(19) United States
(12) Patent Application Publication
(10) Pub. No.: US 2025/0223339 A1
(43) Pub. Date: Jul. 10, 2025

(54) SARS-COV2 ANTIBODIES AND USES THEREOF

(71) Applicant: Invivyd, Inc., Waltham, MA (US)

(72) Inventors: Laura Walker, Waltham, MA (US); Chengzi I. Kaku, Lebanon, NH (US)

(21) Appl. No.: 18/852,870

(22) PCT Filed: Apr. 1, 2023
(86) PCT No.: PCT/US2023/065250

§ 371 Date: Sep. 30, 2024

Related U.S. Application Data
(60) Provisional application No. 63/326,333, filed on Apr. 1, 2022.
(60) Provisional application No. 63/396,003, filed on Aug. 8, 2022.
(60) Provisional application No. 63/408,980, filed on Sep. 22, 2022.
(60) Provisional application No. 63/452,253, filed on Mar. 15, 2023.

(51) Int. Cl. C07K 16/10

(52) U.S. Cl. CPC C07K 16/1003; C07K 2317/33; C07K 2317/76; C07K 2317/92

(57) ABSTRACT

The present disclosure is directed to antibodies and antigen binding fragments thereof having binding specificity for the S protein of coronaviruses (CoV-S), such as the S protein of the SARS coronavirus 2 (SARS-COV-2-S), including neutralizing antibodies. The antibodies and antigen binding fragments thereof comprise the sequences of the VH, VL, and CDR polypeptides described herein, and the polynucleotides encoding them. The disclosure contemplates conjugates of anti-CoV-S antibodies and binding fragments thereof conjugated to one or more functional or detectable moieties. Methods of making said anti-CoV-S antibodies and antigen binding fragments thereof are also contemplated. Other embodiments of the disclosure contemplate using anti-CoV-S antibodies, and binding fragments thereof, for the diagnosis, assessment, and treatment of diseases and disorders associated with coronaviruses or the S protein thereof and conditions where neutralization or inhibition of coronaviruses or the S protein thereof would be therapeutically beneficial.

### RELATED APPLICATIONS

[0001] This application claims the benefit of priority to U.S. Provisional Application 63/326,333, filed Apr. 1, 2022; U.S. Provisional Application No. 63/396,003, filed Aug. 8, 2022; U.S. Provisional Application No. 63/408,980, filed Sep. 22, 2022; and U.S. Provisional Application No. 63/452,253, filed Mar. 15, 2023. The entire contents of each of these applications are incorporated herein by reference.

### SEQUENCE LISTING

[0002] The instant application contains a Sequence Listing which has been submitted electronically in XML file format and is hereby incorporated by reference in its entirety. Said XML copy, created on Mar. 27, 2023, is named 132280-00720_SL.xml and is 7,171,527 bytes in size.

### FIELD

[0003] This disclosure generally pertains to antibodies and antigen-binding fragments thereof, preferably human antibodies and antigen-binding fragments and/or affinity-matured variants thereof, recombinant cells engineered to express such antibodies, and compositions containing such antibodies and antigen-binding fragments thereof, wherein such antibodies and antigen-binding fragments thereof bind to the S protein of coronaviruses (“CoV-S”) and therapeutic and diagnostic uses for the antibodies, antigen-binding fragments, and compositions thereof.

### BACKGROUND

[0004] Coronaviruses (“CoV”) are genetically classified into four major genera: the Alphacoronavirus genus (ACoV genus); the Betacoronavirus genus (BCoV genus); the Gammacoronavirus genus (CCoV genus); and Deltacoronavirus genus (DCoV genus), and while ACoV and BCoV primarily infect mammals CCOV and DCoV predominantly infect birds (Wu A. et al., Cell Host Microbe. 2020 Mar. 11; 27 (3): 325-328). Coronaviruses that infect humans were first identified in the mid-1960s, and currently, seven confirmed CoV species are known as human pathogens. Four CoV species, the HCoV-HKU1 and HCoV-OC43 from the BCoV genus and the HCoV-229E and HCoV-NL63 from the ACoV genus, are endemic species in humans and cause mild respiratory symptoms, mostly in pediatric patients (Brielle E. S., et al., BioRxiv reprint, 2020.03.10). The other three human CoV species, the SARS-COV, the MERS-COV, and the SARS-COV-2 (also known as “2019-nCOV”), all of which are from the BCoV genus, have caused severe outbreaks, including the Severe Acute Respiratory Syndrome (SARS) outbreak in 2002-2003, the Middle East Respiratory Syndrome (MERS) outbreak in 2012-2013, and the current (2019-) pandemic of the coronavirus disease of 2019 (“COVID-19”).

[0005] The genome of coronaviruses, whose size ranges between approximately 26,000 and 32,000 bases, includes a variable number (from 6 to 11) of open reading frames (“ORFs”) (Wu A. et al., Cell Host Microbe. 2020; 27 (3): 325-328). The first ORF encodes 16 non-structural proteins (“nsps”), and the remaining ORFs encode accessory proteins and structural proteins. The four major structural proteins are the spike surface glycoprotein (“'S protein” or “S” or “spike protein”), small envelope protein (“E protein” or “E”), matrix protein (“M protein” or “M”), and nucleocapsid protein (“N protein”, or “N”).

[0006] The S protein, which plays an essential role in binding to receptors on the host cell and determines host tropism (Zhu Z. et al., Infect Genet Evol. 2018; 61:183-184), forms homotrimers protruding from the viral surface (Li F. Annu Rev Virol. 2016 Sep. 29; 3 (1): 237-261. Epub 2016 Aug. 25). The S protein is processed into two non-covalently associated subunits, S1 and S2, and each monomer in the trimeric S assembly is a heterodimer of S1 and S2 subunits. Cryo-EM studies have revealed that the S1 subunit is comprised of four domains: an N-terminal domain (NTD), a C-terminal domain (CTD), and two subdomains (Walls A. C. et al., Nature 531, 114-117 (2016).; Tortorici M. A. and Veesler D., Adv Virus Res. 2019; 105:93-116. doi: 10.1016/bs.aivir.2019.08.002. Epub 2019 Aug. 22.; Wrapp D. et al., Science 367, 1260-1263 (2020)). The CTD functions as the receptor-binding domain (RBD) for both SARS-COV and SARS-COV-2 (Li F. J Virol. 2015 February; 89 (4): 1954-64. doi: 10.1128/JVI.02615-14. Epub 2014 Nov. 26). The S2 subunit contains the fusion peptide, heptad repeat 1 and 2, and a transmembrane domain, all of which are required to mediate fusion of the viral and host cell membranes.

[0007] SARS-COV and SARS-COV-2 bind to and use angiotensin-converting enzyme 2 (ACE2) of a host cell as a receptor to enter the host cells (Ge X. Y. et al., Nature. 2013 Nov. 28; 503 (7477): 535-8; Hoffmann M. et al., Cell. 2020 Mar. 4). The motif within the RBD that particularly binds to RCE2 is often referred to as the “ACE2-binding motif”. SARS-COV can also use CD209L (also known as L-SIGN) as an alternative receptor (Jeffers S. A. et al., Proc Natl Acad Sci USA. 2004 Nov. 2; 101 (44): 15748-53. Epub 2004 Oct. 20). In contrast, MERS-COV binds dipeptidyl peptidase 4 (“DPP4”, also known as CD26) of the host cell via a different RBD of the S protein.

[0008] Cell entry of coronaviruses often depends also on priming of the S protein by host cell proteases. Recently, SARS-COV-2 was found to use the serine protease TMPRSS2 for S protein priming and ACE2 for entry (Wu A. et al., Cell Host Microbe. 2020; 27 (3): 325-328; Hoffmann M. et al., Cell. 2020 Mar. 4).

[0009] The genome of SARS-COV-2 is about 29.8 kb nucleotides and encodes 15 non-structural proteins, four structural proteins (S, E, M, and N) and eight accessory proteins (3a, 3b, p6, 7a, 7b, 8b, 9b, and orf14) (Wu A. et al., Cell Host Microbe. 2020 Mar. 11; 27 (3): 325-328). While SARS-COV-2 is genetically close to a SARS-like bat CoV and also to SARS-COV, a number of sequence differences have been identified. When SARS-COV-2 is compared to SARS-COV or SARS-like bat CoV, 380 amino acid differences or substitutions were found, 27 of which are in the S protein, including 6 substitutions in the RBD at amino acid region 357-528 (but not in the receptor-binding motifs that directly interact with ACE2) and 6 substitutions in the underpinning subdomain (SD) at amino acid region 569-655.

[0010] Multiple variants of SARS-COV-2 have developed since the onset of COVID. Among those, the Omicron variant is a highly divergent variant with a high number of mutations, including 26-32 mutations in the spike protein, some of which are associated with humoral immune escape potential and higher transmissibility. Omicron is a much more rapidly spreading variant that has grown from first report on Nov. 25, 2021 to a record global spike of cases that is already several times the level of Delta. Moreover, Omicron is causing an increase in breakthrough infections among fully vaccinated individuals. As a result, the protection provided by both vaccination and prior infection is much reduced.

[0011] Accordingly, there is an unmed need for development of new treatment, e.g., antibodies, for treating SAR-COV-2, in particular, the Omicron variant.

### SUMMARY

[0012] The present invention is based on the discovery of antibodies with broad activity against all SARS-COV-2 variants of concern (VOCs) described to date. In particular, the disclosed antibodies were isolated from Omicron/BA.1 breakthrough infection donors and were shown to display broad activity against all SARS-COV-2 VOCs, including the Omicron variant BA.1 and its sublineages, e.g., BF.7, BQ.1.1, BA.2.75, and/or XBB.1. These antibodies represent promising candidates for therapeutic development and provide a framework for the development of vaccines that induce broadly neutralizing antibody responses.

[0013] Accordingly, in one aspect, the present disclosure provides an isolated antibody, or antigen-binding fragment thereof, that binds to the spike protein of a corona virus (CoV-S), wherein said antibody, or antigen-binding fragment thereof, comprises a heavy chain variable region (VH) and a light chain variable region (VL), wherein the VH comprises an amino acid sequence having at least 90%, 91%, 92%, 93%, 94%, 95%, 96%, 97%, 98%, or 99% sequence identity to, comprises, or consists of an amino acid sequence selected from the group consisting of any one of the VH sequences in Tables 3 and 5, and wherein the VL comprises an amino acid sequence having at least 90%, 91%, 92%, 93%, 94%, 95%, 96%, 97%, 98%, or 99% sequence identity to, comprises, or consists of an amino acid sequence selected from the group consisting of any one of the VL sequences in Tables 4 and 6. In one embodiment, the VH and VL are from the same antibody in Tables 3-6. In another embodiment, the VH and VL are from a different antibody in Tables 3-6.

[0014] In some embodiments, the VH comprises a VH CDR1 amino acid sequence selected from the group consisting of any VH CDR1 sequence in Tables 3 and 5, a VH CDR2 amino acid sequence selected from the group consisting of any VH CDR2 sequence in Tables 3 and 5, and a VH CDR3 amino acid sequence selected from the group consisting of any VH CDR3 sequence in Tables 3 and 5, and the VL comprises a VL CDR1 amino acid sequence selected from the group consisting of any VL CDR1 sequence in Tables 4 and 6, a VL CDR2 amino acid sequence selected from the group consisting of any VL CDR2 sequence in Tables 4 and 6, and a VL CDR3 amino acid sequence selected from the group consisting of any VL CDR3 sequence in Tables 4 and 6. In one embodiment, the CDRs are from the same antibody in Tables 3-6. In another embodiment, the CDRs are from a different antibody in Tables 3-6.

[0015] In another aspect, the present disclosure provides an isolated antibody, or antigen-binding fragment thereof, that binds to the spike protein of a corona virus (CoV-S), wherein said antibody, or antigen-binding fragment thereof, comprises a heavy chain variable region (VH) and a light chain variable region (VL), wherein the VH comprises a VH CDR1 amino acid sequence selected from the group consisting of any VH CDR1 sequence in Tables 3 and 5, a VH CDR2 amino acid sequence selected from the group consisting of any VH CDR2 sequence in Tables 3 and 5, and a VH CDR3 amino acid sequence selected from the group consisting of any VH CDR3 sequence in Tables 3 and 5, and wherein the VL comprises a VL CDR1 amino acid sequence selected from the group consisting of any VL CDR1 sequence in Tables 4 and 6, a VL CDR2 amino acid sequence selected from the group consisting of any VL CDR2 sequence in Tables 4 and 6, and a VL CDR3 amino acid sequence selected from the group consisting of any VL CDR3 sequence in Tables 4 and 6.

[0016] In some embodiments, the VH comprises an amino acid sequence having at least 90%, 91%, 92%, 93%, 94%, 95%, 96%, 97%, 98%, or 99% sequence identity to, comprises, or consists of an amino acid sequence selected from the group consisting of any one of the VH sequences in Tables 3 and 5, and the VL comprises an amino acid sequence having at least 90%, 91%, 92%, 93%, 94%, 95%, 96%, 97%, 98%, or 99% sequence identity to, comprises, or consists of an amino acid sequence selected from the group consisting of any one of the VL sequences in Tables 4 and 6.

[0017] In some embodiments, the VH comprises the VH amino acid sequence of ADI-75738, and the VL comprises the VL amino acid sequence of ADI-75738. In some embodiments, the VH comprises the VH amino acid sequence of ADI-75700, and the VL comprises the VL amino acid sequence of ADI-75700. In some embodiments, the VH comprises the VH amino acid sequence of ADI-75859, and the VL comprises the VL amino acid sequence of ADI-75859. In some embodiments, the VH comprises the VH amino acid sequence of ADI-75684, and the VL comprises the VL amino acid sequence of ADI-75684. In some embodiments, the VH comprises the VH amino acid sequence of ADI-75754, and the VL comprises the VL amino acid sequence of ADI-75754. In some embodiments, the VH comprises the VH amino acid sequence of ADI-75648, and the VL comprises the VL amino acid sequence of ADI-75648. In some embodiments, the VH comprises the VH amino acid sequence of ADI-75632, and the VL comprises the VL amino acid sequence of ADI-75632. In some embodiments, the VH comprises the VH amino acid sequence of ADI-75741, and the VL comprises the VL amino acid sequence of ADI-75741. In some embodiments, the VH comprises the VH amino acid sequence of ADI-75725, and the VL comprises the VL amino acid sequence of ADI-75725. In some embodiments, the VH comprises the VH amino acid sequence of ADI-75717, and the VL comprises the VL amino acid sequence of ADI-75717. In some embodiments, the VH comprises the VH amino acid sequence of ADI-75706, and the VL comprises the VL amino acid sequence of ADI-75706. In some embodiments, the VH comprises the VH amino acid sequence of ADI-75699, and the VL comprises the VL amino acid sequence of ADI-75699. In some embodiments, the VH comprises the VH amino acid sequence of ADI-75747, and the VL comprises the VL amino acid sequence of ADI-75747. In some embodiments, the VH comprises the VH amino acid sequence of ADI-75773, and the VL comprises the VL amino acid sequence of ADI-75773. In some embodiments, the VH comprises the VH amino acid sequence of ADI-75696, and the VL comprises the VL amino acid sequence of ADI-75696. In some embodiments, the VH comprises the VH amino acid sequence of VYD223 (also known as ADI-75865), and the VL comprises the VL amino acid sequence of VYD223. In some embodiments, the VH comprises the VH amino acid sequence of VYD224 (also known as ADI-80707), and the VL comprises the VL amino acid sequence of VYD224. In some embodiments, the VH comprises the VH amino acid sequence of ADI-75864, and the VL comprises the VL amino acid sequence of ADI-75864. In some embodiments, the VH comprises the VH amino acid sequence of ADI-75620, and the VL comprises the VL amino acid sequence of ADI-75620. In some embodiments, the VH comprises the VH amino acid sequence of VYD225, and the VL comprises the VL amino acid sequence of VYD225.

[0018] In some embodiments, the antibody or antibody-binding fragment thereof comprises the VH CDR1, VH CDR2, VH CDR3, VL CDR1, VL CDR2, and VL CDR3 amino acid sequences of ADI-75738. In some embodiments, the antibody or antibody-binding fragment thereof comprises the VH CDR1, VH CDR2, VH CDR3, VL CDR1, VL CDR2, and VL CDR3 amino acid sequences of ADI-75700. In some embodiments, the antibody or antibody-binding fragment thereof comprises the VH CDR1, VH CDR2, VH CDR3, VL CDR1, VL CDR2, and VL CDR3 amino acid sequences of ADI-75859. In some embodiments, the antibody or antibody-binding fragment thereof comprises the VH CDR1, VH CDR2, VH CDR3, VL CDR1, VL CDR2, and VL CDR3 amino acid sequences of ADI-75684. In some embodiments, the antibody or antibody-binding fragment thereof comprises the VH CDR1, VH CDR2, VH CDR3, VL CDR1, VL CDR2, and VL CDR3 amino acid sequences of ADI-75754. In some embodiments, the antibody or antibody-binding fragment thereof comprises the VH CDR1, VH CDR2, VH CDR3, VL CDR1, VL CDR2, and VL CDR3 amino acid sequences of ADI-75648. In some embodiments, the antibody or antibody-binding fragment thereof comprises the VH CDR1, VH CDR2, VH CDR3, VL CDR1, VL CDR2, and VL CDR3 amino acid sequences of ADI-75632. In some embodiments, the antibody or antibody-binding fragment thereof comprises the VH CDR1, VH CDR2, VH CDR3, VL CDR1, VL CDR2, and VL CDR3 amino acid sequences of ADI-75741. In some embodiments, the antibody or antibody-binding fragment thereof comprises the VH CDR1, VH CDR2, VH CDR3, VL CDR1, VL CDR2, and VL CDR3 amino acid sequences of ADI-75725. In some embodiments, the antibody or antibody-binding fragment thereof comprises the VH CDR1, VH CDR2, VH CDR3, VL CDR1, VL CDR2, and VL CDR3 amino acid sequences of ADI-75717. In some embodiments, the antibody or antibody-binding fragment thereof comprises the VH CDR1, VH CDR2, VH CDR3, VL CDR1, VL CDR2, and VL CDR3 amino acid sequences of ADI-75706. In some embodiments, the antibody or antibody-binding fragment thereof comprises the VH CDR1, VH CDR2, VH CDR3, VL CDR1, VL CDR2, and VL CDR3 amino acid sequences of ADI-75699. In some embodiments, the antibody or antibody-binding fragment thereof comprises the VH CDR1, VH CDR2, VH CDR3, VL CDR1, VL CDR2, and VL CDR3 amino acid sequences of ADI-75747. In some embodiments, the antibody or antibody-binding fragment thereof comprises the VH CDR1, VH CDR2, VH CDR3, VL CDR1, VL CDR2, and VL CDR3 amino acid sequences of ADI-75773. In some embodiments, the antibody or antibody-binding fragment thereof comprises the VH CDR1, VH CDR2, VH CDR3, VL CDR1, VL CDR2, and VL CDR3 amino acid sequences of ADI-75696. In some embodiments, the antibody or antibody-binding fragment thereof comprises the VH CDR1, VH CDR2, VH CDR3, VL CDR1, VL CDR2, and VL CDR3 amino acid sequences of ADI-75864. In some embodiments, the antibody or antibody-binding fragment thereof comprises the VH CDR1, VH CDR2, VH CDR3, VL CDR1, VL CDR2, and VL CDR3 amino acid sequences of ADI-75620. In some embodiments, the antibody or antibody-binding fragment thereof comprises the VH CDR1, VH CDR2, VH CDR3, VL CDR1, VL CDR2, and VL CDR3 amino acid sequences of VYD223. In some embodiments, the antibody or antibody-binding fragment thereof comprises the VH CDR1, VH CDR2, VH CDR3, VL CDR1, VL CDR2, and VL CDR3 amino acid sequences of VYD224. In some embodiments, the antibody or antibody-binding fragment thereof comprises the VH CDR1, VH CDR2, VH CDR3, VL CDR1, VL CDR2, and VL CDR3 amino acid sequences of VYD225.

[0019] In some embodiments, SARS-COV-S comprises a sequence having at least 95% identity to the amino acid sequence of SEQ ID NO:1, and wherein SARS-COV-2-S comprises a sequence having at least 95% identity to the amino acid sequence of SEQ ID NO:5.

[0020] In some embodiments, the isolated antibody, or antigen-binding fragment thereof, cross-reacts with SARS-COV-S and SARS-COV-2-S.

[0021] In certain embodiments, an antibody or antigen-binding fragment thereof is capable of binding to a SARS-COV-2 variant. In some embodiments, the SARS-COV-2-S is a B.1.1.7 variant (alpha), a B. 1.351 variant (beta), a B.1.1.28 variant, a B. 1.429 variant, a P.1 variant, a B.1.617 variant (e.g., B.1.617.1 and B.1.617.2 (delta)), a C.37 variant, a 1.621 variant, a AY.1 variant, a 1.623 variant, a C.36 variant, a A.27 variant, a AV.1 variant, a B.1.1.482 variant, a B.1.1.523 variant, a B.1.427 variant, a AY.4 variant, a AY.11 variant, a D614G variant, or a B.1.1.529/BA.1 variant (also known as the Omicron variant) or its sub-lineages (e.g., BA1.1, BA.2, BA.2.75, BA.4, BA.5, BA.4.6, BQ.1, BQ.1.1, XBB, XBB.1, XBB.1.5, BJ.1, BM.1.1.1, BA.2.3.20, BF.7, XBC, BN.1, or CH.1.1).

[0022] In some embodiments, the antibody, or antigen-binding fragment thereof, cross-reacts with SARS-COV-S and SARS-COV-2-S.

[0023] In some embodiments, the antibody, or antigen-binding fragment thereof, binds to the receptor binding domain (RBD) or the N-terminal domain (NTD) of SARS-COV-S and/or of SARS-CoV-2-S.

[0024] In some embodiments, the antibody, or antigen-binding fragment thereof, binds to the receptor binding domain (RBD) of CoV-S from the B.1.1.529/BA.1 variant, the BA.1.1 variant, the BA.2.75 variant, the BQ.1.1 variant, and/or the XBB variant.

[0025] In some embodiments, the antibody, or antigen-binding fragment thereof, binds to the S1 subunit and/or the S2 subunit of SARS-COV-S and/or of SARS-COV-2-S.

[0026] In some embodiments, the antibody, or antigen-binding fragment thereof, binds to the ACE2-binding motif of SARS-COV-S and/or of SARS-COV-2-S.

[0027] In one embodiment, the antibody, or antigen-binding fragment thereof, competes with ACE2.

[0028] In some embodiments, the antibody, or antigen-binding fragment thereof, (a) binds to the S protein of SARS-COV and/or of SARS-COV-2; and (b) does not bind to any of the S proteins of HCoV-229E, HCoV-HKU1, HCoV-NL63, and HCoV-OC43.

[0029] In some embodiments, the antibody, or antigen-binding fragment thereof, (a) binds to the S protein of SARS-COV and/or of SARS-COV-2; and (b) binds to the S protein of at least one of HCoV-229E, HCoV-HKU1, HCoV-NL63, and HCoV-OC43.

[0030] In one embodiment, the antibody, or antigen-binding fragment thereof, binds to CoV-S with a KD value of: (i) about 100 nM or lower; (ii) about 10 nM or lower; (iii) about 1 nM or lower; (iv) about 100 pM or lower; (v) about 10 pM or lower; (vi) about 1 pM or lower; or (vii) about 0.1 pM or lower.

[0031] In some embodiments, the antibody, or antigen-binding fragment thereof, binds to the receptor binding domain (RBD) of CoV-S from the B.1.1.529/BA.1 variant, the BA.1.1 variant, the BA.2.75 variant, the BQ.1.1 variant, the XBB variant(s), the B.1351 variant, or the B.1.617.2 variant with a KD value of about 100 nM or lower, or about 10 nM or lower, or about 1 nM or lower.

[0032] In some embodiments, the dissociation constant (KD) is measured using an assay selected from the group consisting of surface plasmon resonance, ELISAs, radioimmunoassays, Western blotting, and bio-layer interferometry (BLI).

[0033] In some embodiments, the antibody, or antigen-binding fragment thereof, neutralizes SARS-CoV and/or SARS-COV-2. In some embodiments, the neutralization activity is measured using a VSV-based pseudovirus system. In some embodiments, the neutralization activity is measured using a murine leukemia virus (MLV)-based pseudovirus system. In some embodiments, the neutralization activity is measured using a PhenoSense SARS-COV-2 pseudovirus neutralizing assay.

[0034] In some embodiments, the antibody, or antigen-binding fragment thereof, neutralizes SARS-CoV and/or SARS-COV-2 at: (i) an IC50 of about 100 nM or lower, of about 50 nM or lower, of about 20 nM or lower, of about 10 nM or lower, of about 5 nM or lower, of about 2 nM or lower, of about 1 nM or lower, of about 500 pM or lower, of about 200 pM or lower, of about 100 pM or lower, of about 50 pM or lower, of about 20 pM or lower, of about 10 pM or lower, of about 5 pM or lower, of about 2 pM or lower, or of about 1 pM or lower; and/or (ii) an IC50 of about 1 μg/mL or lower, of about 500 ng/ml or lower, of about 200 ng/ml or lower, of about 100 ng/ml or lower, of about 50 ng/ml or lower, of about 20 ng/mL or lower, of about 10 ng/ml or lower, of about 20 ng/ml or lower, of about 10 mg/mL or lower, of about 5 ng/ml or lower, of about 2 ng/ml or lower, or of about 1 ng/ml or lower, in vitro. In some embodiments, the antibody, or antigen-binding fragment thereof, cross-neutralize VSV-SARS-COV-1 and VSV-SARS-COV-2 with a neutralization IC50 less than about 1 μg/mL. In some embodiments, the neutralization activity is measured using a VSV-based pseudovirus system. In some embodiments, the neutralization activity is measured using a murine leukemia virus (MLV)-based pseudovirus system. In some embodiments, the neutralization activity is measured using a PhenoSense SARS-COV-2 pseudovirus neutralizing assay.

[0035] In some embodiments, the antibody, or antigen-binding fragment thereof, neutralizes the B.1.1.529/BA.1 variant of SARS-COV-2 with an IC50 of about 100 ng/mL or lower, of about 50 ng/ml or lower, of about 40 ng/ml or lower, of about 30 ng/ml or lower, of about 20 ng/mL or lower, of about 10 mg/mL or lower, of about 5 ng/ml or lower, of about 2 ng/ml or lower, or of about 1 ng/ml or lower, in vitro. In some embodiments, the antibody, or antigen-binding fragment thereof, neutralizes the B.1.1.529/BA.1 variant of SARS-COV-2 with an IC50 of about 60 ng/ml or lower.

[0036] In some embodiments, the antibody, or antigen-binding fragment thereof, neutralizes the BA.2.75 variant, the BF.7 variant, the BQ.1.1 variant, the XBB.1 variant and/or the XBB.1.5 variant of SARS-COV-2 with an IC50 of about 200 ng/ml or lower, of about 100 ng/mL or lower, of about 50 ng/ml or lower, of about 40 ng/ml or lower, of about 30 ng/mL or lower, of about 20 ng/ml or lower, of about 10 mg/mL or lower, of about 5 ng/ml or lower, of about 2 ng/ml or lower, or of about 1 ng/ml or lower, in vitro.

[0037] In some embodiments, the antibody, or antigen-binding fragment thereof, neutralizes the BA.2.75 variant of SARS-COV-2 with an IC50 of about 40 ng/ml or lower.

[0038] In some embodiments, the antibody, or antigen-binding fragment thereof, neutralizes the BF.7 variant of SARS-COV-2 with an IC50 of about 30 ng/ml or lower.

[0039] In some embodiments, the antibody, or antigen-binding fragment thereof, neutralizes the BQ.1.1 variant of SARS-COV-2 with an IC50 of about 50 ng/mL or lower.

[0040] In some embodiments, the antibody, or antigen-binding fragment thereof, neutralizes the XBB.1 variant of SARS-COV-2 with an IC50 of about 200 ng/ml or lower.

[0041] In some embodiments, the antibody, or antigen-binding fragment thereof, neutralizes the D614G variant of SARS-COV-2 with an IC50 of about 100 ng/ml or lower, of about 50 ng/ml or lower, of about 40 ng/mL or lower, of about 30 ng/mL or lower, of about 20 ng/ml or lower, of about 10 mg/mL or lower, of about 5 ng/mL or lower, of about 2 ng/ml or lower, or of about 1 ng/ml or lower, in vitro. In some embodiments, the antibody, or antigen-binding fragment thereof, neutralizes the D614G variant of SARS-COV-2 with an IC50 of about 20 ng/ml or lower,

[0042] In some embodiments, the antibody, or antigen-binding fragment thereof, is a human, humanized, primatized or chimeric antibody, or antigen-binding fragment thereof.

[0043] In some embodiments, the antibody, or antigen-binding fragment thereof, is bispecific or multispecific. In some embodiments, the bispecific or multispecific antibody, or antigen-binding fragment thereof, comprises at least one first antigen-binding domain (“ABD”) and at least one second ABD, wherein: (i) said first ABD comprises the VH CDR1, the VH CDR2, the VH CDR3, the VL CDR1, the VL CDR2, and the VL CDR3 of a first antibody selected from Tables 3-6; and (ii) said second ABD comprises the VH CDR1, the VH CDR2, the VH CDR3, the VL CDR1, the VL CDR2, and the VL CDR3 of a second antibody selected from Tables 3-6, wherein the first anti-CoV-S antibody is same as the second anti-CoV-S antibody, or wherein the first anti-CoV-S antibody is different from the second anti-CoV-S antibody.

[0044] In some embodiments, the first anti-CoV-S antibody binds to a first CoV-S, and the second anti-CoV-S antibody binds to a second CoV-S.

[0045] In some embodiments, the first anti-CoV-S antibody and the second anti-CoV-S antibody bind to: (i) the same coronavirus species, optionally wherein the first CoV-S and the second CoV-S are (a) both of SARS-COV or (b) both of SARS-COV-2, and optionally wherein the first anti-CoV-S antibody and the second anti-CoV-S antibody bind to the same or different epitopes on a CoV-S expressed by said SARS-COV or SARS-COV-2; or (ii) different coronavirus species, optionally wherein the first CoV-S and the second CoV-S are of (a) of SARS-COV and of SARS-COV-2, respectively, or (b) of SARS-COV-2 and of SARS-COV, respectively.

[0046] In some embodiments, the bispecific or multispecific antibody, or antigen-binding fragment thereof, comprises at least one first antigen-binding domain (“ABD”) and at least one second ABD, wherein: wherein: (a) said first ABD comprises the VH CDR1, the VH CDR2, the VH CDR3, the VL CDR1, the VL CDR2, and the VL CDR3 of a first anti-CoV-S antibody selected from Tables 3-6; and (b) said second ABD binds to an antigen which is not a CoV-S, optionally wherein said antigen is a cytokine, a cytokine receptor, or an immunomodulatory polypeptide.

[0047] In some embodiments, the antibody, or antigen-binding fragment thereof, comprises a Fab, Fab2, or scFv. In some embodiments, the antibody, or antigen-binding fragment thereof, comprises a constant region, an Fc region, or at least one domain thereof.

[0048] In some embodiments, the constant region or Fc region comprises a mutation which impairs at least one effector function, optionally FcR binding, complement binding, glycosylation, complement-dependent cytotoxicity (“CDC”), or antibody-dependent cellular cytotoxicity (“ADCC”).

[0049] In some embodiments, the constant or Fc region is human. In some embodiments, the human constant or Fc region is selected from a human IgG1, IgG2, IgG3 or IgG4 constant or Fc region.

[0050] In one embodiment, the antibody, or antigen-binding fragment thereof, is a neutralizing antibody. In one embodiment, the antibody, or antigen-binding fragment thereof, is an affinity optimized antibody, or antigen-binding fragment thereof.

[0051] In one aspect, the present disclosure provides an isolated antibody, or antigen-binding fragment thereof, which competes for binding with the isolated antibody, or antigen-binding fragment thereof, as described herein.

[0052] In some embodiments, binding competition is measured using an assay selected from the group consisting of surface plasmon resonance, ELISAs, radioimmunoassays, Western blotting, and bio-layer interferometry (BLI).

[0053] In one aspect, the present disclosure provides an isolated antibody, or antigen-binding fragment thereof, which binds the same epitope as the isolated antibody, or antigen-binding fragment thereof, as described herein.

[0054] In some embodiments, epitope mapping is determined using an assay selected from the group consisting of surface plasmon resonance, ELISAs, radioimmunoassays, Western blotting, and bio-layer interferometry (BLI).

[0055] In another aspect, the present disclosure provides an affinity matured variant of any one of the isolated antibodies, or antigen-binding fragments thereof, as described herein.

[0056] In one aspect, the present disclosure provides a nucleic acid molecule, e.g., a DNA or an mRNA molecule, encoding an antibody or antigen binding fragment thereof, as disclosed herein.

[0057] In one aspect, the present disclosure provides a chimeric antigen receptor (“CAR”) comprising at least one antibody, or antigen-binding fragment thereof, as described herein.

[0058] In one aspect, the present disclosure provides an antibody drug conjugate (“ADC”) comprising: (a) at least one antibody, or antigen-binding fragment thereof, as described herein; and (b) a drug.

[0059] In some embodiments, the drug is: (i) an antiviral drug, optionally, remdesivir, favipiravir, darunavir, nelfinavir, saquinavir, lopinavir or ritonavir; (ii) an antihelminth drug, optionally ivermectin; (iii) an antiparasite drug, optionally hydroxychloroquine, chloroquine, or atovaquone; (iv) antibacterial vaccine, optionally the tuberculosis vaccine BCG; or (v) an anti-inflammatory drug, optionally a steroid such as ciclesonide, a TNF inhibitor (e.g., adalimumab), a TNF receptor inhibitor (e.g., etanercept), an IL-6 inhibitor (e.g., clazakizumab), an IL-6 receptor inhibitor (e.g., toclizumab), or metamizole; (vi) an antihistamine drug, optionally bepotastine; (vii) an ACE inhibitor, optionally moexipril; (viii) a drug that inhibits priming of CoV-S, optionally a serine protease inhibitor, further optionally nafamostat; or (ix) a cytotoxic drug, optionally daunorubicin, mitoxantrone, doxorubicin, cucurbitacin, chaetocin, chaetoglobosin, chlamydocin, calicheamicin, nemorubicin, cryptophyscin, mensacarcin, ansamitocin, mitomycin C, geldanamycin, mechercharmycin, rebeccamycin, safracin, okilactomycin, oligomycin, actinomycin, sandramycin, hypothemycin, polyketomycin, hydroxyellipticine, thiocolchicine, methotrexate, triptolide, taltobulin, lactacystin, dolastatin, auristatin, monomethyl auristatin E (MMAE), monomethyl auristatin F (MMAF), telomestatin, tubastatin A, combretastatin, maytansinoid, MMAD, MMAF, DM1, DM4, DTT, 16-GMB-APA-GA, 17-DMAP-GA, JW 55, pyrrolobenzodiazepine, SN-38, Ro 5-3335, puwainaphycin, duocarmycin, bafilomycin, taxoid, tubulysin, ferulenol, lusiol A, fumagillin, hygrolidin, glucopiericidin, amanitin, ansatrienin, cinerubin, phallacidin, phalloidin, phytosphongosine, piericidin, poronetin, phodophyllotoxin, gramicidin A, sanguinarine, sinefungin, herboxidiene, microcolin B, microcystin, muscotoxin A, tolytoxin, tripolin A, myoseverin, mytoxin B, nocuolin A, psuedolaric acid B, pseurotin A, cyclopamine, curvulin, colchicine, aphidicolin, englerin, cordycepin, apoptolidin, epothilone A, limaquinone, isatropolone, isofistularin, quinaldopeptin, ixabepilone, aeroplysinin, arruginosin, agrochelin, or epothilone.

[0060] In one aspect, the present disclosure provides a composition comprising at least one antibody, or antigen-binding fragment thereof, a CAR or an ADC as described herein. In one embodiment, the composition further comprises an additional anti-SARS-COV-S antibody, or antigen-binding fragment thereof.

[0061] In one aspect, the present disclosure provides a pharmaceutical composition comprising at least one antibody, or antigen-binding fragment thereof, a CAR or an ADC as described herein; and a pharmaceutically acceptable carrier or excipient. In one embodiment, the pharmaceutical composition further comprises an additional anti-SARS-COV-S antibody, or antigen-binding fragment thereof.

[0062] In one aspect, the present disclosure provides a method of treating infection by SARS-COV, SARS-COV-2, and/or another coronavirus optionally selected from the group consisting of MERS-CoV, HCoV-HKU1, HCoV-OC43, HCoV-229E, and HCoV-NL63, or treating a condition, symptom, disease, or disorder associated with said infection in a subject in need thereof, comprising administering to the subject a therapeutically effective amount of an antibody, or antigen-binding fragment thereof, a CAR or an ADC as described herein.

[0063] In some embodiments, the condition, symptom, disease, or disorder comprises at least one of bronchitis, pneumonia, respiratory failure, acute respiratory failure, organ failure, multi-organ system failure, pediatric inflammatory multisystem syndrome, acute respiratory distress syndrome, blood clot, a cardiac condition, myocardial injury, myocarditis, heart failure, cardiac arrest, acute myocardial infarction, dysrhythmia, venous thromboembolism, post-intensive care syndrome, shock, anaphylactic shock, cytokine release syndrome, septic shock, disseminated intravascular coagulation, ischemic stroke, intracerebral hemorrhage, microangiopathic thrombosis, psychosis, seizure, nonconvulsive status epilepticus, traumatic brain injury, stroke, anoxic brain injury, encephalitis, posterior reversible leukoencephalopathy, necrotizing encephalopathy, post-infectious encephalitis, autoimmune mediated encephalitis, acute disseminated encephalomyelitis, acute kidney injury, acute liver injury, pancreatic injury, immune thrombocytopenia, subacute thyroiditis, a gastrointestinal complication, aspergillosis, increased susceptibility to infection with another virus or bacteria, and/or a pregnancy-related complication.

[0064] In one aspect, the present disclosure provides a method of preventing infection by SARS-CoV, SARS-COV-2, and/or another coronavirus optionally selected from the group consisting of MERS-COV, HCoV-HKU1, HCoV-OC43, HCoV-229E, and HCoV-NL63 in a subject in need thereof, comprising administering to the subject a prophylactically effective amount of an antibody, or antigen-binding fragment thereof, a CAR or an ADC as described herein.

[0065] In one aspect, the present disclosure provides a method of inducing an immune response against SARS-COV, SARS-COV-2, and/or another coronavirus optionally selected from the group consisting of MERS-COV, HCoV-HKU1, HCoV-OC43, HCoV-229E, and HCoV-NL63 in a subject in need thereof, comprising administering at least one antibody, or antigen-binding fragment thereof, a CAR or an ADC as described herein.

[0066] In some embodiments, the immune response elicits immunoprotection against SARS-COV, SARS-COV-2 and/or another coronavirus.

[0067] In one aspect, the present disclosure provides a method of inhibiting or blocking infection of susceptible cells by SARS-COV, SARS-COV-2, and/or another coronavirus optionally selected from the group consisting of MERS-COV, HCoV-HKU1, HCoV-OC43, HCoV-229E, and HCoV-NL63 in a subject in need thereof, comprising administering at least one antibody, or antigen-binding fragment thereof, a CAR or an ADC as described herein.

[0068] In one aspect, provided herein is a method of preventing the need for a subject infected with SARS-COV, SARS-COV-2, and/or another coronavirus optionally selected from the group consisting of MERS-COV, HCoV-HKU1, HCoV-OC43, HCoV-229E, and HCoV-NL63 to be placed on a ventilator, or reducing the time that a subject infected with SARS-COV or SARS-COV-2 or another coronavirus optionally selected from the group consisting of MERS-COV, HCoV-HKU1, HCoV-OC43, HCoV-229E, and HCoV-NL63 is on a ventilator, comprising administering to the subject a prophylactically or therapeutically effective amount of an antibody, or antigen-binding fragment thereof, a CAR or an ADC as described herein.

[0069] In one aspect, provided herein is a method of preventing the onset of pneumonia in a subject infected SARS-COV, SARS-COV-2, and/or another coronavirus optionally selected from the group consisting of MERS-COV, HCoV-HKU1, HCoV-OC43, HCoV-229E, and HCoV-NL63, or treating pneumonia and/or the symptoms of pneumonia in a subject for a subject infected SARS-COV or SARS-COV-2 or another coronavirus optionally selected from the group consisting of MERS-COV, HCoV-HKU1, HCoV-OC43, HCoV-229E, and HCoV-NL63, comprising administering to the subject a prophylactically or therapeutically effective amount of an antibody, or antigen-binding fragment thereof, a CAR or an ADC as described herein.

[0070] In some embodiments, the subject is a human subject.

[0071] In some embodiments, the subject is immunocompromised. In some embodiments, the subject is at risk of exposure to SARS-COV, SARS-COV-2, and/or another coronavirus. In some embodiments, the subject has at least one risk factor which renders them more prone to a poor clinical outcome. In some embodiments, the at least one risk factor is one or more of (i) an old age such as over 55, 60 or 65 years old, (ii) diabetes, (iii) a chronic respiratory condition such as asthma, cystic fibrosis, another fibrotic condition, and COPD, (iv) obesity, (iv) hypertension, (v) a cardiac or cardiovascular condition, such as heart defects or abnormalities, (vi) a chronic inflammatory or autoimmune condition such as lupus and multiple sclerosis, and (vii) an immunocompromised status which may be caused by cancer, undergoing chemotherapy, smoking, bone marrow or organ transplantation, immune deficiencies, poorly controlled HIV infection or AIDS, or prolonged use of corticosteroids or other immunosuppressive medications.

[0072] In some embodiments, the antibody, or antigen-binding fragment thereof, is administered in combination with an additional at least one anti-CoV-S antibody or antigen-binding fragment. In one embodiment, the administration is at the same time. In one embodiment, the administration is sequential. In some embodiments, the additional anti-CoV-S antibody or antigen-binding fragment is adintrevimab.

[0073] In some embodiments, the antibody, or antigen-binding fragment thereof, is administered as a single dose.

[0074] In some embodiments, the antibody, or antigen-binding fragment thereof, is administered intravenously. In one embodiment, the antibody, or antigen-binding fragment thereof, is administered via an intravenous (IV) push. In another embodiment, the antibody, or antigen-binding fragment thereof, is administered via an IV bolus. In another embodiment, the antibody, or antigen-binding fragment thereof, is administered via IV infusion. In other embodiments, the antibody, or antigen-binding fragment thereof, is administered intramuscularly.

[0075] In some embodiments, the antibody, or antigen-binding fragment thereof, is administered at a dose of about 100 mg to 5000 mg, about 100 mg to 4500 mg, about 100 mg to 4000 mg, about 100 mg to about 3500 mg, about 100 mg to about 3000 mg, about 100 mg to about 2500 mg, about 100 mg to about 2000 mg, about 200 mg to about 1500 mg, about 300 mg to about 600 mg, about 500 mg to about 1200 mg, about 300 mg to about 1200 mg, about 500 to about 1000 mg, about 1000 mg to about 1500 mg, about 1500 mg to about 2000 mg, about 2000 mg to about 2500 mg, about 2500 mg to about 3000 mg, about 3000 mg to about 3500 mg, about 3500 mg to about 4000 mg, about 4000 to about 4500 mg, or about 4500 mg to about 5000 mg. In some embodiments, the antibody, or antigen-binding fragment thereof, is administered at a dose of about 200 mg, about 300 mg, about 400 mg, about 500 mg, about 600 mg, about 700 mg, about 800 mg, about 900 mg, about 1000 mg about 1100 mg, about 1200 mg, about 1300 mg, about 1400 mg, about 1500 mg, about 1600 mg, about 1700 mg, about 1800 mg, about 1900 mg, about 2000 mg, about 2100 mg, about 2200 mg, about 2300 mg, about 2400 mg, about 2500 mg, about 2600 mg, about 2700 mg, about 2800 mg, about 2900 mg, about 3000 mg, about 3100 mg, about 3200 mg, about 3300 mg, about 3400 mg, about 3500 mg, about 3600 mg, about 3700 mg, about 3800 mg, about 3900 mg, about 4000 mg, about 4100 mg, about 4200 mg, about 4300 mg, about 4400 mg, about 4500 mg, about 4600 mg, about 4700 mg, about 4800 mg, about 4900 mg, or about 5000 mg.

[0076] In one embodiment, the antibody, or antigen-binding fragment thereof, is administered once. In one embodiment, the antibody, or antigen-binding fragment thereof, is administered twice. In one embodiment, the antibody, or antigen-binding fragment thereof, is administered weekly. In another embodiment, the antibody, or antigen-binding fragment thereof, is administered daily, weekly, every two weeks, monthly, or every two months. In one embodiment, the antibody, or antigen-binding fragment thereof, is administered weekly for about four weeks, once weekly for about a month, weekly for about 5 weeks, weekly for about 6 weeks, weekly for about 7 weeks, or weekly for about two months, or weekly for about three months.

[0077] In one embodiment, the antibody, or antigen-binding fragment thereof, is administered monthly for about one month, monthly for about two months, monthly for about three months, or monthly for about four months. In one embodiment, the antibody, or antigen-binding fragment thereof, is administered once, or multiple times, e.g., twice, three times, four times, or five times, for the first one month, the first two months, the first three months, the first four months, or the first five months.

[0078] In one embodiment, the antibody, or antigen-binding fragment thereof, is administered to a recipient subject with a frequency of once every twenty-six weeks or less, such as once every sixteen weeks or less, once every eight weeks or less, once every four weeks or less, once every two weeks or less, once every week or less, or once daily or less.

[0079] The antibody, or antigen-binding fragment thereof, may be administered every year or less, every 6 moths or less, every three months or less, every one month or less, every two weeks or less, every week or less, once daily or less, multiple times per day, and/or every few hours. In one embodiment, the administration is given every month, every 2 months, every 3 months, every 4 months, every 5 months, every 6 months, every 7 months, every eight months, every 9 months, every 10 months, every 11 months, or once a year.

[0080] In some embodiments, the antibody, or antigen-binding fragment thereof, is administered in combination with one or more additional anti-CoV-S-antibodies.

[0081] In one aspect, the present disclosure provides a method of producing the antibody, or antigen-binding portion thereof, as described herein, the method comprising expressing the antibody, or antigen-binding portion thereof, in a recombinant cell, and isolating the antibody, or antigen-binding portion thereof, from the cell. In some embodiments, the method further comprises formulating the antibody, or antigen-binding portion thereof, isolated from the cell into a pharmaceutical composition.

[0082] In another aspect, the present disclosure provides a library of antibodies comprising at least 2, 3, 4, 5, 6, 7, 8, 9, 10 or more isolated antibodies, or antigen-binding fragments thereof, that bind to the spike protein of a corona virus (CoV-S), wherein said antibodies, or antigen-binding fragments thereof, each comprise a heavy chain variable region (VH) and a light chain variable region (VL), wherein each VH consists of an amino acid sequence selected from the group consisting of any one of the VH sequences in Tables 3 and 5, and wherein each VL consists of an amino acid sequence selected from the group consisting of any one of the VL sequences in Tables 4 and 6.

[0083] In one aspect, the present disclosure provides a composition comprising two or more isolated antibodies, or antigen-binding fragment thereof, wherein said antibodies, or antigen-binding fragments thereof, each comprise a heavy chain variable region (VH) and a light chain variable region (VL), wherein each VH consists of an amino acid sequence selected from the group consisting of any one of the VH sequences in Tables 3 and 5, and wherein each VL consists of an amino acid sequence selected from the group consisting of any one of the VL sequences in Tables 4 and 6.

[0084] In another aspect, the present disclosure provides a composition comprising two or more isolated antibodies, or antigen-binding fragments thereof, selected from the group consisting of VYD223, VYD224, and VYD225.

[0085] In some embodiments, the composition comprises VYD224 and VYD225.

[0086] In one aspect, the present disclosure provides a pharmaceutical composition comprising a composition described herein, and a pharmaceutically acceptable carrier or excipient.

[0087] In another aspect, the present disclosure provides a method of treating infection by SARS-CoV, SARS-COV-2, and/or another coronavirus optionally selected from the group consisting of MERS-COV, HCoV-HKU1, HCoV-OC43, HCoV-229E, and HCoV-NL63, or treating a condition, symptom, disease, or disorder associated with said infection in a subject in need thereof, comprising administering to the subject a therapeutically effective amount of the composition or the pharmaceutical composition described herein.

[0088] In some embodiments, the condition, symptom, disease, or disorder comprises at least one of bronchitis, pneumonia, respiratory failure, acute respiratory failure, organ failure, multi-organ system failure, pediatric inflammatory multisystem syndrome, acute respiratory distress syndrome, blood clot, a cardiac condition, myocardial injury, myocarditis, heart failure, cardiac arrest, acute myocardial infarction, dysrhythmia, venous thromboembolism, post-intensive care syndrome, shock, anaphylactic shock, cytokine release syndrome, septic shock, disseminated intravascular coagulation, ischemic stroke, intracerebral hemorrhage, microangiopathic thrombosis, psychosis, seizure, nonconvulsive status epilepticus, traumatic brain injury, stroke, anoxic brain injury, encephalitis, posterior reversible leukoencephalopathy, necrotizing encephalopathy, post-infectious encephalitis, autoimmune mediated encephalitis, acute disseminated encephalomyelitis, acute kidney injury, acute liver injury, pancreatic injury, immune thrombocytopenia, subacute thyroiditis, a gastrointestinal complication, aspergillosis, increased susceptibility to infection with another virus or bacteria, and/or a pregnancy-related complication.

[0089] In one aspect, the present disclosure provides a method of preventing infection by SARS-CoV, SARS-COV-2, and/or another coronavirus optionally selected from the group consisting of MERS-COV, HCoV-HKU1, HCoV-OC43, HCoV-229E, and HCoV-NL63 in a subject in need thereof, comprising administering to the subject a prophylactically effective amount of the composition or the pharmaceutical composition as described herein.

[0090] In one aspect, the present disclosure provides a method of inducing an immune response against SARS-COV, SARS-COV-2, and/or another coronavirus optionally selected from the group consisting of MERS-COV, HCoV-HKU1, HCoV-OC43, HCoV-229E, and HCoV-NL63 in a subject in need thereof, comprising administering the composition or the pharmaceutical composition of the present disclosure as described herein.

[0091] In some embodiments, the immune response elicits immunoprotection against SARS-COV, SARS-COV-2 and/or another coronavirus.

[0092] In another aspect, the present disclosure provides a method of inhibiting or blocking infection of susceptible cells by SARS-COV, SARS-COV-2, and/or another coronavirus optionally selected from the group consisting of MERS-COV, HCoV-HKU1, HCoV-OC43, HCoV-229E, and HCoV-NL63 in a subject in need thereof, comprising administering the composition or the pharmaceutical composition of the present disclosure as described herein.

[0093] In one aspect, the present disclosure provides a method of preventing the need for a subject infected with SARS-COV, SARS-COV-2, and/or another coronavirus optionally selected from the group consisting of MERS-COV, HCoV-HKU1, HCoV-OC43, HCoV-229E, and HCoV-NL63 to be placed on a ventilator, or reducing the time that a subject infected with SARS-COV or SARS-COV-2 or another coronavirus optionally selected from the group consisting of MERS-COV, HCoV-HKU1, HCoV-OC43, HCoV-229E, and HCoV-NL63 is on a ventilator, comprising administering to the subject a prophylactically or therapeutically effective amount of the composition or the pharmaceutical composition of the present disclosure as described herein.

[0094] In another aspect, the present disclosure provides a method of preventing the onset of pneumonia in a subject infected SARS-COV, SARS-COV-2, and/or another coronavirus optionally selected from the group consisting of MERS-COV, HCoV-HKU1, HCoV-OC43, HCoV-229E, and HCoV-NL63, or treating pneumonia and/or the symptoms of pneumonia in a subject for a subject infected SARS-COV or SARS-COV-2 or another coronavirus optionally selected from the group consisting of MERS-COV, HCoV-HKU1, HCoV-OC43, HCoV-229E, and HCoV-NL63, comprising administering to the subject a prophylactically or therapeutically effective amount of the composition or the pharmaceutical composition of the present disclosure as described herein.

[0095] In some embodiments, the subject is a human subject.

[0096] In some embodiments, the subject is immunocompromised.

[0097] In some embodiments, the subject is at risk of exposure to SARS-COV, SARS-COV-2, and/or another coronavirus.

[0098] In some embodiments, the subject has at least one risk factor which renders them more prone to a poor clinical outcome.

[0099] In some embodiments, the at least one risk factor is one or more of (i) an old age such as over 55, 60 or 65 years old, (ii) diabetes, (iii) a chronic respiratory condition such as asthma, cystic fibrosis, another fibrotic condition, and COPD, (iv) obesity, (iv) hypertension, (v) a cardiac or cardiovascular condition, such as heart defects or abnormalities, (vi) a chronic inflammatory or autoimmune condition such as lupus and multiple sclerosis, and (vii) an immunocompromised status which may be caused by cancer, undergoing chemotherapy, smoking, bone marrow or organ transplantation, immune deficiencies, poorly controlled HIV infection or AIDS, or prolonged use of corticosteroids or other immunosuppressive medications.

[0100] In some embodiments, the composition is administered intravenously or intramuscularly. In one embodiment, the composition is administered via an IV push. In another embodiment, the composition, is administered via an IV bolus.

[0101] In some embodiments, the composition is administered at a dose of about 100 mg to about 5000 mg, about 100 mg to 4500 mg, about 100 mg to 4000 mg, about 100 mg to about 3500 mg, about 100 mg to about 3000 mg, about 100 mg to about 2500 mg, about 100 mg to about 2000 mg, about 200 mg to about 1500 mg, about 300 mg to about 600 mg, about 500 mg to about 1200 mg, about 300 mg to about 1200 mg, about 500 to about 1000 mg, about 1000 mg to about 1500 mg, about 1500 mg to about 2000 mg, about 2000 mg to about 2500 mg, about 2500 mg to about 3000 mg, about 3000 mg to about 3500 mg, about 3500 mg to about 4000 mg, about 4000 to about 4500 mg, or about 4500 mg to about 5000 mg.

[0102] In some embodiments, the composition is administered at a dose of about 300 mg, about 500 mg, about 600 mg, about 1000 mg, about 1200 mg, about 1500 mg, about 2000 mg, about 2500 mg, about 300 mg, about 3500 mg, about 4000 mg, about 4500 mg, or about 5000 mg.

[0103] In some embodiments, the composition is administered once, or is administered weekly, monthly, every two months, every three months, or every six months.

[0104] In some embodiments, administering the composition results in about 30%, about 40%, about 50%, about 60%, or about 70% relative risk reduction, e.g., for at least 2 months, at least 4 months, at least 6 months, at least 8 months, at least 10 months, or at least 12 months.

[0105] In another aspect, the present invention provides an isolated nucleic acid molecule, e.g., a DNA or an mRNA molecule, encoding the antibody, or antigen-binding fragment thereof, of the present invention, as described herein.

[0106] In yet another aspect, the present invention provides an isolated mRNA molecule encoding the antibody, or antigen-binding fragment thereof, of the invention, as described herein.

[0107] In one aspect, the present invention provides a composition comprising the isolated nucleic acid molecule, or the isolated mRNA molecule of the invention, as described herein.

[0108] In another aspect, the present invention provides a kit comprising the antibody, or antigen-binding fragment thereof, the isolated nucleic acid molecule, or the isolated mRNA molecule, of the invention, as described herein, and instructions for use.

[0109] In yet another aspect, the present invention provides a vial comprising the antibody, or antigen-binding fragment thereof, the isolated nucleic acid molecule, or the isolated mRNA molecule, of the invention, as described herein.

[0110] In some embodiments, the vial is about 1 mL, about 2 mL, about 4 ml, about 8 mL, about 12 mL, about 16 mL, about 20 ml, or about 24 mL in volume.

[0111] In some embodiments, each vial comprises about 100 mg, about 200 mg, about 300 mg, about 500 mg, about 600 mg, about 700 mg, about 800 mg, about 900 mg, about 1000 mg, about 1500 mg, about 2000 mg, or about 2500 mg of the antibody or antigen-binding fragment thereof.

### BRIEF DESCRIPTION OF THE DRAWINGS

[0112] The patent or application file contains at least one drawing executed in color. Copies of this patent or patent application publication with color drawing(s) will be provided by the Office upon request and payment of the necessary fee.

[0113] FIGS. 1A-1G depict the serum binding and neutralizing activity following BA.1 breakthrough infection. FIG. 1A: Vaccination, infection, and blood draw timelines. FIGS. 1B-1C: Serum IgG (FIG. 1B) and (FIG. 1C) IgA reactivity with recombinant WT and BA.1 Hexapro-stabilized S proteins (left) and RBDs (right) following BA.1 breakthrough infection. Serum samples from uninfected/vaccinated donors at one month (1M) or six months (6M) following primary vaccination (2× mRNA) or one month following booster mRNA vaccination (3× mRNA) are shown for comparison. The fold change in median EC₅₀ against BA.1 relative to D614G is shown above each paired set of measurements. Black bars represent median binding EC₅₀ titers. Dotted lines represent the lower limit of detection. FIGS. 1D-G: Serum neutralizing activity against SARS-COV-2 D614G, Beta, Delta, and BA.1 and SARS-COV (FIG. 1D) one month after primary mRNA vaccination (n=12), (FIG. 1E) six months after primary mRNA vaccination (n=10), (FIG. 1F) one month after booster mRNA vaccination (n=11), and (FIG. 1G) 14 to 27 days after BA.1 breakthrough infection (n=7), as measured using a murine leukemia virus (MLV)-based pseudovirus neutralization assay. Plotted values represent serum neutralizing IC₅₀ titers and values shown above the data points indicate the median IC₅₀ titer. The fold change in IC₅₀ titer for each virus relative to D614G is shown in parentheses. Donors infected after primary mRNA vaccination are shown as circles and those infected after booster mRNA vaccination are shown as triangles. Statistical comparisons were determined by (FIGS. 1B-C) two-sided Kruskal-Wallis test with Dunn's multiple comparisons or (FIG. 1D) Friedman's test with multiple comparisons. 1M, one month; 6M, six months; EC₅₀, 50% effective concentration; IC₅₀, 50% inhibitory concentration; WT, wild type. *P<0.05, **P<0.01, ***P<0.001, ****P<0.0001.

[0114] FIGS. 2A-2H depict SARS-COV-2 S-specific B cell responses induced by BA.1 breakthrough infection. FIGS. 2A-2B. Frequency of circulating B cells that recognize recombinant WT and BA.1 RBDs among (FIG. 2A) IgG⁺ and (FIG. 2B) IgA⁺ B cells in BA.1 breakthrough infection donors and uninfected/vaccinated donors at one- or six-months following primary vaccination (2× mRNA) or one month following booster mRNA vaccination (3× mRNA), as measured by flow cytometry. Bars indicate median frequencies. Donors with breakthrough infections occurring after primary mRNA vaccination are shown as circles and those infected after booster mRNA vaccination are shown as triangles. FIG. 2C. Representative fluorescence-activated cell sorting (FACS) gating strategy used to identify RBD-directed B cells that are WT-specific or WT/BA.1 cross-reactive, shown for a pre-pandemic donor and a breakthrough infection donor. Percentages of WT-specific (tan) and WT/BA.1 cross-reactive (teal) B cells out of all RBD-reactive cells are shown in parentheses. FIGS. 2D-E. Mean proportions of RBD-reactive B cells that bind WT and/or BA.1 RBD among (FIG. 2D) total S⁺swIg⁺ B cells or (FIG. 2E) S⁺ swIg⁺ CD71+ B cells. Error bars represent standard errors of the mean. Samples collected six months following mRNA vaccination were excluded from this analysis due to low numbers of RBD-specific CD71+ cells at this time point. FIGS. 2F-H. Percentage of S-reactive swIg⁺ B cells that target the (FIG. 2F) NTD, (FIG. 2G) RBD, and (FIG. 2H) Hexapro-stabilized S2 subunits. Black bars represent median percentages. For breakthrough infection donors, this analysis was restricted to S⁺swIg⁺CD71⁺ B cells to capture the activated response. Statistical comparisons were determined by (FIGS. 2A-B) two-way ANOVA with subsequent Dunnett's multiple comparisons test or (FIGS. 2D-H) two-sided Kruskal-Wallis test with Dunn's multiple comparisons. 1M, one month; 6M, six months; swIg, class-switched immunoglobulin; WT, wild type. *P<0.05, **P<0.01, ***P<0.001, ****P<0.0001.

[0115] FIGS. 3A-3E depict sequence features of RBD-directed monoclonal antibodies isolated from BA.1 breakthrough infection donors. FIG. 3A. Proportion of antibodies that bind recombinant WT and/or BA.1 RBD antigens from each donor, as determined by biolayer interferometry (BLI). The number of antibodies isolated from each donor is indicated at the top of each bar. FIG. 3B. Clonal lineage analysis. Clonally expanded lineages are represented as colored slices proportional to the lineage size, and unique clones are combined and shown as a single grey segment. The total number of antibodies is shown in the center of each pie. FIG. 3C. Germline IGHV gene usage frequencies among anti-RBD antibodies derived from breakthrough infection donors. Germline gene frequency distributions among anti-RBD antibodies isolated from mRNA vaccinated donors and unselected (baseline) memory B cell repertoires are included for reference (17). FIG. 3D Distribution of HCDR3 amino acid lengths in BA.1-reactive antibodies. The dotted black line represents the median, and the lower and upper lines represent the first and third quartile, respectively. FIG. 3E. Number of VH nucleotide substitutions in antibodies isolated from each breakthrough infection donor, with medians shown by black bars. Statistical significance was determined by Fisher's exact test compared to the baseline repertoire. 1M, one month; CDR, complementarity determining region; IGHV, immunoglobulin heavy variable domain; VH, variable heavy chain; WT, wild type. ***P<0.001, ****P<0.0001.

[0116] FIGS. 4A-4G depict binding and neutralization properties of anti-RBD antibodies isolated following BA.1 breakthrough infection. FIG. 4A. Fab binding affinities for recombinant WT and BA.1 RBD antigens, as measured by BLI. Fabs with no detectable binding activity or with binding kinetics that could not be fit to a 1:1 binding model were excluded. FIG. 4B. Proportion of BA.1-reactive antibodies with the indicated binding affinities for SARS-COV-2 VOC RBDs and SARS-COV RBD, as measured by BLI. Antibodies with weak binding affinities that could not be fit to a 1:1 binding model are shown as >100 nM. FIG. 4C. Proportion of antibodies from each donor with the indicated levels of neutralizing activity against MLV-SARS-COV-2 D614G and BA.1 at a concentration of 5 g/ml. FIG. 4D. MLV-SARS-COV-2 D614G and BA.1 neutralization IC₅₀s for antibodies that displayed >90% neutralization against D614G and/or BA.1 at a concentration of 5 μg/ml. FIG. 4E. Heatmap showing neutralization potency and binding breadth of BA.1 neutralizing antibodies. The bottom bar shows convergent IGHV germline gene families. FIG. 4F. Pie charts showing convergent germline gene usage among BA.1-neutralizing antibodies (right) compared to the baseline human antibody repertoires (left) (17). FIG. 4G. Competitive binding profiles of BA.1 neutralizing antibodies utilizing convergent IGHV germline genes, as determined by BLI sandwich competition assay using ACE2 and the indicated comparator antibodies. Fab, antigen binding fragment; IC₅₀, 50% inhibitory concentration; IGHV, immunoglobulin gene heavy variable; K_{D}, equilibrium dissociation constant; N.B., non-binding; WT, wild type.

[0117] FIG. 5 depicts the prevalence of circulating SARS-COV-2 variants. Genomic sequencing analyses of SARS-COV-2 infections occurring in the United States CDC Region 1 (Connecticut, Maine, Massachusetts, New Hampshire, Rhode Island, and Vermont) are colored by the indicated Pango lineage.

[0118] FIGS. 6A-6C depict SARS-COV-2 RBD-specific B cell staining. FIG. 6A. Representative FACS gating strategy to determine frequencies of WT- and BA.1-RBD-reactive B cells among IgG⁺ and IgA⁺ B cells. FIG. 6B. Representative FACS gating strategy to determine the proportion of CD71⁺S⁺RBD⁺ cells that are WT-specific or BA.1/WT cross-reactive. FIG. 6C. Representative FACS gating strategy used to calculate the proportion S-specific B cells directed to the NTD, RBD, and S2 subdomains. FSC-A, forward scatter area; FSC-H, forward scatter height; SSC-A, side scatter area.

[0119] FIG. 7 depicts distribution of subdomain specificities within the S-specific B cell response following BA.1 breakthrough infection. Proportions of S-reactive CD71⁺ swIg⁺ B cells that recognize the NTD (left), RBD (middle), or prefusion-stabilized S2 (right) subdomains in donors who experienced breakthrough infection after either two-dose or three-dose mRNA vaccination, as determined by flow cytometry. Black bars indicate medians.

[0120] FIG. 8 depicts representative FACS gating strategy for single-cell sorting RBD-specific swIg⁺ B cells. FACS plots shown are gated on swIg⁺ CD19+ B cells. A pre-pandemic donor was included as a negative control.

[0121] FIG. 9 depicts binding reactivities of breakthrough infection-derived antibodies isolated from CD71+ B cells. The number at the top of each bar represents the total number of antibodies.

[0122] FIGS. 10A-10C depict antibody breadth of activity against SARS-COV-2 variants and SARS-CoV. FIG. 10A. Fab binding affinities of BA.1 neutralizing antibodies to SARS-COV RBD, as determined by BLI. FIG. 10B. Neutralization IC50s against SARS-COV and BA.1 among antibodies displaying Fab binding to SARS-COV. FIG. 10C. Neutralization potency (left) and Fab binding affinity (right) for the indicated SARS-COV-2 variants of concern and SARS-COV. IC50, 50% inhibitory concentration; KD, equilibrium dissociation constant; N.B., non-binding; n.d., not determined; N.N., non-neutralizing.

[0123] FIG. 11 depicts IGHV germline gene frequency distributions among BA.1 neutralizing antibodies. Frequency distributions of all RBD-binding antibodies isolated from breakthrough infection donors and the human baseline (unselected) repertoire are included for reference (17). Statistical comparisons were made by Fisher's exact test compared to the baseline repertoire. IGHV, immunoglobulin heavy variable domain. *P<0.05, **P<0.01, ***P<0.001, ****P<0.0001.

[0124] FIG. 12 depicts HCDR3 amino acid lengths of BA.1 neutralizing antibodies utilizing IGH3-53/3-66 germline genes, with baseline antibody repertoire lengths included for comparison (17). Statistical comparisons were determined by Kruskal-Wallis test with subsequent Dunn's multiple comparisons. HCDR3, heavy complementarity determining region 3. ****P<0.0001

[0125] FIG. 13 depicts neutralizing activity of antibodies utilizing convergent IGHV germline genes against D614G and BA.1, as determined using an MLV-based pseudovirus assay. Black bars represent median IC50s. Statistical significance was determined by two-way ANOVA with subsequent Dunnett's multiple comparisons test IC50, 50% inhibitory concentration. IGHV, immunoglobulin heavy variable domain. **P<0.01.

[0126] FIGS. 14A-14B depict sequence features of breakthrough infection-derived IGHV1-69 neutralizing antibodies. FIG. 14A. Light chain IGLV germline gene usage among non-ACE2-competitive IGHV1-19 antibodies. The total number of antibodies is shown in the center of the pie. FIG. 14B. Pairwise comparisons of LCDR3 amino acid identity. The percentage identity of each pairwise comparison is shown in the middle of each square. LCDR3, light chain complementarity determining region 3; IGKV, immunoglobulin kappa variable domain. IGLV, immunoglobulin lambda variable domain.

[0127] FIGS. 15A-15D depict the serum neutralizing antibody responses induced following BA.1 breakthrough infection. FIG. 15A. Timeline of vaccination, BA.1 breakthrough infection, and sample collections. FIG. 15B. Paired analysis of serum neutralizing activity against SARS-COV-2 D614G and BA.1, BA.2, BA.2.75, BA.4/5, Beta, and Delta variants, and SARS-COV (SARS1) at 1-month (T1) and 5-6-month (T2) time points, as determined via a MLV-based pseudovirus neutralization assay. Connected data points represent paired samples for each donor, and the median fold change in serum titer between the two time points is shown in parentheses. Dotted lines represent the lower limit of detection of the assay. FIG. 15C. Serum neutralizing titers against SARS-COV-2 variants and SARS-CoV in samples collected at (left) 1-month and (right) 5-6-month post-breakthrough infection for each donor. Median titers are shown above the data points. Dotted lines represent the lower limit of detection of the assay. FIG. 15D. Fold change in serum neutralizing titers for the indicated SARS-COV-2 variants and SARS-COV relative to SARS-COV-2 D614G at early (T1) and late (T2) time points. Black bars represent median fold changes. Dotted line indicates no change in IC₅₀. Breakthrough infection donors infected after two-dose mRNA vaccination (n=4) are shown as circles and those infected after a third mRNA dose (n=3) are shown as triangles. One two-dose vaccinated breakthrough donor was lost to follow-up at the second time point. Statistical comparisons were determined by (FIG. 15B) Wilcoxon matched-pairs signed rank test, (FIG. 15C) Friedman's one-way ANOVA with Dunn's multiple comparisons, or (FIG. 15D) mixed model ANOVA. *P<0.05; **P<0.01; ****P<0.0001; ns, not significant.

[0128] FIGS. 16A-16F depict the SARS-COV-2 RBD-specific memory B cell responses following BA.1 breakthrough infection. FIG. 16A. Representative fluorescence-activated cell sorting gating strategy used to enumerate frequencies of (top) total (WT+BA.1) RBD-reactive B cells among class-switched (IgG⁺ or IgA⁺) CD19+ B cells and (bottom) WT-specific, BA.1-specific, and WT/BA.1 cross-reactive B cells among total RBD-reactive, class-switched (IgG⁺ or IgA⁺) CD19⁺ B cells. FIGS. 16B-C. Frequencies of (B) total RBD-reactive or (C) WT/BA.1 RBD cross-reactive B cells among class-switched CD19⁺ B cells at 1-month (T1) and 5-6-month (T2) time points. Connected data points represent paired samples for each donor. Donors infected after two-dose mRNA vaccination (n=4) are shown as circles and those infected after a third mRNA dose (n=3) are shown as triangles. One two-dose vaccinated breakthrough donor was censored at the second time point. FIG. 16D. Mean proportions of RBD-reactive, class-switched B cells that display WT-specific, BA.1-specific or WT/BA.1-cross-reactive binding at each time point. Error bars indicate standard error of mean. FIG. 16E. Clonal lineage analysis of RBD-directed antibodies isolated from four donors at the early (T1) and late (T2) time points. Clonally expanded lineages (defined as antibodies with the same heavy and light chain germlines, same CDR3 lengths, and ≥80% CDRH3 sequence identity) are represented as colored slices. Each colored slice represents a clonal lineage with the size of the slice proportional to the lineage size. Unique clones are combined into a single gray segment. The number of antibodies is shown in the center of each pie. Three of the donors (IML4042, IML4043, and IML4044) experienced BA.1 breakthrough infection following two-dose mRNA vaccination and the remaining donor (IML4045) was infected after a booster immunization. FIG. 16F. Levels of somatic hypermutation, as determined by the number of nucleotide substitutions in the variable heavy (VH) region, at the early and late time points among WT-specific, WT/BA.1 cross-reactive, and BA.1-specific antibodies. Medians are shown by black bars. Statistical significance was determined by (FIGS. 16B and C) Wilcoxon matched-pairs signed rank test or (FIGS. 16D and F) Mann-Whitney U test. swIg⁺, class-switched immunoglobulin. PE, phycoerythrin; *P<0.05; **P<0.01.

[0129] FIGS. 17A-17F depicts the binding and neutralizing properties of RBD-directed antibodies induced by BA.1 breakthrough infection. FIGS. 17A-B. Fab binding affinities of WT/BA.1 cross-reactive antibodies for recombinant WT and BA.1 RBD antigens, as measured by BLI, are plotted as bivariates for antibodies derived from (left) 1-month and (right) 5-6-month time points in (A) and summarized as a column dot plot in (B). Median affinities are indicated by black bars and shown below data points. FIG. 17C. Proportions of WT/BA.1 cross-reactive antibodies at each time point that show increased affinity for the BA.1 RBD relative to WT (red shades) or increased affinity for WT RBD (blue shades). Values represent the percentage of antibodies belonging to each of the indicated categories. FIGS. 17D-E. Neutralizing activities of cross-binding antibodies against SARS-COV-2 D614G and BA.1, as determined by an MLV-based pseudovirus neutralization assay. IC₅₀ values are plotted in (D) as bivariates for antibodies isolated from (left) 1-month and (right) 5-6-month tie points and summarized as column dot plots in (E). Median IC₅₀ values are indicated by black bars and shown below data points. FIG. 17F. Proportions of WT/BA.1 cross-neutralizing antibodies at each time point that show increased neutralizing potency against BA.1 (red shades) or D614G (blue shades). Values represent the percentage of antibodies belonging to each of the indicated categories. Statistical comparisons were determined by (B and E) Kruskal-Wallis test with subsequent Dunn's multiple comparisons or (C and F) Mann-Whitney U test. IC₅₀, 50% inhibitory concentration; K_{D}, equilibrium dissociation constant; *P<0.05; **P<0.01; ****P<0.0001.

[0130] FIGS. 18A-18G depict the breadth of D614G/BA.1 cross-neutralizing antibodies at early and late time points following BA.1 breakthrough infection. FIG. 18A. Fab binding affinities of D614G/BA.1 cross-neutralizing antibodies isolated at 1-month (T1) and 5-6-month (T2) time points for recombinant SARS-COV-2 variant RBDs and the SARS-COV RBD, as determined by BLI. Black bars represent medians. FIG. 18B. Pie charts showing the proportions of antibodies derived from (left) early and (right) late time points that bound the indicated number of SARS-COV-2 variant RBDs with Fab K_{D}s≤10 nM. The total number of antibodies is shown in the center of each pie. FIG. 18C. Proportions of D614G/BA.1 cross-neutralizing antibodies with the indicated fold changes in Fab binding affinities for recombinant SARS-COV-2 variant RBDs relative to the WT RBD. FIG. 18D. Pie charts showing frequencies of the indicated convergent germline genes among D614G/BA.1 cross-neutralizing antibodies isolated at early (T1) and late (T2) timelines. Germline gene frequencies observed in baseline human antibody repertoires (upper right) are shown for comparison. FIG. 18E. Structural projections of binding escape mutations determined for the indicated convergent antibodies using deep mutational scanning analysis of yeast-displayed SARS-COV-2 BA.1 RBD mutant libraries. The RBD surface is colored by a gradient ranging from no escape (white) to strong escape (red) at each site. FIG. 18F. Heatmap summarizing convergent antibody escape mutations present in the indicated SARS-COV-2 Omicron sub-lineages. FIG. 18G. Fab binding affinities of convergent antibodies utilizing the indicated germline genes for SARS-COV-2 WT and Omicron sub-variant RBD antigens, as measured by BLI. Black bars indicate median affinities. Statistical comparisons were determined by (A and C) Kruskal-Wallis test with Holms corrected multiple pairwise comparisons, (B and D) Fisher's exact test, or (G) Kruskal-Wallis test with subsequent Dunn's multiple comparisons with WT. K_{D}, equilibrium dissociation constant; *P<0.05; **P<0.01; ***P<0.001; ****P<0.0001.

[0131] FIGS. 19A-19B depict SARS-COV-2 antigen-specific B cell staining and sorting. FIG. 19A. Representative FACS gating strategy to determine frequencies of WT and/or BA.1 RBD-reactive B cells among class-switched (IgG⁺ or IgA⁺) B cells. The frequency of events in each gate relative to the parent gate are shown as percentages in each plot. FIG. 19B. FACS gates used for single-cell sorting of WT and/or Omicron BA.1 RBD-specific memory B cells in 4 individuals 5-6 months following BA.1 breakthrough infection, Donors IML4042, IML4043, and IML4044 experienced breakthrough infection following two-dose mRNA vaccination, and IML4045 was infected after a third mRNA dose. A healthy pre-pandemic donor sample is shown as a control. FSC-A, forward scatter area; FSC-H, forward scatter height; swIg⁺, class-switched immunoglobulin; SSC-A, side scatter area.

[0132] FIG. 20 depicts the cross-reactivity of RBD-directed B cells at early and late time points following BA.1 breakthrough infection. Proportion of RBD-directed class-switched B cells that are (left) WT-specific, (middle) WT/BA.1 cross-reactive, and (right) BA.1-specific at 1-month (T1) and 5-6-month (T2) time points, as determined by flow cytometry. Donors infected after two-dose mRNA vaccination (n=4) are shown as circles and those infected after a third mRNA booster dose (n=3) are shown as triangles. One two-dose vaccinated breakthrough donor was censored at the second time point. Statistical comparisons were determined by Mann-Whitney U tests. **P<0.01.

[0133] FIGS. 21A-21B depict the cross-reactivity of RBD-directed monoclonal antibodies isolated at 1- and 5-6 months following BA.1 breakthrough infection. FIG. 21A. Proportion of BA.1-specific, WT-specific, and WT/BA.1 cross-reactive antibodies isolated from breakthrough infection donors at 1-month (T1) and 5-6-month (T2) time points, as determined by BLI. FIG. 21B. Summary of antibody cross-reactivity at both time points. Connected data points represent paired samples for each donor. Donors infected after two-dose mRNA vaccination (n=4) are shown as circles and those infected after a third mRNA booster dose (n=3) are shown as triangles. One two-dose vaccinated breakthrough donor was censored at the second time point.

[0134] FIG. 22 depicts the IGHV germline usage among cross-reactive antibodies. Human IGHV germline gene usage frequencies among WT/BA.1 cross-reactive antibodies at 1 month (T1) and 5-6 month (T2) time points. Germline gene distribution of RBD-directed antibodies derived from two-dose mRNA-vaccinated/uninfected donors were obtained from the CoV-AbDab database (29). Human baseline (unselected) repertoire frequencies were included for reference. Statistical comparisons were made by Fisher's exact test compared to the baseline repertoire. IGHV, immunoglobulin heavy variable domain. *P<0.05, **P<0.01, ***P<0.001, ****P<0.0001.

[0135] FIG. 23 depicts the binding and neutralization properties of BA. 1-specific antibodies. Heatmap showing neutralization IC₅₀s and SARS-COV-2 variant RBD binding affinities of BA.1-specific antibodies.

[0136] FIG. 24 depicts the binding breadth of D614G/BA.1 cross-neutralizing antibodies. Heatmap showing neutralization IC₅₀s and SARS-COV-2 variant RBD binding affinities of D614G/BA.1 cross-neutralizing antibodies isolated 5-6 months following BA.1 breakthrough infection. Antibodies utilizing convergent germline are indicated in the right-most column.

[0137] FIGS. 25A-25B depict the germline gene usage of D614G/BA.1 cross-neutralizing antibodies isolated 5-6 months following BA.1 breakthrough infection. FIG. 25A. Human IGHV germline distribution frequencies among D614G/BA.1 cross-neutralizing antibodies isolated 1-month (T1) and 5-6-months (T2) following breakthrough infection, with human baseline repertoire frequencies shown for comparison. FIG. 25B. Pie charts showing the proportion of cross-neutralizing antibodies isolated from each donor that utilize convergent germline genes. The total number of antibodies isolated from each donor is indicated above each pie chart. IGHV, immunoglobulin human variable domain; *P<0.05, **P<0.01, ***P<0.001, ****P<0.0001.

[0138] FIGS. 26A-26C depict the sequence and binding features of antibodies utilizing convergent germline genes. FIG. 26A. Pie charts showing light chain germline usage among IGHV1-69 antibodies isolated at 1-month (T1) and 5-6 month (T2) time points. The number of antibodies analyzed from each time point is indicated in the center of each pie. FIG. 26B. HCDR3 amino acid length distribution of IGHV3-53 and IGHV3-66 cross-neutralizing antibodies isolated 1-month (T1) and 5-6 months (T2) following BA.1 breakthrough infection. HCDR3 lengths of IGHV3-53/3-66-utilizing antibodies isolated following primary D614G infection and the baseline human antibody repertoire were included for comparison. FIG. 26C. Proportion of cross-neutralizing antibodies utilizing the indicated germline genes that compete with the ACE2 receptor for binding, as determined by a BLI competition assay. The number of antibodies analyzed is shown in the center of each pie. Statistical comparisons were determined by Kruskal-Wallis test with subsequent Dunn's multiple comparisons. A.A., amino acids; *P<0.05; ****P<0.0001.

[0139] FIGS. 27A-27C depict the deep mutational scanning analysis. FIG. 27A. Representative FACS gates used to select antibody-escape mutations in yeast-displayed Omicron BA.1 mutant libraries. Gates were drawn to capture ˜50% of wildtype Omicron BA.1-expressing yeast labeled at an antibody concentration 0.1× the selection concentration. From duplicate mutant libraries, yeast cells in the antibody-escape bin were sorted and sequenced. Post-sort mutant frequencies were compared to the pre-sort population to calculate per-mutant “escape fractions”, the fraction of cells expressing a mutation that were found in the antibody-escape sort gate. FIG. 27B. Correlation in per-mutation (left) and per-site (right) escape fractions in replica the library selections for each antibody. FIG. 27C. Lineplots at left show the total site-wise escape at each RBD site. This metric is mapped to structure in FIG. 17E. Sites of strong escape indicated by pink bars are shown at the mutation level in logoplots at center. Mutations are colored by their effects on ACE2 binding (scale bar at right). Note that prominent escape mutations such as K356T and I468N introduce N-linked glycosylation motifs.

[0140] FIG. 28 depicts the charge variant profile of VYD223 (also known as ADI-75865), the intermediate antibody (VYD223+K74T), and VYD225 (VYD223+K74T+N31Q) as determined by capillary isoelectric focusing (cIEF).

[0141] FIG. 29 depicts the intact masses observed for VYD223, the intermediate antibody (VYD223+K74T), and VYD225 (VYD223+K74T+N31Q) as determined by reduced deglycosylated liquid chromatography-mass spectrometry (LC-MS) of the heavy chain.

[0142] FIG. 30A depicts the level of monomer species by size exclusion chromatography (SEC) following protein A purification, the hydrophobic interaction (HIC) retention time, and the polyspecificity reagent (PSR) score of VYD223, and the intermediate antibody (VYD223+K74T). FIG. 30B depicts the binding affinity of VYD223 and the intermediate antibody (VYD223+K74T) against the RBD of the wild type SARS-COV-2 and the BA.2.75 variant.

[0143] FIG. 31 depicts the binding affinity of VYD225 and VYD223 against the RBD of SARS-COV-2 variants (the BA.1.1 variant, the BA.2.75 variant, the BQ.1.1 variant and the XBB variant).

[0144] FIG. 32 is a heatmap depicting the neutralization IC₅₀ of VYD225, VYD223, VYD224 (also known as ADI-80707), and adintrevimab against the wild type SARS-COV-2 strain, and the Omicron variants (i.e., the BF.7 variant, the BQ.1.1 variant, the BA.2.75 variant, the XBB.1 variant, and the XBB.1.5 variant) in a pseduovirus neutralization assay. VYD223-A has a K74T substitution in the VH chain of VYD223.

[0145] FIG. 33 depicts the biophysical analysis of VYD223 and VYD225.

[0146] FIG. 34 depicts the dose-response curve for VYD223 neutralization against SARS-COV-2 pseudoviruses.

### DETAILED DESCRIPTION

### A. Definitions

[0147] It is to be understood that this invention is not limited to the particular methodology, protocols, cell lines, animal species or genera, and reagents described, as such may vary. It is also to be understood that the terminology used herein is for the purpose of describing particular embodiments only and is not intended to limit the scope of the present invention, which will be limited only by the appended claims. As used herein the singular forms “a”, “and”, and “the” include plural referents unless the context clearly dictates otherwise. Thus, for example, reference to “a cell” includes a plurality of such cells and reference to “the protein” includes reference to one or more proteins and equivalents thereof known to those skilled in the art, and so forth. All technical and scientific terms used herein have the same meaning as commonly understood to one of ordinary skill in the art to which this invention belongs unless clearly indicated otherwise.

[0148] Spike protein (S protein): As used herein, unless stated otherwise S protein includes any coronavirus form of S protein. The term coronavirus S protein (“CoV-S”) is used to describe the S protein of any coronaviruses. In particular, the “SARS-COV-S” and “SARS-COV-2-S” encompass the following S protein of SARS-COV and of SARS-COV-2 amino acid sequences:

SARS-COV-S:
(SEQ ID NO: 1)
MFVFLVLLPLVSSQCVNLTTRTQLPPAYTNSFTRGVYYPDKVFRSSVLHSTQDLFLPFFSNVT
WFHAIHVSGTNGTKRFDNPVLPFNDGVYFASTEKSNIIRGWIFGTTLDSKTQSLLIVNNATNV
VIKVCEFQFCNDPFLGVYYHKNNKSWMESEFRVYSSANNCTFEYVSQPFLMDLEGKQGNFK
NLREFVFKNIDGYFKIYSKHTPINLVRDLPQGFSALEPLVDLPIGINITRFQTLLALHRSYLTPG
DSSSGWTAGAAAYYVGYLQPRTFLLKYNENGTITDAVDCALDPLSETKCTLKSFTVEKGIYQ
TSNFRVQPTESIVRFPNITNLCPFGEVENATRFASVYAWNRKRISNCVADYSVLYNSASFSTFK
CYGVSPTKLNDLCFTNVYADSFVIRGDEVRQIAPGQTGKIADYNYKLPDDFTGCVIAWNSNN
LDSKVGGNYNYLYRLFRKSNLKPFERDISTEIYQAGSTPCNGVEGENCYFPLQSYGFQPTNGV
GYQPYRVVVLSFELLHAPATVCGPKKSTNLVKNKCVNFNFNGLTGTGVLTESNKKFLPFQQF
GRDIADTTDAVRDPQTLEILDITPCSFGGVSVITPGTNTSNQVAVLYQDVNCTEVPVAIHADQ
LTPTWRVYSTGSNVFQTRAGCLIGAEHVNNSYECDIPIGAGICASYQTQTNSPGSASSVASQSI
IAYTMSLGAENSVAYSNNSIAIPTNFTISVTTEILPVSMTKTSVDCTMYICGDSTECSNLLLQY
GSFCTQLNRALTGIAVEQDKNTQEVFAQVKQIYKTPPIKDFGGFNFSQILPDPSKPSKRSFIEDL
LFNKVTLADAGFIKQYGDCLGDIAARDLICAQKFNGLTVLPPLLTDEMIAQYTSALLAGTITS
GWTFGAGAALQIPFAMQMAYRFNGIGVTQNVLYENQKLIANQFNSAIGKIQDSLSSTASALG
KLQDVVNQNAQALNTLVKQLSSNFGAISSVLNDILSRLDPPEAEVQIDRLITGRLQSLQTYVT
QQLIRAAEIRASANLAATKMSECVLGQSKRVDFCGKGYHLMSFPQSAPHGVVFLHVTYVPA
QEKNFTTAPAICHDGKAHFPREGVFVSNGTHWFVTQRNFYEPQIITTDNTFVSGNCDVVIGIV
NNTVYDPLQPELDSFKEELDKYFKNHTSPDVDLGDISGINASVVNIQKEIDRLNEVAKNLNES
LIDLQELGKYEQGSGYIPEAPRDGQAYVRKDGEWVLLSTFLGRSLEVLFQGPGHHHHHHHHS
AWSHPQFEKGGGSGGGGSGGSAWSHPQFEK (1288 amino acids, encoded by
SEQ ID NO: 2),

but also any mutants, splice variants, isoforms, orthologs, homologs, and variants of this sequence.

SARS-COV-2-S:
(SEQ ID NO: 5)
MFVFLVLLPLVSSQCVNLTTRTQLPPAYTNSFTRGVYYPDKVFRSSVLHSTQDLFLPFFSNVT
WFHAIHVSGTNGTKRFDNPVLPFNDGVYFASTEKSNIIRGWIFGTTLDSKTQSLLIVNNATNV
VIKVCEFQFCNDPFLGVYYHKNNKSWMESEFRVYSSANNCTFEYVSQPFLMDLEGKQGNFK
NLREFVFKNIDGYFKIYSKHTPINLVRDLPQGFSALEPLVDLPIGINITRFQTLLALHRSYLTPG
DSSSGWTAGAAAYYVGYLQPRTFLLKYNENGTITDAVDCALDPLSETKCTLKSFTVEKGIYQ
TSNFRVQPTESIVRFPNITNLCPFGEVENATRFASVYAWNRKRISNCVADYSVLYNSASFSTFK
CYGVSPTKLNDLCFTNVYADSFVIRGDEVRQIAPGQTGKIADYNYKLPDDFTGCVIAWNSNN
LDSKVGGNYNYLYRLFRKSNLKPFERDISTEIYQAGSTPCNGVEGENCYFPLQSYGFQPTNGV
GYQPYRVVVLSFELLHAPATVCGPKKSTNLVKNKCVNFNFNGLTGTGVLTESNKKFLPFQQF
GRDIADTTDAVRDPQTLEILDITPCSFGGVSVITPGTNTSNQVAVLYQDVNCTEVPVAIHADQ
LTPTWRVYSTGSNVFQTRAGCLIGAEHVNNSYECDIPIGAGICASYQTQTNSPRRARSVASQSI
IAYTMSLGAENSVAYSNNSIAIPTNFTISVTTEILPVSMTKTSVDCTMYICGDSTECSNLLLQY
GSFCTQLNRALTGIAVEQDKNTQEVFAQVKQIYKTPPIKDFGGFNFSQILPDPSKPSKRSFIEDL
LFNKVTLADAGFIKQYGDCLGDIAARDLICAQKFNGLTVLPPLLTDEMIAQYTSALLAGTITS
GWTFGAGAALQIPFAMQMAYRFNGIGVTQNVLYENQKLIANQFNSAIGKIQDSLSSTASALG
KLQDVVNQNAQALNTLVKQLSSNFGAISSVLNDILSRLDKVEAEVQIDRLITGRLQSLQTYVT
QQLIRAAEIRASANLAATKMSECVLGQSKRVDFCGKGYHLMSFPQSAPHGVVFLHVTYVPA
QEKNFTTAPAICHDGKAHFPREGVFVSNGTHWFVTQRNFYEPQIITTDNTFVSGNCDVVIGIV
NNTVYDPLQPELDSFKEELDKYFKNHTSPDVDLGDISGINASVVNIQKEIDRLNEVAKNLNES
LIDLQELGKYEQYIKWPWYIWLGFIAGLIAIVMVTIMLCCMTSCCSCLKGCCSCGSCCKFDED
DSEPVLKGVKLHYT, (1273 amino acids, encoded by SEQ ID NO: 6),

but also any mutants, splice variants, isoforms, orthologs, homologs, and variants of this sequence. In some embodiments, the CoV-S comprises a polypeptide sequence having at least 85%, 90%, 95%, 96%, 97%, 98%, or 99% identity to either SEQ ID NO:1 or SEQ ID NO:5.

[0149] “Effective treatment or prevention of CoV infection” herein refers to eliminating CoV from the subject or preventing the expansion of CoV in the subject or eliminating or reducing the symptoms such as fever, cough, shortness of breath, runny nose, congestion, conjunctivitis, and/or gastrointestinal symptoms after administration of an effective amount of an anti-CoV-S antibody or antigen-binding fragment thereof according to the disclosure. In some instances, effective treatment may eliminate the need for the subject to be placed on a ventilator or reduce the time the subject needs to be on a ventilator. The treatment may be effected as a monotherapy or in association with another active agent such as an antiviral agent or anti-inflammatory agent by way of example.

[0150] As used herein, “treatment” is an approach for obtaining beneficial or desired clinical results. For purposes of this disclosure, beneficial or desired clinical results include, but are not limited to, one or more of the following: improvement in any aspect of COV-S-related conditions such as fever or cough. For example, in the context of CoV infection treatment this includes lessening severity, alleviation of fever, cough, shortness of breath, and other associated symptoms, reducing frequency of recurrence, increasing the quality of life of those suffering from the CoV-related symptoms, and decreasing dose of other medications required to treat the CoV-related symptoms. Other associated symptoms include, but are not limited to, diarrhea, conjunctivitis, loss of smell, and loss of taste. Still other symptoms which may be alleviated or prevented include inflammation, cytokine storm and/or sepsis.

[0151] “Reducing incidence” or “prophylaxis” or “prevention” means any of reducing severity for a particular disease, condition, symptom, or disorder (the terms disease, condition, and disorder are used interchangeably throughout the application). Reduction in severity includes reducing drugs and/or therapies generally used for the condition by, for example, reducing the need for, amount of, and/or exposure to drugs or therapies. Reduction in severity also includes reducing the duration, and/or frequency of the particular condition, symptom, or disorder (including, for example, delaying or increasing time to next episodic attack in an individual). This further includes eliminating the need for the subject to be placed on a ventilator or reducing the time the subject needs to be on a ventilator.

[0152] “Ameliorating” one or more symptoms of CoV infection-related conditions means a lessening or improvement of one or more symptoms of the condition, e.g., fever or cough or shortness of breath as compared to not administering an anti-CoV-S antagonist antibody. “Ameliorating” also includes shortening or reduction in duration of a symptom. Again, this may include eliminating the need for the subject to be placed on a ventilator or reducing the time the subject needs to be on a ventilator.

[0153] As used herein, “controlling CoV-related symptom” or “controlling” another CoV-S-related condition refers to maintaining or reducing severity or duration of one or more symptoms of the condition (as compared to the level before treatment). For example, the duration or severity or frequency of symptoms is reduced by at least about any of 10%, 20%, 30%, 40%, 50%, 60%, 70%, 80%, 90%, or 100% in the individual as compared to the level before treatment. The reduction in the duration or severity, or frequency of symptoms can last for any length of time, e.g., 2 weeks, 4 weeks (1 month), 8 weeks (2 months), 16 weeks (3 months), 4 months, 5 months, 6 months, 9 months, 12 months, etc.

[0154] As used therein, “delaying” the development of a CoV-S-related condition such as shortness of breath, bronchitis, or pneumonia e.g., interstitial), means to defer, hinder, slow, retard, stabilize, and/or postpone progression of the condition or disease. This delay can be of varying lengths of time, depending on the history of the condition or disease and/or individuals being treated. As is evident to one skilled in the art, a sufficient or significant delay can, in effect, encompass prevention, in that the individual does not develop symptoms. A method that “delays” development of the symptom is a method that reduces probability of developing the symptom in a given time frame and/or reduces extent of the symptoms in a given time frame, when compared to not using the method. Such comparisons are typically based on clinical studies, using a statistically significant number of subjects.

[0155] “Development” or “progression” of a CoV-related condition such as cough or fever means initial manifestations and/or ensuing progression of the disorder. Development of cough or fever can be detectable and assessed using standard clinical techniques as well known in the art. However, development also refers to progression that may be undetectable. For purpose of this disclosure, development, or progression refers to the biological course of the symptoms. “Development” includes occurrence, recurrence, and onset. As used herein “onset” or “occurrence” of a condition includes initial onset and/or recurrence.

[0156] As used herein, an “effective dosage” or “effective amount” of drug, compound, or pharmaceutical composition is an amount sufficient to effect beneficial or desired results. For prophylactic use, beneficial or desired results include results such as eliminating or reducing the risk, lessening the severity, or delaying the outset of the disease, including biochemical, histological, and/or behavioral symptoms of the disease, its complications and intermediate pathological phenotypes presenting during development of the disease. For therapeutic use, beneficial or desired results include clinical results such as reducing symptom intensity, duration, or frequency, and decreasing one or more symptoms resulting from CoV infection, including its complications and intermediate pathological phenotypes presenting during development of the disease, increasing the quality of life of those suffering from the disease, decreasing the dose of other medications required to treat the disease, enhancing effect of another medication, and/or delaying the progression of the disease of patients, eliminating the need for the subject to be placed on a ventilator or reducing the time the subject needs to be on a ventilator.

[0157] An effective dosage can be administered in one or more administrations. For purposes of this disclosure, an effective dosage of drug, compound, or pharmaceutical composition is an amount sufficient to accomplish prophylactic or therapeutic treatment either directly or indirectly. As is understood in the clinical context, an effective dosage of a drug, compound, or pharmaceutical composition may or may not be achieved in conjunction with another drug, compound, or pharmaceutical composition. Thus, an “effective dosage” may be considered in the context of administering one or more therapeutic agents, and a single agent may be considered to be given in an effective amount if, in conjunction with one or more other agents, a desirable result may be or is achieved.

[0158] A “suitable host cell” or “host cell” generally includes any cell wherein the subject anti-CoV-S antibodies and antigen-binding fragments thereof can be produced recombinantly using techniques and materials readily available. For example, the anti-CoV-S antibodies and antigen-binding fragments thereof of the present disclosure can be produced in genetically engineered host cells according to conventional techniques. Suitable host cells are those cell types that can be transformed or transfected with exogenous DNA and grown in culture, and include bacteria, fungal cells (e.g., yeast), and cultured higher eukaryotic cells (including cultured cells of multicellular organisms), particularly cultured mammalian cells, e.g., human or non-human mammalian cells. In an exemplary embodiment these antibodies may be expressed in CHO cells. Techniques for manipulating cloned DNA molecules and introducing exogenous DNA into a variety of host cells are disclosed by Sambrook et al., Molecular Cloning: A Laboratory Manual, 2nd ed., Cold Spring Harbor, N.Y.: Cold Spring Harbor Laboratory Press (1989), and Current Protocols in Molecular Biology, Ausubel et al., editors, New York, NY: Green and Wiley and Sons (1993).

[0159] In some exemplary embodiments the antibodies may be expressed in mating competent yeast, e.g., any haploid, diploid or tetraploid yeast that can be grown in culture. Yeast useful in fermentation expression methods may exist in a haploid, diploid, or other polyploid form.

[0160] A “selectable marker” herein refers to a gene or gene fragment that confers a growth phenotype (physical growth characteristic) on a cell receiving that gene as, for example through a transformation event. The selectable marker allows that cell to survive and grow in a selective growth medium under conditions in which cells that do not receive that selectable marker gene cannot grow. Selectable marker genes generally fall into several types, including positive selectable marker genes such as a gene that confers on a cell resistance to an antibiotic or other drug, temperature when two temperature sensitive (“ts”) mutants are crossed or a ts mutant is transformed; negative selectable marker genes such as a biosynthetic gene that confers on a cell the ability to grow in a medium without a specific nutrient needed by all cells that do not have that biosynthetic gene, or a mutagenized biosynthetic gene that confers on a cell inability to grow by cells that do not have the wild type gene; and the like.

[0161] An “expression vector” herein refers to DNA vectors containing elements that facilitate manipulation for the expression of a foreign protein within the target host cell, e.g., a bacterial, insect, yeast, plant, amphibian, reptile, avian, or mammalian cell, e.g., a CHO or HEK cell. Conveniently, manipulation of sequences and production of DNA for transformation may first performed in a bacterial host, e.g. E. coli, and usually vectors will include sequences to facilitate such manipulations, including a bacterial origin of replication and appropriate bacterial selection marker. Selection markers encode proteins necessary for the survival or growth of transformed host cells grown in a selective culture medium. Host cells not transformed with the vector containing the selection gene will not survive in the culture medium. Typical selection genes encode proteins that (a) confer resistance to antibiotics or other toxins, (b) complement auxotrophic deficiencies, or (c) supply critical nutrients not available from complex media. Exemplary vectors and methods for transformation of yeast are described, for example, in Burke, D., Dawson, D., & Stearns, T., Methods in yeast genetics: a Cold Spring Harbor Laboratory course manual, Plainview, NY: Cold Spring Harbor Laboratory Press (2000). Expression vectors for use in the methods of the disclosure may include yeast or mammalian specific sequences, including a selectable auxotrophic or drug marker for identifying transformed host strains. A drug marker may further be used to amplify copy number of the vector in a yeast host cell.

[0162] The polypeptide coding sequence of interest is operably linked to transcriptional and translational regulatory sequences that provide for expression of the polypeptide in the desired host cells, e.g., yeast or mammalian cells. These vector components may include, but are not limited to, one or more of the following: an enhancer element, a promoter, and a transcription termination sequence. Sequences for the secretion of the polypeptide may also be included, e.g. a signal sequence, and the like. An origin of replication, e.g., a yeast or mammalian origin of replication, is optional, as expression vectors may be integrated into the host cell genome.

[0163] Nucleic acids are “operably linked” when placed into a functional relationship with another nucleic acid sequence. For example, DNA for a signal sequence is operably linked to DNA for a polypeptide if it is expressed as a preprotein that participates in the secretion of the polypeptide; a promoter or enhancer is operably linked to a coding sequence if it affects the transcription of the sequence. Generally, “operably linked” means that the DNA sequences being linked are contiguous, and, in the case of a secretory leader, contiguous and in reading frame. However, enhancers do not have to be contiguous. Linking is accomplished by ligation at convenient restriction sites or alternatively via a PCR/recombination method familiar to those skilled in the art (GATEWAY® Technology (universal method for cloning DNA); Invitrogen, Carlsbad California). If such sites do not exist, the synthetic oligonucleotide adapters or linkers are used in accordance with conventional practice.

[0164] Promoters are untranslated sequences located upstream (5′) to the start codon of a structural gene (generally within about 100 to 1000 bp) that control the transcription and translation of particular nucleic acid sequences to which they are operably linked. Such promoters fall into several classes: inducible, constitutive, and repressible promoters (that increase levels of transcription in response to absence of a repressor). Inducible promoters may initiate increased levels of transcription from DNA under their control in response to some change in culture conditions, e.g., the presence or absence of a nutrient or a change in temperature.

[0165] The promoter fragment may also serve as the site for homologous recombination and integration of the expression vector into the same site in the host cell, e.g., yeast or mammalian cell, genome; alternatively, a selectable marker may be used as the site for homologous recombination. Suitable promoters for use in different eukaryotic and prokaryotic cells are well known and commercially available.

[0166] The polypeptides of interest may be produced recombinantly not only directly, but also as a fusion polypeptide with a heterologous polypeptide, e.g. a signal sequence or other polypeptide having a specific cleavage site at the N-terminus of the mature protein or polypeptide. In general, the signal sequence may be a component of the vector, or it may be a part of the polypeptide coding sequence that is inserted into the vector. The heterologous signal sequence selected preferably is one that is recognized and processed through one of the standard pathways available within the host cell, e.g., a mammalian cell, an insect cell, or a yeast cell. Additionally, these signal peptide sequences may be engineered to provide for enhanced secretion in expression systems. Secretion signals of interest also include mammalian and yeast signal sequences, which may be heterologous to the protein being secreted, or may be a native sequence for the protein being secreted. Signal sequences include pre-peptide sequences, and in some instances may include propeptide sequences. Many such signal sequences are known in the art, including the signal sequences found on immunoglobulin chains, e.g., K28 preprotoxin sequence, PHA-E, FACE, human MCP-1, human serum albumin signal sequences, human Ig heavy chain, human Ig light chain, and the like. For example, see Hashimoto et. al., Protein Eng., 11 (2): 75 (1998); and Kobayashi et. al., Therapeutic Apheresis, 2 (4): 257 (1998)).

[0167] Transcription may be increased by inserting a transcriptional activator sequence into the vector. These activators are cis-acting elements of DNA, usually about from 10 to 300 bp, which act on a promoter to increase its transcription. Transcriptional enhancers are relatively orientation and position independent, having been found 5′ and 3′ to the transcription unit, within an intron, as well as within the coding sequence itself. The enhancer may be spliced into the expression vector at a position 5′ or 3′ to the coding sequence, but is preferably located at a site 5′ from the promoter.

[0168] Expression vectors used in eukaryotic host cells may also contain sequences necessary for the termination of transcription and for stabilizing the mRNA. Such sequences are commonly available from 3′ to the translation termination codon, in untranslated regions of eukaryotic or viral DNAs or cDNAs. These regions contain nucleotide segments transcribed as polyadenylated fragments in the untranslated portion of the mRNA.

[0169] Construction of suitable vectors containing one or more of the above-listed components employs standard ligation techniques or PCR/recombination methods. Isolated plasmids or DNA fragments are cleaved, tailored, and re-ligated in the form desired to generate the plasmids required or via recombination methods. For analysis to confirm correct sequences in plasmids constructed, the ligation mixtures are used to transform host cells, and successful transformants selected by antibiotic resistance (e.g. ampicillin or Zeocin) where appropriate. Plasmids from the transformants are prepared, analyzed by restriction endonuclease digestion, and/or sequenced.

[0170] As an alternative to restriction and ligation of fragments, recombination methods based on specific attachment (“att”) sites and recombination enzymes may be used to insert DNA sequences into a vector. Such methods are described, for example, by Landy, Ann. Rev. Biochem., 58:913-949 (1989); and are known to those of skill in the art. Such methods utilize intermolecular DNA recombination that is mediated by a mixture of lambda and E. coli-encoded recombination proteins. Recombination occurs between att sites on the interacting DNA molecules. For a description of att sites see Weisberg and Landy, Site-Specific Recombination in Phage Lambda, in Lambda II, p. 211-250, Cold Spring Harbor, NY: Cold Spring Harbor Press (1983). The DNA segments flanking the recombination sites are switched, such that after recombination, the att sites are hybrid sequences comprised of sequences donated by each parental vector. The recombination can occur between DNAs of any topology.

[0171] Att sites may be introduced into a sequence of interest by ligating the sequence of interest into an appropriate vector; generating a PCR product containing att B sites through the use of specific primers; generating a cDNA library cloned into an appropriate vector containing att sites; and the like.

[0172] Folding, as used herein, refers to the three-dimensional structure of polypeptides and proteins, where interactions between amino acid residues act to stabilize the structure. While non-covalent interactions are important in determining structure, usually the proteins of interest will have intra- and/or intermolecular covalent disulfide bonds formed by two cysteine residues. For naturally occurring proteins and polypeptides or derivatives and variants thereof, the proper folding is typically the arrangement that results in optimal biological activity, and can conveniently be monitored by assays for activity, e.g. ligand binding, enzymatic activity, etc.

[0173] In some instances, for example where the desired product is of synthetic origin, assays based on biological activity will be less meaningful. The proper folding of such molecules may be determined on the basis of physical properties, energetic considerations, modeling studies, and the like.

[0174] The expression host may be further modified by the introduction of sequences encoding one or more enzymes that enhance folding and disulfide bond formation, i.e. foldases, chaperonins, etc. Such sequences may be constitutively or inducibly expressed in the host cell, using vectors, markers, etc. as known in the art. Preferably the sequences, including transcriptional regulatory elements sufficient for the desired pattern of expression, are stably integrated in the yeast genome through a targeted methodology.

[0175] For example, the eukaryotic protein disulfide isomerase (“PDI”) is not only an efficient catalyst of protein cysteine oxidation and disulfide bond isomerization, but also exhibits chaperone activity. Co-expression of PDI can facilitate the production of active proteins having multiple disulfide bonds. Also of interest is the expression of immunoglobulin heavy chain binding protein (“BIP”); cyclophilin; and the like.

[0176] Cultured mammalian cells are exemplary hosts for production of the disclosed anti-CoV-S antibodies and antigen-binding fragments thereof. As mentioned CHO cells are particularly suitable for expression of antibodies. Many procedures are known in the art for manufacturing monoclonal antibodies in mammalian cells. (See, Galfre, G. and Milstein, C., Methods Enzym., 73:3-46, 1981; Basalp et al., Turk. J. Biol., 24:189-196, 2000; Wurm, F. M., Nat. Biotechnol., 22:1393-1398, 2004; and Li et al., mAbs, 2 (5): 466-477, 2010). As mentioned in further detail infra, common host cell lines employed in mammalian monoclonal antibody manufacturing schemes include, but are not limited to, human embryonic retinoblast cell line PER.C6® (Crucell N.V., Leiden, The Netherlands), NS0 murine myeloma cells (Medical Research Council, London, UK), CV1 monkey kidney cell line, 293 human embryonic kidney cell line, BHK baby hamster kidney cell line, VERO African green monkey kidney cell line, human cervical carcinoma cell line HELA, MDCK canine kidney cells, BRL buffalo rat liver cells, W138 human lung cells, HepG2 human liver cells, MMT mouse mammary tumor cells, TRI cells, MRC5 cells, Fs4 cells, myeloma or lymphoma cells, or Chinese Hamster (Cricetulus griseus) Ovary (CHO) cells, and the like. Many different subclones or sub-cell lines of CHO cells known in the art that are useful and optimized for production of recombinant monoclonal antibodies, such as the DP12 (CHO K1 dhfr-) cell line, NS0 cells are a non-Ig secreting, non-light chain-synthesizing subclone of NS-1 cells that are resistant to azaguanine. Other Chinese Hamster and CHO cells are commercially available (from ATCC, etc.), including CHO-DXB11 (CHO-DUKX), CHO-pro3, CHO-DG44, CHO 1-15, CHO DP-12, Lec2, M1WT3, Lec8, pgsA-745, and the like, all of which are genetically altered to optimize the cell line for various parameters. Monoclonal antibodies are commonly manufactured using a batch fed method whereby the monoclonal antibody chains are expressed in a mammalian cell line and secreted into the tissue culture medium in a bioreactor. Medium (or feed) is continuously supplied to the bioreactor to maximize recombinant protein expression. Recombinant monoclonal antibody is then purified from the collected media. In some circumstances, additional steps are needed to reassemble the antibodies through reduction of disulfide bonds, etc. Such production methods can be scaled to be as large as 10,000 L in a single batch or more. It is now routine to obtain as much as 20 pg/cell/day through the use of such cell lines and methodologies, providing titers as high as 10 g/L or more, amounting to 15 to 100 kg from bioreactors of 10 kL to 25 kL. (Li et al., 2010). Various details of this production methodology, including cloning of the polynucleotides encoding the antibodies into expression vectors, transfecting cells with these expression vectors, selecting for transfected cells, and expressing and purifying the recombinant monoclonal antibodies from these cells are provided below.

[0177] For recombinant production of an anti-CoV-S antibody or antigen-binding fragment in mammalian cells, nucleic acids encoding the antibody or fragment thereof are generally inserted into a replicable vector for further cloning (amplification of the DNA) or for expression. DNA encoding the antibody is readily isolated or synthesized using conventional procedures (e.g., by using oligonucleotide probes that are capable of binding specifically to DNAs encoding the heavy and light chains of the antibody). The vector components generally include, but are not limited to, one or more of the following: a signal sequence, an origin of replication, one or more marker genes, an enhancer element, a promoter, and a transcription termination sequence. Selection of promoters, terminators, selectable markers, vectors, and other elements is a matter of routine design within the level of ordinary skill in the art. Many such elements are known in the art and are available through commercial suppliers.

[0178] The antibodies of this disclosure may be produced recombinantly not only directly, but also as a fusion polypeptide with a heterologous polypeptide, which is preferably a signal sequence or other polypeptide having a specific cleavage site at the N-terminus of the mature protein or polypeptide. The homologous or heterologous signal sequence selected preferably is one that is recognized and processed (i.e., cleaved by a signal peptidase) by the host cell. In mammalian cell expression, mammalian signal sequences as well as viral secretory leaders, for example, the herpes simplex gD signal, are available.

[0179] Such expression vectors and cloning vectors will generally contain a nucleic acid sequence that enables the vector to replicate in one or more selected host cells. Typically, in cloning vectors this sequence is one that enables the vector to replicate independently of the host chromosomal DNA, and includes origins of replication or autonomously replicating sequences. Such sequences are well known for a variety of bacteria, yeast, and viruses, e.g., the origin of replication from the plasmid pBR322 is suitable for most Gram-negative bacteria, the 2mu plasmid origin is suitable for yeast, and various viral origins (Simian Virus 40 (“SV40”), polyoma, adenovirus, vesicular stomatitis virus (“VSV”), or bovine papillomavirus (“BPV”) are useful for cloning vectors in mammalian cells. Generally, the origin of replication component is not needed for mammalian expression vectors (the SV40 origin may typically be used only because it contains the early promoter).

[0180] These vectors will also typically contain a selection gene, also termed a selectable marker. Typical selection genes encode proteins that (a) confer resistance to antibiotics or other toxins, e.g., ampicillin, neomycin, methotrexate, or tetracycline, (b) complement auxotrophic deficiencies, or (c) supply critical nutrients not available from complex media, e.g., the gene encoding D-alanine racemase for Bacilli.

[0181] One example of a selection scheme utilizes a drug to arrest growth of a host cell. Drug selection is generally used to select for cultured mammalian cells into which foreign DNA has been inserted. Such cells are commonly referred to as “transfectants”. Cells that have been cultured in the presence of the selective agent and are able to pass the gene of interest to their progeny are referred to as “stable transfectants.” Examples of such dominant selection use the drugs neomycin, mycophenolic acid, and hygromycin. An exemplary selectable marker is a gene encoding resistance to the antibiotic neomycin. Selection is carried out in the presence of a neomycin-type drug, such as G-418 or the like. Those cells that are successfully transformed with a heterologous gene produce a protein conferring drug resistance and thus survive the selection regimen.

[0182] Selection systems can also be used to increase the expression level of the gene of interest, a process referred to as “amplification.” Amplification of transfectants typically occurs by culturing the cells in the presence of a low level of the selective agent and then increasing the amount of selective agent to select for cells that produce high levels of the products of the introduced genes. Exemplary suitable selectable markers for mammalian cells are those that enable the identification of cells competent to take up the antibody nucleic acid, such as dihydrofolate reductase (“DHFR”), thymidine kinase, metallothionein-I and -II, preferably primate metallothionein genes, adenosine deaminase, ornithine decarboxylase, etc.

[0183] For example, an amplifiable selectable marker for mammalian cells is dihydrofolate reductase, which confers resistance to methotrexate. Other drug resistance genes (e.g. hygromycin resistance, multi-drug resistance, puromycin acetyltransferase) can also be used. Cells transformed with the DHFR selection gene are first identified by culturing all of the transformants in a culture medium that contains methotrexate (“MTX”), a competitive antagonist of DHFR. An appropriate host cell when wild-type DHFR is employed is the Chinese hamster ovary (“CHO”) cell line deficient in DHFR activity.

[0184] Alternatively, host cells (particularly wild-type hosts that contain endogenous DHFR) transformed or co-transformed with DNA sequences encoding antibody, wild-type DHFR protein, and another selectable marker such as aminoglycoside 3′-phosphotransferase (“APH”) can be selected by cell growth in medium containing a selection agent for the selectable marker such as an aminoglycosidic antibiotic, e.g., kanamycin, neomycin, or G-418. See U.S. Pat. No. 4,965,199.

[0185] These vectors may comprise an enhancer sequence that facilitates transcription of a DNA encoding the antibody. Many enhancer sequences are known from mammalian genes (for example, globin, elastase, albumin, alpha-fetoprotein, and insulin). A frequently used enhancer is one derived from a eukaryotic cell virus. Examples thereof include the SV40 enhancer on the late side of the replication origin (bp 100-270), the cytomegalovirus early promoter enhancer, the polyoma enhancer on the late side of the replication origin, and adenovirus enhancers (See also Yaniv, Nature, 297:17-18 (1982) on enhancing elements for activation of eukaryotic promoters). The enhancer may be spliced into the vector at a position 5′ or 3′ to the antibody-encoding sequence, but is preferably located at a site 5′ from the promoter.

[0186] Expression and cloning vectors will also generally comprise a promoter that is recognized by the host organism and is operably linked to the antibody nucleic acid. Promoter sequences are known for eukaryotes. Virtually all eukaryotic genes have an AT-rich region located approximately 25 to 30 bases upstream from the site where transcription is initiated. Another sequence found 70 to 80 bases upstream from the start of transcription of many genes is a CNCAAT region where N may be any nucleotide. At the 3′ end of most eukaryotic genes is an AATAAA sequence that may be the signal for addition of the poly A tail to the 3′ end of the coding sequence. All of these sequences are suitably inserted into eukaryotic expression vectors.

[0187] Antibody transcription from vectors in mammalian host cells may be controlled, for example, by promoters obtained from the genomes of viruses such as polyoma virus, fowlpox virus, adenovirus (such as Adenovirus 2), BPV, avian sarcoma virus, cytomegalovirus, a retrovirus, hepatitis-B virus, and most preferably SV40, from heterologous mammalian promoters, e.g., the actin promoter or an immunoglobulin promoter, from heat-shock promoters, provided such promoters are compatible with the host cell systems.

[0188] The early and late promoters of the SV40 virus are conveniently obtained as an SV40 restriction fragment that also contains the SV40 viral origin of replication. The immediate early promoter of the human cytomegalovirus is conveniently obtained as a HindIII E restriction fragment. A system for expressing DNA in mammalian hosts using the BPV as a vector is disclosed in U.S. Pat. No. 4,419,446. A modification of this system is described in U.S. Pat. No. 4,601,978. See also Reyes et al., Nature, 297:598-601 (1982) on expression of human beta-interferon cDNA in mouse cells under the control of a thymidine kinase promoter from herpes simplex virus. Alternatively, the Rous sarcoma virus long terminal repeat can be used as the promoter.

[0189] Strong transcription promoters can be used, such as promoters from SV40, cytomegalovirus, or myeloproliferative sarcoma virus. See, e.g., U.S. Pat. No. 4,956,288 and U.S. Patent Publication No. 20030103986. Other suitable promoters include those from metallothionein genes (U.S. Pat. Nos. 4,579,821 and 4,601,978) and the adenovirus major late promoter. Expression vectors for use in mammalian cells include pZP-1, pZP-9, and pZMP21, which have been deposited with the American Type Culture Collection, 10801 University Blvd., Manassas, VA. USA under accession numbers 98669, 98668, and PTA-5266, respectively, and derivatives of these vectors.

[0190] Expression vectors used in eukaryotic host cells (yeast, fungus, insect, plant, animal, human, or a nucleated cell from other multicellular organism) will also generally contain sequences necessary for the termination of transcription and for stabilizing the mRNA. Such sequences are commonly available from the 5′ and, occasionally 3′, untranslated regions of eukaryotic or viral DNAs or cDNAs. These regions contain nucleotide segments transcribed as polyadenylated fragments in the untranslated portion of the mRNA encoding the antibody. One useful transcription termination component is the bovine growth hormone polyadenylation region. See WO 94/11026 and the expression vector disclosed therein.

[0191] Suitable host cells for cloning or expressing the subject antibodies include prokaryote, yeast, or higher eukaryote cells described above. However, interest has been greatest in vertebrate cells, and propagation of vertebrate cells in culture has become a routine procedure. Examples of useful mammalian host cell lines are monkey kidney CV1 line transformed by SV40 (COS-1 (ATCC No. CRL 1650); and COS-7, ATCC CRL 1651); human embryonic kidney line (293 or 293 cells subcloned for growth in suspension culture, (ATCC No. CRL 1573; Graham et al., J. Gen. Virol., 36:59-72 (1977)); baby hamster kidney cells (BHK, ATCC CCL 10, ATCC No. CRL 1632; BHK 570, ATCC No. CRL 10314); CHO cells (CHO-K1, ATCC No. CCL 61; CHO-DG44, Urlaub et al., Proc. Natl. Acad. Sci. USA, 77:4216-4220 (1980)); mouse sertoli cells (TM4, Mather, Biol. Reprod., 23:243-251 (1980)); monkey kidney cells (CV1 ATCC CCL 70); African green monkey kidney cells (VERO-76, ATCC CRL-1587); human cervical carcinoma cells (HELA, ATCC CCL 2); canine kidney cells (MDCK, ATCC CCL 34); buffalo rat liver cells (BRL 3A, ATCC CRL 1442); human lung cells (W138, ATCC CCL 75); human liver cells (Hep G2, HB 8065); mouse mammary tumor (MMT 060562, ATCC CCL51); TRI cells (Mather et al., Annals N.Y. Acad. Sci., 383:44-68 (1982)); MRC 5 cells; FS4 cells; and a human hepatoma line (Hep G2). Additional suitable cell lines are known in the art and available from public depositories such as the American Type Culture Collection, Manassas, VA.

[0192] Host cells are transformed with the above-described expression or cloning vectors for antibody production and cultured in conventional nutrient media modified as appropriate for inducing promoters, selecting transformants, or amplifying the genes encoding the desired sequences as discussed supra.

[0193] The mammalian host cells used to produce the antibody of this disclosure may be cultured in a variety of media. Commercially available media such as Ham's F10 (Sigma-Aldrich Corporation, St. Louis, MO), Minimal Essential Medium ((“MEM” (Sigma-Aldrich Corporation, St. Louis, MO), Roswell Park Memorial Institute-1640 medium (“RPMI-1640”, Sigma-Aldrich Corporation, St. Louis, MO), and Dulbecco's Modified Eagle's Medium ((“DMEM” Sigma-Aldrich Corporation, St. Louis, MO) are suitable for culturing the host cells. In addition, any of the media described in Ham et al., Meth. Enz., 58:44 (1979), Barnes et al., Anal. Biochem., 102:255 (1980), U.S. Pat. Nos. 4,767,704; 4,657,866; 4,927,762; 4,560,655; or 5,122,469; WO 90/03430; WO 87/00195; or Reexam U.S. Pat. No. 30,985 can be used as culture media for the host cells. Any of these media may be supplemented as necessary with hormones and/or other growth factors (such as insulin, transferrin, or epidermal growth factor), salts (such as sodium chloride, calcium, magnesium, and phosphate), buffers (such as HEPES), nucleotides (such as adenosine and thymidine), antibiotics (such as Gentamycin drug), trace elements (defined as inorganic compounds usually present at final concentrations in the micromolar range), and glucose or an equivalent energy source. Any other necessary supplements may also be included at appropriate concentrations that would be known to those skilled in the art. The culture conditions, such as temperature, pH, and the like, are those previously used with the host cell selected for expression, and will be apparent to the ordinarily skilled artisan. Methods of development and optimization of media and culture conditions are known in the art (See, Gronemeyer et al., Bioengineering, 1 (4): 188-212, 2014).

[0194] After culture conditions are optimized and a preferred cell line clone is selected, these cells are cultured (either adherent cells or suspension cultures) most typically in a batch-fed process in a bioreactor (many models are commercially available) that involves continuously feeding the cell culture with medium and feed, optimized for the particular cell line chosen and selected for this purpose. (See, Butler, M., Appl. Microbiol. Biotechnol., 68:283-291, 2005; and Kelley, B., mAb, 1 (5): 443-452, 2009). Perfusion systems are also available in which media and feed are continuously supplied to the culture while the same volume of media is being withdrawn from the bioreactor. (Wurm, 2004). Synthetic media, also commercially available, are available for growing cells in a batch-fed culture, avoiding the possibility of contamination from outside sources, such as with the use of animal components, such as bovine serum albumin, etc. However, animal-component-free hydrolysates are commercially available to help boost cell density, culture viability and productivity. (Li et al., 2010). Many studies have been performed in an effort to optimize cell culture media, including careful attention to head space available in roller bottles, redox potentials during growth and expression phases, presence of reducing agents to maintain disulfide bonds during production, etc. (See, for instance, Hutterer et al., mAbs, 5 (4): 608-613, 2013; and Mullan et al., BMC Proceed., 5 (Suppl 8): P110, 2011). Various methodologies have been developed to address the possibility of harmful oxidation during recombinant monoclonal antibody production. (See, for example, U.S. Pat. No. 8,574,869). Cultured cells may be grown by feeding nutrients continuously or as separately administered amounts. Often various process parameters such as cell concentration, pH, temperature, CO₂, dO₂, osmolality, amount of metabolites such as glucose, lactate, glutamine and glutamate, and the like, are monitored by the use of probes during the cell growth either on-line by direct connection to calibrated analyzers or off-line by intervention of operators. The culturing step also typically involves ensuring that the cells growing in culture maintain the transfected recombinant genes by any means known in the art for cell selection.

[0195] Following fermentation, i.e., upon reaching maximum cell growth and recombinant protein expression, the culturing step is typically followed by a harvesting step, whereby the cells are separated from the medium and a harvested cell culture media is thereby obtained. (See, Liu et al., mAbs, 2 (5): 480-499, 2010). Typically, various purification steps, involving column chromatography and the like, follow culturing to separate the recombinant monoclonal antibody from cell components and cell culture media components. The exact purification steps needed for this phase of the production of recombinant monoclonal antibodies depends on the site of expression of the proteins, i.e., in the cytosol of the cells themselves, or the more commonly preferred route of protein excreted into the cell culture medium. Various cell components may be separated using techniques known in the art such as differential centrifugation techniques, gravity-based cell settling, and/or size exclusion chromatograph/filtration techniques that can include tangential flow micro-filtration or depth filtration. (See, Pollock et al., Biotechnol. Bioeng., 110:206-219, 2013, and Liu et al., 2010). Centrifugation of cell components may be achieved on a large scale by use of continuous disk stack centrifuges followed by clarification using depth and membrane filters. (See, Kelley, 2009). Most often, after clarification, the recombinant protein is further purified by Protein A chromatography due to the high affinity of Protein A for the Fc domain of antibodies, and typically occurs using a low pH/acidification elution step (typically the acidification step is combined with a precautionary virus inactivation step). Flocculation and/or precipitation steps using acidic or cationic polyelectrolytes may also be employed to separate animal cells in suspension cultures from soluble proteins. (Liu et al., 2010). Lastly, anion- and cation-exchange chromatography, hydrophobic interaction chromatograph (“HIC”), hydrophobic charge induction chromatograph (HCIC), hydroxyapatite chromatography using ceramic hydroxyapatite (Ca₅(PO₄)₃OH)₂, and combinations of these techniques are typically used to polish the solution of recombinant monoclonal antibody. Final formulation and concentration of the desired monoclonal antibody may be achieved by use of ultracentrifugation techniques. Purification yields are typically 70 to 80%. (Kelley, 2009).

[0196] The terms “desired protein” or “desired antibody” herein are used interchangeably and refer generally to a parent antibody specific to a target, i.e., CoV-S or a chimeric or humanized antibody or a binding portion thereof derived therefrom as described herein. The term “antibody” is intended to include any polypeptide chain-containing molecular structure with a specific shape that fits to and recognizes an epitope, where one or more non-covalent binding interactions stabilize the complex between the molecular structure and the epitope. The archetypal antibody molecule is the immunoglobulin, and all types of immunoglobulins, IgG, IgM, IgA, IgE, IgD, etc., from all sources, e.g. human, rodent, rabbit, cow, sheep, pig, dog, other mammals, chicken, other avians, etc., are considered to be “antibodies.” Examples thereof include chimeric antibodies, human antibodies and other non-human mammalian antibodies, humanized antibodies, single chain antibodies (such as scFvs), camelbodies, nanobodies, IgNAR (single-chain antibodies which may be derived from sharks, for example), small-modular immunopharmaceuticals (“SMIPs”), and antibody fragments such as Fabs, Fab′, F(ab′)₂, and the like (See Streltsov et al., Protein Sci., 14 (11): 2901-9 (2005); Greenberg et al., Nature, 374 (6518): 168-73 (1995); Nuttall et al., Mol. Immunol., 38 (4): 313-26 (2001); Hamers-Casterman et al., Nature, 363 (6428): 446-8 (1993); Gill et al., Curr. Opin. Biotechnol., (6): 653-8 (2006)).

[0197] For example, antibodies or antigen-binding fragments thereof may be produced by genetic engineering. In this technique, as with other methods, antibody-producing cells are sensitized to the desired antigen or immunogen. The messenger RNA isolated from antibody producing cells is used as a template to make cDNA using PCR amplification. A library of vectors, each containing one heavy chain gene and one light chain gene retaining the initial antigen specificity, is produced by insertion of appropriate sections of the amplified immunoglobulin cDNA into the expression vectors. A combinatorial library is constructed by combining the heavy chain gene library with the light chain gene library. This results in a library of clones that co-express a heavy and light chain (resembling the Fab fragment or antigen-binding fragment of an antibody molecule). The vectors that carry these genes are co-transfected into a host cell. When antibody gene synthesis is induced in the transfected host, the heavy and light chain proteins self-assemble to produce active antibodies that can be detected by screening with the antigen or immunogen.

[0198] Antibody coding sequences of interest include those encoded by native sequences, as well as nucleic acids that, by virtue of the degeneracy of the genetic code, are not identical in sequence to the disclosed nucleic acids, and variants thereof. Variant polypeptides can include amino acid (“aa”) substitutions, additions, or deletions. The amino acid substitutions can be conservative amino acid substitutions or substitutions to eliminate non-essential amino acids, such as to alter a glycosylation site, or to minimize misfolding by substitution or deletion of one or more cysteine residues that are not necessary for function. Variants can be designed so as to retain or have enhanced biological activity of a particular region of the protein (e.g., a functional domain, catalytic amino acid residues, etc). Variants also include fragments of the polypeptides disclosed herein, particularly biologically active fragments and/or fragments corresponding to functional domains. Techniques for in vitro mutagenesis of cloned genes are known. Also included in the subject disclosure are polypeptides that have been modified using ordinary molecular biological techniques so as to improve their resistance to proteolytic degradation or to optimize solubility properties or to render them more suitable as a therapeutic agent.

[0199] Chimeric antibodies may be made by recombinant means by combining the VL and VH regions, obtained from antibody producing cells of one species with the constant light and heavy chain regions from another. Typically, chimeric antibodies utilize rodent or rabbit variable regions and human constant regions, in order to produce an antibody with predominantly human domains. The production of such chimeric antibodies is well known in the art, and may be achieved by standard means (as described, e.g., in U.S. Pat. No. 5,624,659, incorporated herein by reference in its entirety). It is further contemplated that the human constant regions of chimeric antibodies of the disclosure may be selected from IgG1, IgG2, IgG3, and IgG4 constant regions.

[0200] Humanized antibodies are engineered to contain even more human-like immunoglobulin domains, and incorporate only the complementarity determining regions of the animal-derived antibody. This is accomplished by carefully examining the sequence of the hyper-variable loops of the variable regions of the monoclonal antibody and fitting them to the structure of the human antibody chains. Although facially complex, the process is straightforward in practice. See, e.g., U.S. Pat. No. 6,187,287, incorporated fully herein by reference.

[0201] In addition to entire immunoglobulins (or their recombinant counterparts), immunoglobulin fragments comprising the epitope binding site (e.g., Fab′, F(ab′)₂, or other fragments) may be synthesized. “Fragment” or minimal immunoglobulins may be designed utilizing recombinant immunoglobulin techniques. For instance, “Fv” immunoglobulins for use in the present disclosure may be produced by synthesizing a fused variable light chain region and a variable heavy chain region. Combinations of antibodies are also of interest, e.g. diabodies, which comprise two distinct Fv specificities. In another embodiment, small molecule immunopharmaceuticals (“SMIPs”), camelbodies, nanobodies, and IgNAR are encompassed by immunoglobulin fragments.

[0202] Immunoglobulins and fragments thereof may be modified post-translationally, e.g. to add effector moieties such as chemical linkers, detectable moieties, such as fluorescent dyes, enzymes, toxins, substrates, bioluminescent materials, radioactive materials, chemiluminescent moieties, and the like, or specific binding moieties, such as streptavidin, avidin, or biotin, and the like may be utilized in the methods and compositions of the present disclosure. Examples of additional effector molecules are provided infra.

[0203] A polynucleotide sequence “corresponds” to a polypeptide sequence if translation of the polynucleotide sequence in accordance with the genetic code yields the polypeptide sequence (i.e., the polynucleotide sequence “encodes” the polypeptide sequence), one polynucleotide sequence “corresponds” to another polynucleotide sequence if the two sequences encode the same polypeptide sequence.

[0204] A “heterologous” region or domain of a DNA construct is an identifiable segment of DNA within a larger DNA molecule that is not found in association with the larger molecule in nature. Thus, when the heterologous region encodes a mammalian gene, the DNA flanking the gene usually does not flank the mammalian genomic DNA in the genome of the source organism. Another example of a heterologous region is a construct where the coding sequence itself is not found in nature (e.g., a cDNA where the genomic coding sequence contains introns or synthetic sequences having codons different than the native gene). Allelic variations or naturally-occurring mutational events do not give rise to a heterologous region of DNA as defined herein.

[0205] A “coding sequence” is an in-frame sequence of codons that correspond to or encode a protein or peptide sequence. Two coding sequences correspond to each other if the sequences or their complementary sequences encode the same amino acid sequences. A coding sequence in association with appropriate regulatory sequences may be transcribed and translated into a polypeptide. A polyadenylation signal and transcription termination sequence will usually be located 3′ to the coding sequence. A “promoter sequence” is a DNA regulatory region capable of initiating transcription of a downstream (3′ direction) coding sequence, and typically contain additional sites for binding of regulatory molecules, e.g., transcription factors, that affect the transcription of the coding sequence. A coding sequence is “under the control” of the promoter sequence or “operatively linked” to the promoter when RNA polymerase binds the promoter sequence in a cell and transcribes the coding sequence into mRNA, which is then in turn translated into the protein encoded by the coding sequence.

[0206] The general structure of antibodies in vertebrates now is well understood. See Edelman, G. M., Ann. N.Y. Acad. Sci., 190:5 (1971). Antibodies consist of two identical light polypeptide chains of molecular weight approximately 23,000 daltons (the “light chain”), and two identical heavy chains of molecular weight 53,000-70,000 (the “heavy chain”). The four chains are joined by disulfide bonds in a “Y” configuration wherein the light chains bracket the heavy chains starting at the mouth of the “Y” configuration. The “branch” portion of the “Y” configuration is designated the Fab region; the stem portion of the “Y” configuration is designated the Fc region. The amino acid sequence orientation runs from the N-terminal end at the top of the “Y” configuration to the C-terminal end at the bottom of each chain. The N-terminal end possesses the variable region having specificity for the antigen that elicited it, and is approximately 100 amino acids in length, there being slight variations between light and heavy chain and from antibody to antibody.

[0207] The variable region is linked in each chain to a constant region that extends the remaining length of the chain and that within a particular class of antibody does not vary with the specificity of the antibody (i.e., the antigen eliciting it). There are five known major classes of constant regions that determine the class of the immunoglobulin molecule (IgG, IgM, IgA, IgD, and IgE corresponding to γ, μ, α, δ, and ε (gamma, mu, alpha, delta, or epsilon) heavy chain constant regions). The constant region or class determines subsequent effector function of the antibody, including activation of complement (see Kabat, E. A., Structural Concepts in Immunology and Immunochemistry, 2nd Ed., p. 413-436, New York, NY: Holt, Rinehart, Winston (1976)), and other cellular responses (see Andrews et al., Clinical Immunology, pp. 1-18, W. B. Sanders, Philadelphia, PA (1980); Kohl et al., Immunology, 48:187 (1983)); while the variable region determines the antigen with which it will react. Light chains are classified as either κ (kappa) or λ (lambda). Each heavy chain class can be prepared with either kappa or lambda light chain. The light and heavy chains are covalently bonded to each other, and the “tail” portions of the two heavy chains are bonded to each other by covalent disulfide linkages when the immunoglobulins are generated either by hybridomas or by B-cells.

[0208] The expression “variable region” or “VR” refers to the domains within each pair of light and heavy chains in an antibody that are involved directly in binding the antibody to the antigen. Each heavy chain has at one end a variable region (VH) followed by a number of constant domains. Each light chain has a variable region (VL) at one end and a constant domain at its other end; the constant domain of the light chain is aligned with the first constant domain of the heavy chain, and the light chain variable domain is aligned with the variable domain of the heavy chain.

[0209] The expressions “complementarity-determining region,” “hypervariable region,” or “CDR” refer to one or more of the hyper-variable or complementarity-determining regions (“CDRs”) found in the variable regions of light or heavy chains of an antibody (See Kabat et al., Sequences of Proteins of Immunological Interest, 4^{th} ed., Bethesda, MD: U.S. Dept. of Health and Human Services, Public Health Service, National Institutes of Health (1987)). These expressions include the hypervariable regions as defined by Kabat et al., (Sequences of Proteins of Immunological Interest, NIH Publication No. 91-3242, Bethesda, MD: U.S. Dept. of Health and Human Services, National Institutes of Health (1983)) or the hypervariable loops in 3-dimensional structures of antibodies (Chothia and Lesk, J. Mol. Biol., 196:901-917 (1987)). The CDRs in each chain are held in close proximity by framework regions (“FRs”) and, with the CDRs from the other chain, contribute to the formation of the antigen binding site. Within the CDRs there are select amino acids that have been described as the selectivity determining regions (“SDRs”) that represent the critical contact residues used by the CDR in the antibody-antigen interaction (see Kashmiri et al., Methods, 36 (1): 25-34 (2005)).

[0210] An “isolated antibody”, as used herein, is intended to refer to an antibody that is substantially free of other antibodies having different antigenic specificities (e.g., an isolated antibody that specifically binds CoV-S is substantially free of antibodies that specifically bind antigens other than CoV-S). An isolated antibody that specifically binds CoV-S may, however, have cross-reactivity to other antigens, such as CoV-S molecules from other species. Moreover, an isolated antibody may be substantially free of other cellular material and/or chemicals.

[0211] The phrase “specifically binds to CoV-S” as used herein, refers to the ability of an anti-CoV-S antibody or antigen-binding fragment thereof to interact with CoV-S with a dissociated constant (KD) of, for example, about 1,000 nM or less, about 500 nM or less, about 200 nM or less, about 100 nM or less, about 75 nM or less, about 25 nM or less, about 10 nM or less, about 1 nM or less, about 100 pM nM or less, about 10 pM nM or less, about 1 pM or less, or about 0.1 pM or less. In another embodiment, the phrase “specifically binds to CoV-S”, as used herein, refers to the ability of an anti-CoV-S antibody or antigen-binding fragment thereof to interact with CoV-S with a dissociation constant (KD) of between about 0.1 pM to 1,000 nM, between about 1 pM to 500 nM, between about 10 pM to 100 nM, between about 0.1 nM to 50 nM, or between about 1 nM to 50 nM. In one embodiment, KD is determined by surface plasmon resonance, ELISAs, radioimmunoassays, bio-layer interferometry (BLI), or by any other methods known in the art.

[0212] An “epitope” or “binding site” is an area or region on an antigen to which an antigen-binding peptide (such as an antibody) specifically binds. A protein epitope may comprise amino acid residues directly involved in the binding (also called immunodominant component of the epitope) and other amino acid residues, which are not directly involved in the binding, such as amino acid residues that are effectively blocked by the specifically antigen binding peptide (in other words, the amino acid residue is within the “footprint” of the specifically antigen binding peptide). The term epitope herein includes both types of amino acid binding sites in any particular region of CoV-S, e.g., SARS-COV-S or SARS-COV-2-S, that specifically binds to an anti-CoV-S antibody. In some embodiments, the epitope is a conserved site within the spike protein, e.g., SARS-COV-S or SARS-COV-2-S, e.g., the CR3022 site and the N343 proteoglycan site in the receptor binding domain (RBD), or the S2 domain. CoV-S may comprise a number of different epitopes, which may include, without limitation, (1) linear peptide antigenic determinants, (2) conformational antigenic determinants that consist of one or more non-contiguous amino acids located near each other in a mature CoV-S conformation; and (3) post-translational antigenic determinants that consist, either in whole or part, of molecular structures covalently attached to a CoV-S protein such as carbohydrate groups. In particular, the term “epitope” includes the specific residues in a protein or peptide, e.g., CoV-S, which are involved in the binding of an antibody to such protein or peptide as determined by known and accepted methods such as alanine scanning techniques or the use of various S protein portions with varying lengths.

[0213] The phrase that an antibody (e.g., first antibody) binds “substantially” or “at least partially” the same epitope as another antibody (e.g., second antibody) means that the epitope binding site for the first antibody comprises at least 10%, 20%, 30%, 40%, 50%, 60%, 70%, 80%, 90%, or more of the amino acid residues on the antigen that constitutes the epitope binding site of the second antibody. Also, that a first antibody binds substantially or partially the same or overlapping epitope as a second antibody means that the first and second antibodies compete in binding to the antigen, as described above. Thus, the term “binds to substantially the same epitope or determinant as” a monoclonal antibody means that an antibody “competes” with the antibody.

[0214] The phrase “binds to the same or overlapping epitope or determinant as” an antibody of interest means that an antibody “competes” with said antibody of interest for at least one, (e.g., at least 2, at least 3, at least 4, at least 5) or all residues on CoV-S to which said antibody of interest specifically binds. The identification of one or more antibodies that bind(s) to substantially or essentially the same epitope as the monoclonal antibodies described herein can be readily determined using alanine scanning. Additionally, any one of variety of immunological screening assays in which antibody competition can be assessed. A number of such assays are routinely practiced and well known in the art (see, e.g., U.S. Pat. No. 5,660,827, issued Aug. 26, 1997, which is specifically incorporated herein by reference). It will be understood that actually determining the epitope to which an antibody described herein binds is not in any way required to identify an antibody that binds to the same or substantially the same or overlapping epitope as the monoclonal antibody described herein.

[0215] For example, where the test antibodies to be examined are obtained from different source animals, or are even of a different Ig isotype, a simple competition assay may be employed in which the control antibody is mixed with the test antibody and then applied to a sample containing CoV-S. Protocols based upon ELISAs, radioimmunoassays, Western blotting, and the use of BIACORE® (GE Healthcare Life Sciences, Marlborough, MA) analysis are suitable for use in such simple competition studies.

[0216] In certain embodiments, the control anti-CoV-S antibody is pre-mixed with varying amounts of the test antibody (e.g., in ratios of about 1:1, 1:2, 1:10, or about 1:100) for a period of time prior to applying to the CoV-S (e.g., SARS-COV-S or SARS-COV-2-S) antigen sample. In other embodiments, the control and varying amounts of test antibody can simply be added separately and admixed during exposure to the SARS-COV-S or SARS-COV-2-S antigen sample. As long as bound antibodies can be distinguished from free antibodies (e.g., by using separation or washing techniques to eliminate unbound antibodies) and control antibody from the test antibody (e.g., by using species specific or isotype specific secondary antibodies or by specifically labeling the control antibody with a detectable label) it can be determined if the test antibody reduces the binding of the control antibody to the SARS-CoV-S or SARS-COV-2-S antigens, indicating that the test antibody recognizes substantially the same epitope as the control anti-CoV-S antibody. The binding of the (labeled) control antibody in the presence of a completely irrelevant antibody (that does not bind CoV-S) can serve as the control high value. The control low value can be obtained by incubating the labeled control antibody with the same but unlabeled control antibody, where competition would occur and reduce binding of the labeled antibody. In a test assay, a significant reduction in labeled antibody reactivity in the presence of a test antibody is indicative of a test antibody that recognizes substantially the same epitope, i.e., one that competes with the labeled control antibody. For example, any test antibody that reduces the binding of the control antibody to SARS-COV-S or SARS-COV-2-S by at least about 50%, such as at least about 60%, or more preferably at least about 70% (e.g., about 65-100%), at any ratio of test antibody between about 1:1 or 1:10 and about 1:100 is considered to be an antibody that binds to substantially the same or overlapping epitope or determinant as the control antibody.

[0217] Preferably, such test antibody will reduce the binding of the control antibody to SARS-COV-S or SARS-COV-2-S (or another CoV-S) antigen preferably at least about 50%, at least about 60%, at least about 80%, or at least about 90% (e.g., about 95%) of the binding of the control antibody observed in the absence of the test antibody.

[0218] A simple competition assay in which a test antibody is applied at saturating concentration to a surface onto which SARS-COV-S or SARS-COV-2-S (or another CoV-S) is immobilized also may be advantageously employed. The surface in the simple competition assay is preferably a BIACORE® (GE Healthcare Life Sciences, Marlborough, MA) chip (or other media suitable for surface plasmon resonance (“SPR”) analysis). The binding of a control antibody that binds SARS-COV-S or SARS-CoV-2-S to the COV-S-coated surface is measured. This binding to the SARS-COV-S- or SARS-COV-2-S-containing surface of the control antibody alone is compared with the binding of the control antibody in the presence of a test antibody. A significant reduction in binding to the SARS-COV-S- or SARS-COV-2-S-containing surface by the control antibody in the presence of a test antibody indicates that the test antibody recognizes substantially the same epitope as the control antibody such that the test antibody “competes” with the control antibody. Any test antibody that reduces the binding of control antibody by at least about 20% or more, at least about 40%, at least about 50%, at least about 70%, or more, can be considered to be an antibody that binds to substantially the same epitope or determinant as the control antibody. Preferably, such test antibody will reduce the binding of the control antibody to SARS-COV-S or SARS-COV-2-S by at least about 50% (e.g., at least about 60%, at least about 70%, or more). It will be appreciated that the order of control and test antibodies can be reversed; i.e. the control antibody can be first bound to the surface and then the test antibody is brought into contact with the surface thereafter in a competition assay. Preferably, the “sandwich-style” binding assay infra is used. Alternatively, the antibody having greater affinity for SARS-COV-S or SARS-COV-2-S antigen is bound to the SARS-COV-S- or SARS-COV-2-S-containing surface first, as it will be expected that the decrease in binding seen for the second antibody (assuming the antibodies are competing) will be of greater magnitude. Further examples of such assays are provided in e.g., Saunal and Regenmortel, J. Immunol. Methods, 183:33-41 (1995), the disclosure of which is incorporated herein by reference.

[0219] In addition, whether an antibody binds the same or overlapping epitope(s) on COV-S as another antibody or the epitope bound by a test antibody may in particular be determined using a Western-blot based assay. In this assay a library of peptides corresponding to the antigen bound by the antibody, the CoV-S protein, is made, that comprise overlapping portions of the protein, typically 10-25, 10-20, or 10-15 amino acids long. These different overlapping amino acid peptides encompassing the CoV-S sequence are synthesized and covalently bound to a PEPSPOTS™ nitrocellulose membrane (JPT Peptide Technologies, Berlin, Germany). Blots are then prepared and probed according to the manufacturer's recommendations.

[0220] Essentially, the immunoblot assay then detects by fluorometric means what peptides in the library bind to the test antibody and thereby can identify what residues on the antigen, i.e., COV-S, interact with the test antibody. (See U.S. Pat. No. 7,935,340, incorporated by reference herein).

[0221] Various epitope mapping techniques are known in the art. By way of example, X-ray co-crystallography of the antigen and antibody; NMR; SPR (e.g., at 25° or 37° C.); array-based oligo-peptide scanning (or “pepscan analysis”); site-directed mutagenesis (e.g., alanine scanning); mutagenesis mapping; hydrogen-deuterium exchange; phage display; and limited proteolysis are all epitope mapping techniques that are well known in the art (See, e.g., Epitope Mapping Protocols: Second Edition, Methods in Molecular Biology., editors Mike Schutkowski and Ulrich Reineke, 2^{nd} Ed., New York, NY: Humana Press (2009), and Epitope Mapping Protocols, Methods in Molecular Biology, editor Glenn Morris, 1^{st} Ed., New York, NY: Humana Press (1996), both of which are herein incorporated by referenced in their entirety).

[0222] The identification of one or more antibodies that bind(s) to substantially or essentially the same epitope as the monoclonal antibodies described herein, e.g., antibodies described in Tables 3-6, and e.g., VYD225, VYD224 (also known as ADI-80707), ADI-75696, VYD223 (also known as ADI-75865), ADI-75864, ADI-75620, ADI-75738, ADI-75700, ADI-75859, ADI-75684, ADI-75754, ADI-75648, ADI-75632, ADI-75741, ADI-75725, ADI-75717, ADI-75706, ADI-75699, ADI-75747, or ADI-75773, can be readily determined using any one of variety of immunological screening assays in which antibody competition can be assessed. A number of such assays are routinely practiced and well known in the art (see, e.g., U.S. Pat. No. 5,660,827, issued Aug. 26, 1997, which is incorporated herein by reference). It will be understood that determining the epitope to which an antibody described herein binds is not in any way required to identify an antibody that binds to the same or substantially the same epitope as the monoclonal antibody described herein.

[0223] For example, where the test antibodies to be examined are obtained from different source animals, or are even of a different Ig isotype, a simple competition assay may be employed in which the control antibody (for example, one of the antibodies disclosed in Tables 3-6) is mixed with the test antibody and then applied to a sample containing either or both SARS-COV-S or SARS-COV-2-S, each of which is known to be bound by the antibodies. Protocols based upon ELISAs, radioimmunoassays, Western blotting, and BIACORE® (GE Healthcare Life Sciences, Marlborough, MA) analysis (as described in the Examples section herein) are suitable for use in such simple competition studies.

[0224] In certain embodiments, the method comprises pre-mixing the control antibody with varying amounts of the test antibody (e.g., in ratios of about 1:1, 1:2, 1:10, or about 1:100) for a period of time prior to applying to the CoV-S antigen sample. In other embodiments, the control and varying amounts of test antibody can be added separately and admixed during exposure to the CoV-S antigen sample. As long as bound antibodies can be distinguished from free antibodies (e.g., by using separation or washing techniques to eliminate unbound antibodies) and control antibody from the test antibody (e.g., by using species specific or isotype specific secondary antibodies or by specifically labelling the control antibody with a detectable label), the method can be used to determine that the test antibody reduces the binding of the control antibody to the COV-S antigen, indicating that the test antibody recognizes substantially the same epitope as the control antibody (e.g., one of the antibodies disclosed in Tables 3-6). The binding of the (labeled) control antibody in the presence of a completely irrelevant antibody (that does not bind CoV-S) can serve as the control high value. The control low value can be obtained by incubating the labeled control antibody with the same but unlabeled control antibody, where competition would occur and reduce binding of the labeled antibody. In a test assay, a significant reduction in labeled antibody reactivity in the presence of a test antibody is indicative of a test antibody that recognizes substantially the same epitope, i.e., one that competes with the labeled control antibody. For example, any test antibody that reduces the binding of one or more antibodies disclosed in Tables 3-6, to both of SARS-COV-S or SARS-COV-2-S antigens by at least about 50%, such as at least about 60%, or more preferably at least about 70% (e.g., about 65-100%), at any ratio of control antibody:test antibody between about 1:1 or 1:10 and about 1:100 is considered to be an antibody that binds to substantially the same epitope or determinant as the antibody. Preferably, such test antibody will reduce the binding of one or more of the antibodies disclosed in Tables 3-6, to at least one, preferably each, of the SARS-COV-S or SARS-COV-2-S antigens preferably at least about 50%, at least about 60%, at least about 80% or at least about 90% (e.g., about 95%) of the binding of one or more of the antibodies disclosed in Tables 3-6, observed in the absence of the test antibody. These methods can be adapted to identify and/or evaluate antibodies that compete with other control antibodies.

[0225] A simple competition assay in which a test antibody is applied at saturating concentration to a surface onto which either SARS-COV-S or SARS-COV-2-S, or both, are immobilized also may be advantageously employed. The surface in the simple competition assay is preferably of a media suitable for OCTET® and/or PROTEON®. The binding of a control antibody (e.g., one or more antibodies disclosed in Tables 3-6) to the CoV-S-coated surface is measured. This binding to the CoV-S-containing surface of the control antibody alone is compared with the binding of the control antibody in the presence of a test antibody. A significant reduction in binding to the CoV-S-containing surface by the control antibody in the presence of a test antibody indicates that the test antibody recognizes substantially the same epitope as the control antibody such that the test antibody “competes” with the control antibody. Any test antibody that reduces the binding of control antibody (e.g., one or more antibodies disclosed in Tables 3-6) to both of SARS-COV-S and SARS-COV-2-S antigens by at least about 20% or more, at least about 40%, at least about 50%, at least about 70%, or more, can be considered to be an antibody that binds to substantially the same epitope or determinant as the control antibody (e.g., one or more antibodies disclosed in Tables 3-6). Preferably, such test antibody will reduce the binding of the control antibody (e.g., one or more antibodies disclosed in Tables 3-6) to the CoV-S antigen by at least about 50% (e.g., at least about 60%, at least about 70%, or more). It will be appreciated that the order of control and test antibodies can be reversed; i.e. the control antibody can be first bound to the surface and then the test antibody is brought into contact with the surface thereafter in a competition assay. Preferably, the antibody having higher affinity for SARS-COV-S and SARS-CoV-2-S is bound to the CoV-S-containing surface first, as it will be expected that the decrease in binding seen for the second antibody (assuming the antibodies are competing) will be of greater magnitude. Further examples of such assays are provided in, e.g., Saunal and Regenmortel, J. Immunol. Methods, 183:33-41 (1989), the disclosure of which is incorporated herein by reference.

[0226] Determination of whether an antibody, antigen-binding fragment thereof, or antibody derivative, e.g., an affinity-matured antibody or antigen binding fragment of any of the anti-CoV-S antibodies exemplified herein, binds within one of the epitope regions defined above can be carried out in ways known to the person skilled in the art. In another example of such mapping/characterization methods, an epitope region for an anti-CoV-S antibody may be determined by epitope “footprinting” using chemical modification of the exposed amines/carboxyls in the SARS-COV-S and SARS-COV-2-S protein. One specific example of such a foot-printing technique is the use of hydrogen-deuterium exchange detected by mass spectrometry (“HXMS”), wherein a hydrogen/deuterium exchange of receptor and ligand protein amide protons, binding, and back exchange occurs, wherein the backbone amide groups participating in protein binding are protected from back exchange and therefore will remain deuterated. Relevant regions can be identified at this point by peptic proteolysis, fast microbore high-performance liquid chromatography separation, and/or electrospray ionization mass spectrometry (See, e.g., Ehring H., Analytical Biochemistry, 267 (2): 252-259 (1999) and Engen, J. R. & Smith, D. L., Anal. Chem., 73: 256A-265A (2001)). Another example of a suitable epitope identification technique is nuclear magnetic resonance epitope mapping (“NMR”), where typically the position of the signals in two-dimensional NMR spectras of the free antigen and the antigen complexed with the antigen binding peptide, such as an antibody, are compared. The antigen typically is selectively isotopically labeled with ¹⁵N so that only signals corresponding to the antigen and no signals from the antigen binding peptide are seen in the NMR-spectrum. Antigen signals originating from amino acids involved in the interaction with the antigen binding peptide typically will shift position in the spectras of the complex compared to the spectras of the free antigen, and the amino acids involved in the binding can be identified that way. See, e.g., Ernst Schering Res. Found. Workshop, (44): 149-67 (2004); Huang et al., J. Mol. Biol., 281 (1): 61-67 (1998); and Saito and Patterson, Methods, 9 (3): 516-24 (1996). Epitope mapping/characterization also can be performed using mass spectrometry (“MS”) methods (See, e.g., Downard, J. Mass Spectrom., 35 (4): 493-503 (2000) and Kiselar and Downard, Anal. Chem., 71 (9): 1792-801 (1999)).

[0227] Protease digestion techniques also can be useful in the context of epitope mapping and identification. Antigenic determinant-relevant regions/sequences can be determined by protease digestion, e.g. by using trypsin in a ratio of about 1:50 to SARS-COV-S or SARS-COV-2-S overnight (“o/n”) digestion at 37° C. and pH 7-8, followed by mass spectrometry (“MS”) analysis for peptide identification. The peptides protected from trypsin cleavage by the anti-CoV-S antibody can subsequently be identified by comparison of samples subjected to trypsin digestion and samples incubated with antibody and then subjected to digestion by e.g. trypsin (thereby revealing a footprint for the antibody). Other enzymes like chymotrypsin or pepsin can be used in similar epitope characterization methods. Moreover, enzymatic digestion can provide a quick method for analyzing whether a potential antigenic determinant sequence is within a region of CoV-S in the context of a CoV-S-binding polypeptide. If the polypeptide is not surface exposed, it is most likely not relevant in terms of immunogenicity/antigenicity (See, e.g., Manca, Ann. 1st. Super. Sanità., 27 (1): 15-9 (1991) for a discussion of similar techniques).

[0228] Site-directed mutagenesis is another technique useful for characterization of a binding epitope. For example, in “alanine-scanning” site-directed mutagenesis (also known as alanine scanning, alanine scanning mutagenesis, alanine scanning mutations, combinatorial alanine scanning, or creation of alanine point mutations, for example), each residue within a protein segment is replaced with an alanine residue (or another residue such as valine where alanine is present in the wild-type sequence) through such methodologies as direct peptide or protein synthesis, site-directed mutagenesis, the GENEART™ Mutagenesis Service (Thermo Fisher Scientific, Waltham, MA U.S.A.) or shotgun mutagenesis, for example. A series of single point mutants of the molecule is thereby generated using this technique; the number of mutants generated is equivalent to the number of residues in the molecule, each residue being replaced, one at a time, by a single alanine residue. Alanine is generally used to replace native (wild-type) residues because of its non-bulky, chemically inert, methyl functional group that can mimic the secondary structure preferences that many other amino acids may possess. Subsequently, the effects replacing a native residue with an alanine has on binding affinity of an alanine scanning mutant and its binding partner can be measured using such methods as, but not limited to, SPR binding experiments. If a mutation leads to a significant reduction in binding affinity, it is most likely that the mutated residue is involved in binding. Monoclonal antibodies specific for structural epitopes (i.e., antibodies that do not bind the unfolded protein) can be used as a positive control for binding affinity experiments to verify that the alanine-replacement does not influence the overall tertiary structure of the protein (as changes to the overall fold of the protein may indirectly affect binding and thereby produce a false positive result). See, e.g., Clackson and Wells, Science, 267:383-386 (1995); Weiss et al., Proc. Natl. Acad. Sci. USA, 97 (16): 8950-8954 (2000); and Wells, Proc. Natl. Acad. Sci. USA, 93:1-6 (1996). Example 5 identifies the specific epitope or residues of CoV-S which specifically interact with the anti-CoV-S antibodies disclosed herein.

[0229] Electron microscopy can also be used for epitope “footprinting”. For example, Wang et al., Nature, 355:275-278 (1992) used coordinated application of cryoelectron microscopy, three-dimensional image reconstruction, and X-ray crystallography to determine the physical footprint of a Fab-fragment on the capsid surface of native cowpea mosaic virus.

[0230] Other forms of “label-free” assay for epitope evaluation include SPR (sold commercially as the BIACORE® system, GE Healthcare Life Sciences, Marlborough, MA) and reflectometric interference spectroscopy (“RifS”) (See, e.g., Fagerstam et al., Journal of Molecular Recognition, 3:208-14 (1990); Nice et al., J. Chromatogr., 646:159-168 (1993); Leipert et al., Angew. Chem. Int. Ed., 37:3308-3311 (1998); Kroger et al., Biosensors and Bioelectronics, 17:937-944 (2002)).

[0231] The expressions “framework region” or “FR” refer to one or more of the framework regions within the variable regions of the light and heavy chains of an antibody (See Kabat et al., Sequences of Proteins of Immunological Interest, 4^{th} edition, Bethesda, MD: U.S. Dept. of Health and Human Services, Public Health Service, National Institutes of Health (1987)). These expressions include those amino acid sequence regions interposed between the CDRs within the variable regions of the light and heavy chains of an antibody.

[0232] The term “Fc region” is used to define a C-terminal region of an immunoglobulin heavy chain. The “Fc region” may be a native sequence Fc region or a variant Fc region. Although the boundaries of the Fc region of an immunoglobulin heavy chain might vary, the human IgG heavy chain Fc region is usually defined to stretch from an amino acid residue at position Cys226, or from Pro230, to the carboxyl-terminus thereof. The numbering of the residues in the Fc region is that of the EU index as in Kabat. Kabat et al., Sequences of Proteins of Immunological Interest, 5th edition, Bethesda, MD: U.S. Dept. of Health and Human Services, Public Health Service, National Institutes of Health (1991). The Fc region of an immunoglobulin generally comprises two constant domains, CH2 and CH3.

[0233] The terms “Fc receptor” and “FcR” describe a receptor that binds to the Fc region of an antibody. The preferred FcR is a native sequence human FcR. Moreover, a preferred FcR is one that binds an IgG antibody (a gamma receptor) and includes receptors of the FcγRI, FcγRII, and FcγRIII subclasses, including allelic variants and alternatively spliced forms of these receptors. FcγRII receptors include FcγRIIA (an “activating receptor”) and FcγRIIB (an “inhibiting receptor”), which have similar amino acid sequences that differ primarily in the cytoplasmic domains thereof. FcRs are reviewed in Ravetch and Kinet, Ann. Rev. Immunol., 9:457-92 (1991); Capel et al., Immunomethods, 4:25-34 (1994); and de Haas et al., J. Lab. Clin. Med., 126:330-41 (1995). “FcR” also includes the neonatal receptor, FcRn, which is responsible for the transfer of maternal IgGs to the fetus (Guyer et al., J. Immunol., 117:587 (1976); and Kim et al., J. Immunol., 24:249 (1994)), and which primarily functions to modulate and/or extend the half-life of antibodies in circulation. To the extent that the disclosed anti-CoV-S antibodies are aglycosylated, as a result of the expression system and/or sequence, the subject antibodies are expected to bind FcRn receptors, but not to bind (or to minimally bind) Fcγ receptors.

[0234] A “functional Fc region” possesses at least one effector function of a native sequence Fc region. Exemplary “effector functions” include C1q binding; complement dependent cytotoxicity (“CDC”); Fc receptor binding; antibody-dependent cell-mediated cytotoxicity (“ADCC”); phagocytosis; down-regulation of cell surface receptors (e.g. B cell receptor (“BCR”)), etc. Such effector functions generally require the Fc region to be combined with a binding domain (e.g. an antibody variable domain) and can be assessed using various assays known in the art for evaluating such antibody effector functions.

[0235] A “native sequence Fc region” comprises an amino acid sequence identical to the amino acid sequence of an Fc region found in nature. A “variant Fc region” comprises an amino acid sequence that differs from that of a native sequence Fc region by virtue of at least one amino acid modification, yet retains at least one effector function of the native sequence Fc region. Preferably, the variant Fc region has at least one amino acid substitution compared to a native sequence Fc region or to the Fc region of a parent polypeptide, e.g. from about one to about ten amino acid substitutions, and preferably from about one to about five amino acid substitutions in a native sequence Fc region or in the Fc region of the parent polypeptide. The variant Fc region herein will preferably possess at least about 80% sequence identity with a native sequence Fc region and/or with an Fc region of a parent polypeptide, and most preferably at least about 90% sequence identity therewith, more preferably at least about 95%, at least about 96%, at least about 97%, at least about 98%, or at least about 99% sequence identity therewith.

[0236] In some embodiments, the Fc region of an antibody or antigen-binding antibody fragment of the present disclosure may bind to an Fc receptor (FcR). The FcR may be, but is not limited to, Fc gamma receptor (FcgR), FcgRI, FcgRIIA, FcgRIIB1, FcgRIIB2, FcgRIIIA, FcgRIIIB, Fc epsilon receptor (FceR), FceRI, FceRII, Fc alpha receptor (FcaR), FcaRI, Fc alpha/mu receptor (Fca/mR), or neonatal Fc receptor (FcRn). The Fc may be an IgM, IgD, IgG, IgE, or IgA isotype. An IgG isotype may be an IgG1, IgG2, IgG3, or IgG4.

[0237] Certain amino acid modifications in the Fc region are known to modulate Ab effector functions and properties, such as, but not limited to, antibody-dependent cellular cytotoxicity (ADCC), antibody-dependent cellular phagocytosis (ADCP), complement dependent cytotoxicity (CDC), and half-life (Wang X. et al., Protein Cell. 2018 January; 9 (1): 63-73; Dall'Acqua W. F. et al., J Biol Chem. 2006 Aug. 18; 281 (33): 23514-24. Epub 2006 Jun. 21; Monnet C. et al, Front Immunol. 2015 Feb. 4; 6:39. doi: 10.3389/fimmu.2015.00039. eCollection 2015). The mutation may be symmetrical or asymmetrical. In certain cases, antibodies with Fc regions that have asymmetrical mutation(s) (i.e., two Fc regions are not identical) may provide better functions such as ADCC (Liu Z. et al. J Biol Chem. 2014 Feb. 7; 289 (6): 3571-3590).

[0238] Any of the antibody variable region sequences disclosed herein may be used in combination with a wild-type (WT) Fc or a variant Fc.

[0239] An IgG1-type Fc optionally may comprise one or more amino acid substitutions. Such substitutions may include, for example, N297A, N297Q, D265A, L234A, L235A, C226S, C229S, P238S, E233P, L234V, G236-deleted, P238A, A327Q, A327G, P329A, K322A, L234F, L235E, P331S, T394D, A330L, P331S, F243L, R292P, Y300L, V305I, P396L, S239D, 1332E, S298A, E333A, K334A, L234Y, L235Q, G236W, S239M, H268D, D270E, K326D, A330M, K334E, G236A, K326W, S239D, E333S, S267E, H268F, S324T, E345R, E430G, S440Y, M428L, N434S, L328F, M252Y, S254T, T256E, and/or any combination thereof (the residue numbering is according to the EU index as in Kabat) (Dall'Acqua W. F. et al., J Biol Chem. 2006 Aug. 18; 281 (33): 23514-24. Epub 2006 Jun. 21; Wang X. et al., Protein Cell. 2018 January; 9 (1): 63-73), or for example, N434A, Q438R, S440E, L432D, N434L, and/or any combination thereof (the residue numbering according to EU numbering). The Fc region may further comprise one or more additional amino acid substitutions. Such substitutions may include but are not limited to A330L, L234F, L235E, P3318, and/or any combination thereof (the residue numbering is according to the EU index as in Kabat). Specific exemplary substitution combinations for an IgG1-type Fc include, but not limited to: M252Y, S254T, and T256E (“YTE” variant); M428L and N434A (“LA” variant), M428L and N434S (“LS” variant); M428L, N434A, Q438R, and S440E (“LA-RE” variant); L432D and N434L (“DEL” variant); and L234A, L235A, L432D, and N434L (“LALA-DEL” variant) (the residue numbering is according to the EU index as in Kabat).

[0240] When the Ab is an IgG2, the Fc region optionally may comprise one or more amino acid substitutions. Such substitutions may include but are not limited to P238S, V234A, G237A, H268A, H268Q, H268E, V309L, N297A, N297Q, A330S, P331S, C232S, C233S, M252Y, S254T, T256E, and/or any combination thereof (the residue numbering is according to the EU index as in Kabat). The Fc region optionally may further comprise one or more additional amino acid substitutions. Such substitutions may include but are not limited to M252Y, S254T, T256E, and/or any combination thereof (the residue numbering is according to the EU index as in Kabat).

[0241] An IgG3-type Fc region optionally may comprise one or more amino acid substitutions. Such substitutions may include but are not limited to E235Y (the residue numbering is according to the EU index as in Kabat).

[0242] An IgG4-type Fc region optionally may comprise one or more amino acid substitutions. Such substitutions may include but are not limited to, E233P, F234V, L235A, G237A, E318A, S228P, L236E, S241P, L248E, T394D, M252Y, S254T, T256E, N297A, N297Q, and/or any combination thereof (the residue numbering is according to the EU index as in Kabat). The substitution may be, for example, S228P (the residue numbering is according to the EU index as in Kabat).

[0243] In some cases, the glycan of the human-like Fc region may be engineered to modify the effector function (for example, see Li T. et al., Proc Natl Acad Sci USA. 2017 Mar. 28; 114 (13):3485-3490. doi: 10.1073/pnas. 1702173114. Epub 2017 Mar. 13).

### B. Anti-CoV-S Antibodies and Binding Fragments Thereof Having Binding Activity for CoV-S

[0244] The present invention provides antibodies, or antigen-binding fragments thereof, that display broad activity against all SARS-COV-2 variants of concern (VOCs) described to date (including the BA.1/Omicron variant).

[0245] In some embodiments, an antibody or antigen-binding fragment thereof is capable of binding to the spike protein of a coronavirus (CoV-S). In some embodiments, the CoV-S is the spike protein of SARS-COV (“SARS-COV-S”) and/or the spike protein of SARS-COV-2 (“SARS-COV-2-S”).

[0246] In certain embodiments, an antibody or antigen-binding fragment thereof is capable of binding to a SARS-COV-2 variant. In some embodiments, the SARS-COV-2-S is a B.1.1.7 variant, a B. 1.351 variant, a B.1.1.28 variant, a B. 1.429 variant, a P.1 variant, a B.1.617 variant (e.g., B.1.617.1 and B.1.617.2), a C.37 variant, a 1.621 variant, a AY.1 variant, a 1.623 variant, a C.36 variant, a A.27 variant, a AV.1 variant, a B.1.1.482 variant, a B.1.1.523 variant, a B.1.427 variant, a AY.4 variant, a AY.11 variant, variant, a D614G variant, or a B.1.1.529/BA.1 variant (also known as the Omicron variant) and its sublineages (e.g., BA1.1, BA.2, BA.2.75, BA.4, BA.5, BA.4.6, BQ.1, BQ.1.1, XBB, XBB.1, XBB.1.5, BJ.1, BM.1.1.1, BA.2.3.20, BF.7, XBC, BN.1, or CH.1.1).

[0247] In some embodiments, the antibody or antigen-binding fragment thereof binds to the receptor binding domain (RBD) of CoV-S, e.g., the RBD from the B.1.1.529/BA.1 variant, the BF.7 variant, the BQ.1.1 variant, the BA.2.75 variant, the XBB.1 variant, the BA.2 variant, the B. 1.351 variant, the B.1.617 variant, or the D614G variant.

[0248] In some embodiments, the antibodies can be isolated from subjects experiencing SARS-COV-2, e.g., Omicron/BA.1, breakthrough infection. As used herein, the term “breakthrough infection” is defined as detection of SARS-COV-2 RNA or antigen in respiratory specimen collected from a person 14 days after receipt of all recommended doses of vaccines. As demonstrated in the Examples below, subjects experiencing BA.1 breakthrough infection were shown to have similar serum IgG binding titers to BA.1 and wild type CoV-S and RBD, whereas uninfected/vaccinated subjects displayed reduced serum IgG binding to BA.1 relative to WT CoV-S and RBD. In addition, subjects experiencing BA.1 breakthrough infection generally had higher serum IgA binding titers to BA.1 and WT RBD. Also, BA.1 breakthrough infection was shown to induce similar IgG+ B cell responses and higher magnitude IgA+ B cell responses to BA.1 RBD antigens relative to mRNA vaccination. BA.1 breakthrough infection also preferentially activates B cells that display cross-reactivity with both BA.1 and the original Wuhan-1 vaccine strain, and appears to re-direct B cell immunodominance hierarchy from the S2 subunit to the RBD. As shown in the Example, BA.1 breakthrough infection elicits RBD-directed antibodies with broad activity against SARS-COV-2 VOCs. These antibodies represent promising candidates for therapeutic development and provide a framework for the development of vaccines that induce broadly neutralizing antibody responses.

[0249] The antibodies are capable of binding to the spike protein of the coronavirus. CoV-S refers to the S protein of a coronavirus which is expressed on the surface of virions as a structural protein. As mentioned previously, the S protein plays an essential role for coronaviruses in binding to receptors on the host cell and determines host tropism (Zhu Z. et al., Infect Genet Evol. 2018 July; 61:183-184. doi: 10.1016/j.meegid.2018.03.028. Epub 2018 Apr. 4). SARS-COV and SARS-COV-2 bind to angiotensin-converting enzyme 2 (ACE2) of the host cell via the S protein's receptor-binding domains (RBDs) and uses ACE2 as a receptor to enter the host cells (Ge X. Y. et al., Nature. 2013 Nov. 28; 503 (7477): 535-8. doi: 10.1038/nature12711. Epub 2013 Oct. 30.; Hoffmann M. et al., Cell. 2020 Mar. 4. pii: S0092-8674 (20) 30229-4. doi: 10.1016/j.cell.2020.02.052). SARS-COV can also use CD209L (also known as L-SIGN) as an alternative receptor (Jeffers S. A. et al., Proc Natl Acad Sci USA. 2004 Nov. 2; 101 (44): 15748-53. Epub 2004 Oct. 20). MERS-COV binds dipeptidyl peptidase 4 (“DPP4”, also known as CD26) of the host cells via a different RBD of the S protein. Cell entry of coronaviruses depends on not only binding of the S protein to a host cell receptor but often also priming of the S protein by host cell proteases, and recently SARS-COV-2 was found to use the serine protease TMPRSS2 for S protein priming and then ACE2 for entry (Wu A. et al., Cell Host Microbe. 2020 Mar. 11; 27 (3): 325-328. doi: 10.1016/j.chom.2020.02.001. Epub 2020 Feb. 7; Hoffmann M. et al., Cell. 2020 Mar. 4. pii: S0092-8674 (20) 30229-4. doi: 10.1016/j.cell.2020.02.052).

[0250] The S protein of SARS-COV is referred to as SARS-COV-S and may for example comprise the amino acid sequence of SEQ ID NO: 1 (1288 amino acids). The S protein of SARS-COV-2 is referred to as SARS-COV-2-S and may for example comprise the amino acid sequence of SEQ ID NO: 5 (1273 amino acids).

[0251] The present disclosure provides exemplary antibodies and antigen-binding antibody fragments that bind, e.g., specifically bind, to CoV, wherein at least some of these antibodies and antigen-binding antibody fragments bind to SARS-COV-2-S and/or SARS-COV-2-S. Due to the sequence similarity among different CoV species, such antibodies or antigen-binding antibody fragments of the present disclosure may also cross react with the S protein of other CoV species.

[0252] The exemplary S proteins of CoV that the antibodies or antigen-binding antibody fragments of the present disclosure may bind, e.g., specifically bind, include by way of example, Bat SARS COV (GenBank Accession No. FJ211859), SARS COV (GenBank Accession No. FJ211860), BtSARS.HKU3.1 (GenBank Accession No. DQ022305), BtSARS.HKU3.2 (GenBank Accession No. DQ084199), BtSARS.HKU3.3 (GenBank Accession No. DQ084200), BtSARS.Rml (GenBank Accession No. DQ412043), BtCoV.279.2005 (GenBank Accession No. DQ648857), BtSARS.Rf1 (GenBank Accession No. DQ412042), BtCoV.273.2005 (GenBank Accession No. DQ648856), BtSARS.Rp3 (GenBank Accession No. DQ071615), SARS COV.A022 (GenBank Accession No. AY686863), SARSCOV.CUHK-W1 (GenBank Accession No. AY278554), SARSCOV.GDO1 (GenBank Accession No. AY278489), SARSCOV.HC.SZ.61.03 (GenBank Accession No. AY515512), SARSCOV.SZ16 (GenBank Accession No. AY304488), SARSCOV.Urbani (GenBank Accession No. AY278741), SARSCOV.civet010 (GenBank Accession No. AY572035), or SARSCOV.MA.15 (GenBank Accession No. DQ497008), Rs SHC014 (GenBank® Accession No. KC881005), Rs3367 (GenBank® Accession No. KC881006), WiV1 S (GenBank® Accession No. KC881007).

[0253] In some embodiments, the antibodies and antigen-binding antibody fragments provided herein may also bind to and neutralize existing bat CoV or pre-emergent bat CoVs. Antibodies and antigen-binding antibody fragments with such binding and/or neutralization abilities would be particularly useful in a future pandemic that may be caused by a spillover from an animal reservoir, like a bat.

[0254] Alternatively, the S proteins of CoV to which the antibodies or antigen-binding antibody fragments of the present disclosure may bind, e.g., specifically bind, to and neutralize pre-emergent coronaviruses from other species, e.g., bats.

[0255] Still alternatively, the S proteins of CoV to which the antibodies or antigen-binding antibody fragments of the present disclosure may bind, e.g., specifically bind, to may include, for example, Middle East respiratory syndrome coronavirus isolate Riyadh_2_2012 (GenBank Accession No. KF600652.1), Middle East respiratory syndrome coronavirus isolate Al-Hasa_18_2013 (GenBank Accession No. KF600651.1), Middle East respiratory syndrome coronavirus isolate Al-Hasa_17_2013 (GenBank Accession No. KF600647.1), Middle East respiratory syndrome coronavirus isolate Al-Hasa_15_2013 (GenBank Accession No. KF600645.1), Middle East respiratory syndrome coronavirus isolate Al-Hasa_16_2013 (GenBank Accession No. KF600644.1), Middle East respiratory syndrome coronavirus isolate Al-Hasa_21_2013 (GenBank Accession No. KF600634), Middle East respiratory syndrome coronavirus isolate Al-Hasa_19_2013 (GenBank Accession No. KF600632), Middle East respiratory syndrome coronavirus isolate Buraidah_1_2013 (GenBank Accession No. KF600630.1), Middle East respiratory syndrome coronavirus isolate Hafr-Al-Batin_1_2013 (GenBank Accession No. KF600628.1), Middle East respiratory syndrome coronavirus isolate Al-Hasa_12_2013 (GenBank Accession No. KF600627.1), Middle East respiratory syndrome coronavirus isolate Bisha_1_2012 (GenBank Accession No. KF600620.1), Middle East respiratory syndrome coronavirus isolate Riyadh_3_2013 (GenBank Accession No. KF600613.1), Middle East respiratory syndrome coronavirus isolate Riyadh_1_2012 (GenBank Accession No. KF600612.1), Middle East respiratory syndrome coronavirus isolate Al-Hasa_3_2013 (GenBank Accession No. KF186565.1), Middle East respiratory syndrome coronavirus isolate Al-Hasa_1_2013 (GenBank Accession No. KF186567.1), Middle East respiratory syndrome coronavirus isolate Al-Hasa_2_2013 (GenBank Accession No. KF186566.1), Middle East respiratory syndrome coronavirus isolate Al-Hasa_4_2013 (GenBank Accession No. KF186564.1), Middle East respiratory syndrome coronavirus (GenBank Accession No. KF192507.1), Betacoronavirus England 1-N1 (GenBank Accession No. NC_019843), MERS-COV_SA-N1 (GenBank Accession No. KC667074), following isolates of Middle East Respiratory Syndrome Coronavirus (GenBank Accession No: KF600656.1, GenBank Accession No: KF600655.1, GenBank Accession No: KF600654.1, GenBank Accession No: KF600649.1, GenBank Accession No: KF600648.1, GenBank Accession No: KF600646.1, GenBank Accession No: KF600643.1, GenBank Accession No: KF600642.1, GenBank Accession No: KF600640.1, GenBank Accession No: KF600639.1, GenBank Accession No: KF600638.1, GenBank Accession No: KF600637.1, GenBank Accession No: KF600636.1, GenBank Accession No: KF600635.1, GenBank Accession No: KF600631.1, GenBank Accession No: KF600626.1, GenBank Accession No: KF600625.1, GenBank Accession No: KF600624.1, GenBank Accession No: KF600623.1, GenBank Accession No: KF600622.1, GenBank Accession No: KF600621.1, GenBank Accession No: KF600619.1, GenBank Accession No: KF600618.1, GenBank Accession No: KF600616.1, GenBank Accession No: KF600615.1, GenBank Accession No: KF600614.1, GenBank Accession No: KF600641.1, GenBank Accession No: KF600633.1, GenBank Accession No: KF600629.1, GenBank Accession No: KF600617.1), Coronavirus Neoromicia/PML-PHE1/RSA/2011 GenBank Accession: KC869678.2, Bat Coronavirus Taper/CII_KSA_287/Bisha/Saudi Arabia/GenBank Accession No: KF493885.1, Bat coronavirus Rhhar/CII_KSA_003/Bisha/Saudi Arabia/2013 GenBank Accession No: KF493888.1, Bat coronavirus Pikuh/CII_KSA_001/Riyadh/Saudi Arabia/2013 GenBank Accession No: KF493887.1, Bat coronavirus Rhhar/CII_KSA_002/Bisha/Saudi Arabia/2013 GenBank Accession No: KF493886.1, Bat Coronavirus Rhhar/CII_KSA_004/Bisha/Saudi Arabia/2013 GenBank Accession No: KF493884.1, BtCoV.HKU4.2 (GenBank Accession No. EF065506), BtCoV.HKU4.1 (GenBank Accession No. NC_009019), BtCoV.HKU4.3 (GenBank Accession No. EF065507), BtCoV.HKU4.4 (GenBank Accession No. EF065508), BtCoV 133.2005 (GenBank Accession No. NC 008315), BtCoV.HKU5.5 (GenBank Accession No. EF065512); BtCoV.HKU5.1 (GenBank Accession No. NC_009020), BtCoV.HKU5.2 (GenBank Accession No. EF065510), BtCoV.HKU5.3 (GenBank Accession No. EF065511), human betacoronavirus 2c Jordan-N3/2012 (GenBank Accession No. KC776174.1; human betacoronavirus 2c EMC/2012 (GenBank Accession No. JX869059.2), Pipistrellus bat coronavirus HKU5 isolates (GenBank Accession No: KC522089.1, GenBank Accession No: KC522088.1, GenBank Accession No: KC522087.1, GenBank Accession No: KC522086.1, GenBank Accession No: KC522085.1, GenBank Accession No: KC522084.1, GenBank Accession No: KC522083.1, GenBank Accession No: KC522082.1, GenBank Accession No: KC522081.1, GenBank Accession No: KC522080.1, GenBank Accession No: KC522079.1, GenBank Accession No: KC522078.1, GenBank Accession No: KC522077.1, GenBank Accession No: KC522076.1, GenBank Accession No: KC522075.1, GenBank Accession No: KC522104.1, GenBank Accession No: KC522104.1, GenBank Accession No: KC522103.1, GenBank Accession No: KC522102.1, GenBank Accession No: KC522101.1, GenBank Accession No: KC522100.1, GenBank Accession No: KC522099.1, GenBank Accession No: KC522098.1, GenBank Accession No: KC522097.1, GenBank Accession No: KC522096.1, GenBank Accession No: KC522095.1, GenBank Accession No: KC522094.1, GenBank Accession No: KC522093.1, GenBank Accession No: KC522092.1, GenBank Accession No: KC522091.1, GenBank Accession No: KC522090.1, GenBank Accession No: KC522119.1 GenBank Accession No: KC522118.1 GenBank Accession No: KC522117.1 GenBank Accession No: KC522116.1 GenBank Accession No: KC522115.1 GenBank Accession No: KC522114.1 GenBank Accession No: KC522113.1 GenBank Accession No: KC522112.1 GenBank Accession No: KC522111.1 GenBank Accession No: KC522110.1 GenBank Accession No: KC522109.1 GenBank Accession No: KC522108.1, GenBank Accession No: KC522107.1, GenBank Accession No: KC522106.1, GenBank Accession No: KC522105.1) Pipistrellus bat coronavirus HKU4 isolates (GenBank Accession No: KC522048.1, GenBank Accession No: KC522047.1, GenBank Accession No: KC522046.1, GenBank Accession No: KC522045.1, GenBank Accession No: KC522044.1, GenBank Accession No: KC522043.1, GenBank Accession No: KC522042.1, GenBank Accession No: KC522041.1, GenBank Accession No: KC522040.1 GenBank Accession No: KC522039.1, GenBank Accession No: KC522038.1, GenBank Accession No: KC522037.1, GenBank Accession No: KC522036.1, GenBank Accession No: KC522048.1 GenBank Accession No: KC522047.1 GenBank Accession No: KC522046.1 GenBank Accession No: KC522045.1 GenBank Accession No: KC522044.1 GenBank Accession No: KC522043.1 GenBank Accession No: KC522042.1 GenBank Accession No: KC522041.1 GenBank Accession No: KC522040.1, GenBank Accession No: KC522039.1 GenBank Accession No: KC522038.1 GenBank Accession No: KC522037.1 GenBank Accession No: KC522036.1, GenBank Accession No: KC522061.1 GenBank Accession No: KC522060.1 GenBank Accession No: KC522059.1 GenBank Accession No: KC522058.1 GenBank Accession No: KC522057.1 GenBank Accession No: KC522056.1 GenBank Accession No: KC522055.1 GenBank Accession No: KC522054.1 GenBank Accession No: KC522053.1 GenBank Accession No: KC522052.1 GenBank Accession No: KC522051.1 GenBank Accession No: KC522050.1 GenBank Accession No: KC522049.1 GenBank Accession No: KC522074.1, GenBank Accession No: KC522073.1 GenBank Accession No: KC522072.1 GenBank Accession No: KC522071.1 GenBank Accession No: KC522070.1 GenBank Accession No: KC522069.1 GenBank Accession No: KC522068.1 GenBank Accession No: KC522067.1, GenBank Accession No: KC522066.1 GenBank Accession No: KC522065.1 GenBank Accession No: KC522064.1, GenBank Accession No: KC522063.1, or GenBank Accession No: KC522062.1.

[0256] Alternatively, the S proteins of CoV to which the antibodies or antigen-binding antibody fragments of the present disclosure may bind, e.g., specifically bind, may include for example, FCov.FIPV.79.1146.VR.2202 (GenBank Accession No. NV_007025), transmissible gastroenteritis virus (TGEV) (GenBank Accession No. NC_002306; GenBank Accession No. Q811789.2; GenBank Accession No. DQ811786.2; GenBank Accession No. DQ811788.1; GenBank Accession No. DQ811785.1; GenBank Accession No. X52157.1; GenBank Accession No. AJ011482.1; GenBank Accession No. KC962433.1; GenBank Accession No. AJ271965.2; GenBank Accession No. JQ693060.1; GenBank Accession No. KC609371.1; GenBank Accession No. JQ693060.1; GenBank Accession No. JQ693059.1; GenBank Accession No. JQ693058.1; GenBank Accession No. JQ693057.1; GenBank Accession No. JQ693052.1; GenBank Accession No. JQ693051.1; GenBank Accession No. JQ693050.1), or porcine reproductive and respiratory syndrome virus (PRRSV) (GenBank Accession No. NC_001961.1; GenBank Accession No. DQ811787).

[0257] Alternatively, the S proteins of CoV to which the antibodies or antigen-binding antibody fragments of the present disclosure may bind, e.g., specifically bind, may include, for example, BtCoV.1A.AFCD62 (GenBank Accession No. NC_010437), BtCoV.1B.AFCD307 (GenBank Accession No. NC_010436), BtCov.HKU8.AFCD77 (GenBank Accession No. NC_010438), BtCoV.512.2005 (GenBank Accession No. DQ648858), porcine epidemic diarrhea virus PEDV.CV777 (GenBank Accession No. NC_003436, GenBank Accession No. DQ355224.1, GenBank Accession No. DQ355223.1, GenBank Accession No. DQ355221.1, GenBank Accession No. JN601062.1, GenBank Accession No. N601061.1, GenBank Accession No. JN601060.1, GenBank Accession No. JN601059.1, GenBank Accession No. JN601058.1, GenBank Accession No. JN601057.1, GenBank Accession No. JN601056.1, GenBank Accession No. JN601055.1, GenBank Accession No. JN601054.1, GenBank Accession No. JN601053.1, GenBank Accession No. JN601052.1, GenBank Accession No. JN400902.1, GenBank Accession No. JN547395.1, GenBank Accession No. FJ687473.1, GenBank Accession No. FJ687472.1, GenBank Accession No. FJ687471.1, GenBank Accession No. FJ687470.1, GenBank Accession No. FJ687469.1, GenBank Accession No. FJ687468.1, GenBank Accession No. FJ687467.1, GenBank Accession No. FJ687466.1, GenBank Accession No. FJ687465.1, GenBank Accession No. FJ687464.1, GenBank Accession No. FJ687463.1, GenBank Accession No. FJ687462.1, GenBank Accession No. FJ687461.1, GenBank Accession No. FJ687460.1, GenBank Accession No. FJ687459.1, GenBank Accession No. FJ687458.1, GenBank Accession No. FJ687457.1, GenBank Accession No. FJ687456.1, GenBank Accession No. FJ687455.1, GenBank Accession No. FJ687454.1, GenBank Accession No. FJ687453 GenBank Accession No. FJ687452.1, GenBank Accession No. FJ687451.1, GenBank Accession No. FJ687450.1, GenBank Accession No. FJ687449.1, GenBank Accession No. AF500215.1, GenBank Accession No. KF476061.1, GenBank Accession No. KF476060.1, GenBank Accession No. KF476059.1, GenBank Accession No. KF476058.1, GenBank Accession No. KF476057.1, GenBank Accession No. KF476056.1, GenBank Accession No. KF476055.1, GenBank Accession No. KF476054.1, GenBank Accession No. KF476053.1, GenBank Accession No. KF476052.1, GenBank Accession No. KF476051.1, GenBank Accession No. KF476050.1, GenBank Accession No. KF476049.1, GenBank Accession No. KF476048.1, GenBank Accession No. KF177258.1, GenBank Accession No. KF177257.1, GenBank Accession No. KF177256.1, GenBank Accession No. KF177255.1), HCoV.229E (GenBank Accession No. NC_002645), HCoV.NL63.Amsterdam.I (GenBank Accession No. NC_005831), BtCoV.HKU2.HK.298.2006 (GenBank Accession No. EF203066), BtCoV.HKU2.HK.33.2006 (GenBank Accession No. EF203067), BtCoV.HKU2.HK.46.2006 (GenBank Accession No. EF203065), or BtCoV.HKU2.GD.430.2006 (GenBank Accession No. EF203064).

[0258] Alternatively, the S proteins of CoV to which the antibodies or antigen-binding antibody fragments of the present disclosure may bind, e.g., specifically bind, may include, for example, HCoV.HKU1.C.N5 (GenBank Accession No. DQ339101), MHV.A59 (GenBank Accession No. NC 001846), PHEV.VW572 (GenBank Accession No. NC 007732), HCoV.OC43.ATCC.VR.759 (GenBank Accession No. NC_005147), or bovine enteric coronavirus (BCoV.ENT) (GenBank Accession No. NC_003045).

[0259] Alternatively, the S proteins of CoV to which the antibodies or antigen-binding antibody fragments of the present disclosure may bind, e.g., specifically bind, may include, for example, BtCoV.HKU9.2 (GenBank Accession No. EF065514), BtCoV.HKU9.1 (GenBank Accession No. NC_009021), BtCoV.HkU9.3 (GenBank Accession No. EF065515), or BtCoV.HKU9.4 (GenBank Accession No. EF065516).sarbecovirus

[0260] In some instances, an anti-CoV-S antibody or antigen-binding fragment thereof according to the disclosure binds to CoV-S (e.g., SARS-COV-S and/or SARS-COV-2-S, and/or any of the CoV S proteins listed above) with a dissociation constant (KD) of (i) 100 nM or lower; (ii) about 10 nM or lower; (iii) about 1 nM or lower; (iv) about 100 pM or lower; (v) about 10 pM or lower; (vi) about 1 pM or lower; or (vii) about 0.1 pM or lower.

[0261] In some instances, an anti-CoV-S antibody or antigen-binding fragment thereof according to the disclosure binds to the RBD of CoV-S (e.g., SARS-COV-S and/or SARS-COV-2-S, and/or any of the CoV S proteins listed above) with a dissociation constant (KD) of (i) 100 nM or lower; (ii) about 10 nM or lower; (iii) about 1 nM or lower; (iv) about 100 pM or lower; (v) about 10 pM or lower; (vi) about 1 pM or lower; or (vii) about 0.1 pM or lower.

[0262] In some instances, an anti-CoV-S antibody or antigen-binding fragment thereof according to the disclosure binds to the RBD of CoV-S of the B.1.1.529/BA.1 variant, the BF.7 variant, the BQ. 1.1 variant, the BA.2.75 variant, the XBB.1 variant, the B.1351 variant, or the B.1.617.2 variant, with a dissociation constant (KD) of (i) 100 nM or lower; (ii) about 10 nM or lower; (iii) about 1 nM or lower; (iv) about 100 pM or lower; (v) about 10 pM or lower; (vi) about 1 pM or lower; or (vii) about 0.1 pM or lower.

[0263] The present disclosure provides exemplary antibodies or antigen-binding fragments thereof that bind CoV-S, including human CoV-S, which optionally may be affinity-matured. Other antibodies or antigen-binding fragments thereof that bind CoV-S, including those having different CDRs, and epitopic specificity may be obtained using the disclosure of the present specification, and using methods that are generally known in the art. Such antibodies and antigen-binding fragments thereof antagonize the biological effects of CoV-S in vivo and therefore are useful in treating or preventing COV-S-related conditions including, particularly coronavirus infection. In preferred embodiments, the antibody or antigen-binding fragment thereof according to the disclosure comprises one or more CDRs, a V_{L} chain and/or V_{H} chain of the anti-CoV-S antibodies and antigen-binding fragments thereof described herein.

[0264] In some embodiments, an anti-CoV-S antibody or antigen-binding fragment thereof according to the disclosure will interfere with, block, reduce, or modulate the interaction between COV-S and its receptor(s) (e.g., ACE2, CD209L, L-SIGN, DPP4, or CD26) on host cells or a S protein-priming protein on host cells (e.g., TMPRSS2). If binding of the S protein to its receptor is blocked or reduced, CoV virions may be prohibited from entering the cells, i.e., infection to further cells is prevented. Also, if the S protein is prevented from binding to a S protein-priming protein, the S protein would not be activated and therefore the host cell entry via the receptor may be reduced, i.e., infection to further cells is prevented.

[0265] In some instance, an anti-CoV-S antibody or antigen-binding fragment thereof according to the disclosure is “neutralizing”, e.g., it substantially or totally prevents the specific interaction of CoV-S with the host receptors or priming protein. As a result, CoV virions may be substantially or totally cleared by immune cells of the host, such as phagocytes via, for example, Fc receptor mediated phagocytosis or mere phagocytosis due to increased time of virions outside the cells. In some embodiments, the antibody or antigen-binding fragment thereof neutralizes CoV-S, e.g., by remaining bound to CoV-S in a location and/or manner that prevents CoV-S from binding to its receptor or priming protein on host cells. As a result, CoV virions may be substantially or totally prevented from entering the cells, i.e. infection to further cells is prevented.

[0266] In certain embodiments, an anti-CoV-S antibody or antigen-binding fragment thereof according to the disclosure neutralizes CoV (e.g., SARS-COV and/or SARS-COV-2) at an IC50 of about 100 nM or lower, of about 50 nM or lower, of about 20 nM or lower, of about 10 nM or lower, of about 5 nM or lower, of about 2 nM or lower, of about 1 nM or lower, of about 500 pM or lower, of about 200 pM or lower, of about 100 pM or lower, of about 50 pM or lower, of about 20 pM or lower, of about 10 pM or lower, of about 5 pM or lower, of about 2 pM or lower, or of about 1 pM or lower, or at an IC50 of about 500 ng/mL or lower, of about 200 ng/ml or lower, of about 100 ng/ml or lower, of about 50 ng/ml or lower, at about 20 ng/mL or lower, at about 10 ng/ml or lower, at about 20 ng/ml or lower, at about 10 mg/mL or lower, at about 5 ng/ml or lower, at about 2 ng/ml or lower, or at about 1 ng/ml or lower, in vitro, as measured by any of the neutralization assays described in Examples herein.

[0267] In some embodiments, the antibody, or antigen-binding fragment thereof, neutralizes the B.1.1.529/BA.1 variant of SARS-COV-2 with an IC50 of about 100 ng/ml or lower, of about 50 ng/ml or lower, of about 40 ng/ml or lower, of about 30 ng/mL or lower, of about 20 ng/ml or lower, of about 10 mg/mL or lower, of about 5 ng/ml or lower, of about 2 ng/mL or lower, or of about 1 ng/ml or lower, in vitro. In some embodiments, the antibody, or antigen-binding fragment thereof, neutralizes the B.1.1.529/BA.1 variant of SARS-COV-2 with an IC50 of about 60 ng/mL or lower.

[0268] In some embodiments, the antibody, or antigen-binding fragment thereof, neutralizes the BA2.75 variant, the BF.7 variant, the BQ.1.1 variant, the XBB.1 variant, and/or the XBB.1.5 of SARS-CoV-2 with an IC50 of about 200 ng/mL or lower, of about 100 ng/ml or lower, of about 50 ng/ml or lower, of about 40 ng/mL or lower, of about 30 ng/ml or lower, of about 20 ng/ml or lower, of about 10 mg/mL or lower, of about 5 ng/ml or lower, of about 2 ng/ml or lower, or of about 1 ng/ml or lower, in vitro.

[0269] In some embodiments, the antibody, or antigen-binding fragment thereof, neutralizes the BA.2.75 variant of SARS-COV-2 with an IC50 of about 40 ng/ml or lower.

[0270] In some embodiments, the antibody, or antigen-binding fragment thereof, neutralizes the BF.7 variant of SARS-COV-2 with an IC50 of about 30 ng/mL or lower.

[0271] In some embodiments, the antibody, or antigen-binding fragment thereof, neutralizes the BQ.1.1 variant of SARS-COV-2 with an IC50 of about 50 ng/mL or lower.

[0272] In some embodiments, the antibody, or antigen-binding fragment thereof, neutralizes the XBB.1 variant of SARS-COV-2 with an IC50 of about 200 ng/ml or lower.

[0273] In some embodiments, the antibody, or antigen-binding fragment thereof, neutralizes the D614G variant of SARS-COV-2 with an IC50 of about 100 ng/ml or lower, of about 50 ng/ml or lower, of about 40 ng/ml or lower, of about 30 ng/ml or lower, of about 20 ng/ml or lower, of about 10 mg/mL or lower, of about 5 ng/ml or lower, of about 2 ng/ml or lower, or of about 1 ng/mL or lower, in vitro. In some embodiments, the antibody, or antigen-binding fragment thereof, neutralizes the D614G variant of SARS-COV-2 with an IC50 of about 20 ng/ml or lower,

[0274] In some instances, an anti-CoV-S antibody or antigen-binding fragment thereof according to the disclosure or cocktail thereof, when administered to a coronavirus infected host or one susceptible to coronavirus infection such as a health care worker may promote a neutralization response in the host against the coronavirus which is sufficient to permit the host to be able to mount an effective cell-mediated immune response against the virus, e.g., T cell-mediated or cytokine-mediated immune response against the coronavirus and/or to be more responsive to other treatment methods such as drugs, antivirals or other biologics.

[0275] As mentioned, the anti-CoV-S antibodies or antigen-binding fragments thereof according to the disclosure have a variety of uses. For example, the subject antibodies and fragments can be useful in prophylactic or therapeutic applications, as well as diagnostically in binding assays. The subject anti-CoV-S antibodies or antigen-binding fragments thereof are useful for affinity purification of CoV-S, in particular human CoV-S or its ligands and in screening assays to identify other antagonists of CoV-S activity. Some of the antibodies or antigen-binding fragments thereof are useful for inhibiting binding of CoV-S to its receptor(s) (e.g., ACE2, CD209L, L-SIGN, DPP4, or CD26) on host cells or a S protein-priming protein on host cells (e.g., TMPRSS2) or inhibiting COV-S-mediated activities and/or biological effects.

[0276] As used herein, the term “one or more biological effects associated with COV-S refers to any biological effect mediated, induced, or otherwise attributable to COV-S, e.g., binding properties, functional properties, and other properties of biological significance. Non-limiting exemplary biological effects of COV-S include COV-S binding to its receptor(s) (e.g., ACE2, CD209L, L-SIGN, DPP4, or CD26) on host cells or a S protein-priming protein on host cells (e.g., TMPRSS2), activation of host cells for allowing virus entry, activation of immune cells as a result of the entry of CoV into the cell, e.g., via presentation of CoV antigen(s) on the host cells' MHC molecule, and resulting inflammation. The subject anti-CoV-S antibodies are capable of inhibiting one, a combination of, or all of these exemplary CoV-S biological activities. For example, the anti-CoV-S antibodies and antigen-binding fragments thereof provided herein may neutralize CoV virions or reduce the infectivity of CoV virions.

[0277] The antibody or antigen-binding fragment thereof according to the disclosure can be used in a variety of therapeutic applications. For example, in some embodiments the anti-CoV-S antibody or antigen-binding fragment thereof are useful for treating conditions associated with CoV-S, such as, but not limited to, symptoms associated with CoV infection. The CoV may be any CoV, including SARS-CoV, SARS-COV-2, MERS-COV, HCoV-HKU1, HCoV-OC43, HCoV-229E, and HCoV-NL63, and also may be any of the CoV species listed above herein.

[0278] Specific examples of CoV infection-associated symptoms are fever, cough, dry cough, shortness of breath or difficulty of breath, fatigue, aches, runny nose, congestion, sore throat, conjunctivitis, chest pain, headache, muscle ache, chills, loss of smell, and loss of taste, and gastrointestinal symptoms including diarrhea. Complications and/or diseases/disorders associated with coronavirus infection may include, for example, bronchitis, pneumonia, respiratory failure, acute respiratory failure, organ failure, multi-organ system failure, pediatric inflammatory multisystem syndrome, acute respiratory distress syndrome (a severe lung condition that causes low oxygen in the blood and organs), blood clots, cardiac conditions, myocardial injury, myocarditis, heart failure, cardiac arrest, acute myocardial infarction, dysrhythmias, venous thromboembolism, post-intensive care syndrome, shock, anaphylactic shock, cytokine release syndrome, septic shock, disseminated intravascular coagulation, ischemic stroke, intracerebral hemorrhage, microangiopathic thrombosis, psychosis, seizure, nonconvulsive status epilepticus, traumatic brain injury, stroke, anoxic brain injury, encephalitis, posterior reversible leukoencephalopathy, necrotizing encephalopathy, post-infectious encephalitis, autoimmune mediated encephalitis, acute disseminated encephalomyelitis, acute kidney injury, acute liver injury, pancreatic injury, immune thrombocytopenia, subacute thyroiditis, gastrointestinal complications, aspergillosis, increased susceptibility to infection with another virus or bacteria, and/or pregnancy-related complications. Certain diseases and conditions, such as high blood pressure, type 1 diabetes, liver disease, overweight, chronic lung diseases including cystic fibrosis, pulmonary fibrosis, and asthma, compromised immune system due to transplant, use of an immunosuppressant, or HIV infection, and brain and nervous system condition, may increase the risk of CoV infection-associated complications and diseases.

[0279] The subject anti-CoV-S antibodies and antigen-binding fragments thereof may be used alone or in association with other active agents or drugs, including other biologics, to treat any subject in which blocking, inhibiting, or neutralizing the in vivo effect of CoV-S or blocking or inhibiting the interaction of CoV-S and its receptor(s) (e.g., ACE2, CD209L, L-SIGN, DPP4, or CD26) on host cells or a S protein-priming protein on host cells (e.g., TMPRSS2), is therapeutically desirable.

[0280] The anti-CoV-S antibodies and antigen-binding fragments thereof comprising the disclosure have binding affinity for CoV-S, such as SARS-COV-S or SARS-COV-S2. Some antibodies of the present disclosure binds to SARS-COV-S or SARS-COV-S2 with a similar K_{D} (M), while some antibodies of the present disclosure bind to SARS-COV-S with a lower K_{D} (M) (i.e., higher affinity) than to SARS-COV-S2, and some antibodies of the present disclosure bind to SARS-COV-S-2 with a lower K_{D} (M) (i.e., higher affinity) than to SARS-COV-S.

[0281] Exemplary anti-CoV antibodies and antigen-binding fragments thereof according to the disclosure, and the specific CDRs thereof are identified in this section. For convenience, each exemplified antibody or antigen-binding fragment thereof, and corresponding sequences are separately identified by a specific nomenclature as shown in Tables 3-6.

[0282] The anti-CoV-S antibodies and antigen-binding fragments thereof comprising the disclosure have binding affinity for CoV-S, such as SARS-COV-S or SARS-COV-S2. Some antibodies of the present disclosure binds to SARS-COV-S or SARS-COV-S2 with a similar K_{D} (M), while some antibodies of the present disclosure bind to SARS-COV-S with a lower K_{D} (M) (i.e., higher affinity) than to SARS-COV-S2, and some antibodies of the present disclosure bind to SARS-COV-S-2 with a lower K_{D} (M) (i.e., higher affinity) than to SARS-COV-S. Affinities to different CoV-S proteins for antibodies of the present disclosure are provided in Tables 3-6.

### C. Anti-CoV-S Antibody Polypeptide Sequences and Nucleic Acid Sequences Encoding Thereof

### Antibodies Disclosed Herein

[0283] Anti-CoV-S antibodies, and antigen-binding fragments thereof, specifically provided by the present disclosure include any one of the antibodies as shown Tables 3-6, and antigen-binding fragments thereof. Any Fc variant may be used in combination with any of the variable sequences disclosed herein.

[0284] Tables 3 and 5 (Appendixes A and C) and Tables 4 and 6 (Appendixes B and D) show (i) the amino acid sequences of the VH, VH FR1, VH CDR1, VH FR2, VH CDR2, VH FR3, VH CDR3, VH FR4, VL, VL FR1, VL CDR1, VL FR2, VL CDR2, VL FR3, VL CDR3, and VL FR4 for individual antibodies, and (ii) the DNA sequences of the VH and VL chains for individual antibodies. In some embodiments, the VH comprises a reverted VH sequence of an antibody. In some embodiments, the VL sequence comprises a reverted VL sequence of an antibody. The reverted VH and VL sequences include reversions of primer-induced mutations to germline sequences, and also include silent amino acid mutations that have been reverted to germinline DNA codons.

### Variations of the Disclosed Antibodies and Polynucleotide Sequences Encoding Such Variations

[0285] In one embodiment, the disclosure contemplates anti-CoV-S antibodies or antigen-binding antibody fragments comprising (i) a VH CDR that is same as the VH CDR3 of, (ii) a VH CDR3 and VL CDR3, both of which as same as both of the VH CDR3 and the VL CDR3 of, (iii) at least 1, 2, 3, 4, 5, or 6 CDRs that are same as the corresponding CDR(s) of, or (iv) 6 CDRs that are all the same as the 6 CDRs of any one of the antibodies disclosed in Tables 3-6. In some embodiments, the antibody is VYD225, VYD224, VYD223, ADI-75696, ADI-75864, ADI-75620, ADI-75738, ADI-75700, ADI-75859, ADI-75684, ADI-75754, ADI-75648, ADI-75632, ADI-75741, ADI-75725, ADI-75717, ADI-75706, ADI-75699, ADI-75747, or ADI-75773. In some embodiments, the antibody is VYD224. In some embodiments, the antibody is VYD225.

[0286] In some embodiments, the disclosure contemplates anti-CoV-S antibodies or antigen-binding antibody fragments, wherein (a) the VH comprises an amino acid sequence with at least 80, 85, 90, 91, 92, 93, 94, 95, 96, 97, 98, 99, or 100% sequence identity to the amino acid sequence of the VH of, and (b) the VL comprises an amino acid sequence with at least 80, 85, 90, 91, 92, 93, 94, 95, 96, 97, 98, 99, or 100% sequence identity to the amino acid sequence of the VL of any one of the disclosed antibodies in Tables 3-6. In some embodiments, the antibody is VYD225, VYD224, VYD223, ADI-75696, ADI-75864, ADI-75620, ADI-75738, ADI-75700, ADI-75859, ADI-75684, ADI-75754, ADI-75648, ADI-75632, ADI-75741, ADI-75725, ADI-75717, ADI-75706, ADI-75699, ADI-75747, or ADI-75773. In some embodiments, the antibody is VYD224. In some embodiments, the antibody is VYD225.

[0287] In further embodiments, the disclosure contemplates anti-CoV-S antibodies or antigen-binding antibody fragments which optionally may be affinity-matured, comprising (i) a VH CDR that is same as the VH CDR3 of, (ii) a VH CDR3 and VL CDR3, both of which as same as both of the VH CDR3 and the VL CDR3 of, (iii) at least 1, 2, 3, 4, 5, or 6 CDRs that are same as the corresponding CDR(s) of, or (iv) 6 CDRs that are all the same as the 6 CDRs of any one of the antibodies disclosed in Tables 3-6. In some embodiments, the antibody is VYD225, VYD224, VYD223, ADI-75696, ADI-75864, ADI-75620, ADI-75738, ADI-75700, ADI-75859, ADI-75684, ADI-75754, ADI-75648, ADI-75632, ADI-75741, ADI-75725, ADI-75717, ADI-75706, ADI-75699, ADI-75747, or ADI-75773. In some embodiments, the antibody is VYD224. In some embodiments, the antibody is VYD225.

[0288] In further embodiments, the disclosure contemplates anti-CoV-S antibodies or antigen-binding antibody fragments which optionally may be affinity-matured, comprising one of the CDR requirements (i)-(iv) of the immediately above paragraph, further wherein (a) the VH comprises an amino acid sequence with at least 80, 85, 90, 91, 92, 93, 94, 95, 96, 97, 98, 99, or 100% sequence identity to the amino acid sequence of the VH of, and (b) the VL comprises an amino acid sequence with at least 80, 85, 90, 91, 92, 93, 94, 95, 96, 97, 98, 99, or 100% sequence identity to the amino acid sequence of the VL of any one of the disclosed antibodies in Tables 3-6. In some embodiments, the antibody is VYD225, VYD224, VYD223 ADI-75696, ADI-75864, ADI-75620, ADI-75738, ADI-75700, ADI-75859, ADI-75684, ADI-75754, ADI-75648, ADI-75632, ADI-75741, ADI-75725, ADI-75717, ADI-75706, ADI-75699, ADI-75747, or ADI-75773. In some embodiments, the antibody is VYD224. In some embodiments, the antibody is VYD225, or an antigen-binding portion thereof.

[0289] In other embodiments, the disclosure includes antibodies and antigen-binding fragments having binding specificity to COV-S, which optionally may be affinity-matured, that bind the same epitope as any one of antibodies disclosed in Tables 3-6. In some embodiments, the antibody is VYD225, VYD224, VYD223 ADI-75696, ADI-75864, ADI-75620, ADI-75738, ADI-75700, ADI-75859, ADI-75684, ADI-75754, ADI-75648, ADI-75632, ADI-75741, ADI-75725, ADI-75717, ADI-75706, ADI-75699, ADI-75747, or ADI-75773. In some embodiments, the antibody is VYD224. In some embodiments, the antibody is VYD225, or an antigen-binding portion thereof.

[0290] In other embodiments, the anti-CoV-S antibodies and antigen-binding fragments of the disclosure which optionally may be affinity-matured, comprise, or alternatively consist of, combinations of one or more of the FRs, CDRs, the VH and VL sequences, and the heavy chain and light chain sequences set forth above, including all of them, or sequences that are at least 90%, 91%, 92%, 93%, 94%, 95%, 96%, 97%, 98%, or 99% identical thereto.

[0291] In a further embodiment of the disclosure, antigen-binding fragments comprise, or alternatively consist of, Fab fragments having binding specificity for CoV-S. The Fab fragment preferably includes the VH and the VL sequence of antibodies in Tables 3-6, or sequences that are at least 90%, 91%, 92%, 93%, 94%, 95%, 96%, 97%, 98%, or 99% identical thereto. This embodiment of the disclosure further includes Fabs containing additions, deletions, and variants of such VH and VL sequence while retaining binding specificity for CoV-S.

[0292] In some embodiments of the disclosure described herein, Fab fragments may be produced by enzymatic digestion (e.g., papain) of the parent full antibody. In another embodiment of the disclosure, anti-CoV-S antibodies such as antibodies disclosed in Tables 3-6, and Fab fragments thereof may be produced via expression in mammalian cells, such as CHO, NSO, or HEK 293 cells, fungal, insect, or microbial systems, such as yeast cells.

[0293] In additional embodiments, the disclosure is further directed to polynucleotides encoding antibody polypeptides having binding specificity to COV-S, including the VH and VL of antibodies in Tables 3-6, as well as fragments, variants, optionally affinity-matured variants, and combinations of one or more of the FRs, CDRs, the VH and VL sequences, and the heavy chain and light chain sequences set forth above, including all of them, or sequences that are at least 90%, 91%, 92%, 93%, 94%, 95%, 96%, 97%, 98%, or 99% identical thereto. In some embodiments, the antibody is VYD225, VYD224, VYD223, ADI-75696, ADI-75864, ADI-75620, ADI-75738, ADI-75700, ADI-75859, ADI-75684, ADI-75754, ADI-75648, ADI-75632, ADI-75741, ADI-75725, ADI-75717, ADI-75706, ADI-75699, ADI-75747, or ADI-75773. In some embodiments, the antibody is VYD224. In some embodiments, the antibody is VYD225, or an antigen-binding portion thereof.

[0294] In other embodiments, the disclosure contemplates isolated anti-CoV-S antibodies and antigen binding fragments comprising (i) a VH which is same as the VH of one antibody selected from Tables 3 and 5; and (ii) a VL which is same as the VL of another antibody selected from Tables 4 and 6, or a variant thereof, wherein optionally one or more of the framework region residues (“FR residues”) and/or CDR residues in said VH or VL polypeptide has been substituted with another amino acid residue resulting in an anti-CoV-S antibody that binds, e.g., specifically binds, CoV-S. In some embodiments, the antibody is VYD225, VYD224, VYD223, ADI-75696, ADI-75864, ADI-75620, ADI-75738, ADI-75700, ADI-75859, ADI-75684, ADI-75754, ADI-75648, ADI-75632, ADI-75741, ADI-75725, ADI-75717, ADI-75706, ADI-75699, ADI-75747, or ADI-75773. In some embodiments, the antibody is VYD224. In some embodiments, the antibody is VYD225, or an antigen-binding portion thereof.

[0295] The disclosure also includes humanized, primatized and other chimeric forms of these antibodies. The chimeric and humanized antibodies may include an Fc derived from IgG1, IgG2, IgG3, or IgG4 constant regions.

[0296] In some embodiments of the disclosure, the chimeric or humanized antibodies or fragments or VH or VL polypeptides originate or are derived from one or more human antibodies, e.g., a human antibody identified from a clonal human B cell population.

[0297] In some aspects, the disclosure provides vectors comprising a nucleic acid molecule encoding an anti-CoV-S antibody or fragment thereof as disclosed herein. In some embodiments, the disclosure provides host cells comprising a nucleic acid molecule encoding an anti-CoV-S antibody or fragment thereof as disclosed herein.

[0298] In some aspects, the disclosure provides isolated antibodies or antigen binding fragments thereof that competes for binding to CoV-S with an antibody or antigen binding fragment thereof disclosed herein.

[0299] In some aspects, the disclosure provides a nucleic acid molecule encoding any of the antibodies or antigen binding fragments disclosed herein.

[0300] In some aspects, the disclosure provides a pharmaceutical or diagnostic composition comprising at least one antibody or antigen binding fragment thereof as disclosed herein.

[0301] In some aspects, the disclosure provides a method for treating or preventing a condition associated with elevated CoV-S levels in a subject, comprising administering to a subject in need thereof an effective amount of at least one isolated antibody or antigen binding fragment thereof as disclosed herein.

[0302] In some aspects, the disclosure provides a method of inhibiting binding of COV-S to its receptor (e.g., ACE2, L-SIGN, CD209L, DPP4, CD26) or an S protein-priming protein (e.g., TMPRSS2) in a subject comprising administering an effective amount of at least one antibody or antigen binding fragment thereof as disclosed herein. For example, administering one or more of the antibodies in Tables 3-6 may inhibit binding of CoV-S to its receptor, e.g., ACE2.

[0303] In some aspects, the disclosure provides an antibody or antigen binding fragment thereof that selectively binds to CoV-S, wherein the antibody or antigen binding fragment thereof binds to CoV-S with a K_{D} of less than or equal to 5×10⁻⁵ M, 10⁻⁵ M, 5×10⁻⁶ M, 10⁻⁶ M, 5×10⁻⁷ M, 10⁻⁷ M, 5×10⁻⁸ M, 10⁻⁸ M, 5×10⁻⁹ M, 10⁻⁹ M, 5×10⁻¹⁰ M, 10⁻¹⁰ M, 5×10⁻¹¹ M, 10⁻¹¹ M, 5×10⁻¹² M, 10⁻¹² M, 5×10⁻¹³ M, or 10⁻¹³ M; preferably, with a K_{D} of less than or equal to 5×10⁻¹⁰ M, 10⁻¹⁰ M, 5×10⁻¹¹ M, 10⁻¹¹ M, 5×10⁻¹² M, or 10⁻¹² M; more preferably, with a K_{D} that is less than about 100 pM, less than about 50 pM, less than about 40 pM, less than about 25 pM, less than about 1 pM, between about 10 pM and about 100 pM, between about 1 pM and about 100 pM, or between about 1 pM and about 10 pM. Preferably, the anti-CoV-S antibody or antigen binding fragment has cross-reactivity to the S protein of CoV other than SARS-COV-S or SARS-COV-2-S.

[0304] The inventive antibodies and antigen binding fragments thereof may be modified post-translationally to add effector moieties such as chemical linkers, detectable moieties such as for example fluorescent dyes, enzymes, substrates, bioluminescent materials, radioactive materials, and chemiluminescent moieties, or functional moieties such as for example streptavidin, avidin, biotin, a cytotoxin, a cytotoxic agent, and radioactive materials.

[0305] Antibodies and antigen binding fragments thereof may also be chemically modified to provide additional advantages such as increased solubility, stability and circulating time (in vivo half-life) of the polypeptide, or decreased immunogenicity (See U.S. Pat. No. 4,179,337). The chemical moieties for derivatization may be selected from water soluble polymers such as polyethylene glycol, ethylene glycol/propylene glycol copolymers, carboxymethylcellulose, dextran, polyvinyl alcohol, and the like. The antibodies and fragments thereof may be modified at random positions within the molecule, or at predetermined positions within the molecule and may include one, two, three, or more attached chemical moieties.

[0306] The polymer may be of any molecular weight, and may be branched or unbranched. For polyethylene glycol, the preferred molecular weight is between about 1 kDa and about 100 kDa (the term “about” indicating that in preparations of polyethylene glycol, some molecules will weigh more, some less, than the stated molecular weight) for ease in handling and manufacturing. Other sizes may be used, depending on the desired therapeutic profile (e.g., the duration of sustained release desired, the effects, if any on biological activity, the ease in handling, the degree or lack of antigenicity and other known effects of the polyethylene glycol to a therapeutic protein or analog). For example, the polyethylene glycol may have an average molecular weight of about 200, 500, 1000, 1500, 2000, 2500, 3000, 3500, 4000, 4500, 5000, 5500, 6000, 6500, 7000, 7500, 8000, 8500, 9000, 9500, 10,000, 10,500, 11,000, 11,500, 12,000, 12,500, 13,000, 13,500, 14,000, 14,500, 15,000, 15,500, 16,000, 16,500, 17,000, 17,500, 18,000, 18,500, 19,000, 19,500, 20,000, 25,000, 30,000, 35,000, 40,000, 50,000, 55,000, 60,000, 65,000, 70,000, 75,000, 80,000, 85,000, 90,000, 95,000, or 100,000 kDa. Branched polyethylene glycols are described, for example, in U.S. Pat. No. 5,643,575; Morpurgo et al., Appl. Biochem. Biotechnol., 56:59-72 (1996); Vorobjev et al., Nucleosides and Nucleotides, 18:2745-2750 (1999); and Caliceti et al., Bioconjug. Chem., 10:638-646 (1999), the disclosures of each of which are incorporated herein by reference.

[0307] There are a number of attachment methods available to those skilled in the art (See e.g., EP 0 401 384, herein incorporated by reference, disclosing a method of coupling PEG to G-CSF; and Malik et al., Exp. Hematol., 20:1028-1035 (1992) (reporting pegylation of GM-CSF using tresyl chloride)). For example, polyethylene glycol may be covalently bound through amino acid residues via a reactive group, such as, a free amino or carboxyl group. Reactive groups are those to which an activated polyethylene glycol molecule may be bound. The amino acid residues having a free amino group may include lysine residues and the N-terminal amino acid residues; those having a free carboxyl group may include aspartic acid residues glutamic acid residues and the C-terminal amino acid residue. Sulfhydryl groups may also be used as a reactive group for attaching the polyethylene glycol molecules. Preferred for therapeutic purposes is attachment at an amino group, such as attachment at the N-terminus or lysine group.

[0308] As described above, polyethylene glycol may be attached to proteins via linkage to any of a number of amino acid residues. For example, polyethylene glycol can be linked to polypeptides via covalent bonds to lysine, histidine, aspartic acid, glutamic acid, or cysteine residues. One or more reaction chemistries may be employed to attach polyethylene glycol to specific amino acid residues (e.g., lysine, histidine, aspartic acid, glutamic acid, or cysteine) or to more than one type of amino acid residue (e.g., lysine, histidine, aspartic acid, glutamic acid, cysteine and combinations thereof).

[0309] Alternatively, antibodies or antigen binding fragments thereof having increased in vivo half-lives may be produced via fusion with albumin (including but not limited to recombinant human serum albumin or fragments or variants thereof (See, e.g., U.S. Pat. No. 5,876,969, EP 0 413 622, and U.S. Pat. No. 5,766,883, herein incorporated by reference in their entirety)), or other circulating blood proteins such as transferrin or ferritin. In a preferred embodiment, polypeptides and/or antibodies of the present disclosure (including fragments or variants thereof) are fused with the mature form of human serum albumin (i.e., amino acids 1-585 of human serum albumin as shown in FIGS. 1 and 2 of EP 0 322 094) which is herein incorporated by reference in its entirety. Polynucleotides encoding fusion proteins of the disclosure are also encompassed by the disclosure.

[0310] Regarding detectable moieties, further exemplary enzymes include, but are not limited to, horseradish peroxidase, acetylcholinesterase, alkaline phosphatase, beta-galactosidase, and luciferase. Further exemplary fluorescent materials include, but are not limited to, rhodamine, fluorescein, fluorescein isothiocyanate, umbelliferone, dichlorotriazinylamine, phycoerythrin, and dansyl chloride. Further exemplary chemiluminescent moieties include, but are not limited to, luminol. Further exemplary bioluminescent materials include, but are not limited to, luciferin and aequorin. Further exemplary radioactive materials include, but are not limited to, Iodine 125 (¹²⁵I), Carbon 14 (¹⁴C), Sulfur 35 (³⁵S), Tritium (³H) and Phosphorus 32 (³²P).

[0311] Methods are known in the art for conjugating an antibody or antigen binding fragment thereof to a detectable moiety and the like, such as for example those methods described by Hunter et al., Nature, 144:945 (1962); David et al., Biochemistry, 13:1014 (1974); Pain et al., J. Immunol. Meth., 40:219 (1981); and Nygren, J., Histochem. and Cytochem., 30:407 (1982).

[0312] Embodiments described herein further include variants and equivalents that are substantially homologous to the antibodies, antibody fragments, diabodies, SMIPs, camelbodies, nanobodies, IgNAR, polypeptides, variable regions, and CDRs set forth herein. These may contain, e.g., conservative substitution mutations, (i.e., the substitution of one or more amino acids by similar amino acids). For example, conservative substitution refers to the substitution of an amino acid with another within the same general class, e.g., one acidic amino acid with another acidic amino acid, one basic amino acid with another basic amino acid, or one neutral amino acid by another neutral amino acid. The intent of a conservative amino acid substitution is well known in the art.

[0313] In other embodiments, the disclosure contemplates polypeptide sequences having at least 90% or greater sequence homology to any one or more of the polypeptide sequences of antigen binding fragments, variable regions and CDRs set forth herein. More preferably, the disclosure contemplates polypeptide sequences having at least 95% or greater sequence homology, even more preferably at least 98% or greater sequence homology, and still more preferably at least 99% or greater sequence homology to any one or more of the polypeptide sequences of antigen binding fragments, variable regions, and CDRs set forth herein.

[0314] Methods for determining homology between nucleic acid and amino acid sequences are well known to those of ordinary skill in the art.

[0315] In other embodiments, the disclosure further contemplates the above-recited polypeptide homologs of the antigen binding fragments, variable regions and CDRs set forth herein further having anti-CoV-S activity. Non-limiting examples of anti-CoV-S activity are set forth herein, e.g., ability to inhibit CoV-S binding to its receptor such as ACE2 or L-SIGN or an S protein-priming protein, thereby resulting in the reduced entry of CoV into cells.

[0316] In other embodiments, the disclosure further contemplates the generation and use of antibodies that bind any of the foregoing sequences, including, but not limited to, anti-idiotypic antibodies. In an exemplary embodiment, such an anti-idiotypic antibody could be administered to a subject who has received an anti-CoV-S antibody to modulate, reduce, or neutralize, the effect of the anti-CoV-S antibody. Such antibodies could also be useful for treatment of an autoimmune disease characterized by the presence of anti-CoV-S antibodies. A further exemplary use of such antibodies, e.g., anti-idiotypic antibodies, is for detection of the anti-CoV-S antibodies of the present disclosure, for example to monitor the levels of the anti-CoV-S antibodies present in a subject's blood or other bodily fluids. For example, in one embodiment, the disclosure provides a method of using the anti-idiotypic antibody to monitor the in vivo levels of said anti-CoV-S antibody or antigen binding fragment thereof in a subject or to neutralize said anti-CoV-S antibody in a subject being administered said anti-CoV-S antibody or antigen binding fragment thereof.

[0317] The present disclosure also contemplates anti-CoV-S antibodies comprising any of the polypeptide or polynucleotide sequences described herein substituted for any of the other polynucleotide sequences described herein. For example, without limitation thereto, the present disclosure contemplates antibodies comprising the combination of any of the VL and VH sequences described herein, and further contemplates antibodies resulting from substitution of any of the CDR sequences described herein for any of the other CDR sequences described herein.

[0318] Another embodiment of the disclosure contemplates these polynucleotides incorporated into an expression vector for expression in mammalian cells such as CHO, NSO, or HEK-293 cells, or in fungal, insect, or microbial systems such as yeast cells. In one embodiment of the disclosure described herein, Fab fragments can be produced by enzymatic digestion (e.g., papain) of any one of the antibodies in Tables 3-6; following expression of the full-length polynucleotides in a suitable host. In another embodiment, anti-CoV-S antibodies, such as anyone the antibodies in Tables 3-6, or Fab fragments thereof, can be produced via expression of the polynucleotides encoding the any one of the antibodies in Tables 3-6, in mammalian cells such as CHO, NSO, or HEK 293 cells, fungal, insect, or microbial systems such as yeast cells. In some embodiments, the antibody is VYD225, VYD224, VYD223 ADI-75696, ADI-75864, ADI-75620, ADI-75738, ADI-75700, ADI-75859, ADI-75684, ADI-75754, ADI-75648, ADI-75632, ADI-75741, ADI-75725, ADI-75717, ADI-75706, ADI-75699, ADI-75747, or ADI-75773, or an antigen-binding portion thereof. In some embodiments, the antibody is VYD224. In some embodiments, the antibody is VYD225, or an antigen-binding portion thereof.

[0319] Host cells and vectors comprising said polynucleotides are also contemplated.

[0320] The disclosure further contemplates vectors comprising the polynucleotide sequences encoding the variable heavy and light chain polypeptide sequences, as well as the individual CDRs (hypervariable regions), as set forth herein, as well as host cells comprising said vector sequences. In embodiments of the disclosure, the host cells are mammalian cells, such as CHO cells. In embodiments of the disclosure, the host cells are yeast cells.

### D. Antibody Combinations

[0321] The present disclosure also provides a composition comprising a combination of two or more antibodies, or antigen-binding fragment thereof, as disclosed herein.

[0322] In some embodiments, the two or more antibodies, or antigen-binding fragment thereof, within the composition, bind to the same epitope. In some embodiments, the two or more antibodies, or antigen-binding fragment thereof, within the composition, bind to different or non-overlapping epitopes.

[0323] In some embodiments, the composition comprises two or more isolated antibodies, or antigen-binding fragment thereof, selected from the group consisting of VYD225, VYD223 and VYD224.

[0324] In some embodiments, the composition comprises VYD225 and VYD224.

[0325] The composition comprising two or more antibodies or antigen-binding fragment thereof can be formulated into a pharmaceutical composition and be used for the methods as described herein.

### E. Antibody-Drug Conjugate Comprising Anti-CoV-S Antibody

[0326] In some aspects, the disclosure is further directed to antibody-drug conjugates (ADCs) comprising (a) any antibody or antigen-binding antibody fragment described herein; and (b) a drug conjugated to the antibody or antigen-binding antibody fragment, either directly or indirectly (e.g., via a linker), and the use of antibody-drug conjugates for the methods of the present application.

[0327] In some aspects, the drug may be, but not limited to, a cytotoxic drug, an apoptotic drug, an immunostimulatory drug, an anti-microbial drug, an antibacterial drug or vaccine, an antiviral drug, antihelminth drug, antiparasitic drug, an anti-inflammatory drug, antihistamine, an anti-fibrotic drug, an immunosuppressive drug, a steroid, a bronchodilator, a beta blocker, an ACE inhibitor, an enzyme, a serine protease inhibitor, a toxin, a radioisotope, a compound, a small molecule, a small molecule inhibitor, a protein, a peptide, a vector, a plasmid, a viral particle, a nanoparticle, a DNA molecule, an RNA molecule, an siRNA, an shRNA, a micro RNA, an oligonucleotide, and an imaging drug.

[0328] An antiviral drug may be remdesivir, favipiravir, darunavir, nelfinavir, saquinavir, lopinavir or ritonavir; an antihelminth drug may be ivermectin; an antiparasite drug may be hydroxychloroquine, chloroquine, or atovaquone; antibacterial drug or vaccine may be the tuberculosis vaccine BCG; an anti-inflammatory drug, may be ciclesonide, a TNF inhibitor (e.g., adalimumab), a TNF receptor inhibitor (e.g., etanercept), an IL-6 inhibitor (e.g., clazakizumab), an IL-6 receptor inhibitor (e.g., toclizumab), or metamizole; an antihistamine drug may be bepotastine; an ACE inhibitor may be moexipril; and a drug that inhibits priming of CoV-S may be a serine protease inhibitor such as nafamostat.

[0329] The toxin may be a bacterial, fungal, plant, or animal toxin, or a fragment thereof. Examples include, but are not limited to, diphtheria A chain, diphtheria toxin, exotoxin A chain, ricin A chain, abrin A chain, modeccin A chain, alpha sarcin, Aleurites fordii protein, a dianthin protein, or a Phytolacca americana protein.

[0330] The a cytotoxic drug or anti-proliferative drug may be, for example, but is not limited to, doxorubicin, daunorubicin, cucurbitacin, chaetocin, chaetoglobosin, chlamydocin, calicheamicin, nemorubicin, cryptophyscin, mensacarcin, ansamitocin, mitomycin C, geldanamycin, mechercharmycin, rebeccamycin, safracin, okilactomycin, oligomycin, actinomycin, sandramycin, hypothemycin, polyketomycin, hydroxyellipticine, thiocolchicine, methotrexate, triptolide, taltobulin, lactacystin, dolastatin, auristatin, monomethyl auristatin E (MMAE), monomethyl auristatin F (MMAF), telomestatin, tubastatin A, combretastatin, maytansinoid, MMAD, MMAF, DM1, DM4, DTT, 16-GMB-APA-GA, 17-DMAP-GA, JW 55, pyrrolobenzodiazepine, SN-38, Ro 5-3335, puwainaphycin, duocarmycin, bafilomycin, taxoid, tubulysin, ferulenol, lusiol A, fumagillin, hygrolidin, glucopiericidin, amanitin, ansatrienin, cinerubin, phallacidin, phalloidin, phytosphongosine, piericidin, poronetin, phodophyllotoxin, gramicidin A, sanguinarine, sinefungin, herboxidiene, microcolin B, microcystin, muscotoxin A, tolytoxin, tripolin A, myoseverin, mytoxin B, nocuolin A, psuedolaric acid B, pseurotin A, cyclopamine, curvulin, colchicine, aphidicolin, englerin, cordycepin, apoptolidin, epothilone A, limaquinone, isatropolone, isofistularin, quinaldopeptin, ixabepilone, aeroplysinin, arruginosin, agrochelin, epothilone, or a derivative thereof (for example, see Polakis P. et al., Pharmacol Rev. 2016 January; 68 (1): 3-19. doi: 10.1124/pr.114.009373) (the drugs may be obtained from many vendors, including Creative Biolabs®).

[0331] The radioisotope may be for example, but is not limited to, At²¹¹, I¹³¹, In¹³¹, I¹²⁵, Y⁹⁰, Re¹⁸⁶, Re¹⁸⁸, Sm¹⁵³, Bi²¹², P³², Pb²¹² and radioactive isotopes of Lu.

[0332] In certain embodiments, the drug may be, but is not limited to, MMAE or MMAF.

[0333] In some embodiments, the Ab or antigen-binding Ab fragment is directly conjugated to the drug to form an ADC.

[0334] In some embodiments, the antibody or antigen-binding antibody fragment is indirectly conjugated to the drug to form an ADC.

[0335] Any appropriate conjugation method may be used to generate an ADC (for example, Nolting B. Methods Mol Biol. 2013; 1045:71-100. doi: 10.1007/978-1-62703-541-5_5; Jain N. et al., Pharm Res. 2015 November; 32 (11): 3526-40. doi: 10.1007/s11095-015-1657-7. Epub 2015 Mar. 11; Tsuchikama K. et al., Protein Cell. 2018 January; 9 (1): 33-46. doi: 10.1007/s13238-016-0323-0. Epub 2016 Oct. 14; Polakis P. et al., Pharmacol Rev. 2016 January; 68 (1): 3-19. doi: 10.1124/pr.114.009373). Examples of methods that may be used to perform conjugation include, but are not limited to, chemical conjugation and enzymatic conjugation.

[0336] Chemical conjugation may utilize, for example, but is not limited to, lysine amide coupling, cysteine coupling, and/or non-natural amino acid incorporation by genetic engineering. Enzymatic conjugation may utilize, for example, but is not limited to, transpeptidation using sortase, transpeptidation using microbial transglutaminase, and/or N-Glycan engineering.

[0337] In certain aspects, one or more of cleavable linkers may be used for conjugation. The cleavable linker may enable cleavage of the drug upon responding to, for example, but not limited to, an environmental difference between the extracellular and intracellular environments (pH, redox potential, etc.) or by specific lysosomal enzymes.

[0338] Examples of the cleavable linker include, but are not limited to, hydrazone linkers, peptide linkers including cathepsin B-responsive linkers, such as valine-citrulline (vc) linker, disulfide linkers such as N-succinimidyl-4-(2-pyridyldithio) (SPP) linker or N-succinimidyl-4-(2-pyridyldithio) butanoate (SPDB) linker, and pyrophosphate diester linkers.

[0339] Alternatively or simultaneously, one or more of non-cleavable linkers may be used. Examples of non-cleavable linkers include thioether linkers, such as N-succinimidyl 4-(N-maleimidomethyl) cyclohexane-1-carboxylate (SMCC), and maleimidocaproyl (mc) linkers. Generally, non-cleavable linkers are more resistant to proteolytic degradation and more stable compared to cleavable linkers.

### F. Chimeric Antigen Receptor Comprising Anti-CoV-S Antigen-Binding Antibody Fragment

[0340] The present application further provides the use of chimeric antigen receptor comprising the anti-CoV-S antigen-binding fragment for the methods of the disclosure. In some embodiments, a compound specific to CoV-S according to the present disclosure may be a chimeric antigen receptor (CAR). In particular, the CARs of the present disclosure comprise an antigen binding (AB) domain that binds to CoV-S, a transmembrane (TM) domain, and an intracellular signaling (ICS) domain.

[0341] In some embodiments, a CAR may comprise a hinge that joins the AB domain and said TM domain.

[0342] In some embodiments, the CAR may comprise one or more costimulatory (CS) domains.

### AB Domain

[0343] A CAR according to the disclosure will comprise an antigen-binding (AB) domain which binds to COV-S. In some embodiments, the AB domain of the CAR may comprise any of the anti-COV-S antigen-binding antibody fragments disclosed herein.

[0344] In some embodiments, the AB domain of the CAR may comprise any of the antigen-binding domain of any of the anti-COV-S antibodies disclosed herein.

[0345] In some embodiments, the AB domain of the CAR may comprise any of the anti-COV-S antibodies, anti-COV-S antigen-binding antibody fragments, anti-COV-S multi-specific Abs, anti-COV-S multi-specific antigen-binding antibody fragments, and anti-COV-S ADCs disclosed herein, or the ABD thereof.

[0346] In some embodiments, the AB domain of the CAR may comprise an anti-COV-S scFv.

[0347] In some embodiments, the AB domain may comprise an amino acid sequence at least 80%, at least 85%, at least 90%, at least 91%, at least 92%, at least 93%, at least 94%, at least 95%, at least 96%, at least 97%, at least 98%, at least 99%, or 100% identical to an scFv comprising the VH and VL of an antibody disclosed in Tables 3-6.

[0348] In some aspects, the AB domain may compete for binding to COV-S with one or more antibodies disclosed in Tables 3-6.

### Hinge

[0349] In some embodiments, the CAR may comprise a hinge sequence between the AB domain and the TM domain. One of the ordinary skill in the art will appreciate that a hinge sequence is a short sequence of amino acids that facilitates flexibility (see, e.g. Woof J. M. et al., Nat. Rev. Immunol., 4 (2): 89-99 (2004)). The hinge sequence can be any suitable sequence derived or obtained from any suitable molecule.

[0350] In some embodiments, the length of the hinge sequence may be optimized based on the desired length of the extracellular portion of the CAR, which may be based on the location of the epitope within the target molecule. For example, if the epitope is in the membrane proximal region within the target molecule, longer hinges may be optimal.

[0351] In some embodiments, the hinge may be derived from or include at least a portion of an immunoglobulin Fc region, for example, an IgG1 Fc region, an IgG2 Fc region, an IgG3 Fc region, an IgG4 Fc region, an IgE Fc region, an IgM Fc region, or an IgA Fc region. In certain embodiments, the hinge includes at least a portion of an IgG1, an IgG2, an IgG3, an IgG4, an IgE, an IgM, or an IgA immunoglobulin Fc region that falls within its CH2 and CH3 domains. In some embodiments, the hinge may also include at least a portion of a corresponding immunoglobulin hinge region. In some embodiments, the hinge is derived from or includes at least a portion of a modified immunoglobulin Fc region, for example, a modified IgG1 Fc region, a modified IgG2 Fc region, a modified IgG3 Fc region, a modified IgG4 Fc region, a modified IgE Fc region, a modified IgM Fc region, or a modified IgA Fc region. The modified immunoglobulin Fc region may have one or more mutations (e.g., point mutations, insertions, deletions, duplications) resulting in one or more amino acid substitutions, modifications, or deletions that cause impaired binding of the hinge to an Fc receptor (FcR). In some aspects, the modified immunoglobulin Fc region may be designed with one or more mutations which result in one or more amino acid substitutions, modifications, or deletions that cause impaired binding of the hinge to one or more FcR including, but not limited to, FcγRI, FcγR2A, FcγR2B1, Fcγ2B2, Fcγ 3A, Fcγ 3B, FcεRI, FcεR2, FcαRI, Fcα/μR, or FcRn.

[0352] In some aspects, a portion of the immunoglobulin constant region may serve as a hinge between the AB domain, for example scFv or nanobody, and the TM domain. The hinge can be of a length that provides for increased responsiveness of the CAR-expressing cell following antigen binding, as compared to in the absence of the hinge. In some examples, the hinge is at or about 12 amino acids in length or is no more than 12 amino acids in length. Exemplary hinges include those having at least about 10 to 229 amino acids, about 10 to 200 amino acids, about 10 to 175 amino acids, about 10 to 150 amino acids, about 10 to 125 amino acids, about 10 to 100 amino acids, about 10 to 75 amino acids, about 10 to 50 amino acids, about 10 to 40 amino acids, about 10 to 30 amino acids, about 10 to 20 amino acids, or about 10 to 15 amino acids, and including any integer between the endpoints of any of the listed ranges. In some embodiments, a hinge has about 12 amino acids or less, about 119 amino acids or less, or about 229 amino acids or less. Exemplary hinges include a CD28 hinge, IgG4 hinge alone, IgG4 hinge linked to CH2 and CH3 domains, or IgG4 hinge linked to the CH3 domain. Exemplary hinges include, but are not limited to, those described in Hudecek M. et al. (2013) Clin. Cancer Res., 19:3153, international patent application publication number WO2014031687, U.S. Pat. No. 8,822,647 or published App. No. US2014/0271635.

Known hinge sequences include those derived from CD8 α molecule or a CD28 molecule.

### Transmembrane (TM) Domain

[0353] With respect to the TM domain, the CAR can be designed to comprise a TM domain that is fused to the AB domain of the CAR. A hinge sequence may be inserted between the AB domain and the TM domain. TM domains may be derived from a natural or from synthetic sources. Where the source is natural, the domain may be derived from any membrane-bound or transmembrane protein. Typically, a TM domain denotes a single transmembrane α helix of a transmembrane protein, also known as an integral protein. TM domains e.g., may be derived from (i.e. comprise at least the transmembrane region(s) of) CD28, CD3 ε, CD4, CD5, CD8, CD9, CD16, CD22, CD33, CD37, CD45, CD64, CD80, CD86, CD134, CD137, CD154, TCR α, TCR β, or CD3 zeta and/or TM domains containing functional variants thereof such as those retaining a substantial portion of the structural, e.g., transmembrane, properties thereof.

[0354] Alternatively, the TM domain may be synthetic, in which case the TM domain will comprise predominantly hydrophobic residues such as leucine and valine. Preferably a triplet of phenylalanine, tryptophan and valine will be found at each end of a synthetic TM domain. A TM domain is generally thermodynamically stable in a membrane. It may be a single a helix, a transmembrane β barrel, a β-helix of gramicidin A, or any other structure. Transmembrane helices are usually about 20 amino acids in length.

[0355] A well-used TM domain comprises the TM region of CD28, e.g., human CD28. Often, a short oligo- or polypeptide spacer, e.g., between 2 and 10 amino acids in length is used to form the linkage between the TM domain and the ICS domain(s) of the CAR.

### Intracellular Signaling (ICS) Domain and Costimulatory (CS) Domain

[0356] The ICS domain or the cytoplasmic domain of a CAR generally triggers or elicits activation of at least one of the normal effector functions of the cell in which the CAR has been placed. The term “effector function” refers to a specialized function of a cell. Effector function of a T cell, for example, may be cytolytic activity or helper activity including the secretion of cytokines. Thus, the term “intracellular signaling domain” or “ICS domain” refers to the portion of a protein which transduces the effector function signal and directs the cell to perform a specialized function. While usually the entire ICS domain can be employed, in many cases it is not necessary to use the entire chain. To the extent that a truncated portion of the intracellular signaling domain is used, such truncated portion may be used in place of the intact chain as long as it transduces the effector function signal. The term “intracellular signaling domain” or “ICS domain” is thus meant to include any truncated portion of the ICS domain sufficient to transduce the effector function signal.

[0357] Examples of known ICS domains include the cytoplasmic sequences of the T cell receptor (TCR) and co-receptors that act in concert to initiate signal transduction following antigen receptor engagement, as well as any derivative or variant of these sequences and any synthetic sequence that has the same functional capability.

[0358] Signals generated through one ICS domain alone may be insufficient for full activation of a cell, and a secondary or costimulatory signal may also be required. In such cases, a costimulatory domain (CS domain) may be included in the cytoplasmic portion of a CAR. A CS domain is a domain that transduces such a secondary or costimulatory signal. In some instances, a CAR of the present disclosure may comprise two or more CS domains. The CS domain(s) may be placed upstream of the ICS domain or downstream of the ICS domain.

[0359] T cell activation can be mediated by two distinct classes of cytoplasmic signaling sequence: those that initiate antigen-dependent primary activation through the TCR (primary cytoplasmic signaling sequences) and those that act in an antigen-independent manner to provide a secondary or costimulatory signal (secondary cytoplasmic signaling sequences). Primary cytoplasmic signaling sequences regulate primary activation of the TCR complex either in a stimulatory way, or in an inhibitory way. Primary cytoplasmic signaling sequences that act in a stimulatory manner may contain signaling motifs which are known as immunoreceptor tyrosine-based activation motifs or ITAMs. Such a cytoplasmic signaling sequence may be contained in the ICS or the CS domain of a CAR of the present disclosure.

[0360] Examples of ITAM-containing primary cytoplasmic signaling sequences include those derived from an ICS domain of a lymphocyte receptor chain, a TCR/CD3 complex protein, an Fc receptor subunit, an IL-2 receptor subunit, CD3ζ, FcR γ, FcRβ, CD3γ, CD3δ, CD3ε, CD5, CD22, CD66d, CD79a, CD79b, CD278 (ICOS), Fcε R1, DAP10, and DAP12. A well-used ICS domain comprises a cytoplasmic signaling sequence derived from CD3 zeta. In some instances, the CD3 ζ ICS domain may be combined with one or more of other cytoplasmic domain(s). For example, the cytoplasmic domain of the CAR can comprise a CD3 ζ ICS domain and a CS domain wherein a CS region refers to a portion of the CAR comprising the intracellular domain of a costimulatory molecule. A costimulatory molecule is a cell surface molecule other than an antigen receptor or their ligands that is required for an efficient response of lymphocytes to an antigen.

[0361] Examples of co-stimulatory molecules include an MHC class I molecule, TNF receptor proteins, Immunoglobulin-like proteins, cytokine receptors, integrins, signaling lymphocytic activation molecules (SLAM proteins), activating NK cell receptors, a Toll ligand receptor, B7-H3, BAFFR, BTLA, BLAME (SLAMF8), CD2, CD4, CD5, CD7, CD8 α, CD8 β, CD11a, LFA-1 (CD11a/CD18), CD11b, CD11c, CD11d, CD18, CD19, CD19a, CD27, CD28, CD29, CD30, CD40, CD49a, CD49D, CD49f, CD69, CD84, CD96 (Tactile), CD100 (SEMA4D), CD103, CRTAM, OX40 (CD134), 4-1BB (CD137), SLAM (SLAMF1, CD150, IPO-3), CD160 (BY55), SELPLG (CD162), DNAM1 (CD226), Ly9 (CD229), SLAMF4 (CD244, 2B4), ICOS (CD278), CEACAM1, CDS, CRTAM, DAP10, GADS, GITR, HVEM (LIGHTR), IA4, ICAM-1, IL2R β, IL2R γ, IL7R α, ITGA4, ITGA6, ITGAD, ITGAE, ITGAL, ITGAM, ITGAX, ITGB1, ITGB2, ITGB7, KIRDS2, LAT, LFA-1, LIGHT, LTBR, NKG2C, NKG2D, NKp30, NKp44, NKp46, NKp80 (KLRF1), PAG/Cbp, PD-1, PSGLI, SLAMF6 (NTB-A, Ly108), SLAMF7, SLP-76, TNFR2, TRANCE/RANKL, VLA1, VLA-6, a ligand that specifically binds with CD83, and the like. The ICS domain and the CS domain(s) of the CAR may be linked to each other in a random or specified order, optionally via a short oligo- or polypeptide linker, e.g., between 2 and 10 amino acids in length.

### Exemplary CAR Constructs

[0362] A CAR construct may comprise the following format: “AB domain-hinge-TM domain-CS domain-ICS domain.”

[0363] CARs of the present disclosure may comprise an amino acid sequence at least 80%, at least 85%, at least 90%, at least 91%, at least 92%, at least 93%, at least 94%, at least 95%, at least 96%, at least 97%, at least 98%, at least 99%, or 100% identical to any of the exemplary constructs below. In the exemplary constructs below, the “anti-CoV-S scFv” may be an scFv generated by linking the VH and VL (in the order of VH-linker-VL or VL-linker-VH) of any one of anti-CoV-S antibodies disclosed in Tables 3-6.

[0364] In some embodiments, a leader sequence (LS) may be placed upstream of the polynucleotide sequences encoding the CAR. The leader sequence facilitates expression of the CAR on the cell surface.

### Further Modification

[0365] CARs according to the present disclosure, nucleotide sequences encoding the same, vectors encoding the same, and cells comprising nucleotide sequences encoding said CARs may be further modified, engineered, optimized, or appended in order to provide or select for various features. These features may include, but are not limited to, efficacy, persistence, target specificity, reduced immunogenicity, multi-targeting, enhanced immune response, expansion, growth, reduced off-target effect, reduced subject toxicity, improved target cytotoxicity, improved attraction of disease alleviating immune cells, detection, selection, targeting, and the like. For example, the cells may be engineered to express another CAR, or to have a suicide mechanism, and may be modified to remove or modify expression of an endogenous receptor or molecule such as a TCR and/or MHC molecule.

[0366] In some embodiments, the vector or nucleic acid sequence encoding the CAR further encodes other genes. The vector or nucleic acid sequence may be constructed to allow for the co-expression of multiple genes using a multitude of techniques including co-transfection of two or more plasmids, the use of multiple or bidirectional promoters, or the creation of bicistronic or multicistronic vectors. The construction of multicistronic vectors may include the encoding of IRES elements or 2A peptides, such as T2A, P2A, E2A, or F2A (for example, see Kim, J. H., et al., “High cleavage efficiency of a 2A peptide derived from porcine teschovirus-1 in human cell lines, zebrafish and mice”, PLOS One. 2011; 6 (4)). The CAR expressing cell may further comprise a disruption to one or more endogenous genes.

### Efficacy

[0367] The CARs of the present disclosure and cells expressing these CARs may be further modified to improve efficacy against cells expressing the target molecule. The cells may be cells expressing COV-S. The cells expressing COV-S may be cancer cells, vascular cells, or any other target disease-associated cells. In some embodiments, the improved efficacy may be measured by increased cytotoxicity against cells expressing the target molecule, for example cytotoxicity against cancer cells. In some embodiments, the improved efficacy may also be measured by increased production of cytotoxic mediators such as, but not limited to, IFN γ, perforin, and granzyme B. In some embodiments, the improved efficacy may be shown by reduction in the signature cytokines of the diseases, or alleviated symptoms of the disease when the CAR expressing cells are administered to a subject. Other cytokines that may be reduced include TGF-beta, IL-6, IL-4, IL-10, and/or IL-13. the improved efficacy may be shown by COV-S-specific immune cell responses, such as T cell cytotoxicity. In case of cancer, improved efficacy may be shown by better tumor cytotoxicity, better infiltration into the tumor, reduction of immunosuppressive mediators, reduction in weight decrease, reduction in ascites, reduction in tumor burden, and/or increased lifespan. In case of autoimmune diseases, reduced responsiveness of autoreactive cells or decrease in autoreactive T cells, B cells, or Abs may represent improved efficacy. In some embodiments, gene expression profiles may be also investigated to evaluate the efficacy of the CAR.

[0368] In one aspect, the CAR expressing cells are further modified to evade or neutralize the activity of immunosuppressive mediators, including, but not limited to prostaglandin E2 (PGE2) and adenosine. In some embodiments, this evasion or neutralization is direct. In other embodiments, this evasion or neutralization is mediated via the inhibition of protein kinase A (PKA) with one or more binding partners, for example ezrin. In a specific embodiment, the CAR-expressing cells further express the peptide “regulatory subunit I anchoring disruptor” (RIAD). RIAD is thought to inhibit the association of protein kinase A (PKA) with ezrin, which thus prevents PKA's inhibition of TCR activation (Newick K. et al. Cancer Immunol Res. 2016 June; 4 (6): 541-51. doi: 10.1158/2326-6066.CIR-15-0263. Epub 2016 Apr. 4).

[0369] In some embodiments, the CAR expressing cells of the disclosure may induce a broad immune response, consistent with epitope spreading.

[0370] In some embodiments, the CAR expressing cells of the disclosure further comprise a homing mechanism. For example, the cell may transgenically express one or more stimulatory chemokines or cytokines or receptors thereof. In particular embodiments, the cells are genetically modified to express one or more stimulatory cytokines. In certain embodiments, one or more homing mechanisms are used to assist the inventive cells to accumulate more effectively to the disease site. In some embodiments, the CAR expressing cells are further modified to release inducible cytokines upon CAR activation, e.g., to attract or activate innate immune cells to a targeted cell (so-called fourth generation CARs or TRUCKS). In some embodiments, CARs may co-express homing molecules, e.g., CCR4 or CCR2b, to increase trafficking to the disease site.

### Controlling CAR Expression

[0371] In some instances, it may be advantageous to regulate the activity of the CAR or CAR expressing cells CAR. For example, inducing apoptosis using, e.g., a caspase fused to a dimerization domain (see, e.g., Di et al., N Engl. J. Med. 2011 Nov. 3; 365 (18): 1673-1683), can be used as a safety switch in the CAR therapy of the instant disclosure. In another example, CAR-expressing cells can also express an inducible Caspase-9 (iCaspase-9) molecule that, upon administration of a dimerizer drug (e.g., rimiducid (also called AP1903 (Bellicum Pharmaceuticals) or AP20187 (Ariad)) leads to activation of the Caspase-9 and apoptosis of the cells. The iCaspase-9 molecule contains a chemical inducer of dimerization (CID) binding domain that mediates dimerization in the presence of a CID. This results in inducible and selective depletion of CAR-expressing cells. In some cases, the iCaspase-9 molecule is encoded by a nucleic acid molecule separate from the CAR-encoding vector(s). In some cases, the iCaspase-9 molecule is encoded by the same nucleic acid molecule as the CAR-encoding vector. The iCaspase-9 can provide a safety switch to avoid any toxicity of CAR-expressing cells. See, e.g., Song et al. Cancer Gene Ther. 2008; 15 (10): 667-75; Clinical Trial Id. No. NCT02107963; and Di et al. N. Engl. J. Med. 2011; 365:1673-83.

[0372] Alternative strategies for regulating the CAR therapy of the instant disclosure include utilizing small molecules or antibodies that deactivate or turn off CAR activity, e.g., by deleting CAR-expressing cells, e.g., by inducing antibody dependent cell-mediated cytotoxicity (ADCC). For example, CAR-expressing cells described herein may also express an antigen that is recognized by molecules capable of inducing cell death, e.g., ADCC or compliment-induced cell death. For example, CAR expressing cells described herein may also express a receptor capable of being targeted by an antibody or antibody fragment. Examples of such receptors include EpCAM, VEGFR, integrins (e.g., integrins αvβ3, α4, αI3/4β3, α4β7, α5β1, αvβ3, αv), members of the TNF receptor superfamily (e.g., TRAIL-R1, TRAIL-R2), PDGF Receptor, interferon receptor, folate receptor, GPNMB, ICAM-1, HLA-DR, CEA, CA-125, MUC1, TAG-72, IL-6 receptor, 5T4, GD2, GD3, CD2, CD3, CD4, CD5, CD11, CD11a/LFA-1, CD15, CD18/ITGB2, CD19, CD20, CD22, CD23/IgE Receptor, CD25, CD28, CD30, CD33, CD38, CD40, CD41, CD44, CD51, CD52, CD62L, CD74, CD80, CD125, CD147/basigin, CD152/CTLA-4, CD154/CD40L, CD195/CCR5, CD319/SLAMF7, and EGFR, and truncated versions thereof (e.g., versions preserving one or more extracellular epitopes but lacking one or more regions within the cytoplasmic domain). For example, CAR-expressing cells described herein may also express a truncated epidermal growth factor receptor (EGFR) which lacks signaling capacity but retains the epitope that is recognized by molecules capable of inducing ADCC, e.g., cetuximab (ERBITUX®), such that administration of cetuximab induces ADCC and subsequent depletion of the CAR-expressing cells (see, e.g., WO2011/056894, and Jonnalagadda et al., “Gene Ther. 2013; 20 (8) 853-860).

[0373] In some embodiments, the CAR cell comprises a polynucleotide encoding a suicide polypeptide, such as for example RQR8. See, e.g., WO2013153391A, which is hereby incorporated by reference in its entirety. In CAR cells comprising the polynucleotide, the suicide polypeptide may be expressed at the surface of a CAR cell. The suicide polypeptide may also comprise a signal peptide at the amino terminus. Another strategy includes expressing a highly compact marker/suicide gene that combines target epitopes from both CD32 and CD20 antigens in the CAR-expressing cells described herein, which binds rituximab, resulting in selective depletion of the CAR-expressing cells, e.g., by ADCC (see, e.g., Philip et al., Blood 2014; 124 (8) 1277-1287). Other methods for depleting CAR-expressing cells include administration of CAMPATH®, a monoclonal anti-CD52 antibody that selectively binds and targets mature lymphocytes, e.g., CAR-expressing cells, for destruction, e.g., by inducing ADCC. In other embodiments, the CAR-expressing cell can be selectively targeted using a CAR ligand, e.g., an anti-idiotypic antibody. In some embodiments, the anti-idiotypic antibody can cause effector cell activity, e.g., ADCC or ADC activities, thereby reducing the number of CAR-expressing cells. In other embodiments, the CAR ligand, e.g., the anti-idiotypic antibody, can be coupled to an agent that induces cell killing, e.g., a toxin, thereby reducing the number of CAR-expressing cells. Alternatively, the CAR molecules themselves can be configured such that the activity can be regulated, e.g., turned on and off, as described below.

[0374] In some embodiments, a regulatable CAR (RCAR) where the CAR activity can be controlled is desirable to optimize the safety and efficacy of a CAR therapy. In some embodiments, a RCAR comprises a set of polypeptides, typically two in the simplest embodiments, in which the components of a standard CAR described herein, e.g., an AB domain and an ICS domain, are partitioned on separate polypeptides or members. In some embodiments, the set of polypeptides include a dimerization switch that, upon the presence of a dimerization molecule, can couple the polypeptides to one another, e.g., can couple an AB domain to an ICS domain. Additional description and exemplary configurations of such regulatable CARs are provided herein and in International Publication No. WO 2015/090229, hereby incorporated by reference in its entirety.

[0375] In an aspect, an RCAR comprises two polypeptides or members: 1) an intracellular signaling member comprising an ICS domain, e.g., a primary ICS domain described herein, and a first switch domain; 2) an antigen binding member comprising an AB domain, e.g., that binds, e.g., specifically binds, a target molecule described herein, as described herein and a second switch domain. Optionally, the RCAR comprises a TM domain described herein. In an embodiment, a TM domain can be disposed on the intracellular signaling member, on the antigen binding member, or on both. Unless otherwise indicated, when members or elements of an RCAR are described herein, the order can be as provided, but other orders are included as well. In other words, in an embodiment, the order is as set out in the text, but in other embodiments, the order can be different. E.g., the order of elements on one side of a transmembrane region can be different from the example, e.g., the placement of a switch domain relative to an ICS domain can be different, e.g., reversed.

[0376] In some embodiments, the CAR expressing immune cell may only transiently express a CAR. For example, the cells of the disclosure may be transduced with mRNA comprising a nucleic acid sequence encoding an inventive CAR. In this vein, the present disclosure also includes an RNA construct that can be directly transfected into a cell. A method for generating mRNA for use in transfection involves in vitro transcription (IVT) of a template with specially designed primers, followed by polyA addition, to produce a construct containing 3′ and 5′ untranslated sequences (“UTRs”), a 5′ cap and/or Internal Ribosome Entry Site (IRES), the nucleic acid to be expressed, and a polyA tail, typically 50-2000 bases in length. RNA so produced can efficiently transfect different kinds of cells. In one embodiment, the template includes sequences for the CAR. In an embodiment, an RNA CAR vector is transduced into a cell by electroporation.

### Target Specificity

[0377] The CAR expressing cells of the present disclosure may further comprise one or more CARs, in addition to the first CAR. These additional CARs may or may not be specific for the target molecule of the first CAR. In some embodiments, the one or more additional CARs may act as inhibitory or activating CARs. In some aspects, the CAR of some embodiments is the stimulatory or activating CAR; in other aspects, it is the costimulatory CAR. In some embodiments, the cells further include inhibitory CARs (iCARs, see Fedorov et al., Sci. Transl. Medicine, 2013 December; 5 (215): 215ra172), such as a CAR recognizing an antigen other than the target molecule of the first CAR, whereby an activating signal delivered through the first CAR is diminished or inhibited by binding of the inhibitory CAR to its ligand, e.g., to reduce off-target effects.

[0378] In some embodiments, the AB domain of the CAR is or is part of an immunoconjugate, in which the AB domain is conjugated to one or more heterologous molecule(s), such as, but not limited to, a cytotoxic agent, an imaging agent, a detectable moiety, a multimerization domain, or other heterologous molecule. Cytotoxic agents include, but are not limited to, radioactive isotopes (e.g., At211, I131, I125, Y90, Re186, Re188, Sm153, Bi212, P32, Pb212 and radioactive isotopes of Lu); chemotherapeutic agents; growth inhibitory agents; enzymes and fragments thereof such as nucleolytic enzymes; antibiotics; toxins such as small molecule toxins or enzymatically active toxins. In some embodiments, the AB domain is conjugated to one or more cytotoxic agents, such as chemotherapeutic agents or drugs, growth inhibitory agents, toxins (e.g., protein toxins, enzymatically active toxins of bacterial, fungal, plant, or animal origin, or fragments thereof), or radioactive isotopes.

[0379] In some embodiments, to enhance persistence, the cells of the disclosure may be further modified to overexpress pro-survival signals, reverse anti-survival signals, overexpress Bcl-xL, overexpress hTERT, lack Fas, or express a TGF-β dominant negative receptor. Persistence may also be facilitated by the administration of cytokines, e.g., IL-2, IL-7, and IL-15.

### G. B-Cell Screening and Isolation

[0380] In one embodiment, the present disclosure contemplates the preparation and isolation of a clonal population of antigen-specific B-cells that may be used for isolating at least one CoV-S antigen-specific cell, which can be used to produce a monoclonal antibody against CoV-S, which is specific to a desired CoV-S antigen, or a nucleic acid sequence corresponding to such an antibody. Methods of preparing and isolating said clonal population of antigen-specific B-cells are taught, for example, in U.S. Patent Publication No. US2007/0269868 to Carvalho-Jensen et al., the disclosure of which is herein incorporated by reference in its entirety. Methods of preparing and isolating said clonal population of antigen-specific B-cells are also taught herein in the examples. Methods of “enriching” a cell population by size or density are known in the art. See, e.g., U.S. Pat. No. 5,627,052. These steps can be used in addition to enriching the cell population by antigen-specificity.

### H. Methods of Producing Antibodies and Fragments Thereof

[0381] In another embodiment, the present disclosure contemplates methods for producing anti-CoV-S antibodies and fragments thereof. Methods of producing antibodies are well known to those of ordinary skill in the art. For example, methods of producing chimeric antibodies are now well known in the art (See, for example, U.S. Pat. No. 4,816,567 to Cabilly et al.; Morrison et al., Proc. Natl. Acad. Sci. U.S.A., 81:8651-55 (1984); Neuberger et al., Nature, 314:268-270 (1985); Boulianne, G. L. et al., Nature, 312:643-46 (1984), the disclosures of each of which are herein incorporated by reference in their entireties).

[0382] As mentioned above, methods of producing humanized antibodies are now well known in the art (See, for example, U.S. Pat. Nos. 5,530,101, 5,585,089, 5,693,762, and 6,180,370 to Queen et al; U.S. Pat. Nos. 5,225,539 and 6,548,640 to Winter; U.S. Pat. Nos. 6,054,297, 6,407,213 and 6,639,055 to Carter et al; U.S. Pat. No. 6,632,927 to Adair; Jones, P. T. et al., Nature, 321:522-525 (1986); Reichmann, L. et al., Nature, 332:323-327 (1988); Verhoeyen, M. et al., Science, 239:1534-36 (1988), the disclosures of each of which are herein incorporated by reference in their entireties).

[0383] Antibody polypeptides of the disclosure having CoV-S binding specificity may also be produced by constructing, using conventional techniques well known to those of ordinary skill in the art, an expression vector containing a promoter (optionally as a component of a eukaryotic or prokaryotic operon) and a DNA sequence encoding an antibody heavy chain in which the DNA sequence encoding the CDRs required for antibody specificity is derived from a non-human cell source, e.g., a rabbit or rodent B-cell source, while the DNA sequence encoding the remaining parts of the antibody chain is derived from a human cell source.

[0384] A second expression vector is produced using the same conventional means well known to those of ordinary skill in the art, said expression vector containing a promoter (optionally as a component of a eukaryotic or prokaryotic operon) and a DNA sequence encoding an antibody light chain in which the DNA sequence encoding the CDRs required for antibody specificity is derived from a non-human cell source, e.g., a rabbit or rodent B-cell source, while the DNA sequence encoding the remaining parts of the antibody chain is derived from a human cell source.

[0385] The expression vectors are transfected into a host cell by convention techniques well known to those of ordinary skill in the art to produce a transfected host cell, said transfected host cell cultured by conventional techniques well known to those of ordinary skill in the art to produce said antibody polypeptides.

[0386] The host cell may be co-transfected with the two expression vectors described above, the first expression vector containing DNA encoding a promoter (optionally as a component of a eukaryotic or prokaryotic operon) and a light chain-derived polypeptide and the second vector containing DNA encoding a promoter (optionally as a component of a eukaryotic or prokaryotic operon) and a heavy chain-derived polypeptide. The two vectors contain different selectable markers, but preferably achieve substantially equal expression of the heavy and light chain polypeptides. Alternatively, a single vector may be used, the vector including DNA encoding both the heavy and light chain polypeptides. The coding sequences for the heavy and light chains may comprise cDNA, genomic DNA, or both.

[0387] The host cells used to express the antibody polypeptides may be either a bacterial cell such as E. coli, or a eukaryotic cell such as P. pastoris. In one embodiment, a mammalian cell of a well-defined type for this purpose, such as a myeloma cell, a CHO cell line, a NSO cell line, or a HEK293 cell line may be used.

[0388] The general methods by which the vectors may be constructed, transfection methods required to produce the host cell and culturing methods required to produce the antibody polypeptides from said host cells all include conventional techniques. Although preferably the cell line used to produce the antibody is a mammalian cell line, any other suitable cell line, such as a bacterial cell line such as an E. coli-derived bacterial strain, or a yeast cell line, may alternatively be used.

[0389] Similarly, once produced the antibody polypeptides may be purified according to standard procedures in the art, such as for example cross-flow filtration, ammonium sulphate precipitation, affinity column chromatography, hydrophobic interaction chromatography (“HIC”), and the like.

[0390] The antibody polypeptides described herein may also be used for the design and synthesis of either peptide or non-peptide mimetics that would be useful for the same therapeutic applications as the antibody polypeptides of the disclosure (See, for example, Saragobi et al., Science, 253:792-795 (1991), the contents of which are herein incorporated by reference in its entirety).

[0391] In another embodiment, the present disclosure contemplates methods for humanizing antibody heavy and light chains which bind to CoV-S. Exemplary methods for humanizing antibody heavy and light chains that may be applied to anti-CoV-S antibodies are identified herein and are conventional in the art.

### I. Screening Assays

[0392] The screening assays described here may be used to identify high affinity anti-CoV-S Abs which may be useful in the treatment of diseases and disorders associated with CoV-S in subjects exhibiting symptoms of a CoV-S associated disease or disorder.

[0393] In some embodiments, the antibody is used as a diagnostic tool. The antibody can be used to assay the amount of CoV-S present in a sample and/or subject. As will be appreciated by one of skill in the art, such antibodies need not be neutralizing antibodies. In some embodiments, the diagnostic antibody is not a neutralizing antibody. In some embodiments, the diagnostic antibody binds to a different epitope than the neutralizing antibody binds to. In some embodiments, the two antibodies do not compete with one another.

[0394] In some embodiments, the antibodies disclosed herein are used or provided in an assay kit and/or method for the detection of CoV-S in mammalian tissues or cells in order to screen/diagnose for a disease or disorder associated with changes in levels of CoV-S. The kit comprises an antibody that binds CoV-S and means for indicating the binding of the antibody with CoV-S, if present, and optionally CoV-S protein levels. Various means for indicating the presence of an antibody can be used. For example, fluorophores, other molecular probes, or enzymes can be linked to the antibody and the presence of the antibody can be observed in a variety of ways. The method for screening for such disorders can involve the use of the kit, or simply the use of one of the disclosed antibodies and the determination of whether the antibody binds to CoV-S in a sample. As will be appreciated by one of skill in the art, high or elevated levels of CoV-S will result in larger amounts of the antibody binding to CoV-S in the sample. Thus, degree of antibody binding can be used to determine how much CoV-S is in a sample. Subjects or samples with an amount of CoV-S that is greater than a predetermined amount (e.g., an amount or range that a person without a CoV-S-related disorder would have) can be characterized as having a CoV-S-mediated disorder.

[0395] The present disclosure further provides for a kit for detecting binding of an anti-CoV-S antibody of the disclosure to CoV-S. In particular, the kit may be used to detect the presence of CoV-S specifically reactive with an anti-CoV-S antibody of the disclosure or an immunoreactive fragment thereof. The kit may also include an antibody bound to a substrate, a secondary antibody reactive with the antigen and a reagent for detecting a reaction of the secondary antibody with the antigen. Such a kit may be an ELISA kit and can comprise the substrate, primary and secondary antibodies when appropriate, and any other necessary reagents such as detectable moieties, enzyme substrates, and color reagents, for example as described herein. The diagnostic kit may also be in the form of an immunoblot kit. The diagnostic kit may also be in the form of a chemiluminescent kit (Meso Scale Discovery, Gaithersburg, MD). The diagnostic kit may also be a lanthanide-based detection kit (PerkinElmer, San Jose, CA).

[0396] A skilled clinician would understand that a biological sample includes, but is not limited to, sera, plasma, urine, fecal sample, saliva, mucous, pleural fluid, synovial fluid, and spinal fluid.

### J. Methods of Ameliorating or Reducing Symptoms of, or Treating, or Preventing, Diseases and Disorders Associated with CoV-S

[0397] The present disclosure provides methods for ameliorating or reducing the symptoms of, or treating, or preventing, diseases and disorders associated with CoV-S. The methods comprise administering an antibody, or antigen-binding fragment thereof, that displays broad activity against all SARS-COV-2 variants of concern (including the Omicron/BA.1 variant) as well as SARS-COV.

[0398] In some embodiments, an antibody or antigen-binding fragment thereof is capable of binding to the spike protein of a corona virus (CoV-S). In some embodiments, the CoV-S is the spike protein of SARS-COV (“SARS-COV-S”) and/or the spike protein of SARS-COV-2 (“SARS-COV-2-S”).

[0399] In certain embodiments, an antibody or antigen-binding fragment thereof is capable of binding to a SARS-COV-2 variant. In some embodiments, the SARS-COV-2-S is a B.1.1.7 variant, a B. 1.351 variant, a B.1.1.28 variant, a B. 1.429 variant, a P.1 variant, a B.1.617 variant (e.g., B.1.617.1 and B.1.617.2), a C.37 variant, a 1.621 variant, a AY.1 variant, a 1.623 variant, a C.36 variant, a A.27 variant, a AV.1 variant, a B.1.1.482 variant, a B.1.1.523 variant, a B.1.427 variant, a AY.4 variant, a AY.11 variant, variant, a D614G variant, or a B.1.1.529/BA.1 variant (also known as the Omicron variant) and its sublineages (e.g., BA1.1, BA.2, BA.2.75, BA.4, BA.5, BA.4.6, BQ.1, BQ.1.1, XBB, XBB.1, XBB.1.5, BJ.1, BM.1.1.1, BA.2.3.20, BF.7, XBC, BN.1, or CH.1.1).

[0400] In some embodiments, the antibody or antigen-binding fragment thereof binds to the receptor binding domain (RBD) of CoV-S, e.g., the RBD of CoV-s from the B.1.1.529/BA.1 variant, the BF.7 variant, the BQ.1.1 variant, the BA.2.75 variant, the XBB.1 variant, the BA.2 variant, the B. 1.351 variant, the B.1.617 variant, or the D614G variant.

[0401] Anti-CoV-S antibodies described in Tables 3-6, or antigen-binding fragments thereof, e.g., VYD225, as well as combinations, can also be administered in a therapeutically effective amount to patients in need of treatment of diseases and disorders associated with CoV-S in the form of a pharmaceutical composition as described in greater detail below.

[0402] Symptoms of CoV infection may include fever, cough, runny nose, congestion, sore throat, bronchitis, pneumonia, shortness of breath, chest pain, headache, muscle ache, chills, fatigue, conjunctivitis, diarrhea, loss of smell, and loss of taste. Complications and/or diseases/disorders associated with coronavirus infection may include, for example, bronchitis, pneumonia, respiratory failure, acute respiratory failure, organ failure, multi-organ system failure, pediatric inflammatory multisystem syndrome, acute respiratory distress syndrome (a severe lung condition that causes low oxygen in the blood and organs), blood clots, cardiac conditions, myocardial injury, myocarditis, heart failure, cardiac arrest, acute myocardial infarction, dysrhythmias, venous thromboembolism, post-intensive care syndrome, shock, anaphylactic shock, cytokine release syndrome, septic shock, disseminated intravascular coagulation, ischemic stroke, intracerebral hemorrhage, microangiopathic thrombosis, psychosis, seizure, nonconvulsive status epilepticus, traumatic brain injury, stroke, anoxic brain injury, encephalitis, posterior reversible leukoencephalopathy, necrotizing encephalopathy, post-infectious encephalitis, autoimmune mediated encephalitis, acute disseminated encephalomyelitis, acute kidney injury, acute liver injury, pancreatic injury, immune thrombocytopenia, subacute thyroiditis, gastrointestinal complications, aspergillosis, increased susceptibility to infection with another virus or bacteria, and/or pregnancy-related complications. Certain diseases and conditions, such as high blood pressure, type 1 diabetes, liver disease, overweight, chronic lung diseases including cystic fibrosis, pulmonary fibrosis, and asthma, compromised immune system due to transplant, use of an immunosuppressant, or HIV infection, and brain and nervous system condition, may increase the risk of CoV infection-associated complications and diseases.

[0403] Also, the subject anti-CoV-S antibodies and antigen-binding fragments may be used alone or in conjunction with other active agents, e.g., opioids and non-opioid analgesics such as NSAIDs to elicit analgesia. In some embodiments, aspirin and/or acetaminophen may be taken in conjunction with the subject anti-CoV-S antibody or antigen-binding fragment. Aspirin is another type of non-steroidal anti-inflammatory compound.

[0404] The subject antibodies potentially optionally may be combined with one or more of the following: (i) an antiviral drug, optionally, remdesivir, favipiravir, darunavir, nelfinavir, saquinavir, lopinavir, or ritonavir; (ii) an antihelminth drug, optionally ivermectin; (iii) an antiparasitic drug, optionally hydroxychloroquine, chloroquine, or atovaquone; (iv) antibacterial vaccine, optionally the tuberculosis vaccine BCG; or (v) an anti-inflammatory drug, optionally a steroid such as ciclesonide, a TNF inhibitor (e.g., adalimumab), a TNF receptor inhibitor (e.g., etanercept), an IL-6 inhibitor (e.g., clazakizumab), an IL-6 receptor inhibitor (e.g., toclizumab), or metamizole; (vi) an antihistamine drug, optionally bepotastine; (vii) an ACE inhibitor, which is optionally moexipril; or (viii) a drug that inhibits priming of CoV-S, optionally a serine protease inhibitor, further optionally nafamostat. in order to increase or enhance pain management. This may allow for such analgesic compounds to be administered for longer duration or at reduced dosages thereby potentially alleviating adverse side effects associated therewith.

[0405] In some embodiments, the anti-CoV-S antibodies and antigen-binding fragments disclosed herein are administered in combination with one or more antibodies as described in U.S. Provisional Application No. 63/143,456, filed on Jan. 29, 2021, the entire contents of which have been incorporated herein by reference. In some embodiments, the antibody to be administered in combination with the anti-CoV-S antibodies and antigen-binding fragments disclosed herein is ADI-58125, as described in U.S. Provisional Application No. 63/143,456. In one embodiment, the antibodies are administered at the same time. In another embodiment, the antibodies are administered sequentially.

[0406] The subject to which the pharmaceutical formulation is administered can be, e.g., any human or non-human animal needing such treatment, prevention and/or amelioration, or who would otherwise benefit from the inhibition or attenuation of CoV-S-mediated activity. For example, the subject can be an individual that is diagnosed with, or who is deemed to be at risk of being afflicted by any of the aforementioned diseases or disorders. In some instances the subject may be in an advanced state of CoV infection, e.g., a subject who is on a ventilator. In some instances, the subject can be one having one or more risk factors (such as advanced age, obesity, diabetes, etc, and others previously identified) which correlate to a poor CoV treatment or recovery prognosis. The present disclosure further includes the use of any of the pharmaceutical formulations disclosed herein in the manufacture of a medicament for the treatment, prevention and/or amelioration of any disease or disorder associated with CoV or CoV-S activity (including any of the above-mentioned exemplary diseases, disorders and conditions).

### K. Administration

[0407] In one embodiment, the anti-CoV-S antibodies described herein, or CoV-S binding fragments thereof, as well as combinations of said antibodies or antigen-binding fragments thereof, are administered to a subject at a concentration of between 0.1 mg/ml and about any one of 0.5, 1, 5, 10, 15 20, 25, 30, 35, 40, 45, 50, 55, 60, 65, 70, 75, 80, 85, 90, 95, 100, 110, 120, 130, 140, 150, 160, 170, 180, 190, or 200 mg/ml, +/−10% error.

[0408] In another embodiment, the anti-CoV-S antibodies and fragments thereof described herein are administered to a subject at a dose of between about 0.01 and 100.0 or 200.0 mg/kg of body weight of the recipient subject. In certain embodiments, depending on the type and severity of the CoV-S-related disease, about 1 μg/kg to 50 mg/kg (e.g., 0.1-20 mg/kg) of antibody is an initial candidate dosage for administration to the patient, whether, for example, by one or more separate administrations, or by continuous infusion. In another embodiment, about 1 μg/kg to 15 mg/kg (e.g., 0.1 mg/kg-10 mg/kg) of antibody is an initial candidate dosage for administration to the patient. A typical daily dosage might range from about 1 μg/kg to 100 mg/kg or more, depending on several factors, e.g., the particular mammal being treated, the clinical condition of the individual patient, the cause of the disorder, the site of delivery of the agent, the method of administration, the scheduling of administration, and other factors known to medical practitioners. However, other dosage regimens may be useful.

[0409] For example, in addition to the relative dosages (mg/kg) discussed herein, the subject anti-CoV-S antibodies and antigen-binding fragments thereof can be administered to a subject at an absolute dose (mg). Accordingly, in one embodiment, the anti-CoV-S antibodies and antigen-binding fragments thereof described herein are administered to a subject at a dose of between about 1 microgram and about 2000 milligrams regardless of the route of administration.

[0410] In some embodiments, the antibody, or antigen-binding fragment thereof, or the combination of said antibodies or antigen-binding fragments thereof, is administered at a dose of about 100 mg to about 5000 mg, about 100 mg to 4500 mg, about 100 mg to 4000 mg, about 100 mg to about 3500 mg, about 100 mg to about 3000 mg, about 100 mg to about 2500 mg, about 100 mg to about 2000 mg, about 200 mg to about 1500 mg, about 300 mg to about 600 mg, about 500 mg to about 1200 mg, about 300 mg to about 1200 mg, about 500 to about 1000 mg, about 1000 mg to about 1500 mg, about 1500 mg to about 2000 mg, about 2000 mg to about 2500 mg, about 2500 mg to about 3000 mg, about 3000 mg to about 3500 mg, about 3500 mg to about 4000 mg, about 4000 to about 4500 mg, or about 4500 mg to about 5000 mg.

[0411] In some embodiments, the antibody, or antigen-binding fragment thereof, or the combination of said antibodies or antigen-binding fragments thereof, is administered intramuscularly. In some embodiments, the antibody, or antigen-binding fragment thereof, or the combination of said antibodies or antigen-binding fragments thereof, is administered intravenously. In one embodiment, the antibody, or antigen-binding fragment thereof, or the combination of said antibodies and antigen-binding fragments thereof, is administered via an IV push. In another embodiment, the antibody, or antigen-binding fragment thereof, or the combination of said antibodies and antigen-binding fragments thereof, is administered via an IV bolus.

[0412] In some embodiments, the antibody, or antigen-binding fragment thereof, or the combination of said antibodies or antigen-binding fragments thereof, is administered intramuscularly at a dose of about 500 mg. In some embodiments, the antibody, or antigen-binding fragment thereof, or the combination of said antibodies or antigen-binding fragments thereof, is administered intramuscularly at a dose of about 600 mg. In some embodiments, the antibody, or antigen-binding fragment thereof, or the combination of said antibodies or antigen-binding fragments thereof, is administered intravenously at a dose of about 1200 mg. In some embodiments, the antibody, or antigen-binding fragment thereof, or the combination of said antibodies or antigen-binding fragments thereof, is administered intravenously at a dose of about 1500 mg. In some embodiments, the antibody, or antigen-binding fragment thereof, or the combination of said antibodies or antigen-binding fragments thereof, is administered intravenously at a dose of about 2000 mg. In some embodiments, the antibody, or antigen-binding fragment thereof, or the combination of said antibodies or antigen-binding fragments thereof, is administered intravenously at a dose of about 2500 mg. In some embodiments, the antibody, or antigen-binding fragment thereof, or the combination of said antibodies or antigen-binding fragments thereof, is administered intravenously at a dose of about 3000 mg. In some embodiments, the antibody, or antigen-binding fragment thereof, or the combination of said antibodies or antigen-binding fragments thereof, is administered intravenously at a dose of about 3500 mg. In some embodiments, the antibody, or antigen-binding fragment thereof, or the combination of said antibodies or antigen-binding fragments thereof, is administered intravenously at a dose of about 4000 mg. In some embodiments, the antibody, or antigen-binding fragment thereof, or the combination of said antibodies or antigen-binding fragments thereof, is administered intravenously at a dose of about 4500 mg. In some embodiments, the antibody, or antigen-binding fragment thereof, or the combination of said antibodies or antigen-binding fragments thereof, is administered intravenously at a dose of about 5000 mg.

[0413] In one embodiment, the antibody, or antigen-binding fragment thereof, or the combination of said antibodies or antigen-binding fragments thereof, is administered once. In one embodiment, the antibody, or antigen-binding fragment thereof, or the combination of said antibodies or antigen-binding fragments thereof, is administered weekly. In another embodiment, the antibody, or antigen-binding fragment thereof, or the combination of said antibodies or antigen-binding fragments thereof, is administered daily, weekly, every two weeks, monthly, every two months, or every three months. In one embodiment, the antibody, or antigen-binding fragment thereof, or the combination of said antibodies or antigen-binding fragments thereof, is administered weekly for about four weeks, once weekly for about a month, weekly for about 5 weeks, weekly for about 6 weeks, weekly for about 7 weeks, or weekly for about two months.

[0414] In another embodiment, the anti-CoV-S antibodies described herein, or anti-CoV-S antigen-binding fragments thereof, as well as combinations of said antibodies or antigen-binding fragments thereof, are administered to a recipient subject with a frequency of once every twenty-six weeks or less, such as once every sixteen weeks or less, once every eight weeks or less, once every four weeks or less, once every two weeks or less, once every week or less, or once daily or less.

[0415] According to preferred embodiments, the antibody containing medicament or pharmaceutical composition is peripherally administered to a subject via a route selected from one or more of: orally, sublingually, buccally, topically, rectally, via inhalation, transdermally, subcutaneously, intravenously, intra-arterially, or intramuscularly, via intracardiac administration, intraosseously, intradermally, intraperitoneally, transmucosally, vaginally, intravitreally, epicutaneously, intra-articularly, peri-articularly, or locally.

[0416] Fab fragments may be administered every two weeks or less, every week or less, once daily or less, multiple times per day, and/or every few hours. In one embodiment, a patient receives Fab fragments of 0.1 mg/kg to 40 mg/kg per day given in divided doses of 1 to 6 times a day, or in a continuous perfusion form, effective to obtain desired results.

[0417] It is to be understood that the concentration of the antibody or Fab administered to a given patient may be greater or lower than the exemplary administration concentrations set forth above.

[0418] A person of skill in the art would be able to determine an effective dosage and frequency of administration through routine experimentation, for example guided by the disclosure herein and the teachings in, Goodman & Gilman's The Pharmacological Basis of Therapeutics, Brunton, L. L. et al. editors, 11^{th} edition, New York, New York: McGraw-Hill (2006); Howland, R. D. et al., Pharmacology, Volume 864, Lippincott's illustrated reviews., Philadelphia, PA: Lippincott Williams & Wilkins (2006); and Golan, D. E., Principles of pharmacology: the pathophysiologic basis of drug therapy, Philadelphia, PA: Lippincott Williams & Wilkins (2007).

[0419] In another embodiment, the anti-CoV-S antibodies described herein, or CoV-S binding fragments thereof, as well as combinations of said antibodies or antigen-binding fragments thereof, are administered to a subject in a pharmaceutical formulation. In a preferred embodiment, the subject is a human.

[0420] A “pharmaceutical composition” or “medicament” refers to a chemical or biological composition suitable for administration to a subject, preferably a mammal, more preferably a human. Such compositions may be specifically formulated for administration via one or more of a number of routes, including but not limited to buccal, epicutaneous, epidural, inhalation, intraarterial, intracardial, intracerebroventricular, intradermal, intramuscular, intranasal, intraocular, intraperitoneal, intraspinal, intrathecal, intravenous, oral, parenteral, rectally via an enema or suppository, subcutaneous, subdermal, sublingual, transdermal, and transmucosal. In addition, administration can occur by means of injection, powder, liquid, gel, drops, or other means of administration.

[0421] In one embodiment, the anti-CoV-S antibodies described herein, or CoV-S binding fragments thereof, as well as combinations of said antibodies or antigen-binding fragments thereof, may be optionally administered in combination with one or more active agents. Such active agents include (i) an antiviral drug, optionally, remdesivir, favipiravir, darunavir, nelfinavir, saquinavir, lopinavir, or ritonavir; (ii) an antihelminth drug, optionally ivermectin; (iii) an antiparasitic drug, optionally hydroxychloroquine, chloroquine, or atovaquone; (iv) antibacterial vaccine, optionally the tuberculosis vaccine BCG; or (v) an anti-inflammatory drug, optionally a steroid such as ciclesonide, a TNF inhibitor (e.g., adalimumab), a TNF receptor inhibitor (e.g., etanercept), an IL-6 inhibitor (e.g., clazakizumab), an IL-6 receptor inhibitor (e.g., toclizumab), or metamizole; (vi) an antihistamine drug, optionally bepotastine; (vii) an ACE inhibitor, optionally moexipril; or (viii) a drug that inhibits priming of CoV-S, optionally a serine protease inhibitor, further optionally nafamostat.

[0422] An anti-histamine can be any compound that opposes the action of histamine or its release from cells (e.g., mast cells). Anti-histamines include but are not limited to acrivastine, astemizole, azatadine, azelastine, betatastine, brompheniramine, buclizine, cetirizine, cetirizine analogues, chlorpheniramine, clemastine, CS 560, cyproheptadine, desloratadine, dexchlorpheniramine, ebastine, epinastine, fexofenadine, HSR 609, hydroxyzine, levocabastine, loratadine, methscopolamine, mizolastine, norastemizole, phenindamine, promethazine, pyrilamine, terfenadine, and tranilast.

[0423] In CoV infection, respiratory symptoms are often exacerbated by additional bacterial infection. Therefore, such active agents may also be antibiotics, which include but are not limited to amikacin, aminoglycosides, amoxicillin, ampicillin, ansamycins, arsphenamine, azithromycin, azlocillin, aztreonam, bacitracin, carbacephem, carbapenems, carbenicillin, cefaclor, cefadroxil, cefalexin, cefalothin, cefalotin, cefamandole, cefazolin, cefdinir, cefditoren, cefepime, cefixime, cefoperazone, cefotaxime, cefoxitin, cefpodoxime, cefprozil, ceftazidime, ceftibuten, ceftizoxime, ceftobiprole, ceftriaxone, cefuroxime, cephalosporins, chloramphenicol, cilastatin, ciprofloxacin, clarithromycin, clindamycin, cloxacillin, colistin, co-trimoxazole, dalfopristin, demeclocycline, dicloxacillin, dirithromycin, doripenem, doxycycline, enoxacin, ertapenem, erythromycin, ethambutol, flucloxacillin, fosfomycin, furazolidone, fusidic acid, gatifloxacin, geldanamycin, gentamicin, glycopeptides, herbimycin, imipenem, isoniazid, kanamycin, levofloxacin, lincomycin, linezolid, lomefloxacin, loracarbef, macrolides, mafenide, meropenem, methicillin, metronidazole, mezlocillin, minocycline, monobactams, moxifloxacin, mupirocin, nafcillin, neomycin, netilmicin, nitrofurantoin, norfloxacin, ofloxacin, oxacillin, oxytetracycline, paromomycin, penicillin, penicillins, piperacillin, platensimycin, polymyxin B, polypeptides, prontosil, pyrazinamide, quinolones, quinupristin, rifampicin, rifampin, roxithromycin, spectinomycin, streptomycin, sulfacetamide, sulfamethizole, sulfanilamide, sulfasalazine, sulfisoxazole, sulfonamides, teicoplanin, telithromycin, tetracycline, tetracyclines, ticarcillin, tinidazole, tobramycin, trimethoprim, trimethoprim-sulfamethoxazole, troleandomycin, trovafloxacin, and vancomycin.

[0424] Active agents also include aldosterone, beclomethasone, betamethasone, corticosteroids, cortisol, cortisone acetate, deoxycorticosterone acetate, dexamethasone, fludrocortisone acetate, glucocorticoids, hydrocortisone, methylprednisolone, prednisolone, prednisone, steroids, and triamcinolone. Any suitable combination of these active agents is also contemplated.

[0425] A “pharmaceutical excipient” or a “pharmaceutically acceptable excipient” is a carrier, usually a liquid, in which an active therapeutic agent is formulated. In one embodiment, the active therapeutic agent is a humanized antibody described herein, or one or more fragments thereof. The excipient generally does not provide any pharmacological activity to the formulation, though it may provide chemical and/or biological stability, and release characteristics. Exemplary formulations can be found, for example, in Remington's Pharmaceutical Sciences, Gennaro, A. editor, 19^{th} edition, Philadelphia, PA: Williams and Wilkins (1995), which is incorporated by reference.

[0426] As used herein “pharmaceutically acceptable carrier” or “excipient” includes any and all solvents, dispersion media, coatings, antibacterial and antifungal agents, isotonic, and absorption delaying agents that are physiologically compatible. In one embodiment, the carrier is suitable for parenteral administration. Alternatively, the carrier can be suitable for intravenous, intraperitoneal, intramuscular, or sublingual administration. Pharmaceutically acceptable carriers include sterile aqueous solutions or dispersions and sterile powders for the extemporaneous preparation of sterile injectable solutions or dispersions. The use of such media and agents for pharmaceutically active substances is well known in the art. Except insofar as any conventional media or agent is incompatible with the active compound, use thereof in the pharmaceutical compositions of the disclosure is contemplated. Supplementary active compounds can also be incorporated into the compositions.

[0427] Pharmaceutical compositions typically must be sterile and stable under the conditions of manufacture and storage. The disclosure contemplates that the pharmaceutical composition is present in lyophilized form. The composition can be formulated as a solution, microemulsion, liposome, or other ordered structure suitable to high drug concentration. The carrier can be a solvent or dispersion medium containing, for example, water, ethanol, polyol (for example, glycerol, propylene glycol, and liquid polyethylene glycol), and suitable mixtures thereof. The disclosure further contemplates the inclusion of a stabilizer in the pharmaceutical composition. The proper fluidity can be maintained, for example, by the maintenance of the required particle size in the case of dispersion and by the use of surfactants.

[0428] In many cases, it will be preferable to include isotonic agents, for example, sugars, polyalcohols such as mannitol and sorbitol, or sodium chloride in the composition. Absorption of the injectable compositions can be prolonged by including an agent that delays absorption, for example, monostearate salts and gelatin. Moreover, the alkaline polypeptide can be formulated in a time-release formulation, for example in a composition that includes a slow release polymer. The active compounds can be prepared with carriers that will protect the compound against rapid release, such as a controlled release formulation, including implants and microencapsulated delivery systems. Biodegradable, biocompatible polymers can be used, such as ethylene vinyl acetate, polyanhydrides, polyglycolic acid, collagen, polyorthoesters, polylactic acid, polylactic and polyglycolic copolymers (“PLG”). Many methods for the preparation of such formulations are known to those skilled in the art.

[0429] For each of the recited embodiments, the compounds can be administered by a variety of dosage forms. Any biologically acceptable dosage form known to persons of ordinary skill in the art, and combinations thereof, are contemplated. Examples of such dosage forms include, without limitation, reconstitutable powders, elixirs, liquids, solutions, suspensions, emulsions, powders, granules, particles, microparticles, dispersible granules, cachets, inhalants, aerosol inhalants, patches, particle inhalants, implants, depot implants, injectables (including subcutaneous, intramuscular, intravenous, and intradermal), infusions, and combinations thereof.

### L. Kits

[0430] In certain aspects, the instant disclosure provides kits comprising an antibody, or antigen-binding fragment thereof, of the present invention, as described herein, or an isolated nucleic acid molecule, e.g., an isolated mRNA molecule, encoding the antibody or antigen-binding fragment thereof, and a package insert with instructions to perform any of the methods described herein.

[0431] In some embodiments, the kits include instructions for using the kit. The instructions will generally include information about the use of the kit for treating and/preventing infection by SARS-CoV, SARS-COV-2, and/or another coronavirus. In other embodiments, the instructions include at least one of the following: precautions; warnings; clinical studies; and/or references. The instructions may be printed directly on the container (when present), or as a label applied to the container, or as a separate sheet, pamphlet, card, or folder supplied in or with the container. In a further embodiment, a kit can comprise instructions in the form of a label or separate insert (package insert) for suitable operational parameters.

[0432] In some embodiments, the kit includes a pharmaceutical formulation including an antibody, or antigen-binding fragment thereof, or an isolated nucleic acid molecule, e.g., an isolated mRNA molecule, encoding the antibody or antigen-binding fragment thereof, an additional therapeutic agent, and a package insert with instructions to perform any of the methods described herein.

[0433] In some embodiments, the kit can comprise formulation components for parenteral, subcutaneous, intramuscular or intravenous administration, e.g., sealed in a vial in a form ready for loading into a syringe and administration to a subject. In some embodiments, the kits can contain one or more, e.g., two, three, four, or five or more, vials, wherein each vial contains a single unit dose for administration to a subject.

[0434] The vial can be of any size. In some embodiments, the vial is about 1 mL, about 2 mL, about 4 ml, about 8 mL, about 12 mL, about 16 mL, about 20 ml, or about 24 mL in volume.

[0435] In some embodiments, each vial comprises about 100 mg, about 200 mg, about 300 mg, about 500 mg, about 600 mg, about 700 mg, about 800 mg, about 900 mg, about 1000 mg, about 1500 mg, about 2000 mg, or about 2500 mg of the antibody or antigen-binding fragment thereof.

[0436] The kit may be packaged in a number of different configurations such as one or more containers in a single box. The different components can be combined, e.g., according to instructions provided with the kit. The components can be combined according to a method described herein, e.g., to prepare and administer a pharmaceutical composition.

[0437] In some embodiments, the kit can comprise one or more containers with appropriate positive and negative controls or control samples, to be used as standard(s) for detection, calibration, or normalization.

[0438] The kit can further comprise a second container comprising a pharmaceutically-acceptable buffer, such as (sterile) phosphate-buffered saline, Ringer's solution, or dextrose solution; and other suitable additives such as penetration enhancers, carrier compounds and other pharmaceutically acceptable carriers or excipients, as described herein. It can further include other materials desirable from a commercial and user standpoint, including other buffers, diluents, filters, and package inserts with instructions for use. The kit can also include a drug delivery system such as liposomes, micelles, nanoparticles, and microspheres. The kit can further include a delivery device, such as needles, syringes, pumps, and package inserts with instructions for use.

[0439] The above description of various illustrated embodiments of the invention is not intended to be exhaustive or to limit the invention to the precise form disclosed. While specific embodiments of, and examples for, the invention are described herein for illustrative purposes, various equivalent modifications are possible within the scope of the invention, as those skilled in the relevant art will recognize. The teachings provided herein of the invention can be applied to other purposes, other than the examples described above.

[0440] These and other changes can be made to the invention in light of the above detailed description. In general, in the following claims, the terms used should not be construed to limit the invention to the specific embodiments disclosed in the specification and the claims. Accordingly, the invention is not limited by the disclosure, but instead the scope of the invention is to be determined entirely by the following claims.

[0441] The invention may be practiced in ways other than those particularly described in the foregoing description and examples. Numerous modifications and variations of the invention are possible in light of the above teachings and, therefore, are within the scope of the appended claims.

[0442] Certain anti-CoV-S antibody polynucleotides and polypeptides are disclosed in the sequence listing accompanying this patent application filing, and the disclosure of said sequence listing is herein incorporated by reference in its entirety.

[0443] The entire disclosure of each document cited (including patents, patent applications, journal articles, abstracts, manuals, books, or other disclosures) in the Background, Detailed Description, and Examples is herein incorporated by reference in their entireties.

[0444] The following examples are put forth so as to provide those of ordinary skill in the art with a complete disclosure and description of how to make and use the subject invention and are not intended to limit the scope of what is regarded as the invention. Efforts have been made to ensure accuracy with respect to the numbers used (e.g. amounts, temperature, concentrations, etc.), but some experimental errors and deviations should be allowed for. Unless otherwise indicated, parts are parts by weight, molecular weight is average molecular weight, temperature is in degrees centigrade; and pressure is at or near atmospheric.

### EXAMPLES

### Example 1: Recall of Pre-Existing Cross-Reactive B Cell Memory Following Omicron Breakthrough Infection

[0445] mRNA-based COVID-19 vaccines demonstrated a remarkably high degree of protective efficacy against the original SARS-COV-2 Wuhan-1 strain in clinical studies (1, 2). However, waning vaccine-induced immunity combined with the continued emergence of resistant SARS-COV-2 variants has significantly undermined vaccine effectiveness (3-5). In particular, the recently emerged Omicron variant (B.1.1.529/BA.1) and its sub-lineages (e.g., BA1.1 and BA.2) display a striking degree of antibody evasion, thus severely limiting vaccine efficacy against this VOC and allowing it to rapidly displace Delta and drive a global surge in COVID-19 caseloads (6-11).

[0446] Understanding the role of antigenic imprinting in shaping the B cell response to antigenically drifted SARS-COV-2 variants will be critical for the development of next-generation COVID-19 vaccines. Previous studies have shown that breakthrough infection with Delta or Omicron boosts serum neutralizing activity against both the Wuhan-1 vaccine strain and the infecting variant, suggesting recall of cross-reactive vaccine-induced MBCs (12-14). However, the specificities, functions, and genetic features of the antibodies mediating this response remain poorly defined. To address these questions, S-specific serological and peripheral B cell responses were investigated in a cohort of mRNA-vaccinated individuals who had recently experienced BA.1 breakthrough infections.

[0447] Seven mRNA (mRNA-1273 or BNT162b2)-vaccinated individuals residing in the Northeastern region of the United States who experienced SARS-COV-2 breakthrough infections between Dec. 30, 2021 and Jan. 19, 2022 were recruited (Table 1). All donors tested positive for SARS-COV-2 by RT-PCR and experienced asymptomatic or mild disease. While viral samples were unable to be obtained for genome sequencing, SARS-COV-2 variant surveillance data indicates that the BA.1 variant accounted for the vast majority of infections in the United States Northeast during this time period (FIG. 5). Breakthrough infections occurred 5-11 months after the second dose of an mRNA vaccine in four donors and one month after a third mRNA dose in three donors. To study the acute B cell response following breakthrough infection, serum and peripheral blood mononuclear cell (PBMC) samples were collected 14 to 27 days following PCR-confirmed infection (FIG. 1A).

TABLE 1
BA.1 breakthrough infection donor characteristics.

| Donor ID | IML4041 | IML4042 | IML4043 | IML4044 | IML4045 | IML4054 | IML4055 |
|---|---|---|---|---|---|---|---|
| Age | 45 | 19 | 23 | 23 | 24 | 38 | 23 |
| Sex | F | F | M | F | F | F | F |
| Vaccination | 2x | 2x | 2x | 2x | 2x | 2x mRNA- | 3x |
| History | BNT162b2 | BNT162b2 | BNT162b2 | BNT162b2 | BNT162b2, | 1273, 1x | BNT162b2 |
| | | | | | 1x | BNT162b2 | |
| | | | | | mRNA-1273 | | |
| 2nd dose | 7 May 2021 | 22 Jul. 2021 | 23 May 2021 | 10 Feb. 2021 | 15 May 2021 | 5 May 2021 | 23 May 2021 |
| vaccination date | | | | | | | |
| 3rd dose | — | — | — | — | 20 Dec. 2021 | 11 Dec. 2021 | 9 Dec. 2021 |
| vaccination date | | | | | | | |
| (if applicable) | | | | | | | |
| Date of PCR- | 31 Dec. 2021 | 4 Jan. 2022 | 30 Dec. 2021 | 2 Jan. 2022 | 6 Jan. 2022 | 19 Jan. 2022 | 6 Jan. 2022 |
| confirmed | | | | | | | |
| infection | | | | | | | |
| Days between | 25 | 21 | 26 | 23 | 19 | 14 | 27 |
| breakthrough | | | | | | | |
| infection and | | | | | | | |
| sample | | | | | | | |
| collection | | | | | | | |

[0448] Serum IgG and IgA responses to recombinant prefusion-stabilized Wuhan-1/wild type (WT) and BA.1 S proteins and RBD subunits were evaluated following breakthrough infection. For comparison, serum antibody responses were also assessed in a separate cohort of previously uninfected individuals who had received a second dose of an mRNA vaccine at either one- or six-months prior to sampling or a third mRNA booster dose one month prior to sampling (Table 2).

TABLE 2
Uninfected/mRNA-vaccinated cohort characteristics.

| | 2x mRNA (1M) | 2x mRNA (6M) | 3x mRNA (1M) |
|---|---|---|---|
| Sample size | 12 | 11 | 11 |
| Age median | 31 (21-42) | 36 (26-42) | 54 (32-58) |
| (range) | | | |
| Vaccination | 2x mRNA-1273 | 2x mRNA-1273 | 3x mRNA-1273 |
| regimens (%) | (75%) | (82%) | (64%) |
| | 2x BNT162b2 | 2x BNT162b2 | 2x mRNA-1273, |
| | (25%) | (18%) | 1x BNT162b2 |
| | | | (36%) |

[0449] Donors who experienced BA.1 breakthrough infection exhibited similar (within two-fold) serum IgG binding titers to BA.1 and WT S and RBD (FIG. 1B). In contrast, uninfected/mRNA vaccinated donors displayed two- to four-fold reduced serum IgG binding to BA.1 relative to WT S and four- to nine-fold lower serum IgG binding titers to the BA.1 RBD relative to WT (FIG. 1B). Furthermore, breakthrough infection donors exhibited significantly higher serum IgA antibody titers to both WT and BA.1 RBDs relative to uninfected/vaccinated donors (FIG. 1C). Thus, BA.1 breakthrough infection induces serum IgG and IgA binding responses to both WT and BA.1 S antigens in previously vaccinated individuals.

[0450] Next, samples were assessed for serum neutralizing activity against an ancestral SARS-COV-2 strain (D614G), as well as BA.1, Delta, and Beta VOCs using an MLV-based pseudovirus assay. Consistent with prior studies, serum samples obtained from uninfected/vaccinated donors showed 3.5- to 11-fold and 7- to 22-fold lower neutralizing titers against Beta and BA.1, respectively, relative to D614G (FIG. 1D-F). In contrast, serum samples from BA.1 breakthrough infection donors displayed similar (within two-fold) neutralizing titers against D614G and all VOCs tested, suggesting that BA.1 breakthrough infection broadens serum neutralizing antibody responses (FIG. 1G). To determine whether this breadth of activity extended to more divergent sarbecoviruses, the serum samples were also tested for neutralizing activity against SARS-COV. Similar SARS-COV neutralizing titers were observed in BA.1 breakthrough donors and uninfected/vaccinated individuals, suggesting that the breadth of serum reactivity induced by BA.1 breakthrough infection is likely limited to variants of SARS-COV-2 and not more antigenically diverse sarbecoviruses (FIG. 1D-G).

[0451] Next, the magnitude and cross-reactivity of the peripheral RBD-specific B cell response were evaluated following BA.1 breakthrough infection. Although higher serum neutralizing titers to BA.1 were observed in breakthrough donors relative to uninfected/mRNA vaccinated individuals, the two cohorts showed similar frequencies of WT- and BA.1-RBD-reactive IgG+ B cells (FIG. 2A and FIG. 6A). The limited magnitude of the circulating IgG+ B cell response following BA.1 breakthrough infection may be due to the restriction of antigen to the upper respiratory tract during mild and asymptomatic infections. To address this, the frequencies of RBD-specific IgA⁺ B cells were also compared in breakthrough donors and uninfected/vaccinated individuals. In uninfected/vaccinated donors, WT and BA.1 RBD-reactive B cells represented 0.04-0.087% and 0-0.015% of total IgA⁺ B cells, respectively (FIG. 2B). In contrast, breakthrough infection donors mounted significantly higher magnitude IgA responses to the RBD, with BA.1 RBD-specific IgA⁺ B cells accounting for 0.025-0.4% (median=0.069%) of the total IgA⁺ B cell population (FIG. 2B). It was concluded that BA.1 breakthrough infection induces similar IgG+ B cell responses and higher magnitude IgA⁺ B cell responses to BA.1 RBD antigens relative to mRNA vaccination.

[0452] To investigate the impact of pre-existing vaccine-induced immunity on the B cell response to BA.1 breakthrough infection, B cells that displayed WT/BA.1 RBD cross-reactivity were enumerated in BA.1 breakthrough donors and uninfected/mRNA vaccinated individuals (FIG. 2C, FIG. 6A). At one month post primary mRNA vaccination, only 48% of total RBD-directed B cells displayed cross-reactivity with BA.1 (FIG. 2D). The proportion of WT/BA.1 RBD cross-reactive B cells increased to 57% at 6-months post-primary vaccination and to 70% following mRNA booster immunization, consistent with the evolution of anti-SARS-COV-2 antibody breadth over time (15, 16) (FIG. 2D). Following breakthrough infection, BA.1/WT RBD cross-reactive B cells constituted 65-83% of total anti-RBD B cells and the remaining 17-35% bound only to the WT probe (FIG. 2D). Because WT RBD-specific B cells may represent resting MBCs induced by vaccination but not activated by BA. 1 infection, this analysis was also restricted to B cells expressing the activation marker CD71 (FIG. 6B). Among recently activated B cells, 87-98% of total RBD-reactive clones displayed BA.1/WT cross-reactivity, whereas the proportion of cross-reactive B cells remained unchanged in uninfected/mRNA vaccinated individuals (FIG. 2E). BA.1-specific B cells were unable to be detected in any donors following BA.1 breakthrough infection, suggesting limited induction of de novo B cell responses at this time point. Thus, it was concluded that BA.1 breakthrough infection preferentially activates B cells that display cross-reactivity with both BA. 1 and the original Wuhan-1 vaccine strain.

[0453] Next, it was evaluated whether BA.1 breakthrough infection modifies the immunodominance hierarchy of B cells targeting each subdomain with the S trimer. To calculate the proportion of full-length S-reactive B cells targeting each subdomain, B cells were stained with differentially labeled tetramers of full-length S, RBD, NTD, and prefusion-stabilized S2 (FIG. 6C). In the uninfected/vaccinated cohort, class-switched B cells targeting the NTD, RBD, and S2 subdomains comprised 18%, 25%, and 37% of the total S-directed response, respectively, and these proportions remained largely unchanged at six months post-vaccination and after mRNA booster immunization (FIG. 2F-H). In contrast, significantly higher proportions of RBD-directed B cells were observed among donors with breakthrough infection, ranging from 35-63% (median=46%) of the total activated (CD71⁺) B cell response to S (FIG. 2G). Furthermore, S2-reactive B cells comprised a smaller fraction (median=16%) of the S-specific response in breakthrough donors relative to uninfected/mRNA vaccinated individuals (FIG. 2H). This altered immunodominance pattern was observed in donors experiencing BA.1 breakthrough infection following both second and third dose mRNA vaccination (FIG. 7). In summary, BA.1 breakthrough infection appears to re-direct B cell immunodominance hierarchy from the S2 subunit to the RBD.

[0454] To characterize the molecular features of anti-RBD antibodies elicited by BA.1 breakthrough infection, 410 class-switched RBD⁺ B cells were single-cell sorted from five breakthrough infection donors and expressed 317 natively paired antibodies as full-length IgGs (32 to 102 antibodies per donor) (FIG. 8). Despite sorting with a mixture of WT and BA.1 RBDs, the vast majority of IgGs displayed BA.1 RBD reactivity (92-96%), providing strong evidence that these donors experienced BA.1 infections (FIG. 3A). In addition, index sorting analysis revealed that all antibodies derived from CD71⁺ B cells recognized BA.1, suggesting that the WT-specific antibodies likely originated from resting MBCs elicited by vaccination (FIG. 9).

[0455] Sequence analysis revealed that the BA.1 RBD-reactive antibodies displayed a relatively high level of clonal diversity, with 7-45% belonging to expanded clonal lineages (FIG. 3B). A significant over-representation of heavy chain germline genes IGHV3-53, 3-66, 3-30, 1-69, 3-9, and 4-31 was observed in BA.1 breakthrough infection repertoires relative to the baseline human repertoire (17) (FIG. 3C). While IGHV3-53, 3-66, and 3-30 germline gene families have also been shown to be over-represented in the antibody response to ancestral SARS-COV-2 strains, IGHV1-69, 3-9, and 4-31 appear to be unique to the BA.1 breakthrough response (18) (FIG. 3C). The BA.1 RBD-reactive antibodies displayed a similar HCDR3 length distribution compared to the baseline repertoire (FIG. 3D). Ninety-five to 100% of antibodies derived from each donor contained somatic mutations, with median SHM levels ranging from 8 to 11 nucleotide substitutions in VH, supporting a memory B cell origin (FIG. 3E). It was concluded that the early B cell response to breakthrough infection is dominated by highly mutated clones that cross-react with both WT and BA.1 RBDs.

[0456] To further evaluate the binding properties of the BA.1 RBD-reactive antibodies, their monovalent binding affinities for SARS-COV-2 D614G, BA.1, BA.2, Beta, and Delta RBDs and the SARS-COV RBD were measured. The majority (204/293) of RBD-directed antibodies bound with high affinity (K_{D}<10 nM) to both BA.1 and WT RBDs, supporting selection from an affinity matured B cell population (FIG. 4A). However, approximately 70% of the antibodies displayed higher affinity binding (>2-fold) to the WT RBD relative to BA.1, providing strong evidence for the re-activation of pre-existing vaccine-induced MBCs following BA.1 breakthrough infection (FIG. 4A). In contrast to vaccine-induced anti-RBD antibodies, which often show reduced activity against the Beta VOC, only a minority (<5%) of antibodies derived from BA.1 breakthrough donors displayed loss of binding to Beta relative to WT (10, 16) (FIG. 4B). This difference in antibody binding cross-reactivity is likely due to the presence of shared mutations within the Beta and BA.1 RBDs (E484K/A, K417N, and N501Y). Overall, 82% (241/293) of anti-RBD antibodies isolated from breakthrough infection donors displayed monovalent binding to WT, Beta, Delta, BA.1, and BA.2 RBDs, suggesting that BA.1 breakthrough infection activates a large proportion of B cells with broad SARS-COV-2 VOC recognition (FIG. 4B). Consistent with the weak serum neutralizing activity observed against SARS-COV, less than 10% of RBD-targeting antibodies exhibited detectable monovalent binding to the SARS-COV RBD (FIG. 4B). Thus, BA.1 breakthrough infection appears to preferentially expand B cells targeting epitopes that are conserved across SARS-COV-2 variants but not more antigenically divergent sarbecoviruses.

[0457] Next, the BA.1 RBD-reactive antibodies were screened for neutralizing activity against D614G and BA.1. Twenty-eight to 56% and 34-49% of antibodies from each donor displayed >90% neutralizing activity against D614G and BA.1, respectively, at a concentration of 5 μg/ml (FIG. 4C). Titration of the neutralizing antibodies against D614G and BA.1 revealed that 45% (64/141) potently neutralize both viruses with IC₅₀s less than 0.1 μg/ml (FIG. 4D). Consistent with their overall increased binding affinities for the WT RBD relative to BA.1, most of the neutralizing antibodies (78%) displayed higher potency against D614G compared to BA.1 (FIG. 4D). Notably, a large proportion of BA.1 neutralizing antibodies also displayed cross-reactivity with Delta (79%), Beta (90%), and BA.2 (86%) RBDs with affinities within 10-fold of BA.1 (FIG. 4E). A limited number of these VOC cross-reactive antibodies (5 out of 141) also neutralized SARS-COV, with IC₅₀s ranging from 0.039-0.35 μg/ml (FIG. 10). It was concluded that BA.1 breakthrough infection elicits RBD-directed antibodies with broad activity against SARS-COV-2 VOCs.

[0458] Previous studies have defined several “public” classes of neutralizing antibodies (Class 1-4) induced by SARS-COV-2 infection and vaccination (19, 20). To determine whether BA.1 breakthrough infection also elicits recurrent neutralizing antibody responses, the sequence and binding features of the BA.1 neutralizing antibodies were analyzed. Over 40% of all BA. 1 neutralizing antibodies utilized one of three VH germline genes (IGHV3-53/66, IGHV1-69, and IGHV3-9) (FIG. 4F and FIG. 11). Similar to previously described IGHV3-53/66 antibodies isolated from mRNA-vaccinated individuals, the BA.1 neutralizing IGHV3-53/66 antibodies possessed short HCDR3s (11-12 residues) and displayed competitive binding with ACE2, the class 1 mAb REGN10933, and the COVA1-16-like class 4 mAb ADI-62113 (21) (FIG. 4G and FIG. 12). However, unlike vaccine-induced IGHV3-53/66 antibodies, which generally lack activity against SARS-COV-2 variants containing substitutions at position K417 (e.g. Beta, Gamma, and BA.1), breakthrough infection-derived IGHV3-53/66 antibodies displayed broad reactivity with all VOCs tested and potently neutralized both D614G and BA.1 pseudoviruses (median IC₅₀=0.016 and 0.051 μg/ml, respectively) (22, 23) (FIG. 4E and FIG. 13). Thus, these IGHV3-53/66-utilizing antibodies appear to recognize an antigenic site that is overlapping but distinct from previously described IGHV3-53/66 antibodies induced by infection and vaccination.

[0459] Neutralizing antibodies utilizing the IGHV1-69 and IGHV3-9 germline genes also broadly recognized SARS-COV-2 variants, including BA.2 (FIG. 4E). In contrast to IGHV3-53/66, these germline genes have not been shown to be over-represented among RBD-directed antibodies identified from mRNA-vaccinated donors (FIG. 3C). Antibodies utilizing the IGHV1-69 germline gene segregated into two groups, one comprised of antibodies that targeted an ACE2- and REGN10933-competitive region and the other containing antibodies that recognized a non-ACE2 competitive site overlapping the COV2-2130 (class 3) epitope (FIG. 4G). Notably, >80% of non-ACE2 competitive clones utilized the light chain IGLV1-40 gene and displayed highly similar LCDR3 sequences, suggesting a convergent mode of recognition (FIG. 14). Finally, 12/13 IGHV3-9 antibodies recognized an epitope outside of the ACE2 binding site and competed with all three class 3 antibodies tested (S309, REGN10987, and COV2-2130), suggesting a binding mode distinct from the IGHV1-69 antibodies (FIG. 4G). Taken together, BA.1 breakthrough infection elicits multiple recurrent classes of anti-RBD antibodies with broad SARS-COV-2 VOC reactivity.

[0460] A deep understanding of how pre-existing SARS-COV-2 immunity shapes the B cell response to heterologous variant exposure will be important for the development of variant-based booster vaccines. Here this example demonstrates that the acute B cell response to BA.1 breakthrough infection is primarily mediated by re-activated vaccine-induced memory B cell clones with broader SARS-COV-2 VOC cross-reactivity than those elicited by infection or vaccination with ancestral SARS-COV-2 strains. Although the durability and kinetics of the breakthrough-activated B cell response remain unknown, the induction of cross-reactive responses following BA.1 breakthrough infection suggests that booster immunization with heterologous S proteins may be a promising strategy for the elicitation of broadly neutralizing responses against future emerging VOCs.

[0461] Despite the immunodominance of the S2 subunit in the context of primary SARS-COV-2 infection and vaccination, BA.1 breakthrough infection preferentially boosted cross-reactive antibodies targeting the antigenically variable and immuno-subdominant RBD. The molecular explanation(s) for this shift in B cell immunodominance hierarchy remain to be determined but may be driven by increased serum antibody masking of the conserved S2 subunit relative to the more divergent RBD, resulting in limited S2 epitope accessibility for B cell targeting. Notably, serum antibody feedback via epitope masking has been previously shown to limit B cell responses to immunodominant viral epitopes and permit expansion of subdominant responses (24).

[0462] Finally, several monoclonal antibodies from BA.1 breakthrough infection donors were identified that display broad activity against all SARS-COV-2 VOCs described to date as well as SARS-CoV. These antibodies represent promising candidates for therapeutic development and provide a framework for the development of vaccines that induce broadly neutralizing antibody responses.

### Methods and Materials

### Human Subjects and Blood Sample Collection.

[0463] Breakthrough infection donors and uninfected two-dose vaccinated donors participated with informed consent under the healthy donor protocol D10083, Immune Monitoring Core (DartLab) Laboratory at Dartmouth-Hitchcock Hospital. Uninfected three-dose vaccinated participants are enrolled in the clinical trial, CoVacc—Immune response to vaccination against Covid-19, an open multicenter phase IV study, was approved by the Swedish Ethics Review Authority (Dnr 2021-00055) and the Medical Products Agency Sweden. The study was registered at European Clinical Trials Database (EUDRACT Number 2021-000683-30) before the first patient was enrolled. Umeå University, Sweden served as trial sponsor and the Clinical Research Center, University Hospital of Northern Sweden was monitoring the study for regulatory compliance. Individuals were included after informed consent and data were stored in accordance with the EU General Data Protection Regulation.

[0464] Seven participants with BA.1 breakthrough infection were recruited to participate in this study. SARS-COV-2 infection was determined by positive results via both RT-PCR from a saliva sample and rapid antigen test from a nasal swab sample. All participants were previously immunized with two- or three-doses of an mRNA vaccine (BNT162b2 or mRNA-1273) and had no documented history of SARS-COV-2 infection prior to vaccination. Clinical and demographic characteristics of breakthrough infection donors are shown in Table 1. Participants presented to the Dartmouth-Hitchcock Hospital (D-HH) 14 to 27 days after their first SARS-COV-2 positive test for blood draw. Venous blood was collected using BD Vacutainer® tubes with acid citrate dextrose (ACD), and plasma and PBMCs were isolated using a Ficoll 1077 (Sigma) gradient, washed, and counted with an anti-human CD45 stain on a volumetric flow cytometer. PBMC were frozen in 12.5% human serum and 10% DMSO diluted in RPMI-1040 and stored in liquid nitrogen until use. Plasma was isolated and frozen at −80° C.

[0465] A separate cohort of uninfected/mRNA-vaccinated volunteers were recruited for blood sample collection at D-HH (for two-dose mRNA-vaccinated donors) and Umeå University (for three-dose mRNA-vaccinated donors). Samples were collected at one month (n=12) and six months (n=11) following the second mRNA dose or one month following the third mRNA dose (n=11). Demographics for these participants are shown in Table 2. Sample collection and processing methods for two-dose vaccinated individuals are described above. For individuals who received a third mRNA dose, venous blood was collected and PBMCs and plasma isolated in BD EDTA Vacutainer® CPT™ tubes. PBMCs were frozen in 90% fetal calf serum supplemented with 10% DMSO and stored in liquid nitrogen until use. Plasma and serum were stored at −80° C.

### Recombinant SARS-COV-2 S Production.

[0466] To produce prefusion-stabilized WT SARS-COV-2 HexaPro S, DNA encoding residues 1-1208 of the SARS-COV-2 spike (Genbank NC NC_045512.2) with substitutions F817P, A892P, A899P, A942P, K986P, V987P, “GSAS” mutations (SEQ ID NO:7) from positions 682-685 and a C-terminal T4 fibritin motif, 8×HisTag (SEQ ID NO:8) and TwinStrepTag (SARS-COV-2 S-2P) was cloned into a pcDNA3.4 vector. The following mutations were additionally cloned into the Omicron/BA.1 HexaPro S plasmid: A67V, Δ69-70, T95I, G142D, Δ143-145, Δ211, L212I, ins214EPE, G339D, S371L, S373P, S375F, K417N, N440K, G446S, S477N, T478K, E484A, Q493K, G496S, Q498R, N501Y, Y505H, T547K, D614G, H655Y, N679K, P681H, N764K, D796Y, N856K, Q954H, N969K, L981F. Plasmids were transiently transfected into FreeStyle HEK 293F cells (Thermo Fisher) using polyethylenimine following the manufacturer's directions. After one week of culture, the supernatants were harvested, and centrifuged to remove cellular debris. S protein preps were purified by Ni affinity chromatography and followed by size exclusion chromatography using the Superose 6 column (GE Healthcare) before concentrating and freezing at −80° C.

### Serum ELISAs

[0467] 96-well half-area plates (Corning) were coated with the following recombinant antigens at a concentration of 5 μg/ml diluted in PBS: SARS-COV-2 WT Hexapro-stabilized S, BA.1 Hexapro-stabilized S, WT RBD (Sino Biological, Cat #40592-V08B), BA.1 RBD (Acro Biosystems, Cat #SPD-C522e), WT NTD (Acro Biosystems, Cat #S1D-52H6), BA.1 NTD (Acro Biosystems, Cat #SPD-C522d), and Hexapro-stabilized S2 (Acro Biosystems, Cat #S2N-C52H5) antigens. Following overnight incubation at 4° C., wells were washed with wash buffer (1×PBS with 0.05% Tween-20) and blocked with 75 μl 3% bovine serum albumin (BSA) in 1×PBS for 1 h at 37° C. Coated wells were subsequently incubated with serial dilutions of human sera ranging from 1:40 to 1:1,310,720 in a solution of 0.1% BSA, 0.01% Tween-20 in 1×PBS for 1 h at 37° C. and then washed three times with wash buffer. To detect antigen-specific IgG and IgA, wells were incubated with either a 1:5000 dilution of anti-human IgG horseradish peroxidase (HRP; Jackson Immunoresearch Laboratories, Cat #109-036-098) or a 1:10,000 dilution of anti-human IgA HRP (Jackson Immunoresearch Laboratories, Cat #109-036-011) in 0.1% BSA, 0.01% Tween-20, 1×PBS for 1 h at 37° C. Plates were then washed three times and developed with 25 μl of room temperature-equilibrated 1-Step™ Ultra TMB Substrate Solution (Thermo Fisher Scientific) for 5 min. The developing reaction was terminated by addition of 25 μl 4 N sulfuric acid. Absorbance was measured at 450 nm using a Spectramax microplate reader (Molecular Devices). Titration curves were fitted via non-linear regression to determine the 50% effective concentration (EC₅₀) in GraphPad Prism (version 9.3.1).

### SARS-COV-2 Pseudovirus Generation.

[0468] Single-cycle infection pseudoviruses were generated as previously described (25). Briefly, HEK293T cells seeded overnight in 6-well tissue culture plates (Corning) were co-transfected with the following plasmids: 1) 0.5 μg of pCDNA3.3 encoding SARS-COV-2 spike genes with 19-residue C-terminal truncations, 2) 2 μg of MLV-based luciferase reporter gene plasmid (Vector Builder), and 3) 2 μg of MLV gag/pol (Vector Builder). The SARS-COV-2 Omicron/BA.1 contained the following mutations in relative to Wuhan-1: A67V, A69-70, T95I, G142D, A143-145, A211, L212I, ins214EPE, G339D, S371L, S373P, S375F, K417N, N440K, G446S, S477N, T478K, E484A, Q493K, G496S, Q498R, N501Y, Y505H, T547K, D614G, H655Y, N679K, P681H, N764K, D796Y, N856K, Q954H, N969K, L981F. Plasmids were combined with Lipofectamine 2000 (ThermoFisher Scientific) and transfected following the manufacturer's recommendations. Culture supernatants containing SARS-CoV-2 S-pseudotyped MLV particles were collected 48 h post-transfection, aliquoted, and frozen at −80° C. for neutralization assays.

### Pseudovirus Neutralization Assay.

[0469] HeLa-hACE2 reporter cells (BPS Bioscience Cat #79958) were seeded overnight at 10,000 cells per well in 96-well tissue culture plates (Corning). Human plasma and serum samples were heat-inactivated at 56° C. for 30 min. Next, monoclonal antibodies or heat-inactivated sera were serially diluted in MEM/EBSS media supplemented with 10% FBS with 50 μl of MLV viral stock and incubated for 1 h at 37° C. with 5% carbon dioxide. Cell culture media was removed, and cells were washed two times with PBS. The virus-antibody mixture was subsequently added to HeLa-hACE2 cells and incubated for 48 h at 37° C. with 5% carbon dioxide. Cells were then lysed with Luciferase Cell Culture Lysis 5× reagent (Promega), and luciferase activity was measured using the Luciferase Assay System (Promega) following manufacturer's protocols. Infectivity was measured as relative luminescence units (RLUs) using a luminometer (Perkin Elmer). The percentage neutralization was calculated as 100*(1−[RLUsample−RLUbackground]/[RLUisotype control mAb−RLUbackground]), and the 50% neutralization concentration was interpolated from four-parameter non-linear regression fitted curves in GraphPad Prism (version 9.3.1).

### FACS Analysis of SARS-COV-2 S-Specific B Cell Responses.

[0470] Antigen-specific B cells were detected using recombinant biotinylated antigens tetramerized with fluorophore-conjugated streptavidin (SA). For detection of peripheral B cells that recognize WT and/or BA.1 RBD, 4:1 molar ratios of biotinylated antigens to SA were mixed in the following combinations: WT HexaPro S with SA-AlexaFluor 633 (Invitrogen), BA.1 HexaPro S with SA-AlexaFluor 633 (Invitrogen), WT RBD (Acro Biosystems, Cat #SPD-C82E8) with SA-BV421 (BioLegend), and BA.1 RBD (Acro Biosystems, Cat #SPD-C522e) with SA-phycoerythrin (PE; Invitrogen). For determination of subdomain reactivities within the total S-specific B cell population, antigen tetramers were mixed in the following combinations: WT HexaPro S with SA-AlexaFluor 633 (Invitrogen), BA.1 HexaPro S with SA-AlexaFluor 633 (Invitrogen), WT RBD (Acro Biosystems, Cat #SPD-C82E8) with SA-BV421 (BioLegend), BA.1 RBD (Acro Biosystems, Cat #SPD-C522e) with SA-BV421, WT NTD (Acro Biosystems, Cat #S1D-52H6) with SA-PE, BA.1 NTD (Acro Biosystems, Cat #SPD-C522d) with SA-PE, and HexaPro-stabilized WT S2 (Acro Biosystems, Cat #S2N-C52H5) with SA-BV711 (BD BioSciences). Antigen tetramers were incubated for 30 min at 4° C., followed by quenching of unbound SA sites using 5 μl of 2 μM Pierce biotin (ThermoFisher Scientific). PBMCs were stained with pooled tetramerized antigens (25 nM each) and anti-human antibodies anti-CD19 (PE-Cy7; Biolegend), anti-CD3 (PerCP-Cy5.5; Biolegend), anti-CD8 (PerCP-Cy5.5; Biolegend), anti-CD14 (PerCP-Cy5.5; Invitrogen), and anti-CD16 (PerCP-Cy5.5; Biolegend) diluted in a 1:1 [v/v] mixture of Brilliant Stain Buffer (BD BioSciences) and FACS buffer (2% BSA/1 mM EDTA in 1×PBS) for 15 min on ice. Following one wash, cells were resuspended in a mixture of propidium iodide and anti-human antibodies anti-IgG (BV605; BD Biosciences), anti-IgA (FITC; Abcam), anti-CD27 (BV510; BD Biosciences), and anti-CD71 (APC-Cy7; Biolegend) and incubated for 15 min on ice. After washing two times with FACS buffer, samples were analyzed using a BD FACS Aria II (BD Biosciences).

[0471] The proportion of class-switched RBD-specific B cells that reacted with WT and/or BA.1 RBD was calculated by dividing the number of BA.1/WT cross-reactive or WT-specific IgG+ and IgA+ (swIg+) B cells by the total number of RBD+ S+ swIg+ B cells. The proportion of S-reactive B cells that recognized each subdomain (NTD, RBD, or S2) was calculated by dividing the number of IgG+ and IgA+ (swIg+) B cells that recognize both S and the subdomain by the total number of S+ swIg+ cells.

### Single B Cell Sorting.

[0472] Biotinylated recombinant WT (Acro Biosystems, Cat #SPD-C82E8) and BA.1 (Acro Biosystems, Cat #SPD-C522e) RBDs were separately mixed with AlexaFluor 633-conjugated SA (SA-633; Invitrogen) and PE-SA (Invitrogen) at a 4:1 molar ratio of antigen to SA for 30 min at 4° C. The four antigen-SA pairs were then pooled to create a mixture of PE- and APC-labelled WT and BA.1 RBD tetramers. PBMCs were stained with tetramerized antigens (25 nM each) and a mixture of anti-CD19 (PE-Cy7; Biolegend), anti-CD20 (BV711; Biolegend) anti-CD3 (PerCP-Cy5.5; Biolegend), anti-CD8 (PerCP-Cy5.5; Biolegend), anti-CD14 (PerCP-Cy5.5; Invitrogen), and anti-CD16 (PerCP-Cy5.5; Biolegend) antibodies diluted in FACS buffer (2% BSA/1 mM EDTA in 1×PBS) for 15 min on ice. Stained cells were centrifuged for 10 min at 400×g, washed once with FACS buffer, and centrifuged again to pellet the cells. Next, cells were resuspended in propidium iodide and anti-human antibodies anti-IgM (BV421; BD Biosciences), anti-IgG (BV605; BD Biosciences), anti-IgA (FITC; Abcam), anti-CD27 (BV510; BD Biosciences), and anti-CD71 (APC-Cy7; Biolegend) diluted in Brilliant Stain Buffer (BD BioSciences) and FACS buffer. Following 15 min of incubation on ice, Cells were washed two times, resuspended in FACS buffer, and analyzed using a BD FACS Aria II (BD Biosciences). Class-switched B cells, defined as CD19+CD3−CD8−CD14−CD16−PI−IgM− and IgG+ or IgA+, that specifically bound to the WT/BA. 1 RBD mixture were single-cell index sorted into 96-well polystyrene microplates (Corning) containing 20 μl lysis buffer per well [5 μl of 5× first strand SSIV cDNA buffer (Invitrogen), 1.25 μl dithiothreitol (Invitrogen), 0.625 μl of NP-40 (Thermo Scientific), 0.25 μl RNaseOUT (Invitrogen), and 12.8 μl dH2O]. Plates were then frozen at −80° C. before further downstream processing.

### Amplification and Cloning of Antibody Variable Genes.

[0473] Antibody variable gene mRNA transcripts (VH, Vk, Vλ) were amplified by RT-PCR as described previously (22). Briefly, cDNA was synthesized using SuperScript IV enzyme (ThermoFisher Scientific), followed by two rounds of nested PCRs. The second cycle of nested PCR added 40 base pairs of 5′ and 3′ homology to restriction enzyme-digested S. cerevisiae expression vectors to enable homologous recombination during transformation. PCR-amplified variable gene DNA was chemically transformed into competent yeast cells via the lithium acetate method and yeast were plated on selective amino acid drop-out agar plates (26). Transformed yeast colonies were picked for sequencing and characterization.

### Expression and Purification of IgG and Fab Molecules.

[0474] Antibodies were expressed as human IgG1 via S. cerevisiae cultures, as described previously (22). Briefly, yeast cells were grown for IgG expression over 6 days, and the IgG-containing supernatant was subsequently harvested by centrifugation. Antibodies were purified by protein A-affinity chromatography, eluted with a solution of 200 mM acetic acid/50 mM NaCl (pH 3.5). The pH was then neutralized using ⅛th volume of 2 M Hepes (pH 8.0).

[0475] Fab fragments were generated by incubating IgG with papain for 2 h at 30° C. The reaction was terminated using iodoacetamide, and the mixture containing digested Fab and Fc was purified by Protein A agarose to remove Fc fragments and undigested IgG. Fabs present in the flow-through were further purified using CaptureSelect™ IgG-CH1 affinity resin (ThermoFisher Scientific) and eluted from the column using 200 mM acetic acid/50 mM NaCl (pH 3.5). Fab solutions were pH-neutralized using ⅛th volume 2 M Hepes (pH 8.0).

### Binding Affinity Measurements by Biolayer Interferometry.

[0476] Binding affinities were measured by biolayer interferometry (BLI) using a FortéBio Octet HTX instrument (Sartorius). All steps were performed at 25° C. and at an orbital shaking speed of 1000 rpm. All reagents were formulated in PBSF buffer (PBS with 0.1% w/v BSA).

[0477] Recombinant biotinylated antigens were diluted (100 nM) in PBSF and loaded onto streptavidin biosensors (Sartorius) to a sensor response of 0.6-1.0 nm and then allowed to equilibrate in PBSF for a minimum of 30 min. After a 60 s baseline step in PBSF, antigen-loaded sensors were exposed (180 s) to Fab or IgG fragments (100 nM) and then dipped (180 s) into PBSF to measure any dissociation of the antigen from the biosensor surface. Fab binding data with detectable binding responses (>0.1 nm) were aligned, inter-step corrected (to the association step) and fit to a 1:1 binding model using the FortéBio Data Analysis Software, version 11.1.

### Epitope Binning by Biolayer Interferometry.

[0478] Antibody competition with recombinant human ACE2 and comparator antibodies for binding to SARS-COV-2 RBD was determined by BLI using a ForteBio Octet HTX (Sartorius). All binding steps were performed at 25° C. and at an orbital shaking speed of 1000 rpm. All reagents were formulated in PBSF (1×PBS with 0.1% w/v BSA). For ACE2 competition experiments, test antibodies (100 nM) were captured onto anti-human IgG capture (AHC) biosensors (Molecular Devices) to a sensor response of 1.0 nm-1.4 nm. IgG-loaded sensors were then soaked (20 min) in an irrelevant IgG1 solution (0.5 mg/ml) to block remaining Fc binding sites, followed by a 30 min incubation in PBSF. To assess any potential cross interactions between sensor-loaded IgG and ACE2, the IgG-loaded and blocked sensors were exposed (90 s) to a 300 nM ACE2 (Sino Biological, Cat #10108-H08H). Sensors were next allowed to baseline (60 s) before exposing (180 s) to recombinant SARS-COV-2 RBD (100 nM; Acro Biosystems, Cat #SPD-C52H3) and then exposed (180 s) to ACE2 (300 nM). Increased sensor responses following ACE2 exposure represented a non-ACE2-competitive binding profile, whereas antibodies showing unchanged sensor responses were designated as ACE2-competitive. Antibody competition with comparator antibodies (REGN10933, ADI-62113, COV2-2130, REGN10987, and S309) was performed using the same method as described above but with a different assay orientation: comparator antibodies were captured to anti-human IgG capture biosensors (Molecular Devices) and then exposed to antibodies of interest (300 nM) in solution.

### REFERENCES

[0479] 1. T. Pilishvili et al., Effectiveness of mRNA Covid-19 Vaccine among U.S. Health Care Personnel. N Engl J Med 385, e90 (2021).
[0480] 2. D. R. Feikin et al., Duration of effectiveness of vaccines against SARS-COV-2 infection and COVID-19 disease: results of a systematic review and meta-regression. Lancet 399, 924-944 (2022).
[0481] 3. Y. Goldberg et al., Waning Immunity after the BNT162b2 Vaccine in Israel. N Engl J Med 385, e85 (2021).
[0482] 4. K. B. Pouwels et al., Effect of Delta variant on viral burden and vaccine effectiveness against new SARS-COV-2 infections in the UK. Nat Med 27, 2127-2135 (2021).
[0483] 5. L. J. Abu-Raddad, H. Chemaitelly, A. A. Butt, C.-V. National Study Group for, Effectiveness of the BNT162b2 Covid-19 Vaccine against the B.1.1.7 and B.1.351 Variants. N Engl J Med 385, 187-189 (2021).
[0484] 6. N. Andrews et al., Covid-19 Vaccine Effectiveness against the Omicron (B.1.1.529) Variant. N Engl J Med, (2022).
[0485] 7. H. Chemaitelly et al., Duration of mRNA vaccine protection against SARS-COV-2 Omicron BA.1 and BA.2 subvariants in Qatar. medRxiv, 2022.2003.2013.22272308 (2022).
[0486] 8. W. Dejnirattisai et al., SARS-COV-2 Omicron-B.1.1.529 leads to widespread escape from neutralizing antibody responses. Cell, (2022).
[0487] 9. L. Liu et al., Striking antibody evasion manifested by the Omicron variant of SARS-COV-2. Nature 602, 676-681 (2022).
[0488] 10. A. Sokal et al., Immune escape of SARS-COV-2 Omicron variant from mRNA vaccination-elicited RBD-specific memory B cells. bioRxiv, 2021.2012.2021.473528 (2021).
[0489] 11. S. Iketani et al., Antibody evasion properties of SARS-COV-2 Omicron sublineages. Nature, (2022).
[0490] 12. V. Servellita et al., Neutralizing immunity in vaccine breakthrough infections from the SARS-COV-2 Omicron and Delta variants. medRxiv, 2022.2001.2025.22269794 (2022).
[0491] 13. S. I. Richardson et al., SARS-COV-2 Omicron triggers cross-reactive neutralization and Fc effector functions in previously vaccinated, but not unvaccinated individuals. medRxiv, 2022.2002.2010.22270789 (2022).
[0492] 14. M. S. Seaman et al., Vaccine Breakthrough Infection with the SARS-COV-2 Delta or Omicron (BA.1) Variant Leads to Distinct Profiles of Neutralizing Antibody Responses. medRxiv, 2022.2003.2002.22271731 (2022).
[0493] 15. R. R. Goel et al., Efficient recall of Omicron-reactive B cell memory after a third dose of SARS-COV-2 mRNA vaccine. bioRxiv, 2022.2002.2020.481163 (2022).
[0494] 16. F. Muecksch et al., Increased Potency and Breadth of SARS-COV-2 Neutralizing Antibodies After a Third mRNA Vaccine Dose. bioRxiv, (2022).
[0495] 17. B. Briney, A. Inderbitzin, C. Joyce, D. R. Burton, Commonality despite exceptional diversity in the baseline human antibody repertoire. Nature 566, 393-397 (2019).
[0496] 18. Z. Wang et al., mRNA vaccine-elicited antibodies to SARS-COV-2 and circulating variants. Nature 592, 616-622 (2021).
[0497] 19. C. O. Barnes et al., SARS-COV-2 neutralizing antibody structures inform therapeutic strategies. Nature 588, 682-687 (2020).
[0498] 20. M. Yuan et al., Structural and functional ramifications of antigenic drift in recent SARS-CoV-2 variants. Science 373, 818-823 (2021).
[0499] 21. H. Liu et al., A recurring YYDRxG pattern in broadly neutralizing antibodies to a conserved site on SARS-COV-2, variants of concern, and related viruses. bioRxiv, 2021.2012.2015.472864 (2021).
[0500] 22. M. Sakharkar et al., Prolonged evolution of the human B cell response to SARS-COV-2 infection. Sci Immunol 6, (2021).
[0501] 23. Q. Zhang et al., Potent and protective IGHV3-53/3-66 public antibodies and their shared escape mutant on the spike of SARS-COV-2. Nat Commun 12, 4210 (2021).
[0502] 24. H. A. McNamara et al., Antibody Feedback Limits the Expansion of B Cell Responses to Malaria Vaccination but Drives Diversification of the Humoral Response. Cell Host Microbe 28, 572-585 e577 (2020).
[0503] 25. T. F. Rogers et al., Isolation of potent SARS-COV-2 neutralizing antibodies and protection from disease in a small animal model. Science 369, 956-963 (2020).
[0504] 26. R. D. Gietz, R. H. Schiestl, High-efficiency yeast transformation using the LiAc/SS carrier DNA/PEG method. Nat Protoc 2, 31-34 (2007).

### Example 2: Evolution of Antibody Immunity Following Omicron BA.1 Breakthrough Infection

[0505] The emergence and global spread of the SARS-COV-2 Omicron BA.1 variant in late 2021 resulted in the largest surge in COVID-19 caseloads to date (1). While currently available COVID-19 vaccines induced high levels of protection against pre-Omicron variants, the extensive immune evasiveness of Omicron resulted in significantly reduced vaccine efficacy and durability following both primary and booster immunization (2-5). Moreover, antigenically drifted sub-lineages of Omicron (e.g. BA.2, BA.2.12.1, BA.4/5, BA.2.75, BA.2.75.2, and BA.4.6) continue to emerge and supplant prior sub-variants (4, 6, 7). The high prevalence of Omicron breakthrough infections led to the development and emergency use authorization of Omicron variant-based booster mRNA vaccines, despite limited safety and immunogenicity data in humans (2, 8). Thus, there is an urgent need to understand if and how secondary exposure to antigenically divergent variants, such as Omicron, shape SARS-COV-2-specific B cell memory.

[0506] The acute antibody response following Omicron BA. 1 breakthrough infection is dominated by re-activated memory B cells induced by mRNA vaccination (9-11). In support of these findings, preliminary data from clinical trials evaluating the immunogenicity of variant-based booster vaccines demonstrated that BA.1-containing mRNA vaccines induce a modest improvement in peak serum neutralizing responses compared with ancestral Wuhan-1 immunization (12). Although these studies provide evidence for “original antigenic sin” in the early B cell response following Omicron breakthrough infection, if and how this response evolves over time remains unclear. To address these questions, SARS-COV-2-specific serological and memory B responses were longitudinally profiled in mRNA-vaccinated donors up to six months following BA.1 breakthrough infection.

[0507] The antibody response to SARS-COV-2 was initially characterized in a cohort of seven mRNA-1273 vaccinated donors 14 to 27 days (median=23 days) after BA.1 breakthrough infection (9). To study the evolution of this response, blood samples were obtained from six of the seven participants at a follow-up appointment four to six months (median=153 days) post-infection (FIG. 15A, Table 7). Three of the six donors experienced infection after two-dose mRNA-1273 vaccination while the remaining three donors were infected after a third booster dose. None of the donors reported a second breakthrough infection between the two sample collection time points.

TABLE 7
Donor Characteristics.

| Donor ID | IML4041 | IML4042 | IML4043 | IML4044 | IML4045 | IML4054 | IML4055 |
|---|---|---|---|---|---|---|---|
| Age | 45 | 19 | 23 | 23 | 24 | 38 | 23 |
| Sex | F | F | M | F | F | F | F |
| Vaccination | 2x | 2x | 2x | 2x | 2x | 3x | 3x |
| History | BNT162b2 | BNT162b2 | BNT162b2 | BNT162b2 | BNT162b2, | mRNA-1273 | BNT162b2 |
| | | | | | 1x | | |
| | | | | | mRNA-1273 | | |
| Date of 2nd | 7 May 2021 | 22 Jul. 2021 | 23 May 2021 | 10 Feb. 2021 | 15 May 2021 | 5 May 2021 | 1 May 2021 |
| vaccination | | | | | | | |
| dose | | | | | | | |
| Date of 3rd | — | — | — | — | 20 Dec. 2021 | 11 Dec. 2021 | 9 Dec. 2021 |
| dose (if | | | | | | | |
| applicable) | | | | | | | |
| Date of | 31 Dec. 2021 | 4 Jan. 2022 | 30 Dec. 2021 | 2 Jan. 2022 | 6 Jan. 2022 | 19 Jan. 2022 | 6 Jan. 2022 |
| infection | | | | | | | |
| Days | 25 | 21 | 26 | 23 | 19 | 14 | 27 |
| between | | | | | | | |
| infection | | | | | | | |
| and first | | | | | | | |
| (T1) sample | | | | | | | |
| collection | | | | | | | |
| Days | N/A; | 170 | 139 | 139 | 168 | 122 | 168 |
| between | censored | | | | | | |
| infection | | | | | | | |
| and second | | | | | | | |
| (T2) sample | | | | | | | |
| collection | | | | | | | |

[0508] To evaluate serum neutralization breadth and potency, the plasma samples were tested for neutralizing activity against SARS-COV-2 D614G, emergent variants (BA.1, BA.2, BA.4/5, BA.2.75, Beta, and Delta), and the more evolutionarily divergent sarbecovirus SARS-COV, in a murine-leukemia virus (MLV)-based pseudovirus assay. Paired comparisons within each participant revealed that serum neutralizing titers against D614G declined by a median of 4.8-fold at 5- to 6-months post-infection relative to those observed within one-month post-infection (FIG. 15B). Correspondingly, lower serum neutralizing titers against Omicron sub-variants (2.8 to 3.9-fold, respectively), Beta (1.6-fold), Delta (3.8-fold), and SARS-COV (3.1-fold) at the 5- to 6-month time point relative to the early time point were observed (FIG. 15B). Despite this waning of neutralizing antibody titers over time, all of the donor sera displayed detectable neutralizing activity against all of the SARS-COV-2 variants tested at the 5-6 month time point (median titers ranging from 117 to 552) (FIG. 15C). Notably, titers remained within 3-fold of that observed for D614G for all variants except BA.4/5, which showed the greatest degree of escape from serum neutralizing antibodies (5.5-fold reduction from D614G), consistent with published serological studies (4, 5). Furthermore, the fold reduction in serum neutralizing titer for SARS-COV-2 VOCs relative to D614G remained similar at both time points, suggesting maintained serum neutralization breadth over time (FIG. 15D). Minimal cross-neutralizing activity against SARS-COV (median titer=21) was observed in all donors, suggesting that serum neutralization breadth remained limited to SARS-COV-2 variants (FIG. 15C). It was concluded that serum neutralizing titers wane over the course 6-months following Omicron BA.1 breakthrough infection but nevertheless remain at detectable levels across a diverse range of SARS-COV-2 variants through 6 months.

[0509] Next, the magnitude and cross-reactivity of the antigen-specific B cell response were assessed via flow cytometric enumeration of B cells stained with differentially labeled wildtype (Wuhan-1; WT) and BA.1 RBD tetramers (FIG. 16A, FIG. 19A). At the 5-6-month time point, total RBD-reactive B cells (WT and/or BA.1-reactive) and WT/BA.1 cross-reactive B cells comprised a median of 0.44% (ranging 0.12-2.53%) and 0.37% (ranging 0.12-2.53%) of class-switched (IgG⁺ or IgA⁺) B cells, respectively (FIG. 16B, FIG. 16C, FIG. 19A). Thus, 86% (ranging 69-100%) of all RBD+ class-switched B cells at 5-6 months post-infection displayed BA.1/WT cross-reactivity, compared with 75% at 1-month post-infection (ranging 65-81%) (FIG. 16D, FIG. 20). Correspondingly, WT-specific B cells decreased from 25% of all RBD+ class-switched B cells at 1 month to 11% at 5-6 months (FIG. 16D, FIG. 20). Consistent with the waning of serum neutralizing titers over time, a modest but significant decline (1.1 to 3.7-fold) in the frequencies of WT/BA.1 cross-reactive B cells at 5-6 months relative to the 1-month time point was also observed (FIG. 16C). At the late time point, the emergence of a BA.1-specific B cell population (average=3% of class-switched B cells) was detected in 3 of the 6 individuals, although the magnitude of this response varied widely among individuals (ranging from 1-18%) (FIG. 16D, FIG. 20). In summary, Omicron BA.1 breakthrough infection induces a WT/BA.1 cross-reactive B cell response at early time points post-infection and this response only modestly declines over the course of 6 months.

[0510] To compare the molecular characteristics of antibodies isolated at early and late time points following BA.1 breakthrough infection, 71 to 110 class-switched RBD-reactive B cells were single-cell sorted from four of the five previously studied donors (donors IML4042, IML4043, IML4044, IML4045) at 139 to 170 days after breakthrough infection and expressed a total of 363 natively paired antibodies as full-length IgGs (FIG. 19B) (9). Similar to the antibodies characterized from the acute time point, the newly isolated antibodies primarily recognized both WT and BA.1 RBD antigens (73-97%), exhibited a high degree of clonal diversity, and displayed preferential usage of certain VH germline genes (IGHV1-46, 1-69, 3-13, 3-53, 3-66, 3-9, and 4-31 germline genes at both time points) (FIG. 16E, FIGS. 21A-B and FIG. 22). The level of SHM in the cross-reactive antibodies increased from a median of 9 VH nucleotide substitutions at 1-month to 11 VH nucleotide substitutions by 5-6 months, potentially suggesting affinity maturation in secondary germinal centers (FIG. 16F). Consistent with their higher levels of SHM, the antibodies isolated at 5-6 months displayed 1.7-fold improved binding to BA.1 (median KD=1.3 nM) and 2-fold reduced binding affinity to the WT RBD (median K_{D}=1.0 nM) relative to early antibodies, suggesting maturation towards Omicron BA.1 at the expense of WT affinity (FIG. 17A and FIG. 17B). These changes in binding recognition resulted in the late antibodies showing more balanced affinity profiles compared to the early antibodies (FIG. 17B). For example, the majority of antibodies (73%) isolated at the late time point exhibited WT and BA.1 RBD affinities within two-fold of each other compared to only 24% of early antibodies (FIG. 17C).

[0511] To determine whether the improvement in binding affinity for BA.1 translated into enhanced neutralization potency, the antibodies were assessed for neutralizing activity against WT and BA.1 using a pseudovirus assay. Fifty-one percent and 42% of WT/BA.1 cross-binding antibodies isolated from the 1-month and 5-6-month time point, respectively, cross-neutralized D614G and BA.1 with IC₅₀s<2 μg/ml. Overall, the neutralizing antibodies displayed approximately 2-fold lower potency against D614G at the late time point relative to the acute time point, consistent with the observed reduction in WT RBD affinity over time (FIG. 17D and FIG. 17E). Furthermore, consistent with the improvement in BA.1 RBD affinity over time, the antibodies isolated at 6 months trended towards more potent neutralization of BA.1 relative to antibodies isolated at 1 month (FIG. 17E). Forty-one percent of the neutralizing antibodies isolated at 6 months exhibited more potent activity against BA.1 relative to D614G, compared to only 7% of the acute neutralizing antibodies (FIG. 17F). In summary, cross-reactive antibody responses induced following BA.1 breakthrough infection evolve toward increased BA.1 affinity and neutralization potency for at least 6 months post-infection.

[0512] Although the vast majority of antibodies isolated at the 5-6-month time point displayed WT/BA.1 cross-reactive binding, a limited number of BA.1-specific antibodies were identified in all four donors, comprising 1% to 15% of total RBD-specific antibodies (median=4%) (FIGS. 21A-B). In contrast, BA.1-specific antibodies were only detected in a single donor at the acute time point (FIGS. 21A-B). Furthermore, unlike the BA.1-specific antibodies isolated at the early time point, which lacked somatic mutations, the BA.1-specific antibodies identified at 5-6 months displayed SHM levels similar to those of cross-reactive antibodies (median=11 VH nucleotide substitutions) (FIG. 16F). Forty percent of BA.1-specific antibodies isolated at the late time point neutralized BA.1, with IC₅₀s ranging from 0.002 to 0.089 μg/ml, and none of the antibodies displayed detectable neutralizing activity against D614G (FIG. 23). Thus, BA.1 breakthrough infection induces a limited and delayed de novo Omicron-specific B cell response that undergoes affinity maturation over time.

[0513] To further explore the breadth of both WT/BA. 1 cross-reactive and BA.1-specific neutralizing antibodies, their binding reactivities were evaluated with a panel of recombinant RBDs encoding mutations present in SARS-COV-2 variants BA.2, BA.4/5, Beta, and Delta, and the more antigenically divergent SARS-COV. D614G/BA.1 cross-neutralizing antibodies displayed 2.4-fold reduced affinity for the WT RBD and 3.4-fold improved affinity for the BA.1 RBD relative to early neutralizing antibodies, consistent with the pattern observed for all WT/BA.1 cross-binding antibodies (FIG. 18A, FIGS. 17A-C). Furthermore, the WT/BA.1 cross-reactive antibodies isolated at 6 months broadly recognized other SARS-COV-2 variants, except for BA.4/5, which was associated with a ≥5-fold loss in affinity for 57% (68/120) of the WT/BA.1 neutralizing antibodies (FIG. 18A, FIG. 24). Importantly, the 5-6-month antibodies displayed higher affinity binding to all Omicron sub-variants and Beta relative to the early antibodies, suggesting that the increased affinity to BA.1 also improved breadth of reactivity against other variants (FIG. 18A). In support of this finding, a significantly higher proportion (40%) of neutralizing antibodies isolated at 6 months displayed high affinity (K_{D}<10 nM) binding to all five variants tested compared with early antibodies (22%) (FIG. 18B). Furthermore, antibodies isolated at the late time point displayed smaller differences in binding affinity against BA.1, BA.2, BA.4/5 and the early Beta and Delta variants relative to early antibodies (FIG. 18C). In contrast to the WT/BA.1 cross-reactive antibodies, the BA.1-specific neutralizing antibodies displayed limited breadth, with only 50% of these antibodies maintaining binding to BA.2 and none of the antibodies showing reactivity with WT, BA.4/5, Beta, or Delta (FIG. 23). It was concluded that BA.1 breakthrough infection results in an overall broadening of the anti-SARS-COV-2 neutralizing antibody repertoire.

[0514] Among neutralizing antibodies isolated at both time points, significant over-representation of four IGHV germline genes (IGHV1-69, IGHV3-53/3-66, and IGHV3-9) were observed (9) (FIG. 25A). At the 5-6-month time point, over half (54%) of the neutralizing antibodies were encoded by one of these four germlines, with one-third of these antibodies utilizing IGHV1-69 (FIG. 18D, FIGS. 25A-B). It was previously found that BA.1-neutralizing IGHV1-69 antibodies isolated from the early time point preferentially paired with the light chain germline IGLV1-40 and targeted an antigenic site overlapping that of the class 3 antibody COV2-2130 and non-overlapping with the ACE2 binding site (9). Similarly, 69% of IGHV1-69 antibodies isolated at 5-6 months paired with the IGLV1-40 germline and the majority (80%) failed to compete with ACE2 for binding (FIGS. 26A and 26C). Likewise, >90% of IGHV3-9 antibodies identified from both time points recognized a non-ACE2-competitive binding site, although unlike IGHV1-69 antibodies, IGHV3-9 antibodies recognize an epitope overlapping S309 and REGN10987 as well as COV2-2130, suggesting a distinct mode of binding from IGHV1-69 antibodies (FIG. 26C) (9). Lastly, IGHV3-53/66 antibodies isolated from both time points were characterized by short HCDR3s (median=11 to 12 nucleotide substitutions) compared with baseline HCDR3 lengths (median=15 substitutions) and displayed competitive binding with the ACE2 receptor (FIGS. 26B and 26C). Thus, convergent antibody classes dominated the neutralizing antibody response at both early and late time points following BA.1 breakthrough infection, suggesting little to no change in B cell immunodominance hierarchy over time.

[0515] Given the dominance of these public clonotypes in BA.1 breakthrough infection donors, their escape mutations in the BA.1 background were determined. One to two antibodies belonging to each convergent germline were randomly selected and deep mutational scanning (DMS) analysis was performed using a library encoding all possible amino acid substitutions from BA.1 (FIG. 27A) (13). Antibodies encoded by IGHV3-53 (ADI-75733) and IGHV3-66 (ADI-75732) displayed similar escape profiles, consistent with their shared sequence features and competitive binding profiles (FIG. 18E and FIG. 27C) (9). RBD positions N460 and F486, which are mutated in emergent variants (N460K in B.2.75, BA.2.75.2, BN.1, and BQ.1; F486S in BA.2.75.2; and F486V in BA.4/5, BA.4.6, and BQ.1.1), were associated with binding escape from IGHV3-53/66 antibodies (FIG. 18F and FIG. 27C). IGHV1-69 and IGHV3-9 antibodies both showed reduced binding to RBDs incorporating mutations at positions 344-349, 356, 452-453, 468, and 490. Notably, residues R346, K356, L452, and F490 are mutated across evolutionarily diverse Omicron sub-lineages, including BA.4.6 (R346T, L452R), BA.4/5 (L452R), BA.2.12.1 (L452Q), BJ.1 (R346T, F490V), BN.1 (R346T, K356T, F490S), and BQ.1.1 (R346T, L452R) (FIG. 18F and FIG. 27C) (6). Consistent with these escape profiles, IGHV1-69 and IGHV3-9 class antibodies displayed reduced binding to BA.2.12.1 and BA.4/5 relative to early Omicron variants, likely due to the unique L452Q/R mutations present in these variants compared with BA.1 and BA.2 (FIG. 18G). Consistent with DMS-based predictions, both BA.2.75 and BA.4/5 RBDs displayed increased binding resistance to IGHV3-53/66 antibodies (FIGS. 18F and 18G). Thus, convergent D614G/BA.1 cross-neutralizing antibodies recognize epitopes commonly mutated in recently emerging Omicron sub-variants, providing a molecular explanation for the high degree of antigenic convergence observed in recent Omicron sub-variant evolution and their increased level of immune evasion relative to BA.1.

[0516] In summary, BA.1 breakthrough infection in mRNA-vaccinated individuals induces broadly neutralizing serological and MBC responses that persist for at least six months after infection, supporting real-world studies showing that BA.1 breakthrough infection provides protection against symptomatic BA.1, BA.2, and BA.5 infection for at least 5-6 months (14-16). Furthermore, although the acute B cell response following breakthrough infection is primarily mediated by recall of cross-reactive vaccine-induced MBCs, these MBC clones accumulate somatic mutations and evolve increased breadth and potency for at least 6 months following infection. Although this enhanced neutralization breadth and potency was not reflected in the serum antibody response, it is possible that a second heterologous exposure may broaden the serological repertoire by activating these affinity matured MBCs, akin to the improved serum neutralization breadth observed following mRNA booster vaccination (17, 18). Nevertheless, these data indicate that infection or vaccination with antigenically divergent SARS-COV-2 variants may provide long-term benefits by broadening pre-existing anti-SARS-COV-2 B cell memory.

[0517] Finally, it was found that convergent classes of neutralizing antibodies dominated the BA.1 breakthrough response at both early and late time points, reminiscent of the antibody response elicited following primarily infection or vaccination with early ancestral SARS-COV-2 strains (19-21). The sustained prevalence of public clones that target residues frequently mutated in emerging Omicron subvariants offers a molecular explanation for the continued antigenic drift of Omicron. Thus, in contrast to current approaches to the design of universal vaccines for highly antigenically variable viruses, such as HIV and influenza, which aim to focus the neutralizing response on a limited number of relatively conserved epitopes, the development of “variant-proof” COVID-19 vaccines may require a different strategy: engineering of spike-based immunogens that induce neutralizing antibody responses to a limited set of somewhat variable, non-overlapping epitopes, with the goal of limiting convergent immune pressure (22-24).

### Materials and Methods

### Human Subjects and Blood Sample Collection.

[0518] Seven BA.1 breakthrough infected participants were recruited to participate in this study with informed consent under the healthy donor protocol D10083, Immune Monitoring Core (DartLab) Laboratory at Dartmouth-Hitchcock Hospital, as previously described (9). Briefly, participants experienced breakthrough infection after two- or three-dose mRNA vaccination (BNT162b2 and/or mRNA-1273). Venous blood was collected at two time points, an early visit at 14 to 27 days (T1) and a late visit 139 to 170 days (T2) after their first SARS-COV-2 test. Participants had no documented history of SARS-COV-2 infection prior to vaccination or between the two blood draw time points. Clinical and demographic characteristics of breakthrough infection donors are shown in Table 7. Plasma and peripheral blood mononuclear cell (PBMC) samples were isolated using a Ficoll 1077 (Sigma) gradient, as previously described (9).

### Plasmid Design and Construction.

[0519] Plasmids expressing spike proteins of SARS-COV-2 variants and SARS-COV were ordered as gene block fragments (IDT) and cloned into a mammalian expression vector for MLV-based pseudovirus production as previously described (26). All SARS-COV-2 variant spikes and the SARS-CoV spike were C-terminally truncated by 19-amino acids or 28-amino acids, respectively, to increase infectious titers. The SARS-COV S sequence was retrieved from ENA (AAP13441). SARS-COV-2 variants contain the following mutations from the Wuhan-Hu-1 sequence (Genbank: NC_045512.2):
[0520] D614G: D614G.
[0521] Beta: D80A, D215G, Δ242-244, K417N, E484K, N501Y, D614G, A701V
[0522] Delta: T19R, G142D, Δ156-157, R158G, L452R, T478K, D614G, P681R, D950N
[0523] BA.1: A67V, Δ69-70, T95I, G142D/Δ143-145, Δ211/L212I, ins214EPE, G339D, S371L, S373P, S375F, K417N, N440K, G446S, S477N, T478K, E484A, Q493R, G496S, Q498R, N501Y, Y505H, T547K, D614G, H655Y, N679K, P681H, N764K, D796Y, N856K, Q954H, N969K, L981F
[0524] BA.2: T19I, L24S, Δ25-27, G142D, V213G, G339D, S371F, S373P, S375F, T376A, D405N, R408S, K417N, N440K, S477N, T478K, E484A, Q493R, Q498R, N501Y, Y505H, D614G, H655Y, N679K, P681H, N764K, D796Y, Q954H, N969K
[0525] BA.4/5: T19I, L24S, Δ25-27, Δ69-70, G142D, V213G, G339D, S371F, S373P, S375F, T376A, D405N, R408S, K417N, N440K, L452R, S477N, T478K, E484A, F486V, Q498R, N501Y, Y505H, D614G, H655Y, N679K, P681H, N764K, D796Y, Q954H, N969K
[0526] BA.2.75: T19I, L24S, Δ25-27, G142D, K147E, W152R, F157L, 1210V, V213G, G339H, G257S, S371F, S373P, S375F, T376A, D405N, R408S, K417N, N440K, G446S, N460K, S477N, T478K, E484A, Q498R, N501Y, Y505H, D614G, H655Y, N679K, P681H, N764K, D796Y, Q954H, N969K

### SARS-COV-2 Pseudovirus Generation.

[0527] Single-cycle infectious MLVs pseudotyped with spike proteins of SARS-COV-2 variants and SARS-COV were generated as previously described (26). Briefly, HEK293T cells were seeded at a density of 0.5 million cells/ml in 6-well tissue culture plates and the next day, transfected using Lipofectamine 2000 (ThermoFisher Scientific) with the following plasmids: 1) 0.5 μg per well of pCDNA3.3 encoding SARS-COV-2 spike with a 19-amino acid truncation at the C-terminus, 2) 2 μg per well of MLV-based luciferase reporter gene plasmid (Vector Builder), and 3) 2 μg per well of MLV gag/pol (Vector Builder). MLV particles were harvested 48 h post-transfection, aliquoted, and stored at −80° C. for neutralization assays.

### Pseudovirus Neutralization Assay.

[0528] MLV pseudovirus neutralization assays for serum and monoclonal antibodies were performed as previously described (9). Briefly, 56° C. heat-inactivated sera or antibodies were serially diluted in 50 μl MEM/EBSS media supplemented with 10% fetal bovine serum (FBS) and incubated with 50 μl of MLV viral stock for 1 h at 37° C. Following incubation, antibody-virus mixtures were added to previously seeded HeLa-hACE2 reporter cells (BPS Bioscience Cat #79958). Infection was allowed to occur for 48 h at 37° C. Infection was measured by lysing cells with Luciferase Cell Culture Lysis reagent (Promega) and detecting luciferase activity using the Luciferase Assay System (Promega) following manufacturer's protocols. Infectivity was as quantified by relative luminescence units (RLUs) and the percentage neutralization was calculated as 100*(1−[RLUsample−RLUbackground]/[RLUisotype control mAb−RLUbackground]). Neutralization IC₅₀ was interpolated from curves fitted using four-parameter non-linear regression in GraphPad Prism (version 9.3.1).

### FACS Analysis of SARS-COV-2 S-Specific B Cell Responses.

[0529] Antigen-specific B cells were detected using recombinant biotinylated antigens tetramerized with fluorophore-conjugated streptavidin (SA), as previously described (9). Briefly, Avitag biotinylated WT RBD (Acro Biosystems, Cat #SPD-C82E8) and Avitag biotinylated BA.1 RBD (Acro Biosystems, Cat #SPD-C82E4) were mixed in 4:1 molar ratios with SA-BV421 (BioLegend) and SA-phycoerythrin (PE; Invitrogen), respectively, and allowed to incubate for 20 min on ice. Unbound SA sites were subsequently quenched using 5 μl of 2 μM Pierce biotin (ThermoFisher Scientific). Approximately 10 million PBMCs were stained with tetramerized RBDs (25 nM each); anti-human antibodies anti-CD19 (PE-Cy7; Biolegend), anti-CD3 (PerCP-Cy5.5; Biolegend), anti-CD8 (PerCP-Cy5.5; Biolegend), anti-CD14 (PerCP-Cy5.5; Invitrogen), and anti-CD16 (PerCP-Cy5.5; Biolegend); and 50 μl Brilliant Stain Buffer (BD BioSciences) diluted in FACS buffer (2% BSA/1 mM EDTA in 1×PBS). 200 μl of staining reagents were added to each PBMC sample and incubated for 15 min on ice. After one wash with FACS buffer, cells were stained in a mixture of propidium iodide and anti-human antibodies anti-IgG (BV605; BD Biosciences), anti-IgA (FITC; Abcam), anti-CD27 (BV510; BD Biosciences), and anti-CD71 (APC-Cy7; Biolegend). Following 15 min of incubation on ice, cells were washed two times with FACS buffer and analyzed using a BD FACS Aria II (BD BioSciences).

[0530] For sorting of RBD-specific, class-switched B cells, PBMCs that react with either WT and/or BA.1 RBD tetramers among CD19⁺CD3⁻CD8⁻CD14⁻CD16⁻PI⁻ and IgG⁺ or IgA⁺ cells were single-cell index sorted into 96-well polystyrene microplates (Corning) containing 20 μl lysis buffer per well [5 μl of 5× first strand SSIV cDNA buffer (Invitrogen), 1.25 μl dithiothreitol (Invitrogen), 0.625 μl of NP-40 (Thermo Scientific), 0.25 μl RNaseOUT (Invitrogen), and 12.8 μl dH2O]. Plates briefly centrifuged and then frozen at −80° C. before PCR amplification.

### Amplification and Cloning of Antibody Variable Genes.

[0531] Antibody variable gene fragments (VH, Vk, Vλ) were amplified by RT-PCR as described previously (27). Briefly, cDNA was synthesized using randomized hexamers and SuperScript IV enzyme (ThermoFisher Scientific). cDNA was subsequently amplified by two rounds of nested PCRs, with the second cycle of nested PCR adding 40 base pairs of flanking DNA homologous to restriction enzyme-digested S. cerevisiae expression vectors to enable homologous recombination during transformation. PCR-amplified variable gene DNA was mixed with expression vectors and chemically transformed into competent yeast cells via the lithium acetate method (28). Yeast were plated on selective amino acid drop-out agar plates and individual yeast colonies were picked for sequencing and recombinant antibody expression.

### Expression and Purification of IgG and Fab Molecules.

[0532] Antibodies were expressed as human IgG1 via S. cerevisiae cultures, as described previously (27). Briefly, yeast cells were grown in culture for 6 days for antibody production, before collecting IgG-containing supernatant by centrifugation. IgGs were subsequently purified by protein A-affinity chromatography and eluted using 200 mM acetic acid/50 mM NaCl (pH 3.5). The pH was then neutralized using ⅛^{th} volume of 2 M Hepes (pH 8.0). Fab fragments were cleaved from full-length IgG by incubating with papain for 2 h at 30° C. before terminating the reaction using iodoacetamide. Fab fragments were purified from the mixture of digested antibody Fab ad Fc fragments using a two-step chromatography system: 1) Protein A agarose was used to remove Fc fragments and undigested IgG, and 2) Fabs in the flow-through were further purified using CaptureSelect™ IgG-CH1 affinity resin (ThermoFisher Scientific) and eluted from the column using 200 mM acetic acid/50 mM NaCl (pH 3.5). Fab solutions were pH-neutralized using ⅛th volume 2 M Hepes (pH 8.0).

### Binding Affinity Measurements by Biolayer Interferometry.

[0533] Antibody binding kinetics were measured by biolayer interferometry (BLI) using a FortéBio Octet HTX instrument (Sartorius). All steps were performed at 25° C. and at an orbital shaking speed of 1000 rpm, and all reagents were formulated in PBSF buffer (PBS with 0.1% w/v BSA). To measure monovalent binding affinities against SARS-COV-2 RBD variants and SARS-COV S, recombinant RBDs of SARS-COV-2 WT (Acro Biosystems, Cat #SPD-C52H3), Beta (Acro Biosystems, Cat #SPD-C52Hp), Delta (Acro Biosystems, Cat #SPD-C52Hh), BA.1 (Acro Biosystems, Cat #SPD-C522f), BA.2 (Acro Biosystems, Cat #SPD-C522g), BA.4/5 (Acro Biosystems, Cat #SPD-C522r), and SARS-CoV (Sino Biological, Cat #40150-V08B2) were biotinylated using EZ-Link™ Sulfo-NHS-LC-Biotin (Thermo Scientific) following manufacturer's recommendations to achieve an average of 4 biotins per RBD molecule. Biotinylated antigens were diluted (100 nM) in PBSF and loaded onto streptavidin biosensors (Sartorius) to a sensor response of 1.0-1.2 nm and then allowed to equilibrate in PBSF for a minimum of 30 min. After a 60 s baseline step in PBSF, antigen-loaded sensors were exposed (180 s) to 100 nM Fab and then dipped (420 s) into PBSF to measure any dissociation of the antigen from the biosensor surface. Fab binding data with detectable binding responses (>0.1 nm) were aligned, inter-step corrected (to the association step) and fit to a 1:1 binding model using the FortéBio Data Analysis Software (version 11.1).

### ACE2 Competition by Biolayer Interferometry.

[0534] Antibody binding competition with recombinant human ACE2 receptor (Sino Biological, Cat #10108-H08H) was determined by BLI using a ForteBio Octet HTX (Sartorius). All binding steps were performed at 25° C. and at an orbital shaking speed of 1000 rpm. All reagents were formulated in PBSF (1×PBS with 0.1% w/v BSA). IgGs (100 nM) were captured onto anti-human IgG capture (AHC) biosensors (Molecular Devices) to a sensor response of 1.0 nm-1.4 nm, and then soaked (20 min) in an irrelevant IgG1 solution (0.5 mg/ml) to block remaining Fc binding sites. Next, sensors were equilibrated for 30 min in PBSF and then briefly exposed (90 s) to 300 nM of ACE2 to assess any potential cross interactions between sensor-loaded IgG and ACE2. Sensors were allowed to baseline (60 s) in PBSF before exposing (180 s) to 100 nM SARS-COV-2 RBD (Acro Biosystems, Cat #SPD-C52H3). Last, RBD-bound sensors were exposed (180 s) to 300 nM ACE2 to assess competition, where antibodies that resulted in increased sensor responses after ACE2 exposure represented non-ACE2-competitive binding profiles while those resulting in unchanged responses represented ACE2-competitive profiles.

### Deep Mutational Scanning Analysis of Antibody Binding Escape.

[0535] Yeast-display deep mutational scanning experiments identifying mutations that escape binding by each monoclonal antibody were conducted with duplicate site-saturation mutagenesis Omicron BA.1 RBD libraries (13). Yeast libraries were grown in SD-CAA media (6.7 g/L Yeast Nitrogen Base, 5.0 g/L Casamino acids, 2.13 g/L MES, and 2% w/v dextrose), and backdiluted to 0.67 OD600 in SG-CAA+0.1% D (SD-CAA with 2% galactose and 0.1% dextrose in place of the 2% dextrose) to induce RBD expression, which proceeded for 16-18 hours at room temperature with mild agitation. 5 OD of cells were washed in PBS-BSA (0.2 mg/L) and labeled for one hour at room temperature in 1 mL with a concentration of antibody determined as the EC90 from pilot isogenic binding assays. In parallel, 0.5 OD of yeast expressing the Omicron BA.1 wildtype RBD were incubated in 100 μL of antibody at the matched EC90 concentration or 0.1× the concentration for FACS gate-setting. Cells were washed, incubated with 1:100 FITC-conjugated chicken anti-Myc antibody (Immunology Consultants CMYC-45F) to label RBD expression and 1:200 PE-conjugated goat anti-human-IgG (Jackson ImmunoResearch 109-115-098) to label bound antibody. Labeled cells were washed and resuspended in PBS for FACS.

[0536] Antibody-escape cells in each library were selected via FACS on a BD FACSAria II. FACS selection gates were drawn to capture approximately 50% of yeast expressing the wildtype BA.1 RBD labeled at 10× reduced antibody labeling concentration (see gates in FIG. 27A). For each sample, ˜4 million RBD⁺ cells were processed on the sorter with collection of cells in the antibody-escape bin. Sorted cells were grown overnight in SD-CAA+pen-strep, plasmid purified (Zymo D2005), PCR amplified, and barcode sequenced on an Illumina NextSeq. In parallel, plasmid samples were purified from 30 OD of pre-sorted library cultures and sequenced to establish pre-selection barcode frequencies.

[0537] Demultiplexed Illumina barcode reads were matched to library barcodes in barcode-mutant lookup tables using dms_variants (version 0.8.9), yielding a table of counts of each barcode in each pre- and post-sort population. The escape fraction of each barcoded variant was computed from sequencing counts in the pre-sort and antibody-escape populations via the formula:

$${E}_{v} = F * ( \frac{{n}_{v}^{post}}{{N}^{post}} ) / ( \frac{{n}_{v}^{pre}}{{N}^{pre}} )$$

where F is the total fraction of the library that escapes antibody binding, nᵥ is the counts of variant v in the pre- or post-sort samples with a pseudocount addition of 0.5, and N is the total sequencing count across all variants pre- and post-sort. These escape fractions represent the estimated fraction of cells expressing a particular variant that fall in the escape bin.

[0538] Computational filters were applied to remove mutants with low sequencing counts or highly deleterious mutations that had ACE2 binding scores <−2 or expression scores of <−1, and mutations to the conserved RBD cysteine residues were removed. Per-mutant escape fractions were computed as the average across barcodes within replicates, with the correlations between replicate library selections shown in FIG. 27B.

### REFERENCES

[0539] 1. WHO Coronavirus (COVID-19) Dashboard|WHO Coronavirus (COVID-19) Dashboard With Vaccination Data, (available at https://covid19.who.int/).
[0540] 2. H. F. Tseng, B. K. Ackerson, Y. Luo, L. S. Sy, C. A. Talarico, Y. Tian, K. J. Bruxvoort, J. E. Tubert, A. Florea, J. H. Ku, G. S. Lee, S. K. Choi, H. S. Takhar, M. Aragones, L. Qian, Effectiveness of mRNA-1273 against SARS-COV-2 Omicron and Delta variants. Nat. Med. 28, 1063-1071 (2022).
[0541] 3. S. Y. Tartof, J. M. Slezak, L. Puzniak, V. Hong, F. Xie, B. K. Ackerson, S. R. Valluri, L. Jodar, J. M. McLaughlin, Durability of BNT162b2 vaccine against hospital and emergency department admissions due to the omicron and delta variants in a large health system in the USA: a test-negative case-control study. Lancet Respir. Med. 10, 689-699 (2022).
[0542] 4. Q. Wang, Y. Guo, S. Iketani, M. S. Nair, Z. Li, H. Mohri, M. Wang, J. Yu, A. D. Bowen, J. Y. Chang, J. G. Shah, N. Nguyen, Z. Chen, K. Meyers, M. T. Yin, M. E. Sobieszczyk, Z. Sheng, Y. Huang, L. Liu, D. D. Ho, Antibody evasion by SARS-COV-2 Omicron subvariants BA.2.12.1, BA.4 and BA.5. Nature. 608, 603-608 (2022).
[0543] 5. A. Tuekprakhon, R. Nutalai, A. Dijokaite-Guraliuc, D. Zhou, H. M. Ginn, M. Selvaraj, C. Liu, A. J. Mentzer, P. Supasa, H. M. E. Duyvesteyn, R. Das, D. Skelly, T. G. Ritter, A. Amini, S. Bibi, S. Adele, S. A. Johnson, B. Constantinides, H. Webster, N. Temperton, G. R. Screaton, Antibody escape of SARS-COV-2 Omicron BA.4 and BA.5 from vaccine and BA.1 serum. Cell. 185, 2422-2433.e13 (2022).
[0544] 6. Y. Cao, F. Jian, J. Wang, Y. Yu, W. Song, A. Yisimayi, J. Wang, R. An, N. Zhang, Y. Wang, P. Wang, L. Zhao, H. Sun, L. Yu, S. Yang, X. Niu, T. Xiao, Q. Gu, F. Shao, X. Hao, X. S. Xie, Imprinted SARS-COV-2 humoral immunity induces converging Omicron RBD evolution. BioRxiv (2022), doi: 10.1101/2022.09.15.507787.
[0545] 7. D. J. Sheward, C. Kim, J. Fischbach, S. Muschiol, R. A. Ehling, N. K. Björkström, G. B. Karlsson Hedestam, S. T. Reddy, J. Albert, T. P. Peacock, B. Murrell, Omicron sublineage BA.2.75.2 exhibits extensive escape from neutralising antibodies. BioRxiv (2022), doi: 10.1101/2022.09.16.508299.
[0546] 8. Coronavirus (COVID-19) Update: FDA Authorizes Moderna, Pfizer-BioNTech Bivalent COVID-19 Vaccines for Use as a Booster Dose|FDA, (available at https://www.fda.gov/news-events/press-announcements/coronavirus-covid-19-update-fda-authorizes-moderna-pfizer-biontech-bivalent-covid-19-vaccines-use).
[0547] 9. C. I. Kaku, A. J. Bergeron, C. Ahlm, J. Normark, M. Sakharkar, M. N. E. Forsell, L. M. Walker, Recall of preexisting cross-reactive B cell memory after Omicron BA.1 breakthrough infection. Sci. Immunol. 7, eabq3511 (2022).
[0548] 10. J. Quandt, A. Muik, N. Salisch, B. G. Lui, S. Lutz, K. Krüger, A.-K. Wallisch, P. Adams-Quack, M. Bacher, A. Finlayson, O. Ozhelvaci, I. Vogler, K. Grikscheit, S. Hoehl, U.
[0549] Goetsch, S. Ciesek, Ö. Türeci, U. Sahin, Omicron BA.1 breakthrough infection drives cross-variant neutralization and memory B cell formation against conserved epitopes. Sci. Immunol. 7, eabq2427 (2022).
[0550] 11. Z. Wang, P. Zhou, F. Muecksch, A. Cho, T. B. Tanfous, M. Canis, L. Witte, B. Johnson, R. Raspe, F. Schmidt, E. Bednarski, J. D. Silva, V. Ramos, S. Zong, M. Turroja, K. G. Millard, K.-H. Yao, I. Shimeliovich, J. Dizon, A. Kaczynska, M. C. Nussenzweig, Memory B cell responses to Omicron subvariants after SARS-COV-2 mRNA breakthrough infection. BioRxiv (2022), doi: 10.1101/2022.08.11.503601.
[0551] 12. S. Chalkias, C. Harper, K. Vrbicky, S. R. Walsh, B. Essink, A. Brosz, N. McGhee, J. E. Tomassini, X. Chen, Y. Chang, A. Sutherland, D. C. Montefiori, B. Girard, D. K. Edwards, J. Feng, H. Zhou, L. R. Baden, J. M. Miller, R. Das, A Bivalent Omicron-Containing Booster Vaccine against Covid-19. N. Engl. J. Med. (2022), doi: 10.1056/NEJMoa2208343.
[0552] 13. A. Schiepers, M. F. L. van't Wout, A. J. Greaney, T. Zang, H. Muramatsu, P. J. C. Lin, Y. K. Tam, L. Mesin, T. N. Starr, P. D. Bieniasz, N. Pardi, J. D. Bloom, G. D. Victora, Molecular fate-mapping of serum antibodies reveals the effects of antigenic imprinting on repeated immunization. BioRxiv (2022), doi: 10.1101/2022.08.29.505743.
[0553] 14. H. Chemaitelly, H. H. Ayoub, P. Coyle, P. Tang, H. M. Yassine, H. A. Al-Khatib, M. K. Smatti, M. R. Hasan, Z. Al-Kanaani, E. Al-Kuwari, A. Jeremijenko, A. H. Kaleeckal, A. N. Latif, R. M. Shaik, H. F. Abdul-Rahim, G. K. Nasrallah, M. G. Al-Kuwari, A. A. Butt, H. E. Al-Romaihi, M. H. Al-Thani, L. J. Abu-Raddad, Protection of Omicron sub-lineage infection against reinfection with another Omicron sub-lineage. medRxiv (2022), doi: 10.1101/2022.02.24.22271440.
[0554] 15. J. Malato, R. M. Ribeiro, P. P. Leite, P. Casaca, E. Fernandes, C. Antunes, V. R. Fonseca, M. C. Gomes, L. Graca, Risk of BA.5 Infection among Persons Exposed to Previous SARS-COV-2 Variants. N. Engl. J. Med. 387, 953-954 (2022).
[0555] 16. D.-Y. Lin, Y. Gu, Y. Xu, D. Zeng, B. Wheeler, H. Young, S. K. Sunny, Z. Moore, Effects of vaccination and previous infection on omicron infections in children. N. Engl. J. Med. (2022), doi: 10.1056/NEJMc2209371.
[0556] 17. F. Muecksch, Z. Wang, A. Cho, C. Gaebler, T. Ben Tanfous, J. DaSilva, E. Bednarski, V. Ramos, S. Zong, B. Johnson, R. Raspe, D. Schaefer-Babajew, I. Shimeliovich, M. Daga, K.-H. Yao, F. Schmidt, K. G. Millard, M. Turroja, M. Jankovic, T. Y. Oliveira, M. C. Nussenzweig, Increased memory B cell potency and breadth after a SARS-COV-2 mRNA boost. Nature. 607, 128-134 (2022).
[0557] 18. W. F. Garcia-Beltran, K. J. St Denis, A. Hoelzemer, E. C. Lam, A. D. Nitido, M. L. Sheehan, C. Berrios, O. Ofoman, C. C. Chang, B. M. Hauser, J. Feldman, A. L. Roederer, D. J. Gregory, M. C. Poznansky, A. G. Schmidt, A. J. Iafrate, V. Naranbhai, A. B. Balazs, mRNA-based COVID-19 vaccine boosters induce neutralizing immunity against SARS-COV-2 Omicron variant. Cell. 185, 457-466.e4 (2022).
[0558] 19. D. F. Robbiani, C. Gaebler, F. Muecksch, J. C. C. Lorenzi, Z. Wang, A. Cho, M. Agudelo, C. O. Barnes, A. Gazumyan, S. Finkin, T. Hägglöf, T. Y. Oliveira, C. Viant, A. Hurley, H.-H. Hoffmann, K. G. Millard, R. G. Kost, M. Cipolla, K. Gordon, F. Bianchini, M. C. Nussenzweig, Convergent antibody responses to SARS-COV-2 in convalescent individuals. Nature. 584, 437-442 (2020).
[0559] 20. C. O. Barnes, C. A. Jette, M. E. Abernathy, K.-M. A. Dam, S. R. Esswein, H. B. Gristick, A. G. Malyutin, N. G. Sharaf, K. E. Huey-Tubman, Y. E. Lee, D. F. Robbiani, M. C. Nussenzweig, A. P. West, P. J. Bjorkman, SARS-COV-2 neutralizing antibody structures inform therapeutic strategies. Nature. 588, 682-687 (2020).
[0560] 21. Z. Wang, F. Schmidt, Y. Weisblum, F. Muecksch, C. O. Barnes, S. Finkin, D. Schaefer-Babajew, M. Cipolla, C. Gaebler, J. A. Lieberman, T. Y. Oliveira, Z. Yang, M. E. Abernathy, K. E. Huey-Tubman, A. Hurley, M. Turroja, K. A. West, K. Gordon, K. G. Millard, V. Ramos, M. C. Nussenzweig, mRNA vaccine-elicited antibodies to SARS-COV-2 and circulating variants. Nature. 592, 616-622 (2021).
[0561] 22. A. Lanzavecchia, A. Frühwirth, L. Perez, D. Corti, Antibody-guided vaccine design: identification of protective epitopes. Curr. Opin. Immunol. 41, 62-67 (2016).
[0562] 23. A. B. Ward, I. A. Wilson, Innovations in structure-based antigen design and immune monitoring for next generation vaccines. Curr. Opin. Immunol. 65, 50-56 (2020).
[0563] 24. P. D. Kwong, J. R. Mascola, HIV-1 Vaccines Based on Antibody Identification, B Cell Ontogeny, and Epitope Structure. Immunity. 48, 855-871 (2018).
[0564] 25. B. Briney, A. Inderbitzin, C. Joyce, D. R. Burton, Commonality despite exceptional diversity in the baseline human antibody repertoire. Nature. 566, 393-397 (2019).
[0565] 26. T. F. Rogers, F. Zhao, D. Huang, N. Beutler, A. Burns, W.-T. He, O. Limbo, C. Smith, G. Song, J. Woehl, L. Yang, R. K. Abbott, S. Callaghan, E. Garcia, J. Hurtado, M. Parren, L. Peng, S. Ramirez, J. Ricketts, M. J. Ricciardi, D. R. Burton, Isolation of potent SARS-COV-2 neutralizing antibodies and protection from disease in a small animal model. Science. 369, 956-963 (2020).
[0566] 27. A. Z. Wec, D. Haslwanter, Y. N. Abdiche, L. Shehata, N. Pedreño-Lopez, C. L. Moyer, Z. A. Bornholdt, A. Lilov, J. H. Nett, R. K. Jangra, M. Brown, D. I. Watkins, C. Ahlm, M. N. Forsell, F. A. Rey, G. Barba-Spaeth, K. Chandran, L. M. Walker, Longitudinal dynamics of the human B cell response to the yellow fever 17D vaccine. Proc Natl Acad Sci USA. 117, 6675-6685 (2020).
[0567] 28. R. D. Gietz, R. H. Schiestl, High-efficiency yeast transformation using the LiAc/SS carrier DNA/PEG method. Nat. Protoc. 2, 31-34 (2007).
[0568] 29. M. I. J. Raybould, A. Kovaltsuk, C. Marks, C. M. Deane, CoV-AbDab: the coronavirus antibody database. Bioinformatics. 37, 734-735 (2021).
[0569] 30. M. Sakharkar, C. G. Rappazzo, W. F. Wieland-Alter, C.-L. Hsieh, D. Wrapp, E. S. Esterman, C. I. Kaku, A. Z. Wec, J. C. Geoghegan, J. S. Mclellan, R. I. Connor, P. F. Wright, L. M. Walker, Prolonged evolution of the human B cell response to SARS-COV-2 infection. Sci. Immunol. 6 (2021), doi: 10.1126/sciimmunol.abg6916.

### Example 3. Re-Engineering of Antibody VYD223

[0570] Antibody VYD223 (also known as ADI-75865) was re-engineered by modifying the glycation and deamination sites in the heavy chain. Specifically, K74T and N31Q substitutions were introduced to the heavy chain of VYD223. The resulting antibody was named as VYD225. VYD225 shows a highly similar neutralization potency to the parental mAb when produced in an identical process, yet with improved developability characteristics. Specifically, VYD225 had a significant reduction in acidic species (FIG. 28) and glycated species (FIG. 29) when compared to VYD223. In addition, removal of glycation site (K74T) showed no negative impact on biophysical properties (FIG. 30A) and binding activity (FIG. 30B). The biophysical properties of VYD225 and VYD223 were also shown in FIG. 33. FIG. 34 depicts the neutralization activity of VYD223 against WT SARS-COV-2 and the XBB.1.5 variant.

[0571] To evaluate the binding properties of VYD225 and the parental mAb, VYD223, their monovalent binding affinities for the RBD of the wild type SARS-COV-2 strain, the BA.1.1 variant, the BQ.1.1 variant, the BA.2.75 variant, the XBB.1 variant were measured.

[0572] In addition, the neutralizing activity of VYD225 against the wild type SARS-COV-2 strain, the BF.7 variant, the BQ.1.1 variant, the BA.2.75 variant, the XBB.1 variant, and the XBB.1.5 variant was assessed using an pseudovirus assay, and compared with other mAbs, e.g., VYD223, VYD224, and adintrevimab (also known as ADI-58125). As shown in FIG. 32, VYD225 demonstrates potent and broad pseudovirus neutralization potency against all variants tested including XBB.1 and XBB1.5.

[0573] These data suggest that VYD225 displays broad activity against the SARS-COV-2 VOCs, including the Omicron variants. This antibody represents a promising candidate for therapeutic development and provides a framework for the development of vaccines that induce broadly neutralizing antibody responses.

### Example 4. In Vitro Pseudovirus Neutralization Assay Using SARS-COV-2 Spike Glycoprotein Variants

[0574] SARS-COV-2 pseudovirus neutralization assays were performed using the PhenoSense SARS-CoV-2 Neutralizing Antibody Assay (Monogram Biosciences), as described in Huang et al., 2021, Sci Rep. 11 (1): 23921. Briefly, pseudoviruses bearing SARS-COV-2 D614G or variant spike proteins were produced by co-transfecting HEK293 cells with a codon-optimized spike sequence expression vector and an HIV genomic vector with a firefly luciferase reporter gene replacing the HIV envelope gene. Culture supernatants were harvested 48 hours post transfection, filtered, and frozen at <−70° C. Pseudovirus titers were determined by inoculating HEK293T cells that were transiently transfected with hACE2 and TMPRSS2 expression vectors and measuring luciferase activity (in RLU) following incubation at 37° C. for 3 days. Virus inoculum for the assay was standardized for all variants based on the screening RLUs.

[0575] To test antibody neutralization, a predetermined amount of pseudovirus was incubated with titrating amounts of test mAb for 1 hour at 37° C. before adding to HEK293 cells expressing hACE2 and TMPRSS2. For each variant tested, the WT (D614G) reference was tested in parallel. Pseudovirus infection was allowed to occur for 3 days before cells were assessed for luciferase activity. Luciferase activity was determined by adding Steady Glo (Promega) and measuring luciferase signal (RLU) using a luminometer.

[0576] The neutralization potency of VYD224 (also known as ADI-80707) was assessed against SARS-COV-2 variant pseudoviruses in the PhenoSense SARS-COV-2 neutralizing assay. As shown in Table 8, VYD224 demonstrated potency against all pseudovirus variants except for XBB, XBB.1 and XBB.1.5, against which it lacked activity.

TABLE 8
Neutralization Activity of VYD224 Against SARS-CoV-2 Pseudovirus

| Pango | Variant | RBD Substitutions Present | IC₅₀ (μg/mL) |
|---|---|---|---|
| Lineage | Description | in Monogram Pseudovirus | VYD224 |
| B.1 | WT (D614G) | | 0.0005-0.0011 |
| B.1.617.2 | Delta | L452R, T478K | 0.0010 |
| BA.1 | Omicron | G339D, S371L, S373P, S375F, K417N, | 0.0013 |
| | | N440K, G446S, S477N, T478K, E484A, | |
| | | Q493K, G496S, Q498R, N501Y, Y505H | |
| BA.4/5 | Omicron | G339D, S371F, S373P, S375F, T376A, | 0.4002 |
| | | D405N, R408S, K417N, N440K, L452R, | |
| | | S477N, T478K, E484A, F486V, Q498R, | |
| | | N501Y, Y505H | |
| BA.4.6 | Omicron | G339D, R346T, S371F, S373P, S375F, | 0.2667 |
| | | T376A, D405N, R408S, K417N, N440K, | |
| | | L452R, S477N, T478K, E484A, F486V, | |
| | | Q498R, N501Y, Y505H | |
| BF.7 | Omicron | G339D, R346T, S371F, S373P, S375F, | 0.2810 |
| | | T376A, D405N, R408S, K417N, N440K, | |
| | | L452R, S477N, T478K, E484A, F486V, | |
| | | Q498R, N501Y, Y505H | |
| BQ.1 | Omicron | G339D, S371F, S373P, S375F, T376A, | 0.4402 |
| | | D405N, R408S, K417N, N440K, K444T, | |
| | | L452R, N460K, S477N, T478K, E484A, | |
| | | F486V, Q498R, N501Y, Y505H | |
| BQ.1.1 | Omicron | G339D, R346T, S371F, S373P, S375F, | 0.8095 |
| | | T376A, D405N, R408S, K417N, N440K, | |
| | | K444T, L452R, N460K, S477N, T478K, | |
| | | E484A, F486V, Q498R, N501Y, Y505H | |
| BA.2.75 | Omicron | G339H, S371F, S373P, S375F, T376A, | 0.0040 |
| | | D405N, R408S, K417N, N440K, G446S, | |
| | | N460K, S477N, T478K, E484A, Q498R, | |
| | | N501Y, Y505H | |
| BN.1 | Omicron | G339H, R346T, K356T, S371F, S373P, | 0.0015 |
| | | S375F, T376A, D405N, R408S, K417N, | |
| | | N440K, G446S, N460K, S477N, T478K, | |
| | | E484A, F490S, Q498R, N501Y, Y505H | |
| XBB | Omicron | G339H, R346T, L368I, S371F, S373P, | >5 |
| | | S375F, T376A, D405N, R408S, K417N, | |
| | | N440K, V445P, G446S, N460K, S477N, | |
| | | T478K, E484A, F486S, F490S, Q493R, | |
| | | Q498R, N501Y, Y505H | |
| XBB.1 | Omicron | G339H, R346T, L368I, S371F, S373P, | >5 |
| | | S375F, T376A, D405N, R408S, K417N, | |
| | | N440K, V445P, G446S, N460K, S477N, | |
| | | T478K, E484A, F486S, F490S, Q493R, | |
| | | Q498R, N501Y, Y505H | |
| XBB.1.5 | Omicron | G339H, R346T, L368I, S371F, S373P, | >5 |
| | | S375F, T376A, D405N, R408S, K417N, | |
| | | N440K, V445P, G446S, N460K, S477N, | |
| | | T478K, E484A, F486P, F490S, Q493R, | |
| | | Q498R, N501Y, Y505H | |

IC50 = half-maximal inhibitory concentration; SARS-CoV-2 = severe acute respiratory syndrome coronavirus 2; WT = wild-type. All data were generated using the PhenoSense SARS-CoV-2 Neutralizing Antibody Assay (Monogram Biosciences, Inc). IC50 values are reported as a range when data were obtained from independent experiments. 5 μg/mL was the upper concentration tested.

[0577] Having fully described and enabled the invention, the invention is further described by the claims that follow.

TABLE 3

| | VH | | SEQ | | SEQ | | SEQ | | SEQ | | SEQ | | SEQ | | SEQ | | SEQ | | SEQ | Reverted | SEQ |
|---|---|---|---|---|---|---|---|---|---|---|---|---|---|---|---|---|---|---|---|---|---|
| Clone | Germ- | | ID | VH | ID | VH | ID | VH | ID | VH | ID | VH | ID | VH | ID | | ID | | ID | VH | ID |
| ID | line | VH FR1 | NO: | CDR1 | NO: | FR2 | NO: | CDR2 | NO: | FR3 | NO: | CDR3 | NO: | FR4 | NO: | VH DNA | NO: | VH Protein | NO: | Protein | NO: |
| ADI- | IGHV3- | QVQLVQSG | 9 | FTFRSYG | 198 | WVRQA | 431 | DILYDG | 519 | RFTIS | 777 | AKQSGP | 1021 | WGQGAL | 1285 | CAGGTCCAGCTGGTGCAGTCTGGGGGA | 1306 | QVQLVQSGGA | 1589 | | |
| 75846 | 30 | GAVVQPGR | | MH | | PGKGL | | SNKYYA | | RDNSK | | YCSGRS | | VTVSS | | GCCGTGGTCCAGCCTGGGAGGTCCCTG | | VVQPGRSLRL | | | |
| | | SLRLSCAA | | | | EWVA | | DSVKG | | NTLYL | | CYSGLF | | | | AGACTCTCCTGTGCAGCCTCTGGATTC | | SCAASGFTFR | | | |
| | | SG | | | | | | | | QMNSL | | DY | | | | ACCTTCCGAAGTTATGGCATGCACTGG | | SYGMHWVRQA | | | |
| | | | | | | | | | | RAEDT | | | | | | GTCCGCCAGGCTCCAGGCAAGGGGCTG | | PGKGLEWVAD | | | |
| | | | | | | | | | | AVYYC | | | | | | GAGTGGGTGGCAGATATATTATATGAT | | ILYDGSNKYY | | | |
| | | | | | | | | | | | | | | | | GGAAGTAATAAATACTATGCAGACTCC | | ADSVKGRFTI | | | |
| | | | | | | | | | | | | | | | | GTGAAGGGCCGATTCACCATCTCCAGA | | SRDNSKNTLY | | | |
| | | | | | | | | | | | | | | | | GACAATTCCAAGAACACGCTGTATCTG | | LQMNSLRAED | | | |
| | | | | | | | | | | | | | | | | CAAATGAACAGCCTGAGAGCTGAGGAC | | TAVYYCAKQS | | | |
| | | | | | | | | | | | | | | | | ACGGCTGTATATTACTGTGCGAAACAG | | GPYCSGRSCY | | | |
| | | | | | | | | | | | | | | | | TCCGGCCCTTATTGTAGTGGTCGTAGC | | SGLFDYWGQG | | | |
| | | | | | | | | | | | | | | | | TGCTACTCGGGTCTCTTTGACTACTGG | | ALVTVSS | | | |
| | | | | | | | | | | | | | | | | GGCCAGGGAGCCCTGGTCACCGTCTCC | | | | | |
| | | | | | | | | | | | | | | | | TCA | | | | | |
| ADI- | IGHV3- | QVQLVQSG | 10 | FTFSSYA | 199 | WVRQA | 431 | VISDDG | 520 | RFTIS | 778 | ARDLNG | 1022 | WGQGTL | 1286 | CAGGTCCAGCTGGTGCAGTCTGGGGGA | 1307 | QVQLVQSGGG | 1590 | | |
| 75829 | 30 | GGVVQPGR | | MH | | PGKGL | | NNKEYP | | RDNSK | | DFFDFA | | VTVSS | | GGCGTGGTCCAGCCTGGGAGGTCCCTG | | VVQPGRSLRL | | | |
| | | SLRLSCAA | | | | EWVA | | DSVKG | | NTLYL | | IFDY | | | | AGACTCTCCTGTGCAGCCTCTGGATTC | | SCAASGFTFS | | | |
| | | SG | | | | | | | | QVNSL | | | | | | ACCTTCAGCAGTTATGCTATGCACTGG | | SYAMHWVRQA | | | |
| | | | | | | | | | | TAEDT | | | | | | GTCCGCCAGGCCCCAGGCAAGGGGCTG | | PGKGLEWVAV | | | |
| | | | | | | | | | | AVYYC | | | | | | GAGTGGGTGGCAGTTATATCAGATGAT | | ISDDGNNKEY | | | |
| | | | | | | | | | | | | | | | | GGAAACAATAAAGAGTACCCAGACTCC | | PDSVKGRFTI | | | |
| | | | | | | | | | | | | | | | | GTGAAGGGCCGCTTCACCATCTCCAGA | | SRDNSKNTLY | | | |
| | | | | | | | | | | | | | | | | GACAATTCCAAGAACACACTATATCTG | | LQVNSLTAED | | | |
| | | | | | | | | | | | | | | | | CAAGTGAACAGCCTGACAGCTGAGGAC | | TAVYYCARDL | | | |
| | | | | | | | | | | | | | | | | ACGGCTGTTTATTACTGTGCGAGAGAT | | NGDFFDFAIF | | | |
| | | | | | | | | | | | | | | | | CTTAACGGTGACTTCTTTGACTTCGCG | | DYWGQGTLVT | | | |
| | | | | | | | | | | | | | | | | ATTTTTGACTACTGGGGCCAGGGAACC | | VSS | | | |
| | | | | | | | | | | | | | | | | CTGGTCACCGTCTCCTCA | | | | | |
| ADI- | IGHV3- | QVQLVESG | 11 | FTFTSYG | 200 | WVRQA | 431 | VISNDG | 521 | RFTIS | 779 | ARDYGD | 1023 | WGQGTL | 1286 | CAGGTCCAGCTGGTGGAGTCTGGGGGA | 1308 | QVQLVESGGG | 1591 | | |
| 75811 | 30 | GGVVQPGR | | FH | | PGKGL | | SYKDYV | | RDNSK | | FVTWFD | | VTVSS | | GGCGTGGTCCAGCCAGGGAGGTCCCTG | | VVQPGRSLRL | | | |
| | | SLRLSCAA | | | | EWVA | | DSVKG | | NTVYL | | P | | | | AGACTCTCCTGTGCAGCCTCTGGATTC | | SCAASGFTFT | | | |
| | | SG | | | | | | | | QMNSL | | | | | | ACCTTCACTAGTTATGGTTTCCACTGG | | SYGFHWVRQA | | | |
| | | | | | | | | | | RAEDT | | | | | | GTCCGCCAGGCTCCAGGCAAGGGTCTA | | PGKGLEWVAV | | | |
| | | | | | | | | | | AVYYC | | | | | | GAGTGGGTGGCAGTTATATCAAATGAT | | ISNDGSYKDY | | | |
| | | | | | | | | | | | | | | | | GGAAGTTACAAAGACTACGTAGACTCC | | VDSVKGRFTI | | | |
| | | | | | | | | | | | | | | | | GTGAAGGGCCGATTCACCATCTCCAGA | | SRDNSKNTVY | | | |
| | | | | | | | | | | | | | | | | GACAATTCCAAGAACACGGTGTATCTC | | LQMNSLRAED | | | |
| | | | | | | | | | | | | | | | | CAAATGAACAGCCTGAGAGCTGAGGAC | | TAVYYCARDY | | | |
| | | | | | | | | | | | | | | | | ACGGCTGTGTATTACTGTGCGAGAGAC | | GDFVTWFDPW | | | |
| | | | | | | | | | | | | | | | | TACGGTGACTTCGTCACCTGGTTCGAC | | GQGTLVTVSS | | | |
| | | | | | | | | | | | | | | | | CCCTGGGGCCAGGGAACCCTGGTCACC | | | | | |
| | | | | | | | | | | | | | | | | GTCTCCTCA | | | | | |
| ADI- | IGHV3- | QVQLVQSG | 12 | FTFTTYW | 201 | WVRQA | 431 | SIKQDG | 522 | RFTIS | 780 | AREMGL | 1024 | WGQGTL | 1286 | CAGGTGCAGCTGGTGCAGTCTGGGGGA | 1309 | QVQLVQSGGG | 1592 | | |
| 75585 | 7 | GGLVQPGG | | MS | | PGKGL | | SEAYYV | | RDNAR | | FWFDP | | VTVSS | | GGCTTGGTCCAGCCTGGGGGGTCCCTG | | LVQPGGSLRL | | | |
| | | SLRLSCAA | | | | EWVA | | DSVRG | | NSLHL | | | | | | AGACTCTCCTGTGCAGCCTCTGGATTC | | SCAASGFTFT | | | |
| | | SG | | | | | | | | QMISL | | | | | | ACCTTTACTACCTATTGGATGAGCTGG | | TYWMSWVRQA | | | |
| | | | | | | | | | | RAEDT | | | | | | GTCCGCCAGGCTCCAGGGAAGGGGCTG | | PGKGLEWVAS | | | |
| | | | | | | | | | | AVYYC | | | | | | GAGTGGGTGGCCAGTATAAAGCAAGAT | | IKQDGSEAYY | | | |
| | | | | | | | | | | | | | | | | GGAAGTGAGGCATATTATGTGGACTCT | | VDSVRGRFTI | | | |
| | | | | | | | | | | | | | | | | GTGAGGGGCCGATTCACCATCTCCAGA | | SRDNARNSLH | | | |
| | | | | | | | | | | | | | | | | GACAACGCCAGGAACTCACTGCATCTG | | LQMISLRAED | | | |
| | | | | | | | | | | | | | | | | CAAATGATCAGCCTGAGAGCCGAGGAC | | TAVYYCAREM | | | |
| | | | | | | | | | | | | | | | | ACGGCTGTGTATTATTGTGCGAGAGAA | | GLFWFDPWGQ | | | |
| | | | | | | | | | | | | | | | | ATGGGTTTATTCTGGTTCGACCCCTGG | | GTLVTVSS | | | |
| | | | | | | | | | | | | | | | | GGCCAGGGAACCCTGGTCACCGTCTCC | | | | | |
| | | | | | | | | | | | | | | | | TCA | | | | | |
| ADI- | IGHV3- | QVQLVQSG | 13 | FSFSDAW | 202 | WVRQA | 432 | RISSET | 523 | RFTIS | 781 | STDDVL | 1025 | WGQGTT | 1287 | CAGGTGCAGCTGGTGCAGTCTGGGGGA | 1310 | QVQLVQSGGG | 1593 | | |
| 75869 | 15 | GGLVKPGG | | MS | | PGKGL | | DGGTTE | | RDNSK | | TGYDYA | | VTVSS | | GGCTTGGTAAAGCCTGGGGGGTCCCTT | | LVKPGGSLRL | | | |
| | | SLRLSCAA | | | | EWVG | | YAAPVK | | GTLYL | | MDV | | | | AGACTCTCCTGTGCAGCCTCTGGATTC | | SCAASGFSFS | | | |
| | | SG | | | | | | G | | QMNSL | | | | | | AGTTTCAGTGACGCCTGGATGAGCTGG | | DAWMSWVRQA | | | |
| | | | | | | | | | | KTEDT | | | | | | GTCCGCCAGGCTCCAGGGAAGGGGCTG | | PGKGLEWVGR | | | |
| | | | | | | | | | | AVYYC | | | | | | GAGTGGGTTGGCCGTATCAGCAGCGAA | | ISSETDGGTT | | | |
| | | | | | | | | | | | | | | | | ACTGATGGTGGGACAACAGAGTACGCT | | EYAAPVKGRF | | | |
| | | | | | | | | | | | | | | | | GCACCCGTGAAAGGCAGATTCACCATC | | TISRDNSKGT | | | |
| | | | | | | | | | | | | | | | | TCAAGAGATAATTCAAAAGGCACGCTG | | LYLQMNSLKT | | | |
| | | | | | | | | | | | | | | | | TATCTGCAAATGAACAGCCTGAAAACC | | EDTAVYYCST | | | |
| | | | | | | | | | | | | | | | | GAGGACACAGCCGTGTATTACTGTTCC | | DDVLTGYDYA | | | |
| | | | | | | | | | | | | | | | | ACTGACGATGTTTTGACTGGCTATGAC | | MDVWGQGTTV | | | |
| | | | | | | | | | | | | | | | | TACGCTATGGACGTCTGGGGCCAAGGG | | TVSS | | | |
| | | | | | | | | | | | | | | | | ACCACGGTCACCGTCTCCTCA | | | | | |
| ADI- | IGHV1- | QVQLQQSG | 14 | YIFINYY | 203 | WVRQA | 433 | IISPRS | 524 | RVTMS | 782 | ARDRRS | 1026 | WGQGTL | 1286 | CAGGTGCAGCTGCAGCAGTCTGGGACT | 1311 | QVQLQQSGTE | 1594 | | |
| 75817 | 46 | TEVKKPGA | | IS | | PGQGL | | GSASYA | | RDTST | | GGDDGG | | VTVSS | | GAGGTGAAGAAGCCTGGGGCCTCAGTG | | VKKPGASVKV | | | |
| | | SVKVSCKA | | | | EWMG | | QKFQG | | STVYM | | WFDP | | | | AAAGTTTCCTGCAAGGCATCTGGATAC | | SCKASGYIFI | | | |
| | | SG | | | | | | | | EVTSL | | | | | | ATCTTCATCAACTACTATATAAGCTGG | | NYYISWVRQA | | | |
| | | | | | | | | | | QSEDT | | | | | | GTGCGACAGGCCCCTGGACAAGGGCTT | | PGQGLEWMGI | | | |
| | | | | | | | | | | AVYYC | | | | | | GAGTGGATGGGAATAATCAGCCCTAGA | | ISPRSGSASY | | | |
| | | | | | | | | | | | | | | | | AGTGGTAGCGCGAGCTACGCACAGAAG | | AQKFQGRVTM | | | |
| | | | | | | | | | | | | | | | | TTCCAGGGCAGAGTCACCATGAGTAGG | | SRDTSTSTVY | | | |
| | | | | | | | | | | | | | | | | GACACGTCCACGAGTACAGTCTACATG | | MEVTSLQSED | | | |
| | | | | | | | | | | | | | | | | GAGGTGACCAGCCTGCAATCTGAGGAC | | TAVYYCARDR | | | |
| | | | | | | | | | | | | | | | | ACGGCCGTTTATTACTGTGCGAGAGAT | | RSGGDDGGWF | | | |
| | | | | | | | | | | | | | | | | CGGCGATCCGGTGGTGACGATGGGGGC | | DPWGQGTLVT | | | |
| | | | | | | | | | | | | | | | | TGGTTCGACCCCTGGGGCCAGGGAACC | | VSS | | | |
| | | | | | | | | | | | | | | | | CTGGTCACCGTCTCCTCA | | | | | |
| ADI- | IGHV3- | EVQLEQSG | 15 | FTFRRYG | 204 | WVRQA | 431 | VISYDG | 525 | RFTSS | 783 | AKQSGQ | 1027 | WGQGAL | 1285 | GAGGTGCAGCTGGAGCAGTCTGGGGGA | 1312 | EVQLEQSGGG | 1595 | | |
| 75590 | 30 | GGVVQPGR | | MH | | PGKGL | | ENKDYP | | RDNSK | | YCSGGT | | VTVSS | | GGCGTAGTCCAGCCTGGGAGGTCCCTG | | VVQPGRSLRL | | | |
| | | SLRLSCAA | | | | EWVA | | DSVKG | | NTLYL | | CYEGSL | | | | AGACTCTCCTGTGCAGCCTCTGGATTC | | SCAASGFTFR | | | |
| | | SG | | | | | | | | EMNSL | | DY | | | | ACTTTCAGAAGGTATGGCATGCACTGG | | RYGMHWVRQA | | | |
| | | | | | | | | | | RAEDT | | | | | | GTCCGCCAGGCTCCAGGCAAGGGTCTG | | PGKGLEWVAV | | | |
| | | | | | | | | | | AVYYC | | | | | | GAGTGGGTGGCAGTTATATCATATGAT | | ISYDGENKDY | | | |
| | | | | | | | | | | | | | | | | GGAGAAAACAAAGACTATCCGGACTCC | | PDSVKGRFTS | | | |
| | | | | | | | | | | | | | | | | GTGAAGGGCCGATTCACCAGCTCCAGA | | SRDNSKNTLY | | | |
| | | | | | | | | | | | | | | | | GACAATTCCAAGAACACGCTGTATCTG | | LEMNSLRAED | | | |
| | | | | | | | | | | | | | | | | GAAATGAACAGCCTGAGAGCTGAGGAC | | TAVYYCAKQS | | | |
| | | | | | | | | | | | | | | | | ACGGCTGTCTATTACTGTGCGAAACAG | | GQYCSGGTCY | | | |
| | | | | | | | | | | | | | | | | TCCGGTCAATATTGTAGTGGTGGTACC | | EGSLDYWGQG | | | |
| | | | | | | | | | | | | | | | | TGCTACGAAGGGTCCCTTGACTACTGG | | ALVTVSS | | | |
| | | | | | | | | | | | | | | | | GGCCAGGGAGCCCTGGTCACCGTCTCC | | | | | |
| | | | | | | | | | | | | | | | | TCA | | | | | |
| ADI- | IGHV3- | QVQLVESG | 11 | FTFSNYA | 205 | WVRQA | 431 | VILKDG | 526 | RFTIS | 784 | ARDYGG | 1028 | WGQGTL | 1286 | CAGGTGCAGCTGGTGGAGTCTGGGGGA | 1313 | QVQLVESGGG | 1596 | | |
| 75823 | 30 | GGVVQPGR | | IH | | PGKGL | | SGKFYA | | RDNSK | | YVTYFD | | VTVSS | | GGCGTGGTCCAGCCTGGGAGGTCCCTG | | VVQPGRSLRL | | | |
| | | SLRLSCAA | | | | EWVA | | DSVKG | | NTVFL | | Y | | | | AGACTCTCCTGTGCAGCCTCTGGATTC | | SCAASGFTFS | | | |
| | | SG | | | | | | | | QTNSL | | | | | | ACCTTCAGTAATTATGCTATACATTGG | | NYAIHWVRQA | | | |
| | | | | | | | | | | RPEDT | | | | | | GTCCGCCAGGCTCCAGGCAAGGGGCTG | | PGKGLEWVAV | | | |
| | | | | | | | | | | AMYYC | | | | | | GAGTGGGTGGCAGTTATATTAAAAGAT | | ILKDGSGKFY | | | |
| | | | | | | | | | | | | | | | | GGAAGCGGGAAATTCTACGCAGACTCC | | ADSVKGRFTI | | | |
| | | | | | | | | | | | | | | | | GTGAAGGGCCGATTCACCATCTCCAGA | | SRDNSKNTVF | | | |
| | | | | | | | | | | | | | | | | GACAATTCCAAGAACACGGTGTTTCTG | | LQTNSLRPED | | | |
| | | | | | | | | | | | | | | | | CAAACGAACAGCCTGAGACCTGAGGAC | | TAMYYCARDY | | | |
| | | | | | | | | | | | | | | | | ACGGCTATGTATTACTGTGCGAGAGAC | | GGYVTYFDYW | | | |
| | | | | | | | | | | | | | | | | TACGGTGGCTACGTGACTTACTTTGAC | | GQGTLVTVSS | | | |
| | | | | | | | | | | | | | | | | TACTGGGGCCAGGGAACCCTGGTCACC | | | | | |
| | | | | | | | | | | | | | | | | GTCTCCTCA | | | | | |
| ADI- | IGHV4- | QVQLQQWG | 16 | GSFSGYY | 206 | WIRQS | 434 | EINHSG | 527 | RVIIS | 785 | ARARLG | 1029 | WGRGTL | 1288 | CAGGTGCAGCTACAGCAGTGGGGCGCA | 1314 | QVQLQQWGAG | 1597 | | |
| 75569 | 34 | AGLLKPSD | | WS | | PGKGL | | STNYNP | | VDTSK | | ESYWHF | | VTVSS | | GGACTGTTGAAGCCTTCGGATACCCTG | | LLKPSDTLSR | | | |
| | | TLSRTCAV | | | | EWIG | | SLKS | | KQFSL | | DL | | | | TCCCGCACCTGCGCTGTCTATGGTGGG | | TCAVYGGSFS | | | |
| | | YG | | | | | | | | NLTSV | | | | | | TCCTTCAGTGGTTACTACTGGAGTTGG | | GYYWSWIRQS | | | |
| | | | | | | | | | | TAADT | | | | | | ATCCGCCAGTCCCCAGGGAAGGGGCTG | | PGKGLEWIGE | | | |
| | | | | | | | | | | AIYYC | | | | | | GAGTGGATTGGAGAAATCAATCATAGT | | INHSGSTNYN | | | |
| | | | | | | | | | | | | | | | | GGAAGCACCAACTACAACCCGTCCCTC | | PSLKSRVIIS | | | |
| | | | | | | | | | | | | | | | | AAGAGTCGAGTCATCATATCAGTGGAC | | VDTSKKQFSL | | | |
| | | | | | | | | | | | | | | | | ACGTCCAAGAAGCAGTTCTCCCTGAAC | | NLTSVTAADT | | | |
| | | | | | | | | | | | | | | | | CTGACCTCTGTGACCGCCGCGGACACG | | AIYYCARARL | | | |
| | | | | | | | | | | | | | | | | GCTATATATTACTGTGCGAGAGCGCGG | | GESYWHFDLW | | | |
| | | | | | | | | | | | | | | | | TTGGGCGAAAGTTACTGGCACTTCGAT | | GRGTLVTVSS | | | |
| | | | | | | | | | | | | | | | | CTCTGGGGCCGTGGCACCCTGGTCACC | | | | | |
| | | | | | | | | | | | | | | | | GTCTCCTCA | | | | | |
| ADI- | IGHV3- | QVQLVQSG | 12 | FTFSSYD | 207 | WVRQG | 435 | TIGTAG | 528 | RFTIS | 786 | ARQGNG | 1030 | WGRGTL | 1288 | CAGGTCCAGCTGGTGCAGTCTGGGGGA | 1315 | QVQLVQSGGG | 1598 | | |
| 75623 | 13 | GGLVQPGG | | MH | | TGNRL | | DTYYAD | | RENAK | | YTYGNW | | VTVSS | | GGCTTGGTACAGCCTGGGGGGTCCCTG | | LVQPGGSLRL | | | |
| | | SLRLSCAA | | | | EWVS | | SVKG | | NSLYL | | YFDL | | | | AGACTCTCCTGTGCAGCCTCTGGATTC | | SCAASGFTFS | | | |
| | | SG | | | | | | | | QMSSL | | | | | | ACCTTCAGTTCCTACGACATGCACTGG | | SYDMHWVRQG | | | |
| | | | | | | | | | | TAGDT | | | | | | GTCCGCCAAGGTACAGGGAACCGTCTG | | TGNRLEWVST | | | |
| | | | | | | | | | | AVYYC | | | | | | GAGTGGGTCTCAACAATTGGTACTGCT | | IGTAGDTYYA | | | |
| | | | | | | | | | | | | | | | | GGCGACACATACTATGCAGACTCCGTG | | DSVKGRFTIS | | | |
| | | | | | | | | | | | | | | | | AAGGGCCGATTCACCATCTCCAGAGAA | | RENAKNSLYL | | | |
| | | | | | | | | | | | | | | | | AATGCCAAGAACTCCTTGTATCTTCAA | | QMSSLTAGDT | | | |
| | | | | | | | | | | | | | | | | ATGAGCAGCCTGACAGCCGGAGACACG | | AVYYCARQGN | | | |
| | | | | | | | | | | | | | | | | GCTGTCTATTACTGTGCAAGACAAGGC | | GYTYGNWYFD | | | |
| | | | | | | | | | | | | | | | | AATGGATACACCTATGGCAACTGGTAC | | LWGRGTLVTV | | | |
| | | | | | | | | | | | | | | | | TTCGATCTCTGGGGCCGTGGCACCCTG | | SS | | | |
| | | | | | | | | | | | | | | | | GTCACCGTCTCCTCA | | | | | |
| ADI- | IGHV3- | QVQLVQSG | 17 | FTFEDYA | 208 | WVRQV | 436 | GISYNS | 529 | RFTIS | 787 | AKSLRE | 1031 | WGQGTT | 1287 | CAGGTGCAGCTGGTGCAGTCTGGGGGA | 1316 | QVQLVQSGGG | 1599 | | |
| 75626 | 9 | GGLVQPGR | | MH | | PGKGL | | GSVDYA | | RDNAK | | FHSYYY | | VTVSS | | GGCTTGGTACAGCCTGGCAGGTCCCTG | | LVQPGRSLRL | | | |
| | | SLRLSCAA | | | | EWVS | | DSVKG | | NSLYL | | GMDV | | | | AGACTCTCTTGTGCAGCCTCTGGATTC | | SCAASGFTFE | | | |
| | | SG | | | | | | | | QMNSL | | | | | | ACCTTTGAGGATTATGCCATGCACTGG | | DYAMHWVRQV | | | |
| | | | | | | | | | | KNEDT | | | | | | GTCCGCCAAGTTCCAGGGAAGGGCCTG | | PGKGLEWVSG | | | |
| | | | | | | | | | | ALYYC | | | | | | GAGTGGGTCTCAGGTATCAGTTACAAT | | ISYNSGSVDY | | | |
| | | | | | | | | | | | | | | | | AGTGGTAGCGTAGACTATGCGGACTCT | | ADSVKGRFTI | | | |
| | | | | | | | | | | | | | | | | GTGAAGGGCCGATTCACCATCTCCAGA | | SRDNAKNSLY | | | |
| | | | | | | | | | | | | | | | | GACAACGCCAAGAACTCCCTGTATCTG | | LQMNSLKNED | | | |
| | | | | | | | | | | | | | | | | CAAATGAACAGTCTGAAAAATGAGGAC | | TALYYCAKSL | | | |
| | | | | | | | | | | | | | | | | ACGGCCTTGTATTATTGTGCAAAAAGT | | REFHSYYYGM | | | |
| | | | | | | | | | | | | | | | | CTTAGGGAGTTCCACTCCTACTACTAC | | DVWGQGTTVT | | | |
| | | | | | | | | | | | | | | | | GGCATGGACGTCTGGGGCCAAGGGACC | | VSS | | | |
| | | | | | | | | | | | | | | | | ACGGTCACCGTCTCCTCA | | | | | |
| ADI- | IGHV3- | QVQLVQSG | 18 | LPFSSNA | 209 | WVRQA | 437 | GISGRG | 530 | RFTVS | 788 | ATDQVG | 1032 | WGQGTL | 1286 | CAGGTGCAGCTGGTGCAGTCTGGGGGA | 1317 | QVQLVQSGGG | 1600 | | |
| 75622 | 23 | GGLVQPGG | | MS | | PGKGL | | ETTYYV | | RDNSK | | GFTMVQ | | VTVSS | | GGCTTGGTACAGCCGGGGGGGTCCCTG | | LVQPGGSLRL | | | |
| | | SLRLSCAV | | | | EWVS | | DSVKG | | NTLFL | | PEYFHH | | | | AGACTCTCCTGTGCAGTCTCTGGACTC | | SCAVSGLPFS | | | |
| | | SG | | | | | | | | QMDSL | | | | | | CCCTTTAGTAGCAATGCCATGAGCTGG | | SNAMSWVRQA | | | |
| | | | | | | | | | | RAEDT | | | | | | GTCCGCCAGGCTCCAGGGAAGGGGCTG | | PGKGLEWVSG | | | |
| | | | | | | | | | | AVYYC | | | | | | GAGTGGGTCTCAGGTATTAGTGGTAGA | | ISGRGETTYY | | | |
| | | | | | | | | | | | | | | | | GGTGAGACCACATACTACGTAGACTCC | | VDSVKGRFTV | | | |
| | | | | | | | | | | | | | | | | GTGAAGGGCCGGTTCACCGTCTCCAGA | | SRDNSKNTLF | | | |
| | | | | | | | | | | | | | | | | GACAATTCGAAGAACACGCTGTTTTTG | | LQMDSLRAED | | | |
| | | | | | | | | | | | | | | | | CAAATGGACAGCCTGAGAGCCGAGGAC | | TAVYYCATDQ | | | |
| | | | | | | | | | | | | | | | | ACGGCTGTATACTACTGTGCGACAGAT | | VGGFTMVQPE | | | |
| | | | | | | | | | | | | | | | | CAAGTAGGGGGATTTACTATGGTTCAG | | YFHHWGQGTL | | | |
| | | | | | | | | | | | | | | | | CCAGAGTACTTCCACCACTGGGGCCAG | | VTVSS | | | |
| | | | | | | | | | | | | | | | | GGCACCCTGGTCACCGTCTCCTCA | | | | | |
| ADI- | IGHV3- | QVQLEQSG | 19 | FTFKNYG | 210 | WVRQA | 431 | VILYDR | 531 | RFTIS | 789 | AKGGAP | 1033 | WGQGSL | 1289 | CAGGTCCAGCTGGAGCAGTCTGGGGGA | 1318 | QVQLEQSGGG | 1601 | | |
| 75598 | 30 | GGVVQPGR | | MH | | PGKGL | | SGKHYA | | RDNSK | | YCGGSN | | VTVSS | | GGCGTGGTCCAGCCTGGGAGGTCCCTG | | VVQPGRSLRL | | | |
| | | SLRLSCAA | | | | EWVA | | DSVKG | | NTLYL | | CYLGYF | | | | AGACTCTCCTGTGCAGCCTCTGGATTC | | SCAASGFTFK | | | |
| | | SG | | | | | | | | QMNSL | | DY | | | | ACTTTCAAGAACTATGGCATGCACTGG | | NYGMHWVRQA | | | |
| | | | | | | | | | | RTEDT | | | | | | GTCCGCCAGGCTCCAGGCAAGGGGCTG | | PGKGLEWVAV | | | |
| | | | | | | | | | | AVYYC | | | | | | GAGTGGGTGGCAGTTATATTATATGAC | | ILYDRSGKHY | | | |
| | | | | | | | | | | | | | | | | CGAAGTGGTAAACACTACGCAGACTCT | | ADSVKGRFTI | | | |
| | | | | | | | | | | | | | | | | GTGAAGGGCCGATTCACCATCTCCAGA | | SRDNSKNTLY | | | |
| | | | | | | | | | | | | | | | | GACAATTCCAAGAACACTCTCTATCTG | | LQMNSLRTED | | | |
| | | | | | | | | | | | | | | | | CAAATGAACAGCCTGAGAACTGAAGAC | | TAVYYCAKGG | | | |
| | | | | | | | | | | | | | | | | ACGGCTGTGTACTACTGTGCGAAAGGT | | APYCGGSNCY | | | |
| | | | | | | | | | | | | | | | | GGGGCCCCATATTGTGGTGGTAGTAAC | | LGYFDYWGQG | | | |
| | | | | | | | | | | | | | | | | TGCTACCTGGGCTACTTTGACTACTGG | | SLVTVSS | | | |
| | | | | | | | | | | | | | | | | GGCCAGGGATCCCTGGTCACCGTCTCC | | | | | |
| | | | | | | | | | | | | | | | | TCA | | | | | |
| ADI- | IGHV3- | QVQLQQSG | 20 | FTFNNHA | 211 | WVRQA | 431 | VVSYDG | 532 | RFTIS | 790 | AREDYH | 1034 | WGQGTL | 1286 | CAGGTGCAGCTGCAGCAGTCTGGGGGA | 1319 | QVQLQQSGGG | 1602 | | |
| 75572 | 30 | GGVVQPGR | | MH | | PGKGL | | SNKYYA | | RDNSK | | DSSGSF | | VTVSS | | GGCGTGGTCCAGCCTGGGAGGTCCCTG | | VVQPGRSLRL | | | |
| | | SLRLSCAA | | | | EWVA | | NSVKG | | KMVYL | | DY | | | | AGACTCTCCTGTGCAGCCTCTGGATTC | | SCAASGFTFN | | | |
| | | SG | | | | | | | | QMNSL | | | | | | ACCTTCAATAACCATGCTATGCACTGG | | NHAMHWVRQA | | | |
| | | | | | | | | | | RPEDS | | | | | | GTCCGCCAGGCTCCAGGCAAGGGGCTG | | PGKGLEWVAV | | | |
| | | | | | | | | | | AVFYC | | | | | | GAGTGGGTGGCAGTTGTTTCATATGAT | | VSYDGSNKYY | | | |
| | | | | | | | | | | | | | | | | GGAAGTAACAAATACTACGCAAACTCC | | ANSVKGRFTI | | | |
| | | | | | | | | | | | | | | | | GTGAAGGGCCGATTCACCATCTCCAGA | | SRDNSKKMVY | | | |
| | | | | | | | | | | | | | | | | GACAATTCCAAGAAAATGGTGTATTTG | | LQMNSLRPED | | | |
| | | | | | | | | | | | | | | | | CAAATGAACAGCCTGAGACCTGAGGAC | | SAVFYCARED | | | |
| | | | | | | | | | | | | | | | | TCGGCTGTGTTTTACTGTGCGAGAGAG | | YHDSSGSFDY | | | |
| | | | | | | | | | | | | | | | | GATTACCATGATAGTAGTGGATCCTTT | | WGQGTLVTVS | | | |
| | | | | | | | | | | | | | | | | GACTACTGGGGCCAGGGAACCCTGGTC | | S | | | |
| | | | | | | | | | | | | | | | | ACCGTCTCCTCA | | | | | |
| ADI- | IGHV4- | QVQLQESG | 21 | AALSSSN | 212 | WVRQS | 438 | EIFHSG | 533 | RVTIS | 791 | ARVAGM | 1035 | WGQGTL | 1286 | CAGGTGCAGCTGCAGGAGTCGGGGCCA | 1320 | QVQLQESGPG | 1603 | | |
| 75819 | 4 | PGLVKPSG | | WWS | | PGKGL | | STYYNP | | VDKSK | | FDY | | VTVSS | | GGACTGGTGAAGCCTTCGGGGACCCTG | | LVKPSGTLSL | | | |
| | | TLSLTCAV | | | | EWIG | | SLKS | | SQFSL | | | | | | TCCCTCACCTGCGCTGTCTCTGGTGCC | | TCAVSGAALS | | | |
| | | SG | | | | | | | | KLTSV | | | | | | GCCCTCAGCAGTAGTAACTGGTGGAGT | | SSNWWSWVRQ | | | |
| | | | | | | | | | | TAADT | | | | | | TGGGTCCGCCAGTCCCCAGGGAAGGGG | | SPGKGLEWIG | | | |
| | | | | | | | | | | AVYYC | | | | | | CTGGAGTGGATTGGGGAAATCTTTCAT | | EIFHSGSTYY | | | |
| | | | | | | | | | | | | | | | | AGTGGGAGCACCTACTACAATCCGTCC | | NPSLKSRVTI | | | |
| | | | | | | | | | | | | | | | | CTCAAGAGTCGAGTCACCATATCAGTA | | SVDKSKSQFS | | | |
| | | | | | | | | | | | | | | | | GACAAGTCGAAGAGCCAATTCTCCCTG | | LKLTSVTAAD | | | |
| | | | | | | | | | | | | | | | | AAGCTGACCTCTGTGACCGCCGCGGAC | | TAVYYCARVA | | | |
| | | | | | | | | | | | | | | | | ACGGCCGTGTATTACTGTGCGAGAGTC | | GMFDYWGQGT | | | |
| | | | | | | | | | | | | | | | | GCTGGGATGTTTGACTACTGGGGCCAG | | LVTVSS | | | |
| | | | | | | | | | | | | | | | | GGAACCCTGGTCACCGTCTCCTCA | | | | | |
| ADI- | IGHV3- | QVQLQQSG | 22 | FTFRTYG | 213 | WVRQA | 431 | VVLYDG | 534 | RFTIS | 792 | AKQSGQ | 1027 | WGQGAL | 1285 | CAGGTGCAGCTGCAGCAGTCTGGGGGA | 1321 | QVQLQQSGGG | 1604 | | |
| 75616 | 30 | GGVVQPGR | | MH | | PGKGL | | SNEDYA | | RDNSK | | YCSGGT | | VTVSS | | GGCGTGGTCCAGCCTGGGAGGTCCCTG | | VVQPGRSLRL | | | |
| | | SLRLSCEA | | | | EWVA | | DSVKG | | NTLYL | | CYEGSL | | | | AGACTCTCCTGTGAAGCCTCTGGATTC | | SCEASGFTFR | | | |
| | | SG | | | | | | | | QMNSL | | DY | | | | ACCTTCAGGACCTATGGCATGCATTGG | | TYGMHWVRQA | | | |
| | | | | | | | | | | RPEDT | | | | | | GTCCGCCAGGCTCCAGGCAAGGGGCTG | | PGKGLEWVAV | | | |
| | | | | | | | | | | AVYFC | | | | | | GAGTGGGTGGCAGTTGTATTATATGAT | | VLYDGSNEDY | | | |
| | | | | | | | | | | | | | | | | GGAAGTAATGAAGACTACGCAGATTCC | | ADSVKGRFTI | | | |
| | | | | | | | | | | | | | | | | GTGAAGGGCCGATTCACCATCTCCAGA | | SRDNSKNTLY | | | |
| | | | | | | | | | | | | | | | | GACAATTCCAAGAACACGCTGTATCTG | | LQMNSLRPED | | | |
| | | | | | | | | | | | | | | | | CAGATGAACAGCCTGAGACCTGAGGAC | | TAVYFCAKQS | | | |
| | | | | | | | | | | | | | | | | ACGGCTGTGTATTTCTGTGCGAAGCAG | | GQYCSGGTCY | | | |
| | | | | | | | | | | | | | | | | TCCGGTCAATATTGTAGTGGTGGTACT | | EGSLDYWGQG | | | |
| | | | | | | | | | | | | | | | | TGCTACGAAGGGTCCCTTGACTACTGG | | ALVTVSS | | | |
| | | | | | | | | | | | | | | | | GGCCAGGGAGCCCTGGTCACCGTCTCC | | | | | |
| | | | | | | | | | | | | | | | | TCA | | | | | |
| ADI- | IGHV3- | QVQLVQSG | 23 | FTFDDYA | 214 | WVRQA | 437 | GISWNG | 535 | RFIIS | 793 | AKGFGG | 1036 | WGQGAL | 1285 | CAGGTGCAGCTGGTGCAGTCTGGGGGA | 1322 | QVQLVQSGGG | 1605 | | |
| 75581 | 9 | GGLVQPGR | | MH | | PGKGL | | GVLDYA | | RDNVS | | IGADRL | | VTVSS | | GGCTTGGTACAGCCTGGCAGGTCCCTG | | LVQPGRSLRL | | | |
| | | SLRLSCEA | | | | EWVS | | DSVKG | | RDNVK | | TGSEEY | | | | AGACTCTCCTGTGAAGCCTCTGGATTC | | SCEASGFTFD | | | |
| | | SG | | | | | | | | NSLYL | | YFDY | | | | ACCTTTGATGATTATGCCATGCACTGG | | DYAMHWVRQA | | | |
| | | | | | | | | | | QMNSL | | | | | | GTCCGGCAAGCTCCAGGGAAGGGCCTG | | PGKGLEWVSG | | | |
| | | | | | | | | | | RAEDT | | | | | | GAGTGGGTCTCAGGTATTAGTTGGAAT | | ISWNGGVLDY | | | |
| | | | | | | | | | | ALYYC | | | | | | GGTGGTGTATTAGACTATGCGGACTCT | | ADSVKGRFII | | | |
| | | | | | | | | | | | | | | | | GTGAAGGGCCGATTCATCATCTCCAGA | | SRDNVSRDNV | | | |
| | | | | | | | | | | | | | | | | GACAATGTCTCCAGAGACAACGTCAAG | | KNSLYLQMNS | | | |
| | | | | | | | | | | | | | | | | AACTCTCTGTATCTGCAAATGAACAGT | | LRAEDTALYY | | | |
| | | | | | | | | | | | | | | | | CTGAGAGCTGAGGACACGGCCTTATAT | | CAKGFGGIGA | | | |
| | | | | | | | | | | | | | | | | TACTGTGCAAAAGGTTTTGGAGGCATA | | DRLTGSEEYY | | | |
| | | | | | | | | | | | | | | | | GGAGCAGATCGGCTTACGGGGAGTGAG | | FDYWGQGALV | | | |
| | | | | | | | | | | | | | | | | GAGTACTACTTTGACTACTGGGGCCAG | | TVSS | | | |
| | | | | | | | | | | | | | | | | GGAGCCCTGGTCACCGTCTCCTCA | | | | | |
| ADI- | IGHV3- | QVQLQQSG | 20 | FTFSTYG | 215 | WVRQA | 431 | VIAFDG | 536 | RFTIS | 794 | AKNQAP | 1037 | WGQGTL | 1286 | CAGGTGCAGCTGCAGCAGTCTGGGGGA | 1323 | QVQLQQSGGG | 1606 | | |
| 75613 | 30 | GGVVQPGR | | MH | | PGKGL | | SKKYYG | | RDSSK | | YCGGGN | | VTVSS | | GGCGTGGTCCAGCCTGGGAGGTCCCTG | | VVQPGRSLRL | | | |
| | | SLRLSCAA | | | | EWVA | | DSVKG | | NTLYL | | CLNGYF | | | | AGACTCTCCTGTGCAGCGTCTGGATTC | | SCAASGFTFS | | | |
| | | SG | | | | | | | | QMNSL | | DY | | | | ACCTTCAGTACCTATGGCATGCACTGG | | TYGMHWVRQA | | | |
| | | | | | | | | | | RPEDT | | | | | | GTCCGCCAGGCTCCAGGCAAGGGGCTG | | PGKGLEWVAV | | | |
| | | | | | | | | | | AVYYC | | | | | | GAGTGGGTGGCAGTTATAGCATTTGAT | | IAFDGSKKYY | | | |
| | | | | | | | | | | | | | | | | GGAAGTAAGAAATATTATGGAGACTCC | | GDSVKGRFTI | | | |
| | | | | | | | | | | | | | | | | GTGAAGGGCCGATTCACCATCTCCAGA | | SRDSSKNTLY | | | |
| | | | | | | | | | | | | | | | | GACAGCTCCAAGAACACGCTGTATCTG | | LQMNSLRPED | | | |
| | | | | | | | | | | | | | | | | CAAATGAACAGCCTGAGACCTGAGGAC | | TAVYYCAKNQ | | | |
| | | | | | | | | | | | | | | | | ACGGCTGTCTATTACTGTGCGAAGAAC | | APYCGGGNCL | | | |
| | | | | | | | | | | | | | | | | CAAGCCCCGTATTGTGGTGGTGGGAAC | | NGYFDYWGQG | | | |
| | | | | | | | | | | | | | | | | TGCCTCAACGGCTACTTTGACTACTGG | | TLVTVSS | | | |
| | | | | | | | | | | | | | | | | GGCCAGGGAACCCTGGTCACCGTCTCC | | | | | |
| | | | | | | | | | | | | | | | | TCA | | | | | |
| ADI- | IGHV3- | QVQLVESG | 24 | FTFSSYD | 207 | WVRQG | 439 | VIGTGG | 537 | RFTIS | 795 | ARVTHI | 1038 | WGRGTL | 1288 | CAGGTGCAGCTGGTGGAGTCTGGGGGA | 1324 | QVQLVESGGG | 1607 | | |
| 75872 | 13 | GGLVQPGG | | MH | | IGKGL | | DTYYPD | | RDNGK | | TMGLKM | | VTVSS | | GGCTTGGTACAGCCTGGGGGGTCCCTG | | LVQPGGSLRL | | | |
| | | SLRLSCAA | | | | EWVS | | SVKG | | NSLYL | | YWYLDL | | | | AGACTCTCCTGTGCAGCCTCTGGATTC | | SCAASGFTFS | | | |
| | | SG | | | | | | | | QMNSL | | | | | | ACCTTCAGTAGCTACGACATGCACTGG | | SYDMHWVRQG | | | |
| | | | | | | | | | | RAGDT | | | | | | GTCCGCCAAGGTATAGGAAAAGGTCTG | | IGKGLEWVSV | | | |
| | | | | | | | | | | AVYYC | | | | | | GAGTGGGTCTCAGTTATCGGTACTGGT | | IGTGGDTYYP | | | |
| | | | | | | | | | | | | | | | | GGTGACACATACTATCCAGACTCCGTG | | DSVKGRFTIS | | | |
| | | | | | | | | | | | | | | | | AAGGGCCGCTTCACAATCTCCAGAGAC | | RDNGKNSLYL | | | |
| | | | | | | | | | | | | | | | | AATGGCAAGAACTCCTTGTATCTTCAA | | QMNSLRAGDT | | | |
| | | | | | | | | | | | | | | | | ATGAACAGCCTGAGAGCCGGGGACACG | | AVYYCARVTH | | | |
| | | | | | | | | | | | | | | | | GCTGTGTATTACTGTGCAAGAGTCACG | | ITMGLKMYWY | | | |
| | | | | | | | | | | | | | | | | CATATAACAATGGGGCTGAAGATGTAC | | LDLWGRGTLV | | | |
| | | | | | | | | | | | | | | | | TGGTACCTCGATCTCTGGGGCCGTGGC | | TVSS | | | |
| | | | | | | | | | | | | | | | | ACCCTGGTCACCGTCTCCTCA | | | | | |
| VYD223 | IGHV4- | EVQLQQSG | 25 | ASISNHD | 216 | WVRQS | 438 | AIFHSG | 538 | RLTIS | 796 | ARARGI | 1039 | WGQGTL | 1286 | GAGGTGCAGCTGCAGCAGTCAGGCCCA | 1325 | EVQLQQSGPG | 1608 | QVQLQESG | 1872 |
| (ADI- | 4 | PGLVKPSG | | WWT | | PGKGL | | TTNYNP | | VDKSK | | LDF | | VTVSS | | GGACTGGTGAAGCCTTCGGGGACCCTG | | LVKPSGTLSL | | PGLVKPSG | |
| 75865) | | TLSLTCAV | | | | EWIG | | SLRS | | SHFSL | | | | | | TCCCTCACCTGCGCTGTGTCTGGTGCC | | TCAVSGASIS | | TLSLTCAV | |
| | | SG | | | | | | | | KLTSV | | | | | | TCCATCAGCAATCATGACTGGTGGACT | | NHDWWTWVRQ | | SGASISNH | |
| | | | | | | | | | | TAADT | | | | | | TGGGTCCGCCAGTCCCCAGGGAAGGGG | | SPGKGLEWIG | | DWWTWVRQ | |
| | | | | | | | | | | AVYYC | | | | | | CTGGAATGGATTGGCGCAATATTTCAT | | AIFHSGTTNY | | SPGKGLEW | |
| | | | | | | | | | | | | | | | | AGTGGGACCACCAACTACAACCCGTCC | | NPSLRSRLTI | | IGAIFHSG | |
| | | | | | | | | | | | | | | | | CTCAGGAGTCGACTCACCATATCAGTA | | SVDKSKSHFS | | TTNYNPSL | |
| | | | | | | | | | | | | | | | | GACAAGTCCAAGAGCCACTTCTCCCTG | | LKLTSVTAAD | | RSRLTISV | |
| | | | | | | | | | | | | | | | | AAACTGACCTCTGTGACCGCCGCGGAC | | TAVYYCARAR | | DKSKSHFS | |
| | | | | | | | | | | | | | | | | ACGGCCGTCTATTACTGTGCGAGAGCC | | GILDFWGQGT | | LKLTSVTA | |
| | | | | | | | | | | | | | | | | CGAGGAATCCTTGACTTTTGGGGCCAG | | LVTVSS | | ADTAVYYC | |
| | | | | | | | | | | | | | | | | GGAACCCTGGTCACCGTCTCCTCA | | | | ARARGILD | |
| | | | | | | | | | | | | | | | | | | | | FWGQGTLV | |
| | | | | | | | | | | | | | | | | | | | | TVSS | |
| ADI- | IGHV5- | SLRISCKG | 26 | YTFTNYW | 217 | WVRQI | 440 | KIDPSD | 539 | HVTIS | 797 | ARQKKY | 1040 | WGQGTL | 1286 | CAGGTGCAGCTGCAGGAGTCCGGAGCA | 1326 | QVQLQESGAE | 1609 | | |
| 75822 | 10-1 | QVQLQESG | | IS | | PGKGL | | SYTDYN | | ADKSS | | SSSPFD | | VTVSS | | GAGGTGAAAAAGCCCGGGGAGTCTCTG | | VKKPGESLRI | | | |
| | | AEVKKPGE | | | | EWMG | | PSFEG | | STAYL | | P | | | | AGGATCTCCTGTAAGGGTTCTGGATAC | | SCKGSGYTFT | | | |
| | | SG | | | | | | | | QRTNL | | | | | | ACTTTTACCAACTACTGGATCAGCTGG | | NYWISWVRQI | | | |
| | | | | | | | | | | EASDS | | | | | | GTGCGCCAGATACCCGGGAAAGGCCTG | | PGKGLEWMGK | | | |
| | | | | | | | | | | AIYYC | | | | | | GAGTGGATGGGGAAAATTGATCCTAGT | | IDPSDSYTDY | | | |
| | | | | | | | | | | | | | | | | GACTCTTATACCGACTACAACCCGTCC | | NPSFEGHVTI | | | |
| | | | | | | | | | | | | | | | | TTCGAAGGCCACGTCACCATCTCAGCT | | SADKSSSTAY | | | |
| | | | | | | | | | | | | | | | | GACAAGTCCTCCAGCACTGCCTACCTG | | LQRTNLEASD | | | |
| | | | | | | | | | | | | | | | | CAGAGGACCAACCTGGAGGCCTCGGAC | | SAIYYCARQK | | | |
| | | | | | | | | | | | | | | | | AGCGCCATTTATTACTGTGCGAGACAG | | KYSSSPFDPW | | | |
| | | | | | | | | | | | | | | | | AAGAAATATAGCAGTAGTCCGTTCGAC | | GQGTLVTVSS | | | |
| | | | | | | | | | | | | | | | | CCCTGGGGCCAAGGAACCCTGGTCACC | | | | | |
| | | | | | | | | | | | | | | | | GTCTCCTCA | | | | | |
| ADI- | IGHV4- | QVQLQQSG | 27 | GSITGSD | 218 | WVRQS | 438 | EIFHSG | 540 | RVSFS | 798 | ARTRGL | 1041 | WGQGTL | 1286 | CAGGTGCAGCTGCAGCAGTCGGGCCCA | 1327 | QVQLQQSGPR | 1610 | | |
| 75843 | 4 | PRLVKPSG | | WWT | | PGKGL | | SAVYNP | | VDKSK | | IDF | | VTVSS | | AGACTGGTGAAGCCTTCGGGGACCCTG | | LVKPSGTLSL | | | |
| | | TLSLTCAV | | | | EWIG | | SLES | | NHFSL | | | | | | TCCCTCACCTGCGCTGTCTCTGGTGGC | | TCAVSGGSIT | | | |
| | | SG | | | | | | | | NLRSV | | | | | | TCCATCACCGGTAGTGACTGGTGGACT | | GSDWWTWVRQ | | | |
| | | | | | | | | | | TAADT | | | | | | TGGGTCCGCCAGTCCCCAGGGAAGGGA | | SPGKGLEWIG | | | |
| | | | | | | | | | | AVYYC | | | | | | CTGGAGTGGATTGGGGAAATCTTTCAT | | EIFHSGSAVY | | | |
| | | | | | | | | | | | | | | | | AGTGGGAGCGCCGTCTACAACCCGTCC | | NPSLESRVSF | | | |
| | | | | | | | | | | | | | | | | CTCGAGAGTCGAGTCAGCTTTTCAGTA | | SVDKSKNHFS | | | |
| | | | | | | | | | | | | | | | | GACAAGTCCAAAAACCACTTCTCCCTG | | LNLRSVTAAD | | | |
| | | | | | | | | | | | | | | | | AACCTGAGGTCTGTGACCGCCGCGGAC | | TAVYYCARTR | | | |
| | | | | | | | | | | | | | | | | ACGGCCGTGTATTACTGTGCCCGTACA | | GLIDFWGQGT | | | |
| | | | | | | | | | | | | | | | | CGGGGCCTTATTGACTTCTGGGGCCAG | | LVTVSS | | | |
| | | | | | | | | | | | | | | | | GGAACCCTGGTCACCGTCTCCTCA | | | | | |
| ADI- | IGHV2- | QVPLVQSG | 28 | FSLSTSG | 219 | WIRQP | 441 | LIYWDD | 541 | RLTIT | 799 | AQRRGT | 1042 | WGQGTL | 1286 | CAGGTCCCGCTGGTGCAGTCTGGTCCT | 1328 | QVPLVQSGPT | 1611 | | |
| 75584 | 5 | PTLVKPTQ | | VGVG | | PGKAL | | DERYNP | | KDTSK | | MIVAEG | | VTVSS | | ACGCTGGTGAAACCCACACAGACCCTC | | LVKPTQTLTL | | | |
| | | TLTLTCTF | | | | EWLA | | SLKS | | SQVVL | | SFDS | | | | ACGCTGACCTGCACCTTCTCTGGGTTC | | TCTFSGFSLS | | | |
| | | SG | | | | | | | | TMTNM | | | | | | TCACTCAGCACTAGTGGAGTGGGTGTG | | TSGVGVGWIR | | | |
| | | | | | | | | | | GPVDT | | | | | | GGCTGGATCCGTCAGCCCCCAGGAAAG | | QPPGKALEWL | | | |
| | | | | | | | | | | GTYYC | | | | | | GCCCTGGAGTGGCTTGCACTCATTTAT | | ALIYWDDDER | | | |
| | | | | | | | | | | | | | | | | TGGGATGATGATGAGCGCTACAACCCA | | YNPSLKSRLT | | | |
| | | | | | | | | | | | | | | | | TCTCTGAAGAGCAGGCTCACCATCACC | | ITKDTSKSQV | | | |
| | | | | | | | | | | | | | | | | AAGGACACCTCCAAAAGCCAGGTGGTC | | VLTMTNMGPV | | | |
| | | | | | | | | | | | | | | | | CTTACAATGACCAACATGGGCCCTGTG | | DTGTYYCAQR | | | |
| | | | | | | | | | | | | | | | | GACACAGGCACATATTACTGTGCACAG | | RGTMIVAEGS | | | |
| | | | | | | | | | | | | | | | | AGACGGGGGACTATGATAGTGGCGGAG | | FDSWGQGTLV | | | |
| | | | | | | | | | | | | | | | | GGCTCCTTTGACTCCTGGGGCCAGGGA | | TVSS | | | |
| | | | | | | | | | | | | | | | | ACCCTGGTCACCGTCTCCTCA | | | | | |
| ADI- | IGHV3- | RCTLVQSG | 29 | FTFRHYG | 220 | WVRQA | 431 | VILYDG | 542 | RFTIS | 777 | AKQSGQ | 1043 | WGQGTL | 1286 | AGGTGCACGCTGGTGCAGTCTGGGGGA | 1329 | RCTLVQSGGG | 1612 | | |
| 75655 | 30 | GGVVQPGR | | MH | | PGKGL | | SNKDYA | | RDNSK | | YCSGGS | | VTVSS | | GGCGTGGTCCAGCCTGGGAGGTCCCTG | | VVQPGRSLRL | | | |
| | | SLRLSCAA | | | | EWVA | | DSVKG | | NTLYL | | CYEGSL | | | | AGACTCTCCTGTGCAGCCTCTGGATTC | | SCAASGFTFR | | | |
| | | SG | | | | | | | | QMNSL | | DY | | | | ACCTTCAGGCACTACGGCATGCACTGG | | HYGMHWVRQA | | | |
| | | | | | | | | | | RAEDT | | | | | | GTCCGCCAGGCACCAGGCAAGGGGCTG | | PGKGLEWVAV | | | |
| | | | | | | | | | | AVYYC | | | | | | GAGTGGGTGGCAGTTATATTATATGAT | | ILYDGSNKDY | | | |
| | | | | | | | | | | | | | | | | GGAAGTAATAAAGACTACGCAGACTCC | | ADSVKGRFTI | | | |
| | | | | | | | | | | | | | | | | GTGAAGGGCCGATTCACCATCTCCAGA | | SRDNSKNTLY | | | |
| | | | | | | | | | | | | | | | | GACAACTCCAAGAACACCCTGTATCTG | | LQMNSLRAED | | | |
| | | | | | | | | | | | | | | | | CAAATGAACAGCCTGAGAGCAGAGGAC | | TAVYYCAKQS | | | |
| | | | | | | | | | | | | | | | | ACGGCTGTGTATTACTGTGCGAAACAG | | GQYCSGGSCY | | | |
| | | | | | | | | | | | | | | | | TCCGGTCAATATTGTAGTGGTGGTAGT | | EGSLDYWGQG | | | |
| | | | | | | | | | | | | | | | | TGCTACGAAGGGTCCTTAGACTACTGG | | TLVTVSS | | | |
| | | | | | | | | | | | | | | | | GGCCAGGGAACCCTGGTCACCGTCTCC | | | | | |
| | | | | | | | | | | | | | | | | TCA | | | | | |
| ADI- | IGHV3- | QVQLVESG | 30 | FPFSTYD | 221 | WVRQA | 437 | GISDSG | 543 | RFTIS | 800 | AKLAGT | 1044 | WGQGTL | 1286 | CAGGTGCAGCTGGTGGAGTCTGGGGGA | 1330 | QVQLVESGGG | 1613 | | |
| 75641 | 23 | GGLIQPGG | | MG | | PGKGL | | GSPYYA | | RDNSN | | PPDYFD | | VTVSS | | GGCTTGATACAGCCGGGGGGGTCCCTG | | LIQPGGSLRL | | | |
| | | SLRLSCAA | | | | EWVS | | VSVRG | | NILHL | | Y | | | | AGACTCTCCTGTGCAGCCTCTGGATTT | | SCAASGFPFS | | | |
| | | SG | | | | | | | | QMNSL | | | | | | CCCTTTAGCACCTATGACATGGGCTGG | | TYDMGWVRQA | | | |
| | | | | | | | | | | RAEDT | | | | | | GTCCGCCAGGCTCCAGGGAAGGGGCTG | | PGKGLEWVSG | | | |
| | | | | | | | | | | AVYYC | | | | | | GAGTGGGTCTCAGGAATTAGTGATAGT | | ISDSGGSPYY | | | |
| | | | | | | | | | | | | | | | | GGTGGTAGCCCATACTACGCAGTCTCC | | AVSVRGRFTI | | | |
| | | | | | | | | | | | | | | | | GTGAGGGGCCGATTCACCATCTCCAGA | | SRDNSNNILH | | | |
| | | | | | | | | | | | | | | | | GACAATTCCAACAACATTCTACATCTG | | LQMNSLRAED | | | |
| | | | | | | | | | | | | | | | | CAAATGAACAGCCTGAGAGCCGAGGAC | | TAVYYCAKLA | | | |
| | | | | | | | | | | | | | | | | ACGGCCGTTTATTACTGTGCGAAACTA | | GTPPDYFDYW | | | |
| | | | | | | | | | | | | | | | | GCTGGTACACCCCCCGACTACTTTGAC | | GQGTLVTVSS | | | |
| | | | | | | | | | | | | | | | | TACTGGGGCCAGGGAACCCTGGTCACC | | | | | |
| | | | | | | | | | | | | | | | | GTCTCCTCA | | | | | |
| ADI- | IGHV3- | QVQLVQSG | 10 | FTFRHYG | 220 | WVRQA | 431 | VISYDG | 544 | RFTIS | 801 | AKQSGQ | 1045 | WGQGTL | 1286 | CAGGTGCAGCTGGTGCAGTCTGGGGGA | 1331 | QVQLVQSGGG | 1614 | | |
| 75565 | 30 | GGVVQPGR | | MH | | PGKGL | | DYKYYA | | RDNSR | | YCSGGD | | VTVSS | | GGCGTGGTCCAGCCTGGGAGGTCCCTG | | VVQPGRSLRL | | | |
| | | SLRLSCAA | | | | EWVA | | DSVKG | | STLFL | | CYVGSF | | | | AGACTCTCCTGTGCAGCCTCTGGATTC | | SCAASGFTFR | | | |
| | | SG | | | | | | | | QMNTL | | DY | | | | ACCTTCAGACACTATGGCATGCACTGG | | HYGMHWVRQA | | | |
| | | | | | | | | | | RAEDT | | | | | | GTCCGCCAGGCTCCAGGCAAGGGGCTG | | PGKGLEWVAV | | | |
| | | | | | | | | | | AMYFC | | | | | | GAGTGGGTGGCAGTTATATCATATGAT | | ISYDGDYKYY | | | |
| | | | | | | | | | | | | | | | | GGAGATTATAAATATTATGCAGACTCC | | ADSVKGRFTI | | | |
| | | | | | | | | | | | | | | | | GTGAAGGGCCGATTCACCATCTCCAGA | | SRDNSRSTLF | | | |
| | | | | | | | | | | | | | | | | GACAATTCCAGGAGTACACTGTTTCTG | | LQMNTLRAED | | | |
| | | | | | | | | | | | | | | | | CAAATGAACACCTTGAGAGCTGAAGAC | | TAMYFCAKQS | | | |
| | | | | | | | | | | | | | | | | ACGGCTATGTATTTCTGTGCGAAACAG | | GQYCSGGDCY | | | |
| | | | | | | | | | | | | | | | | TCCGGTCAATATTGTAGTGGTGGAGAC | | VGSFDYWGQG | | | |
| | | | | | | | | | | | | | | | | TGCTACGTAGGGTCCTTTGACTACTGG | | TLVTVSS | | | |
| | | | | | | | | | | | | | | | | GGCCAGGGAACCCTGGTCACCGTCTCC | | | | | |
| | | | | | | | | | | | | | | | | TCA | | | | | |
| ADI- | IGHV3- | QVQLVESG | 31 | FTFDDYG | 222 | WVRQT | 442 | LISGDG | 545 | RFTIS | 802 | TRETTG | 1046 | WGEGTT | 1290 | CAGGTGCAGCTGGTGGAGTCTGGGGGA | 1332 | QVQLVESGGG | 1615 | | |
| 75783 | 43 | GGVVQPGG | | MQ | | PGKDL | | GGTFYA | | RDNSK | | FRYQSL | | VTVSS | | GGCGTGGTACAGCCTGGGGGGTCCCTG | | VVQPGGSLRL | | | |
| | | SLRLSCAA | | | | EWVA | | DSVKG | | NSLYL | | NSYYNY | | | | AGACTCTCCTGTGCAGCCTCTGGATTC | | SCAASGFTFD | | | |
| | | SG | | | | | | | | QMNSL | | MDV | | | | ACCTTTGATGATTATGGCATGCAGTGG | | DYGMQWVRQT | | | |
| | | | | | | | | | | RPEDT | | | | | | GTCCGACAAACTCCAGGGAAGGATCTG | | PGKDLEWVAL | | | |
| | | | | | | | | | | ALYYC | | | | | | GAGTGGGTCGCTCTTATTAGTGGGGAT | | ISGDGGGTFY | | | |
| | | | | | | | | | | | | | | | | GGTGGTGGCACCTTCTATGCAGACTCT | | ADSVKGRFTI | | | |
| | | | | | | | | | | | | | | | | GTGAAGGGCCGATTCACCATCTCCAGA | | SRDNSKNSLY | | | |
| | | | | | | | | | | | | | | | | GACAACAGCAAAAATTCCCTGTATCTG | | LQMNSLRPED | | | |
| | | | | | | | | | | | | | | | | CAAATGAATAGTCTGAGACCTGAGGAC | | TALYYCTRET | | | |
| | | | | | | | | | | | | | | | | ACCGCCTTATATTACTGCACGAGAGAA | | TGFRYQSLNS | | | |
| | | | | | | | | | | | | | | | | ACAACTGGATTCAGATATCAATCCCTT | | YYNYMDVWGE | | | |
| | | | | | | | | | | | | | | | | AATTCCTACTACAACTACATGGACGTC | | GTTVTVSS | | | |
| | | | | | | | | | | | | | | | | TGGGGCGAAGGGACCACGGTCACCGTC | | | | | |
| | | | | | | | | | | | | | | | | TCCTCA | | | | | |
| ADI- | IGHV3- | QVQLVQSG | 32 | FTFRNYA | 223 | WVRQA | 443 | GVSRNG | 546 | RFTIS | 803 | VKDLGQ | 1047 | WGQGTT | 1287 | CAGGTGCAGCTGGTGCAGTCTGGGGGA | 1333 | QVQLVQSGGG | 1616 | | |
| 75805 | 64D | GGLVQPGG | | MH | | PGKGL | | DIADYT | | RDNSK | | QWYDAF | | VTVSS | | GGCTTGGTCCAGCCTGGGGGGTCCCTG | | LVQPGGSLRL | | | |
| | | SLRLSCSA | | | | EYVS | | DSVKG | | NTLYL | | DI | | | | AGACTCTCCTGTTCAGCCTCTGGATTC | | SCSASGFTFR | | | |
| | | SG | | | | | | | | QMRSL | | | | | | ACCTTCAGGAACTATGCTATGCACTGG | | NYAMHWVRQA | | | |
| | | | | | | | | | | GSEDT | | | | | | GTCCGCCAGGCTCCAGGGAAGGGACTG | | PGKGLEYVSG | | | |
| | | | | | | | | | | ALYYC | | | | | | GAGTATGTTTCAGGTGTTAGTCGTAAT | | VSRNGDIADY | | | |
| | | | | | | | | | | | | | | | | GGGGATATCGCAGACTACACAGACTCA | | TDSVKGRFTI | | | |
| | | | | | | | | | | | | | | | | GTGAAGGGCAGATTCACCATCTCCAGA | | SRDNSKNTLY | | | |
| | | | | | | | | | | | | | | | | GACAATTCCAAGAATACGCTGTATCTT | | LQMRSLGSED | | | |
| | | | | | | | | | | | | | | | | CAAATGCGCAGTCTGGGAAGTGAGGAC | | TALYYCVKDL | | | |
| | | | | | | | | | | | | | | | | ACGGCTCTGTATTACTGTGTGAAAGAT | | GQQWYDAFDI | | | |
| | | | | | | | | | | | | | | | | CTTGGCCAGCAGTGGTATGATGCTTTT | | WGQGTTVTVS | | | |
| | | | | | | | | | | | | | | | | GATATCTGGGGCCAAGGGACCACGGTC | | S | | | |
| | | | | | | | | | | | | | | | | ACCGTCTCCTCA | | | | | |
| ADI- | IGHV4- | QVQLQESG | 33 | GSISGIS | 224 | WVRQP | 444 | EIFHSG | 547 | RVTIS | 804 | ARVSGF | 1048 | WGQGTL | 1286 | CAGGTGCAGCTGCAGGAGTCGGGCCCA | 1334 | QVQLQESGPR | 1617 | | |
| 75588 | 4 | PRLVNPSG | | WWS | | PGKGL | | SAHYNP | | VDNSK | | FDY | | VTVSS | | AGACTGGTGAACCCTTCGGGGACCCTG | | LVNPSGTLSL | | | |
| | | TLSLTCAV | | | | EWIG | | SLKS | | NQFSL | | | | | | TCCCTCACCTGCGCTGTCTCTGGGGGC | | TCAVSGGSIS | | | |
| | | SG | | | | | | | | KLTSV | | | | | | TCCATCAGCGGTATTAGCTGGTGGAGT | | GISWWSWVRQ | | | |
| | | | | | | | | | | TAADT | | | | | | TGGGTCCGCCAGCCCCCCGGGAAGGGG | | PPGKGLEWIG | | | |
| | | | | | | | | | | AIYYC | | | | | | CTGGAGTGGATTGGGGAGATATTTCAT | | EIFHSGSAHY | | | |
| | | | | | | | | | | | | | | | | AGTGGGAGCGCCCACTACAACCCGTCC | | NPSLKSRVTI | | | |
| | | | | | | | | | | | | | | | | CTCAAGAGTCGAGTCACCATATCAGTA | | SVDNSKNQFS | | | |
| | | | | | | | | | | | | | | | | GACAACTCCAAGAACCAGTTCTCCCTG | | LKLTSVTAAD | | | |
| | | | | | | | | | | | | | | | | AAGCTGACCTCTGTGACCGCCGCGGAC | | TAIYYCARVS | | | |
| | | | | | | | | | | | | | | | | ACGGCCATATATTACTGTGCAAGAGTC | | GFFDYWGQGT | | | |
| | | | | | | | | | | | | | | | | AGCGGGTTTTTTGACTACTGGGGCCAG | | LVTVSS | | | |
| | | | | | | | | | | | | | | | | GGAACCCTGGTCACCGTCTCCTCA | | | | | |
| ADI- | IGHV4- | QVQLQQWG | 34 | GSLSGYY | 225 | WIRQP | 445 | EINHSG | 548 | RVTIS | 805 | ARGLGL | 1049 | WGQGTT | 1287 | CAGGTGCAGCTACAGCAGTGGGGCGCA | 1335 | QVQLQQWGAG | 1618 | | |
| 75871 | 34 | AGLLKPSE | | CN | | PGKGL | | NTYYNP | | VDTSK | | LDI | | VTVSS | | GGACTGTTGAAGCCTTCGGAGACCCTG | | LLKPSETLSL | | | |
| | | TLSLTCAV | | | | EWIG | | SLKS | | DQFSL | | | | | | TCCCTCACCTGCGCTGTCTCTGGTGGG | | TCAVSGGSLS | | | |
| | | SG | | | | | | | | KLNSV | | | | | | TCCCTCAGTGGTTACTACTGCAACTGG | | GYYCNWIRQP | | | |
| | | | | | | | | | | TAADT | | | | | | ATCCGCCAGCCCCCAGGGAAGGGGCTG | | PGKGLEWIGE | | | |
| | | | | | | | | | | AVYYC | | | | | | GAGTGGATTGGGGAAATCAATCACAGT | | INHSGNTYYN | | | |
| | | | | | | | | | | | | | | | | GGAAACACCTACTACAACCCGTCCCTC | | PSLKSRVTIS | | | |
| | | | | | | | | | | | | | | | | AAGAGTCGAGTCACCATATCAGTAGAC | | VDTSKDQFSL | | | |
| | | | | | | | | | | | | | | | | ACGTCCAAAGACCAGTTCTCCCTGAAG | | KLNSVTAADT | | | |
| | | | | | | | | | | | | | | | | CTGAACTCTGTGACCGCCGCGGACACG | | AVYYCARGLG | | | |
| | | | | | | | | | | | | | | | | GCTGTATATTATTGTGCGAGAGGCTTG | | LLDIWGQGTT | | | |
| | | | | | | | | | | | | | | | | GGACTCCTAGATATCTGGGGCCAAGGG | | VTVSS | | | |
| | | | | | | | | | | | | | | | | ACCACGGTCACCGTCTCCTCA | | | | | |
| ADI- | IGHV1- | QVQLVQSG | 35 | YTFTSYT | 226 | WVRQA | 446 | WIDAGN | 549 | RVTIT | 806 | ARDDSS | 1050 | WGQGTL | 1286 | CAGGTCCAGCTGGTGCAGTCTGGGGCT | 1336 | QVQLVQSGAE | 1619 | | |
| 75868 | 3 | AEVKKPGA | | IH | | PGQRL | | GDTQYS | | SDPSA | | SYSLTS | | VTVSS | | GAGGTGAAGAAGCCTGGGGCCTCAGTG | | VKKPGASVKV | | | |
| | | SVKVSCKA | | | | EWMA | | QNFQG | | STAYM | | YFDY | | | | AAGGTTTCCTGCAAGGCTTCTGGATAC | | SCKASGYTFT | | | |
| | | SG | | | | | | | | ELSGL | | | | | | ACCTTCACTAGCTATACTATTCATTGG | | SYTIHWVRQA | | | |
| | | | | | | | | | | RSEDT | | | | | | GTGCGCCAGGCCCCCGGACAAAGGCTT | | PGQRLEWMAW | | | |
| | | | | | | | | | | AVYYC | | | | | | GAGTGGATGGCATGGATCGACGCTGGC | | IDAGNGDTQY | | | |
| | | | | | | | | | | | | | | | | AATGGTGACACACAATATTCACAGAAC | | SQNFQGRVTI | | | |
| | | | | | | | | | | | | | | | | TTTCAGGGCAGAGTCACCATTACCAGT | | TSDPSASTAY | | | |
| | | | | | | | | | | | | | | | | GACCCATCCGCGAGCACAGCCTACATG | | MELSGLRSED | | | |
| | | | | | | | | | | | | | | | | GAGCTGAGCGGCCTGAGATCTGAAGAC | | TAVYYCARDD | | | |
| | | | | | | | | | | | | | | | | ACGGCTGTCTATTACTGTGCGAGAGAC | | SSSYSLTSYF | | | |
| | | | | | | | | | | | | | | | | GATAGCAGCAGCTATTCCCTAACCTCT | | DYWGQGTLVT | | | |
| | | | | | | | | | | | | | | | | TACTTTGACTACTGGGGCCAGGGAACC | | VSS | | | |
| | | | | | | | | | | | | | | | | CTGGTCACCGTCTCCTCA | | | | | |
| ADI- | IGHV3- | QVQLVQSG | 36 | FIFSDYS | 227 | WVRQA | 447 | GISSTG | 550 | RFTIS | 807 | VKDIGS | 1051 | WGQGTT | 1287 | CAGGTGCAGCTGGTGCAGTCTGGGGGA | 1337 | QVQLVQSGGG | 1620 | | |
| 75653 | 64D | GGLVQPGG | | MH | | PGKGL | | DITDYA | | RDNSK | | WKYFDV | | VTVSS | | GGCTTGGTCCAGCCTGGGGGGTCCCTG | | LVQPGGSLSL | | | |
| | | SLSLSCLV | | | | DYVS | | DSVKD | | NTLYL | | FDV | | | | AGCCTCTCCTGTTTAGTCTCTGGATTC | | SCLVSGFIFS | | | |
| | | SG | | | | | | | | QMSSL | | | | | | ATCTTCAGTGACTATTCTATGCACTGG | | DYSMHWVRQA | | | |
| | | | | | | | | | | RVEDT | | | | | | GTCCGCCAGGCTCCAGGGAAGGGACTG | | PGKGLDYVSG | | | |
| | | | | | | | | | | AVYYC | | | | | | GATTATGTTTCAGGTATTAGTAGTACT | | ISSTGDITDY | | | |
| | | | | | | | | | | | | | | | | GGGGATATCACAGACTACGCAGACTCA | | ADSVKDRFTI | | | |
| | | | | | | | | | | | | | | | | GTGAAGGACAGATTCACCATCTCCAGA | | SRDNSKNTLY | | | |
| | | | | | | | | | | | | | | | | GACAATTCCAAGAACACGCTGTATCTT | | LQMSSLRVED | | | |
| | | | | | | | | | | | | | | | | CAAATGAGCAGTCTGAGAGTTGAGGAC | | TAVYYCVKDI | | | |
| | | | | | | | | | | | | | | | | ACGGCTGTGTATTATTGTGTGAAAGAT | | GSWKYFDVFD | | | |
| | | | | | | | | | | | | | | | | ATTGGGAGCTGGAAGTATTTTGATGTT | | VWGQGTTVTV | | | |
| | | | | | | | | | | | | | | | | TTTGATGTCTGGGGCCAAGGGACCACG | | SS | | | |
| | | | | | | | | | | | | | | | | GTCACCGTCTCCTCA | | | | | |
| ADI- | IGHV3- | QVQLVESG | 11 | FTFSTYS | 228 | WVRQA | 431 | VILYDG | 551 | RFTIS | 792 | ARDWSG | 1052 | WGQGTL | 1286 | CAGGTGCAGCTGGTGGAGTCTGGGGGA | 1338 | QVQLVESGGG | 1621 | | |
| 75826 | 30 | GGVVQPGR | | MH | | PGKGL | | TYKDYA | | RDNSK | | KLPVSW | | VTVSS | | GGCGTGGTCCAGCCTGGGAGGTCCCTG | | VVQPGRSLRL | | | |
| | | SLRLSCAA | | | | EWVA | | DSVKG | | NTLYL | | FDP | | | | AGACTCTCCTGTGCAGCCTCTGGATTC | | SCAASGFTFS | | | |
| | | SG | | | | | | | | QMNSL | | | | | | ACCTTCAGTACCTATTCTATGCACTGG | | TYSMHWVRQA | | | |
| | | | | | | | | | | RPEDT | | | | | | GTCCGCCAGGCTCCAGGCAAGGGGCTG | | PGKGLEWVAV | | | |
| | | | | | | | | | | AVYFC | | | | | | GAGTGGGTGGCAGTTATTTTATATGAT | | ILYDGTYKDY | | | |
| | | | | | | | | | | | | | | | | GGAACCTATAAAGACTACGCAGACTCC | | ADSVKGRFTI | | | |
| | | | | | | | | | | | | | | | | GTGAAGGGCCGATTCACCATCTCCAGA | | SRDNSKNTLY | | | |
| | | | | | | | | | | | | | | | | GACAATTCCAAGAACACGCTGTATCTG | | LQMNSLRPED | | | |
| | | | | | | | | | | | | | | | | CAAATGAACAGCCTGAGACCTGAGGAC | | TAVYFCARDW | | | |
| | | | | | | | | | | | | | | | | ACGGCTGTCTATTTCTGTGCCAGAGAT | | SGKLPVSWFD | | | |
| | | | | | | | | | | | | | | | | TGGAGTGGCAAACTTCCTGTATCCTGG | | PWGQGTLVTV | | | |
| | | | | | | | | | | | | | | | | TTCGACCCCTGGGGCCAGGGAACCCTG | | SS | | | |
| | | | | | | | | | | | | | | | | GTCACCGTCTCCTCA | | | | | |
| ADI- | IGHV3- | QVQLQQSG | 20 | FSFISYG | 229 | WVRQA | 431 | VISDDG | 552 | RFTIS | 808 | ARDDGS | 1053 | WGQGTL | 1286 | CAGGTGCAGCTGCAGCAGTCTGGGGGA | 1339 | QVQLQQSGGG | 1622 | | |
| 75709 | 33 | GGVVQPGR | | MH | | PGKGL | | SFKYSA | | RDNSK | | PTTYFG | | VTVSS | | GGCGTGGTCCAGCCTGGGAGGTCCCTG | | VVQPGRSLRL | | | |
| | | SLRLSCAA | | | | EWVA | | DSVKG | | KTLFL | | L | | | | AGACTCTCCTGTGCAGCGTCTGGATTC | | SCAASGFSFI | | | |
| | | SG | | | | | | | | QMNSL | | | | | | TCCTTCATTAGTTATGGCATGCACTGG | | SYGMHWVRQA | | | |
| | | | | | | | | | | RAEDT | | | | | | GTCCGCCAGGCTCCAGGCAAGGGGCTG | | PGKGLEWVAV | | | |
| | | | | | | | | | | AVYYC | | | | | | GAGTGGGTGGCAGTTATTTCGGATGAT | | ISDDGSFKYS | | | |
| | | | | | | | | | | | | | | | | GGGTCTTTTAAATACTCTGCAGACTCC | | ADSVKGRFTI | | | |
| | | | | | | | | | | | | | | | | GTGAAGGGCCGGTTCACCATCTCCAGA | | SRDNSKKTLF | | | |
| | | | | | | | | | | | | | | | | GACAATTCCAAGAAGACACTGTTTCTG | | LQMNSLRAED | | | |
| | | | | | | | | | | | | | | | | CAAATGAACAGCCTGAGAGCCGAGGAC | | TAVYYCARDD | | | |
| | | | | | | | | | | | | | | | | ACGGCTGTGTATTACTGTGCGAGAGAT | | GSPTTYFGLW | | | |
| | | | | | | | | | | | | | | | | GACGGATCACCCACCACTTACTTTGGC | | GQGTLVTVSS | | | |
| | | | | | | | | | | | | | | | | CTCTGGGGCCAGGGAACCCTGGTCACC | | | | | |
| | | | | | | | | | | | | | | | | GTCTCCTCA | | | | | |
| ADI- | IGHV3- | QVQLVQSG | 10 | FTFSDHA | 230 | WVRQA | 431 | VMSYDG | 553 | RATIS | 809 | AREDYY | 1054 | WGQGTT | 1287 | CAGGTCCAGCTGGTGCAGTCTGGGGGA | 1340 | QVQLVQSGGG | 1623 | | |
| 75685 | 30 | GGVVQPGR | | MH | | PGKGL | | SNEYYA | | RDNSK | | DSSGAF | | VTVSS | | GGCGTGGTCCAGCCTGGGAGGTCCCTG | | VVQPGRSLRL | | | |
| | | SLRLSCAA | | | | EWVA | | DSVKG | | NTLYL | | DM | | | | AGACTCTCCTGTGCAGCCTCTGGATTC | | SCAASGFTFS | | | |
| | | SG | | | | | | | | QMNSL | | | | | | ACCTTCAGTGACCATGCTATGCACTGG | | DHAMHWVRQA | | | |
| | | | | | | | | | | RAEDT | | | | | | GTCCGCCAGGCTCCAGGCAAGGGACTG | | PGKGLEWVAV | | | |
| | | | | | | | | | | AIYYC | | | | | | GAGTGGGTGGCAGTCATGTCATATGAT | | MSYDGSNEYY | | | |
| | | | | | | | | | | | | | | | | GGAAGTAATGAATACTACGCAGATTCC | | ADSVKGRATI | | | |
| | | | | | | | | | | | | | | | | GTGAAGGGCCGAGCCACCATCTCCAGA | | SRDNSKNTLY | | | |
| | | | | | | | | | | | | | | | | GACAATTCCAAGAACACCCTGTATCTG | | LQMNSLRAED | | | |
| | | | | | | | | | | | | | | | | CAAATGAACAGCCTGAGAGCTGAGGAC | | TAIYYCARED | | | |
| | | | | | | | | | | | | | | | | ACGGCTATATATTATTGTGCGAGAGAG | | YYDSSGAFDM | | | |
| | | | | | | | | | | | | | | | | GATTACTATGATAGTAGTGGTGCTTTT | | WGQGTTVTVS | | | |
| | | | | | | | | | | | | | | | | GATATGTGGGGCCAAGGGACCACGGTC | | S | | | |
| | | | | | | | | | | | | | | | | ACCGTCTCCTCA | | | | | |
| ADI- | IGHV3- | QVQLVQSG | 17 | FTFDDYA | 214 | WVRQT | 448 | AISWNS | 554 | RFTIS | 810 | AKDKSS | 1055 | WGQGTT | 1287 | CAGGTCCAGCTGGTGCAGTCTGGGGGA | 1341 | QVQLVQSGGG | 1624 | | |
| 75831 | 9 | GGLVQPGR | | MH | | PGKGL | | ASIGYA | | RDNAK | | NYGDYA | | VTVSS | | GGCTTGGTACAGCCTGGCAGGTCCCTG | | LVQPGRSLRL | | | |
| | | SLRLSCAA | | | | EWVS | | DSVKG | | NSLYL | | GGMEV | | | | AGACTCTCCTGTGCAGCCTCTGGATTC | | SCAASGFTFD | | | |
| | | SG | | | | | | | | QMNSL | | | | | | ACCTTTGATGATTATGCCATGCACTGG | | DYAMHWVRQT | | | |
| | | | | | | | | | | RVEDT | | | | | | GTCCGGCAAACTCCAGGGAAGGGCCTG | | PGKGLEWVSA | | | |
| | | | | | | | | | | ALYYC | | | | | | GAGTGGGTCTCAGCCATTAGTTGGAAT | | ISWNSASIGY | | | |
| | | | | | | | | | | | | | | | | AGTGCTAGTATAGGCTATGCGGACTCT | | ADSVKGRFTI | | | |
| | | | | | | | | | | | | | | | | GTGAAGGGCCGATTCACCATCTCCAGA | | SRDNAKNSLY | | | |
| | | | | | | | | | | | | | | | | GACAACGCCAAGAACTCCCTGTATCTC | | LQMNSLRVED | | | |
| | | | | | | | | | | | | | | | | CAAATGAACAGTCTGAGAGTTGAGGAC | | TALYYCAKDK | | | |
| | | | | | | | | | | | | | | | | ACGGCCTTGTATTACTGTGCAAAAGAT | | SSNYGDYAGG | | | |
| | | | | | | | | | | | | | | | | AAATCGTCAAACTACGGTGACTACGCA | | MEVWGQGTTV | | | |
| | | | | | | | | | | | | | | | | GGGGGTATGGAGGTCTGGGGCCAAGGG | | TVSS | | | |
| | | | | | | | | | | | | | | | | ACCACGGTCACCGTCTCCTCA | | | | | |
| ADI- | IGHV3- | QVQLVQSG | 9 | FTFNSYG | 231 | WVRQA | 431 | VIIHDG | 555 | RFTIS | 811 | AKQSCS | 1056 | WGQGTL | 1286 | CAGGTGCAGCTGGTGCAGTCTGGGGGA | 1342 | QVQLVQSGGA | 1625 | | |
| 75873 | 30 | GAVVQPGR | | MH | | PGKGL | | SNKYHA | | RDNSK | | GGSCYH | | VTVSS | | GCCGTGGTCCAGCCTGGGAGGTCCCTG | | VVQPGRSLRL | | | |
| | | SLRLSCAA | | | | EWVA | | DSVKG | | NTLYL | | EFYFES | | | | AGACTCTCCTGTGCAGCCTCTGGATTC | | SCAASGFTFN | | | |
| | | SG | | | | | | | | QMNNL | | | | | | ACCTTTAATAGCTATGGCATGCACTGG | | SYGMHWVRQA | | | |
| | | | | | | | | | | RAEDT | | | | | | GTCCGCCAGGCTCCGGGCAAGGGGCTG | | PGKGLEWVAV | | | |
| | | | | | | | | | | AVYYC | | | | | | GAGTGGGTGGCAGTTATAATACATGAT | | IIHDGSNKYH | | | |
| | | | | | | | | | | | | | | | | GGAAGTAATAAATACCATGCAGACTCC | | ADSVKGRFTI | | | |
| | | | | | | | | | | | | | | | | GTGAAGGGCCGATTCACCATCTCCAGA | | SRDNSKNTLY | | | |
| | | | | | | | | | | | | | | | | GACAATTCCAAGAACACGTTGTATCTG | | LQMNNLRAED | | | |
| | | | | | | | | | | | | | | | | CAAATGAACAACCTGAGAGCTGAGGAC | | TAVYYCAKQS | | | |
| | | | | | | | | | | | | | | | | ACGGCTGTGTATTACTGTGCGAAACAA | | CSGGSCYHEF | | | |
| | | | | | | | | | | | | | | | | TCATGCAGTGGTGGTAGCTGTTACCAC | | YFESWGQGTL | | | |
| | | | | | | | | | | | | | | | | GAATTTTACTTTGAGTCATGGGGCCAG | | VTVSS | | | |
| | | | | | | | | | | | | | | | | GGAACCCTGGTCACCGTCTCCTCA | | | | | |
| ADI- | IGHV5- | QVQLVQSR | 37 | YSFKYFW | 232 | WVRQM | 449 | TIYPGD | 556 | QVTIS | 812 | VKRQSG | 1057 | WGQGTT | 1287 | CAGGTCCAGCTGGTGCAGTCTCGAGCA | 1343 | QVQLVQSRAE | 1626 | | |
| 75621 | 51 | AEVKKPGD | | IG | | PGKGL | | SDTRYS | | ADRST | | TSFDY | | VTVSS | | GAGGTGAAAAAGCCCGGGGACTCTCTG | | VKKPGDSLQI | | | |
| | | SLQISCQT | | | | EWVA | | LSFQG | | DTAYL | | | | | | CAGATCTCCTGTCAGACATCTGGATAC | | SCQTSGYSFK | | | |
| | | SG | | | | | | | | QWNSL | | | | | | AGTTTTAAGTACTTCTGGATCGGCTGG | | YFWIGWVRQM | | | |
| | | | | | | | | | | KASDT | | | | | | GTGCGCCAGATGCCCGGGAAAGGCCTG | | PGKGLEWVAT | | | |
| | | | | | | | | | | AIYYC | | | | | | GAGTGGGTGGCCACCATCTATCCTGGT | | IYPGDSDTRY | | | |
| | | | | | | | | | | | | | | | | GACTCTGATACCAGATACAGTCTGTCC | | SLSFQGQVTI | | | |
| | | | | | | | | | | | | | | | | TTCCAAGGCCAGGTCACCATCTCAGCC | | SADRSTDTAY | | | |
| | | | | | | | | | | | | | | | | GACAGGTCCACCGATACCGCCTACCTA | | LQWNSLKASD | | | |
| | | | | | | | | | | | | | | | | CAGTGGAACAGCCTCAAGGCCTCGGAC | | TAIYYCVKRQ | | | |
| | | | | | | | | | | | | | | | | ACCGCCATCTACTATTGTGTGAAGCGC | | SGTSFDYWGQ | | | |
| | | | | | | | | | | | | | | | | CAAAGTGGAACTTCGTTTGACTACTGG | | GTTVTVSS | | | |
| | | | | | | | | | | | | | | | | GGCCAGGGGACCACGGTCACCGTCTCC | | | | | |
| | | | | | | | | | | | | | | | | TCA | | | | | |
| ADI- | IGHV3- | QVQLQQSG | 22 | FTFSNYG | 233 | WVRQA | 431 | VIWDDG | 557 | RFTIS | 777 | ARDGPG | 1058 | WGQGTL | 1286 | CAGGTGCAGCTGCAGCAGTCTGGGGGG | 1344 | QVQLQQSGGG | 1627 | | |
| 75755 | 33 | GGVVQPGR | | MH | | PGKGL | | SGKHYA | | RDNSK | | DKMVTL | | VTVSS | | GGCGTGGTCCAGCCTGGGAGGTCCCTG | | VVQPGRSLRL | | | |
| | | SLRLSCEA | | | | EWVA | | DSVKG | | NTLYL | | FDY | | | | AGACTCTCCTGTGAAGCGTCTGGATTC | | SCEASGFTFS | | | |
| | | SG | | | | | | | | QMNSL | | | | | | ACCTTCAGTAATTATGGCATGCACTGG | | NYGMHWVRQA | | | |
| | | | | | | | | | | RAEDT | | | | | | GTCCGCCAGGCTCCAGGCAAGGGGCTG | | PGKGLEWVAV | | | |
| | | | | | | | | | | AVYYC | | | | | | GAGTGGGTGGCAGTTATATGGGATGAT | | IWDDGSGKHY | | | |
| | | | | | | | | | | | | | | | | GGAAGTGGTAAACACTATGCAGACTCC | | ADSVKGRFTI | | | |
| | | | | | | | | | | | | | | | | GTGAAGGGCCGATTCACCATCTCCAGA | | SRDNSKNTLY | | | |
| | | | | | | | | | | | | | | | | GACAACTCCAAGAACACACTTTATCTG | | LQMNSLRAED | | | |
| | | | | | | | | | | | | | | | | CAAATGAACAGCCTGAGAGCCGAGGAC | | TAVYYCARDG | | | |
| | | | | | | | | | | | | | | | | ACGGCTGTGTATTACTGTGCGAGAGAT | | PGDKMVTLFD | | | |
| | | | | | | | | | | | | | | | | GGCCCCGGGGACAAGATGGTTACCCTC | | YWGQGTLVTV | | | |
| | | | | | | | | | | | | | | | | TTTGACTACTGGGGCCAGGGAACCCTG | | SS | | | |
| | | | | | | | | | | | | | | | | GTCACCGTCTCCTCA | | | | | |
| ADI- | IGHV3- | QVQLVQSG | 12 | FSFSNYA | 234 | WVRQA | 437 | GIGGRG | 558 | RFTIS | 813 | ATDEVV | 1059 | WGQGTL | 1286 | CAGGTGCAGCTGGTGCAGTCTGGGGGA | 1345 | QVQLVQSGGG | 1628 | | |
| 75702 | 23 | GGLVQPGG | | MS | | PGKGL | | KNTYYA | | RDNSK | | TAIQPE | | VTVSS | | GGCTTGGTACAGCCGGGGGGGTCCCTG | | LVQPGGSLRL | | | |
| | | SLRLSCAA | | | | EWVS | | DSVKG | | NTLFL | | YFHH | | | | AGACTCTCCTGTGCAGCCTCTGGATTC | | SCAASGFSFS | | | |
| | | SG | | | | | | | | QMNSL | | | | | | AGCTTTAGCAATTACGCCATGAGCTGG | | NYAMSWVRQA | | | |
| | | | | | | | | | | RAEDT | | | | | | GTCCGCCAGGCTCCAGGGAAGGGGCTG | | PGKGLEWVSG | | | |
| | | | | | | | | | | ALYYC | | | | | | GAGTGGGTCTCCGGTATTGGTGGTCGT | | IGGRGKNTYY | | | |
| | | | | | | | | | | | | | | | | GGTAAAAACACATACTACGCAGACTCC | | ADSVKGRFTI | | | |
| | | | | | | | | | | | | | | | | GTGAAGGGCCGGTTCACCATCTCCAGA | | SRDNSKNTLF | | | |
| | | | | | | | | | | | | | | | | GACAATTCCAAGAACACGCTGTTTCTG | | LQMNSLRAED | | | |
| | | | | | | | | | | | | | | | | CAAATGAACAGCCTGAGAGCCGAGGAC | | TALYYCATDE | | | |
| | | | | | | | | | | | | | | | | ACGGCCCTATATTACTGTGCGACAGAT | | VVTAIQPEYF | | | |
| | | | | | | | | | | | | | | | | GAGGTGGTGACTGCTATCCAACCTGAA | | HHWGQGTLVT | | | |
| | | | | | | | | | | | | | | | | TATTTCCACCACTGGGGCCAGGGCACC | | VSS | | | |
| | | | | | | | | | | | | | | | | CTGGTCACCGTCTCCTCA | | | | | |
| ADI- | IGHV3- | QVQLVQSG | 38 | FTFSNYG | 233 | WVRQA | 431 | VIWDDG | 557 | RFTIS | 777 | ARDGPG | 1058 | WGQGTL | 1286 | CAGGTCCAGCTGGTGCAGTCTGGGGGC | 1346 | QVQLVQSGGG | 1629 | | |
| 75778 | 33 | GGVVQPGR | | MH | | PGKGL | | SGKHYA | | RDNSK | | DKMVTL | | VTVSS | | GGCGTGGTCCAGCCTGGGAGGTCCCTG | | VVQPGRSLRL | | | |
| | | SLRLSCEA | | | | EWVA | | DSVKG | | NTLYL | | FDY | | | | AGACTCTCCTGTGAAGCGTCTGGATTC | | SCEASGFTFS | | | |
| | | SG | | | | | | | | QMNSL | | | | | | ACCTTCAGTAATTATGGCATGCACTGG | | NYGMHWVRQA | | | |
| | | | | | | | | | | RAEDT | | | | | | GTCCGCCAGGCTCCAGGCAAGGGGCTG | | PGKGLEWVAV | | | |
| | | | | | | | | | | AVYYC | | | | | | GAGTGGGTGGCAGTTATATGGGATGAT | | IWDDGSGKHY | | | |
| | | | | | | | | | | | | | | | | GGAAGTGGTAAACACTATGCAGACTCC | | ADSVKGRFTI | | | |
| | | | | | | | | | | | | | | | | GTGAAGGGCCGATTCACCATCTCCAGA | | SRDNSKNTLY | | | |
| | | | | | | | | | | | | | | | | GACAACTCCAAGAACACACTTTATCTG | | LQMNSLRAED | | | |
| | | | | | | | | | | | | | | | | CAAATGAACAGCCTGAGAGCCGAGGAC | | TAVYYCARDG | | | |
| | | | | | | | | | | | | | | | | ACGGCTGTGTATTACTGTGCGAGAGAT | | PGDKMVTLFD | | | |
| | | | | | | | | | | | | | | | | GGCCCCGGGGACAAGATGGTTACCCTC | | YWGQGTLVTV | | | |
| | | | | | | | | | | | | | | | | TTTGACTACTGGGGCCAGGGAACCCTG | | SS | | | |
| | | | | | | | | | | | | | | | | GTCACCGTCTCCTCA | | | | | |
| ADI- | IGHV4- | QVQLQESG | 39 | GSISTNG | 235 | WIRQH | 450 | YIYYSG | 559 | RVTMS | 814 | ARDYVT | 1060 | WGQGTL | 1286 | CAGGTGCAGCTGCAGGAGTCGGGCCCA | 1347 | QVQLQESGPG | 1630 | | |
| 75575 | 31 | PGLVKPSQ | | YYWS | | PGKGL | | SAYYNP | | VDTSK | | GRGMLP | | VTVSS | | GGACTGGTGAAGCCCTCACAGACCCTG | | LVKPSQTLSL | | | |
| | | TLSLTCTV | | | | EWIG | | SLKS | | NQFSL | | D | | | | TCCCTCACCTGCACTGTCTCTGGTGGC | | TCTVSGGSIS | | | |
| | | SG | | | | | | | | KLSSV | | | | | | TCCATCAGCACTAATGGTTACTACTGG | | TNGYYWSWIR | | | |
| | | | | | | | | | | TVADT | | | | | | AGCTGGATCCGCCAGCACCCAGGGAAG | | QHPGKGLEWI | | | |
| | | | | | | | | | | AVYYC | | | | | | GGCCTGGAGTGGATTGGGTACATCTAT | | GYIYYSGSAY | | | |
| | | | | | | | | | | | | | | | | TACAGTGGGAGCGCCTACTACAACCCG | | YNPSLKSRVT | | | |
| | | | | | | | | | | | | | | | | TCCCTCAAGAGTCGAGTGACCATGTCA | | MSVDTSKNQF | | | |
| | | | | | | | | | | | | | | | | GTAGACACGTCTAAGAACCAGTTCTCC | | SLKLSSVTVA | | | |
| | | | | | | | | | | | | | | | | CTGAAGCTGAGCTCTGTGACTGTCGCG | | DTAVYYCARD | | | |
| | | | | | | | | | | | | | | | | GACACGGCCGTGTACTACTGTGCGAGA | | YVTGRGMLPD | | | |
| | | | | | | | | | | | | | | | | GACTACGTTACGGGGGGGGGAATGCTC | | WGQGTLVTVS | | | |
| | | | | | | | | | | | | | | | | CCCGACTGGGGCCAGGGAACCCTGGTC | | S | | | |
| | | | | | | | | | | | | | | | | ACCGTCTCCTCA | | | | | |
| ADI- | IGHV7- | QVQLVQSG | 40 | YTFTSNA | 236 | WVRQA | 433 | WINTNT | 560 | RFVFS | 815 | ARRSGY | 1061 | WGQGTL | 1286 | CAGGTGCAGCTGGTGCAGTCTGGGTCT | 1348 | QVQLVQSGSE | 1631 | | |
| 75690 | 4-1 | SESKKPGA | | IN | | PGQGL | | GNPTYA | | LDTAV | | TSGSDW | | VTVSS | | GAGTCGAAAAAGCCTGGGGCCTCAGTG | | SKKPGASVRV | | | |
| | | SVRVSCKA | | | | EWMG | | QGFTG | | STAYL | | LDP | | | | AGGGTTTCCTGCAAGGCTTCTGGATAC | | SCKASGYTFT | | | |
| | | SG | | | | | | | | HINNL | | | | | | ACCTTCACTAGCAATGCTATCAATTGG | | SNAINWVRQA | | | |
| | | | | | | | | | | KPEDT | | | | | | GTGCGACAGGCCCCTGGACAAGGGCTT | | PGQGLEWMGW | | | |
| | | | | | | | | | | AVFYC | | | | | | GAGTGGATGGGATGGATCAACACCAAC | | INTNTGNPTY | | | |
| | | | | | | | | | | | | | | | | ACCGGGAACCCAACGTATGCCCAGGGC | | AQGFTGRFVF | | | |
| | | | | | | | | | | | | | | | | TTCACAGGACGGTTTGTCTTCTCCTTG | | SLDTAVSTAY | | | |
| | | | | | | | | | | | | | | | | GACACCGCTGTCAGCACGGCCTATCTG | | LHINNLKPED | | | |
| | | | | | | | | | | | | | | | | CACATCAACAATCTAAAGCCTGAGGAC | | TAVFYCARRS | | | |
| | | | | | | | | | | | | | | | | ACTGCCGTTTTCTACTGTGCGAGGAGA | | GYTSGSDWLD | | | |
| | | | | | | | | | | | | | | | | TCCGGGTATACAAGTGGCTCAGACTGG | | PWGQGTLVTV | | | |
| | | | | | | | | | | | | | | | | CTCGACCCCTGGGGCCAGGGAACCCTG | | SS | | | |
| | | | | | | | | | | | | | | | | GTCACCGTCTCCTCA | | | | | |
| ADI- | IGHV3- | QVQLVQSG | 41 | FTFGHYG | 237 | WVRQA | 431 | AIIYDG | 561 | RFTIS | 816 | AKLGGL | 1062 | WGQGTL | 1286 | CAGGTGCAGCTGGTGCAGTCTGGGGGA | 1349 | QVQLVQSGGG | 1632 | | |
| 75735 | 30 | GGVGQPGR | | MH | | PGKGL | | SDKQYA | | RDNSK | | YCSGGN | | VTVSS | | GGCGTGGGCCAGCCTGGGAGGTCCCTG | | VGQPGRSLRL | | | |
| | | SLRLSCAA | | | | EWVA | | DSVKG | | NTVYL | | CFSGYF | | | | AGACTCTCCTGTGCAGCCTCTGGATTC | | SCAASGFTFG | | | |
| | | SG | | | | | | | | QMNSL | | DY | | | | ACCTTCGGTCACTATGGCATGCACTGG | | HYGMHWVRQA | | | |
| | | | | | | | | | | RPEDT | | | | | | GTCCGCCAGGCTCCAGGCAAGGGGCTG | | PGKGLEWVAA | | | |
| | | | | | | | | | | AIYFC | | | | | | GAGTGGGTGGCAGCAATAATATATGAT | | IIYDGSDKQY | | | |
| | | | | | | | | | | | | | | | | GGCAGTGACAAACAATATGCAGACTCC | | ADSVKGRFTI | | | |
| | | | | | | | | | | | | | | | | GTGAAGGGCCGATTCACCATCTCCAGA | | SRDNSKNTVY | | | |
| | | | | | | | | | | | | | | | | GACAATTCCAAGAACACAGTGTATTTG | | LQMNSLRPED | | | |
| | | | | | | | | | | | | | | | | CAAATGAACAGCCTGAGACCTGAGGAC | | TAIYFCAKLG | | | |
| | | | | | | | | | | | | | | | | ACGGCTATATATTTTTGTGCGAAACTG | | GLYCSGGNCF | | | |
| | | | | | | | | | | | | | | | | GGGGGCTTGTATTGTAGTGGTGGCAAC | | SGYFDYWGQG | | | |
| | | | | | | | | | | | | | | | | TGCTTCTCCGGCTACTTTGACTACTGG | | TLVTVSS | | | |
| | | | | | | | | | | | | | | | | GGCCAGGGAACCCTGGTCACCGTCTCC | | | | | |
| | | | | | | | | | | | | | | | | TCA | | | | | |
| ADI- | IGHV4- | QVQLQESG | 42 | GSISRSG | 238 | WIRQP | 445 | SIYNSG | 562 | RVTIS | 817 | ARAPGI | 1063 | WGQGTL | 1286 | CAGGTGCAGCTGCAGGAGTCCGGCCCA | 1350 | QVQLQESGPG | 1633 | | |
| 75859 | 39 | PGLVKPSE | | HYWG | | PGKGL | | ATYFNP | | VDTSK | | IDC | | VTVSS | | GGACTGGTGAAGCCTTCGGAGACCCTG | | LVKPSETLSL | | | |
| | | TLSLTCTV | | | | EWIG | | SLKS | | NQFSL | | | | | | TCCCTCACCTGCACTGTGTCTAGTGGC | | TCTVSSGSIS | | | |
| | | SS | | | | | | | | RLSSV | | | | | | TCTATCAGTCGCAGTGGTCACTATTGG | | RSGHYWGWIR | | | |
| | | | | | | | | | | TAADT | | | | | | GGCTGGATCCGCCAGCCCCCAGGGAAG | | QPPGKGLEWI | | | |
| | | | | | | | | | | AVYYC | | | | | | GGGCTGGAGTGGATTGGGAGTATCTAT | | GSIYNSGATY | | | |
| | | | | | | | | | | | | | | | | AATAGTGGGGCCACCTACTTCAACCCG | | FNPSLKSRVT | | | |
| | | | | | | | | | | | | | | | | TCCCTCAAGAGTCGAGTCACCATATCC | | ISVDTSKNQF | | | |
| | | | | | | | | | | | | | | | | GTTGACACGTCCAAGAACCAGTTCTCC | | SLRLSSVTAA | | | |
| | | | | | | | | | | | | | | | | CTGAGGCTGAGCTCTGTGACCGCCGCA | | DTAVYYCARA | | | |
| | | | | | | | | | | | | | | | | GACACGGCTGTCTATTACTGTGCAAGA | | PGIIDCWGQG | | | |
| | | | | | | | | | | | | | | | | GCCCCGGGCATTATTGACTGCTGGGGC | | TLVTVSS | | | |
| | | | | | | | | | | | | | | | | CAGGGAACCCTGGTCACCGTCTCTTCA | | | | | |
| ADI- | IGHV4- | QVQLQQWG | 43 | GSLSGYY | 239 | WIRQP | 445 | EISHSG | 563 | RVTIL | 818 | ARGLGM | 1064 | WGQGTT | 1287 | CAGGTGCAGCTGCAGCAGTGGGGCGCA | 1351 | QVQLQQWGAG | 1634 | | |
| 75857 | 34 | AGLLKPSE | | WS | | PGKGL | | GTYYNP | | VDTSK | | YDV | | VTVSS | | GGACTGTTGAAGCCTTCGGAGACCCTT | | LLKPSETLSL | | | |
| | | TLSLTCAV | | | | EWIG | | SLKS | | NQFSL | | | | | | TCCCTCACCTGCGCTGTCTATGGTGGG | | TCAVYGGSLS | | | |
| | | YG | | | | | | | | KLTSV | | | | | | TCCCTCAGTGGTTACTACTGGAGCTGG | | GYYWSWIRQP | | | |
| | | | | | | | | | | TAADT | | | | | | ATCCGCCAGCCCCCAGGGAAGGGGCTG | | PGKGLEWIGE | | | |
| | | | | | | | | | | AVYYC | | | | | | GAGTGGATTGGGGAAATCAGTCATAGT | | ISHSGGTYYN | | | |
| | | | | | | | | | | | | | | | | GGAGGCACCTACTACAACCCGTCCCTC | | PSLKSRVTIL | | | |
| | | | | | | | | | | | | | | | | AAGAGTCGAGTCACCATATTAGTAGAC | | VDTSKNQFSL | | | |
| | | | | | | | | | | | | | | | | ACGTCCAAGAACCAGTTCTCCCTGAAG | | KLTSVTAADT | | | |
| | | | | | | | | | | | | | | | | CTGACCTCTGTGACCGCCGCGGACACG | | AVYYCARGLG | | | |
| | | | | | | | | | | | | | | | | GCTGTGTATTACTGTGCGAGAGGCCTT | | MYDVWGQGTT | | | |
| | | | | | | | | | | | | | | | | GGAATGTACGACGTCTGGGGCCAAGGG | | VTVSS | | | |
| | | | | | | | | | | | | | | | | ACCACGGTCACCGTCTCCTCA | | | | | |
| ADI- | IGHV4- | QVQLQQSG | 44 | GSISSFN | 240 | WVRQS | 438 | EINHSD | 564 | RVSIS | 819 | ARADRS | 1065 | WGRGTL | 1288 | CAGGTGCAGCTGCAGCAGTCGGGCCCA | 1352 | QVQLQQSGPG | 1635 | | |
| 75596 | 4 | PGLVKPSG | | WWT | | PGKGL | | TTNYNP | | VDKSK | | DYYDST | | VTVSS | | GGACTGGTGAAGCCTTCGGGGACCCTG | | LVKPSGTLSL | | | |
| | | TLSLTCAV | | | | EWIG | | SLKS | | NQFSL | | PYRVPY | | | | TCCCTCACCTGCGCTGTCTCTGGTGGC | | TCAVSGGSIS | | | |
| | | SG | | | | | | | | KLSSV | | FDY | | | | TCCATCAGCAGTTTTAACTGGTGGACT | | SFNWWTWVRQ | | | |
| | | | | | | | | | | TAADT | | | | | | TGGGTCCGCCAGTCCCCAGGAAAGGGG | | SPGKGLEWIG | | | |
| | | | | | | | | | | AVYYC | | | | | | CTGGAATGGATTGGAGAAATCAATCAT | | EINHSDTTNY | | | |
| | | | | | | | | | | | | | | | | AGTGACACCACCAACTACAACCCGTCC | | NPSLKSRVSI | | | |
| | | | | | | | | | | | | | | | | CTCAAGAGTCGAGTCTCCATTTCAGTG | | SVDKSKNQFS | | | |
| | | | | | | | | | | | | | | | | GACAAGTCCAAAAACCAGTTCTCCCTG | | LKLSSVTAAD | | | |
| | | | | | | | | | | | | | | | | AAGTTGAGTTCTGTGACCGCCGCGGAC | | TAVYYCARAD | | | |
| | | | | | | | | | | | | | | | | ACGGCCGTGTATTACTGTGCGAGAGCT | | RSDYYDSTPY | | | |
| | | | | | | | | | | | | | | | | GATCGTAGCGATTACTATGATAGTACT | | RVPYFDYWGR | | | |
| | | | | | | | | | | | | | | | | CCTTATCGAGTCCCCTACTTTGACTAT | | GTLVTVSS | | | |
| | | | | | | | | | | | | | | | | TGGGGCCGGGGAACCCTGGTCACCGTC | | | | | |
| | | | | | | | | | | | | | | | | TCCTCA | | | | | |
| ADI- | IGHV3- | QVQLVQSG | 45 | FSFSSYA | 241 | WVRQA | 431 | VILDDG | 565 | RFTIS | 820 | ARDMGA | 1066 | WGQGTL | 1286 | CAGGTGCAGCTGGTGCAGTCTGGGGGA | 1353 | QVQLVQSGGG | 1636 | | |
| 75838 | 30 | GGVVQPGR | | MH | | PGKGL | | NNKLYA | | RDNSK | | VVTHFD | | VTVSS | | GGCGTGGTCCAGCCTGGGAGGTCCCTG | | VVQPGRSLRL | | | |
| | | SLRLSCVA | | | | EWVA | | DSVKG | | NTLYL | | Y | | | | AGACTCTCCTGTGTAGCCTCTGGATTC | | SCVASGFSFS | | | |
| | | SG | | | | | | | | QVNSL | | | | | | AGCTTCAGTAGTTATGCTATGCACTGG | | SYAMHWVRQA | | | |
| | | | | | | | | | | RTEDT | | | | | | GTCCGCCAGGCTCCAGGCAAGGGGCTA | | PGKGLEWVAV | | | |
| | | | | | | | | | | AVYYC | | | | | | GAATGGGTGGCAGTTATATTAGATGAT | | ILDDGNNKLY | | | |
| | | | | | | | | | | | | | | | | GGAAATAATAAATTGTACGCAGACTCC | | ADSVKGRFTI | | | |
| | | | | | | | | | | | | | | | | GTGAAGGGCCGATTCACCATCTCCAGA | | SRDNSKNTLY | | | |
| | | | | | | | | | | | | | | | | GACAATTCCAAGAACACGCTGTATCTG | | LQVNSLRTED | | | |
| | | | | | | | | | | | | | | | | CAAGTGAACAGCCTGAGAACTGAGGAC | | TAVYYCARDM | | | |
| | | | | | | | | | | | | | | | | ACGGCTGTGTATTACTGTGCGAGAGAT | | GAVVTHFDYW | | | |
| | | | | | | | | | | | | | | | | ATGGGTGCGGTGGTAACTCATTTTGAC | | GQGTLVTVSS | | | |
| | | | | | | | | | | | | | | | | TACTGGGGCCAGGGAACCCTGGTCACC | | | | | |
| | | | | | | | | | | | | | | | | GTCTCCTCA | | | | | |
| ADI- | IGHV3- | QVQLQQSG | 20 | ITFSTFG | 242 | WVRQA | 431 | VISNDG | 566 | RFTIS | 821 | AKEGPG | 1067 | WGQGTL | 1286 | CAGGTGCAGCTGCAGCAGTCTGGGGGA | 1354 | QVQLQQSGGG | 1637 | | |
| 75607 | 30 | GGVVQPGR | | MH | | PGKGL | | GSKHYK | | RDNAK | | ASGFNY | | VTVSS | | GGCGTGGTCCAGCCTGGGAGGTCCCTG | | VVQPGRSLRL | | | |
| | | SLRLSCAA | | | | EWVA | | DSVKG | | NTLYL | | FDS | | | | AGACTCTCCTGTGCAGCCTCTGGAATC | | SCAASGITFS | | | |
| | | SG | | | | | | | | QMNSL | | | | | | ACCTTCAGCACATTTGGAATGCACTGG | | TFGMHWVRQA | | | |
| | | | | | | | | | | RAEDT | | | | | | GTCCGCCAGGCTCCAGGCAAGGGGCTG | | PGKGLEWVAV | | | |
| | | | | | | | | | | AVYYC | | | | | | GAGTGGGTGGCAGTTATATCAAATGAT | | ISNDGGSKHY | | | |
| | | | | | | | | | | | | | | | | GGAGGTAGCAAACACTACAAAGACTCC | | KDSVKGRFTI | | | |
| | | | | | | | | | | | | | | | | GTGAAGGGCCGATTCACCATCTCCAGA | | SRDNAKNTLY | | | |
| | | | | | | | | | | | | | | | | GACAATGCCAAGAACACACTGTATCTG | | LQMNSLRAED | | | |
| | | | | | | | | | | | | | | | | CAAATGAACAGCCTGAGAGCTGAGGAC | | TAVYYCAKEG | | | |
| | | | | | | | | | | | | | | | | ACGGCTGTGTATTACTGTGCGAAAGAG | | PGASGFNYFD | | | |
| | | | | | | | | | | | | | | | | GGGCCCGGGGCTTCGGGATTTAACTAC | | SWGQGTLVTV | | | |
| | | | | | | | | | | | | | | | | TTTGACTCCTGGGGCCAGGGAACCCTG | | SS | | | |
| | | | | | | | | | | | | | | | | GTCACCGTCTCCTCA | | | | | |
| ADI- | IGHV3- | QVQLVQSG | 46 | FTFSSNA | 243 | WVRQA | 437 | GISGRG | 567 | RFTIS | 822 | ATDEVG | 1068 | WGQGTL | 1286 | CAGGTGCAGCTGGTGCAGTCTGGGGGA | 1355 | QVQLVQSGGG | 1638 | | |
| 75570 | 23 | GGLVQPGG | | MS | | PGKGL | | DTTYYA | | RDNSR | | GFTMVQ | | VTVSS | | GGCTTGGTACAGCCTGGGGGGCCCCTG | | LVQPGGPLRL | | | |
| | | PLRLSCAA | | | | EWVS | | DSVKG | | NTLSL | | PEYFHH | | | | AGACTCTCCTGTGCAGCCTCTGGATTC | | SCAASGFTFS | | | |
| | | SG | | | | | | | | QMNSL | | | | | | ACCTTTAGTAGCAATGCCATGAGCTGG | | SNAMSWVRQA | | | |
| | | | | | | | | | | RAEDT | | | | | | GTCCGCCAGGCTCCAGGGAAGGGGCTG | | PGKGLEWVSG | | | |
| | | | | | | | | | | AIYYC | | | | | | GAGTGGGTCTCAGGTATTAGTGGTAGA | | ISGRGDTTYY | | | |
| | | | | | | | | | | | | | | | | GGTGATACCACATACTACGCAGACTCC | | ADSVKGRFTI | | | |
| | | | | | | | | | | | | | | | | GTGAAGGGCCGGTTCACCATCTCCAGA | | SRDNSRNTLS | | | |
| | | | | | | | | | | | | | | | | GACAATTCCAGGAACACGCTGTCTCTG | | LQMNSLRAED | | | |
| | | | | | | | | | | | | | | | | CAGATGAACAGCCTGAGAGCCGAGGAC | | TAIYYCATDE | | | |
| | | | | | | | | | | | | | | | | ACGGCTATATATTACTGTGCGACAGAT | | VGGFTMVQPE | | | |
| | | | | | | | | | | | | | | | | GAAGTAGGGGGATTTACAATGGTTCAG | | YFHHWGQGTL | | | |
| | | | | | | | | | | | | | | | | CCAGAATACTTCCACCACTGGGGCCAG | | VTVSS | | | |
| | | | | | | | | | | | | | | | | GGCACCCTGGTCACCGTCTCCTCA | | | | | |
| ADI- | IGHV3- | QVQLVQSG | 12 | FTFSTYD | 244 | WVRQT | 451 | AIGTAG | 568 | RFTIS | 823 | ARAVES | 1069 | WGQGTT | 1287 | CAGGTCCAGCTGGTGCAGTCTGGGGGA | 1356 | QVQLVQSGGG | 1639 | | |
| 75833 | 13 | GGLVQPGG | | MH | | TGKSL | | DRYYAD | | RENAK | | YNLWAF | | VTVSS | | GGCTTGGTACAGCCTGGGGGGTCCCTG | | LVQPGGSLRL | | | |
| | | SLRLSCAA | | | | EWVS | | SVKG | | NSLYL | | DI | | | | AGACTCTCCTGTGCAGCCTCTGGATTC | | SCAASGFTFS | | | |
| | | SG | | | | | | | | QMNNL | | | | | | ACCTTCAGTACCTACGACATGCACTGG | | TYDMHWVRQT | | | |
| | | | | | | | | | | RAGDT | | | | | | GTCCGCCAAACTACAGGAAAAAGTCTG | | TGKSLEWVSA | | | |
| | | | | | | | | | | AVYHC | | | | | | GAGTGGGTCTCAGCTATTGGTACTGCT | | IGTAGDRYYA | | | |
| | | | | | | | | | | | | | | | | GGTGACAGATACTATGCAGACTCCGTG | | DSVKGRFTIS | | | |
| | | | | | | | | | | | | | | | | AAGGGCCGATTCACCATCTCCAGAGAA | | RENAKNSLYL | | | |
| | | | | | | | | | | | | | | | | AATGCCAAGAACTCCTTGTATCTTCAA | | QMNNLRAGDT | | | |
| | | | | | | | | | | | | | | | | ATGAACAACCTGAGAGCCGGGGACACG | | AVYHCARAVE | | | |
| | | | | | | | | | | | | | | | | GCTGTGTATCACTGTGCAAGAGCGGTC | | SYNLWAFDIW | | | |
| | | | | | | | | | | | | | | | | GAGTCTTATAATTTGTGGGCTTTTGAT | | GQGTTVTVSS | | | |
| | | | | | | | | | | | | | | | | ATCTGGGGCCAAGGGACCACGGTCACC | | | | | |
| | | | | | | | | | | | | | | | | GTCTCCTCA | | | | | |
| ADI- | IGHV4- | QVQLQESG | 21 | APISSSN | 245 | WVRQP | 444 | EIYHTG | 569 | RLTIS | 824 | ARVAGL | 1070 | WGQGTL | 1286 | CAGGTGCAGCTGCAGGAGTCGGGCCCA | 1357 | QVQLQESGPG | 1640 | | |
| 75845 | 4 | PGLVKPSG | | WWS | | PGKGL | | STAYNP | | LDKSN | | FDS | | VTVSS | | GGACTGGTGAAGCCTTCGGGGACCCTG | | LVKPSGTLSL | | | |
| | | TLSLTCAV | | | | EWIG | | SLES | | KQFSL | | | | | | TCCCTCACCTGCGCTGTCTCTGGTGCC | | TCAVSGAPIS | | | |
| | | SG | | | | | | | | MLSSV | | | | | | CCCATCAGCAGTAGTAATTGGTGGAGT | | SSNWWSWVRQ | | | |
| | | | | | | | | | | TAADT | | | | | | TGGGTCCGCCAGCCCCCAGGGAAGGGC | | PPGKGLEWIG | | | |
| | | | | | | | | | | AVYYC | | | | | | CTGGAGTGGATTGGGGAAATCTATCAT | | EIYHTGSTAY | | | |
| | | | | | | | | | | | | | | | | ACTGGGAGCACCGCCTACAACCCGTCC | | NPSLESRLTI | | | |
| | | | | | | | | | | | | | | | | CTCGAGAGTCGACTGACCATATCACTA | | SLDKSNKQFS | | | |
| | | | | | | | | | | | | | | | | GACAAGTCCAACAAGCAATTCTCCCTG | | LMLSSVTAAD | | | |
| | | | | | | | | | | | | | | | | ATGCTGAGCTCTGTGACCGCCGCGGAC | | TAVYYCARVA | | | |
| | | | | | | | | | | | | | | | | ACGGCCGTGTATTACTGTGCGAGAGTA | | GLFDSWGQGT | | | |
| | | | | | | | | | | | | | | | | GCTGGCCTCTTTGACTCCTGGGGTCAG | | LVTVSS | | | |
| | | | | | | | | | | | | | | | | GGAACCCTGGTCACCGTCTCCTCA | | | | | |
| ADI- | IGHV2- | QVQLVESG | 47 | FSLSSPR | 246 | WIRQP | 441 | HIFSND | 570 | RLTIS | 825 | ARNMGL | 1071 | WGQGTL | 1286 | CAGGTGCAGCTGGTGGAGTCTGGTCCT | 1358 | QVQLVESGPV | 1641 | | |
| 75606 | 26 | PVLVKPTE | | MGVS | | PGKAL | | EELFST | | KDTSK | | LEVAGI | | VTVSS | | GTGCTGGTGAAACCCACAGAGACCCTC | | LVKPTETLTL | | | |
| | | TLTLTCAV | | | | EWLA | | SLKS | | SQVVL | | QEGWFD | | | | ACGCTGACCTGCGCCGTCTCTGGGTTC | | TCAVSGFSLS | | | |
| | | SG | | | | | | | | TMTNM | | S | | | | TCACTCAGTAGTCCTAGAATGGGTGTG | | SPRMGVSWIR | | | |
| | | | | | | | | | | GPVDT | | | | | | AGTTGGATCCGTCAGCCCCCAGGGAAG | | QPPGKALEWL | | | |
| | | | | | | | | | | ATYYC | | | | | | GCCCTGGAGTGGCTTGCACACATTTTT | | AHIFSNDEEL | | | |
| | | | | | | | | | | | | | | | | TCGAATGACGAAGAATTGTTCAGTACA | | FSTSLKSRLT | | | |
| | | | | | | | | | | | | | | | | TCTCTGAAGAGCAGGCTCACCATCTCC | | ISKDTSKSQV | | | |
| | | | | | | | | | | | | | | | | AAGGACACCTCCAAAAGCCAGGTGGTC | | VLTMTNMGPV | | | |
| | | | | | | | | | | | | | | | | CTTACCATGACCAACATGGGCCCTGTG | | DTATYYCARN | | | |
| | | | | | | | | | | | | | | | | GACACAGCCACATATTACTGTGCACGG | | MGLLEVAGIQ | | | |
| | | | | | | | | | | | | | | | | AATATGGGTCTTCTGGAAGTGGCTGGA | | EGWFDSWGQG | | | |
| | | | | | | | | | | | | | | | | ATTCAAGAAGGTTGGTTCGACTCCTGG | | TLVTVSS | | | |
| | | | | | | | | | | | | | | | | GGCCAGGGAACCCTGGTCACCGTCTCC | | | | | |
| | | | | | | | | | | | | | | | | TCA | | | | | |
| ADI- | IGHV4- | QVQLQQSG | 44 | GSITNSA | 247 | WVRQS | 452 | EISHSG | 571 | RVTMS | 826 | ARVAGM | 1072 | WGQGTL | 1286 | CAGGTGCAGCTGCAGCAGTCGGGCCCA | 1359 | QVQLQQSGPG | 1642 | | |
| 75568 | 4 | PGLVKPSG | | WWS | | PEKGL | | STNYNP | | VDKSK | | IDY | | VTVSS | | GGACTGGTGAAGCCTTCGGGGACCCTG | | LVKPSGTLSL | | | |
| | | TLSLTCAV | | | | EWIG | | SLKS | | NQFSL | | | | | | TCCCTCACCTGCGCTGTGTCTGGTGGT | | TCAVSGGSIT | | | |
| | | SG | | | | | | | | KLRSV | | | | | | TCCATCACTAATAGTGCCTGGTGGAGT | | NSAWWSWVRQ | | | |
| | | | | | | | | | | TAADT | | | | | | TGGGTCCGCCAGTCCCCAGAAAAGGGG | | SPEKGLEWIG | | | |
| | | | | | | | | | | AVYYC | | | | | | CTGGAGTGGATTGGTGAAATCTCTCAT | | EISHSGSTNY | | | |
| | | | | | | | | | | | | | | | | AGTGGGAGCACCAACTACAACCCGTCC | | NPSLKSRVTM | | | |
| | | | | | | | | | | | | | | | | CTCAAGAGTCGAGTCACCATGTCAGTA | | SVDKSKNQFS | | | |
| | | | | | | | | | | | | | | | | GACAAGTCCAAGAACCAGTTCTCCCTC | | LKLRSVTAAD | | | |
| | | | | | | | | | | | | | | | | AAGTTGAGGTCTGTGACCGCCGCGGAC | | TAVYYCARVA | | | |
| | | | | | | | | | | | | | | | | ACGGCCGTGTATTACTGTGCGCGAGTT | | GMIDYWGQGT | | | |
| | | | | | | | | | | | | | | | | GCGGGGATGATTGACTACTGGGGCCAG | | LVTVSS | | | |
| | | | | | | | | | | | | | | | | GGAACCCTGGTCACCGTCTCCTCA | | | | | |
| ADI- | IGHV3- | PGAAGAVW | 48 | FTFSRFA | 248 | WVRQA | 431 | GISYDG | 572 | RFTIS | 827 | AKEGPG | 1073 | WGQGTL | 1286 | CCAGGTGCAGCTGGTGCAGTCTGGGGG | 1360 | PGAAGAVWGR | 1643 | | |
| 75633 | 30 | GRRGPAGR | | MH | | PGKGL | | ENRYYA | | RDNSK | | ASGFNY | | VTVSS | | AGGCGTGGTCCAGCTGGGAGGTCCCTG | | RGPAGRSLRL | | | |
| | | SLRLSCAA | | | | EWVA | | DSVRG | | NTLYM | | FDY | | | | AGACTCTCCTGTGCAGCCTCTAAATTC | | SCAASKFTFS | | | |
| | | SK | | | | | | | | QMNSL | | | | | | ACCTTCAGTAGGTTTGCCATGCACTGG | | RFAMHWVRQA | | | |
| | | | | | | | | | | RAEDT | | | | | | GTCCGCCAGGCTCCAGGCAAGGGCCTG | | PGKGLEWVAG | | | |
| | | | | | | | | | | AVYYC | | | | | | GAGTGGGTGGCAGGTATCTCATATGAT | | ISYDGENRYY | | | |
| | | | | | | | | | | | | | | | | GGAGAAAATAGATACTATGCAGACTCC | | ADSVRGRFTI | | | |
| | | | | | | | | | | | | | | | | GTGAGGGGCCGATTCACCATCTCCAGA | | SRDNSKNTLY | | | |
| | | | | | | | | | | | | | | | | GACAATTCCAAGAACACGCTGTACATG | | MQMNSLRAED | | | |
| | | | | | | | | | | | | | | | | CAAATGAACAGCCTGAGAGCTGAGGAC | | TAVYYCAKEG | | | |
| | | | | | | | | | | | | | | | | ACGGCTGTCTATTACTGTGCGAAAGAG | | PGASGFNYFD | | | |
| | | | | | | | | | | | | | | | | GGGCCCGGGGCTTCGGGCTTTAACTAC | | YWGQGTLVTV | | | |
| | | | | | | | | | | | | | | | | TTTGACTACTGGGGCCAGGGAACCCTG | | SS | | | |
| | | | | | | | | | | | | | | | | GTCACCGTCTCCTCA | | | | | |
| ADI- | IGHV4- | QVQLQQRG | 49 | DFLRGSY | 249 | WIRQP | 445 | EISQSG | 573 | RLSIS | 828 | ARGRGY | 1074 | WGQGAL | 1285 | CAGGTGCAGCTGCAGCAACGGGGCGCG | 1361 | QVQLQQRGAG | 1644 | | |
| 75617 | 34 | AGLLKPSE | | WA | | PGKGL | | GVNSNP | | IDTSK | | GSGSDS | | VTVSS | | GGACTGTTGAAGCCCTCGGAGACCCTG | | LLKPSETLSL | | | |
| | | TLSLTCAV | | | | EWIG | | SLKS | | SHFSL | | FDD | | | | TCCCTCACCTGCGCTGTCTCTGGTGAT | | TCAVSGDFLR | | | |
| | | SG | | | | | | | | KLKSV | | | | | | TTCTTAAGAGGTTCTTACTGGGCCTGG | | GSYWAWIRQP | | | |
| | | | | | | | | | | TAADT | | | | | | ATCCGCCAGCCCCCCGGGAAGGGGCTG | | PGKGLEWIGE | | | |
| | | | | | | | | | | AIYYC | | | | | | GAGTGGATTGGAGAAATCAGTCAGAGT | | ISQSGGVNSN | | | |
| | | | | | | | | | | | | | | | | GGTGGAGTCAATTCCAACCCGTCCCTC | | PSLKSRLSIS | | | |
| | | | | | | | | | | | | | | | | AAGAGTCGACTCTCCATATCAATAGAC | | IDTSKSHFSL | | | |
| | | | | | | | | | | | | | | | | ACGTCCAAGAGTCACTTCTCCCTGAAG | | KLKSVTAADT | | | |
| | | | | | | | | | | | | | | | | TTGAAGTCTGTGACCGCCGCGGACACG | | AIYYCARGRG | | | |
| | | | | | | | | | | | | | | | | GCTATCTATTACTGTGCGAGAGGCCGC | | YGSGSDSFDD | | | |
| | | | | | | | | | | | | | | | | GGTTACGGATCAGGGAGTGACTCCTTT | | WGQGALVTVS | | | |
| | | | | | | | | | | | | | | | | GACGACTGGGGCCAGGGAGCCCTGGTC | | S | | | |
| | | | | | | | | | | | | | | | | ACCGTCTCCTCA | | | | | |
| ADI- | IGHV3- | QVQLVQSG | 10 | FSFSTYV | 250 | WVRQA | 431 | VISSDG | 574 | RFTIS | 829 | ARDGGF | 1075 | WGQGTT | 1287 | CAGGTGCAGCTGGTGCAGTCTGGGGGA | 1362 | QVQLVQSGGG | 1645 | | |
| 75579 | 30 | GGVVQPGR | | MH | | PGKGL | | TAKFHA | | RDNSK | | HSGRLP | | VTVSS | | GGCGTGGTCCAGCCTGGGAGGTCCCTG | | VVQPGRSLRL | | | |
| | | SLRLSCAA | | | | EWVA | | DSVKG | | NTLYL | | VDAFDI | | | | AGACTCTCCTGTGCAGCCTCTGGATTC | | SCAASGFSFS | | | |
| | | SG | | | | | | | | EMNSL | | | | | | AGCTTCAGTACCTATGTTATGCACTGG | | TYVMHWVRQA | | | |
| | | | | | | | | | | RAEDT | | | | | | GTCCGCCAGGCTCCAGGCAAGGGGCTG | | PGKGLEWVAV | | | |
| | | | | | | | | | | AVFYC | | | | | | GAGTGGGTGGCAGTTATCTCATCTGAT | | ISSDGTAKFH | | | |
| | | | | | | | | | | | | | | | | GGAACCGCTAAATTCCACGCAGACTCC | | ADSVKGRFTI | | | |
| | | | | | | | | | | | | | | | | GTGAAGGGCCGATTCACCATCTCCAGA | | SRDNSKNTLY | | | |
| | | | | | | | | | | | | | | | | GACAATTCCAAGAACACGCTCTATCTA | | LEMNSLRAED | | | |
| | | | | | | | | | | | | | | | | GAAATGAACAGCCTGAGAGCTGAGGAC | | TAVFYCARDG | | | |
| | | | | | | | | | | | | | | | | ACGGCTGTGTTTTACTGTGCGAGAGAT | | GFHSGRLPVD | | | |
| | | | | | | | | | | | | | | | | GGAGGTTTCCACTCTGGGAGGCTCCCT | | AFDIWGQGTT | | | |
| | | | | | | | | | | | | | | | | GTCGATGCTTTTGATATCTGGGGCCAA | | VTVSS | | | |
| | | | | | | | | | | | | | | | | GGGACCACGGTCACCGTCTCCTCA | | | | | |
| ADI- | IGHV1- | QVQLVQSG | 50 | GTFSTYA | 251 | WVRQA | 453 | RIIPVV | 575 | RVTIT | 830 | ARAPLE | 1076 | WGQGTL | 1286 | CAGGTCCAGCTTGTACAGTCTGGGGCT | 1363 | QVQLVQSGAE | 1646 | | |
| 75807 | 69 | AEVKKPGS | | FN | | PGQGL | | NIVNYA | | ADKST | | VGEYGD | | VTVSS | | GAGGTGAAGAAGCCTGGGTCCTCGGTG | | VKKPGSSVKV | | | |
| | | SVKVSCKA | | | | DWMG | | QKFQG | | STAYM | | LMGWFD | | | | AAGGTCTCCTGCAAGGCTTCTGGAGGC | | SCKASGGTFS | | | |
| | | SG | | | | | | | | ELSSL | | P | | | | ACCTTCAGCACCTATGCTTTCAACTGG | | TYAFNWVRQA | | | |
| | | | | | | | | | | RSDDT | | | | | | GTGCGACAGGCCCCTGGACAAGGGCTT | | PGQGLDWMGR | | | |
| | | | | | | | | | | AVYYC | | | | | | GACTGGATGGGAAGGATCATCCCTGTC | | IIPVVNIVNY | | | |
| | | | | | | | | | | | | | | | | GTGAATATAGTAAACTACGCACAGAAG | | AQKFQGRVTI | | | |
| | | | | | | | | | | | | | | | | TTCCAGGGCAGAGTCACGATTACCGCG | | TADKSTSTAY | | | |
| | | | | | | | | | | | | | | | | GACAAATCCACGAGCACTGCCTACATG | | MELSSLRSDD | | | |
| | | | | | | | | | | | | | | | | GAGCTGAGCAGCCTGAGATCTGACGAC | | TAVYYCARAP | | | |
| | | | | | | | | | | | | | | | | ACGGCCGTTTATTACTGTGCGAGAGCG | | LEVGEYGDLM | | | |
| | | | | | | | | | | | | | | | | CCCCTGGAAGTCGGTGAATATGGTGAC | | GWFDPWGQGT | | | |
| | | | | | | | | | | | | | | | | TTAATGGGCTGGTTCGACCCCTGGGGC | | LVTVSS | | | |
| | | | | | | | | | | | | | | | | CAGGGAACCCTGGTCACCGTCTCCTCA | | | | | |
| ADI- | IGHV3- | EVQLVESG | 51 | FTFRNYA | 223 | WVRQA | 443 | GVSRNG | 546 | RFTIS | 831 | VKDLGQ | 1047 | WGQGTT | 1287 | GAGGTGCAGCTGGTGGAGTCTGGGGGA | 1364 | EVQLVESGGG | 1647 | | |
| 75780 | 64D | GGLVQPGG | | MH | | PGKGL | | DIADYT | | RDNSK | | QWYDAF | | VTVSS | | GGCTTGGTCCAGCCTGGGGGGTCCCTG | | LVQPGGSLRL | | | |
| | | SLRLSCSA | | | | EYVS | | DSVKG | | NMVYL | | DI | | | | AGACTCTCCTGTTCAGCCTCTGGATTC | | SCSASGFTFR | | | |
| | | SG | | | | | | | | QMSSL | | | | | | ACCTTCAGAAACTATGCTATGCACTGG | | NYAMHWVRQA | | | |
| | | | | | | | | | | RSEDT | | | | | | GTCCGCCAGGCTCCAGGGAAGGGACTG | | PGKGLEYVSG | | | |
| | | | | | | | | | | ALYYC | | | | | | GAGTATGTTTCAGGTGTTAGTCGTAAT | | VSRNGDIADY | | | |
| | | | | | | | | | | | | | | | | GGGGATATCGCAGACTATACAGACTCA | | TDSVKGRFTI | | | |
| | | | | | | | | | | | | | | | | GTGAAGGGCAGATTCACCATCTCCAGA | | SRDNSKNMVY | | | |
| | | | | | | | | | | | | | | | | GACAATTCCAAGAATATGGTGTATCTT | | LQMSSLRSED | | | |
| | | | | | | | | | | | | | | | | CAAATGAGCAGTCTGAGAAGTGAGGAC | | TALYYCVKDL | | | |
| | | | | | | | | | | | | | | | | ACGGCTCTGTATTACTGTGTGAAAGAT | | GQQWYDAFDI | | | |
| | | | | | | | | | | | | | | | | CTCGGGCAGCAGTGGTATGATGCTTTT | | WGQGTTVTVS | | | |
| | | | | | | | | | | | | | | | | GATATCTGGGGCCAAGGGACAACGGTC | | S | | | |
| | | | | | | | | | | | | | | | | ACCGTCTCCTCA | | | | | |
| ADI- | IGHV1- | QVQLVQSG | 52 | GTFSSYT | 252 | WVRQA | 433 | RIIPIL | 576 | RVTIT | 832 | AREAGY | 1077 | WGRGTL | 1288 | CAGGTCCAGCTGGTGCAGTCTGGGGCT | 1365 | QVQLVQSGAE | 1648 | | |
| 75748 | 69 | AEVKKPGS | | IT | | PGQGL | | GLANYA | | ADKST | | SSSSSS | | VTVSS | | GAGGTGAAGAAGCCTGGGTCCTCGATG | | VKKPGSSMKV | | | |
| | | SMKVSCKA | | | | EWMG | | QKFQG | | STAYM | | WYFDL | | | | AAGGTCTCCTGTAAGGCTTCTGGAGGC | | SCKASGGTFS | | | |
| | | SG | | | | | | | | ELSSL | | | | | | ACCTTCAGCAGCTATACTATCACCTGG | | SYTITWVRQA | | | |
| | | | | | | | | | | RSEDT | | | | | | GTGCGACAGGCCCCTGGACAAGGGCTT | | PGQGLEWMGR | | | |
| | | | | | | | | | | AVYYC | | | | | | GAGTGGATGGGAAGGATCATCCCTATC | | IIPILGLANY | | | |
| | | | | | | | | | | | | | | | | CTTGGTCTAGCAAACTACGCACAGAAG | | AQKFQGRVTI | | | |
| | | | | | | | | | | | | | | | | TTCCAGGGCAGAGTCACGATTACCGCG | | TADKSTSTAY | | | |
| | | | | | | | | | | | | | | | | GACAAATCCACGAGCACAGCCTACATG | | MELSSLRSED | | | |
| | | | | | | | | | | | | | | | | GAGCTGAGCAGCCTGAGATCTGAGGAC | | TAVYYCAREA | | | |
| | | | | | | | | | | | | | | | | ACGGCCGTGTATTACTGTGCGAGAGAG | | GYSSSSSSWY | | | |
| | | | | | | | | | | | | | | | | GCGGGGTATAGTAGCTCGTCGAGTAGC | | FDLWGRGTLV | | | |
| | | | | | | | | | | | | | | | | TGGTACTTCGATCTCTGGGGCCGTGGC | | TVSS | | | |
| | | | | | | | | | | | | | | | | ACCCTGGTCACCGTCTCCTCA | | | | | |
| ADI- | IGHV1- | QVQLVQSG | 53 | YTFTKYY | 253 | WVRQA | 433 | GINPSG | 577 | RVTMT | 833 | ARADFS | 1078 | WGQGTL | 1286 | CAGGTCCAGCTGGTGCAGTCTGGGGCT | 1366 | QVQLVQSGAE | 1649 | | |
| 75820 | 46 | AEVKKPGA | | IH | | PGQGL | | GSTDYA | | SDTST | | DSVVWA | | VTVSS | | GAGGTGAAGAAGCCTGGGGCCTCAGTG | | VKKPGASVKV | | | |
| | | SVKVPCKA | | | | EWMG | | QKFQG | | STVYM | | VSYFFD | | | | AAGGTTCCCTGCAAGGCATCTGGATAC | | PCKASGYTFT | | | |
| | | SG | | | | | | | | ELSSL | | S | | | | ACCTTCACCAAATACTATATACACTGG | | KYYIHWVRQA | | | |
| | | | | | | | | | | RSEDT | | | | | | GTGCGACAGGCCCCTGGACAAGGGCTT | | PGQGLEWMGG | | | |
| | | | | | | | | | | AVYFC | | | | | | GAGTGGATGGGAGGAATCAACCCCAGT | | INPSGGSTDY | | | |
| | | | | | | | | | | | | | | | | GGTGGTAGCACAGACTACGCACAGAAG | | AQKFQGRVTM | | | |
| | | | | | | | | | | | | | | | | TTCCAGGGCAGAGTCACCATGACCAGC | | TSDTSTSTVY | | | |
| | | | | | | | | | | | | | | | | GACACGTCCACGAGCACAGTCTACATG | | MELSSLRSED | | | |
| | | | | | | | | | | | | | | | | GAACTGAGCAGCCTGAGATCTGAGGAC | | TAVYFCARAD | | | |
| | | | | | | | | | | | | | | | | ACGGCCGTATATTTCTGTGCGAGAGCC | | FSDSVVWAVS | | | |
| | | | | | | | | | | | | | | | | GACTTTAGCGATTCCGTCGTCTGGGCA | | YFFDSWGQGT | | | |
| | | | | | | | | | | | | | | | | GTCTCCTACTTCTTTGACTCCTGGGGC | | LVTVSS | | | |
| | | | | | | | | | | | | | | | | CAGGGAACCCTGGTCACCGTCTCCTCA | | | | | |
| ADI- | IGHV1- | QVQLVQSG | 54 | YTFTGYY | 254 | WVRQA | 433 | RINPNS | 578 | RVTMT | 834 | ARALGC | 1079 | WGQGTL | 1286 | CAGGTGCAGCTGGTGCAGTCTGGGGCT | 1367 | QVQLVQSGAE | 1650 | | |
| 75612 | 2 | AEVKKPGA | | IH | | PGQGL | | GGTNYA | | RDTSV | | SDDNCY | | VTVSS | | GAGGTGAAGAAGCCTGGGGCCTCAGTG | | VKKPGASVNV | | | |
| | | SVNVSCKA | | | | EWMG | | QKFQG | | STAYM | | GRRDY | | | | AACGTCTCCTGCAAGGCTTCTGGATAC | | SCKASGYTFT | | | |
| | | SG | | | | | | | | ELRRL | | | | | | ACCTTCACCGGCTACTATATCCACTGG | | GYYIHWVRQA | | | |
| | | | | | | | | | | TSDDT | | | | | | GTGCGACAGGCCCCTGGACAAGGGCTT | | PGQGLEWMGR | | | |
| | | | | | | | | | | AVYYC | | | | | | GAGTGGATGGGACGGATCAACCCTAAC | | INPNSGGTNY | | | |
| | | | | | | | | | | | | | | | | AGTGGTGGCACAAACTATGCACAGAAG | | AQKFQGRVTM | | | |
| | | | | | | | | | | | | | | | | TTTCAGGGCAGGGTCACCATGACCAGG | | TRDTSVSTAY | | | |
| | | | | | | | | | | | | | | | | GACACGTCCGTCAGCACAGCCTACATG | | MELRRLTSDD | | | |
| | | | | | | | | | | | | | | | | GAGCTGCGCAGGCTGACATCTGACGAC | | TAVYYCARAL | | | |
| | | | | | | | | | | | | | | | | ACGGCCGTATATTACTGTGCGAGAGCC | | GCSDDNCYGR | | | |
| | | | | | | | | | | | | | | | | CTAGGTTGTAGTGATGATAACTGCTAC | | RDYWGQGTLV | | | |
| | | | | | | | | | | | | | | | | GGACGAAGGGACTACTGGGGCCAGGGA | | TVSS | | | |
| | | | | | | | | | | | | | | | | ACCCTGGTCACCGTCTCCTCA | | | | | |
| ADI- | IGHV3- | QVQLVQSG | 55 | FSFSNYA | 234 | WVRQA | 437 | GISGRG | 579 | RFTVS | 835 | AKDQEG | 1080 | WGQGTL | 1286 | CAGGTGCAGCTGGTGCAGTCTGGGGGA | 1368 | QVQLVQSGGD | 1651 | EVQLVESG | 1873 |
| 75696 | 23 | GDLVQPGG | | MS | | PGKGL | | DRTYYA | | RDNSK | | GFTMVQ | | VTVSS | | GACTTGGTACAGCCTGGGGGGTCCCTG | | LVQPGGSLRL | | GDLVQPGG | |
| | | SLRLSCTA | | | | EWVS | | DSVKG | | NRLYL | | PEYFHY | | | | AGACTCTCCTGTACAGCCTCTGGATTC | | SCTASGFSFS | | SLRLSCTA | |
| | | SG | | | | | | | | QMNSL | | | | | | AGTTTTAGCAACTATGCCATGAGCTGG | | NYAMSWVRQA | | SGFSFSNY | |
| | | | | | | | | | | TDEDT | | | | | | GTCCGCCAGGCTCCAGGGAAGGGGCTG | | PGKGLEWVSG | | AMSWVRQA | |
| | | | | | | | | | | AIYYC | | | | | | GAGTGGGTCTCAGGTATTAGTGGTCGT | | ISGRGDRTYY | | PGKGLEWV | |
| | | | | | | | | | | | | | | | | GGTGATAGGACATACTACGCAGACTCC | | ADSVKGRFTV | | SGISGRGD | |
| | | | | | | | | | | | | | | | | GTGAAGGGCCGGTTCACCGTCTCCAGA | | SRDNSKNRLY | | RTYYADSV | |
| | | | | | | | | | | | | | | | | GACAATTCCAAGAACAGGCTGTATCTG | | LQMNSLTDED | | KGRFTVSR | |
| | | | | | | | | | | | | | | | | CAAATGAATAGCCTGACAGACGAAGAC | | TAIYYCAKDQ | | DNSKNRLY | |
| | | | | | | | | | | | | | | | | ACGGCCATATATTACTGTGCAAAAGAT | | EGGFTMVQPE | | LQMNSLTD | |
| | | | | | | | | | | | | | | | | CAAGAAGGGGGGTTTACTATGGTTCAG | | YFHYWGQGTL | | EDTAIYYC | |
| | | | | | | | | | | | | | | | | CCAGAATACTTCCACTACTGGGGCCAG | | VTVSS | | AKDQEGGF | |
| | | | | | | | | | | | | | | | | GGCACCCTGGTCACCGTCTCCTCA | | | | TMVQPEYF | |
| | | | | | | | | | | | | | | | | | | | | HYWGQGTL | |
| | | | | | | | | | | | | | | | | | | | | VTVSS | |
| ADI- | IGHV4- | QVQLQQSG | 56 | GSVSSGS | 255 | WIRQH | 450 | NIFYNG | 580 | RVIIS | 836 | ARSPGG | 1081 | WGQGTL | 1286 | CAGGTGCAGCTGCAGCAGTCGGGCCCA | 1369 | QVQLQQSGPG | 1652 | | |
| 75571 | 31 | PGLVKPSQ | | NYWS | | PGKGL | | KTYYNP | | LNTSK | | LFDF | | VTVSS | | GGACTGGTGAAGCCTTCACAGACCCTG | | LVKPSQTLSL | | | |
| | | TLSLTCTV | | | | EWIG | | SLKS | | NHFSL | | | | | | TCCCTCACCTGCACTGTCTCTGGTGGC | | TCTVSGGSVS | | | |
| | | SG | | | | | | | | ELNSV | | | | | | TCCGTCAGCAGTGGTAGTAACTACTGG | | SGSNYWSWIR | | | |
| | | | | | | | | | | TAADT | | | | | | AGCTGGATCCGCCAGCACCCAGGGAAG | | QHPGKGLEWI | | | |
| | | | | | | | | | | AVYYC | | | | | | GGCCTGGAGTGGATTGGGAACATCTTT | | GNIFYNGKTY | | | |
| | | | | | | | | | | | | | | | | TACAATGGGAAAACCTACTACAACCCG | | YNPSLKSRVI | | | |
| | | | | | | | | | | | | | | | | TCCCTAAAGAGTCGAGTTATCATATCA | | ISLNTSKNHF | | | |
| | | | | | | | | | | | | | | | | CTAAATACGTCTAAGAACCACTTCTCC | | SLELNSVTAA | | | |
| | | | | | | | | | | | | | | | | CTGGAGCTGAACTCTGTGACTGCCGCG | | DTAVYYCARS | | | |
| | | | | | | | | | | | | | | | | GACACGGCCGTTTATTACTGTGCGAGG | | PGGLFDFWGQ | | | |
| | | | | | | | | | | | | | | | | TCCCCTGGGGGATTATTTGACTTCTGG | | GTLVTVSS | | | |
| | | | | | | | | | | | | | | | | GGCCAGGGAACCCTGGTCACCGTCTCC | | | | | |
| | | | | | | | | | | | | | | | | TCA | | | | | |
| ADI- | IGHV3- | QVQLVQSG | 57 | FAFDAYD | 256 | WVRQV | 454 | LISRDG | 581 | RFTIS | 837 | VKDISA | 1082 | WGQGTL | 1286 | CAGGTGCAGCTGGTACAGTCTGGGGGA | 1370 | QVQLVQSGGG | 1653 | | |
| 75766 | 43 | GGVVQPGG | | MH | | PEKGL | | GGTFYA | | RDNSK | | DTSMVP | | VTVSS | | GGCGTGGTACAGCCTGGGGGGTCCCTG | | VVQPGGSLRL | | | |
| | | SLRLSCAA | | | | EWIS | | DSMKG | | NSLYL | | VFAH | | | | AGACTCTCCTGTGCAGCCTCTGGATTC | | SCAASGFAFD | | | |
| | | SG | | | | | | | | QMNSL | | | | | | GCCTTTGATGCTTATGACATGCACTGG | | AYDMHWVRQV | | | |
| | | | | | | | | | | RTEDT | | | | | | GTCCGTCAAGTTCCAGAGAAGGGTCTG | | PEKGLEWISL | | | |
| | | | | | | | | | | ALYYC | | | | | | GAGTGGATCTCTCTTATTAGTAGGGAT | | ISRDGGGTFY | | | |
| | | | | | | | | | | | | | | | | GGTGGTGGCACATTCTATGCAGACTCT | | ADSMKGRFTI | | | |
| | | | | | | | | | | | | | | | | ATGAAGGGCCGATTCACCATCTCCAGA | | SRDNSKNSLY | | | |
| | | | | | | | | | | | | | | | | GACAACAGCAAAAACTCCCTGTATTTG | | LQMNSLRTED | | | |
| | | | | | | | | | | | | | | | | CAAATGAACAGTCTGAGAACTGAGGAC | | TALYYCVKDI | | | |
| | | | | | | | | | | | | | | | | ACCGCCTTGTATTACTGTGTAAAAGAT | | SADTSMVPVF | | | |
| | | | | | | | | | | | | | | | | ATTTCCGCGGATACTTCTATGGTACCG | | AHWGQGTLVT | | | |
| | | | | | | | | | | | | | | | | GTCTTTGCTCACTGGGGCCAGGGAACC | | VSS | | | |
| | | | | | | | | | | | | | | | | CTGGTCACCGTCTCCTCA | | | | | |
| ADI- | IGHV4- | QVQLQQSG | 44 | GSISGIN | 257 | WVRQS | 455 | EISQSG | 582 | RVTIS | 838 | ARVSGF | 1083 | WGQGTL | 1286 | CAGGTGCAGCTGCAGCAGTCGGGCCCA | 1371 | QVQLQQSGPG | 1654 | | |
| 75635 | 4 | PGLVKPSG | | WWS | | PRQGL | | STYYNP | | VDKSK | | FDS | | VTVSS | | GGACTGGTGAAGCCTTCGGGGACCCTG | | LVKPSGTLSL | | | |
| | | TLSLTCAV | | | | EWIG | | SLKS | | NQFSL | | | | | | TCCCTCACCTGCGCTGTCTCTGGTGGC | | TCAVSGGSIS | | | |
| | | SG | | | | | | | | KLTSV | | | | | | TCCATCAGTGGTATAAACTGGTGGAGT | | GINWWSWVRQ | | | |
| | | | | | | | | | | TAADT | | | | | | TGGGTCCGCCAGTCCCCACGGCAGGGG | | SPRQGLEWIG | | | |
| | | | | | | | | | | AIYYC | | | | | | CTGGAGTGGATTGGGGAAATCTCTCAG | | EISQSGSTYY | | | |
| | | | | | | | | | | | | | | | | AGTGGGAGCACCTACTACAACCCGTCT | | NPSLKSRVTI | | | |
| | | | | | | | | | | | | | | | | CTCAAAAGTCGAGTCACCATATCAGTA | | SVDKSKNQFS | | | |
| | | | | | | | | | | | | | | | | GACAAGTCTAAGAACCAGTTCTCCCTG | | LKLTSVTAAD | | | |
| | | | | | | | | | | | | | | | | AAGCTGACCTCTGTGACCGCCGCGGAC | | TAIYYCARVS | | | |
| | | | | | | | | | | | | | | | | ACGGCCATATATTACTGTGCGAGAGTC | | GFFDSWGQGT | | | |
| | | | | | | | | | | | | | | | | AGCGGGTTTTTTGACTCCTGGGGCCAG | | LVTVSS | | | |
| | | | | | | | | | | | | | | | | GGAACCCTGGTCACCGTCTCCTCA | | | | | |
| ADI- | IGHV2- | RCPLKESG | 58 | FSLNTGG | 258 | WIRQP | 441 | LIYWDG | 583 | RLTIT | 839 | ARHGIP | 1084 | WGQGTL | 1286 | AGGTGCCCGTTGAAGGAGTCTGGTCCT | 1372 | RCPLKESGPT | 1655 | QITLKESG | 1874 |
| 75864 | 5 | PTVVKPTQ | | VGVG | | PGKAL | | DQRYSP | | KDTSK | | TIFDY | | VTVSS | | ACGGTGGTTAAACCCACACAGACCCTC | | VVKPTQTLTL | | PTVVKPTQ | |
| | | TLTLTCTF | | | | EWLA | | SLNT | | NQVVL | | | | | | ACGCTGACCTGCACCTTCTCTGGGTTC | | TCTFSGFSLN | | TLTLTCTF | |
| | | SG | | | | | | | | TMTNM | | | | | | TCACTCAACACTGGTGGAGTGGGTGTG | | TGGVGVGWIR | | SGFSLNTG | |
| | | | | | | | | | | DPVDT | | | | | | GGCTGGATCCGTCAGCCCCCAGGAAAG | | QPPGKALEWL | | GVGVGWIR | |
| | | | | | | | | | | ATYFC | | | | | | GCCCTGGAGTGGCTTGCGCTCATTTAT | | ALIYWDGDQR | | QPPGKALE | |
| | | | | | | | | | | | | | | | | TGGGATGGTGATCAGCGCTACAGCCCA | | YSPSLNTRLT | | WLALIYWD | |
| | | | | | | | | | | | | | | | | TCTCTGAATACCAGACTCACCATCACC | | ITKDTSKNQV | | GDQRYSPS | |
| | | | | | | | | | | | | | | | | AAGGACACCTCCAAAAACCAGGTAGTC | | VLTMTNMDPV | | LNTRLTIT | |
| | | | | | | | | | | | | | | | | CTTACAATGACCAACATGGACCCTGTG | | DTATYFCARH | | KDTSKNQV | |
| | | | | | | | | | | | | | | | | GACACAGCCACATATTTCTGTGCACGC | | GIPTIFDYWG | | VLTMTNMD | |
| | | | | | | | | | | | | | | | | CATGGCATTCCTACAATTTTTGATTAC | | QGTLVTVSS | | PVDTATYF | |
| | | | | | | | | | | | | | | | | TGGGGCCAGGGAACCCTGGTCACCGTC | | | | CARHGIPT | |
| | | | | | | | | | | | | | | | | TCCTCA | | | | IFDYWGQG | |
| | | | | | | | | | | | | | | | | | | | | TLVTVSS | |
| ADI- | IGHV1- | QVQLVQSG | 59 | YSFTSYS | 259 | WVRQA | 433 | IINPGG | 584 | RVTVT | 840 | ARTRIS | 1085 | WGQGTL | 1286 | CAGGTGCAGCTGGTGCAGTCTGGGGCT | 1373 | QVQLVQSGAE | 1656 | | |
| 75877 | 46 | AEVRKPGA | | MH | | PGQGL | | GSTGYA | | RDTST | | PATDYF | | VTVSS | | GAGGTGAGGAAGCCTGGGGCCTCAGTG | | VRKPGASVKV | | | |
| | | SVKVSCEA | | | | EWMG | | QKFQG | | STVYM | | DK | | | | AAAGTTTCCTGCGAGGCATCTGGATAC | | SCEASGYSFT | | | |
| | | SG | | | | | | | | ELSSL | | | | | | AGCTTCACCAGCTATTCTATGCACTGG | | SYSMHWVRQA | | | |
| | | | | | | | | | | RSEDT | | | | | | GTGCGCCAGGCCCCTGGACAAGGACTT | | PGQGLEWMGI | | | |
| | | | | | | | | | | AMYYC | | | | | | GAGTGGATGGGTATAATCAACCCTGGT | | INPGGGSTGY | | | |
| | | | | | | | | | | | | | | | | GGTGGTAGCACAGGCTACGCACAGAAG | | AQKFQGRVTV | | | |
| | | | | | | | | | | | | | | | | TTCCAGGGCAGAGTCACCGTGACCAGG | | TRDTSTSTVY | | | |
| | | | | | | | | | | | | | | | | GACACGTCCACGAGCACAGTCTACATG | | MELSSLRSED | | | |
| | | | | | | | | | | | | | | | | GAACTGAGCAGCCTGAGATCTGAGGAC | | TAMYYCARTR | | | |
| | | | | | | | | | | | | | | | | ACGGCCATGTATTACTGTGCGAGAACC | | ISPATDYFDK | | | |
| | | | | | | | | | | | | | | | | CGCATATCACCAGCCACGGACTACTTT | | WGQGTLVTVS | | | |
| | | | | | | | | | | | | | | | | GACAAGTGGGGCCAGGGAACCCTGGTC | | S | | | |
| | | | | | | | | | | | | | | | | ACCGTCTCCTCA | | | | | |
| ADI- | IGHV3- | QVQLVESG | 30 | FIVSSNY | 260 | WVRQA | 437 | TIFSGG | 585 | RFIIS | 841 | VRDGLY | 1086 | WGQGTL | 1286 | CAGGTCCAGCTGGTGGAGTCTGGAGGA | 1374 | QVQLVESGGG | 1657 | | |
| 75827 | 53 | GGLIQPGG | | MS | | PGKGL | | STFYAD | | RDNSK | | VGVAD | | VTVSS | | GGCTTGATCCAGCCTGGGGGGTCCCTG | | LIQPGGSLRL | | | |
| | | SLRLSCAA | | | | EWVS | | SVKG | | NTLYL | | | | | | AGACTCTCCTGTGCAGCCTCTGGATTC | | SCAASGFIVS | | | |
| | | SG | | | | | | | | QMTSL | | | | | | ATCGTCAGTAGCAACTACATGAGCTGG | | SNYMSWVRQA | | | |
| | | | | | | | | | | RAGDT | | | | | | GTCCGCCAGGCTCCAGGGAAGGGGCTG | | PGKGLEWVST | | | |
| | | | | | | | | | | AVYYC | | | | | | GAGTGGGTCTCAACCATTTTTAGCGGT | | IFSGGSTFYA | | | |
| | | | | | | | | | | | | | | | | GGAAGCACGTTCTACGCAGACTCCGTG | | DSVKGRFIIS | | | |
| | | | | | | | | | | | | | | | | AAGGGCCGATTCATCATCTCCAGAGAC | | RDNSKNTLYL | | | |
| | | | | | | | | | | | | | | | | AATTCCAAGAACACGCTGTATCTTCAA | | QMTSLRAGDT | | | |
| | | | | | | | | | | | | | | | | ATGACCAGCCTGAGAGCCGGGGACACG | | AVYYCVRDGL | | | |
| | | | | | | | | | | | | | | | | GCCGTATATTATTGTGTGAGAGATGGA | | YVGVADWGQG | | | |
| | | | | | | | | | | | | | | | | CTATATGTGGGGGTGGCGGACTGGGGC | | TLVTVSS | | | |
| | | | | | | | | | | | | | | | | CAGGGAACCCTGGTCACCGTCTCCTCA | | | | | |
| ADI- | IGHV3- | QVQLVQSG | 60 | FIFSDYS | 227 | WVRQA | 447 | GISSTG | 550 | RFTIS | 842 | VKDIGS | 1051 | WGQGTT | 1287 | CAGGTGCAGCTGGTGCAGTCTGGGGGA | 1375 | QVQLVQSGGA | 1658 | | |
| 75683 | 64D | GALVQPGG | | MH | | PGKGL | | DITDYA | | RDNSK | | WKYFDV | | VTVSS | | GCCTTGGTCCAGCCTGGGGGGTCCCTG | | LVQPGGSLSL | | | |
| | | SLSLSCLV | | | | DYVS | | DSVKD | | NMLYL | | FDV | | | | AGCCTCTCCTGTTTAGTCTCTGGATTC | | SCLVSGFIFS | | | |
| | | SG | | | | | | | | QMSSL | | | | | | ATCTTCAGTGACTATTCTATGCACTGG | | DYSMHWVRQA | | | |
| | | | | | | | | | | RVEDT | | | | | | GTCCGCCAGGCTCCAGGGAAGGGACTG | | PGKGLDYVSG | | | |
| | | | | | | | | | | AVYYC | | | | | | GATTATGTTTCAGGTATTAGTAGTACA | | ISSTGDITDY | | | |
| | | | | | | | | | | | | | | | | GGGGATATCACAGACTACGCAGACTCA | | ADSVKDRFTI | | | |
| | | | | | | | | | | | | | | | | GTGAAGGACAGATTCACCATCTCCAGA | | SRDNSKNMLY | | | |
| | | | | | | | | | | | | | | | | GACAATTCCAAGAACATGCTGTATCTT | | LQMSSLRVED | | | |
| | | | | | | | | | | | | | | | | CAAATGAGCAGTTTGAGAGTTGAGGAC | | TAVYYCVKDI | | | |
| | | | | | | | | | | | | | | | | ACGGCTGTGTATTATTGTGTGAAAGAT | | GSWKYFDVFD | | | |
| | | | | | | | | | | | | | | | | ATTGGGAGCTGGAAGTACTTTGATGTT | | VWGQGTTVTV | | | |
| | | | | | | | | | | | | | | | | TTTGATGTCTGGGGCCAAGGGACCACG | | SS | | | |
| | | | | | | | | | | | | | | | | GTCACCGTCTCCTCA | | | | | |
| ADI- | IGHV4- | QVQLQESG | 61 | GSISTSY | 261 | WVRQP | 444 | EIYQSG | 586 | RVTIS | 843 | VRDRSL | 1087 | WGKGTT | 1291 | CAGGTGCAGCTGCAGGAGTCGGGCCCA | 1376 | QVQLQESGPG | 1659 | | |
| 75776 | 4 | PGLVKPSG | | WWS | | PGKGL | | STNYNP | | VDRSK | | YCSNGN | | VTVSS | | GGACTGGTGAAGCCTTCGGGGACCCTG | | LVKPSGTLSL | | | |
| | | TLSLTCDV | | | | EWIG | | SLKS | | NQFSL | | CPHMDV | | | | TCCCTCACCTGCGATGTCTCTGGTGGC | | TCDVSGGSIS | | | |
| | | SG | | | | | | | | KLSSV | | | | | | TCCATCAGCACTAGTTACTGGTGGAGC | | TSYWWSWVRQ | | | |
| | | | | | | | | | | TAADT | | | | | | TGGGTCCGCCAGCCCCCAGGAAAGGGG | | PPGKGLEWIG | | | |
| | | | | | | | | | | GVYYC | | | | | | CTGGAGTGGATTGGGGAAATCTATCAA | | EIYQSGSTNY | | | |
| | | | | | | | | | | | | | | | | AGTGGGAGCACCAACTACAACCCGTCC | | NPSLKSRVTI | | | |
| | | | | | | | | | | | | | | | | CTCAAGAGTCGAGTCACCATATCAGTA | | SVDRSKNQFS | | | |
| | | | | | | | | | | | | | | | | GACAGGTCCAAGAACCAGTTCTCCCTG | | LKLSSVTAAD | | | |
| | | | | | | | | | | | | | | | | AAGCTGAGCTCTGTGACCGCCGCGGAC | | TGVYYCVRDR | | | |
| | | | | | | | | | | | | | | | | ACGGGCGTGTACTACTGTGTGAGAGAT | | SLYCSNGNCP | | | |
| | | | | | | | | | | | | | | | | CGGTCCTTATATTGTAGTAATGGTAAC | | HMDVWGKGTT | | | |
| | | | | | | | | | | | | | | | | TGCCCACACATGGACGTCTGGGGCAAA | | VTVSS | | | |
| | | | | | | | | | | | | | | | | GGGACCACGGTCACCGTCTCCTCA | | | | | |
| ADI- | IGHV3- | RCTLQQSG | 62 | FTFSSYG | 262 | WVRQA | 456 | VVWYDG | 587 | RFTIS | 777 | ARDTWE | 1088 | WGKGTT | 1291 | AGGTGCACGCTGCAGCAGTCTGGGGGA | 1377 | RCTLQQSGGG | 1660 | | |
| 75785 | 33 | GGVVQPGK | | MH | | PGQGL | | SNKYYV | | RDNSK | | VPAADP | | VTVSS | | GGCGTGGTCCAGCCTGGGAAGTCCCTG | | VVQPGKSLRL | | | |
| | | SLRLSCAA | | | | EWVA | | DSVKG | | NTLYL | | PYYYYY | | | | AGACTCTCCTGTGCAGCGTCTGGATTC | | SCAASGFTFS | | | |
| | | SG | | | | | | | | QMNSL | | MDV | | | | ACCTTCAGTAGCTATGGCATGCACTGG | | SYGMHWVRQA | | | |
| | | | | | | | | | | RAEDT | | | | | | GTCCGCCAGGCTCCAGGCCAGGGGCTG | | PGQGLEWVAV | | | |
| | | | | | | | | | | AVYYC | | | | | | GAGTGGGTGGCAGTTGTATGGTATGAT | | VWYDGSNKYY | | | |
| | | | | | | | | | | | | | | | | GGAAGTAATAAATATTATGTAGACTCC | | VDSVKGRFTI | | | |
| | | | | | | | | | | | | | | | | GTGAAGGGCCGATTCACCATCTCCAGA | | SRDNSKNTLY | | | |
| | | | | | | | | | | | | | | | | GATAATTCCAAGAACACGCTGTATCTG | | LQMNSLRAED | | | |
| | | | | | | | | | | | | | | | | CAAATGAATAGCCTGAGAGCCGAGGAC | | TAVYYCARDT | | | |
| | | | | | | | | | | | | | | | | ACGGCTGTGTATTACTGTGCGAGAGAT | | WEVPAADPPY | | | |
| | | | | | | | | | | | | | | | | ACTTGGGAAGTACCAGCTGCCGACCCT | | YYYYMDVWGK | | | |
| | | | | | | | | | | | | | | | | CCCTACTACTACTACTATATGGACGTC | | GTTVTVSS | | | |
| | | | | | | | | | | | | | | | | TGGGGCAAAGGGACCACGGTCACCGTC | | | | | |
| | | | | | | | | | | | | | | | | TCCTCA | | | | | |
| ADI- | IGHV4- | QVQLQQSG | 44 | GSISGIN | 257 | WVRQS | 455 | EISQSG | 582 | RVTIS | 838 | ARVSGF | 1083 | WGQGTL | 1286 | CAGGTGCAGCTGCAGCAGTCGGGCCCA | 1371 | QVQLQQSGPG | 1654 | | |
| 75594 | 4 | PGLVKPSG | | WWS | | PRQGL | | STYYNP | | VDKSK | | FDS | | VTVSS | | GGACTGGTGAAGCCTTCGGGGACCCTG | | LVKPSGTLSL | | | |
| | | TLSLTCAV | | | | EWIG | | SLKS | | NQFSL | | | | | | TCCCTCACCTGCGCTGTCTCTGGTGGC | | TCAVSGGSIS | | | |
| | | SG | | | | | | | | KLTSV | | | | | | TCCATCAGTGGTATAAACTGGTGGAGT | | GINWWSWVRQ | | | |
| | | | | | | | | | | TAADT | | | | | | TGGGTCCGCCAGTCCCCACGGCAGGGG | | SPRQGLEWIG | | | |
| | | | | | | | | | | AIYYC | | | | | | CTGGAGTGGATTGGGGAAATCTCTCAG | | EISQSGSTYY | | | |
| | | | | | | | | | | | | | | | | AGTGGGAGCACCTACTACAACCCGTCT | | NPSLKSRVTI | | | |
| | | | | | | | | | | | | | | | | CTCAAAAGTCGAGTCACCATATCAGTA | | SVDKSKNQFS | | | |
| | | | | | | | | | | | | | | | | GACAAGTCTAAGAACCAGTTCTCCCTG | | LKLTSVTAAD | | | |
| | | | | | | | | | | | | | | | | AAGCTGACCTCTGTGACCGCCGCGGAC | | TAIYYCARVS | | | |
| | | | | | | | | | | | | | | | | ACGGCCATATATTACTGTGCGAGAGTC | | GFFDSWGQGT | | | |
| | | | | | | | | | | | | | | | | AGCGGGTTTTTTGACTCCTGGGGCCAG | | LVTVSS | | | |
| | | | | | | | | | | | | | | | | GGAACCCTGGTCACCGTCTCCTCA | | | | | |
| ADI- | IGHV4- | QVQLQQSG | 56 | GSISSYY | 263 | WIRQP | 457 | YIYYSG | 588 | RVTMS | 844 | ARHAPI | 1089 | WGQGTL | 1286 | CAGGTGCAGCTGCAGCAGTCGGGCCCA | 1378 | QVQLQQSGPG | 1661 | | |
| 75801 | 59 | PGLVKPSQ | | WS | | PGKGL | | NTNYSP | | VDTSK | | HSALYE | | VTVSS | | GGACTGGTGAAGCCTTCGCAGACCCTG | | LVKPSQTLSL | | | |
| | | TLSLTCTV | | | | QWIG | | SLRS | | NQFSL | | PNTYFD | | | | TCCCTCACCTGCACTGTCTCTGGTGGC | | TCTVSGGSIS | | | |
| | | SG | | | | | | | | KLSSV | | Y | | | | TCCATCAGTAGTTACTACTGGAGCTGG | | SYYWSWIRQP | | | |
| | | | | | | | | | | TAADT | | | | | | ATCCGGCAGCCCCCAGGGAAGGGACTG | | PGKGLQWIGY | | | |
| | | | | | | | | | | AVYYC | | | | | | CAGTGGATTGGGTATATCTATTACAGT | | IYYSGNTNYS | | | |
| | | | | | | | | | | | | | | | | GGGAACACCAACTACAGCCCCTCCCTC | | PSLRSRVTMS | | | |
| | | | | | | | | | | | | | | | | AGGAGTCGAGTCACCATGTCAGTAGAC | | VDTSKNQFSL | | | |
| | | | | | | | | | | | | | | | | ACGTCCAAGAATCAGTTCTCCCTGAAA | | KLSSVTAADT | | | |
| | | | | | | | | | | | | | | | | CTGAGCTCTGTGACCGCCGCAGACACG | | AVYYCARHAP | | | |
| | | | | | | | | | | | | | | | | GCCGTGTATTACTGTGCGAGACATGCT | | IHSALYEPNT | | | |
| | | | | | | | | | | | | | | | | CCGATACATTCGGCACTTTACGAACCG | | YFDYWGQGTL | | | |
| | | | | | | | | | | | | | | | | AATACGTACTTTGACTACTGGGGCCAG | | VTVSS | | | |
| | | | | | | | | | | | | | | | | GGAACCCTGGTCACCGTCTCCTCA | | | | | |
| ADI- | IGHV3- | RCTLRAVW | 63 | FTFEDYA | 264 | WVRLL | 458 | GVSWNS | 589 | RFIIS | 845 | VKLYSG | 1090 | WGQGTT | 1287 | AGGTGCACGCTGCGTGCAGTCTGGGGG | 1379 | RCTLRAVWGR | 1662 | | |
| 75624 | 9 | GRLGTAWQ | | IH | | PGKGL | | GVIDYV | | RDNAK | | GRDYDF | | VTVSS | | AGGCTTGGTACAGCCTGGCAGGTCCTG | | LGTAWQVLTL | | | |
| | | VLTLSCTA | | | | EWVS | | DSVKG | | NSLYL | | RSGSQN | | | | ACACTCTCCTGTACAGCCTCTGGATTC | | SCTASGFTFE | | | |
| | | SG | | | | | | | | HMRSL | | GNGNGM | | | | ACGTTTGAAGATTATGCCATACACTGG | | DYAIHWVRLL | | | |
| | | | | | | | | | | RPEDT | | DV | | | | GTCCGGCTACTTCCAGGGAAGGGCCTG | | PGKGLEWVSG | | | |
| | | | | | | | | | | ALYYC | | | | | | GAGTGGGTCTCGGGTGTTAGTTGGAAT | | VSWNSGVIDY | | | |
| | | | | | | | | | | | | | | | | AGTGGTGTCATAGACTACGTGGACTCT | | VDSVKGRFII | | | |
| | | | | | | | | | | | | | | | | GTGAAGGGCCGATTCATCATCTCCAGA | | SRDNAKNSLY | | | |
| | | | | | | | | | | | | | | | | GACAACGCCAAGAACTCCTTATATCTG | | LHMRSLRPED | | | |
| | | | | | | | | | | | | | | | | CATATGAGAAGTCTGAGACCTGAGGAC | | TALYYCVKLY | | | |
| | | | | | | | | | | | | | | | | ACGGCCTTATATTACTGTGTAAAATTA | | SGGRDYDFRS | | | |
| | | | | | | | | | | | | | | | | TACTCGGGGGGGAGGGACTACGATTTT | | GSQNGNGNGM | | | |
| | | | | | | | | | | | | | | | | CGGAGTGGTTCGCAAAATGGGAATGGA | | DVWGQGTTVT | | | |
| | | | | | | | | | | | | | | | | AACGGTATGGACGTCTGGGGCCAAGGG | | VSS | | | |
| | | | | | | | | | | | | | | | | ACCACGGTCACCGTCTCCTCA | | | | | |
| ADI- | IGHV3- | QVQLQESG | 64 | FNFGNYV | 265 | WVRQA | 432 | LIRSNS | 590 | RFTIS | 846 | STSRGG | 1091 | WGQGTL | 1286 | CAGGTGCAGCTGCAGGAGTCTGGGGGA | 1380 | QVQLQESGGG | 1663 | | |
| 75764 | 49 | GGLVQPGR | | MS | | PGKGL | | FGGTTQ | | RDDST | | STNWFF | | VTVSS | | GGCTTGGTACAGCCAGGGCGGTCCCTG | | LVQPGRSLRL | | | |
| | | SLRLSCTG | | | | EWVG | | YAASVR | | SIAYL | | Y | | | | AGACTCTCCTGTACAGGTTCTGGATTC | | SCTGSGFNFG | | | |
| | | SG | | | | | | G | | QMNSL | | | | | | AACTTTGGTAATTATGTTATGAGCTGG | | NYVMSWVRQA | | | |
| | | | | | | | | | | KTEDT | | | | | | GTCCGCCAGGCTCCAGGGAAGGGGCTG | | PGKGLEWVGL | | | |
| | | | | | | | | | | AVYYC | | | | | | GAGTGGGTTGGTCTCATTAGAAGCAAT | | IRSNSFGGTT | | | |
| | | | | | | | | | | | | | | | | TCTTTTGGTGGGACAACACAATACGCC | | QYAASVRGRF | | | |
| | | | | | | | | | | | | | | | | GCGTCTGTGAGAGGCAGATTCACCATC | | TISRDDSTSI | | | |
| | | | | | | | | | | | | | | | | TCAAGAGATGATTCCACAAGCATCGCC | | AYLQMNSLKT | | | |
| | | | | | | | | | | | | | | | | TATCTGCAAATGAACAGCCTGAAAACC | | EDTAVYYCST | | | |
| | | | | | | | | | | | | | | | | GAAGACACAGCCGTATATTACTGTTCC | | SRGGSTNWFF | | | |
| | | | | | | | | | | | | | | | | ACTAGTCGTGGGGGTAGCACCAACTGG | | YWGQGTLVTV | | | |
| | | | | | | | | | | | | | | | | TTTTTTTACTGGGGCCAGGGAACCCTG | | SS | | | |
| | | | | | | | | | | | | | | | | GTCACCGTCTCCTCA | | | | | |
| ADI- | IGHV3- | EVQLVQSG | 65 | FTFSSYA | 266 | WVRQA | 459 | SISSDG | 591 | RFTIS | 847 | VKDLGT | 1092 | WGQGTT | 1287 | GAGGTGCAGCTGGTGCAGTCTGGGGGA | 1381 | EVQLVQSGGG | 1664 | | |
| 75806 | 64D | GGLVQPGG | | VY | | PGKGP | | GITYYA | | RDNSK | | MIVDVL | | VTVSS | | GGCTTGGTCCAGCCGGGGGGGTCCCTG | | LVQPGGSLRL | | | |
| | | SLRLSCSA | | | | EYVS | | DSVKG | | NTLYL | | EM | | | | AGACTCTCCTGTTCAGCCTCTGGATTC | | SCSASGFTFS | | | |
| | | SG | | | | | | | | QMSTL | | | | | | ACCTTCAGTAGTTATGCTGTGTACTGG | | SYAVYWVRQA | | | |
| | | | | | | | | | | RAEDT | | | | | | GTCCGCCAGGCTCCAGGGAAGGGACCG | | PGKGPEYVSS | | | |
| | | | | | | | | | | AVYYC | | | | | | GAATATGTTTCATCTATTAGTAGTGAT | | ISSDGGITYY | | | |
| | | | | | | | | | | | | | | | | GGGGGTATCACATACTACGCAGACTCA | | ADSVKGRFTI | | | |
| | | | | | | | | | | | | | | | | GTGAAGGGCAGATTCACCATCTCCAGA | | SRDNSKNTLY | | | |
| | | | | | | | | | | | | | | | | GACAATTCCAAGAACACGCTGTATCTT | | LQMSTLRAED | | | |
| | | | | | | | | | | | | | | | | CAAATGAGCACTCTGAGAGCTGAGGAC | | TAVYYCVKDL | | | |
| | | | | | | | | | | | | | | | | ACGGCTGTGTATTATTGTGTGAAAGAT | | GTMIVDVLEM | | | |
| | | | | | | | | | | | | | | | | CTAGGAACTATGATAGTAGATGTTTTG | | WGQGTTVTVS | | | |
| | | | | | | | | | | | | | | | | GAAATGTGGGGCCAAGGGACCACGGTC | | S | | | |
| | | | | | | | | | | | | | | | | ACCGTCTCCTCA | | | | | |
| ADI- | IGHV3- | RSTLVQSG | 66 | FIFSRQW | 267 | WVRQA | 431 | SIKQDG | 592 | RFTIS | 848 | ARETGA | 1093 | RGQGTL | 1292 | AGGTCCACGCTGGTGCAGTCTGGGGGA | 1382 | RSTLVQSGGG | 1665 | | |
| 75630 | 7 | GGLVQPGG | | MS | | PGKGL | | SEKYYV | | RDNAK | | FWFDP | | VTVSS | | GGCCTGGTCCAGCCTGGGGGGTCCCTG | | LVQPGGSLRL | | | |
| | | SLRLSCAA | | | | EWVA | | DSVKG | | NSLYL | | | | | | AGACTCTCCTGTGCAGCCTCTGGATTC | | SCAASGFIFS | | | |
| | | SG | | | | | | | | QLNSL | | | | | | ATCTTTAGTAGACAATGGATGAGCTGG | | RQWMSWVRQA | | | |
| | | | | | | | | | | RVEDT | | | | | | GTCCGCCAGGCTCCAGGGAAGGGACTG | | PGKGLEWVAS | | | |
| | | | | | | | | | | AVYYC | | | | | | GAGTGGGTGGCCAGCATAAAGCAAGAT | | IKQDGSEKYY | | | |
| | | | | | | | | | | | | | | | | GGGAGTGAGAAATACTATGTGGACTCT | | VDSVKGRFTI | | | |
| | | | | | | | | | | | | | | | | GTGAAGGGCCGATTCACCATCTCCAGA | | SRDNAKNSLY | | | |
| | | | | | | | | | | | | | | | | GACAACGCCAAGAACTCCCTGTATCTG | | LQLNSLRVED | | | |
| | | | | | | | | | | | | | | | | CAATTGAACAGCCTGAGAGTCGAAGAC | | TAVYYCARET | | | |
| | | | | | | | | | | | | | | | | ACGGCTGTGTATTACTGTGCGAGAGAA | | GAFWFDPRGQ | | | |
| | | | | | | | | | | | | | | | | ACGGGTGCATTCTGGTTCGACCCCAGG | | GTLVTVSS | | | |
| | | | | | | | | | | | | | | | | GGCCAGGGAACCCTGGTCACCGTCTCC | | | | | |
| | | | | | | | | | | | | | | | | TCA | | | | | |
| ADI- | IGHV4- | QVQLQESG | 67 | GSIRSYY | 268 | WIRQP | 445 | YVHDSG | 593 | RVTMS | 849 | ASLLVR | 1094 | WGQGTL | 1286 | CAGGTGCAGCTGCAGGAGTCGGGCCCA | 1383 | QVQLQESGPG | 1666 | | |
| 75609 | 59 | PGLVKPSE | | WS | | PGKGL | | STNYNP | | LDTSK | | YRGYEI | | VTVSS | | GGACTGGTGAAGCCTTCGGAGACCCTG | | LVKPSETLSL | | | |
| | | TLSLTCTV | | | | EWIG | | SLKS | | NQFSL | | DY | | | | TCCCTCACCTGCACTGTTTCTGGTGGC | | TCTVSGGSIR | | | |
| | | SG | | | | | | | | KLRSV | | | | | | TCCATCAGGAGTTACTACTGGAGCTGG | | SYYWSWIRQP | | | |
| | | | | | | | | | | TAADT | | | | | | ATCCGGCAGCCCCCAGGGAAGGGACTG | | PGKGLEWIGY | | | |
| | | | | | | | | | | AVYYC | | | | | | GAGTGGATTGGATATGTCCACGACAGT | | VHDSGSTNYN | | | |
| | | | | | | | | | | | | | | | | GGGAGCACCAACTACAACCCCTCCCTT | | PSLKSRVTMS | | | |
| | | | | | | | | | | | | | | | | AAGAGTCGAGTCACCATGTCACTAGAC | | LDTSKNQFSL | | | |
| | | | | | | | | | | | | | | | | ACGTCCAAGAATCAGTTCTCCCTGAAG | | KLRSVTAADT | | | |
| | | | | | | | | | | | | | | | | CTCAGGTCTGTGACCGCTGCGGACACG | | AVYYCASLLV | | | |
| | | | | | | | | | | | | | | | | GCCGTGTATTATTGTGCGAGTCTGTTA | | RYRGYEIDYW | | | |
| | | | | | | | | | | | | | | | | GTCCGATATAGAGGATACGAAATTGAC | | GQGTLVTVSS | | | |
| | | | | | | | | | | | | | | | | TATTGGGGCCAGGGAACCCTGGTCACC | | | | | |
| | | | | | | | | | | | | | | | | GTCTCCTCA | | | | | |
| ADI- | IGHV3- | QVQLVESG | 68 | FIFSDYS | 227 | WVRQA | 460 | GISSNG | 594 | RFTIS | 850 | VKDMGS | 1095 | WGQGTT | 1287 | CAGGTGCAGCTGGTGGAGTCTGGGGGA | 1384 | QVQLVESGGG | 1667 | | |
| 75671 | 64D | GGLVQPGG | | MH | | PGKGL | | DITDYA | | RDNSK | | SKYWDV | | VTVSS | | GGCTTGGTCCAGCCTGGGGGGTCCCTG | | LVQPGGSLSL | | | |
| | | SLSLSCVV | | | | EYLS | | DSVKD | | NTLYL | | FDV | | | | AGCCTCTCCTGTGTAGTCTCTGGATTC | | SCVVSGFIFS | | | |
| | | SG | | | | | | | | QMSSM | | | | | | ATCTTCAGTGACTATTCTATGCACTGG | | DYSMHWVRQA | | | |
| | | | | | | | | | | RIEEW | | | | | | GTCCGCCAGGCTCCAGGGAAGGGACTG | | PGKGLEYLSG | | | |
| | | | | | | | | | | AVYHC | | | | | | GAATATCTTTCAGGAATTAGTAGTAAT | | ISSNGDITDY | | | |
| | | | | | | | | | | | | | | | | GGGGATATCACAGACTACGCAGACTCA | | ADSVKDRFTI | | | |
| | | | | | | | | | | | | | | | | GTGAAGGACAGATTCACCATCTCCAGA | | SRDNSKNTLY | | | |
| | | | | | | | | | | | | | | | | GACAATTCCAAGAACACACTGTATCTT | | LQMSSMRIEE | | | |
| | | | | | | | | | | | | | | | | CAAATGAGCAGTATGAGAATTGAAGAA | | WAVYHCVKDM | | | |
| | | | | | | | | | | | | | | | | TGGGCTGTTTATCATTGTGTGAAAGAT | | GSSKYWDVFD | | | |
| | | | | | | | | | | | | | | | | ATGGGGAGCTCGAAGTACTGGGATGTT | | VWGQGTTVTV | | | |
| | | | | | | | | | | | | | | | | TTTGATGTTTGGGGCCAAGGGACCACG | | SS | | | |
| | | | | | | | | | | | | | | | | GTCACCGTCTCCTCA | | | | | |
| ADI- | IGHV3- | QVQLVQSG | 69 | VTVSKYA | 269 | WVRQA | 437 | GISGYG | 595 | RYTIS | 851 | AKGPRS | 1096 | WGRGTL | 1288 | CAGGTGCAGCTGGTGCAGTCTGGGGGA | 1385 | QVQLVQSGGG | 1668 | | |
| 75660 | 23 | GGLVQPGG | | MS | | PGKGL | | DTTYYA | | RDNSK | | NHDYFD | | VTVSS | | GGCTTGGTACAGCCTGGGGGGTCCGTG | | LVQPGGSVRL | | | |
| | | SVRLSCGA | | | | EWVS | | DSVKG | | NTLYL | | D | | | | AGACTCTCCTGTGGAGCCTCTGGAGTC | | SCGASGVTVS | | | |
| | | SG | | | | | | | | QMNSL | | | | | | ACAGTTAGCAAATATGCCATGAGCTGG | | KYAMSWVRQA | | | |
| | | | | | | | | | | RDEDT | | | | | | GTCCGCCAGGCTCCAGGGAAGGGGCTG | | PGKGLEWVSG | | | |
| | | | | | | | | | | AVYYC | | | | | | GAGTGGGTCTCAGGTATTAGTGGTTAT | | ISGYGDTTYY | | | |
| | | | | | | | | | | | | | | | | GGTGATACCACATACTACGCAGACTCC | | ADSVKGRYTI | | | |
| | | | | | | | | | | | | | | | | GTGAAGGGCCGGTACACCATCTCCAGA | | SRDNSKNTLY | | | |
| | | | | | | | | | | | | | | | | GACAATTCCAAGAACACGCTGTATCTG | | LQMNSLRDED | | | |
| | | | | | | | | | | | | | | | | CAAATGAACAGCCTGAGAGACGAGGAC | | TAVYYCAKGP | | | |
| | | | | | | | | | | | | | | | | ACGGCCGTATATTACTGTGCGAAAGGA | | RSNHDYFDDW | | | |
| | | | | | | | | | | | | | | | | CCCCGCAGTAACCACGACTACTTTGAC | | GRGTLVTVSS | | | |
| | | | | | | | | | | | | | | | | GATTGGGGCCGGGGAACCCTGGTCACC | | | | | |
| | | | | | | | | | | | | | | | | GTCTCCTCA | | | | | |
| ADI- | IGHV3- | QVQLVQSG | 70 | FSFSTYG | 270 | WIRQA | 461 | VIWSGG | 596 | RFTIS | 852 | ARDGDG | 1097 | WGQGTL | 1286 | CAGGTGCAGCTGGTGCAGTCTGGGGGA | 1386 | QVQLVQSGGG | 1669 | | |
| 75802 | 33 | GGVVQPGR | | MH | | PGKGL | | SGKHYA | | RDNSK | | GLVTFP | | VTVSS | | GGCGTGGTCCAGCCTGGGAGGTCCCTG | | VVQPGRSLRL | | | |
| | | SLRLSCTA | | | | EWVA | | DSVKG | | NTLNL | | DY | | | | AGACTCTCCTGTACAGCGTCTGGATTC | | SCTASGFSFS | | | |
| | | SG | | | | | | | | QMNSL | | | | | | AGCTTCAGTACCTATGGCATGCACTGG | | TYGMHWIRQA | | | |
| | | | | | | | | | | RVEDT | | | | | | ATTCGCCAGGCTCCAGGCAAGGGGCTG | | PGKGLEWVAV | | | |
| | | | | | | | | | | ATYYC | | | | | | GAGTGGGTGGCAGTTATCTGGTCTGGT | | IWSGGSGKHY | | | |
| | | | | | | | | | | | | | | | | GGAAGTGGTAAACACTATGCAGACTCC | | ADSVKGRFTI | | | |
| | | | | | | | | | | | | | | | | GTGAAGGGCCGGTTCACCATCTCCAGA | | SRDNSKNTLN | | | |
| | | | | | | | | | | | | | | | | GATAATTCGAAGAACACACTGAATCTG | | LQMNSLRVED | | | |
| | | | | | | | | | | | | | | | | CAAATGAACAGCCTGAGAGTCGAGGAC | | TATYYCARDG | | | |
| | | | | | | | | | | | | | | | | ACGGCTACATATTACTGTGCGAGAGAT | | DGGLVTFPDY | | | |
| | | | | | | | | | | | | | | | | GGCGACGGGGGGCTGGTTACCTTCCCG | | WGQGTLVTVS | | | |
| | | | | | | | | | | | | | | | | GACTACTGGGGCCAGGGAACCCTGGTC | | S | | | |
| | | | | | | | | | | | | | | | | ACCGTCTCCTCA | | | | | |
| ADI- | IGHV2- | QVTLKESG | 71 | FSLSTTG | 271 | WIRQP | 441 | LIYWDD | 597 | RLSIT | 853 | AHTPDG | 1098 | WGQGTL | 1286 | CAGGTCACGCTGAAGGAGTCTGGTCCT | 1387 | QVTLKESGPT | 1670 | | |
| 75614 | 5 | PTLVKPTQ | | VGVG | | PGKAL | | DQRYSP | | KDTSK | | RYFDWL | | VTVSS | | ACCCTGGTGAAACCCACACAGACCCTC | | LVKPTQTLTL | | | |
| | | TLTLTCTF | | | | EWLA | | SLKS | | NQVVL | | TPLFGN | | | | ACGCTGACCTGCACCTTCTCTGGTTTC | | TCTFSGFSLS | | | |
| | | SG | | | | | | | | TMTNM | | YYFDF | | | | TCACTCAGCACTACTGGAGTGGGTGTG | | TTGVGVGWIR | | | |
| | | | | | | | | | | DPVDT | | | | | | GGCTGGATCCGTCAGCCCCCAGGAAAG | | QPPGKALEWL | | | |
| | | | | | | | | | | ATYYC | | | | | | GCCCTGGAGTGGCTTGCGCTCATTTAT | | ALIYWDDDQR | | | |
| | | | | | | | | | | | | | | | | TGGGATGATGATCAGCGCTACAGCCCA | | YSPSLKSRLS | | | |
| | | | | | | | | | | | | | | | | TCTCTGAAGAGCAGGCTCAGCATCACC | | ITKDTSKNQV | | | |
| | | | | | | | | | | | | | | | | AAGGACACCTCCAAAAACCAGGTGGTC | | VLTMTNMDPV | | | |
| | | | | | | | | | | | | | | | | CTTACAATGACCAACATGGACCCTGTG | | DTATYYCAHT | | | |
| | | | | | | | | | | | | | | | | GACACAGCCACATACTACTGTGCACAC | | PDGRYFDWLT | | | |
| | | | | | | | | | | | | | | | | ACCCCGGACGGGCGATATTTTGACTGG | | PLFGNYYFDF | | | |
| | | | | | | | | | | | | | | | | TTAACCCCTCTTTTTGGAAACTACTAC | | WGQGTLVTVS | | | |
| | | | | | | | | | | | | | | | | TTTGACTTCTGGGGCCAGGGAACCCTG | | S | | | |
| | | | | | | | | | | | | | | | | GTCACCGTCTCCTCA | | | | | |
| ADI- | IGHV3- | QVQLVQSG | 12 | FTFSRYW | 272 | WVRQA | 431 | NIKQDG | 598 | RFTIS | 854 | AKDSTP | 1099 | WGQGTL | 1286 | CAGGTGCAGCTGGTGCAGTCTGGGGGA | 1388 | QVQLVQSGGG | 1671 | | |
| 75661 | 7 | GGLVQPGG | | MS | | PGKGL | | SEKNYV | | RDNAK | | ATYSND | | VTVSS | | GGCTTGGTCCAGCCGGGGGGGTCCCTG | | LVQPGGSLRL | | | |
| | | SLRLSCAA | | | | EWVA | | DSVKG | | NSLYL | | WTNAEY | | | | AGACTCTCCTGTGCAGCCTCTGGATTC | | SCAASGFTFS | | | |
| | | SG | | | | | | | | QMNSL | | FQH | | | | ACCTTTAGTCGTTATTGGATGAGCTGG | | RYWMSWVRQA | | | |
| | | | | | | | | | | RAEDT | | | | | | GTCCGCCAGGCTCCAGGGAAGGGGCTG | | PGKGLEWVAN | | | |
| | | | | | | | | | | AVYYC | | | | | | GAGTGGGTGGCCAACATTAAGCAAGAT | | IKQDGSEKNY | | | |
| | | | | | | | | | | | | | | | | GGAAGTGAGAAGAACTATGTGGACTCT | | VDSVKGRFTI | | | |
| | | | | | | | | | | | | | | | | GTGAAGGGCCGATTCACCATCTCCAGA | | SRDNAKNSLY | | | |
| | | | | | | | | | | | | | | | | GACAACGCCAAGAACTCACTGTATCTG | | LQMNSLRAED | | | |
| | | | | | | | | | | | | | | | | CAAATGAATAGTCTGAGAGCCGAGGAC | | TAVYYCAKDS | | | |
| | | | | | | | | | | | | | | | | ACGGCTGTGTATTACTGTGCGAAAGAT | | TPATYSNDWT | | | |
| | | | | | | | | | | | | | | | | TCTACGCCGGCTACTTATAGCAATGAC | | NAEYFQHWGQ | | | |
| | | | | | | | | | | | | | | | | TGGACAAACGCTGAGTACTTCCAGCAC | | GTLVTVSS | | | |
| | | | | | | | | | | | | | | | | TGGGGCCAGGGCACCCTGGTCACCGTC | | | | | |
| | | | | | | | | | | | | | | | | TCCTCA | | | | | |
| ADI- | IGHV4- | QVQLQQSG | 72 | GFINSGG | 273 | WIRQH | 462 | SIFDSG | 599 | RLTIS | 855 | ARSPGG | 1081 | WGQGTL | 1286 | CAGGTGCAGCTGCAGCAGTCGGGCCCA | 1389 | QVQLQQSGPG | 1672 | | |
| 75697 | 31 | PGLVKPSQ | | NYWS | | PGTGL | | TTYYNP | | VDTSK | | LFDF | | VTVSS | | GGACTGGTGAAGCCTTCACAGACCCTG | | LVKPSQTLSL | | | |
| | | TLSLTCSV | | | | EWIG | | SLKS | | NQFSL | | | | | | TCCCTAACCTGCAGTGTCTCTGGTGGC | | TCSVSGGFIN | | | |
| | | SG | | | | | | | | KLSSV | | | | | | TTCATCAACAGCGGTGGGAACTACTGG | | SGGNYWSWIR | | | |
| | | | | | | | | | | TAADT | | | | | | AGCTGGATCCGCCAGCACCCAGGGACG | | QHPGTGLEWI | | | |
| | | | | | | | | | | AVYFC | | | | | | GGCCTGGAGTGGATTGGGTCCATCTTT | | GSIFDSGTTY | | | |
| | | | | | | | | | | | | | | | | GACAGTGGGACCACCTACTACAACCCG | | YNPSLKSRLT | | | |
| | | | | | | | | | | | | | | | | TCCCTCAAGAGTCGACTCACTATATCA | | ISVDTSKNQF | | | |
| | | | | | | | | | | | | | | | | GTAGACACGTCTAAGAACCAGTTCTCC | | SLKLSSVTAA | | | |
| | | | | | | | | | | | | | | | | CTGAAGCTGAGCTCTGTGACTGCCGCG | | DTAVYFCARS | | | |
| | | | | | | | | | | | | | | | | GACACGGCCGTGTATTTCTGTGCGAGG | | PGGLFDFWGQ | | | |
| | | | | | | | | | | | | | | | | TCCCCTGGGGGATTATTTGACTTCTGG | | GTLVTVSS | | | |
| | | | | | | | | | | | | | | | | GGCCAGGGAACCCTGGTCACCGTCTCC | | | | | |
| | | | | | | | | | | | | | | | | TCA | | | | | |
| ADI- | IGHV4- | QVQLQQWG | 73 | GSFSDYF | 274 | WIRQP | 445 | ELTHTG | 600 | RVTIL | 856 | ARGDFY | 1100 | WGQGTT | 1287 | CAGGTGCAGCTACAGCAGTGGGGCGCA | 1390 | QVQLQQWGAG | 1673 | | |
| 75700 | 34 | AGLLKPSE | | WN | | PGKGL | | STNYNP | | ADTSK | | STRLAF | | VTVSS | | GGACTGTTGAAGCCCTCGGAGACCCTG | | LLKPSETLSL | | | |
| | | TLSLTCGV | | | | EWIG | | SLKS | | SQFSL | | DL | | | | TCCCTCACCTGCGGTGTCTATGATGGG | | TCGVYDGSFS | | | |
| | | YD | | | | | | | | NLSSV | | | | | | TCCTTCAGTGATTACTTCTGGAACTGG | | DYFWNWIRQP | | | |
| | | | | | | | | | | TAADT | | | | | | ATCCGCCAGCCCCCAGGGAAGGGGCTG | | PGKGLEWIGE | | | |
| | | | | | | | | | | AVYYC | | | | | | GAGTGGATTGGGGAGCTCACGCATACT | | LTHTGSTNYN | | | |
| | | | | | | | | | | | | | | | | GGAAGTACCAACTACAACCCGTCCCTC | | PSLKSRVTIL | | | |
| | | | | | | | | | | | | | | | | AAGAGTCGAGTCACCATATTAGCAGAC | | ADTSKSQFSL | | | |
| | | | | | | | | | | | | | | | | ACGTCCAAGAGCCAGTTCTCCCTGAAC | | NLSSVTAADT | | | |
| | | | | | | | | | | | | | | | | CTGAGCTCTGTGACCGCCGCGGACACG | | AVYYCARGDF | | | |
| | | | | | | | | | | | | | | | | GCTGTGTATTACTGTGCGAGAGGCGAT | | YSTRLAFDLW | | | |
| | | | | | | | | | | | | | | | | TTTTATAGCACCAGGCTCGCTTTTGAT | | GQGTTVTVSS | | | |
| | | | | | | | | | | | | | | | | CTCTGGGGCCAAGGGACCACGGTCACC | | | | | |
| | | | | | | | | | | | | | | | | GTCTCCTCA | | | | | |
| ADI- | IGHV3- | QVQLLESG | 74 | FTLSNDD | 275 | WVRQP | 463 | GTGTSG | 601 | RFTIS | 857 | VRGTAT | 1101 | WGKGTT | 1291 | CAGGTGCAGCTGCTGGAGTCTGGGGGA | 1391 | QVQLLESGGG | 1674 | | |
| 75787 | 13 | GGLVQPGG | | MH | | IGKGL | | DTYYLD | | RENAR | | GYYYYM | | VTVSS | | GGCTTGGTACAGCCTGGGGGGTCCCTG | | LVQPGGSLRL | | | |
| | | SLRLSCAA | | | | EWVS | | SVKG | | NSVYL | | DV | | | | AGACTCTCCTGTGCAGCCTCTGGATTC | | SCAASGFTLS | | | |
| | | SG | | | | | | | | QMNSL | | | | | | ACCCTCAGTAACGACGACATGCACTGG | | NDDMHWVRQP | | | |
| | | | | | | | | | | GAGDT | | | | | | GTCCGCCAACCTATAGGAAAAGGTCTG | | IGKGLEWVSG | | | |
| | | | | | | | | | | AIYYC | | | | | | GAGTGGGTCTCAGGTACTGGTACTTCT | | TGTSGDTYYL | | | |
| | | | | | | | | | | | | | | | | GGTGACACATATTATCTAGACTCCGTG | | DSVKGRFTIS | | | |
| | | | | | | | | | | | | | | | | AAGGGCCGATTCACCATCTCCAGAGAA | | RENARNSVYL | | | |
| | | | | | | | | | | | | | | | | AATGCCAGGAACTCCGTGTATCTTCAA | | QMNSLGAGDT | | | |
| | | | | | | | | | | | | | | | | ATGAACAGTCTGGGAGCCGGGGACACG | | AIYYCVRGTA | | | |
| | | | | | | | | | | | | | | | | GCTATATATTATTGTGTAAGAGGGACT | | TGYYYYMDVW | | | |
| | | | | | | | | | | | | | | | | GCAACGGGCTACTACTACTACATGGAC | | GKGTTVTVSS | | | |
| | | | | | | | | | | | | | | | | GTCTGGGGCAAAGGGACCACGGTCACC | | | | | |
| | | | | | | | | | | | | | | | | GTCTCCTCA | | | | | |
| ADI- | IGHV3- | QVHAGGVW | 75 | FTFSSYG | 262 | WVRQA | 431 | VISYDG | 602 | RFTIS | 858 | VRDPQD | 1102 | WGQGTL | 1286 | CAGGTGCACGCTGGTGGAGTCTGGGGG | 1392 | QVHAGGVWGR | 1675 | | |
| 75642 | 30 | GRRGPAGR | | MH | | PGKGL | | SNKYYR | | RETSK | | CGGSRC | | VTVSS | | AGGCGTGGTCCAGCTGGGAGGTCCCTG | | RGPAGRSLRL | | | |
| | | SLRLSCAA | | | | EWVA | | DSVKG | | NTLYL | | SNALGY | | | | AGACTCTCCTGTGCAGCCTCTGGATTC | | SCAASGFTFS | | | |
| | | SG | | | | | | | | QMTSL | | FDY | | | | ACCTTCAGTAGCTATGGAATGCACTGG | | SYGMHWVRQA | | | |
| | | | | | | | | | | RAEDT | | | | | | GTCCGCCAGGCTCCAGGCAAGGGCCTA | | PGKGLEWVAV | | | |
| | | | | | | | | | | AVYYC | | | | | | GAGTGGGTGGCAGTTATATCATATGAT | | ISYDGSNKYY | | | |
| | | | | | | | | | | | | | | | | GGAAGTAATAAATACTACAGAGACTCC | | RDSVKGRFTI | | | |
| | | | | | | | | | | | | | | | | GTGAAGGGCCGATTCACCATCTCCAGA | | SRETSKNTLY | | | |
| | | | | | | | | | | | | | | | | GAAACTTCCAAGAACACGCTGTATCTG | | LQMTSLRAED | | | |
| | | | | | | | | | | | | | | | | CAAATGACCAGCCTGAGAGCTGAGGAC | | TAVYYCVRDP | | | |
| | | | | | | | | | | | | | | | | ACGGCTGTATATTACTGTGTGAGAGAT | | QDCGGSRCSN | | | |
| | | | | | | | | | | | | | | | | CCCCAAGATTGTGGTGGTTCCAGGTGT | | ALGYFDYWGQ | | | |
| | | | | | | | | | | | | | | | | TCAAACGCGCTTGGTTACTTTGACTAC | | GTLVTVSS | | | |
| | | | | | | | | | | | | | | | | TGGGGCCAGGGAACCCTGGTCACCGTC | | | | | |
| | | | | | | | | | | | | | | | | TCCTCA | | | | | |
| ADI- | IGHV3- | QVQLVQSG | 10 | ITFRSNG | 276 | WVRQA | 431 | FIWFDG | 603 | RFIIS | 859 | AREPHC | 1103 | WGQGTT | 1287 | CAGGTGCAGCTGGTGCAGTCTGGGGGA | 1393 | QVQLVQSGGG | 1676 | | |
| 75861 | 33 | GGVVQPGR | | MH | | PGKGL | | SKKYYG | | RDNSN | | TGGVCD | | VTVSS | | GGCGTGGTCCAGCCTGGGAGGTCCCTG | | VVQPGRSLRL | | | |
| | | SLRLSCAA | | | | EWVA | | DSVKG | | NTLYL | | ALDI | | | | AGACTCTCCTGTGCAGCGTCTGGAATC | | SCAASGITFR | | | |
| | | SG | | | | | | | | QMNSL | | | | | | ACCTTCAGGAGCAATGGCATGCACTGG | | SNGMHWVRQA | | | |
| | | | | | | | | | | RAEDT | | | | | | GTCCGCCAGGCTCCAGGCAAGGGGCTG | | PGKGLEWVAF | | | |
| | | | | | | | | | | AVYYC | | | | | | GAGTGGGTGGCGTTTATATGGTTTGAT | | IWFDGSKKYY | | | |
| | | | | | | | | | | | | | | | | GGAAGTAAGAAATATTATGGAGACTCC | | GDSVKGRFII | | | |
| | | | | | | | | | | | | | | | | GTGAAGGGCCGATTCATCATCTCCAGA | | SRDNSNNTLY | | | |
| | | | | | | | | | | | | | | | | GACAATTCCAACAACACGCTGTATCTG | | LQMNSLRAED | | | |
| | | | | | | | | | | | | | | | | CAAATGAACAGCCTGAGAGCCGAGGAC | | TAVYYCAREP | | | |
| | | | | | | | | | | | | | | | | ACGGCTGTCTATTACTGTGCGAGAGAA | | HCTGGVCDAL | | | |
| | | | | | | | | | | | | | | | | CCCCACTGCACTGGTGGTGTATGCGAT | | DIWGQGTTVT | | | |
| | | | | | | | | | | | | | | | | GCTCTTGATATCTGGGGCCAAGGGACC | | VSS | | | |
| | | | | | | | | | | | | | | | | ACGGTCACCGTCTCCTCA | | | | | |
| ADI- | IGHV3- | QVQLVQSG | 76 | FIFSNYD | 277 | WVRQT | 464 | AIGTAG | 604 | RFTIS | 860 | ARAEHS | 1104 | WGRGTL | 1288 | CAGGTGCAGCTGGTGCAGTCTGGGGGA | 1394 | QVQLVQSGGG | 1677 | | |
| 75578 | 13 | GGLVQPGG | | MH | | TGKGL | | DTYYAD | | RENAK | | GFVVYF | | VTVSS | | GGCCTGGTGCAGCCGGGGGGGTCCCTG | | LVQPGGSLRL | | | |
| | | SLRLSCGA | | | | EWVS | | SVKG | | NSLYL | | DL | | | | AGACTCTCCTGTGGAGCCTCTGGATTC | | SCGASGFIFS | | | |
| | | SG | | | | | | | | QMNSL | | | | | | ATCTTCAGTAACTACGACATGCACTGG | | NYDMHWVRQT | | | |
| | | | | | | | | | | RAGDT | | | | | | GTCCGCCAAACTACAGGAAAAGGTCTG | | TGKGLEWVSA | | | |
| | | | | | | | | | | AVYYC | | | | | | GAGTGGGTCTCAGCTATTGGAACTGCT | | IGTAGDTYYA | | | |
| | | | | | | | | | | | | | | | | GGTGACACATACTATGCAGACTCCGTG | | DSVKGRFTIS | | | |
| | | | | | | | | | | | | | | | | AAGGGCCGTTTCACCATCTCCAGAGAA | | RENAKNSLYL | | | |
| | | | | | | | | | | | | | | | | AATGCCAAGAACTCCTTGTATCTTCAA | | QMNSLRAGDT | | | |
| | | | | | | | | | | | | | | | | ATGAACAGCCTGAGAGCCGGGGACACG | | AVYYCARAEH | | | |
| | | | | | | | | | | | | | | | | GCTGTGTATTACTGTGCAAGAGCTGAA | | SGFVVYFDLW | | | |
| | | | | | | | | | | | | | | | | CATAGTGGCTTCGTTGTCTACTTCGAT | | GRGTLVTVSS | | | |
| | | | | | | | | | | | | | | | | CTCTGGGGCCGTGGCACCCTGGTCACC | | | | | |
| | | | | | | | | | | | | | | | | GTCTCCTCA | | | | | |
| ADI- | IGHV2- | EVQLVQSG | 77 | FSFSTSG | 278 | WIRQP | 441 | LIYWDG | 605 | RLTIA | 861 | ARHTVA | 1105 | WGQGTL | 1286 | GAGGTGCAGCTGGTGCAGTCTGGTCCT | 1395 | EVQLVQSGPT | 1678 | | |
| 75808 | 5 | PTLVKPTQ | | MGVG | | PGKAL | | DERYSP | | RDTSK | | TIFDY | | VTVSS | | ACGCTGGTGAAACCCACACAGACCGTC | | LVKPTQTVTL | | | |
| | | TVTLTCTF | | | | EWLA | | SLQS | | NQVVL | | | | | | ACGCTGACCTGCACCTTCTCTGGGTTC | | TCTFSGFSFS | | | |
| | | SG | | | | | | | | TMTNM | | | | | | TCGTTCAGTACTAGTGGAATGGGTGTG | | TSGMGVGWIR | | | |
| | | | | | | | | | | DPVDT | | | | | | GGCTGGATCCGTCAGCCCCCAGGAAAG | | QPPGKALEWL | | | |
| | | | | | | | | | | ATYYC | | | | | | GCCCTGGAGTGGCTTGCACTCATTTAT | | ALIYWDGDER | | | |
| | | | | | | | | | | | | | | | | TGGGATGGTGATGAGCGCTACAGCCCA | | YSPSLQSRLT | | | |
| | | | | | | | | | | | | | | | | TCTCTGCAGAGCAGGCTCACCATCGCC | | IARDTSKNQV | | | |
| | | | | | | | | | | | | | | | | AGGGACACCTCCAAAAACCAGGTGGTC | | VLTMTNMDPV | | | |
| | | | | | | | | | | | | | | | | CTTACAATGACCAACATGGACCCTGTG | | DTATYYCARH | | | |
| | | | | | | | | | | | | | | | | GACACAGCCACATATTACTGTGCACGC | | TVATIFDYWG | | | |
| | | | | | | | | | | | | | | | | CATACAGTGGCGACCATTTTTGACTAC | | QGTLVTVSS | | | |
| | | | | | | | | | | | | | | | | TGGGGCCAGGGAACCCTGGTCACCGTC | | | | | |
| | | | | | | | | | | | | | | | | TCCTCA | | | | | |
| ADI- | IGHV3- | QVQLVESG | 78 | FIFTTYW | 279 | WVRQA | 431 | NIKQDG | 606 | RFTIS | 862 | ARELGI | 1106 | WGQGTL | 1286 | CAGGTGCAGCTGGTGGAGTCTGGGGGA | 1396 | QVQLVESGGG | 1679 | | |
| 75848 | 7 | GGLVQPGG | | MS | | PGKGL | | SEKYYV | | RDNAK | | SDY | | VTVSS | | GGCTTGGTCCAGCCTGGGGGGTCCCTG | | LVQPGGSLRL | | | |
| | | SLRLSCEA | | | | EWVA | | DSVKG | | NSLYL | | | | | | AGACTCTCCTGTGAAGCCTCTGGATTC | | SCEASGFIFT | | | |
| | | SG | | | | | | | | QMDSL | | | | | | ATCTTTACAACCTATTGGATGAGTTGG | | TYWMSWVRQA | | | |
| | | | | | | | | | | RAEDT | | | | | | GTCCGCCAGGCTCCAGGGAAGGGGCTG | | PGKGLEWVAN | | | |
| | | | | | | | | | | AVYYC | | | | | | GAGTGGGTGGCCAACATAAAGCAAGAT | | IKQDGSEKYY | | | |
| | | | | | | | | | | | | | | | | GGAAGTGAGAAATACTATGTGGACTCT | | VDSVKGRFTI | | | |
| | | | | | | | | | | | | | | | | GTGAAGGGCCGATTCACCATCTCCAGA | | SRDNAKNSLY | | | |
| | | | | | | | | | | | | | | | | GACAACGCCAAGAACTCACTGTATCTG | | LQMDSLRAED | | | |
| | | | | | | | | | | | | | | | | CAAATGGACAGCCTGAGAGCCGAGGAC | | TAVYYCAREL | | | |
| | | | | | | | | | | | | | | | | ACGGCCGTTTATTACTGTGCGAGAGAG | | GISDYWGQGT | | | |
| | | | | | | | | | | | | | | | | CTGGGGATCTCGGACTACTGGGGCCAG | | LVTVSS | | | |
| | | | | | | | | | | | | | | | | GGAACCCTGGTCACCGTCTCCTCA | | | | | |
| ADI- | IGHV3- | QVQLVQSG | 79 | FIVSANY | 280 | WVRQA | 465 | VLYSGG | 607 | RFTIS | 863 | VRDWGE | 1107 | WGQGTL | 1286 | CAGGTGCAGCTGGTGCAGTCTGGAGGA | 1397 | QVQLVQSGGG | 1680 | | |
| 75832 | 53 | GGLIQPGG | | MS | | PGKRL | | TTFYAD | | RDNSK | | FFFDF | | VTVSS | | GGCTTGATCCAGCCGGGGGGGTCCCTG | | LIQPGGSLRL | | | |
| | | SLRLSCAA | | | | EWVS | | SVKG | | NTLYL | | | | | | AGACTCTCCTGTGCAGCCTCTGGGTTC | | SCAASGFIVS | | | |
| | | SG | | | | | | | | QMNSL | | | | | | ATCGTCAGTGCCAACTACATGAGCTGG | | ANYMSWVRQA | | | |
| | | | | | | | | | | RADDT | | | | | | GTCCGCCAGGCTCCAGGGAAGCGGCTG | | PGKRLEWVSV | | | |
| | | | | | | | | | | AVYFC | | | | | | GAGTGGGTCTCAGTTCTTTATAGCGGC | | LYSGGTTFYA | | | |
| | | | | | | | | | | | | | | | | GGTACCACATTCTACGCCGACTCCGTG | | DSVKGRFTIS | | | |
| | | | | | | | | | | | | | | | | AAGGGCCGATTCACCATCTCCAGAGAC | | RDNSKNTLYL | | | |
| | | | | | | | | | | | | | | | | AATTCCAAGAACACGCTGTATCTTCAA | | QMNSLRADDT | | | |
| | | | | | | | | | | | | | | | | ATGAACAGCCTGAGAGCCGACGACACG | | AVYFCVRDWG | | | |
| | | | | | | | | | | | | | | | | GCCGTGTATTTTTGTGTGAGAGATTGG | | EFFFDFWGQG | | | |
| | | | | | | | | | | | | | | | | GGGGAGTTCTTCTTTGACTTCTGGGGC | | TLVTVSS | | | |
| | | | | | | | | | | | | | | | | CAGGGTACCCTGGTCACCGTCTCCTCA | | | | | |
| ADI- | IGHV3- | EVQLVETG | 80 | FTVSSNY | 281 | WVRQA | 437 | IIYPGG | 608 | RFTIS | 864 | ARDRGG | 1108 | WGQGTL | 1286 | GAGGTGCAGCTGGTGGAGACTGGAGGA | 1398 | EVQLVETGGG | 1681 | | |
| 75618 | 53 | GGLIQPGG | | MS | | PGKGL | | SSFYAE | | RDSSK | | YPDY | | VTVSS | | GGCTTGATCCAGCCTGGGGGGTCCCTG | | LIQPGGSLRL | | | |
| | | SLRLSCAA | | | | EWVS | | SVKG | | NTLYL | | | | | | AGACTCTCCTGTGCAGCCTCTGAGTTC | | SCAASEFTVS | | | |
| | | SE | | | | | | | | QMDSL | | | | | | ACCGTCAGTAGCAACTACATGAGCTGG | | SNYMSWVRQA | | | |
| | | | | | | | | | | RAEDT | | | | | | GTCCGCCAGGCTCCAGGGAAGGGACTG | | PGKGLEWVSI | | | |
| | | | | | | | | | | AVYYC | | | | | | GAGTGGGTCTCAATTATTTATCCCGGT | | IYPGGSSFYA | | | |
| | | | | | | | | | | | | | | | | GGTAGCTCATTCTACGCAGAGTCCGTG | | ESVKGRFTIS | | | |
| | | | | | | | | | | | | | | | | AAGGGCCGATTCACCATCTCCAGAGAC | | RDSSKNTLYL | | | |
| | | | | | | | | | | | | | | | | AGTTCCAAGAACACGCTCTATCTTCAA | | QMDSLRAEDT | | | |
| | | | | | | | | | | | | | | | | ATGGACAGCCTGAGAGCCGAGGACACG | | AVYYCARDRG | | | |
| | | | | | | | | | | | | | | | | GCCGTGTATTACTGTGCGAGAGATCGG | | GYPDYWGQGT | | | |
| | | | | | | | | | | | | | | | | GGTGGGTACCCTGACTACTGGGGCCAG | | LVTVSS | | | |
| | | | | | | | | | | | | | | | | GGAACCCTGGTCACCGTCTCCTCA | | | | | |
| ADI- | IGHV3- | QVQLVQSG | 10 | FTFSSFP | 282 | WIRQA | 466 | VVSYDG | 609 | RFTIS | 865 | AREMHY | 1109 | WGQGTL | 1286 | CAGGTCCAGCTGGTGCAGTCTGGGGGA | 1399 | QVQLVQSGGG | 1682 | | |
| 75830 | 30 | GGVVQPGR | | MH | | PGKGL | | SSKHYT | | RDNSM | | YDSSGY | | VTVSS | | GGCGTGGTCCAGCCTGGGAGGTCCCTG | | VVQPGRSLRL | | | |
| | | SLRLSCAA | | | | QWVA | | DSVKG | | NIVYL | | FKGNNY | | | | AGACTCTCCTGTGCAGCCTCTGGATTC | | SCAASGFTFS | | | |
| | | SG | | | | | | | | QMNSL | | FDP | | | | ACCTTCAGTAGTTTTCCTATGCACTGG | | SFPMHWIRQA | | | |
| | | | | | | | | | | RAEDT | | | | | | ATCCGCCAGGCTCCAGGCAAGGGGCTA | | PGKGLQWVAV | | | |
| | | | | | | | | | | AVYYC | | | | | | CAGTGGGTGGCAGTTGTGTCATATGAT | | VSYDGSSKHY | | | |
| | | | | | | | | | | | | | | | | GGAAGTAGTAAACACTATACAGACTCC | | TDSVKGRFTI | | | |
| | | | | | | | | | | | | | | | | GTGAAGGGCCGATTCACCATCTCCAGA | | SRDNSMNIVY | | | |
| | | | | | | | | | | | | | | | | GACAACTCCATGAACATCGTGTATCTG | | LQMNSLRAED | | | |
| | | | | | | | | | | | | | | | | CAAATGAACAGCCTGAGAGCTGAGGAC | | TAVYYCAREM | | | |
| | | | | | | | | | | | | | | | | ACGGCTGTGTATTACTGTGCGAGAGAA | | HYYDSSGYFK | | | |
| | | | | | | | | | | | | | | | | ATGCATTACTATGATAGTAGTGGTTAT | | GNNYFDPWGQ | | | |
| | | | | | | | | | | | | | | | | TTTAAAGGCAATAACTACTTCGACCCC | | GTLVTVSS | | | |
| | | | | | | | | | | | | | | | | TGGGGCCAGGGAACCCTGGTCACCGTC | | | | | |
| | | | | | | | | | | | | | | | | TCCTCA | | | | | |
| ADI- | IGHV3- | EVQLVETG | 81 | IIVSYNY | 283 | WVRQA | 437 | LIYAGG | 610 | RFTIS | 777 | TRDRGP | 1110 | WGQGTL | 1286 | GAGGTGCAGCTGGTGGAGACTGGAGGA | 1400 | EVQLVETGGG | 1683 | | |
| 75628 | 53 | GGLIQPGG | | MS | | PGKGL | | STYYAD | | RDNSK | | LLHDL | | VTVSS | | GGATTGATCCAGCCGGGGGGGTCCCTG | | LIQPGGSLRL | | | |
| | | SLRLSCAA | | | | EWVS | | SVKG | | NTLYL | | | | | | AGACTCTCCTGTGCAGCCTCTGGGATC | | SCAASGIIVS | | | |
| | | SG | | | | | | | | QMNSL | | | | | | ATCGTCAGTTACAACTACATGAGTTGG | | YNYMSWVRQA | | | |
| | | | | | | | | | | RAEDT | | | | | | GTCCGCCAGGCTCCAGGGAAGGGGCTG | | PGKGLEWVSL | | | |
| | | | | | | | | | | AVYYC | | | | | | GAGTGGGTCTCACTCATTTATGCCGGT | | IYAGGSTYYA | | | |
| | | | | | | | | | | | | | | | | GGTAGCACCTACTACGCAGACTCCGTG | | DSVKGRFTIS | | | |
| | | | | | | | | | | | | | | | | AAGGGCCGTTTCACCATCTCCAGAGAC | | RDNSKNTLYL | | | |
| | | | | | | | | | | | | | | | | AATTCCAAGAACACACTATATCTTCAA | | QMNSLRAEDT | | | |
| | | | | | | | | | | | | | | | | ATGAACAGCCTGAGAGCCGAGGACACG | | AVYYCTRDRG | | | |
| | | | | | | | | | | | | | | | | GCCGTGTATTACTGTACGAGAGATAGG | | PLLHDLWGQG | | | |
| | | | | | | | | | | | | | | | | GGGCCTTTACTACACGACCTCTGGGGC | | TLVTVSS | | | |
| | | | | | | | | | | | | | | | | CAGGGAACCCTGGTCACCGTCTCCTCA | | | | | |
| ADI- | IGHV4- | QVQLQESG | 39 | GSISSGN | 284 | WIRQS | 434 | YIYYSG | 611 | RVTIS | 866 | VRERIS | 1111 | WGQGTT | 1287 | CAGGTGCAGCTGCAGGAGTCTGGCCCA | 1401 | QVQLQESGPG | 1684 | | |
| 75640 | 30-1 | PGLVKPSQ | | YYWS | | PGKGL | | STYYNP | | VDTSK | | MDILSG | | VTVSS | | GGACTGGTGAAGCCTTCACAGACCCTG | | LVKPSQTLSL | | | |
| | | TLSLTCTV | | | | EWIG | | SLKS | | DQFSL | | NSPHYY | | | | TCCCTCACCTGCACTGTCTCTGGTGGC | | TCTVSGGSIS | | | |
| | | SG | | | | | | | | KLSSV | | GVDV | | | | TCCATCAGCAGTGGTAATTACTACTGG | | SGNYYWSWIR | | | |
| | | | | | | | | | | TAADT | | | | | | AGTTGGATCCGCCAGTCCCCAGGGAAG | | QSPGKGLEWI | | | |
| | | | | | | | | | | AVYHC | | | | | | GGCCTGGAGTGGATTGGGTACATCTAT | | GYIYYSGSTY | | | |
| | | | | | | | | | | | | | | | | TACAGTGGGAGCACCTACTACAATCCG | | YNPSLKSRVT | | | |
| | | | | | | | | | | | | | | | | TCCCTCAAGAGTCGAGTTACCATATCA | | ISVDTSKDQF | | | |
| | | | | | | | | | | | | | | | | GTAGACACGTCCAAGGACCAGTTCTCC | | SLKLSSVTAA | | | |
| | | | | | | | | | | | | | | | | CTGAAGCTGAGCTCTGTGACTGCCGCA | | DTAVYHCVRE | | | |
| | | | | | | | | | | | | | | | | GACACGGCCGTGTATCACTGTGTCAGA | | RISMDILSGN | | | |
| | | | | | | | | | | | | | | | | GAAAGGATTTCTATGGATATTTTGAGT | | SPHYYGVDVW | | | |
| | | | | | | | | | | | | | | | | GGTAATTCCCCCCACTACTACGGAGTG | | GQGTTVTVSS | | | |
| | | | | | | | | | | | | | | | | GACGTCTGGGGCCAAGGGACCACGGTC | | | | | |
| | | | | | | | | | | | | | | | | ACCGTCTCCTCA | | | | | |
| ADI- | IGHV3- | QVQLVQSG | 82 | FTFEDYA | 264 | WVRLL | 458 | GVSWNS | 589 | RFIIS | 845 | VKLYSG | 1112 | WGQGTT | 1287 | CAGGTGCAGCTGGTGCAGTCTGGGGGA | 1402 | QVQLVQSGGG | 1685 | | |
| 75657 | 9 | GGLVQPGR | | IH | | PGKGL | | GVIDYV | | RDNAK | | GRDYDF | | VTVSS | | GGCTTGGTGCAGCCTGGCAGGTCCCTG | | LVQPGRSLTL | | | |
| | | SLTLSCTA | | | | EWVS | | DSVKG | | NSLYL | | RSGSQN | | | | ACACTCTCCTGTACAGCCTCTGGATTC | | SCTASGFTFE | | | |
| | | SG | | | | | | | | HMRSL | | GGGDAM | | | | ACGTTTGAAGATTATGCCATACACTGG | | DYAIHWVRLL | | | |
| | | | | | | | | | | RPEDT | | DV | | | | GTCCGGCTACTTCCAGGGAAGGGCCTG | | PGKGLEWVSG | | | |
| | | | | | | | | | | ALYYC | | | | | | GAGTGGGTCTCGGGTGTTAGTTGGAAT | | VSWNSGVIDY | | | |
| | | | | | | | | | | | | | | | | AGTGGTGTCATAGACTACGTGGACTCT | | VDSVKGRFII | | | |
| | | | | | | | | | | | | | | | | GTGAAGGGCCGATTCATCATCTCCAGA | | SRDNAKNSLY | | | |
| | | | | | | | | | | | | | | | | GACAACGCCAAGAACTCCTTGTATCTG | | LHMRSLRPED | | | |
| | | | | | | | | | | | | | | | | CATATGAGAAGTCTGAGACCTGAGGAC | | TALYYCVKLY | | | |
| | | | | | | | | | | | | | | | | ACGGCCTTATATTACTGTGTAAAATTA | | SGGRDYDFRS | | | |
| | | | | | | | | | | | | | | | | TACTCGGGGGGGAGGGACTACGATTTT | | GSQNGGGDAM | | | |
| | | | | | | | | | | | | | | | | CGGAGTGGTTCGCAAAATGGGGGTGGA | | DVWGQGTTVT | | | |
| | | | | | | | | | | | | | | | | GACGCTATGGACGTCTGGGGCCAAGGG | | VSS | | | |
| | | | | | | | | | | | | | | | | ACCACGGTCACCGTCTCCTCA | | | | | |
| ADI- | IGHV2- | RSTLQQSG | 83 | FSLATTG | 285 | WIRQP | 441 | LIYWDD | 612 | RVTIT | 867 | AHMVGR | 1113 | WGKGTT | 1291 | AGGTCCACGCTGCAGCAGTCTGGTCCT | 1403 | RSTLQQSGPT | 1686 | | |
| 75713 | 5 | PTLVKPTQ | | VGVG | | PGKAL | | DKRYSP | | KDTFK | | SYYDVL | | VTVSS | | ACGCTGGTGAAACCCACACAGACCCTC | | LVKPTQTLTL | | | |
| | | TLTLTCTF | | | | EWLA | | SLKS | | NQVVL | | TGFSSY | | | | ACGCTGACCTGCACCTTCTCTGGGTTC | | TCTFSGFSLA | | | |
| | | SG | | | | | | | | TMTNM | | YSYYMD | | | | TCACTCGCAACTACTGGAGTGGGTGTG | | TTGVGVGWIR | | | |
| | | | | | | | | | | DPVDT | | V | | | | GGCTGGATCCGTCAGCCCCCAGGAAAG | | QPPGKALEWL | | | |
| | | | | | | | | | | GTYYC | | | | | | GCCCTGGAATGGCTTGCACTCATTTAT | | ALIYWDDDKR | | | |
| | | | | | | | | | | | | | | | | TGGGATGATGATAAGCGCTACAGCCCA | | YSPSLKSRVT | | | |
| | | | | | | | | | | | | | | | | TCTCTGAAGAGCAGGGTCACCATCACC | | ITKDTFKNQV | | | |
| | | | | | | | | | | | | | | | | AAGGACACCTTCAAAAACCAGGTGGTC | | VLTMTNMDPV | | | |
| | | | | | | | | | | | | | | | | CTTACAATGACCAACATGGACCCGGTG | | DTGTYYCAHM | | | |
| | | | | | | | | | | | | | | | | GACACAGGCACATATTACTGTGCACAC | | VGRSYYDVLT | | | |
| | | | | | | | | | | | | | | | | ATGGTTGGTCGTTCGTATTACGATGTT | | GFSSYYSYYM | | | |
| | | | | | | | | | | | | | | | | TTGACTGGTTTTTCTTCCTACTACTCC | | DVWGKGTTVT | | | |
| | | | | | | | | | | | | | | | | TACTACATGGACGTTTGGGGCAAAGGG | | VSS | | | |
| | | | | | | | | | | | | | | | | ACCACGGTCACCGTCTCCTCA | | | | | |
| ADI- | IGHV2- | QVTLMESG | 84 | FSLSTSG | 286 | WIRQP | 441 | LIYWDD | 613 | RLTVT | 868 | AHRPRS | 1114 | WGQGTL | 1286 | CAGGTCACGCTGATGGAGTCTGGTCGT | 1404 | QVTLMESGRT | 1687 | | |
| 75692 | 5 | RTLVKPTQ | | VSVG | | PGKAL | | DTRYSP | | KDTSK | | QSGYDS | | VTVSS | | ACGCTGGTGAAACCCACACAGACCCTC | | LVKPTQTLTL | | | |
| | | TLTLTCTF | | | | EWLA | | SLKR | | NQVVL | | SFDV | | | | ACGCTGACCTGCACCTTCTCTGGGTTC | | TCTFSGFSLS | | | |
| | | SG | | | | | | | | TLTNL | | | | | | TCACTCAGTACTAGTGGAGTGAGTGTG | | TSGVSVGWIR | | | |
| | | | | | | | | | | GAVDT | | | | | | GGCTGGATCCGTCAGCCCCCAGGAAAG | | QPPGKALEWL | | | |
| | | | | | | | | | | GTYYC | | | | | | GCCCTGGAGTGGCTTGCACTCATTTAT | | ALIYWDDDTR | | | |
| | | | | | | | | | | | | | | | | TGGGATGATGATACGCGCTACAGCCCA | | YSPSLKRRLT | | | |
| | | | | | | | | | | | | | | | | TCTCTGAAGAGGAGGCTCACCGTCACC | | VTKDTSKNQV | | | |
| | | | | | | | | | | | | | | | | AAGGACACCTCCAAAAACCAGGTGGTC | | VLTLTNLGAV | | | |
| | | | | | | | | | | | | | | | | CTTACACTGACCAACTTGGGCGCTGTG | | DTGTYYCAHR | | | |
| | | | | | | | | | | | | | | | | GACACAGGCACATATTACTGTGCACAC | | PRSQSGYDSS | | | |
| | | | | | | | | | | | | | | | | AGACCGAGGTCACAAAGTGGCTACGAC | | FDVWGQGTLV | | | |
| | | | | | | | | | | | | | | | | TCGTCCTTTGACGTCTGGGGCCAGGGA | | TVSS | | | |
| | | | | | | | | | | | | | | | | ACCCTGGTCACCGTCTCCTCA | | | | | |
| ADI- | IGHV3- | QVQLVQSG | 12 | FTFSSYD | 207 | WVRQA | 437 | GIGTAG | 614 | RFTIS | 869 | ARVEYS | 1115 | WGRGTL | 1288 | CAGGTGCAGCTGGTGCAGTCTGGGGGA | 1405 | QVQLVQSGGG | 1688 | | |
| 75587 | 13 | GGLVQPGG | | MH | | PGKGL | | DTYYAD | | RENAK | | SGWSYW | | VTVSS | | GGCTTGGTACAGCCTGGGGGGTCCCTG | | LVQPGGSLRL | | | |
| | | SLRLSCAA | | | | EWVS | | SVKG | | NSFYL | | FFDL | | | | AGACTCTCCTGTGCAGCCTCCGGATTC | | SCAASGFTFS | | | |
| | | SG | | | | | | | | QMNSL | | | | | | ACCTTCAGTAGCTACGACATGCACTGG | | SYDMHWVRQA | | | |
| | | | | | | | | | | RAGDT | | | | | | GTCCGCCAGGCTCCAGGAAAAGGTCTG | | PGKGLEWVSG | | | |
| | | | | | | | | | | AVYYC | | | | | | GAATGGGTCTCAGGTATTGGTACTGCT | | IGTAGDTYYA | | | |
| | | | | | | | | | | | | | | | | GGTGACACATACTATGCAGACTCCGTG | | DSVKGRFTIS | | | |
| | | | | | | | | | | | | | | | | AAGGGCCGATTCACCATCTCCAGAGAA | | RENAKNSFYL | | | |
| | | | | | | | | | | | | | | | | AATGCCAAGAACTCCTTCTATCTTCAA | | QMNSLRAGDT | | | |
| | | | | | | | | | | | | | | | | ATGAACAGCCTGAGAGCCGGGGACACG | | AVYYCARVEY | | | |
| | | | | | | | | | | | | | | | | GCTGTGTATTACTGTGCAAGAGTGGAG | | SSGWSYWFFD | | | |
| | | | | | | | | | | | | | | | | TATAGTAGCGGCTGGTCGTACTGGTTC | | LWGRGTLVTV | | | |
| | | | | | | | | | | | | | | | | TTCGATCTCTGGGGCCGTGGCACCCTG | | SS | | | |
| | | | | | | | | | | | | | | | | GTCACCGTCTCCTCA | | | | | |
| ADI- | IGHV3- | EVQLVQSG | 85 | FTLSSDD | 287 | WVRQA | 467 | GIGTSG | 615 | RFSIS | 870 | ARGRST | 1116 | WGKGTT | 1291 | GAGGTGCAGCTGGTGCAGTCTGGGGGA | 1406 | EVQLVQSGGG | 1689 | | |
| 75775 | 13 | GGLAQPGG | | MH | | TGKGL | | DTYYPD | | RENAK | | MIQGDK | | VTVSS | | GGCTTGGCACAGCCTGGGGGGTCCCTG | | LAQPGGSLRL | | | |
| | | SLRLSCAA | | | | EWVS | | SVKG | | NSLYL | | KYYHYY | | | | AGACTCTCCTGTGCAGCCTCTGGATTC | | SCAASGFTLS | | | |
| | | SG | | | | | | | | QMNSL | | YMDV | | | | ACCCTCAGTAGCGACGACATGCACTGG | | SDDMHWVRQA | | | |
| | | | | | | | | | | RAGDT | | | | | | GTCCGCCAAGCTACAGGAAAAGGTCTG | | TGKGLEWVSG | | | |
| | | | | | | | | | | AVYYC | | | | | | GAGTGGGTCTCAGGTATTGGTACGTCT | | IGTSGDTYYP | | | |
| | | | | | | | | | | | | | | | | GGTGACACATACTATCCAGACTCCGTG | | DSVKGRFSIS | | | |
| | | | | | | | | | | | | | | | | AAGGGCCGATTCAGCATCTCCAGAGAA | | RENAKNSLYL | | | |
| | | | | | | | | | | | | | | | | AATGCCAAGAACTCACTGTATCTTCAA | | QMNSLRAGDT | | | |
| | | | | | | | | | | | | | | | | ATGAACAGCCTGAGAGCCGGGGACACG | | AVYYCARGRS | | | |
| | | | | | | | | | | | | | | | | GCTGTGTATTACTGTGCAAGAGGACGT | | TMIQGDKKYY | | | |
| | | | | | | | | | | | | | | | | TCTACTATGATTCAGGGAGACAAAAAA | | HYYYMDVWGK | | | |
| | | | | | | | | | | | | | | | | TACTACCACTACTACTACATGGACGTC | | GTTVTVSS | | | |
| | | | | | | | | | | | | | | | | TGGGGCAAAGGGACCACGGTCACCGTC | | | | | |
| | | | | | | | | | | | | | | | | TCCTCA | | | | | |
| ADI- | IGHV1- | QVQLQQSG | 86 | GTFISDA | 288 | WVRQA | 433 | RIIPIL | 616 | RVTLT | 871 | AIDRDY | 1117 | WGKGTT | 1291 | CAGGTGCAGCTGCAGCAGTCTGGGGCT | 1407 | QVQLQQSGAE | 1690 | | |
| 75758 | 69 | AEVKKPGS | | VS | | PGQGL | | GTATYA | | ADKST | | PGDYYY | | VTVSS | | GAGGTGAAGAAGCCTGGGTCCTCGGTG | | VKKPGSSVKV | | | |
| | | SVKVSCKA | | | | EWMG | | QKFQG | | STAYM | | HYYTDV | | | | AAGGTCTCCTGCAAGGCTTCTGGAGGC | | SCKASGGTFI | | | |
| | | SG | | | | | | | | ELRSL | | | | | | ACCTTCATCAGCGATGCTGTCAGCTGG | | SDAVSWVRQA | | | |
| | | | | | | | | | | RSDDT | | | | | | GTGCGACAGGCCCCTGGACAAGGGCTT | | PGQGLEWMGR | | | |
| | | | | | | | | | | AVYYC | | | | | | GAGTGGATGGGAAGGATCATCCCTATA | | IIPILGTATY | | | |
| | | | | | | | | | | | | | | | | CTGGGAACAGCTACCTACGCACAGAAG | | AQKFQGRVTL | | | |
| | | | | | | | | | | | | | | | | TTCCAGGGCAGAGTCACGCTTACCGCG | | TADKSTSTAY | | | |
| | | | | | | | | | | | | | | | | GACAAATCCACGAGCACAGCCTACATG | | MELRSLRSDD | | | |
| | | | | | | | | | | | | | | | | GAACTGCGCAGCCTGAGATCTGACGAC | | TAVYYCAIDR | | | |
| | | | | | | | | | | | | | | | | ACGGCCGTCTATTACTGTGCGATAGAC | | DYPGDYYYHY | | | |
| | | | | | | | | | | | | | | | | AGGGACTACCCGGGCGATTACTACTAT | | YTDVWGKGTT | | | |
| | | | | | | | | | | | | | | | | CACTACTACACGGACGTCTGGGGCAAA | | VTVSS | | | |
| | | | | | | | | | | | | | | | | GGGACCACGGTCACCGTCTCCTCA | | | | | |
| ADI- | IGHV3- | QVQLVQSG | 87 | ITVSSNY | 289 | WVRQA | 437 | VIYAGG | 617 | RFSIS | 872 | ARDLGP | 1118 | WGQGTT | 1287 | CAGGTGCAGCTGGTGCAGTCTGGGGGA | 1408 | QVQLVQSGGG | 1691 | | |
| 75793 | 66 | GGLVRPGG | | MN | | PGKGL | | STFYAD | | RDNSK | | YGFDI | | VTVSS | | GGCTTGGTCCGGCCGGGGGGGTCTCTG | | LVRPGGSLRL | | | |
| | | SLRLSCAA | | | | EWVS | | SVKG | | NTLYL | | | | | | AGACTCTCCTGTGCAGCCTCTGAAATC | | SCAASEITVS | | | |
| | | SE | | | | | | | | QMNSL | | | | | | ACCGTCAGTAGTAACTACATGAACTGG | | SNYMNWVRQA | | | |
| | | | | | | | | | | RADDT | | | | | | GTCCGCCAGGCTCCAGGGAAGGGGCTG | | PGKGLEWVSV | | | |
| | | | | | | | | | | AVYYC | | | | | | GAGTGGGTCTCAGTTATATATGCCGGT | | IYAGGSTFYA | | | |
| | | | | | | | | | | | | | | | | GGTAGCACATTCTACGCAGACTCCGTG | | DSVKGRFSIS | | | |
| | | | | | | | | | | | | | | | | AAGGGCAGATTCAGCATCTCCAGAGAC | | RDNSKNTLYL | | | |
| | | | | | | | | | | | | | | | | AATTCCAAAAACACGCTGTATCTTCAA | | QMNSLRADDT | | | |
| | | | | | | | | | | | | | | | | ATGAACAGCCTGAGAGCCGACGACACG | | AVYYCARDLG | | | |
| | | | | | | | | | | | | | | | | GCTGTGTATTACTGTGCGAGAGACTTG | | PYGFDIWGQG | | | |
| | | | | | | | | | | | | | | | | GGCCCCTACGGATTTGATATCTGGGGC | | TTVTVSS | | | |
| | | | | | | | | | | | | | | | | CAAGGGACCACGGTCACCGTCTCCTCA | | | | | |
| ADI- | IGHV3- | QVQLVQSG | 12 | FTFSNYD | 290 | WVRQV | 468 | TIGTAG | 618 | RFTIS | 873 | ARVQYS | 1119 | WGKGTT | 1291 | CAGGTGCAGCTGGTGCAGTCTGGGGGA | 1409 | QVQLVQSGGG | 1692 | | |
| 75804 | 13 | GGLVQPGG | | MH | | TGKGL | | DTYYPD | | RDNAK | | SGRHQY | | VTVSS | | GGCTTGGTACAGCCTGGGGGGTCCCTG | | LVQPGGSLRL | | | |
| | | SLRLSCAA | | | | EWVS | | SVKG | | NSLYL | | SYYYMD | | | | AGACTCTCCTGTGCAGCCTCTGGATTC | | SCAASGFTFS | | | |
| | | SG | | | | | | | | QMNSL | | V | | | | ACCTTCAGTAACTACGACATGCACTGG | | NYDMHWVRQV | | | |
| | | | | | | | | | | RAGDT | | | | | | GTCCGCCAAGTCACAGGAAAAGGTCTG | | TGKGLEWVST | | | |
| | | | | | | | | | | AVYFC | | | | | | GAGTGGGTTTCAACTATTGGTACTGCT | | IGTAGDTYYP | | | |
| | | | | | | | | | | | | | | | | GGTGACACATACTATCCAGACTCCGTG | | DSVKGRFTIS | | | |
| | | | | | | | | | | | | | | | | AAGGGCCGATTCACCATCTCCAGAGAC | | RDNAKNSLYL | | | |
| | | | | | | | | | | | | | | | | AATGCCAAGAACTCCTTGTATCTTCAA | | QMNSLRAGDT | | | |
| | | | | | | | | | | | | | | | | ATGAACAGCCTGAGAGCCGGGGACACG | | AVYFCARVQY | | | |
| | | | | | | | | | | | | | | | | GCTGTGTATTTCTGTGCAAGAGTCCAG | | SSGRHQYSYY | | | |
| | | | | | | | | | | | | | | | | TATAGCAGTGGCCGGCACCAATACTCC | | YMDVWGKGTT | | | |
| | | | | | | | | | | | | | | | | TACTACTACATGGACGTCTGGGGCAAA | | VTVSS | | | |
| | | | | | | | | | | | | | | | | GGGACCACGGTCACCGTCTCCTCA | | | | | |
| ADI- | IGHV3- | QVQLVQTG | 88 | IIVSRNY | 291 | WVRQA | 469 | VLYAGG | 619 | RFTIS | 777 | ARDGVY | 1120 | WGQGTT | 1287 | CAGGTGCAGCTGGTGCAGACTGGAGGA | 1410 | QVQLVQTGGG | 1693 | | |
| 75658 | 53 | GGLIQPGG | | MT | | PGEGL | | STFYAD | | RDNSK | | YGMDI | | VTVSS | | GGCTTGATCCAGCCGGGGGGGTCCCTG | | LIQPGGSLRL | | | |
| | | SLRLSCAA | | | | EWVG | | SVKG | | NTLYL | | | | | | AGACTCTCTTGTGCAGCCTCTGGGATC | | SCAASGIIVS | | | |
| | | SG | | | | | | | | QMNSL | | | | | | ATCGTCAGTCGCAACTACATGACCTGG | | RNYMTWVRQA | | | |
| | | | | | | | | | | RAEDT | | | | | | GTCCGCCAGGCTCCAGGGGAGGGGCTG | | PGEGLEWVGV | | | |
| | | | | | | | | | | AVYYC | | | | | | GAGTGGGTCGGAGTTCTTTATGCCGGT | | LYAGGSTFYA | | | |
| | | | | | | | | | | | | | | | | GGTAGTACATTCTACGCAGACTCCGTG | | DSVKGRFTIS | | | |
| | | | | | | | | | | | | | | | | AAGGGCCGATTCACCATCTCCAGAGAC | | RDNSKNTLYL | | | |
| | | | | | | | | | | | | | | | | AATTCGAAGAACACACTGTATCTTCAA | | QMNSLRAEDT | | | |
| | | | | | | | | | | | | | | | | ATGAACAGCCTGAGAGCCGAGGACACG | | AVYYCARDGV | | | |
| | | | | | | | | | | | | | | | | GCCGTGTATTACTGTGCGAGAGATGGG | | YYGMDIWGQG | | | |
| | | | | | | | | | | | | | | | | GTGTACTATGGGATGGACATCTGGGGC | | TTVTVSS | | | |
| | | | | | | | | | | | | | | | | CAGGGGACCACGGTCACCGTCTCCTCA | | | | | |
| ADI- | IGHV3- | QVQLVESG | 89 | ITVSSNY | 292 | WVRQA | 437 | TIYAGG | 620 | RFTIS | 874 | ARDLEI | 1121 | WGQGTT | 1287 | CAGGTGCAGCTGGTGGAGTCTGGGGGA | 1411 | QVQLVESGGG | 1694 | | |
| 75768 | 66 | GGLVQPGG | | MK | | PGKGL | | STFYAD | | RDNSK | | AGALDI | | VTVSS | | GGCTTGGTCCAGCCTGGGGGGTCCCTG | | LVQPGGSLRL | | | |
| | | SLRLSCAA | | | | EWVS | | SVRG | | NTLYL | | | | | | AGACTCTCCTGTGCAGCCTCTGAAATC | | SCAASEITVS | | | |
| | | SE | | | | | | | | QMNSL | | | | | | ACCGTCAGTAGCAACTACATGAAGTGG | | SNYMKWVRQA | | | |
| | | | | | | | | | | RAGDT | | | | | | GTCCGCCAGGCTCCAGGGAAGGGGCTG | | PGKGLEWVST | | | |
| | | | | | | | | | | AVYYC | | | | | | GAGTGGGTCTCAACTATTTATGCCGGT | | IYAGGSTFYA | | | |
| | | | | | | | | | | | | | | | | GGTAGCACATTCTACGCAGACTCCGTG | | DSVRGRFTIS | | | |
| | | | | | | | | | | | | | | | | AGGGGCAGATTCACCATCTCCAGAGAC | | RDNSKNTLYL | | | |
| | | | | | | | | | | | | | | | | AATTCCAAGAATACACTATATCTTCAA | | QMNSLRAGDT | | | |
| | | | | | | | | | | | | | | | | ATGAACAGCCTGAGAGCCGGAGACACG | | AVYYCARDLE | | | |
| | | | | | | | | | | | | | | | | GCTGTTTATTACTGTGCGAGAGATTTG | | IAGALDIWGQ | | | |
| | | | | | | | | | | | | | | | | GAGATTGCAGGCGCTTTGGATATCTGG | | GTTVTVSS | | | |
| | | | | | | | | | | | | | | | | GGCCAAGGGACCACGGTCACCGTCTCC | | | | | |
| | | | | | | | | | | | | | | | | TCA | | | | | |
| ADI- | IGHV3- | QVQLVQSG | 90 | FTFRNYE | 293 | WVRQA | 470 | YISPSG | 621 | RFTIS | 875 | ARAREL | 1122 | WGQGTL | 1286 | CAGGTCCAGCTGGTGCAGTCTGGGGGA | 1412 | QVQLVQSGGG | 1695 | | |
| 75810 | 48 | GGLVQPGG | | MN | | PGKGL | | VTIHYA | | RDNDK | | VEVFDY | | VTVSS | | GGCTTGGTACAGCCTGGAGGGTCCCTG | | LVQPGGSLRL | | | |
| | | SLRLSCAT | | | | EWIS | | DSVKG | | NSLYL | | | | | | AGACTCTCCTGTGCAACCTCTGGATTC | | SCATSGFTFR | | | |
| | | SG | | | | | | | | QMNSL | | | | | | ACCTTCAGAAATTATGAAATGAATTGG | | NYEMNWVRQA | | | |
| | | | | | | | | | | RGEDT | | | | | | GTCCGCCAGGCTCCAGGGAAGGGGCTG | | PGKGLEWISY | | | |
| | | | | | | | | | | AVYFC | | | | | | GAGTGGATTTCATACATTAGCCCTAGT | | ISPSGVTIHY | | | |
| | | | | | | | | | | | | | | | | GGTGTTACCATACACTACGCAGACTCT | | ADSVKGRFTI | | | |
| | | | | | | | | | | | | | | | | GTGAAGGGCCGATTCACCATCTCCAGA | | SRDNDKNSLY | | | |
| | | | | | | | | | | | | | | | | GACAACGATAAGAATTCACTGTATCTG | | LQMNSLRGED | | | |
| | | | | | | | | | | | | | | | | CAAATGAACAGCCTGAGAGGCGAGGAC | | TAVYFCARAR | | | |
| | | | | | | | | | | | | | | | | ACGGCTGTTTATTTCTGTGCGAGAGCA | | ELVEVFDYWG | | | |
| | | | | | | | | | | | | | | | | AGAGAGCTGGTCGAGGTCTTTGACTAC | | QGTLVTVSS | | | |
| | | | | | | | | | | | | | | | | TGGGGCCAGGGAACCCTGGTCACCGTC | | | | | |
| | | | | | | | | | | | | | | | | TCCTCA | | | | | |
| ADI- | IGHV3- | QVQLVETG | 91 | IIVSRNY | 291 | WVRQV | 436 | VIYPGG | 622 | RFTIS | 876 | AREDNN | 1123 | WGQGTT | 1287 | CAGGTGCAGCTGGTGGAGACTGGAGGA | 1413 | QVQLVETGGG | 1696 | | |
| 75784 | 53 | GGLIQPGG | | MT | | PGKGL | | STFYAD | | RDDSK | | NAFDI | | VTVSS | | GGCTTGATCCAGCCGGGGGGGTCCCTG | | LIQPGGSLRL | | | |
| | | SLRLSCAA | | | | EWVS | | SVRG | | NTLYL | | | | | | AGACTCTCCTGTGCAGCCTCTGAGATC | | SCAASEIIVS | | | |
| | | SE | | | | | | | | QMNSL | | | | | | ATCGTCAGTAGGAACTACATGACCTGG | | RNYMTWVRQV | | | |
| | | | | | | | | | | RAEDT | | | | | | GTCCGCCAGGTCCCAGGGAAAGGGCTG | | PGKGLEWVSV | | | |
| | | | | | | | | | | AVYYC | | | | | | GAGTGGGTCTCAGTTATTTATCCCGGT | | IYPGGSTFYA | | | |
| | | | | | | | | | | | | | | | | GGGAGCACTTTCTACGCAGACTCCGTG | | DSVRGRFTIS | | | |
| | | | | | | | | | | | | | | | | AGGGGCCGATTCACCATCTCCAGAGAC | | RDDSKNTLYL | | | |
| | | | | | | | | | | | | | | | | GATTCCAAGAACACTCTGTATCTTCAA | | QMNSLRAEDT | | | |
| | | | | | | | | | | | | | | | | ATGAACAGCCTGAGAGCCGAGGACACG | | AVYYCAREDN | | | |
| | | | | | | | | | | | | | | | | GCCGTGTATTACTGTGCGAGAGAAGAC | | NNAFDIWGQG | | | |
| | | | | | | | | | | | | | | | | AATAATAATGCTTTTGATATTTGGGGG | | TTVTVSS | | | |
| | | | | | | | | | | | | | | | | CAAGGGACAACGGTCACCGTCTCCTCA | | | | | |
| ADI- | IGHV4- | QVQLQQSG | 92 | GSITSIS | 294 | WVRQP | 444 | EIHHSG | 623 | RLTMS | 877 | ARVSGF | 1048 | WGQGTT | 1287 | CAGGTGCAGCTGCAGCAGTCGGGCCCA | 1414 | QVQLQQSGPG | 1697 | | |
| 75619 | 4 | PGLVKPSG | | WWS | | PGKGL | | STTYNP | | VGKSN | | FDY | | VTVSS | | GGACTGGTGAAGCCTTCGGGGACACTG | | LVKPSGTLSL | | | |
| | | TLSLTCAV | | | | EWIG | | TLRS | | NQFSL | | | | | | TCCCTCACCTGCGCTGTCTCTAGTGGC | | TCAVSSGSIT | | | |
| | | SS | | | | | | | | QLTSV | | | | | | TCCATCACCAGTATTAGCTGGTGGAGT | | SISWWSWVRQ | | | |
| | | | | | | | | | | TAADT | | | | | | TGGGTCCGCCAGCCCCCAGGGAAGGGG | | PPGKGLEWIG | | | |
| | | | | | | | | | | AIYYC | | | | | | CTGGAGTGGATTGGGGAAATCCATCAT | | EIHHSGSTTY | | | |
| | | | | | | | | | | | | | | | | AGTGGGAGTACCACCTACAACCCGACC | | NPTLRSRLTM | | | |
| | | | | | | | | | | | | | | | | CTCAGGAGTCGACTCACCATGTCAGTC | | SVGKSNNQFS | | | |
| | | | | | | | | | | | | | | | | GGCAAGTCCAACAACCAGTTCTCCCTG | | LQLTSVTAAD | | | |
| | | | | | | | | | | | | | | | | CAGCTGACCTCTGTGACCGCCGCGGAC | | TAIYYCARVS | | | |
| | | | | | | | | | | | | | | | | ACGGCCATATATTACTGTGCGAGAGTC | | GFFDYWGQGT | | | |
| | | | | | | | | | | | | | | | | AGTGGATTTTTTGACTATTGGGGCCAG | | TVTVSS | | | |
| | | | | | | | | | | | | | | | | GGGACCACGGTCACCGTCTCCTCA | | | | | |
| ADI- | IGHV4- | QVQLQQWG | 93 | GAFSGYF | 295 | WIRQS | 471 | EVTHSG | 624 | RVTMS | 878 | ARGDFY | 1124 | WGQGSM | 1293 | CAGGTGCAGCTACAGCAGTGGGGCGCA | 1415 | QVQLQQWGAG | 1698 | | |
| 75738 | 34 | AGLLKPSE | | WN | | PVKGL | | NTNYNP | | VDASK | | STRLAF | | VTVSS | | GGACTGCTGAAGCCTTCGGAGACCCTG | | LLKPSETLSL | | | |
| | | TLSLTCGV | | | | EWIG | | SLKS | | NEFSL | | DV | | | | TCCCTCACCTGCGGTGTCCACGATGGG | | TCGVHDGAFS | | | |
| | | HD | | | | | | | | NLTSV | | | | | | GCCTTCAGTGGTTACTTCTGGAACTGG | | GYFWNWIRQS | | | |
| | | | | | | | | | | TAADT | | | | | | ATCCGCCAGTCCCCAGTGAAGGGGCTG | | PVKGLEWIGE | | | |
| | | | | | | | | | | AVYYC | | | | | | GAGTGGATTGGGGAAGTCACTCATAGT | | VTHSGNTNYN | | | |
| | | | | | | | | | | | | | | | | GGCAACACCAACTACAACCCGTCCCTC | | PSLKSRVTMS | | | |
| | | | | | | | | | | | | | | | | AAGAGTCGAGTCACCATGTCAGTAGAC | | VDASKNEFSL | | | |
| | | | | | | | | | | | | | | | | GCGTCCAAGAACGAATTCTCCCTGAAC | | NLTSVTAADT | | | |
| | | | | | | | | | | | | | | | | CTGACCTCTGTGACCGCCGCGGACACG | | AVYYCARGDF | | | |
| | | | | | | | | | | | | | | | | GCTGTGTATTACTGTGCGAGGGGCGAC | | YSTRLAFDVW | | | |
| | | | | | | | | | | | | | | | | TTTTATAGCACCAGGCTCGCTTTTGAT | | GQGSMVTVSS | | | |
| | | | | | | | | | | | | | | | | GTCTGGGGCCAAGGGTCAATGGTCACC | | | | | |
| | | | | | | | | | | | | | | | | GTCTCCTCA | | | | | |
| ADI- | IGHV2- | QVQLQQSG | 94 | FSLNTGG | 296 | WIRQP | 441 | LIYWDD | 625 | RLAIT | 879 | ARLKIA | 1125 | WGQGTL | 1286 | CAGGTCCAGCTGCAGCAGTCTGGTCCT | 1416 | QVQLQQSGPT | 1699 | | |
| 75790 | 5 | PTLVKPTQ | | VAVG | | PGKAL | | DKRYSP | | KDTSK | | PIVDA | | VTVSS | | ACGCTGGTGAAACCCACACAGACCCTC | | LVKPTQTLTL | | | |
| | | TLTLTCTF | | | | EWLA | | SLKN | | NQVVL | | | | | | ACGCTGACCTGCACCTTCTCTGGGTTC | | TCTFSGFSLN | | | |
| | | SG | | | | | | | | TMTDM | | | | | | TCCCTCAACACTGGTGGAGTGGCTGTG | | TGGVAVGWIR | | | |
| | | | | | | | | | | DPVDT | | | | | | GGCTGGATCCGTCAGCCCCCAGGAAAG | | QPPGKALEWL | | | |
| | | | | | | | | | | ATYYC | | | | | | GCCCTGGAGTGGCTTGCACTCATTTAT | | ALIYWDDDKR | | | |
| | | | | | | | | | | | | | | | | TGGGATGATGATAAGCGCTACAGCCCA | | YSPSLKNRLA | | | |
| | | | | | | | | | | | | | | | | TCTCTGAAGAACAGGCTCGCCATCACC | | ITKDTSKNQV | | | |
| | | | | | | | | | | | | | | | | AAGGACACCTCCAAAAACCAGGTGGTC | | VLTMTDMDPV | | | |
| | | | | | | | | | | | | | | | | CTTACAATGACCGACATGGACCCTGTG | | DTATYYCARL | | | |
| | | | | | | | | | | | | | | | | GACACAGCCACATATTACTGTGCACGC | | KIAPIVDAWG | | | |
| | | | | | | | | | | | | | | | | CTTAAGATAGCTCCAATAGTTGACGCC | | QGTLVTVSS | | | |
| | | | | | | | | | | | | | | | | TGGGGCCAGGGAACCCTGGTCACCGTC | | | | | |
| | | | | | | | | | | | | | | | | TCCTCA | | | | | |
| ADI- | IGHV3- | QVQLVQSG | 10 | FAFTTYV | 297 | WVRQA | 472 | VISSDG | 626 | RFTIS | 880 | ARDGGY | 1126 | WGQGTT | 1287 | CAGGTGCAGCTGGTGCAGTCTGGGGGA | 1417 | QVQLVQSGGG | 1700 | | |
| 75719 | 30 | GGVVQPGR | | MH | | PGKGL | | SAKFYA | | RDSSQ | | SGYFDA | | VTVSS | | GGCGTGGTCCAGCCTGGGAGGTCCCTG | | VVQPGRSLRL | | | |
| | | SLRLSCAA | | | | EWVT | | DSVKG | | NTLYL | | FDI | | | | AGACTCTCCTGTGCAGCCTCTGGATTC | | SCAASGFAFT | | | |
| | | SG | | | | | | | | QMNSL | | | | | | GCCTTCACTACCTATGTTATGCACTGG | | TYVMHWVRQA | | | |
| | | | | | | | | | | RAEDT | | | | | | GTCCGCCAGGCTCCAGGCAAGGGGCTG | | PGKGLEWVTV | | | |
| | | | | | | | | | | AVYYC | | | | | | GAGTGGGTAACCGTTATCTCATCTGAT | | ISSDGSAKFY | | | |
| | | | | | | | | | | | | | | | | GGAAGTGCTAAATTTTACGCAGACTCC | | ADSVKGRFTI | | | |
| | | | | | | | | | | | | | | | | GTGAAGGGCCGATTCACCATCTCCAGA | | SRDSSQNTLY | | | |
| | | | | | | | | | | | | | | | | GACAGTTCCCAGAATACGCTCTATCTT | | LQMNSLRAED | | | |
| | | | | | | | | | | | | | | | | CAAATGAACAGCCTGAGAGCTGAGGAC | | TAVYYCARDG | | | |
| | | | | | | | | | | | | | | | | ACGGCTGTCTATTACTGTGCGAGAGAT | | GYSGYFDAFD | | | |
| | | | | | | | | | | | | | | | | GGGGGATATAGTGGCTACTTTGATGCC | | IWGQGTTVTV | | | |
| | | | | | | | | | | | | | | | | TTTGATATCTGGGGCCAAGGGACCACG | | SS | | | |
| | | | | | | | | | | | | | | | | GTCACCGTCTCCTCA | | | | | |
| ADI- | IGHV1- | QVQLVQSG | 95 | GTFSNYF | 298 | WVRQA | 473 | RIIPIL | 627 | RVTIT | 832 | AREGGT | 1127 | WGQGTL | 1286 | CAGGTGCAGCTGGTGCAGTCTGGGGCT | 1418 | QVQLVQSGAE | 1701 | | |
| 75742 | 69 | AEVKKLGS | | IS | | PGQGL | | GIAYYA | | ADKST | | TTEYFQ | | VTVSS | | GAAGTGAAGAAGCTTGGGTCCTCGGTG | | VKKLGSSVKV | | | |
| | | SVKVSCKA | | | | ECMG | | QKFQG | | STAYM | | H | | | | AAGGTCTCCTGCAAGGCCTCTGGAGGC | | SCKASGGTFS | | | |
| | | SG | | | | | | | | ELSSL | | | | | | ACGTTCAGCAACTATTTTATCAGCTGG | | NYFISWVRQA | | | |
| | | | | | | | | | | RSEDT | | | | | | GTGCGACAGGCCCCTGGACAAGGGCTT | | PGQGLECMGR | | | |
| | | | | | | | | | | AVYYC | | | | | | GAGTGCATGGGGAGGATCATCCCTATC | | IIPILGIAYY | | | |
| | | | | | | | | | | | | | | | | CTTGGTATAGCATACTACGCTCAGAAG | | AQKFQGRVTI | | | |
| | | | | | | | | | | | | | | | | TTCCAGGGCAGAGTCACGATTACCGCG | | TADKSTSTAY | | | |
| | | | | | | | | | | | | | | | | GACAAATCCACGAGCACAGCCTACATG | | MELSSLRSED | | | |
| | | | | | | | | | | | | | | | | GAGCTGAGCAGCCTGAGATCTGAGGAC | | TAVYYCAREG | | | |
| | | | | | | | | | | | | | | | | ACGGCCGTGTATTATTGTGCGAGAGAA | | GTTTEYFQHW | | | |
| | | | | | | | | | | | | | | | | GGTGGTACCACCACTGAATACTTCCAG | | GQGTLVTVSS | | | |
| | | | | | | | | | | | | | | | | CATTGGGGCCAGGGCACCCTGGTCACC | | | | | |
| | | | | | | | | | | | | | | | | GTCTCCTCA | | | | | |
| ADI- | IGHV3- | QVQLVQSG | 96 | FTFSSYG | 262 | WVRQA | 431 | VIWYNG | 628 | RFTIS | 777 | ARDTWE | 1128 | WGRGTT | 1294 | CAGGTGCAGCTGGTGCAGTCTGGGGGA | 1419 | QVQLVQSGGD | 1702 | | |
| 75779 | 33 | GDVVQPGR | | MH | | PGKGL | | SNKYYI | | RDNSK | | VPVADP | | VTVSS | | GACGTGGTCCAGCCTGGGAGGTCCCTG | | VVQPGRSLRL | | | |
| | | SLRLSCAT | | | | EWVA | | DSVKG | | NTLYL | | PYYYYY | | | | AGACTCTCCTGTGCAACGTCTGGATTC | | SCATSGFTFS | | | |
| | | SG | | | | | | | | QMNSL | | MDV | | | | ACCTTCAGTAGCTATGGCATGCACTGG | | SYGMHWVRQA | | | |
| | | | | | | | | | | RAEDT | | | | | | GTCCGCCAGGCTCCAGGCAAGGGGCTG | | PGKGLEWVAV | | | |
| | | | | | | | | | | AVYYC | | | | | | GAGTGGGTGGCAGTTATTTGGTATAAT | | IWYNGSNKYY | | | |
| | | | | | | | | | | | | | | | | GGAAGTAATAAATACTATATAGACTCC | | IDSVKGRFTI | | | |
| | | | | | | | | | | | | | | | | GTGAAGGGCCGATTCACCATCTCCAGA | | SRDNSKNTLY | | | |
| | | | | | | | | | | | | | | | | GACAATTCCAAGAACACGCTCTATCTG | | LQMNSLRAED | | | |
| | | | | | | | | | | | | | | | | CAAATGAACAGCCTGAGAGCCGAGGAC | | TAVYYCARDT | | | |
| | | | | | | | | | | | | | | | | ACGGCTGTGTATTACTGTGCGAGAGAT | | WEVPVADPPY | | | |
| | | | | | | | | | | | | | | | | ACTTGGGAAGTACCAGTTGCCGACCCT | | YYYYMDVWGR | | | |
| | | | | | | | | | | | | | | | | CCTTATTATTATTACTACATGGACGTG | | GTTVTVSS | | | |
| | | | | | | | | | | | | | | | | TGGGGCAGAGGGACCACGGTCACCGTC | | | | | |
| | | | | | | | | | | | | | | | | TCCTCA | | | | | |
| ADI- | IGHV1- | QVQLVQSG | 97 | YTFTSYY | 299 | WVRQA | 433 | IINPSD | 629 | RVTMT | 881 | ARNSFG | 1129 | WGQGTL | 1286 | CAGGTCCAGCTGGTGCAGTCTGGGGCT | 1420 | QVQLVQSGAE | 1703 | | |
| 75650 | 46 | AEVKKPGA | | MH | | PGQGL | | AGASYV | | RDTST | | YYYDNS | | VTVSS | | GAAGTGAAGAAGCCTGGGGCCTCAATG | | VKKPGASMKV | | | |
| | | SMKVSCKA | | | | EWMG | | QKFQG | | STVYM | | AYLPAL | | | | AAGGTTTCATGCAAGGCATATGGATAC | | SCKAYGYTFT | | | |
| | | YG | | | | | | | | ELSSL | | DFDY | | | | ACTTTCACCAGCTACTATATGCATTGG | | SYYMHWVRQA | | | |
| | | | | | | | | | | RSEDT | | | | | | GTGCGACAGGCCCCTGGACAAGGGCTT | | PGQGLEWMGI | | | |
| | | | | | | | | | | AVYYC | | | | | | GAGTGGATGGGAATAATCAACCCTAGT | | INPSDAGASY | | | |
| | | | | | | | | | | | | | | | | GATGCTGGCGCAAGCTACGTACAGAAG | | VQKFQGRVTM | | | |
| | | | | | | | | | | | | | | | | TTCCAGGGCAGAGTCACCATGACCAGG | | TRDTSTSTVY | | | |
| | | | | | | | | | | | | | | | | GACACGTCCACGAGCACAGTCTACATG | | MELSSLRSED | | | |
| | | | | | | | | | | | | | | | | GAGCTGAGCAGCCTGAGATCTGAGGAC | | TAVYYCARNS | | | |
| | | | | | | | | | | | | | | | | ACGGCCGTGTACTACTGTGCGAGAAAT | | FGYYYDNSAY | | | |
| | | | | | | | | | | | | | | | | TCTTTTGGATATTACTATGATAATAGT | | LPALDFDYWG | | | |
| | | | | | | | | | | | | | | | | GCTTATTTGCCCGCCTTGGACTTTGAC | | QGTLVTVSS | | | |
| | | | | | | | | | | | | | | | | TACTGGGGCCAGGGAACCCTGGTCACC | | | | | |
| | | | | | | | | | | | | | | | | GTCTCCTCA | | | | | |
| ADI- | IGHV3- | QVQLQQSG | 98 | ITVSSNY | 300 | WVRQA | 437 | IIYPGG | 608 | RFSIS | 882 | ARDRGG | 1108 | WGQGTL | 1286 | CAGGTGCAGCTGCAGCAGTCTGGAGGA | 1421 | QVQLQQSGGG | 1704 | | |
| 75593 | 53 | GGLIQPGG | | MS | | PGKGL | | SSFYAE | | RDSSK | | YPDY | | VTVSS | | GGCTTGATCCAGCCTGGGGGGTCCCTG | | LIQPGGSLRL | | | |
| | | SLRLSCVA | | | | EWVS | | SVKG | | NTLYL | | | | | | AGACTCTCCTGTGTAGCCTCTGAGATC | | SCVASEITVS | | | |
| | | SE | | | | | | | | QMDSL | | | | | | ACCGTCAGTAGCAACTACATGAGCTGG | | SNYMSWVRQA | | | |
| | | | | | | | | | | TVEDT | | | | | | GTCCGCCAGGCTCCAGGGAAGGGACTG | | PGKGLEWVSI | | | |
| | | | | | | | | | | AIYYC | | | | | | GAGTGGGTCTCAATAATTTATCCCGGT | | IYPGGSSFYA | | | |
| | | | | | | | | | | | | | | | | GGTAGTTCATTCTACGCAGAGTCCGTG | | ESVKGRFSIS | | | |
| | | | | | | | | | | | | | | | | AAGGGCCGATTCAGCATCTCCAGGGAC | | RDSSKNTLYL | | | |
| | | | | | | | | | | | | | | | | AGTTCCAAGAACACCCTCTATCTTCAA | | QMDSLTVEDT | | | |
| | | | | | | | | | | | | | | | | ATGGACAGCCTGACAGTCGAGGACACG | | AIYYCARDRG | | | |
| | | | | | | | | | | | | | | | | GCCATTTACTATTGTGCGAGAGATCGG | | GYPDYWGQGT | | | |
| | | | | | | | | | | | | | | | | GGTGGGTACCCTGACTACTGGGGCCAG | | LVTVSS | | | |
| | | | | | | | | | | | | | | | | GGAACCCTGGTCACCGTCTCCTCA | | | | | |
| ADI- | IGHV1- | QVQLVQSG | 35 | HTFANYY | 301 | WVRQA | 433 | IINPSG | 630 | RVTMT | 881 | ARGGIV | 1130 | WGQGTL | 1286 | CAGGTGCAGCTGGTGCAGTCTGGGGCT | 1422 | QVQLVQSGAE | 1705 | | |
| 75814 | 46 | AEVKKPGA | | MH | | PGQGL | | GSTAYA | | RDTST | | PDAKQY | | VTVSS | | GAGGTGAAGAAACCTGGGGCCTCAGTG | | VKKPGASVKV | | | |
| | | SVKVSCKA | | | | EWMG | | QHFQD | | STVYM | | FDY | | | | AAGGTTTCCTGCAAGGCATCCGGACAC | | SCKASGHTFA | | | |
| | | SG | | | | | | | | ELSSL | | | | | | ACCTTCGCCAACTACTATATGCACTGG | | NYYMHWVRQA | | | |
| | | | | | | | | | | RSEDT | | | | | | GTGCGACAGGCCCCTGGACAAGGGCTT | | PGQGLEWMGI | | | |
| | | | | | | | | | | AVYYC | | | | | | GAGTGGATGGGCATAATCAACCCTAGT | | INPSGGSTAY | | | |
| | | | | | | | | | | | | | | | | GGTGGTAGCACAGCCTACGCACAGCAC | | AQHFQDRVTM | | | |
| | | | | | | | | | | | | | | | | TTCCAGGACAGAGTCACCATGACCAGG | | TRDTSTSTVY | | | |
| | | | | | | | | | | | | | | | | GACACGTCCACGAGCACAGTCTACATG | | MELSSLRSED | | | |
| | | | | | | | | | | | | | | | | GAGCTGAGCAGCCTGAGATCTGAGGAC | | TAVYYCARGG | | | |
| | | | | | | | | | | | | | | | | ACGGCCGTGTATTACTGTGCGAGAGGG | | IVPDAKQYFD | | | |
| | | | | | | | | | | | | | | | | GGTATAGTCCCAGATGCTAAGCAATAC | | YWGQGTLVTV | | | |
| | | | | | | | | | | | | | | | | TTTGACTACTGGGGCCAGGGAACCCTG | | SS | | | |
| | | | | | | | | | | | | | | | | GTCACCGTCTCCTCA | | | | | |
| ADI- | IGHV3- | QVQLVESG | 11 | FTFSTYG | 215 | WVRQA | 431 | VISYDG | 631 | RFTIS | 883 | AKEGPG | 1073 | WGQGTL | 1286 | CAGGTGCAGCTGGTGGAGTCTGGGGGA | 1423 | QVQLVESGGG | 1706 | | |
| 75662 | 30 | GGVVQPGR | | MH | | PGKGL | | SNKHYA | | RDNSK | | ASGFNY | | VTVSS | | GGCGTAGTCCAGCCTGGGAGGTCCCTG | | VVQPGRSLRL | | | |
| | | SLRLSCAA | | | | EWVA | | DSVKG | | KTLYL | | FDY | | | | AGACTCTCCTGTGCAGCCTCTGGATTC | | SCAASGFTFS | | | |
| | | SG | | | | | | | | QMNSL | | | | | | ACCTTCAGTACCTATGGCATGCACTGG | | TYGMHWVRQA | | | |
| | | | | | | | | | | RTEDA | | | | | | GTCCGCCAGGCTCCAGGCAAGGGGCTG | | PGKGLEWVAV | | | |
| | | | | | | | | | | AVYYC | | | | | | GAGTGGGTGGCAGTTATATCATATGAT | | ISYDGSNKHY | | | |
| | | | | | | | | | | | | | | | | GGAAGTAATAAACACTATGCAGACTCC | | ADSVKGRFTI | | | |
| | | | | | | | | | | | | | | | | GTGAAGGGCCGATTCACCATCTCCAGA | | SRDNSKKTLY | | | |
| | | | | | | | | | | | | | | | | GACAATTCCAAGAAGACGCTGTATCTG | | LQMNSLRTED | | | |
| | | | | | | | | | | | | | | | | CAAATGAACAGCCTGAGAACTGAGGAC | | AAVYYCAKEG | | | |
| | | | | | | | | | | | | | | | | GCGGCTGTGTATTACTGTGCGAAAGAG | | PGASGFNYFD | | | |
| | | | | | | | | | | | | | | | | GGGCCCGGGGCTTCGGGATTTAACTAC | | YWGQGTLVTV | | | |
| | | | | | | | | | | | | | | | | TTTGACTACTGGGGCCAGGGAACCCTG | | SS | | | |
| | | | | | | | | | | | | | | | | GTCACCGTCTCCTCA | | | | | |
| ADI- | IGHV3- | EVQLVQTG | 99 | FIVSRNY | 302 | WVRQA | 437 | LIYAGG | 632 | RFTIS | 789 | TRDRGP | 1131 | WGQGTL | 1286 | GAGGTGCAGCTGGTGCAGACTGGAGGA | 1424 | EVQLVQTGGG | 1707 | | |
| 75627 | 53 | GGLIQPGG | | MS | | PGKGL | | STFYAD | | RDNSK | | LLHDY | | VTVSS | | GGCTTGATCCAGCCTGGGGGGTCCCTG | | LIQPGGSLRL | | | |
| | | SLRLSCAA | | | | EWVS | | SVKG | | NTLYL | | | | | | AGACTCTCCTGTGCAGCCTCTGAATTC | | SCAASEFIVS | | | |
| | | SE | | | | | | | | QMNSL | | | | | | ATCGTCAGTCGCAACTACATGAGTTGG | | RNYMSWVRQA | | | |
| | | | | | | | | | | RTEDT | | | | | | GTCCGCCAGGCTCCAGGGAAGGGGCTG | | PGKGLEWVSL | | | |
| | | | | | | | | | | AVYYC | | | | | | GAGTGGGTCTCACTTATCTATGCCGGT | | IYAGGSTFYA | | | |
| | | | | | | | | | | | | | | | | GGTAGTACATTCTACGCAGACTCCGTG | | DSVKGRFTIS | | | |
| | | | | | | | | | | | | | | | | AAGGGCCGATTCACCATCTCCAGAGAC | | RDNSKNTLYL | | | |
| | | | | | | | | | | | | | | | | AATTCCAAGAACACACTTTATCTACAA | | QMNSLRTEDT | | | |
| | | | | | | | | | | | | | | | | ATGAACAGCCTCAGAACCGAGGACACG | | AVYYCTRDRG | | | |
| | | | | | | | | | | | | | | | | GCCGTGTATTACTGTACGAGAGATAGA | | PLLHDYWGQG | | | |
| | | | | | | | | | | | | | | | | GGGCCTTTACTACACGACTACTGGGGC | | TLVTVSS | | | |
| | | | | | | | | | | | | | | | | CAGGGAACCCTGGTCACCGTCTCCTCA | | | | | |
| ADI- | IGHV3- | QVQLVESG | 100 | FTFEDYA | 208 | WVRQT | 474 | GISWNG | 633 | RFIIS | 884 | TKAQAP | 1132 | WGPGTT | 1295 | CAGGTGCAGCTGGTGGAGTCTGGGGGA | 1425 | QVQLVESGGG | 1708 | | |
| 75792 | 9 | GGLVQPGR | | MH | | PGKGP | | GIMGYA | | RDNAK | | LDSGDY | | VTVSS | | GGCTTGGTACAGCCTGGCAGGTCCCTG | | LVQPGRSLRL | | | |
| | | SLRLSCAA | | | | EWVS | | ASVEG | | NSLYL | | GGGFHI | | | | AGACTCTCCTGTGCAGCCTCTGGATTC | | SCAASGFTFE | | | |
| | | SG | | | | | | | | QMMRL | | | | | | ACCTTTGAAGATTATGCCATGCACTGG | | DYAMHWVRQT | | | |
| | | | | | | | | | | RAEDT | | | | | | GTCCGGCAAACTCCAGGGAAGGGCCCG | | PGKGPEWVSG | | | |
| | | | | | | | | | | AFYYC | | | | | | GAGTGGGTCTCAGGTATTAGTTGGAAT | | ISWNGGIMGY | | | |
| | | | | | | | | | | | | | | | | GGGGGTATCATGGGCTATGCGGCCTCT | | AASVEGRFII | | | |
| | | | | | | | | | | | | | | | | GTAGAGGGCCGATTCATCATCTCCAGA | | SRDNAKNSLY | | | |
| | | | | | | | | | | | | | | | | GACAACGCCAAGAACTCCCTGTATCTG | | LQMMRLRAED | | | |
| | | | | | | | | | | | | | | | | CAAATGATGCGTCTGAGAGCAGAGGAC | | TAFYYCTKAQ | | | |
| | | | | | | | | | | | | | | | | ACGGCCTTCTATTACTGTACAAAAGCC | | APLDSGDYGG | | | |
| | | | | | | | | | | | | | | | | CAAGCCCCACTTGACTCCGGTGACTAC | | GFHIWGPGTT | | | |
| | | | | | | | | | | | | | | | | GGCGGTGGTTTTCATATCTGGGGCCCA | | VTVSS | | | |
| | | | | | | | | | | | | | | | | GGGACAACGGTCACCGTCTCTTCA | | | | | |
| ADI- | IGHV3- | QVQLVESG | 101 | FTFRDHA | 303 | WVRQA | 475 | TISGSG | 634 | RFTIS | 885 | ARGTTI | 1133 | WGQGTL | 1286 | CAGGTGCAGCTGGTGGAGTCTGGGGGA | 1426 | QVQLVESGGG | 1709 | | |
| 75791 | 23 | GGLVQPGG | | MS | | PGKGL | | DTFSHA | | RDNSK | | FGGALD | | VTVSS | | GGCTTGGTACAGCCTGGGGGGTCCCTG | | LVQPGGSLRV | | | |
| | | SLRVSCAG | | | | DWAS | | DSVKG | | DTLYL | | IP | | | | AGAGTCTCCTGTGCAGGCTCTGGATTC | | SCAGSGFTFR | | | |
| | | SG | | | | | | | | QMTSL | | | | | | ACCTTTAGAGACCACGCCATGAGCTGG | | DHAMSWVRQA | | | |
| | | | | | | | | | | RGEDT | | | | | | GTCCGCCAGGCTCCAGGGAAGGGACTG | | PGKGLDWAST | | | |
| | | | | | | | | | | AVYFC | | | | | | GACTGGGCCTCAACTATCAGTGGCAGT | | ISGSGDTFSH | | | |
| | | | | | | | | | | | | | | | | GGTGATACTTTTAGCCACGCAGATTCC | | ADSVKGRFTI | | | |
| | | | | | | | | | | | | | | | | GTGAAGGGCCGGTTCACCATCTCCAGA | | SRDNSKDTLY | | | |
| | | | | | | | | | | | | | | | | GACAACTCCAAGGACACTCTCTACTTA | | LQMTSLRGED | | | |
| | | | | | | | | | | | | | | | | CAAATGACCAGCCTGAGAGGCGAGGAC | | TAVYFCARGT | | | |
| | | | | | | | | | | | | | | | | ACGGCCGTGTATTTCTGTGCGAGAGGG | | TIFGGALDPW | | | |
| | | | | | | | | | | | | | | | | ACCACGATTTTTGGGGGGGCTTTAGAC | | GQGTLVTVSS | | | |
| | | | | | | | | | | | | | | | | CCCTGGGGCCAGGGAACCCTGGTCACC | | | | | |
| | | | | | | | | | | | | | | | | GTCTCTTCA | | | | | |
| ADI- | IGHV5- | QVQLVQSG | 102 | YYFARYW | 304 | WVRQM | 476 | IIYPGD | 635 | QVTMS | 886 | ARQGTT | 1134 | WGQGTL | 1286 | CAGGTCCAGCTGGTGCAGTCTGGAGCA | 1427 | QVQLVQSGAE | 1710 | | |
| 75721 | 51 | AEVKKAGE | | IG | | PGKGL | | SDTRYS | | ADKSI | | VGHFDY | | VTVSS | | GAGGTGAAAAAGGCCGGGGAGTCTCTG | | VKKAGESLKI | | | |
| | | SLKISCKG | | | | EWMG | | PSFQG | | STAFL | | | | | | AAGATCTCCTGTAAGGGTTCTGGATAC | | SCKGSGYYFA | | | |
| | | SG | | | | | | | | QWSSL | | | | | | TACTTTGCCAGATACTGGATCGGCTGG | | RYWIGWVRQM | | | |
| | | | | | | | | | | KASDT | | | | | | GTGCGCCAGATGCCCGGGAAAGGCCTG | | PGKGLEWMGI | | | |
| | | | | | | | | | | AMYYC | | | | | | GAATGGATGGGGATCATCTATCCTGGT | | IYPGDSDTRY | | | |
| | | | | | | | | | | | | | | | | GACTCGGATACCAGATACAGCCCGTCC | | SPSFQGQVTM | | | |
| | | | | | | | | | | | | | | | | TTCCAAGGCCAGGTCACCATGTCAGCC | | SADKSISTAF | | | |
| | | | | | | | | | | | | | | | | GACAAGTCCATCAGCACCGCCTTCCTG | | LQWSSLKASD | | | |
| | | | | | | | | | | | | | | | | CAGTGGAGCAGCCTGAAGGCCTCGGAC | | TAMYYCARQG | | | |
| | | | | | | | | | | | | | | | | ACCGCCATGTATTACTGTGCGAGACAG | | TTVGHFDYWG | | | |
| | | | | | | | | | | | | | | | | GGCACGACAGTAGGACACTTTGACTAC | | QGTLVTVSS | | | |
| | | | | | | | | | | | | | | | | TGGGGCCAGGGAACCCTGGTCACCGTC | | | | | |
| | | | | | | | | | | | | | | | | TCCTCA | | | | | |
| ADI- | IGHV1- | QVQLQQSG | 103 | YTFSNYA | 305 | WVRQA | 477 | WINPAN | 636 | RVTFT | 887 | ARGVSP | 1135 | WGRGTT | 1294 | CAGGTACAGCTGCAGCAGTCTGGGGCT | 1428 | QVQLQQSGAE | 1711 | | |
| 75761 | 3 | AEVKKPGA | | IH | | PGQGP | | NNIKYS | | RDTSA | | NTVVGL | | VTVSS | | GAGGTGAAGAAGCCTGGGGCCTCAGTG | | VKKPGASVKV | | | |
| | | SVKVSCKA | | | | EWMG | | EKFQG | | STGYM | | GYYYYM | | | | AAAGTTTCCTGCAAGGCTTCTGGATAC | | SCKASGYTFS | | | |
| | | SG | | | | | | | | EMGSL | | DV | | | | ACCTTCTCTAACTATGCAATACATTGG | | NYAIHWVRQA | | | |
| | | | | | | | | | | TSEDT | | | | | | GTGCGCCAGGCCCCCGGACAAGGGCCT | | PGQGPEWMGW | | | |
| | | | | | | | | | | AVYYC | | | | | | GAGTGGATGGGGTGGATCAACCCTGCC | | INPANNNIKY | | | |
| | | | | | | | | | | | | | | | | AATAATAACATAAAGTATTCAGAGAAG | | SEKFQGRVTF | | | |
| | | | | | | | | | | | | | | | | TTCCAGGGCAGAGTCACCTTTACCAGG | | TRDTSASTGY | | | |
| | | | | | | | | | | | | | | | | GACACATCCGCGAGCACAGGCTACATG | | MEMGSLTSED | | | |
| | | | | | | | | | | | | | | | | GAGATGGGAAGCCTGACATCTGAAGAC | | TAVYYCARGV | | | |
| | | | | | | | | | | | | | | | | ACGGCTGTCTATTACTGTGCGAGAGGT | | SPNTVVGLGY | | | |
| | | | | | | | | | | | | | | | | GTCTCCCCTAATACGGTTGTTGGATTG | | YYYMDVWGRG | | | |
| | | | | | | | | | | | | | | | | GGTTACTACTACTACATGGACGTCTGG | | TTVTVSS | | | |
| | | | | | | | | | | | | | | | | GGCAGAGGGACCACGGTCACCGTCTCC | | | | | |
| | | | | | | | | | | | | | | | | TCA | | | | | |
| ADI- | IGHV1- | QVQLVQSG | 50 | GTFIRNT | 306 | WLRQA | 478 | RVIPLL | 637 | RVTII | 888 | AREGTG | 1136 | WGQGTT | 1287 | CAGGTGCAGCTGGTGCAGTCTGGGGCT | 1429 | QVQLVQSGAE | 1712 | | |
| 75682 | 69 | AEVKKPGS | | IS | | PGQGL | | NVVDYA | | ADKSS | | YCDGGV | | VTVSS | | GAGGTGAAGAAGCCTGGGTCCTCGGTG | | VKKPGSSVKV | | | |
| | | SVKVSCKA | | | | EWMG | | QKFQG | | STVYM | | CHDAFE | | | | AAGGTCTCCTGCAAGGCTTCTGGAGGC | | SCKASGGTFI | | | |
| | | SG | | | | | | | | ELSSL | | I | | | | ACCTTCATCAGGAACACTATAAGTTGG | | RNTISWLRQA | | | |
| | | | | | | | | | | RSEDT | | | | | | CTGCGACAGGCCCCTGGACAGGGGCTT | | PGQGLEWMGR | | | |
| | | | | | | | | | | AVYYC | | | | | | GAGTGGATGGGAAGGGTCATCCCTTTA | | VIPLLNVVDY | | | |
| | | | | | | | | | | | | | | | | CTTAATGTAGTTGACTACGCGCAGAAG | | AQKFQGRVTI | | | |
| | | | | | | | | | | | | | | | | TTCCAGGGCAGAGTCACGATAATCGCG | | IADKSSSTVY | | | |
| | | | | | | | | | | | | | | | | GACAAATCTTCGAGCACAGTCTACATG | | MELSSLRSED | | | |
| | | | | | | | | | | | | | | | | GAGTTGAGTAGCCTGAGATCTGAGGAC | | TAVYYCAREG | | | |
| | | | | | | | | | | | | | | | | ACGGCCGTGTATTACTGTGCGAGAGAG | | TGYCDGGVCH | | | |
| | | | | | | | | | | | | | | | | GGGACCGGGTATTGTGATGGTGGTGTA | | DAFEIWGQGT | | | |
| | | | | | | | | | | | | | | | | TGCCATGATGCATTTGAGATCTGGGGC | | TVTVSS | | | |
| | | | | | | | | | | | | | | | | CAAGGGACAACGGTCACCGTCTCCTCA | | | | | |
| ADI- | IGHV3- | QVQLVQSG | 79 | ITVSSNY | 300 | WVRQA | 437 | LLYAGG | 638 | RFTIS | 889 | ARDLVD | 1137 | WGQGTT | 1287 | CAGGTGCAGCTGGTGCAGTCTGGAGGA | 1430 | QVQLVQSGGG | 1713 | | |
| 75847 | 53 | GGLIQPGG | | MS | | PGKGL | | STFYAD | | RDNSK | | YGMDV | | VTVSS | | GGCTTGATCCAGCCGGGGGGGTCCCTG | | LIQPGGSLRL | | | |
| | | SLRLSCAA | | | | EWVS | | SVKG | | NTLFL | | | | | | AGACTCTCCTGCGCAGCCTCTGGGATC | | SCAASGITVS | | | |
| | | SG | | | | | | | | QMNSL | | | | | | ACCGTCAGTAGCAACTACATGAGCTGG | | SNYMSWVRQA | | | |
| | | | | | | | | | | RADDT | | | | | | GTCCGCCAGGCTCCAGGGAAGGGGCTG | | PGKGLEWVSL | | | |
| | | | | | | | | | | AVYYC | | | | | | GAGTGGGTCTCACTTCTTTATGCCGGT | | LYAGGSTFYA | | | |
| | | | | | | | | | | | | | | | | GGAAGCACCTTCTACGCAGACTCCGTG | | DSVKGRFTIS | | | |
| | | | | | | | | | | | | | | | | AAGGGCCGATTCACCATCTCCAGAGAC | | RDNSKNTLFL | | | |
| | | | | | | | | | | | | | | | | AATTCCAAGAACACACTGTTTCTTCAA | | QMNSLRADDT | | | |
| | | | | | | | | | | | | | | | | ATGAACAGCCTGAGAGCCGACGACACG | | AVYYCARDLV | | | |
| | | | | | | | | | | | | | | | | GCCGTGTATTACTGTGCGAGAGATCTG | | DYGMDVWGQG | | | |
| | | | | | | | | | | | | | | | | GTGGATTACGGTATGGACGTCTGGGGC | | TTVTVSS | | | |
| | | | | | | | | | | | | | | | | CAAGGGACCACGGTCACCGTCTCCTCA | | | | | |
| ADI- | IGHV3- | QVQLVESG | 104 | FTFSSYE | 307 | WVRQA | 479 | SISSRG | 639 | RFTIS | 890 | ARDLGG | 1138 | WGQGTL | 1286 | CAGGTGCAGCTGGTGGAGTCTGGGGGA | 1431 | QVQLVESGGG | 1714 | | |
| 75852 | 48 | GGLVQPGG | | MN | | PGKGL | | SSKFYA | | RDNAK | | SYSGTF | | VTVSS | | GGCTTGGTACAGCCTGGAGGGTCCCTG | | LVQPGGSLRL | | | |
| | | SLRLYCAA | | | | ESIS | | DSVKG | | NSVFL | | DH | | | | AGACTCTATTGTGCAGCCTCTGGATTC | | YCAASGFTFS | | | |
| | | SG | | | | | | | | QMNSL | | | | | | ACCTTCAGTAGTTATGAAATGAATTGG | | SYEMNWVRQA | | | |
| | | | | | | | | | | RVEDT | | | | | | GTCCGCCAGGCTCCTGGGAAGGGGCTG | | PGKGLESISS | | | |
| | | | | | | | | | | ALYYC | | | | | | GAATCGATCTCATCCATTAGTAGTCGT | | ISSRGSSKFY | | | |
| | | | | | | | | | | | | | | | | GGGAGTTCCAAATTCTACGCAGACTCT | | ADSVKGRFTI | | | |
| | | | | | | | | | | | | | | | | GTGAAGGGCCGATTCACCATCTCCAGA | | SRDNAKNSVF | | | |
| | | | | | | | | | | | | | | | | GACAACGCCAAGAACTCGGTGTTTCTG | | LQMNSLRVED | | | |
| | | | | | | | | | | | | | | | | CAAATGAACAGCCTGAGAGTCGAGGAC | | TALYYCARDL | | | |
| | | | | | | | | | | | | | | | | ACGGCTCTTTACTATTGTGCGAGAGAT | | GGSYSGTFDH | | | |
| | | | | | | | | | | | | | | | | TTGGGAGGCAGCTACTCGGGGACCTTT | | WGQGTLVTVS | | | |
| | | | | | | | | | | | | | | | | GACCACTGGGGCCAGGGAACCCTGGTC | | S | | | |
| | | | | | | | | | | | | | | | | ACCGTCTCCTCA | | | | | |
| ADI- | IGHV3- | EVQLVQSG | 105 | FTFSNYD | 290 | WVRQP | 480 | AIGTAG | 640 | RLTIS | 891 | TRALFC | 1139 | WGRGTL | 1288 | GAGGTGCAGCTGGTGCAGTCTGGGGGA | 1432 | EVQLVQSGGV | 1715 | | |
| 75715 | 13 | GVLVQPGG | | MH | | PGKRL | | DTYYSD | | RENAR | | GDDCYT | | VTVSS | | GTCTTGGTACAGCCGGGGGGGTCCCTG | | LVQPGGSLRL | | | |
| | | SLRLSCAA | | | | EWVS | | SVKG | | KSLYL | | NWYFDL | | | | AGACTCTCCTGTGCAGCCTCTGGATTC | | SCAASGFTFS | | | |
| | | SG | | | | | | | | QMNSL | | | | | | ACCTTCAGTAACTACGACATGCACTGG | | NYDMHWVRQP | | | |
| | | | | | | | | | | RDGDT | | | | | | GTCCGCCAACCTCCAGGAAAACGTCTG | | PGKRLEWVSA | | | |
| | | | | | | | | | | AVYYC | | | | | | GAATGGGTCTCAGCTATTGGAACTGCT | | IGTAGDTYYS | | | |
| | | | | | | | | | | | | | | | | GGTGACACATACTATTCAGACTCCGTG | | DSVKGRLTIS | | | |
| | | | | | | | | | | | | | | | | AAGGGCCGACTCACCATCTCCAGAGAA | | RENARKSLYL | | | |
| | | | | | | | | | | | | | | | | AATGCCAGGAAGTCCTTGTATCTTCAA | | QMNSLRDGDT | | | |
| | | | | | | | | | | | | | | | | ATGAACAGCCTGAGAGACGGCGACACG | | AVYYCTRALF | | | |
| | | | | | | | | | | | | | | | | GCAGTGTATTACTGTACAAGAGCTCTG | | CGDDCYTNWY | | | |
| | | | | | | | | | | | | | | | | TTTTGTGGTGATGATTGCTACACAAAC | | FDLWGRGTLV | | | |
| | | | | | | | | | | | | | | | | TGGTACTTCGATCTCTGGGGCCGCGGC | | TVSS | | | |
| | | | | | | | | | | | | | | | | ACCCTGGTCACCGTCTCCTCA | | | | | |
| ADI- | IGHV3- | QVTLKESG | 106 | FTFSGFG | 308 | WIRQA | 461 | VISYDG | 641 | RFTIS | 892 | AKDSHD | 1140 | WGQGTT | 1287 | CAGGTCACGTTGAAGGAGTCTGGGGGA | 1433 | QVTLKESGGG | 1716 | | |
| 75854 | 30 | GGVVQPGR | | MH | | PGKGL | | SNKYYE | | RDNSK | | YAMDV | | VTVSS | | GGCGTGGTCCAGCCTGGGAGGTCCCTG | | VVQPGRSLRL | | | |
| | | SLRLSCAA | | | | EWVA | | DSVKG | | NTLYL | | | | | | AGACTCTCCTGTGCAGCCTCTGGTTTC | | SCAASGFTFS | | | |
| | | SG | | | | | | | | QMNSL | | | | | | ACTTTTAGTGGTTTTGGCATGCACTGG | | GFGMHWIRQA | | | |
| | | | | | | | | | | RAEDT | | | | | | ATCCGCCAGGCTCCAGGCAAGGGGCTG | | PGKGLEWVAV | | | |
| | | | | | | | | | | AVYFC | | | | | | GAGTGGGTGGCAGTTATATCATATGAT | | ISYDGSNKYY | | | |
| | | | | | | | | | | | | | | | | GGAAGTAATAAATATTATGAAGACTCC | | EDSVKGRFTI | | | |
| | | | | | | | | | | | | | | | | GTGAAGGGCCGATTCACCATTTCCAGA | | SRDNSKNTLY | | | |
| | | | | | | | | | | | | | | | | GACAATTCCAAGAACACGCTGTATCTG | | LQMNSLRAED | | | |
| | | | | | | | | | | | | | | | | CAAATGAACAGCCTGAGAGCTGAGGAC | | TAVYFCAKDS | | | |
| | | | | | | | | | | | | | | | | ACGGCTGTCTATTTTTGTGCGAAAGAT | | HDYAMDVWGQ | | | |
| | | | | | | | | | | | | | | | | AGTCACGATTACGCTATGGACGTCTGG | | GTTVTVSS | | | |
| | | | | | | | | | | | | | | | | GGCCAAGGGACCACGGTCACCGTCTCC | | | | | |
| | | | | | | | | | | | | | | | | TCA | | | | | |
| ADI- | IGHV2- | QVTLKQSG | 107 | FSIRFNG | 309 | WIRQP | 481 | LIFWDD | 642 | RVSIT | 893 | AHSTDR | 1141 | WGQGTL | 1286 | CAGGTCACGCTGAAGCAGTCTGGTCCT | 1434 | QVTLKQSGPT | 1717 | | |
| 75701 | 5 | PTLVRPTR | | VGVG | | PGKAL | | DKRYSP | | KDTSR | | RNFEWL | | VTVSS | | ACGCTGGTGAGACCCACACGGACCCTC | | LVRPTRTLTV | | | |
| | | TLTVTCTF | | | | EWLG | | SLKS | | NQVVL | | SLSGWG | | | | ACGGTGACGTGCACCTTCTTTGGGTTT | | TCTFFGFSIR | | | |
| | | FG | | | | | | | | TMTNM | | GNFEY | | | | TCAATCAGATTTAATGGAGTGGGTGTG | | FNGVGVGWIR | | | |
| | | | | | | | | | | DPVDT | | | | | | GGCTGGATCCGGCAGCCCCCAGGAAAG | | QPPGKALEWL | | | |
| | | | | | | | | | | ATYYC | | | | | | GCCCTGGAGTGGCTTGGATTAATTTTT | | GLIFWDDDKR | | | |
| | | | | | | | | | | | | | | | | TGGGATGATGATAAGCGGTACAGCCCA | | YSPSLKSRVS | | | |
| | | | | | | | | | | | | | | | | TCTTTGAAGAGCAGGGTCAGCATCACC | | ITKDTSRNQV | | | |
| | | | | | | | | | | | | | | | | AAGGACACCTCCAGAAACCAGGTGGTC | | VLTMTNMDPV | | | |
| | | | | | | | | | | | | | | | | CTTACAATGACCAACATGGACCCTGTG | | DTATYYCAHS | | | |
| | | | | | | | | | | | | | | | | GACACAGCCACATATTACTGTGCACAC | | TDRRNFEWLS | | | |
| | | | | | | | | | | | | | | | | TCCACAGATAGACGCAATTTTGAATGG | | LSGWGGNFEY | | | |
| | | | | | | | | | | | | | | | | TTATCATTGTCCGGGTGGGGGGGGAAC | | WGQGTLVTVS | | | |
| | | | | | | | | | | | | | | | | TTTGAATACTGGGGCCAGGGAACCCTG | | S | | | |
| | | | | | | | | | | | | | | | | GTCACCGTTTCCTCA | | | | | |
| ADI- | IGHV3- | EVQLVQTG | 99 | FIVTRNY | 310 | WVRQA | 437 | LIYPGG | 643 | RFTIS | 777 | ARDRGP | 1142 | WGQGTL | 1286 | GAGGTGCAGCTGGTGCAGACTGGAGGA | 1435 | EVQLVQTGGG | 1718 | | |
| 75681 | 53 | GGLIQPGG | | MS | | PGKGL | | STYYAD | | RDNSK | | SLHDY | | VTVSS | | GGCTTGATCCAGCCGGGGGGGTCCCTG | | LIQPGGSLRL | | | |
| | | SLRLSCAA | | | | EWVS | | SVKG | | NTLYL | | | | | | AGACTCTCCTGTGCAGCCTCTGAATTC | | SCAASEFIVT | | | |
| | | SE | | | | | | | | QMNSL | | | | | | ATCGTCACTAGAAACTACATGAGTTGG | | RNYMSWVRQA | | | |
| | | | | | | | | | | RAEDT | | | | | | GTCCGCCAGGCTCCAGGGAAGGGGCTG | | PGKGLEWVSL | | | |
| | | | | | | | | | | AVYYC | | | | | | GAGTGGGTCTCACTCATATATCCCGGT | | IYPGGSTYYA | | | |
| | | | | | | | | | | | | | | | | GGCAGCACATACTACGCAGACTCCGTG | | DSVKGRFTIS | | | |
| | | | | | | | | | | | | | | | | AAGGGCCGATTCACAATCTCCAGAGAC | | RDNSKNTLYL | | | |
| | | | | | | | | | | | | | | | | AATTCCAAGAACACCCTCTATCTTCAA | | QMNSLRAEDT | | | |
| | | | | | | | | | | | | | | | | ATGAACAGCCTGAGAGCCGAGGACACG | | AVYYCARDRG | | | |
| | | | | | | | | | | | | | | | | GCCGTCTATTACTGTGCGAGAGATAGG | | PSLHDYWGQG | | | |
| | | | | | | | | | | | | | | | | GGGCCTTCACTACACGACTATTGGGGC | | TLVTVSS | | | |
| | | | | | | | | | | | | | | | | CAGGGAACCCTGGTCACCGTCTCCTCA | | | | | |
| ADI- | IGHV3- | EVQLVETG | 80 | IIVTSNY | 311 | WVRQA | 437 | VIYPGG | 644 | RFTVS | 894 | ARERTS | 1143 | WGQGTL | 1286 | GAGGTGCAGCTGGTGGAGACTGGAGGA | 1436 | EVQLVETGGG | 1719 | | |
| 75757 | 53 | GGLIQPGG | | MN | | PGKGL | | TTYYAD | | RDNSK | | GRLD | | VTVSS | | GGCTTGATCCAGCCTGGGGGGTCCCTG | | LIQPGGSLRL | | | |
| | | SLRLSCAA | | | | EWVS | | SVKG | | NTLYL | | | | | | AGACTCTCCTGTGCAGCCTCTGAGATC | | SCAASEIIVT | | | |
| | | SE | | | | | | | | QMNSL | | | | | | ATCGTCACTAGCAACTACATGAACTGG | | SNYMNWVRQA | | | |
| | | | | | | | | | | RAEDT | | | | | | GTCCGCCAGGCTCCAGGGAAGGGGCTG | | PGKGLEWVSV | | | |
| | | | | | | | | | | AVYYC | | | | | | GAGTGGGTCTCAGTCATTTATCCCGGT | | IYPGGTTYYA | | | |
| | | | | | | | | | | | | | | | | GGTACCACATACTACGCAGACTCCGTG | | DSVKGRFTVS | | | |
| | | | | | | | | | | | | | | | | AAGGGCCGATTCACCGTCTCCAGAGAC | | RDNSKNTLYL | | | |
| | | | | | | | | | | | | | | | | AATTCCAAGAACACCCTGTATCTTCAA | | QMNSLRAEDT | | | |
| | | | | | | | | | | | | | | | | ATGAACAGTCTGAGAGCCGAGGACACG | | AVYYCARERT | | | |
| | | | | | | | | | | | | | | | | GCCGTTTATTACTGTGCGAGGGAACGG | | SGRLDWGQGT | | | |
| | | | | | | | | | | | | | | | | ACCAGTGGCCGGCTCGACTGGGGCCAG | | LVTVSS | | | |
| | | | | | | | | | | | | | | | | GGAACCCTGGTCACCGTCTCCTCA | | | | | |
| ADI- | IGHV3- | QVQLVQSG | 108 | FTFSRYW | 312 | WVRQA | 431 | NIKQDG | 645 | RFTIS | 895 | ARDSTP | 1144 | WGQGTQ | 1296 | CAGGTGCAGCTGGTGCAGTCTGGGGGA | 1437 | QVQLVQSGGG | 1720 | | |
| 75656 | 7 | GGLVQPGG | | MT | | PGKGL | | SEKNYV | | RDNAK | | ATYNND | | VTVSS | | GGCTTGGTCCAGCCTGGGGGGTCCATG | | LVQPGGSMRL | | | |
| | | SMRLSCAA | | | | EWVA | | DSVNG | | NSLFL | | WTYPEY | | | | AGACTCTCCTGTGCAGCCTCTGGATTC | | SCAASGFTFS | | | |
| | | ISG | | | | | | | | QMISL | | FDL | | | | ACCTTTAGTCGATATTGGATGACCTGG | | RYWMTWVRQA | | | |
| | | | | | | | | | | RAEDS | | | | | | GTCCGCCAGGCTCCAGGGAAGGGGCTG | | PGKGLEWVAN | | | |
| | | | | | | | | | | AVYFC | | | | | | GAGTGGGTGGCCAACATAAAGCAAGAT | | IKQDGSEKNY | | | |
| | | | | | | | | | | | | | | | | GGAAGTGAGAAAAACTATGTGGACTCT | | VDSVNGRFTI | | | |
| | | | | | | | | | | | | | | | | GTCAACGGCCGATTCACCATCTCCAGA | | SRDNAKNSLF | | | |
| | | | | | | | | | | | | | | | | GACAACGCCAAGAACTCACTGTTTCTG | | LQMISLRAED | | | |
| | | | | | | | | | | | | | | | | CAAATGATCAGCCTGAGAGCCGAGGAC | | SAVYFCARDS | | | |
| | | | | | | | | | | | | | | | | TCGGCTGTGTATTTCTGTGCGAGAGAT | | TPATYNNDWT | | | |
| | | | | | | | | | | | | | | | | TCTACGCCGGCTACTTATAACAATGAC | | YPEYFDLWGQ | | | |
| | | | | | | | | | | | | | | | | TGGACTTACCCTGAATACTTCGACCTC | | GTQVTVSS | | | |
| | | | | | | | | | | | | | | | | TGGGGCCAGGGCACCCAGGTCACCGTC | | | | | |
| | | | | | | | | | | | | | | | | TCCTCA | | | | | |
| ADI- | IGHV3- | QVQLEQSG | 109 | FTFSRYW | 312 | WVRQA | 431 | NIKQDG | 598 | RFTIS | 896 | ARDCTP | 1145 | WGQGTL | 1286 | CAGGTGCAGCTGGAGCAGTCTGGGGGA | 1438 | QVQLEQSGGG | 1721 | | |
| 75677 | 7 | GGLVQPGG | | MT | | PGKGL | | SEKNYV | | RDNAK | | ATYNND | | VTVSS | | GGCTTGGTCCAGCCTGGGGGGTCCTTG | | LVQPGGSLRL | | | |
| | | SLRLSCAA | | | | EWVA | | DSVKG | | NSLFM | | WTYAEY | | | | AGACTCTCCTGTGCAGCCTCTGGATTC | | SCAASGFTFS | | | |
| | | SG | | | | | | | | QMNSL | | FDH | | | | ACCTTTAGTCGGTATTGGATGACCTGG | | RYWMTWVRQA | | | |
| | | | | | | | | | | RAEDT | | | | | | GTCCGCCAGGCTCCAGGGAAGGGGCTG | | PGKGLEWVAN | | | |
| | | | | | | | | | | AVYYC | | | | | | GAGTGGGTGGCCAACATAAAGCAAGAT | | IKQDGSEKNY | | | |
| | | | | | | | | | | | | | | | | GGAAGTGAGAAAAACTATGTGGACTCT | | VDSVKGRFTI | | | |
| | | | | | | | | | | | | | | | | GTGAAGGGCCGATTCACCATCTCCAGA | | SRDNAKNSLF | | | |
| | | | | | | | | | | | | | | | | GACAACGCCAAGAACTCACTGTTTATG | | MQMNSLRAED | | | |
| | | | | | | | | | | | | | | | | CAAATGAACAGCCTGAGAGCCGAGGAC | | TAVYYCARDC | | | |
| | | | | | | | | | | | | | | | | ACGGCTGTGTATTACTGTGCGAGAGAT | | TPATYNNDWT | | | |
| | | | | | | | | | | | | | | | | TGTACGCCGGCTACTTATAACAATGAC | | YAEYFDHWGQ | | | |
| | | | | | | | | | | | | | | | | TGGACATACGCTGAATACTTCGACCAC | | GTLVTVSS | | | |
| | | | | | | | | | | | | | | | | TGGGGCCAGGGCACCCTGGTCACCGTC | | | | | |
| | | | | | | | | | | | | | | | | TCCTCA | | | | | |
| ADI- | IGHV1- | QVQLVQSG | 35 | YSFTSYY | 313 | WVRQA | 433 | IINPSG | 646 | RVTMT | 897 | ARDAGV | 1146 | WGQGTL | 1286 | CAGGTCCAGCTGGTGCAGTCTGGGGCT | 1439 | QVQLVQSGAE | 1722 | | |
| 75860 | 46 | AEVKKPGA | | IQ | | PGQGL | | GSTSYA | | RDEST | | VDPLDP | | VTVSS | | GAGGTGAAGAAGCCTGGGGCCTCAGTG | | VKKPGASVKV | | | |
| | | SVKVSCKA | | | | EWMG | | QKFQG | | RTVYM | | YPLPRF | | | | AAGGTTTCCTGCAAGGCATCTGGATAC | | SCKASGYSFT | | | |
| | | SG | | | | | | | | ELSSL | | | | | | TCCTTCACCAGCTACTATATACAGTGG | | SYYIQWVRQA | | | |
| | | | | | | | | | | RSEDT | | | | | | GTGCGACAGGCCCCTGGACAAGGGCTT | | PGQGLEWMGI | | | |
| | | | | | | | | | | AMYYC | | | | | | GAGTGGATGGGAATAATCAACCCTAGT | | INPSGGSTSY | | | |
| | | | | | | | | | | | | | | | | GGTGGAAGCACAAGCTACGCACAGAAG | | AQKFQGRVTM | | | |
| | | | | | | | | | | | | | | | | TTTCAGGGCAGAGTCACCATGACTAGG | | TRDESTRTVY | | | |
| | | | | | | | | | | | | | | | | GACGAGTCCACGAGAACAGTGTACATG | | MELSSLRSED | | | |
| | | | | | | | | | | | | | | | | GAGCTGAGCAGCCTGAGATCTGAGGAC | | TAMYYCARDA | | | |
| | | | | | | | | | | | | | | | | ACGGCCATGTATTACTGTGCGAGAGAT | | GVVDPLDPYP | | | |
| | | | | | | | | | | | | | | | | GCGGGTGTGGTGGACCCGCTGGACCCC | | LPRFWGQGTL | | | |
| | | | | | | | | | | | | | | | | TACCCCCTGCCTCGTTTCTGGGGCCAG | | VTVSS | | | |
| | | | | | | | | | | | | | | | | GGAACCCTGGTCACCGTCTCCTCA | | | | | |
| ADI- | IGHV3- | QVQLQQSG | 110 | FTFTSYD | 314 | WVRQA | 437 | TIGTTG | 647 | RFTIS | 860 | ARGVQE | 1147 | WGKGTT | 1291 | CAGGTGCAGCTGCAGCAGTCTGGGGGA | 1440 | QVQLQQSGGG | 1723 | | |
| 75672 | 13 | GGLVQPGG | | MH | | PGKGL | | DSYYPG | | RENAK | | ERRGLV | | VTVSS | | GGCTTGGTACAGCCTGGGGGGTCCCTG | | LVQPGGSLRL | | | |
| | | SLRLSCAA | | | | EWVS | | SVKG | | NSLYL | | RKFYYY | | | | AGACTCTCCTGTGCAGCCTCTGGATTC | | SCAASGFTFT | | | |
| | | SG | | | | | | | | QMNSL | | YMDV | | | | ACCTTTACTAGCTACGACATGCACTGG | | SYDMHWVRQA | | | |
| | | | | | | | | | | RAGDT | | | | | | GTCCGCCAAGCTCCAGGAAAGGGTCTG | | PGKGLEWVST | | | |
| | | | | | | | | | | AVYYC | | | | | | GAGTGGGTCTCAACTATTGGAACTACT | | IGTTGDSYYP | | | |
| | | | | | | | | | | | | | | | | GGTGACTCATATTATCCAGGCTCCGTG | | GSVKGRFTIS | | | |
| | | | | | | | | | | | | | | | | AAGGGCCGATTCACCATCTCCAGAGAA | | RENAKNSLYL | | | |
| | | | | | | | | | | | | | | | | AATGCCAAGAACTCCTTGTATCTTCAA | | QMNSLRAGDT | | | |
| | | | | | | | | | | | | | | | | ATGAACAGCCTGAGAGCCGGGGACACG | | AVYYCARGVQ | | | |
| | | | | | | | | | | | | | | | | GCTGTTTATTACTGTGCAAGGGGGGTA | | EERRGLVRKF | | | |
| | | | | | | | | | | | | | | | | CAAGAGGAGCGACGGGGGCTGGTGAGA | | YYYYMDVWGK | | | |
| | | | | | | | | | | | | | | | | AAGTTCTACTACTACTACATGGACGTC | | GTTVTVSS | | | |
| | | | | | | | | | | | | | | | | TGGGGCAAAGGGACCACGGTCACCGTC | | | | | |
| | | | | | | | | | | | | | | | | TCCTCA | | | | | |
| ADI- | IGHV4- | QVQLQESG | 67 | GSISSDH | 315 | WIRQP | 445 | TTYYTA | 648 | RVTIS | 898 | ARVEVS | 1148 | WGQGAL | 1285 | CAGGTGCAGCTGCAGGAGTCGGGCCCG | 1441 | QVQLQESGPG | 1724 | | |
| 75684 | 39 | PGLVKPSE | | FYWG | | PGKGL | | RTNYNP | | VDTSK | | GGFSGY | | VTVSS | | GGACTGGTGAAGCCTTCGGAGACCCTG | | LVKPSETLSL | | | |
| | | TLSLTCTV | | | | EWIG | | SLKS | | NQFSL | | DFLTPY | | | | TCCCTCACCTGCACTGTCTCTGGCGGC | | TCTVSGGSIS | | | |
| | | SG | | | | | | | | KLTSV | | YFDY | | | | TCCATCAGCAGTGATCATTTCTACTGG | | SDHFYWGWIR | | | |
| | | | | | | | | | | TATDT | | | | | | GGCTGGATCCGCCAGCCCCCAGGGAAG | | QPPGKGLEWI | | | |
| | | | | | | | | | | AIYYC | | | | | | GGGCTGGAGTGGATTGGGACCACCTAT | | GTTYYTARTN | | | |
| | | | | | | | | | | | | | | | | TATACTGCCCGCACCAACTACAACCCG | | YNPSLKSRVT | | | |
| | | | | | | | | | | | | | | | | TCCCTCAAGAGTCGGGTCACCATATCC | | ISVDTSKNQF | | | |
| | | | | | | | | | | | | | | | | GTTGACACGTCCAAGAACCAGTTCTCC | | SLKLTSVTAT | | | |
| | | | | | | | | | | | | | | | | CTGAAGCTGACCTCTGTGACCGCCACA | | DTAIYYCARV | | | |
| | | | | | | | | | | | | | | | | GACACGGCTATTTATTACTGTGCGCGA | | EVSGGFSGYD | | | |
| | | | | | | | | | | | | | | | | GTCGAGGTTTCGGGTGGATTTAGTGGC | | FLTPYYFDYW | | | |
| | | | | | | | | | | | | | | | | TACGATTTCCTCACACCGTACTACTTT | | GQGALVTVSS | | | |
| | | | | | | | | | | | | | | | | GACTACTGGGGCCAGGGAGCCCTGGTC | | | | | |
| | | | | | | | | | | | | | | | | ACCGTCTCCTCA | | | | | |
| ADI- | IGHV3- | QVQLQQSG | 111 | FIVSSNY | 260 | WVRQA | 437 | VIYPGG | 649 | RFTIS | 899 | ARDYGD | 1149 | WGQGTL | 1286 | CAGGTCCAGCTGCAGCAGTCTGGAGGA | 1442 | QVQLQQSGGG | 1725 | | |
| 75733 | 53 | GGLIQPGG | | MS | | PGKGL | | STFYAD | | RDTSK | | YYFDY | | VTVSS | | GGCTTGATCCAGCCTGGGGGGTCCCTG | | LIQPGGSLRL | | | |
| | | SLRLSCAA | | | | EWVS | | SVKG | | NTLYL | | | | | | AGACTCTCCTGTGCAGCCTCTGAGTTC | | SCAASEFIVS | | | |
| | | SE | | | | | | | | QMNSL | | | | | | ATCGTCAGTAGCAACTACATGAGCTGG | | SNYMSWVRQA | | | |
| | | | | | | | | | | RAEDT | | | | | | GTCCGCCAGGCTCCAGGGAAGGGGCTG | | PGKGLEWVSV | | | |
| | | | | | | | | | | AVYYC | | | | | | GAGTGGGTCTCAGTTATTTATCCCGGC | | IYPGGSTFYA | | | |
| | | | | | | | | | | | | | | | | GGTAGCACATTCTACGCAGACTCCGTG | | DSVKGRFTIS | | | |
| | | | | | | | | | | | | | | | | AAGGGCCGATTCACCATCTCCAGAGAC | | RDTSKNTLYL | | | |
| | | | | | | | | | | | | | | | | ACTTCCAAGAACACGCTGTATCTTCAA | | QMNSLRAEDT | | | |
| | | | | | | | | | | | | | | | | ATGAACAGCCTGAGAGCCGAGGACACG | | AVYYCARDYG | | | |
| | | | | | | | | | | | | | | | | GCCGTGTATTACTGTGCGAGAGACTAC | | DYYFDYWGQG | | | |
| | | | | | | | | | | | | | | | | GGTGACTACTACTTTGACTACTGGGGC | | TLVTVSS | | | |
| | | | | | | | | | | | | | | | | CAGGGAACCCTGGTCACCGTCTCCTCA | | | | | |
| ADI- | IGHV3- | QVQLVQSG | 112 | FIVSSNY | 260 | WVRQA | 437 | LMYPGG | 650 | RFTIS | 900 | ARVLPL | 1150 | WGQGTL | 1286 | CAGGTGCAGCTGGTGCAGTCTGGGGGA | 1443 | QVQLVQSGGG | 1726 | | |
| 75732 | 66 | GGLVQPGG | | MS | | PGKGL | | STYYAD | | RDKSK | | HGDFFD | | VTVSS | | GGCTTGGTCCAGCCTGGGGGGTCCCTG | | LVQPGGSLRL | | | |
| | | SLRLSCAA | | | | EWVS | | SVKG | | NTLYL | | Y | | | | AGACTCTCCTGTGCAGCCTCTGAATTC | | SCAASEFIVS | | | |
| | | SE | | | | | | | | QMNSL | | | | | | ATCGTCAGTAGTAATTACATGAGCTGG | | SNYMSWVRQA | | | |
| | | | | | | | | | | RAEDT | | | | | | GTCCGCCAGGCTCCAGGGAAGGGGCTG | | PGKGLEWVSL | | | |
| | | | | | | | | | | AVYYC | | | | | | GAGTGGGTCTCACTTATGTATCCCGGT | | MYPGGSTYYA | | | |
| | | | | | | | | | | | | | | | | GGTAGCACATACTACGCAGACTCCGTG | | DSVKGRFTIS | | | |
| | | | | | | | | | | | | | | | | AAGGGCAGATTCACCATCTCCAGAGAC | | RDKSKNTLYL | | | |
| | | | | | | | | | | | | | | | | AAATCCAAGAACACGCTGTATCTTCAA | | QMNSLRAEDT | | | |
| | | | | | | | | | | | | | | | | ATGAACAGCCTGAGAGCCGAGGACACG | | AVYYCARVLP | | | |
| | | | | | | | | | | | | | | | | GCTGTCTATTACTGTGCGAGAGTCCTC | | LHGDFFDYWG | | | |
| | | | | | | | | | | | | | | | | CCTCTCCACGGTGACTTCTTTGACTAC | | QGTLVTVSS | | | |
| | | | | | | | | | | | | | | | | TGGGGCCAGGGAACCCTGGTCACCGTC | | | | | |
| | | | | | | | | | | | | | | | | TCCTCA | | | | | |
| ADI- | IGHV2- | QVTLKESG | 71 | FSFSTGG | 316 | WIRQP | 441 | LIYWDG | 651 | RLTIT | 901 | AHHQIN | 1151 | ISQGTL | 1297 | CAGGTCACGTTGAAGGAGTCTGGTCCT | 1444 | QVTLKESGPT | 1727 | | |
| 75722 | 5 | PTLVKPTQ | | VGVG | | PGKAL | | DKRYSP | | KDTSK | | TIFGV | | VTVSS | | ACGCTGGTGAAACCCACACAGACCCTC | | LVKPTQTLTL | | | |
| | | TLTLTCTF | | | | EWLA | | SLKN | | NQVVL | | | | | | ACGCTGACCTGCACCTTCTCTGGGTTC | | TCTFSGFSFS | | | |
| | | SG | | | | | | | | TVTNM | | | | | | TCATTCAGCACTGGTGGAGTGGGTGTG | | TGGVGVGWIR | | | |
| | | | | | | | | | | DPVDT | | | | | | GGCTGGATCCGTCAGCCCCCCGGAAAG | | QPPGKALEWL | | | |
| | | | | | | | | | | ATYYC | | | | | | GCCCTAGAGTGGCTTGCACTCATTTAT | | ALIYWDGDKR | | | |
| | | | | | | | | | | | | | | | | TGGGATGGTGATAAGCGCTACAGCCCA | | YSPSLKNRLT | | | |
| | | | | | | | | | | | | | | | | TCTCTGAAGAACAGGCTCACCATCACC | | ITKDTSKNQV | | | |
| | | | | | | | | | | | | | | | | AAGGACACCTCCAAAAACCAGGTGGTC | | VLTVTNMDPV | | | |
| | | | | | | | | | | | | | | | | CTTACAGTGACCAACATGGACCCTGTG | | DTATYYCAHH | | | |
| | | | | | | | | | | | | | | | | GACACAGCCACATATTACTGTGCACAC | | QINTIFGVIS | | | |
| | | | | | | | | | | | | | | | | CACCAAATCAATACGATTTTTGGAGTA | | QGTLVTVSS | | | |
| | | | | | | | | | | | | | | | | ATTAGCCAGGGAACCCTGGTCACCGTC | | | | | |
| | | | | | | | | | | | | | | | | TCCTCA | | | | | |
| ADI- | IGHV2- | QITLKESG | 113 | FSLSTTG | 271 | WIRQP | 441 | LIYWDD | 652 | RLSIT | 853 | AHTPDG | 1152 | WGQGTL | 1286 | CAGATCACGTTGAAGGAGTCTGGTCCT | 1445 | QITLKESGPT | 1728 | | |
| 75674 | 5 | PTLVKPTQ | | VGVG | | PGKAL | | DQRYSP | | KDTSK | | RYFEWL | | VTVSS | | ACCCTGGTGAAACCCACACAGACCCTC | | LVKPTQTLTL | | | |
| | | TLTLTCTF | | | | EWLA | | SLQS | | NQVVL | | TPLFGN | | | | ACGCTGACCTGCACCTTCTCTGGTTTC | | TCTFSGFSLS | | | |
| | | SG | | | | | | | | TMTNM | | YYFDY | | | | TCACTCAGCACTACTGGAGTGGGTGTG | | TTGVGVGWIR | | | |
| | | | | | | | | | | DPVDT | | | | | | GGCTGGATCCGTCAGCCCCCAGGAAAG | | QPPGKALEWL | | | |
| | | | | | | | | | | ATYYC | | | | | | GCCCTGGAGTGGCTTGCACTCATTTAT | | ALIYWDDDQR | | | |
| | | | | | | | | | | | | | | | | TGGGATGATGATCAGCGCTACAGCCCA | | YSPSLQSRLS | | | |
| | | | | | | | | | | | | | | | | TCTCTGCAGAGCAGGCTCAGCATCACC | | ITKDTSKNQV | | | |
| | | | | | | | | | | | | | | | | AAGGACACCTCCAAAAACCAGGTGGTC | | VLTMTNMDPV | | | |
| | | | | | | | | | | | | | | | | CTTACAATGACCAACATGGACCCTGTG | | DTATYYCAHT | | | |
| | | | | | | | | | | | | | | | | GACACAGCCACATATTACTGTGCACAC | | PDGRYFEWLT | | | |
| | | | | | | | | | | | | | | | | ACCCCGGACGGGCGATATTTTGAGTGG | | PLFGNYYFDY | | | |
| | | | | | | | | | | | | | | | | TTAACGCCTCTTTTTGGTAACTACTAC | | WGQGTLVTVS | | | |
| | | | | | | | | | | | | | | | | TTTGACTACTGGGGCCAGGGAACCCTG | | S | | | |
| | | | | | | | | | | | | | | | | GTCACCGTCTCCTCA | | | | | |
| ADI- | IGHV3- | QVQLVQSG | 114 | IIVVRNY | 317 | WVRQA | 437 | VIYSGG | 653 | RFTIS | 902 | ARGRPS | 1153 | WGQGTL | 1286 | CAGGTGCAGCTGGTGCAGTCTGGGGGA | 1446 | QVQLVQSGGA | 1729 | | |
| 75638 | 66 | GALVQPGG | | MS | | PGKGL | | TTFYAD | | RDKSK | | GLYDY | | VTVSS | | GCCTTGGTCCAGCCGGGGGGGTCCCTG | | LVQPGGSLRL | | | |
| | | SLRLACAA | | | | EWVS | | SVKG | | NTLYL | | | | | | AGACTCGCCTGTGCAGCCTCTGAAATC | | ACAASEIIVV | | | |
| | | SE | | | | | | | | QMSSL | | | | | | ATCGTCGTTAGGAACTACATGAGCTGG | | RNYMSWVRQA | | | |
| | | | | | | | | | | RGEDT | | | | | | GTCCGCCAGGCTCCAGGGAAGGGGCTG | | PGKGLEWVSV | | | |
| | | | | | | | | | | AVYYC | | | | | | GAGTGGGTCTCAGTTATTTACAGCGGA | | IYSGGTTFYA | | | |
| | | | | | | | | | | | | | | | | GGTACCACATTCTACGCAGACTCCGTG | | DSVKGRFTIS | | | |
| | | | | | | | | | | | | | | | | AAGGGCCGGTTCACCATCTCCAGAGAC | | RDKSKNTLYL | | | |
| | | | | | | | | | | | | | | | | AAATCCAAGAACACGCTGTATCTTCAA | | QMSSLRGEDT | | | |
| | | | | | | | | | | | | | | | | ATGAGCAGCCTGAGAGGTGAGGACACG | | AVYYCARGRP | | | |
| | | | | | | | | | | | | | | | | GCTGTGTATTACTGTGCGAGAGGGCGA | | SGLYDYWGQG | | | |
| | | | | | | | | | | | | | | | | CCATCCGGATTATATGACTACTGGGGC | | TLVTVSS | | | |
| | | | | | | | | | | | | | | | | CAGGGAACCCTGGTCACCGTCTCCTCA | | | | | |
| ADI- | IGHV1- | QVQLVQSG | 115 | YTFSDYY | 318 | WVRQA | 433 | MINPDA | 654 | RVTMT | 903 | ARDIAG | 1154 | WGQGTL | 1286 | CAGGTGCAGCTGGTACAGTCTGGGGCT | 1447 | QVQLVQSGAE | 1730 | | |
| 75800 | 46 | AEVKKPGA | | IH | | PGQGL | | ASIAYA | | SDTST | | IPATLG | | VTVSS | | GAGGTGAAGAAGCCTGGGGCCTCAGTG | | VKKPGASVKI | | | |
| | | SVKISCKA | | | | EWMG | | QKFQG | | STIYM | | LDP | | | | AAGATTTCCTGCAAGGCATCTGGATAC | | SCKASGYTFS | | | |
| | | SG | | | | | | | | ELSSL | | | | | | ACTTTCAGCGACTACTATATTCACTGG | | DYYIHWVRQA | | | |
| | | | | | | | | | | RSEDT | | | | | | GTGCGACAGGCCCCTGGACAAGGGCTT | | PGQGLEWMGM | | | |
| | | | | | | | | | | AVYYC | | | | | | GAGTGGATGGGAATGATCAACCCTGAT | | INPDAASIAY | | | |
| | | | | | | | | | | | | | | | | GCTGCTAGCATTGCTTACGCACAGAAG | | AQKFQGRVTM | | | |
| | | | | | | | | | | | | | | | | TTCCAGGGCAGAGTTACCATGACGAGT | | TSDTSTSTIY | | | |
| | | | | | | | | | | | | | | | | GACACGTCCACGAGCACAATTTATATG | | MELSSLRSED | | | |
| | | | | | | | | | | | | | | | | GAACTGAGTAGCCTGAGATCTGAGGAC | | TAVYYCARDI | | | |
| | | | | | | | | | | | | | | | | ACGGCCGTGTATTATTGTGCGAGAGAT | | AGIPATLGLD | | | |
| | | | | | | | | | | | | | | | | ATCGCAGGAATACCAGCTACTTTAGGC | | PWGQGTLVTV | | | |
| | | | | | | | | | | | | | | | | CTCGACCCCTGGGGCCAGGGAACCCTG | | SS | | | |
| | | | | | | | | | | | | | | | | GTCACCGTCTCCTCA | | | | | |
| ADI- | IGHV4- | QVTLKESG | 116 | GSFSSGY | 319 | WIRQP | 445 | EISQSG | 655 | RLSIS | 904 | ARGRGY | 1155 | WGQGAL | 1285 | CAGGTCACCTTGAAGGAGTCGGGCGCG | 1448 | QVTLKESGAG | 1731 | | |
| 75675 | 34 | AGLLKPSE | | YWN | | PGKGL | | GANSNP | | IETAK | | GSGSDS | | VTVSS | | GGACTGTTGAAGCCCTCGGAGACCCTG | | LLKPSETLSL | | | |
| | | TLSLTCAV | | | | EWIG | | SLKG | | KQFSL | | FDY | | | | TCCCTCACCTGCGCTGTCTCTGGTGGG | | TCAVSGGSFS | | | |
| | | SG | | | | | | | | KLRSV | | | | | | TCCTTCAGCAGTGGTTATTACTGGAAC | | SGYYWNWIRQ | | | |
| | | | | | | | | | | TAADT | | | | | | TGGATCCGCCAGCCCCCAGGCAAGGGG | | PPGKGLEWIG | | | |
| | | | | | | | | | | ALYYC | | | | | | CTGGAGTGGATTGGAGAAATCAGTCAG | | EISQSGGANS | | | |
| | | | | | | | | | | | | | | | | AGTGGTGGAGCCAACTCCAACCCGTCC | | NPSLKGRLSI | | | |
| | | | | | | | | | | | | | | | | CTCAAGGGTCGACTCTCCATATCAATA | | SIETAKKQFS | | | |
| | | | | | | | | | | | | | | | | GAGACGGCCAAGAAGCAGTTCTCCCTG | | LKLRSVTAAD | | | |
| | | | | | | | | | | | | | | | | AAGCTGAGGTCTGTGACCGCCGCGGAC | | TALYYCARGR | | | |
| | | | | | | | | | | | | | | | | ACGGCTCTCTATTACTGTGCGAGAGGC | | GYGSGSDSFD | | | |
| | | | | | | | | | | | | | | | | CGCGGTTACGGATCAGGGAGTGACTCC | | YWGQGALVTV | | | |
| | | | | | | | | | | | | | | | | TTTGACTATTGGGGCCAGGGAGCCCTG | | SS | | | |
| | | | | | | | | | | | | | | | | GTCACCGTCTCCTCA | | | | | |
| ADI- | IGHV4- | QVQLQQSG | 117 | DSISSYY | 320 | WIRQP | 445 | DIYHSG | 656 | RVTIS | 905 | ARGPKE | 1156 | WGQGTL | 1286 | CAGGTGCAGCTGCAGCAGTCGGGCCCA | 1449 | QVQLQQSGPG | 1732 | | |
| 75818 | 59 | PGLVKPSE | | WS | | PGKGL | | STNYNP | | VDTSK | | RWFNNW | | VTVSS | | GGACTGGTGAAGCCTTCGGAGACCCTG | | LVKPSETLSL | | | |
| | | TLSLTCIV | | | | EWIG | | SLKS | | SQFSL | | FDP | | | | TCCCTCACCTGCATTGTCTCTGGTGAC | | TCIVSGDSIS | | | |
| | | SG | | | | | | | | KLRSV | | | | | | TCCATCAGTAGTTACTATTGGAGCTGG | | SYYWSWIRQP | | | |
| | | | | | | | | | | TAADT | | | | | | ATCCGGCAGCCCCCAGGGAAGGGACTG | | PGKGLEWIGD | | | |
| | | | | | | | | | | AVYYC | | | | | | GAGTGGATTGGGGACATCTATCACAGT | | IYHSGSTNYN | | | |
| | | | | | | | | | | | | | | | | GGGAGCACCAACTACAATCCCTCCCTC | | PSLKSRVTIS | | | |
| | | | | | | | | | | | | | | | | AAGAGTCGAGTCACCATATCAGTAGAC | | VDTSKSQFSL | | | |
| | | | | | | | | | | | | | | | | ACGTCCAAGAGTCAGTTCTCCTTGAAG | | KLRSVTAADT | | | |
| | | | | | | | | | | | | | | | | CTGAGGTCTGTGACCGCTGCGGACACG | | AVYYCARGPK | | | |
| | | | | | | | | | | | | | | | | GCCGTCTATTACTGTGCGAGAGGCCCT | | ERWFNNWFDP | | | |
| | | | | | | | | | | | | | | | | AAAGAGCGCTGGTTCAACAATTGGTTC | | WGQGTLVTVS | | | |
| | | | | | | | | | | | | | | | | GACCCCTGGGGCCAAGGAACCCTGGTC | | S | | | |
| | | | | | | | | | | | | | | | | ACCGTCTCCTCA | | | | | |
| ADI- | IGHV1- | QVQLVQSG | 118 | GTFSSYN | 321 | WVRQA | 433 | RIIPIL | 657 | RVTIT | 906 | AREGGS | 1157 | WGQGTL | 1286 | CAGGTGCAGCTGGTGCAGTCTGGGGCT | 1450 | QVQLVQSGAE | 1733 | | |
| 75741 | 69 | AEVKKPGS | | VN | | PGQGL | | GIANYA | | ADRST | | TTEYFP | | VTVSS | | GAGGTGAAGAAGCCTGGGTCCTCGGTG | | VKKPGSSVKV | | | |
| | | SVKVSCK- | | | | EWMG | | EKFQD | | STAYM | | H | | | | AAGGTCTCCTGCAAGGGCACCTTCAGC | | SCKGTFSSYN | | | |
| | | -- | | | | | | | | ELSSL | | | | | | AGTTATAATGTCAACTGGGTGCGACAG | | VNWVRQAPGQ | | | |
| | | | | | | | | | | RYDDT | | | | | | GCCCCTGGACAAGGGCTTGAGTGGATG | | GLEWMGRIIP | | | |
| | | | | | | | | | | AVYYC | | | | | | GGAAGGATCATCCCTATCCTTGGTATT | | ILGIANYAEK | | | |
| | | | | | | | | | | | | | | | | GCAAACTACGCAGAGAAGTTCCAGGAC | | FQDRVTITAD | | | |
| | | | | | | | | | | | | | | | | AGAGTCACCATTACCGCGGACAGATCC | | RSTSTAYMEL | | | |
| | | | | | | | | | | | | | | | | ACGAGCACAGCCTACATGGAGCTGAGC | | SSLRYDDTAV | | | |
| | | | | | | | | | | | | | | | | AGCCTGAGATATGACGACACGGCCGTA | | YYCAREGGST | | | |
| | | | | | | | | | | | | | | | | TATTACTGTGCGAGAGAAGGTGGTAGC | | TEYFPHWGQG | | | |
| | | | | | | | | | | | | | | | | ACCACTGAATACTTCCCACACTGGGGC | | TLVTVSS | | | |
| | | | | | | | | | | | | | | | | CAGGGCACCCTGGTCACCGTCTCCTCA | | | | | |
| ADI- | IGHV3- | QVQLQESG | 119 | FTDISNY | 322 | WVRQA | 437 | VIYSGG | 658 | RFTIS | 907 | ARGQVP | 1158 | WGQGTT | 1287 | CAGGTGCAGCTGCAGGAGTCCGGAGGA | 1451 | QVQLQESGGD | 1734 | | |
| 75795 | 53 | GDLVQPGG | | MS | | PGKGL | | TAYYAD | | RHNSK | | NDDYVM | | VTVSS | | GACTTGGTCCAGCCTGGGGGGTCCCTG | | LVQPGGSLRL | | | |
| | | SLRLSCAA | | | | EWVS | | SVKG | | NTLYL | | SGAFDI | | | | AGACTCTCTTGTGCAGCCTCTAGGTTC | | SCAASRFTDI | | | |
| | | SR | | | | | | | | QMNSL | | | | | | ACCGACATTAGCAACTACATGAGCTGG | | SNYMSWVRQA | | | |
| | | | | | | | | | | RTEDT | | | | | | GTCCGCCAGGCTCCAGGGAAGGGGCTG | | PGKGLEWVSV | | | |
| | | | | | | | | | | AVYYC | | | | | | GAGTGGGTCTCAGTTATTTATAGTGGT | | IYSGGTAYYA | | | |
| | | | | | | | | | | | | | | | | GGAACCGCATATTACGCAGACTCCGTG | | DSVKGRFTIS | | | |
| | | | | | | | | | | | | | | | | AAGGGCCGATTCACCATCTCCAGACAC | | RHNSKNTLYL | | | |
| | | | | | | | | | | | | | | | | AACTCCAAGAACACACTGTATCTTCAA | | QMNSLRTEDT | | | |
| | | | | | | | | | | | | | | | | ATGAACAGCCTGAGAACTGAGGACACG | | AVYYCARGQV | | | |
| | | | | | | | | | | | | | | | | GCCGTGTATTACTGTGCGAGAGGCCAA | | PNDDYVMSGA | | | |
| | | | | | | | | | | | | | | | | GTCCCCAACGATGACTACGTTATGAGT | | FDIWGQGTTV | | | |
| | | | | | | | | | | | | | | | | GGTGCTTTTGATATCTGGGGCCAAGGG | | TVSS | | | |
| | | | | | | | | | | | | | | | | ACCACGGTCACCGTCTCCTCA | | | | | |
| ADI- | IGHV3- | QVQLVQTG | 120 | VTVTNNY | 323 | WVRQA | 437 | VIYSGG | 659 | RFTIS | 908 | ARDLME | 1159 | WGQGTT | 1287 | CAGGTGCAGCTGGTGCAGACTGGAGGA | 1452 | QVQLVQTGGG | 1735 | | |
| 75816 | 53 | GGLIQPGG | | MN | | PGKGL | | STYYAD | | RDNSK | | AGGMDV | | VTVSS | | GGCTTGATCCAGCCTGGGGGGTCCCTG | | LIQPGGSLRL | | | |
| | | SLRLSCVA | | | | EWVS | | SVKG | | NTLYL | | | | | | AGACTCTCCTGTGTAGCCTCTGGGGTC | | SCVASGVTVI | | | |
| | | SG | | | | | | | | QMNSL | | | | | | ACCGTCACTAACAACTACATGAACTGG | | NNYMNWVRQA | | | |
| | | | | | | | | | | RADDT | | | | | | GTCCGCCAGGCTCCAGGGAAGGGGCTG | | PGKGLEWVSV | | | |
| | | | | | | | | | | AVYYC | | | | | | GAGTGGGTCTCAGTTATTTATAGTGGT | | IYSGGSTYYA | | | |
| | | | | | | | | | | | | | | | | GGCAGCACATACTACGCAGACTCCGTG | | DSVKGRFTIS | | | |
| | | | | | | | | | | | | | | | | AAGGGCCGATTCACCATCTCCAGAGAC | | RDNSKNTLYL | | | |
| | | | | | | | | | | | | | | | | AATTCCAAGAACACGCTCTATCTTCAA | | QMNSLRADDT | | | |
| | | | | | | | | | | | | | | | | ATGAACAGCCTGAGAGCCGACGACACG | | AVYYCARDLM | | | |
| | | | | | | | | | | | | | | | | GCCGTATATTACTGTGCGAGAGATTTG | | EAGGMDVWGQ | | | |
| | | | | | | | | | | | | | | | | ATGGAGGCGGGCGGTATGGACGTCTGG | | GTTVTVSS | | | |
| | | | | | | | | | | | | | | | | GGCCAAGGGACCACGGTCACCGTCTCC | | | | | |
| | | | | | | | | | | | | | | | | TCA | | | | | |
| ADI- | IGHV1- | QVQLQQSG | 86 | GTFSSYS | 324 | WVRQA | 433 | RIFPIL | 660 | RVTIT | 909 | AREGGK | 1160 | WGQGTL | 1286 | CAGGTACAGCTGCAGCAGTCTGGGGCT | 1453 | QVQLQQSGAE | 1736 | | |
| 75725 | 69 | AEVKKPGS | | VS | | PGQGL | | GVADFA | | ADRST | | TTEFFP | | VTVSS | | GAGGTGAAGAAGCCTGGGTCCTCGGTG | | VKKPGSSVKV | | | |
| | | SVKVSCKA | | | | EWMG | | QKFQD | | STAYM | | L | | | | AAGGTCTCCTGCAAGGCCTCTGGAGGC | | SCKASGGTFS | | | |
| | | SG | | | | | | | | EMSRL | | | | | | ACCTTCAGCAGTTATAGTGTCAGCTGG | | SYSVSWVRQA | | | |
| | | | | | | | | | | RPEDT | | | | | | GTGCGTCAGGCCCCTGGACAAGGGCTT | | PGQGLEWMGR | | | |
| | | | | | | | | | | AVYYC | | | | | | GAGTGGATGGGAAGGATCTTCCCTATC | | IFPILGVADF | | | |
| | | | | | | | | | | | | | | | | CTTGGTGTTGCAGACTTCGCACAGAAG | | AQKFQDRVTI | | | |
| | | | | | | | | | | | | | | | | TTCCAGGACAGAGTCACGATTACCGCG | | TADRSTSTAY | | | |
| | | | | | | | | | | | | | | | | GACAGATCCACGAGCACAGCCTACATG | | MEMSRLRPED | | | |
| | | | | | | | | | | | | | | | | GAGATGAGTAGGTTAAGGCCTGAGGAC | | TAVYYCAREG | | | |
| | | | | | | | | | | | | | | | | ACGGCCGTCTATTACTGTGCGAGGGAA | | GKTTEFFPLW | | | |
| | | | | | | | | | | | | | | | | GGTGGTAAGACCACTGAATTCTTCCCC | | GQGTLVTVSS | | | |
| | | | | | | | | | | | | | | | | CTCTGGGGCCAGGGCACCCTGGTCACC | | | | | |
| | | | | | | | | | | | | | | | | GTCTCCTCA | | | | | |
| ADI- | IGHV3- | QVQLVESG | 24 | FTFNTYW | 325 | WVRQA | 431 | SIKQDG | 661 | RFNIS | 910 | AREMGI | 1161 | RGQGSL | 1298 | CAGGTGCAGCTGGTGGAGTCTGGGGGA | 1454 | QVQLVESGGG | 1737 | | |
| 75686 | 7 | GGLVQPGG | | MS | | PGKGL | | GEKYYV | | RDNAK | | FWFDP | | VTVSS | | GGCTTGGTCCAGCCTGGGGGGTCCCTG | | LVQPGGSLRL | | | |
| | | SLRLSCAA | | | | EWVA | | DSVKG | | NSLFL | | | | | | AGACTCTCCTGTGCAGCCTCTGGATTC | | SCAASGFTFN | | | |
| | | SG | | | | | | | | QMSSL | | | | | | ACCTTTAATACGTATTGGATGAGTTGG | | TYWMSWVRQA | | | |
| | | | | | | | | | | RAEDT | | | | | | GTCCGCCAGGCTCCAGGGAAGGGGCTG | | PGKGLEWVAS | | | |
| | | | | | | | | | | AVYYC | | | | | | GAGTGGGTGGCCAGCATAAAACAAGAT | | IKQDGGEKYY | | | |
| | | | | | | | | | | | | | | | | GGAGGTGAGAAATACTATGTGGACTCT | | VDSVKGRFNI | | | |
| | | | | | | | | | | | | | | | | GTGAAGGGCCGATTTAACATCTCCAGA | | SRDNAKNSLF | | | |
| | | | | | | | | | | | | | | | | GACAACGCCAAGAACTCACTGTTTCTG | | LQMSSLRAED | | | |
| | | | | | | | | | | | | | | | | CAAATGAGCAGCCTGAGAGCCGAGGAC | | TAVYYCAREM | | | |
| | | | | | | | | | | | | | | | | ACGGCTGTCTATTACTGTGCGAGAGAA | | GIFWFDPRGQ | | | |
| | | | | | | | | | | | | | | | | ATGGGTATATTCTGGTTCGACCCCCGG | | GSLVTVSS | | | |
| | | | | | | | | | | | | | | | | GGCCAAGGATCCCTGGTCACCGTCTCC | | | | | |
| | | | | | | | | | | | | | | | | TCA | | | | | |
| ADI- | IGHV1- | RYTLQQSG | 121 | GTFNSYS | 326 | WVRQA | 482 | RIIPIL | 662 | RVNII | 911 | ARDVGY | 1162 | WGQGAL | 1285 | AGGTACACGCTGCAGCAGTCTGGGGCT | 1455 | RYTLQQSGAE | 1738 | | |
| 75717 | 69 | AEVKKPGS | | IS | | PEQGL | | GVTDYP | | ADKST | | SGSGST | | VTVSS | | GAGGTGAAGAAGCCTGGGTCTTCGGTG | | VKKPGSSVKV | | | |
| | | SVKVSCKA | | | | EWMG | | QKFQG | | GTAYM | | YYFDL | | | | AAGGTCTCTTGCAAGGCCTCTGGAGGC | | SCKASGGTFN | | | |
| | | SG | | | | | | | | ELSSL | | | | | | ACCTTCAACAGCTATAGTATCAGTTGG | | SYSISWVRQA | | | |
| | | | | | | | | | | RSEDT | | | | | | GTGCGACAGGCCCCTGAGCAAGGGCTT | | PEQGLEWMGR | | | |
| | | | | | | | | | | AVYYC | | | | | | GAGTGGATGGGAAGGATCATCCCTATC | | IIPILGVTDY | | | |
| | | | | | | | | | | | | | | | | CTTGGTGTAACAGACTACCCACAGAAG | | PQKFQGRVNI | | | |
| | | | | | | | | | | | | | | | | TTCCAGGGCAGAGTCAACATTATCGCG | | IADKSTGTAY | | | |
| | | | | | | | | | | | | | | | | GACAAGTCCACGGGCACAGCTTACATG | | MELSSLRSED | | | |
| | | | | | | | | | | | | | | | | GAGCTGAGCAGCCTGAGATCTGAAGAC | | TAVYYCARDV | | | |
| | | | | | | | | | | | | | | | | ACGGCCGTGTATTACTGCGCGAGAGAT | | GYSGSGSTYY | | | |
| | | | | | | | | | | | | | | | | GTGGGTTATTCTGGCTCGGGGAGTACT | | FDLWGQGALV | | | |
| | | | | | | | | | | | | | | | | TACTACTTTGACCTCTGGGGCCAGGGA | | TVSS | | | |
| | | | | | | | | | | | | | | | | GCCCTGGTCACCGTCTCCTCA | | | | | |
| ADI- | IGHV3- | QVTLKESG | 122 | FTFDEYA | 327 | WVRQV | 436 | GSSWNS | 663 | RFTIS | 912 | VKLRTV | 1163 | WGQGTL | 1286 | CAGGTCACGCTGAAGGAGTCTGGGGGA | 1456 | QVTLKESGGG | 1739 | | |
| 75771 | 9 | GGLVQPGR | | IH | | PGKGL | | GIIGYA | | RDNAK | | TAFDFW | | VTVSS | | GGCTTGGTACAGCCTGGCAGGTCCCTG | | LVQPGRSLRL | | | |
| | | SLRLSCAA | | | | EWVS | | DSVKG | | NSLYL | | SGSRPS | | | | AGACTCTCCTGTGCAGCCTCTGGATTC | | SCAASGFTFD | | | |
| | | SG | | | | | | | | QMNSL | | PKQDFD | | | | ACCTTTGATGAATATGCCATTCACTGG | | EYAIHWVRQV | | | |
| | | | | | | | | | | RPEDT | | Y | | | | GTCCGGCAAGTTCCGGGGAAGGGCCTG | | PGKGLEWVSG | | | |
| | | | | | | | | | | ALYYC | | | | | | GAGTGGGTCTCAGGTTCCAGTTGGAAT | | SSWNSGIIGY | | | |
| | | | | | | | | | | | | | | | | AGTGGTATCATAGGCTATGCGGACTCT | | ADSVKGRFTI | | | |
| | | | | | | | | | | | | | | | | GTGAAGGGCCGATTCACCATCTCCAGA | | SRDNAKNSLY | | | |
| | | | | | | | | | | | | | | | | GACAACGCCAAGAACTCCCTGTATCTG | | LQMNSLRPED | | | |
| | | | | | | | | | | | | | | | | CAAATGAACAGTCTGAGACCTGAGGAC | | TALYYCVKLR | | | |
| | | | | | | | | | | | | | | | | ACGGCCTTGTATTACTGTGTAAAACTC | | TVTAFDFWSG | | | |
| | | | | | | | | | | | | | | | | AGAACGGTCACGGCTTTCGATTTTTGG | | SRPSPKQDFD | | | |
| | | | | | | | | | | | | | | | | AGTGGTTCCCGCCCGAGCCCCAAGCAA | | YWGQGTLVTV | | | |
| | | | | | | | | | | | | | | | | GACTTTGACTACTGGGGCCAGGGAACC | | SS | | | |
| | | | | | | | | | | | | | | | | CTGGTCACCGTCTCCTCA | | | | | |
| ADI- | IGHV2- | RSTLEQSG | 123 | FSLSTSG | 328 | WIRQS | 483 | LIDWDD | 664 | RLTIS | 913 | TRTGAI | 1164 | WGQGTT | 1287 | AGGTCCACGCTGGAGCAGTCTGGTCCT | 1457 | RSTLEQSGPA | 1740 | | |
| 75651 | 70 | PALVKPTQ | | TCVN | | PGKAL | | DKYYST | | KDTSK | | IAARPW | | VTVSS | | GCGCTGGTGAAACCCACACAGACCCTC | | LVKPTQTLRL | | | |
| | | TLRLTCTF | | | | EWLA | | SLKT | | NQVVL | | YNYGMD | | | | AGACTGACCTGCACCTTCTCTGGGTTC | | TCTFSGFSLS | | | |
| | | SG | | | | | | | | TMTNM | | V | | | | TCACTCAGCACTAGTGGAACGTGTGTG | | TSGTCVNWIR | | | |
| | | | | | | | | | | DPVDT | | | | | | AACTGGATCCGTCAGTCCCCAGGGAAG | | QSPGKALEWL | | | |
| | | | | | | | | | | ATYYC | | | | | | GCCCTGGAGTGGCTTGCACTCATTGAT | | ALIDWDDDKY | | | |
| | | | | | | | | | | | | | | | | TGGGACGATGATAAATACTACAGCACA | | YSTSLKTRLT | | | |
| | | | | | | | | | | | | | | | | TCTCTGAAGACCAGGCTCACCATCTCC | | ISKDTSKNQV | | | |
| | | | | | | | | | | | | | | | | AAGGACACCTCCAAAAACCAGGTGGTC | | VLTMTNMDPV | | | |
| | | | | | | | | | | | | | | | | CTTACAATGACCAACATGGACCCTGTT | | DTATYYCTRT | | | |
| | | | | | | | | | | | | | | | | GACACAGCCACGTATTATTGTACACGG | | GAIIAARPWY | | | |
| | | | | | | | | | | | | | | | | ACGGGGGCGATTATAGCAGCTCGTCCT | | NYGMDVWGQG | | | |
| | | | | | | | | | | | | | | | | TGGTACAACTACGGTATGGACGTCTGG | | TTVTVSS | | | |
| | | | | | | | | | | | | | | | | GGCCAAGGGACCACGGTCACCGTCTCC | | | | | |
| | | | | | | | | | | | | | | | | TCA | | | | | |
| ADI- | IGHV5- | QVQLVQSG | 124 | YSFTTYW | 329 | WVRQM | 476 | TIYPGD | 665 | QVTIS | 914 | ASQRQR | 1165 | WGKGTT | 1291 | CAGGTCCAGCTGGTGCAGTCTGGAGCA | 1458 | QVQLVQSGAE | 1741 | | |
| 75813 | 51 | AEVKKPGE | | IA | | PGKGL | | SDTRYS | | ADKSI | | GFYYYM | | VTVSS | | GAGGTGAAAAAGCCCGGGGAGTCTCTG | | VKKPGESLKI | | | |
| | | SLKISCEG | | | | EWMG | | PSFQG | | STAYL | | DV | | | | AAGATCTCCTGTGAGGGTTCTGGATAC | | SCEGSGYSFT | | | |
| | | SG | | | | | | | | QWSSL | | | | | | AGCTTTACCACCTACTGGATCGCCTGG | | TYWIAWVRQM | | | |
| | | | | | | | | | | KASDT | | | | | | GTGCGCCAGATGCCCGGGAAAGGCCTG | | PGKGLEWMGT | | | |
| | | | | | | | | | | AIYYC | | | | | | GAGTGGATGGGGACCATCTATCCTGGT | | IYPGDSDTRY | | | |
| | | | | | | | | | | | | | | | | GACTCTGATACCAGATACAGCCCGTCC | | SPSFQGQVTI | | | |
| | | | | | | | | | | | | | | | | TTCCAAGGCCAGGTCACCATCTCAGCC | | SADKSISTAY | | | |
| | | | | | | | | | | | | | | | | GACAAGTCCATCAGTACCGCCTACTTG | | LQWSSLKASD | | | |
| | | | | | | | | | | | | | | | | CAGTGGAGCAGCCTGAAGGCCTCAGAC | | TAIYYCASQR | | | |
| | | | | | | | | | | | | | | | | ACCGCCATTTATTACTGTGCGAGTCAG | | QRGFYYYMDV | | | |
| | | | | | | | | | | | | | | | | CGTCAGCGTGGCTTCTACTACTACATG | | WGKGTTVTVS | | | |
| | | | | | | | | | | | | | | | | GACGTCTGGGGCAAAGGGACCACGGTC | | S | | | |
| | | | | | | | | | | | | | | | | ACCGTCTCCTCA | | | | | |
| ADI- | IGHV3- | QVQLVQSG | 10 | FIFSNYG | 330 | WVRQA | 431 | VISYDG | 666 | RFTIS | 915 | AKMTSS | 1166 | WGQGTT | 1287 | CAGGTGCAGCTGGTGCAGTCTGGGGGA | 1459 | QVQLVQSGGG | 1742 | | |
| 75750 | 30 | GGVVQPGR | | MH | | PGKGL | | SHKYYV | | RDNSK | | SPILYY | | VTVSS | | GGCGTGGTCCAGCCTGGGAGGTCCCTG | | VVQPGRSLRL | | | |
| | | SLRLSCAA | | | | EWVA | | DSVEG | | NTLYL | | YHGMDV | | | | AGACTCTCCTGTGCAGCCTCTGGATTC | | SCAASGFIFS | | | |
| | | SG | | | | | | | | QMDTL | | | | | | ATCTTCAGTAATTATGGCATGCACTGG | | NYGMHWVRQA | | | |
| | | | | | | | | | | RAEDT | | | | | | GTCCGCCAGGCTCCAGGCAAGGGGCTG | | PGKGLEWVAV | | | |
| | | | | | | | | | | AVYYC | | | | | | GAGTGGGTGGCAGTTATATCATATGAT | | ISYDGSHKYY | | | |
| | | | | | | | | | | | | | | | | GGAAGTCATAAATACTATGTAGACTCC | | VDSVEGRFTI | | | |
| | | | | | | | | | | | | | | | | GTTGAGGGCCGATTCACCATCTCCAGA | | SRDNSKNTLY | | | |
| | | | | | | | | | | | | | | | | GACAATTCCAAGAACACGCTGTATCTG | | LQMDTLRAED | | | |
| | | | | | | | | | | | | | | | | CAAATGGACACCTTGAGAGCTGAGGAC | | TAVYYCAKMT | | | |
| | | | | | | | | | | | | | | | | ACGGCTGTGTATTACTGTGCGAAAATG | | SSSPILYYYH | | | |
| | | | | | | | | | | | | | | | | ACTAGCAGCTCGCCCATTCTCTACTAC | | GMDVWGQGTT | | | |
| | | | | | | | | | | | | | | | | TACCACGGTATGGACGTCTGGGGCCAA | | VTVSS | | | |
| | | | | | | | | | | | | | | | | GGGACCACGGTCACCGTCTCCTCA | | | | | |
| ADI- | IGHV3- | RCPLVQSG | 125 | FTFSRYD | 331 | WVRQV | 484 | AIGTAG | 667 | RFTIS | 916 | ARAEFS | 1167 | WGRGTL | 1288 | AGGTGCCCGCTGGTGCAGTCTGGGGGA | 1460 | RCPLVQSGGG | 1743 | | |
| 75608 | 13 | GGLVQPGG | | MH | | TGRGL | | DTYYPD | | RENAK | | GYVLHF | | VTVSS | | GGCTTGGTACAGCCTGGGGGGTCCCTG | | LVQPGGSLRL | | | |
| | | SLRLSCAA | | | | EWVS | | SVKG | | NSLYL | | DL | | | | AGACTCTCCTGTGCAGCCTCTGGATTC | | SCAASGFTFS | | | |
| | | SG | | | | | | | | QMNSL | | | | | | ACCTTCAGTAGGTACGACATGCACTGG | | RYDMHWVRQV | | | |
| | | | | | | | | | | RAGDT | | | | | | GTCCGCCAAGTTACGGGAAGAGGTCTG | | TGRGLEWVSA | | | |
| | | | | | | | | | | AIYYC | | | | | | GAGTGGGTCTCAGCGATTGGTACTGCT | | IGTAGDTYYP | | | |
| | | | | | | | | | | | | | | | | GGTGACACATATTATCCAGACTCCGTG | | DSVKGRFTIS | | | |
| | | | | | | | | | | | | | | | | AAGGGCCGATTCACCATCTCCAGAGAA | | RENAKNSLYL | | | |
| | | | | | | | | | | | | | | | | AATGCCAAGAACTCATTGTATCTTCAA | | QMNSLRAGDT | | | |
| | | | | | | | | | | | | | | | | ATGAACAGCCTGAGAGCCGGGGACACG | | AIYYCARAEF | | | |
| | | | | | | | | | | | | | | | | GCTATTTATTACTGTGCAAGAGCTGAA | | SGYVLHFDLW | | | |
| | | | | | | | | | | | | | | | | TTTAGTGGCTACGTTCTCCACTTCGAT | | GRGTLVTVSS | | | |
| | | | | | | | | | | | | | | | | CTCTGGGGCCGTGGCACCCTGGTCACC | | | | | |
| | | | | | | | | | | | | | | | | GTCTCCTCA | | | | | |
| ADI- | IGHV3- | QVQLVQSG | 12 | FTFSSYW | 332 | WVRQA | 431 | SIKQDG | 668 | RFNIS | 917 | AREMGI | 1161 | WGQGSL | 1289 | CAGGTGCAGCTGGTGCAGTCTGGGGGA | 1461 | QVQLVQSGGG | 1744 | | |
| 75663 | 7 | GGLVQPGG | | MS | | PGKGL | | SEQYYV | | RDNAK | | FWFDP | | VTVSS | | GGCTTGGTCCAGCCTGGGGGGTCCCTG | | LVQPGGSLRL | | | |
| | | SLRLSCAA | | | | EWVA | | DSVKG | | NSLFL | | | | | | AGACTCTCCTGTGCAGCCTCTGGATTC | | SCAASGFTFS | | | |
| | | SG | | | | | | | | QMNSL | | | | | | ACCTTTAGTAGCTATTGGATGAGCTGG | | SYWMSWVRQA | | | |
| | | | | | | | | | | RAEDT | | | | | | GTCCGCCAGGCTCCAGGGAAGGGGCTG | | PGKGLEWVAS | | | |
| | | | | | | | | | | AVYYC | | | | | | GAGTGGGTGGCCAGCATAAAGCAAGAT | | IKQDGSEQYY | | | |
| | | | | | | | | | | | | | | | | GGAAGTGAGCAATACTATGTGGACTCT | | VDSVKGRFNI | | | |
| | | | | | | | | | | | | | | | | GTGAAGGGCCGATTTAACATCTCCAGA | | SRDNAKNSLF | | | |
| | | | | | | | | | | | | | | | | GACAACGCCAAGAACTCACTGTTTCTG | | LQMNSLRAED | | | |
| | | | | | | | | | | | | | | | | CAAATGAACAGCCTGAGAGCCGAGGAC | | TAVYYCAREM | | | |
| | | | | | | | | | | | | | | | | ACGGCTGTCTATTACTGTGCGAGAGAA | | GIFWFDPWGQ | | | |
| | | | | | | | | | | | | | | | | ATGGGTATATTTTGGTTCGACCCCTGG | | GSLVTVSS | | | |
| | | | | | | | | | | | | | | | | GGCCAGGGATCCCTGGTCACCGTCTCC | | | | | |
| | | | | | | | | | | | | | | | | TCA | | | | | |
| ADI- | IGHV3- | RCPLVQSG | 126 | FTVSSNY | 281 | WVRQA | 485 | LIYPGG | 643 | RFTVS | 894 | AREIYG | 1168 | WGQGTL | 1286 | AGGTGCCCGCTGGTGCAGTCTGGGGGA | 1462 | RCPLVQSGGD | 1745 | | |
| 75652 | 66 | GDLVQPGG | | MS | | PGKGL | | STYYAD | | RDNSK | | CTTCSH | | VTVSS | | GACTTGGTCCAGCCTGGGGGGTCCCTC | | LVQPGGSLRL | | | |
| | | SLRLSCEA | | | | QWVS | | SVKG | | NTLYL | | DIPRDS | | | | AGACTCTCCTGTGAAGCCTCTGGATTC | | SCEASGFTVS | | | |
| | | SG | | | | | | | | QMNSL | | | | | | ACCGTCAGTAGCAACTACATGAGCTGG | | SNYMSWVRQA | | | |
| | | | | | | | | | | RAEDT | | | | | | GTCCGCCAGGCTCCAGGGAAGGGGCTG | | PGKGLQWVSL | | | |
| | | | | | | | | | | AVYYC | | | | | | CAGTGGGTTTCACTCATTTATCCCGGT | | IYPGGSTYYA | | | |
| | | | | | | | | | | | | | | | | GGTAGCACATACTACGCAGACTCCGTG | | DSVKGRFTVS | | | |
| | | | | | | | | | | | | | | | | AAGGGCCGATTCACCGTCTCCAGAGAC | | RDNSKNTLYL | | | |
| | | | | | | | | | | | | | | | | AATTCCAAGAACACGCTGTATCTTCAA | | QMNSLRAEDT | | | |
| | | | | | | | | | | | | | | | | ATGAACAGCCTGAGAGCTGAGGACACG | | AVYYCAREIY | | | |
| | | | | | | | | | | | | | | | | GCTGTCTATTACTGTGCGAGAGAAATC | | GCTTCSHDIP | | | |
| | | | | | | | | | | | | | | | | TACGGCTGTACCACCTGCTCTCACGAC | | RDSWGQGTLV | | | |
| | | | | | | | | | | | | | | | | ATCCCACGGGACTCCTGGGGCCAGGGA | | TVSS | | | |
| | | | | | | | | | | | | | | | | ACCCTGGTCACCGTCTCCTCA | | | | | |
| ADI- | IGHV3- | QVQLQQSG | 116 | FTFSNYW | 333 | WVRQA | 486 | RINRDG | 669 | RFTIS | 918 | ARDLES | 1169 | WGQGTL | 1286 | CAGGTGCAGCTGCAGCAGTCTGGGGGA | 1463 | QVQLQQSGGG | 1746 | | |
| 75567 | 74 | GGLVQPGG | | MH | | PGKGL | | SSPTYA | | RDNAK | | GSFHPG | | VTVSS | | GGCTTAGTTCAGCCTGGGGGGTCCCTG | | LVQPGGSLRL | | | |
| | | SLRLSCAA | | | | VWVS | | DSVKG | | NTLFL | | LVRVP | | | | AGACTCTCCTGTGCAGCCTCTGGATTC | | SCAASGFTFS | | | |
| | | SG | | | | | | | | QMNSL | | | | | | ACCTTCAGTAACTACTGGATGCACTGG | | NYWMHWVRQA | | | |
| | | | | | | | | | | RAEDT | | | | | | GTCCGCCAAGCTCCAGGGAAGGGGCTG | | PGKGLVWVSR | | | |
| | | | | | | | | | | AVYYC | | | | | | GTGTGGGTCTCACGTATTAATAGAGAT | | INRDGSSPTY | | | |
| | | | | | | | | | | | | | | | | GGGAGTAGTCCAACTTACGCGGACTCC | | ADSVKGRFTI | | | |
| | | | | | | | | | | | | | | | | GTGAAGGGCCGATTCACCATCTCCAGA | | SRDNAKNTLF | | | |
| | | | | | | | | | | | | | | | | GACAACGCCAAGAACACGCTGTTTCTG | | LQMNSLRAED | | | |
| | | | | | | | | | | | | | | | | CAAATGAACAGTCTGAGAGCCGAAGAC | | TAVYYCARDL | | | |
| | | | | | | | | | | | | | | | | ACGGCTGTGTATTACTGTGCAAGAGAC | | ESGSFHPGLV | | | |
| | | | | | | | | | | | | | | | | CTGGAAAGTGGGAGCTTTCATCCCGGC | | RVPWGQGTLV | | | |
| | | | | | | | | | | | | | | | | CTGGTTCGGGTCCCCTGGGGCCAGGGA | | TVSS | | | |
| | | | | | | | | | | | | | | | | ACCCTGGTCACCGTCTCCTCA | | | | | |
| ADI- | IGHV4- | QVQLQQWG | 127 | GSFSEYY | 334 | WVRQS | 438 | KITHSG | 670 | RVTIS | 919 | ARHVPE | 1170 | WGQGSL | 1289 | CAGGTGCAGCTACAGCAGTGGGGCGCA | 1464 | QVQLQQWGAG | 1747 | | |
| 75670 | 34 | AGLLKPSE | | WT | | PGKGL | | NTDYNP | | VDTSK | | DVVVEP | | VTVSS | | GGACTGTTGAAGCCTTCGGAGACCCTG | | LLKPSETLSL | | | |
| | | TLSLTCGV | | | | EWIG | | SLKS | | NQFSL | | PAPWGL | | | | TCCCTCACCTGCGGTGTCTATGGTGGG | | TCGVYGGSFS | | | |
| | | YG | | | | | | | | RLSSV | | DY | | | | TCCTTCAGTGAATACTACTGGACCTGG | | EYYWTWVRQS | | | |
| | | | | | | | | | | TAADS | | | | | | GTCCGCCAGTCCCCAGGGAAGGGGCTT | | PGKGLEWIGK | | | |
| | | | | | | | | | | AVYYC | | | | | | GAGTGGATTGGTAAAATCACTCATAGT | | ITHSGNTDYN | | | |
| | | | | | | | | | | | | | | | | GGAAACACCGACTACAACCCGTCCCTC | | PSLKSRVTIS | | | |
| | | | | | | | | | | | | | | | | AAGAGTCGAGTCACCATATCAGTGGAC | | VDTSKNQFSL | | | |
| | | | | | | | | | | | | | | | | ACGTCCAAGAACCAGTTCTCCCTGAGG | | RLSSVTAADS | | | |
| | | | | | | | | | | | | | | | | TTGAGCTCTGTGACCGCCGCGGACTCG | | AVYYCARHVP | | | |
| | | | | | | | | | | | | | | | | GCTGTGTATTACTGTGCGAGACATGTT | | EDVVVEPPAP | | | |
| | | | | | | | | | | | | | | | | CCGGAGGATGTTGTAGTAGAACCACCT | | WGLDYWGQGS | | | |
| | | | | | | | | | | | | | | | | GCCCCGTGGGGACTTGACTACTGGGGC | | LVTVSS | | | |
| | | | | | | | | | | | | | | | | CAGGGATCCCTGGTCACCGTCTCCTCA | | | | | |
| ADI- | IGHV3- | QVQLVQSG | 12 | FTFSNYW | 333 | WVRQA | 486 | RINRDG | 669 | RFTIS | 918 | ARDLES | 1169 | WGQGTL | 1286 | CAGGTGCAGCTGGTGCAGTCTGGGGGA | 1465 | QVQLVQSGGG | 1748 | | |
| 75602 | 74 | GGLVQPGG | | MH | | PGKGL | | SSPTYA | | RDNAK | | GSFHPG | | VTVSS | | GGCTTAGTTCAGCCTGGGGGGTCCCTG | | LVQPGGSLRL | | | |
| | | SLRLSCAA | | | | VWVS | | DSVKG | | NTLFL | | LVRVP | | | | AGACTCTCCTGTGCAGCCTCTGGATTC | | SCAASGFTFS | | | |
| | | SG | | | | | | | | QMNSL | | | | | | ACCTTCAGTAACTACTGGATGCACTGG | | NYWMHWVRQA | | | |
| | | | | | | | | | | RAEDT | | | | | | GTCCGCCAAGCTCCAGGGAAGGGGCTG | | PGKGLVWVSR | | | |
| | | | | | | | | | | AVYYC | | | | | | GTGTGGGTCTCACGTATTAATAGAGAT | | INRDGSSPTY | | | |
| | | | | | | | | | | | | | | | | GGGAGTAGTCCAACTTACGCGGACTCC | | ADSVKGRFTI | | | |
| | | | | | | | | | | | | | | | | GTGAAGGGCCGATTCACCATCTCCAGA | | SRDNAKNTLF | | | |
| | | | | | | | | | | | | | | | | GACAACGCCAAGAACACGCTGTTTCTG | | LQMNSLRAED | | | |
| | | | | | | | | | | | | | | | | CAAATGAACAGTCTGAGAGCCGAAGAC | | TAVYYCARDL | | | |
| | | | | | | | | | | | | | | | | ACGGCTGTGTATTACTGTGCAAGAGAC | | ESGSFHPGLV | | | |
| | | | | | | | | | | | | | | | | CTGGAAAGTGGGAGCTTTCATCCCGGC | | RVPWGQGTLV | | | |
| | | | | | | | | | | | | | | | | CTGGTTCGGGTCCCCTGGGGCCAGGGA | | TVSS | | | |
| | | | | | | | | | | | | | | | | ACCCTGGTCACCGTCTCCTCA | | | | | |
| ADI- | IGHV3- | EVQLVQTG | 99 | IIVSRNY | 291 | WVRQA | 437 | VIYPGG | 622 | RFTIS | 920 | AREDNN | 1123 | WGQGTT | 1287 | GAGGTGCAGCTGGTGCAGACTGGAGGA | 1466 | EVQLVQTGGG | 1749 | | |
| 75774 | 53 | GGLIQPGG | | MT | | PGKGL | | STFYAD | | RDDSK | | NAFDI | | VTVSS | | GGCTTGATCCAGCCGGGGGGGTCCCTG | | LIQPGGSLRL | | | |
| | | SLRLSCAA | | | | EWVS | | SVRG | | NTLYL | | | | | | AGACTCTCCTGTGCAGCCTCTGAGATC | | SCAASEIIVS | | | |
| | | SE | | | | | | | | QMTSL | | | | | | ATCGTCAGTAGGAACTACATGACCTGG | | RNYMTWVRQA | | | |
| | | | | | | | | | | RAEDT | | | | | | GTCCGCCAGGCTCCAGGGAAAGGGCTG | | PGKGLEWVSV | | | |
| | | | | | | | | | | AVYYC | | | | | | GAGTGGGTCTCAGTTATTTATCCCGGT | | IYPGGSTFYA | | | |
| | | | | | | | | | | | | | | | | GGGAGCACTTTCTACGCAGACTCCGTG | | DSVRGRFTIS | | | |
| | | | | | | | | | | | | | | | | AGGGGCCGATTCACCATCTCCAGAGAC | | RDDSKNTLYL | | | |
| | | | | | | | | | | | | | | | | GATTCCAAGAACACTCTGTATCTTCAA | | QMTSLRAEDT | | | |
| | | | | | | | | | | | | | | | | ATGACCAGCCTGAGAGCCGAGGACACG | | AVYYCAREDN | | | |
| | | | | | | | | | | | | | | | | GCCGTGTATTACTGTGCGAGAGAAGAC | | NNAFDIWGQG | | | |
| | | | | | | | | | | | | | | | | AATAATAATGCTTTTGATATTTGGGGG | | TTVTVSS | | | |
| | | | | | | | | | | | | | | | | CAAGGGACAACGGTCACCGTCTCCTCA | | | | | |
| ADI- | IGHV1- | QVQLQQSG | 128 | YTFSDYY | 335 | WVRQA | 433 | ILNPSA | 671 | RVTMT | 921 | ARDWRF | 1171 | WGQGTT | 1287 | CAGGTGCAGCTACAGCAGTCTGGGGCT | 1467 | QVQLQQSGAE | 1750 | | |
| 75736 | 46 | AEVKKPGA | | MH | | PGQGL | | GSTSYA | | SDTST | | LPGFDA | | VTVSS | | GAGGTGAAGAAGCCTGGGGCCTCAGTG | | VKKPGASVRV | | | |
| | | SVRVSCKA | | | | EWMG | | QKFQG | | NTVYM | | FDI | | | | AGGGTTTCCTGCAAGGCATCTGGATAC | | SCKASGYTFS | | | |
| | | SG | | | | | | | | ELTSL | | | | | | ACCTTCAGTGACTACTATATGCACTGG | | DYYMHWVRQA | | | |
| | | | | | | | | | | RSEDT | | | | | | GTGCGACAGGCCCCTGGACAAGGGCTT | | PGQGLEWMGI | | | |
| | | | | | | | | | | AVYYC | | | | | | GAGTGGATGGGAATACTCAACCCTAGT | | LNPSAGSTSY | | | |
| | | | | | | | | | | | | | | | | GCTGGTAGCACAAGCTACGCACAGAAG | | AQKFQGRVTM | | | |
| | | | | | | | | | | | | | | | | TTCCAGGGCAGAGTCACCATGACCAGT | | TSDTSTNTVY | | | |
| | | | | | | | | | | | | | | | | GACACGTCCACGAACACAGTCTACATG | | MELTSLRSED | | | |
| | | | | | | | | | | | | | | | | GAGCTGACCAGCCTGAGATCTGAGGAC | | TAVYYCARDW | | | |
| | | | | | | | | | | | | | | | | ACGGCCGTGTATTACTGTGCTAGAGAT | | RFLPGFDAFD | | | |
| | | | | | | | | | | | | | | | | TGGCGGTTTCTACCCGGATTTGATGCT | | IWGQGTTVTV | | | |
| | | | | | | | | | | | | | | | | TTTGATATCTGGGGCCAAGGGACCACG | | SS | | | |
| | | | | | | | | | | | | | | | | GTCACCGTCTCCTCA | | | | | |
| ADI- | IGHV3- | QVQLVESG | 129 | FTFDDYA | 336 | WVRQA | 437 | GVSWNS | 672 | RFIIS | 922 | AKFGGG | 1172 | WGQGTL | 1286 | CAGGTGCAGCTGGTGGAGTCTGGGGGA | 1468 | QVQLVESGGA | 1751 | | |
| 75586 | 9 | GALVQPGR | | IH | | PGKGL | | GIIGYA | | RDNAK | | PTNYDF | | VTVSS | | GCCTTGGTACAGCCTGGCAGGTCCCTG | | LVQPGRSLRL | | | |
| | | SLRLSCAA | | | | EWVS | | DSVKG | | NSLYL | | RSASPY | | | | AGACTCTCCTGTGCAGCCTCTGGATTC | | SCAASGFTFD | | | |
| | | SG | | | | | | | | HMNSL | | HFDS | | | | ACCTTTGATGATTATGCCATCCACTGG | | DYAIHWVRQA | | | |
| | | | | | | | | | | RPEDT | | | | | | GTCCGGCAAGCTCCAGGGAAGGGCCTG | | PGKGLEWVSG | | | |
| | | | | | | | | | | ALYYC | | | | | | GAGTGGGTCTCAGGTGTTAGTTGGAAT | | VSWNSGIIGY | | | |
| | | | | | | | | | | | | | | | | AGTGGTATTATAGGCTATGCGGACTCT | | ADSVKGRFII | | | |
| | | | | | | | | | | | | | | | | GTGAAGGGCCGATTCATCATCTCCAGA | | SRDNAKNSLY | | | |
| | | | | | | | | | | | | | | | | GACAACGCCAAGAACTCCCTGTATCTG | | LHMNSLRPED | | | |
| | | | | | | | | | | | | | | | | CATATGAACAGTCTGAGACCTGAGGAC | | TALYYCAKFG | | | |
| | | | | | | | | | | | | | | | | ACGGCCTTGTATTACTGTGCAAAATTT | | GGPTNYDFRS | | | |
| | | | | | | | | | | | | | | | | GGGGGCGGGCCCACAAATTACGATTTT | | ASPYHFDSWG | | | |
| | | | | | | | | | | | | | | | | CGGAGTGCTTCCCCGTATCACTTTGAC | | QGTLVTVSS | | | |
| | | | | | | | | | | | | | | | | TCCTGGGGCCAGGGAACCCTGGTCACC | | | | | |
| | | | | | | | | | | | | | | | | GTCTCCTCA | | | | | |
| ADI- | IGHV3- | QVQLVQSG | 12 | FTFSTYW | 337 | WVRQA | 431 | SIKQDG | 661 | RFNIS | 917 | AREMGI | 1161 | RGQGSL | 1298 | CAGGTGCAGCTGGTGCAGTCTGGGGGG | 1469 | QVQLVQSGGG | 1752 | | |
| 75687 | 7 | GGLVQPGG | | MS | | PGKGL | | GEKYYV | | RDNAK | | FWFDP | | VTVSS | | GGCTTGGTCCAGCCTGGGGGGTCCCTG | | LVQPGGSLRL | | | |
| | | SLRLSCAA | | | | EWVA | | DSVKG | | NSLFL | | | | | | AGACTCTCCTGTGCAGCCTCTGGATTC | | SCAASGFTFS | | | |
| | | SG | | | | | | | | QMNSL | | | | | | ACCTTTAGTACCTATTGGATGAGTTGG | | TYWMSWVRQA | | | |
| | | | | | | | | | | RAEDT | | | | | | GTCCGCCAGGCTCCAGGGAAGGGGCTG | | PGKGLEWVAS | | | |
| | | | | | | | | | | AVYYC | | | | | | GAGTGGGTGGCCAGCATAAAGCAAGAT | | IKQDGGEKYY | | | |
| | | | | | | | | | | | | | | | | GGAGGTGAAAAATACTATGTGGACTCT | | VDSVKGRFNI | | | |
| | | | | | | | | | | | | | | | | GTGAAGGGCCGATTTAACATCTCCAGA | | SRDNAKNSLF | | | |
| | | | | | | | | | | | | | | | | GACAACGCCAAGAACTCACTGTTTCTG | | LQMNSLRAED | | | |
| | | | | | | | | | | | | | | | | CAAATGAACAGCCTGAGAGCCGAGGAC | | TAVYYCAREM | | | |
| | | | | | | | | | | | | | | | | ACGGCTGTCTATTATTGTGCGAGAGAA | | GIFWFDPRGQ | | | |
| | | | | | | | | | | | | | | | | ATGGGTATATTCTGGTTCGACCCCCGG | | GSLVTVSS | | | |
| | | | | | | | | | | | | | | | | GGCCAGGGATCCCTGGTCACCGTCTCC | | | | | |
| | | | | | | | | | | | | | | | | TCA | | | | | |
| ADI- | IGHV4- | QVQLQESG | 130 | YSISSGY | 338 | WIRQP | 487 | SIYHSG | 673 | RVTIS | 923 | ARDGQG | 1173 | WGQGAL | 1285 | CAGGTGCAGCTGCAGGAGTCGGGCCCA | 1470 | QVQLQESGPG | 1753 | | |
| 75694 | 38-2 | PGLVKASE | | SWG | | LGKGL | | STYYKA | | LDTSK | | YVPPRD | | VTVSS | | GGACTGGTGAAGGCTTCGGAGACCCTG | | LVKASETLSL | | | |
| | | TLSLACTV | | | | EWIG | | SLKS | | NQFSL | | NFDH | | | | TCCCTCGCCTGCACTGTCTCTGGTTAC | | ACTVSGYSIS | | | |
| | | SG | | | | | | | | KLSSV | | | | | | TCCATCAGCAGTGGTTATTCCTGGGGC | | SGYSWGWIRQ | | | |
| | | | | | | | | | | TAADT | | | | | | TGGATCCGGCAGCCCCTAGGGAAGGGG | | PLGKGLEWIG | | | |
| | | | | | | | | | | AVYYC | | | | | | CTGGAGTGGATTGGGAGTATCTATCAT | | SIYHSGSTYY | | | |
| | | | | | | | | | | | | | | | | AGTGGGAGCACCTATTACAAAGCGTCC | | KASLKSRVTI | | | |
| | | | | | | | | | | | | | | | | CTCAAGAGTCGAGTCACCATATCACTA | | SLDTSKNQFS | | | |
| | | | | | | | | | | | | | | | | GACACGTCCAAGAACCAGTTCTCCCTG | | LKLSSVTAAD | | | |
| | | | | | | | | | | | | | | | | AAGCTGAGCTCTGTGACGGCCGCAGAC | | TAVYYCARDG | | | |
| | | | | | | | | | | | | | | | | ACGGCCGTCTATTACTGTGCGAGAGAT | | QGYVPPRDNF | | | |
| | | | | | | | | | | | | | | | | GGTCAAGGGTACGTACCACCGAGAGAC | | DHWGQGALVT | | | |
| | | | | | | | | | | | | | | | | AACTTTGACCACTGGGGCCAGGGAGCC | | VSS | | | |
| | | | | | | | | | | | | | | | | CTGGTCACCGTCTCCTCA | | | | | |
| ADI- | IGHV3- | QVQLVQSG | 12 | ITVSSNY | 339 | WVRQA | 437 | VLYAGG | 674 | RFTIS | 924 | ARDIQR | 1174 | WGQGTT | 1287 | CAGGTGCAGCTGGTGCAGTCTGGAGGA | 1471 | QVQLVQSGGG | 1754 | | |
| 75711 | 53 | GGLVQPGG | | MT | | PGKGL | | STFYTD | | RHNSN | | YGIDV | | VTVSS | | GGCTTGGTCCAGCCGGGGGGGTCCCTG | | LVQPGGSLRL | | | |
| | | SLRLSCAA | | | | EWVS | | SVKG | | NTLYL | | | | | | AGACTCTCCTGTGCAGCCTCTGGAATC | | SCAASGITVS | | | |
| | | SG | | | | | | | | QMNSL | | | | | | ACCGTCAGTAGCAACTACATGACCTGG | | SNYMTWVRQA | | | |
| | | | | | | | | | | RPEDT | | | | | | GTCCGCCAGGCTCCAGGGAAGGGGCTG | | PGKGLEWVSV | | | |
| | | | | | | | | | | AVYYC | | | | | | GAGTGGGTCTCAGTTCTTTATGCCGGT | | LYAGGSTFYT | | | |
| | | | | | | | | | | | | | | | | GGTAGCACCTTCTACACAGACTCCGTG | | DSVKGRFTIS | | | |
| | | | | | | | | | | | | | | | | AAGGGCCGGTTCACCATCTCCAGACAC | | RHNSNNTLYL | | | |
| | | | | | | | | | | | | | | | | AATTCCAACAACACACTGTATCTTCAA | | QMNSLRPEDT | | | |
| | | | | | | | | | | | | | | | | ATGAACAGCCTGAGACCTGAAGACACG | | AVYYCARDIQ | | | |
| | | | | | | | | | | | | | | | | GCCGTTTATTATTGTGCGAGAGACATT | | RYGIDVWGQG | | | |
| | | | | | | | | | | | | | | | | CAGCGATACGGTATAGACGTCTGGGGC | | TTVTVSS | | | |
| | | | | | | | | | | | | | | | | CAAGGGACCACGGTCACCGTCTCCTCA | | | | | |
| ADI- | IGHV4- | QVQLQESG | 39 | GSISSDG | 340 | WIRQH | 450 | YIYYSG | 675 | SFTIS | 925 | ARVVRY | 1175 | WGQGTL | 1286 | CAGGTGCAGCTGCAGGAGTCGGGCCCA | 1472 | QVQLQESGPG | 1755 | | |
| 75704 | 31 | PGLVKPSQ | | YYWS | | PGKGL | | ITYYNP | | VDTSK | | CSSTSC | | VTVSS | | GGACTGGTGAAGCCTTCACAGACCCTG | | LVKPSQTLSL | | | |
| | | TLSLTCTV | | | | EWIG | | SLKS | | NQFSL | | YTLDF | | | | TCCCTCACCTGCACTGTCTCTGGTGGC | | TCTVSGGSIS | | | |
| | | SG | | | | | | | | KLSSV | | | | | | TCCATCAGCAGTGATGGTTACTACTGG | | SDGYYWSWIR | | | |
| | | | | | | | | | | TAADT | | | | | | AGCTGGATCCGCCAGCACCCGGGGAAG | | QHPGKGLEWI | | | |
| | | | | | | | | | | AMYYC | | | | | | GGCCTGGAGTGGATTGGGTACATCTAT | | GYIYYSGITY | | | |
| | | | | | | | | | | | | | | | | TACAGTGGGATCACCTACTACAACCCG | | YNPSLKSSFT | | | |
| | | | | | | | | | | | | | | | | TCCCTCAAGAGTTCATTTACCATATCA | | ISVDTSKNQF | | | |
| | | | | | | | | | | | | | | | | GTAGACACGTCTAAGAACCAGTTCTCC | | SLKLSSVTAA | | | |
| | | | | | | | | | | | | | | | | CTGAAGCTGAGCTCTGTGACTGCCGCG | | DTAMYYCARV | | | |
| | | | | | | | | | | | | | | | | GACACGGCCATGTATTACTGTGCGAGA | | VRYCSSTSCY | | | |
| | | | | | | | | | | | | | | | | GTAGTGAGATACTGTAGTAGTACCAGC | | TLDFWGQGTL | | | |
| | | | | | | | | | | | | | | | | TGCTATACGCTTGACTTCTGGGGCCAG | | VTVSS | | | |
| | | | | | | | | | | | | | | | | GGAACCCTGGTCACCGTCTCCTCA | | | | | |
| ADI- | IGHV3- | RCTLVQSG | 131 | FSFSSFA | 341 | WVRQA | 437 | IISGSG | 676 | RFTIS | 777 | AKGPWC | 1176 | WGQGTL | 1286 | AGGTGCACGCTGGTGCAGTCTGGGGGA | 1473 | RCTLVQSGGG | 1756 | | |
| 75631 | 23 | GGLVQPGG | | MN | | PGKGL | | VNTYYA | | RDNSK | | STSNCY | | VTVSS | | GGCTTGGTACAGCCGGGGGGGTCCCTG | | LVQPGGSLRL | | | |
| | | SLRLSCSA | | | | EWVS | | DSVKG | | NTLYL | | TSMVYP | | | | AGACTCTCCTGTTCAGCCTCTGGATTC | | SCSASGFSFS | | | |
| | | SG | | | | | | | | QMNSL | | VADFFH | | | | AGCTTTAGCAGCTTTGCCATGAACTGG | | SFAMNWVRQA | | | |
| | | | | | | | | | | RAEDT | | H | | | | GTCCGCCAGGCTCCAGGGAAGGGGCTG | | PGKGLEWVSI | | | |
| | | | | | | | | | | AVYYC | | | | | | GAGTGGGTCTCAATAATTAGCGGTAGT | | ISGSGVNTYY | | | |
| | | | | | | | | | | | | | | | | GGTGTTAACACCTACTACGCAGACTCC | | ADSVKGRFTI | | | |
| | | | | | | | | | | | | | | | | GTGAAGGGCCGGTTCACCATCTCCAGA | | SRDNSKNTLY | | | |
| | | | | | | | | | | | | | | | | GACAATTCCAAGAACACGCTGTATCTG | | LQMNSLRAED | | | |
| | | | | | | | | | | | | | | | | CAAATGAACAGCCTGAGAGCCGAGGAC | | TAVYYCAKGP | | | |
| | | | | | | | | | | | | | | | | ACGGCCGTATATTACTGTGCGAAAGGT | | WCSTSNCYTS | | | |
| | | | | | | | | | | | | | | | | CCCTGGTGTAGTACTAGCAACTGCTAT | | MVYPVADFFH | | | |
| | | | | | | | | | | | | | | | | ACTTCAATGGTCTATCCCGTCGCTGAT | | HWGQGTLVTV | | | |
| | | | | | | | | | | | | | | | | TTCTTCCACCACTGGGGCCAGGGCACC | | SS | | | |
| | | | | | | | | | | | | | | | | CTGGTCACCGTCTCCTCA | | | | | |
| ADI- | IGHV1- | QVQLVQSG | 50 | GTFNNHF | 342 | WVRRA | 488 | KIIPII | 677 | RVTIT | 926 | ARRTSS | 1177 | WGQGTL | 1286 | CAGGTGCAGCTGGTGCAGTCTGGGGCT | 1474 | QVQLVQSGAE | 1757 | | |
| 75773 | 69 | AEVKKPGS | | IN | | PGQGL | | DIANSA | | ADKST | | SSEYFD | | VTVSS | | GAGGTGAAGAAGCCTGGGTCCTCGGTG | | VKKPGSSVKV | | | |
| | | SVKVSCKA | | | | EWMG | | QKFQG | | STVYM | | S | | | | AAGGTCTCCTGCAAGGCTTCTGGAGGC | | SCKASGGTFN | | | |
| | | SG | | | | | | | | ELSSL | | | | | | ACCTTCAACAACCATTTTATCAACTGG | | NHFINWVRRA | | | |
| | | | | | | | | | | RSDDT | | | | | | GTGCGACGGGCCCCTGGACAAGGGCTT | | PGQGLEWMGK | | | |
| | | | | | | | | | | AMYYC | | | | | | GAGTGGATGGGAAAGATCATCCCTATC | | IIPIIDIANS | | | |
| | | | | | | | | | | | | | | | | ATTGATATAGCAAACTCCGCACAGAAG | | AQKFQGRVTI | | | |
| | | | | | | | | | | | | | | | | TTCCAGGGCAGAGTCACGATTACCGCG | | TADKSTSTVY | | | |
| | | | | | | | | | | | | | | | | GACAAATCCACGAGCACAGTCTACATG | | MELSSLRSDD | | | |
| | | | | | | | | | | | | | | | | GAGCTGAGCAGCCTGAGATCTGATGAC | | TAMYYCARRT | | | |
| | | | | | | | | | | | | | | | | ACGGCCATGTATTACTGTGCGCGTCGA | | SSSSEYFDSW | | | |
| | | | | | | | | | | | | | | | | ACTAGCAGTTCGTCTGAGTATTTTGAC | | GQGTLVTVSS | | | |
| | | | | | | | | | | | | | | | | TCCTGGGGCCAGGGAACCCTGGTCACC | | | | | |
| | | | | | | | | | | | | | | | | GTCTCCTCA | | | | | |
| ADI- | IGHV3- | QVQLVQSG | 12 | LIVSSNY | 343 | WVRQA | 437 | TIYPGG | 678 | RFTIS | 927 | VRPIYG | 1178 | WGKGTT | 1291 | CAGGTGCAGCTGGTGCAGTCTGGGGGA | 1475 | QVQLVQSGGG | 1758 | | |
| 75798 | 66 | GGLVQPGG | | MS | | PGKGL | | STFYTD | | RDGSK | | GNPGMD | | VTVSS | | GGCTTGGTCCAGCCTGGGGGGTCCCTG | | LVQPGGSLRL | | | |
| | | SLRLSCAA | | | | EWVS | | SVKG | | NTLYL | | V | | | | AGACTCTCCTGTGCAGCCTCTGGACTC | | SCAASGLIVS | | | |
| | | SG | | | | | | | | EMKSP | | | | | | ATCGTCAGTAGTAACTACATGAGCTGG | | SNYMSWVRQA | | | |
| | | | | | | | | | | RAEDT | | | | | | GTCCGCCAGGCTCCAGGGAAGGGGCTG | | PGKGLEWVST | | | |
| | | | | | | | | | | ALYYC | | | | | | GAGTGGGTCTCAACAATTTATCCCGGT | | IYPGGSTFYT | | | |
| | | | | | | | | | | | | | | | | GGTAGCACATTCTACACAGACTCCGTG | | DSVKGRFTIS | | | |
| | | | | | | | | | | | | | | | | AAGGGCAGATTCACCATCTCCAGAGAC | | RDGSKNTLYL | | | |
| | | | | | | | | | | | | | | | | GGTTCCAAGAACACGCTGTATCTGGAA | | EMKSPRAEDT | | | |
| | | | | | | | | | | | | | | | | ATGAAGAGCCCGAGAGCCGAGGACACG | | ALYYCVRPIY | | | |
| | | | | | | | | | | | | | | | | GCTCTTTACTACTGTGTGAGACCCATA | | GGNPGMDVWG | | | |
| | | | | | | | | | | | | | | | | TACGGTGGTAACCCGGGCATGGACGTC | | KGTTVTVSS | | | |
| | | | | | | | | | | | | | | | | TGGGGCAAAGGGACCACGGTCACCGTC | | | | | |
| | | | | | | | | | | | | | | | | TCCTCA | | | | | |
| ADI- | IGHV3- | QVQLVQSG | 132 | FTFNNYG | 344 | WVRQA | 431 | VIWYDG | 679 | RFTIS | 777 | ARFGYS | 1179 | WGQGTL | 1286 | CAGGTCCAGCTGGTGCAGTCTGGGGGA | 1476 | QVQLVQSGGG | 1759 | | |
| 75782 | 33 | GGVVQPGK | | MH | | PGKGL | | SNKYYA | | RDNSK | | LEATTD | | VTVSS | | GGCGTGGTCCAGCCTGGGAAGTCCCTG | | VVQPGKSLRL | | | |
| | | SLRLSCAT | | | | EWVA | | DSVKG | | NTLYL | | AFHY | | | | AGACTCTCCTGTGCAACGTCTGGATTC | | SCATSGFTFN | | | |
| | | SG | | | | | | | | QMNSL | | | | | | ACCTTCAATAACTATGGCATGCACTGG | | NYGMHWVRQA | | | |
| | | | | | | | | | | RAEDT | | | | | | GTCCGCCAGGCTCCAGGCAAGGGGCTG | | PGKGLEWVAV | | | |
| | | | | | | | | | | AVYYC | | | | | | GAGTGGGTGGCAGTTATATGGTATGAT | | IWYDGSNKYY | | | |
| | | | | | | | | | | | | | | | | GGAAGTAATAAATATTACGCAGACTCC | | ADSVKGRFTI | | | |
| | | | | | | | | | | | | | | | | GTGAAGGGCCGATTCACCATCTCCAGA | | SRDNSKNTLY | | | |
| | | | | | | | | | | | | | | | | GACAATTCCAAGAACACGCTGTATCTG | | LQMNSLRAED | | | |
| | | | | | | | | | | | | | | | | CAAATGAACAGCCTGAGAGCCGAGGAC | | TAVYYCARFG | | | |
| | | | | | | | | | | | | | | | | ACGGCTGTGTATTATTGTGCGAGGTTC | | YSLEATTDAF | | | |
| | | | | | | | | | | | | | | | | GGATATAGTCTAGAGGCCACGACCGAC | | HYWGQGTLVT | | | |
| | | | | | | | | | | | | | | | | GCCTTTCACTACTGGGGCCAGGGAACC | | VSS | | | |
| | | | | | | | | | | | | | | | | CTGGTCACCGTCTCCTCA | | | | | |
| ADI- | IGHV3- | QVQLVQSG | 79 | LIVSSNY | 345 | WVRQA | 489 | VLFAGG | 680 | RFTIS | 777 | ARDLVT | 1180 | WGQGTT | 1287 | CAGGTGCAGCTGGTGCAGTCTGGCGGA | 1477 | QVQLVQSGGG | 1760 | | |
| 75858 | 53 | GGLIQPGG | | MN | | PGNRL | | TTFYAD | | RDNSK | | YGMDV | | VTVSS | | GGCTTGATCCAGCCGGGGGGGTCCCTG | | LIQPGGSLRL | | | |
| | | SLRLSCAA | | | | EWVS | | SVKG | | NTLYL | | | | | | CGACTCTCATGTGCAGCCTCTGGGCTC | | SCAASGLIVS | | | |
| | | SG | | | | | | | | QMNSL | | | | | | ATCGTCAGTAGCAACTACATGAACTGG | | SNYMNWVRQA | | | |
| | | | | | | | | | | RAEDT | | | | | | GTCCGCCAGGCTCCAGGGAACCGGCTG | | PGNRLEWVSV | | | |
| | | | | | | | | | | AVYYC | | | | | | GAGTGGGTCTCAGTTCTTTTTGCCGGT | | LFAGGTTFYA | | | |
| | | | | | | | | | | | | | | | | GGAACCACATTCTACGCAGACTCCGTG | | DSVKGRFTIS | | | |
| | | | | | | | | | | | | | | | | AAGGGCCGATTCACCATCTCCAGAGAC | | RDNSKNTLYL | | | |
| | | | | | | | | | | | | | | | | AATTCCAAGAACACTCTGTATCTCCAA | | QMNSLRAEDT | | | |
| | | | | | | | | | | | | | | | | ATGAACAGCCTGCGCGCCGAGGACACG | | AVYYCARDLV | | | |
| | | | | | | | | | | | | | | | | GCCGTGTATTACTGTGCGAGAGATCTG | | TYGMDVWGQG | | | |
| | | | | | | | | | | | | | | | | GTAACCTACGGTATGGATGTCTGGGGC | | TTVTVSS | | | |
| | | | | | | | | | | | | | | | | CAAGGGACCACGGTCACCGTCTCCTCA | | | | | |
| ADI- | IGHV1- | RYPLVQSG | 133 | GTFSSYT | 346 | WVRQA | 490 | RIFPIL | 681 | RVTIT | 928 | ARETGY | 1181 | WGRGTL | 1288 | AGGTACCCGCTGGTGCAGTCTGGGGCT | 1478 | RYPLVQSGAE | 1761 | | |
| 75712 | 69 | AEVKKPGS | | VI | | PGQGL | | GVTDYA | | ADKST | | SSSGSV | | VTVSS | | GAGGTGAAGAAGCCTGGGTCCTCGGTG | | VKKPGSSVKV | | | |
| | | SVKVSCKA | | | | ECLG | | QKFQD | | GTAYM | | PYFHV | | | | AAGGTCTCCTGCAAGGCTTCTGGAGGC | | SCKASGGTFS | | | |
| | | SG | | | | | | | | ELTSL | | | | | | ACCTTCAGCAGCTATACTGTCATCTGG | | SYTVIWVRQA | | | |
| | | | | | | | | | | RSEDT | | | | | | GTGCGGCAGGCCCCTGGACAAGGGCTT | | PGQGLECLGR | | | |
| | | | | | | | | | | AVYYC | | | | | | GAATGCCTGGGAAGGATCTTCCCTATC | | IFPILGVTDY | | | |
| | | | | | | | | | | | | | | | | CTTGGTGTAACAGACTACGCACAGAAG | | AQKFQDRVTI | | | |
| | | | | | | | | | | | | | | | | TTCCAGGACAGAGTCACGATTACCGCG | | TADKSTGTAY | | | |
| | | | | | | | | | | | | | | | | GACAAATCCACGGGCACAGCCTACATG | | MELTSLRSED | | | |
| | | | | | | | | | | | | | | | | GAACTGACCAGCCTGAGATCTGAGGAC | | TAVYYCARET | | | |
| | | | | | | | | | | | | | | | | ACGGCCGTGTATTACTGTGCGAGAGAG | | GYSSSGSVPY | | | |
| | | | | | | | | | | | | | | | | ACGGGTTACTCTAGTTCGGGGAGTGTT | | FHVWGRGTLV | | | |
| | | | | | | | | | | | | | | | | CCGTACTTCCATGTCTGGGGCCGTGGC | | TVSS | | | |
| | | | | | | | | | | | | | | | | ACCCTGGTCACCGTCTCCTCA | | | | | |
| ADI- | IGHV3- | QVQLQQSG | 134 | ITVSANY | 347 | WVRQA | 437 | VLYSGG | 682 | RFTIS | 777 | ARDLVV | 1182 | WGQGTT | 1287 | CAGGTGCAGCTGCAGCAGTCTGGAGGA | 1479 | QVQLQQSGGG | 1762 | | |
| 75716 | 53 | GGLVQPGG | | MN | | PGKGL | | TTYYAD | | RDNSK | | YGMDV | | VTVSS | | GGCTTGGTCCAGCCTGGGGGGTCCCTG | | LVQPGGSLRL | | | |
| | | SLRLSCVA | | | | EWVS | | SVKG | | NTLYL | | | | | | AGACTCTCCTGTGTAGCCTCTGGGATC | | SCVASGITVS | | | |
| | | SG | | | | | | | | QMNSL | | | | | | ACTGTCAGTGCCAACTACATGAACTGG | | ANYMNWVRQA | | | |
| | | | | | | | | | | RAEDT | | | | | | GTCCGCCAGGCTCCAGGAAAGGGGCTG | | PGKGLEWVSV | | | |
| | | | | | | | | | | AVYYC | | | | | | GAGTGGGTCTCAGTTCTTTATAGCGGT | | LYSGGTTYYA | | | |
| | | | | | | | | | | | | | | | | GGTACCACATACTACGCAGACTCCGTG | | DSVKGRFTIS | | | |
| | | | | | | | | | | | | | | | | AAGGGCCGATTCACCATCTCCAGAGAC | | RDNSKNTLYL | | | |
| | | | | | | | | | | | | | | | | AATTCCAAGAACACCCTATATCTTCAA | | QMNSLRAEDT | | | |
| | | | | | | | | | | | | | | | | ATGAACAGTCTGAGAGCTGAGGACACG | | AVYYCARDLV | | | |
| | | | | | | | | | | | | | | | | GCCGTGTATTACTGTGCGAGAGATCTG | | VYGMDVWGQG | | | |
| | | | | | | | | | | | | | | | | GTCGTCTACGGTATGGACGTCTGGGGC | | TTVTVSS | | | |
| | | | | | | | | | | | | | | | | CAAGGGACCACGGTCACCGTCTCCTCA | | | | | |
| ADI- | IGHV1- | QVQLVQSG | 135 | YTFTTFD | 348 | WVRQA | 491 | WMNPNS | 683 | RVTMT | 929 | ARGGEL | 1183 | WGQGTL | 1286 | CAGGTCCAGCTGGTGCAGTCTGGGGCT | 1480 | QVQLVQSGAE | 1763 | | |
| 75689 | 8 | AEVKKPGA | | IN | | TGQGL | | GYTGYA | | RNTST | | TGLLRH | | VTVSS | | GAGGTGAAGAAGCCTGGGGCCTCAGTT | | VKKPGASVRV | | | |
| | | SVRVSCKA | | | | EWMG | | QKFQG | | STAYV | | | | | | AGGGTCTCCTGCAAGGCTTCTGGATAC | | SCKASGYTFT | | | |
| | | SG | | | | | | | | ELNSL | | | | | | ACCTTCACCACTTTTGATATCAACTGG | | TFDINWVRQA | | | |
| | | | | | | | | | | RSEDT | | | | | | GTGCGACAGGCCACTGGACAAGGGCTT | | TGQGLEWMGW | | | |
| | | | | | | | | | | AVYYC | | | | | | GAGTGGATGGGATGGATGAACCCTAAC | | MNPNSGYTGY | | | |
| | | | | | | | | | | | | | | | | AGTGGTTACACAGGCTATGCACAGAAG | | AQKFQGRVTM | | | |
| | | | | | | | | | | | | | | | | TTCCAGGGCAGAGTCACCATGACCAGG | | TRNTSTSTAY | | | |
| | | | | | | | | | | | | | | | | AACACCTCCACAAGCACAGCCTACGTG | | VELNSLRSED | | | |
| | | | | | | | | | | | | | | | | GAGCTGAACAGCCTGCGATCTGAGGAC | | TAVYYCARGG | | | |
| | | | | | | | | | | | | | | | | ACGGCCGTGTATTACTGTGCGAGAGGG | | ELTGLLRHWG | | | |
| | | | | | | | | | | | | | | | | GGGGAACTTACCGGGCTTTTACGCCAC | | QGTLVTVSS | | | |
| | | | | | | | | | | | | | | | | TGGGGCCAGGGAACCCTGGTCACCGTC | | | | | |
| | | | | | | | | | | | | | | | | TCCTCA | | | | | |
| ADI- | IGHV1- | QVQLVQSG | 35 | YSFTGYY | 349 | WIRQA | 492 | QINPNN | 684 | RVTMT | 930 | SAHGTD | 1184 | WGQGTT | 1287 | CAGGTCCAGCTGGTGCAGTCTGGGGCT | 1481 | QVQLVQSGAE | 1764 | | |
| 75669 | 2 | AEVKKPGA | | MY | | PGQGL | | GGTNYA | | RDTSI | | FDV | | VTVSS | | GAGGTGAAGAAGCCTGGGGCCTCAGTG | | VKKPGASVKV | | | |
| | | SVKVSCKA | | | | EWMG | | QKFQG | | NTAYM | | | | | | AAGGTCTCCTGCAAGGCTTCTGGATAC | | SCKASGYSFT | | | |
| | | SG | | | | | | | | ELRRL | | | | | | AGTTTCACCGGCTACTATATGTACTGG | | GYYMYWIRQA | | | |
| | | | | | | | | | | RSDDT | | | | | | ATACGACAGGCCCCTGGACAAGGGCTT | | PGQGLEWMGQ | | | |
| | | | | | | | | | | AVYYC | | | | | | GAGTGGATGGGACAGATCAACCCTAAC | | INPNNGGTNY | | | |
| | | | | | | | | | | | | | | | | AATGGTGGCACAAACTATGCACAGAAG | | AQKFQGRVTM | | | |
| | | | | | | | | | | | | | | | | TTTCAGGGCAGGGTCACCATGACCAGG | | TRDTSINTAY | | | |
| | | | | | | | | | | | | | | | | GACACGTCCATCAACACAGCCTACATG | | MELRRLRSDD | | | |
| | | | | | | | | | | | | | | | | GAGCTGCGCAGGCTGAGATCTGACGAC | | TAVYYCSAHG | | | |
| | | | | | | | | | | | | | | | | ACGGCCGTGTATTACTGTTCGGCACAT | | TDFDVWGQGT | | | |
| | | | | | | | | | | | | | | | | GGAACTGATTTTGATGTCTGGGGCCAA | | TVTVSS | | | |
| | | | | | | | | | | | | | | | | GGGACCACGGTCACCGTCTCCTCA | | | | | |
| ADI- | IGHV1- | QVQLQQSG | 103 | YTFSSYY | 350 | WVRQA | 433 | IINPSA | 685 | RVTMT | 931 | ARGGIV | 1185 | WGQGTL | 1286 | CAGGTGCAGCTGCAGCAGTCTGGGGCT | 1482 | QVQLQQSGAE | 1765 | | |
| 75839 | 46 | AEVKKPGA | | IH | | PGQGL | | GSTTYA | | SDTST | | PDAKEP | | VTVSS | | GAGGTGAAGAAGCCTGGGGCCTCAGTG | | VKKPGASVKV | | | |
| | | SVKVSCKA | | | | EWMG | | QKFQG | | RTIYI | | FHY | | | | AAGGTTTCCTGCAAGGCATCTGGATAC | | SCKASGYTFS | | | |
| | | SG | | | | | | | | ELSSL | | | | | | ACCTTCAGCAGCTACTATATACATTGG | | SYYIHWVRQA | | | |
| | | | | | | | | | | KSEDT | | | | | | GTGCGACAGGCCCCTGGACAAGGGCTT | | PGQGLEWMGI | | | |
| | | | | | | | | | | AVYYC | | | | | | GAGTGGATGGGAATAATCAACCCTAGC | | INPSAGSTTY | | | |
| | | | | | | | | | | | | | | | | GCTGGTAGCACAACCTACGCACAGAAG | | AQKFQGRVTM | | | |
| | | | | | | | | | | | | | | | | TTCCAGGGCAGAGTCACCATGACCAGC | | TSDTSTRTIY | | | |
| | | | | | | | | | | | | | | | | GACACGTCCACGCGCACAATCTATATT | | IELSSLKSED | | | |
| | | | | | | | | | | | | | | | | GAACTGAGCAGCCTGAAATCTGAGGAC | | TAVYYCARGG | | | |
| | | | | | | | | | | | | | | | | ACGGCCGTCTATTACTGTGCGAGAGGG | | IVPDAKEPFH | | | |
| | | | | | | | | | | | | | | | | GGTATAGTGCCAGATGCTAAGGAACCC | | YWGQGTLVTV | | | |
| | | | | | | | | | | | | | | | | TTTCACTACTGGGGCCAGGGAACCCTG | | SS | | | |
| | | | | | | | | | | | | | | | | GTCACCGTCTCCTCA | | | | | |
| ADI- | IGHV3- | QVQLVQSG | 136 | FTFSNYE | 351 | WVRQG | 493 | YISTSG | 686 | RFTIS | 932 | LTHPQP | 1186 | WGQGTL | 1286 | CAGGTGCAGCTGGTGCAGTCTGGGGGA | 1483 | QVQLVQSGGD | 1766 | | |
| 75754 | 48 | GDLVQPGG | | MN | | PGKGL | | STYYYA | | RDNAR | | QYVRPT | | VTVSS | | GACTTGGTACAGCCTGGAGGGTCCCTG | | LVQPGGSLRL | | | |
| | | SLRLSCVA | | | | EWIS | | DSVKG | | NSLYL | | QVVWFD | | | | AGACTCTCCTGTGTCGCCTCTGGATTC | | SCVASGFTFS | | | |
| | | SG | | | | | | | | QMDSL | | P | | | | ACCTTCAGTAATTATGAGATGAACTGG | | NYEMNWVRQG | | | |
| | | | | | | | | | | RVEDT | | | | | | GTCCGCCAGGGTCCAGGGAAGGGACTG | | PGKGLEWISY | | | |
| | | | | | | | | | | AIYYC | | | | | | GAGTGGATTTCATACATTAGTACTAGT | | ISTSGSTYYY | | | |
| | | | | | | | | | | | | | | | | GGTAGTACCTATTACTACGCAGACTCT | | ADSVKGRFTI | | | |
| | | | | | | | | | | | | | | | | GTGAAGGGCCGATTCACCATATCCAGA | | SRDNARNSLY | | | |
| | | | | | | | | | | | | | | | | GACAACGCCAGGAACTCACTGTATCTG | | LQMDSLRVED | | | |
| | | | | | | | | | | | | | | | | CAAATGGACAGCCTGAGAGTCGAGGAC | | TAIYYCLTHP | | | |
| | | | | | | | | | | | | | | | | ACTGCTATTTATTACTGTCTGACACAC | | QPQYVRPTQV | | | |
| | | | | | | | | | | | | | | | | CCTCAGCCTCAATATGTACGACCCACG | | VWFDPWGQGT | | | |
| | | | | | | | | | | | | | | | | CAGGTGGTCTGGTTCGACCCCTGGGGC | | LVTVSS | | | |
| | | | | | | | | | | | | | | | | CAGGGAACCCTGGTCACCGTCTCCTCA | | | | | |
| ADI- | IGHV1- | QVQLVQSG | 137 | FTFSTSA | 352 | WVRQA | 494 | WIAVGR | 687 | RVKIT | 933 | AAPHCN | 1187 | WGQGTM | 1299 | CAGGTCCAGCTGGTGCAGTCTGGGCCT | 1484 | QVQLVQSGPE | 1767 | | |
| 75743 | 58 | PEVKKPGT | | VQ | | RGQPL | | GITDHA | | RDEST | | RTSCHD | | VTVSS | | GAGGTGAAGAAGCCTGGGACCTCAGTG | | VKKPGTSVKV | | | |
| | | SVKVSCKA | | | | EWIG | | QKFQE | | STAYM | | AFDL | | | | AAGGTCTCCTGCAAGGCTTCTGGATTC | | SCKASGFTFS | | | |
| | | SG | | | | | | | | ELSSL | | | | | | ACCTTTAGTACTTCTGCTGTGCAGTGG | | TSAVQWVRQA | | | |
| | | | | | | | | | | RFDDT | | | | | | GTGCGACAGGCTCGTGGGCAGCCCCTT | | RGQPLEWIGW | | | |
| | | | | | | | | | | AVYYC | | | | | | GAGTGGATAGGATGGATCGCCGTTGGC | | IAVGRGITDH | | | |
| | | | | | | | | | | | | | | | | AGAGGTATCACAGACCACGCACAGAAG | | AQKFQERVKI | | | |
| | | | | | | | | | | | | | | | | TTCCAGGAAAGAGTCAAAATTACCAGG | | TRDESTSTAY | | | |
| | | | | | | | | | | | | | | | | GACGAGTCCACAAGTACAGCCTACATG | | MELSSLRFDD | | | |
| | | | | | | | | | | | | | | | | GAACTGAGCAGCTTGAGATTCGACGAC | | TAVYYCAAPH | | | |
| | | | | | | | | | | | | | | | | ACGGCCGTGTATTACTGTGCGGCACCC | | CNRTSCHDAF | | | |
| | | | | | | | | | | | | | | | | CATTGCAATAGAACCAGCTGCCACGAT | | DLWGQGTMVT | | | |
| | | | | | | | | | | | | | | | | GCTTTTGATCTTTGGGGCCAAGGGACA | | VSS | | | |
| | | | | | | | | | | | | | | | | ATGGTCACCGTCTCTTCA | | | | | |
| ADI- | IGHV3- | QVQLVQCG | 138 | FSFGSYV | 353 | WVRQT | 448 | GISGSG | 688 | RFTLS | 934 | ARGRNG | 1188 | WGQGTL | 1286 | CAGGTCCAGCTGGTGCAGTGTGGGGGA | 1485 | QVQLVQCGGG | 1768 | | |
| 75841 | 23 | GGLVQHGG | | MS | | PGKGL | | GSTYYA | | RDVSK | | WYLGAD | | VTVSS | | GGCTTGGTACAGCATGGGGGGTCCCTA | | LVQHGGSLRL | | | |
| | | SLRLSCAA | | | | EWVS | | EAVRG | | DTLFL | | S | | | | AGACTGTCTTGTGCAGCATCTGGATTC | | SCAASGFSFG | | | |
| | | SG | | | | | | | | QLNSL | | | | | | TCCTTTGGCAGCTATGTCATGAGCTGG | | SYVMSWVRQT | | | |
| | | | | | | | | | | KAADT | | | | | | GTCCGCCAGACTCCAGGGAAGGGGCTG | | PGKGLEWVSG | | | |
| | | | | | | | | | | AIYYC | | | | | | GAGTGGGTCTCAGGTATTAGTGGTAGT | | ISGSGGSTYY | | | |
| | | | | | | | | | | | | | | | | GGCGGTAGCACATACTACGCAGAGGCT | | AEAVRGRFTL | | | |
| | | | | | | | | | | | | | | | | GTGAGGGGCCGGTTCACCTTGTCCAGA | | SRDVSKDTLF | | | |
| | | | | | | | | | | | | | | | | GACGTTTCCAAGGACACACTGTTTTTG | | LQLNSLKAAD | | | |
| | | | | | | | | | | | | | | | | CAACTGAACAGCCTGAAAGCGGCGGAC | | TAIYYCARGR | | | |
| | | | | | | | | | | | | | | | | ACGGCCATATACTACTGTGCGAGAGGG | | NGWYLGADSW | | | |
| | | | | | | | | | | | | | | | | CGCAACGGCTGGTACTTGGGGGGGGAC | | GQGTLVTVSS | | | |
| | | | | | | | | | | | | | | | | TCCTGGGGCCAGGGAACCCTGGTCACC | | | | | |
| | | | | | | | | | | | | | | | | GTCTCCTCA | | | | | |
| ADI- | IGHV3- | RCPLVQSG | 139 | VIVSSNY | 354 | WVRQA | 437 | VIYSGG | 689 | RFTIS | 777 | ARGYGD | 1189 | WGQGTL | 1286 | AGGTGCCCGCTGGTGCAGTCTGGAGGA | 1486 | RCPLVQSGGG | 1769 | | |
| 75879 | 53 | GGLIQPGG | | MN | | PGKGL | | STFYAD | | RDNSK | | YYFDY | | VTVSS | | GGCTTGATCCAGCCTGGGGGGTCCCTG | | LIQPGGSLRL | | | |
| | | SLRLSCAA | | | | EWVS | | SVKG | | NTLYL | | | | | | AGACTCTCCTGTGCAGCCTCTGGAGTC | | SCAASGVIVS | | | |
| | | SG | | | | | | | | QMNSL | | | | | | ATCGTCAGTAGCAACTACATGAACTGG | | SNYMNWVRQA | | | |
| | | | | | | | | | | RAEDT | | | | | | GTCCGCCAGGCTCCAGGGAAGGGGCTG | | PGKGLEWVSV | | | |
| | | | | | | | | | | AVYYC | | | | | | GAGTGGGTCTCAGTTATTTATAGCGGT | | IYSGGSTFYA | | | |
| | | | | | | | | | | | | | | | | GGTAGCACATTCTACGCAGACTCCGTG | | DSVKGRFTIS | | | |
| | | | | | | | | | | | | | | | | AAGGGCCGATTCACCATCTCCAGAGAC | | RDNSKNTLYL | | | |
| | | | | | | | | | | | | | | | | AATTCCAAGAACACGCTGTATCTTCAA | | QMNSLRAEDT | | | |
| | | | | | | | | | | | | | | | | ATGAACAGCCTGAGAGCCGAGGACACG | | AVYYCARGYG | | | |
| | | | | | | | | | | | | | | | | GCCGTGTATTACTGTGCGAGAGGCTAC | | DYYFDYWGQG | | | |
| | | | | | | | | | | | | | | | | GGTGACTACTACTTTGACTACTGGGGC | | TLVTVSS | | | |
| | | | | | | | | | | | | | | | | CAGGGAACCCTGGTCACCGTCTCCTCA | | | | | |
| ADI- | IGHV3- | QVQLVQSG | 140 | FTFSNYG | 355 | WVRQA | 437 | GLSRSG | 690 | RFTIS | 935 | AKDLGL | 1190 | WGQGTL | 1286 | CAGGTGCAGCTGGTGCAGTCTGGGGGA | 1487 | QVQLVQSGGG | 1770 | | |
| 75703 | 23 | GGLVQPGG | | MS | | PGKGL | | DITYYA | | RDNSK | | VVTTEV | | VTVSS | | GGCTTGGTACAGCCTGGGGGGTCCCTG | | LVQPGGSLRL | | | |
| | | SLRLSCEA | | | | EWVS | | DSVKG | | NTLYL | | ADF | | | | AGACTCTCCTGTGAAGCCTCTGGATTC | | SCEASGFTFS | | | |
| | | SG | | | | | | | | QMNSL | | | | | | ACCTTTAGCAACTATGGCATGAGTTGG | | NYGMSWVRQA | | | |
| | | | | | | | | | | RAEDT | | | | | | GTCCGCCAGGCTCCAGGGAAGGGGCTG | | PGKGLEWVSG | | | |
| | | | | | | | | | | AIYYC | | | | | | GAGTGGGTCTCAGGTCTAAGTCGTAGT | | LSRSGDITYY | | | |
| | | | | | | | | | | | | | | | | GGTGATATCACATACTACGCAGACTCC | | ADSVKGRFTI | | | |
| | | | | | | | | | | | | | | | | GTGAAGGGCCGGTTCACCATCTCCAGA | | SRDNSKNTLY | | | |
| | | | | | | | | | | | | | | | | GACAATTCCAAGAACACCCTATATCTG | | LQMNSLRAED | | | |
| | | | | | | | | | | | | | | | | CAAATGAACAGCCTGAGAGCCGAGGAC | | TAIYYCAKDL | | | |
| | | | | | | | | | | | | | | | | ACGGCCATATATTACTGTGCGAAAGAT | | GLVVTTEVAD | | | |
| | | | | | | | | | | | | | | | | CTAGGACTGGTAGTGACTACGGAGGTT | | FWGQGTLVTV | | | |
| | | | | | | | | | | | | | | | | GCTGACTTCTGGGGCCAGGGAACCCTG | | SS | | | |
| | | | | | | | | | | | | | | | | GTCACCGTCTCCTCA | | | | | |
| ADI- | IGHV1- | QVQLVQSG | 50 | GTFSSYS | 356 | WVRQA | 495 | KILPIL | 691 | RVTII | 936 | ARESGY | 1191 | WGRGTL | 1288 | CAGGTCCAGCTGGTGCAGTCTGGGGCT | 1488 | QVQLVQSGAE | 1771 | | |
| 75739 | 69 | AEVKKPGS | | IS | | PGQGP | | GATDYA | | ADKST | | SGSGSV | | VTVSS | | GAGGTGAAGAAGCCTGGGTCGTCGGTG | | VKKPGSSVKV | | | |
| | | SVKVSCKA | | | | EWLG | | QKFQG | | STAYM | | TYFHL | | | | AAGGTCTCCTGCAAGGCCTCTGGAGGC | | SCKASGGTFS | | | |
| | | SG | | | | | | | | ELSSL | | | | | | ACCTTCAGCAGCTATAGTATCTCCTGG | | SYSISWVRQA | | | |
| | | | | | | | | | | RSEDT | | | | | | GTGCGACAGGCCCCTGGACAGGGGCCT | | PGQGPEWLGK | | | |
| | | | | | | | | | | AVYYC | | | | | | GAGTGGTTGGGGAAGATCCTCCCTATC | | ILPILGATDY | | | |
| | | | | | | | | | | | | | | | | CTTGGAGCAACAGACTACGCACAGAAG | | AQKFQGRVTI | | | |
| | | | | | | | | | | | | | | | | TTCCAGGGCAGAGTCACCATTATCGCG | | IADKSTSTAY | | | |
| | | | | | | | | | | | | | | | | GACAAATCCACGAGCACGGCCTATATG | | MELSSLRSED | | | |
| | | | | | | | | | | | | | | | | GAGCTGAGTAGTCTGAGATCTGAGGAC | | TAVYYCARES | | | |
| | | | | | | | | | | | | | | | | ACGGCCGTGTATTATTGTGCGAGAGAG | | GYSGSGSVTY | | | |
| | | | | | | | | | | | | | | | | TCGGGGTACTCTGGTTCGGGGAGTGTT | | FHLWGRGTLV | | | |
| | | | | | | | | | | | | | | | | ACGTACTTCCATCTCTGGGGCCGTGGC | | TVSS | | | |
| | | | | | | | | | | | | | | | | ACCCTGGTCACCGTCTCCTCA | | | | | |
| ADI- | IGHV3- | QVQLVQSG | 141 | FTFSTYG | 215 | WVRQA | 431 | VMWFDG | 692 | RFTIS | 892 | ARESHY | 1192 | WGRGTT | 1294 | CAGGTGCAGCTGGTGCAGTCTGGGGGA | 1489 | QVQLVQSGGG | 1772 | | |
| 75762 | 33 | GGVVQPGK | | MH | | PGKGL | | TNKYYA | | RDNSK | | GEDSEY | | VTVSS | | GGCGTGGTCCAGCCTGGGAAGTCCCTG | | VVQPGKSLRL | | | |
| | | SLRLSCAA | | | | EWVA | | DSVKG | | NTLYL | | YFQYYM | | | | AGACTCTCCTGTGCAGCGTCTGGATTC | | SCAASGFTFS | | | |
| | | SG | | | | | | | | QMNSL | | DV | | | | ACCTTCAGTACCTATGGCATGCACTGG | | TYGMHWVRQA | | | |
| | | | | | | | | | | RAEDT | | | | | | GTCCGCCAGGCTCCAGGCAAGGGGCTG | | PGKGLEWVAV | | | |
| | | | | | | | | | | AVYFC | | | | | | GAGTGGGTGGCAGTTATGTGGTTTGAT | | MWFDGTNKYY | | | |
| | | | | | | | | | | | | | | | | GGAACTAATAAATACTATGCAGACTCC | | ADSVKGRFTI | | | |
| | | | | | | | | | | | | | | | | GTGAAGGGCCGATTCACCATCTCCAGA | | SRDNSKNTLY | | | |
| | | | | | | | | | | | | | | | | GACAATTCCAAGAACACGCTGTATCTG | | LQMNSLRAED | | | |
| | | | | | | | | | | | | | | | | CAAATGAACAGCCTTAGAGCCGAGGAC | | TAVYFCARES | | | |
| | | | | | | | | | | | | | | | | ACGGCTGTGTATTTCTGTGCGAGAGAG | | HYGEDSEYYF | | | |
| | | | | | | | | | | | | | | | | TCCCACTACGGTGAAGATTCCGAATAC | | QYYMDVWGRG | | | |
| | | | | | | | | | | | | | | | | TACTTCCAGTACTACATGGACGTCTGG | | TTVTVSS | | | |
| | | | | | | | | | | | | | | | | GGCAGGGGGACCACGGTCACCGTCTCC | | | | | |
| | | | | | | | | | | | | | | | | TCA | | | | | |
| ADI- | IGHV3- | QVQLVQSG | 12 | FTFSSYE | 307 | WVRQA | 437 | FISNSA | 693 | RFTIS | 937 | ARDLGG | 1193 | WGQGTL | 1286 | CAGGTGCAGCTGGTGCAGTCTGGGGGA | 1490 | QVQLVQSGGG | 1773 | | |
| 75815 | 48 | GGLVQPGG | | MN | | PGKGL | | TARYYA | | RDNAK | | SYSGTF | | VTVSS | | GGCTTGGTACAGCCTGGAGGGTCCCTG | | LVQPGGSLRL | | | |
| | | SLRLSCAA | | | | EWVS | | DSVKG | | NSMYL | | DF | | | | AGACTCTCCTGTGCAGCCTCTGGATTC | | SCAASGFTFS | | | |
| | | SG | | | | | | | | QMNSL | | | | | | ACCTTCAGTAGTTATGAAATGAACTGG | | SYEMNWVRQA | | | |
| | | | | | | | | | | RAEDT | | | | | | GTCCGCCAGGCTCCAGGGAAGGGGCTG | | PGKGLEWVSF | | | |
| | | | | | | | | | | AIYYC | | | | | | GAGTGGGTTTCATTCATTAGCAATAGT | | ISNSATARYY | | | |
| | | | | | | | | | | | | | | | | GCTACTGCCAGATACTACGCAGACTCT | | ADSVKGRFTI | | | |
| | | | | | | | | | | | | | | | | GTGAAGGGCCGATTCACCATCTCCAGA | | SRDNAKNSMY | | | |
| | | | | | | | | | | | | | | | | GACAACGCCAAGAACTCCATGTATCTG | | LQMNSLRAED | | | |
| | | | | | | | | | | | | | | | | CAAATGAACAGCCTGAGAGCCGAGGAC | | TAIYYCARDL | | | |
| | | | | | | | | | | | | | | | | ACGGCTATTTATTACTGTGCGAGAGAT | | GGSYSGTFDF | | | |
| | | | | | | | | | | | | | | | | TTGGGAGGGAGCTACTCGGGGACCTTT | | WGQGTLVTVS | | | |
| | | | | | | | | | | | | | | | | GACTTCTGGGGCCAGGGAACCCTGGTC | | S | | | |
| | | | | | | | | | | | | | | | | ACCGTCTCCTCA | | | | | |
| ADI- | IGHV3- | EVQLVQSG | 142 | FTFSSYS | 357 | WVRQA | 431 | VISYDG | 694 | RFTIS | 938 | ARGPHF | 1194 | WGQGTL | 1286 | GAGGTGCAGCTGGTGCAGTCTGGGGGA | 1491 | EVQLVQSGGG | 1774 | | |
| 75765 | 30 | GGVVQPGG | | VH | | PGKGL | | NNKYYA | | RDNSK | | DWVPHT | | VTVSS | | GGCGTGGTCCAGCCTGGGGGGTCCCTG | | VVQPGGSLRL | | | |
| | | SLRLSCAA | | | | EWVA | | ASVKG | | DTLYL | | FDY | | | | AGACTCTCCTGTGCAGCCTCTGGATTC | | SCAASGFTFS | | | |
| | | SG | | | | | | | | EMNSL | | | | | | ACCTTCAGTAGCTATTCTGTACACTGG | | SYSVHWVRQA | | | |
| | | | | | | | | | | RDEDT | | | | | | GTCCGCCAGGCTCCAGGCAAGGGGCTA | | PGKGLEWVAV | | | |
| | | | | | | | | | | AVYYC | | | | | | GAGTGGGTGGCAGTTATATCATATGAT | | ISYDGNNKYY | | | |
| | | | | | | | | | | | | | | | | GGAAATAACAAGTACTACGCAGCCTCC | | AASVKGRFTI | | | |
| | | | | | | | | | | | | | | | | GTGAAGGGCCGATTCACCATCTCCAGA | | SRDNSKDTLY | | | |
| | | | | | | | | | | | | | | | | GACAATTCCAAGGACACGCTGTATCTT | | LEMNSLRDED | | | |
| | | | | | | | | | | | | | | | | GAAATGAACAGCCTGAGAGATGAGGAC | | TAVYYCARGP | | | |
| | | | | | | | | | | | | | | | | ACGGCTGTATATTACTGTGCGAGAGGT | | HFDWVPHTFD | | | |
| | | | | | | | | | | | | | | | | CCACATTTTGACTGGGTCCCGCATACC | | YWGQGTLVTV | | | |
| | | | | | | | | | | | | | | | | TTTGACTACTGGGGCCAGGGAACCCTG | | SS | | | |
| | | | | | | | | | | | | | | | | GTCACCGTCTCCTCA | | | | | |
| ADI- | IGHV5- | QVQLVQSG | 143 | YYFTTYW | 358 | WVRQM | 496 | RIDPSD | 695 | HVTMS | 939 | ARECGG | 1195 | WGQGTT | 1287 | CAGGTGCAGCTGGTGCAGTCTGGAACA | 1492 | QVQLVQSGTE | 1775 | | |
| 75705 | 10-1 | TEVKKPGE | | IT | | PGKGL | | SYTTYS | | IDKSI | | DCYFPE | | VTVSS | | GAAGTGAAAAAGCCCGGGGAGTCTCTG | | VKKPGESLTI | | | |
| | | SLTISCKT | | | | EWLG | | PSFQG | | TTAYL | | PLSHTA | | | | ACGATCTCCTGTAAGACTTCTGGGTAC | | SCKTSGYYFT | | | |
| | | SG | | | | | | | | QWTSL | | FDI | | | | TACTTTACCACCTACTGGATCACCTGG | | TYWITWVRQM | | | |
| | | | | | | | | | | KASDT | | | | | | GTGCGCCAGATGCCCGGGAAAGGCCTG | | PGKGLEWLGR | | | |
| | | | | | | | | | | AMYYC | | | | | | GAGTGGCTGGGGAGGATTGATCCTAGT | | IDPSDSYTTY | | | |
| | | | | | | | | | | | | | | | | GACTCCTATACCACCTACAGCCCGTCC | | SPSFQGHVTM | | | |
| | | | | | | | | | | | | | | | | TTCCAAGGCCACGTCACCATGTCAATT | | SIDKSITTAY | | | |
| | | | | | | | | | | | | | | | | GACAAGTCCATCACCACTGCCTACCTG | | LQWTSLKASD | | | |
| | | | | | | | | | | | | | | | | CAGTGGACCAGCCTGAAGGCCTCGGAC | | TAMYYCAREC | | | |
| | | | | | | | | | | | | | | | | ACCGCCATGTATTACTGTGCGAGAGAA | | GGDCYFPEPL | | | |
| | | | | | | | | | | | | | | | | TGTGGTGGTGACTGCTATTTTCCGGAG | | SHTAFDIWGQ | | | |
| | | | | | | | | | | | | | | | | CCCCTCTCCCATACTGCTTTTGATATC | | GTTVTVSS | | | |
| | | | | | | | | | | | | | | | | TGGGGCCAAGGGACCACGGTCACCGTC | | | | | |
| | | | | | | | | | | | | | | | | TCCTCA | | | | | |
| ADI- | IGHV3- | QVQLVQSG | 144 | FTLRNYA | 359 | WVRQA | 497 | FVAYGR | 696 | RFTIS | 940 | AREPHC | 1196 | WGQGTT | 1287 | CAGGTGCAGCTGGTGCAGTCTGGGGGA | 1493 | QVQLVQSGGG | 1776 | | |
| 75678 | 30 | GGVVQPGG | | MH | | PGKGL | | SSEDYA | | RDNAK | | TGGVCD | | VTVSS | | GGCGTGGTCCAGCCTGGGGGGTCCCTG | | VVQPGGSLRL | | | |
| | | SLRLSCEG | | | | ECVA | | DSVKG | | NTVYL | | AFDV | | | | AGACTCTCCTGTGAAGGCTCTGGATTC | | SCEGSGFTLR | | | |
| | | SG | | | | | | | | EMNSL | | | | | | ACCCTCAGAAACTACGCTATGCACTGG | | NYAMHWVRQA | | | |
| | | | | | | | | | | RVEDA | | | | | | GTCCGCCAGGCTCCAGGCAAGGGGCTG | | PGKGLECVAF | | | |
| | | | | | | | | | | AIYYC | | | | | | GAGTGCGTGGCTTTTGTTGCATATGGC | | VAYGRSSEDY | | | |
| | | | | | | | | | | | | | | | | AGAAGTAGTGAGGACTACGCAGACTCC | | ADSVKGRFTI | | | |
| | | | | | | | | | | | | | | | | GTGAAGGGCCGATTCACCATCTCCAGA | | SRDNAKNTVY | | | |
| | | | | | | | | | | | | | | | | GACAATGCCAAGAACACGGTCTATCTA | | LEMNSLRVED | | | |
| | | | | | | | | | | | | | | | | GAAATGAACAGTCTGAGAGTTGAGGAC | | AAIYYCAREP | | | |
| | | | | | | | | | | | | | | | | GCGGCGATCTATTACTGTGCGAGAGAG | | HCTGGVCDAF | | | |
| | | | | | | | | | | | | | | | | CCCCATTGTACTGGAGGTGTTTGTGAT | | DVWGQGTTVT | | | |
| | | | | | | | | | | | | | | | | GCTTTTGATGTCTGGGGCCAAGGGACC | | VSS | | | |
| | | | | | | | | | | | | | | | | ACGGTCACCGTCTCCTCA | | | | | |
| ADI- | IGHV5- | QVQLVQSG | 145 | YRFTTYW | 360 | WVRQM | 476 | KIDPSD | 697 | HVSIS | 941 | ARLSAD | 1197 | WGQGTT | 1287 | CAGGTGCAGCTGGTGCAGTCTGGAGCA | 1494 | QVQLVQSGAE | 1777 | | |
| 75707 | 10-1 | AEVKKPGE | | IS | | PGKGL | | SYTNYN | | ADKSI | | DYIWGN | | VTVSS | | GAGGTGAAAAAGCCCGGGGAGTCTCTG | | VKKPGESLRI | | | |
| | | SLRISCKG | | | | EWMG | | PSFQG | | STAYL | | YGGGDA | | | | AGGATCTCCTGTAAGGGTTCTGGATAC | | SCKGSGYRFT | | | |
| | | SG | | | | | | | | QWSSL | | FDI | | | | AGATTTACCACCTACTGGATCAGCTGG | | TYWISWVRQM | | | |
| | | | | | | | | | | RASDT | | | | | | GTGCGCCAGATGCCCGGAAAAGGCCTG | | PGKGLEWMGK | | | |
| | | | | | | | | | | AMYYC | | | | | | GAGTGGATGGGGAAGATTGATCCTAGT | | IDPSDSYTNY | | | |
| | | | | | | | | | | | | | | | | GACTCTTATACCAACTACAACCCGTCC | | NPSFQGHVSI | | | |
| | | | | | | | | | | | | | | | | TTCCAAGGCCACGTCAGCATCTCAGCT | | SADKSISTAY | | | |
| | | | | | | | | | | | | | | | | GACAAGTCCATCAGCACTGCCTACCTG | | LQWSSLRASD | | | |
| | | | | | | | | | | | | | | | | CAGTGGAGCAGCCTGAGGGCCTCGGAC | | TAMYYCARLS | | | |
| | | | | | | | | | | | | | | | | ACCGCCATGTATTACTGTGCGAGACTT | | ADDYIWGNYG | | | |
| | | | | | | | | | | | | | | | | AGCGCAGATGATTACATTTGGGGGAAT | | GGDAFDIWGQ | | | |
| | | | | | | | | | | | | | | | | TATGGCGGAGGGGATGCATTTGATATC | | GTTVTVSS | | | |
| | | | | | | | | | | | | | | | | TGGGGCCAAGGGACAACGGTCACCGTC | | | | | |
| | | | | | | | | | | | | | | | | TCCTCA | | | | | |
| ADI- | IGHV3- | QVQLVQSG | 146 | FNFGDYS | 361 | WVRQA | 437 | FIRSKT | 698 | RFTIS | 942 | CREIEG | 1198 | WGKGTT | 1291 | CAGGTCCAGCTGGTGCAGTCTGGGGGA | 1495 | QVQLVQSGGG | 1778 | | |
| 75796 | 49 | GGLVQPGR | | MS | | PGKGL | | YGGTTH | | RDDSK | | TYNYGS | | VTVSS | | GGCTTGGTACAGCCAGGGCGGTCCCTG | | LVQPGRSLRL | | | |
| | | SLRLSCTT | | | | EWVS | | YAASVK | | RIAYL | | NYFYYI | | | | AGACTCTCCTGTACAACTTCTGGATTC | | SCTTSGFNFG | | | |
| | | SG | | | | | | IG | | QMNSL | | DV | | | | AACTTTGGTGATTATTCTATGAGCTGG | | DYSMSWVRQA | | | |
| | | | | | | | | | | KTEDT | | | | | | GTCCGCCAGGCTCCAGGGAAGGGGCTG | | PGKGLEWVSF | | | |
| | | | | | | | | | | AEYYC | | | | | | GAGTGGGTAAGTTTCATTAGAAGCAAG | | IRSKTYGGTT | | | |
| | | | | | | | | | | | | | | | | ACTTATGGAGGGACAACACATTACGCC | | HYAASVKGRF | | | |
| | | | | | | | | | | | | | | | | GCGTCTGTGAAAGGCAGATTCACCATC | | TISRDDSKRI | | | |
| | | | | | | | | | | | | | | | | TCAAGAGATGATTCCAAACGCATCGCC | | AYLQMNSLKT | | | |
| | | | | | | | | | | | | | | | | TATCTGCAAATGAACAGCCTGAAGACC | | EDTAEYYCCR | | | |
| | | | | | | | | | | | | | | | | GAGGACACAGCCGAGTATTATTGTTGT | | EIEGTYNYGS | | | |
| | | | | | | | | | | | | | | | | AGAGAGATTGAAGGGACATATAACTAT | | NYFYYIDVWG | | | |
| | | | | | | | | | | | | | | | | GGTTCGAACTACTTCTACTACATCGAC | | KGTTVTVSS | | | |
| | | | | | | | | | | | | | | | | GTCTGGGGCAAAGGGACCACGGTCACC | | | | | |
| | | | | | | | | | | | | | | | | GTCTCCTCA | | | | | |
| ADI- | IGHV3- | QVQLVQSG | 12 | FTFSSYS | 362 | WVRQA | 437 | YISSRS | 699 | RFTIS | 854 | ARDDRR | 1199 | WGIGTT | 1300 | CAGGTGCAGCTGGTGCAGTCTGGGGGA | 1496 | QVQLVQSGGG | 1779 | | |
| 75673 | 48 | GGLVQPGG | | MN | | PGKGL | | STISYA | | RDNAK | | LGDYYY | | VTVSS | | GGCTTGGTACAGCCTGGGGGGTCCCTG | | LVQPGGSLRL | | | |
| | | SLRLSCAA | | | | EWVS | | DSVKG | | NSLYL | | YYMDV | | | | AGACTCTCCTGTGCAGCCTCTGGATTC | | SCAASGFTFS | | | |
| | | SG | | | | | | | | QMNSL | | | | | | ACCTTCAGTAGTTATAGCATGAACTGG | | SYSMNWVRQA | | | |
| | | | | | | | | | | RAEDT | | | | | | GTCCGCCAGGCTCCAGGGAAGGGGCTG | | PGKGLEWVSY | | | |
| | | | | | | | | | | AVYYC | | | | | | GAATGGGTTTCATACATTAGTAGTAGG | | ISSRSSTISY | | | |
| | | | | | | | | | | | | | | | | AGTAGCACCATATCCTATGCAGACTCT | | ADSVKGRFTI | | | |
| | | | | | | | | | | | | | | | | GTGAAGGGCCGCTTCACCATCTCCAGA | | SRDNAKNSLY | | | |
| | | | | | | | | | | | | | | | | GACAATGCCAAGAACTCACTGTATCTG | | LQMNSLRAED | | | |
| | | | | | | | | | | | | | | | | CAAATGAACAGCCTGAGAGCCGAGGAC | | TAVYYCARDD | | | |
| | | | | | | | | | | | | | | | | ACGGCTGTGTATTACTGTGCGAGAGAT | | RRLGDYYYYY | | | |
| | | | | | | | | | | | | | | | | GATCGGAGACTAGGAGACTACTACTAC | | MDVWGIGTTV | | | |
| | | | | | | | | | | | | | | | | TATTACATGGACGTCTGGGGCATAGGG | | TVSS | | | |
| | | | | | | | | | | | | | | | | ACCACGGTCACCGTCTCCTCA | | | | | |
| ADI- | IGHV3- | QVQLVQSG | 79 | FIVSRNY | 302 | WVRQA | 437 | LIYAGG | 700 | RFTIS | 777 | ARDRGP | 1200 | WGQGTL | 1286 | CAGGTGCAGCTGGTGCAGTCTGGAGGA | 1497 | QVQLVQSGGG | 1780 | | |
| 75566 | 53 | GGLIQPGG | | MS | | PGKGL | | TTYYAD | | RDNSK | | LLHDY | | VTVSS | | GGCTTGATCCAGCCTGGGGGGTCCCTG | | LIQPGGSLRL | | | |
| | | SLRLSCAA | | | | EWVS | | SVKG | | NTLYL | | | | | | AGACTCTCCTGTGCAGCCTCTGGATTC | | SCAASGFIVS | | | |
| | | SG | | | | | | | | QMNSL | | | | | | ATCGTCAGTAGAAACTACATGAGCTGG | | RNYMSWVRQA | | | |
| | | | | | | | | | | RAEDT | | | | | | GTCCGCCAGGCTCCAGGGAAGGGGCTG | | PGKGLEWVSL | | | |
| | | | | | | | | | | AVYYC | | | | | | GAGTGGGTCTCACTTATTTATGCCGGC | | IYAGGTTYYA | | | |
| | | | | | | | | | | | | | | | | GGTACCACATACTACGCAGACTCCGTG | | DSVKGRFTIS | | | |
| | | | | | | | | | | | | | | | | AAGGGCCGATTCACCATCTCCAGAGAC | | RDNSKNTLYL | | | |
| | | | | | | | | | | | | | | | | AATTCCAAGAACACGCTGTATCTTCAA | | QMNSLRAEDT | | | |
| | | | | | | | | | | | | | | | | ATGAACAGCCTGAGAGCCGAGGACACG | | AVYYCARDRG | | | |
| | | | | | | | | | | | | | | | | GCCGTTTATTACTGTGCAAGAGATAGG | | PLLHDYWGQG | | | |
| | | | | | | | | | | | | | | | | GGGCCTTTACTACACGACTACTGGGGC | | TLVTVSS | | | |
| | | | | | | | | | | | | | | | | CAGGGCACCCTGGTCACCGTCTCCTCA | | | | | |
| ADI- | IGHV1- | QVQLLQSG | 147 | GTFSSYT | 363 | WMRQA | 498 | KIFPIL | 701 | RITII | 943 | ARESGY | 1191 | WGRGTL | 1288 | CAGGTGCAGCTGCTGCAGTCTGGGGCT | 1498 | QVQLLQSGAE | 1781 | | |
| 75706 | 69 | AEVKKPGS | | IS | | PGQGP | | GATDYA | | ADKST | | SGSGSV | | VTVSS | | GAGGTGAAGAAGCCTGGGTCCTCGGTG | | VKKPGSSVKV | | | |
| | | SVKVSCKA | | | | EWLG | | QKFQG | | NTAYL | | TYFHL | | | | AAGGTCTCCTGCAAGGCTTCTGGAGGC | | SCKASGGTFS | | | |
| | | SG | | | | | | | | ELSSL | | | | | | ACCTTCAGCAGCTATACTATCTCCTGG | | SYTISWMRQA | | | |
| | | | | | | | | | | RSEDT | | | | | | ATGCGACAGGCCCCTGGACAGGGGCCT | | PGQGPEWLGK | | | |
| | | | | | | | | | | AVYYC | | | | | | GAGTGGTTGGGAAAGATCTTCCCTATC | | IFPILGATDY | | | |
| | | | | | | | | | | | | | | | | CTTGGAGCAACAGACTACGCACAGAAG | | AQKFQGRITI | | | |
| | | | | | | | | | | | | | | | | TTCCAGGGCAGAATCACCATTATCGCG | | IADKSTNTAY | | | |
| | | | | | | | | | | | | | | | | GACAAGTCCACGAACACGGCCTATTTG | | LELSSLRSED | | | |
| | | | | | | | | | | | | | | | | GAGCTGAGCAGCCTGAGATCTGAGGAC | | TAVYYCARES | | | |
| | | | | | | | | | | | | | | | | ACGGCCGTGTATTATTGTGCGAGAGAG | | GYSGSGSVTY | | | |
| | | | | | | | | | | | | | | | | TCGGGGTACTCTGGTTCGGGGAGTGTT | | FHLWGRGTLV | | | |
| | | | | | | | | | | | | | | | | ACGTACTTCCATCTCTGGGGCCGTGGC | | TVSS | | | |
| | | | | | | | | | | | | | | | | ACCCTGGTCACCGTCTCCTCA | | | | | |
| ADI- | IGHV1- | QVQLVQSG | 50 | GTF- | 364 | WVRQA | 433 | RIIPIL | 702 | RVTIT | 944 | AREGGT | 1201 | WGQGTL | 1286 | CAGGTGCAGCTGGTGCAGTCTGGGGCT | 1499 | QVQLVQSGAE | 1782 | | |
| 75699 | 69 | AEVKKPGS | | SYNIN | | PGQGL | | GIPHYA | | ADKST | | TTAYFP | | VTVSS | | GAGGTGAAGAAGCCTGGGTCCTCGGTG | | VKKPGSSVKV | | | |
| | | SVKVSCKA | | | | EWMG | | QRFQG | | TTLFM | | H | | | | AAGGTCTCCTGCAAGGCTTCTGGAGGC | | SCKASGGTFS | | | |
| | | SG | | | | | | | | ELSSL | | | | | | ACTTTCAGTTATAATATAAACTGGGTG | | YNINWVRQAP | | | |
| | | | | | | | | | | RSEDT | | | | | | CGACAGGCCCCTGGACAAGGGCTTGAG | | GQGLEWMGRI | | | |
| | | | | | | | | | | AIYYC | | | | | | TGGATGGGAAGGATCATCCCTATCCTT | | IPILGIPHYA | | | |
| | | | | | | | | | | | | | | | | GGTATACCACACTACGCACAGAGGTTC | | QRFQGRVTIT | | | |
| | | | | | | | | | | | | | | | | CAGGGCAGAGTCACGATTACCGCGGAC | | ADKSTTTLFM | | | |
| | | | | | | | | | | | | | | | | AAATCCACGACTACCCTGTTCATGGAG | | ELSSLRSEDT | | | |
| | | | | | | | | | | | | | | | | CTGAGCAGCCTGAGATCTGAGGACACG | | AIYYCAREGG | | | |
| | | | | | | | | | | | | | | | | GCCATATATTACTGTGCGAGAGAGGGT | | TTTAYFPHWG | | | |
| | | | | | | | | | | | | | | | | GGTACCACCACTGCATACTTCCCGCAC | | QGTLVTVSS | | | |
| | | | | | | | | | | | | | | | | TGGGGCCAGGGCACCCTGGTCACCGTC | | | | | |
| | | | | | | | | | | | | | | | | TCCTCA | | | | | |
| ADI- | IGHV1- | QVQLQQSG | 103 | HTFTGYF | 365 | WVRQA | 433 | RINPNS | 703 | RVTMT | 945 | AREPGR | 1202 | WGQGTL | 1286 | CAGGTGCAGCTGCAGCAGTCTGGGGCT | 1500 | QVQLQQSGAE | 1783 | | |
| 75591 | 2 | AEVKKPGA | | IY | | PGQGL | | GDTDYA | | RDTSI | | DILTGD | | VTVSS | | GAGGTGAAGAAGCCTGGGGCCTCGGTG | | VKKPGASVKV | | | |
| | | SVKVSCKA | | | | EWMG | | QKFQG | | STAYM | | YWDS | | | | AAGGTCTCCTGCAAGGCTTCTGGACAC | | SCKASGHTFT | | | |
| | | SG | | | | | | | | ELSRL | | | | | | ACCTTCACCGGCTACTTTATCTACTGG | | GYFIYWVRQA | | | |
| | | | | | | | | | | TSDDT | | | | | | GTGCGACAGGCCCCTGGACAAGGGCTT | | PGQGLEWMGR | | | |
| | | | | | | | | | | AMYYC | | | | | | GAGTGGATGGGACGGATCAATCCTAAT | | INPNSGDTDY | | | |
| | | | | | | | | | | | | | | | | AGTGGTGACACAGACTATGCACAGAAG | | AQKFQGRVTM | | | |
| | | | | | | | | | | | | | | | | TTCCAGGGCAGGGTCACCATGACCAGG | | TRDTSISTAY | | | |
| | | | | | | | | | | | | | | | | GACACGTCCATCAGCACAGCCTACATG | | MELSRLTSDD | | | |
| | | | | | | | | | | | | | | | | GAGCTGAGCAGGCTGACCTCTGACGAC | | TAMYYCAREP | | | |
| | | | | | | | | | | | | | | | | ACGGCCATGTATTACTGTGCGAGAGAG | | GRDILTGDYW | | | |
| | | | | | | | | | | | | | | | | CCGGGGAGGGATATTTTGACTGGTGAT | | DSWGQGTLVT | | | |
| | | | | | | | | | | | | | | | | TATTGGGACTCGTGGGGCCAGGGAACC | | VSS | | | |
| | | | | | | | | | | | | | | | | CTGGTCACCGTCTCCTCA | | | | | |
| ADI- | IGHV4- | QVQLQQSG | 44 | GSIGSSH | 366 | WVRQT | 499 | EIYQSV | 704 | RVTMS | 946 | ARRGSG | 1203 | WGQGTT | 1287 | CAGGTGCAGCTGCAGCAGTCGGGCCCA | 1501 | QVQLQQSGPG | 1784 | | |
| 75698 | 4 | PGLVKPSG | | WWS | | PGKGL | | STNYNP | | VDKSK | | YCSGGT | | VTVSS | | GGACTGGTGAAGCCTTCGGGGACCCTG | | LVKPSGTLSL | | | |
| | | TLSLTCAV | | | | EWIG | | SLES | | NQFSL | | CYQIPA | | | | TCCCTCACCTGCGCTGTCTCTGGTGGC | | TCAVSGGSIG | | | |
| | | SG | | | | | | | | KLTSV | | DAFAI | | | | TCCATCGGGAGTAGTCACTGGTGGAGT | | SSHWWSWVRQ | | | |
| | | | | | | | | | | TAADT | | | | | | TGGGTCCGCCAGACCCCAGGGAAGGGG | | TPGKGLEWIG | | | |
| | | | | | | | | | | ALYYC | | | | | | CTGGAGTGGATTGGGGAAATCTATCAA | | EIYQSVSTNY | | | |
| | | | | | | | | | | | | | | | | AGTGTGAGCACCAACTACAACCCGTCC | | NPSLESRVTM | | | |
| | | | | | | | | | | | | | | | | CTCGAGAGTCGGGTCACCATGTCAGTA | | SVDKSKNQFS | | | |
| | | | | | | | | | | | | | | | | GACAAGTCCAAGAACCAGTTCTCCCTG | | LKLTSVTAAD | | | |
| | | | | | | | | | | | | | | | | AAGCTGACCTCTGTGACCGCCGCGGAC | | TALYYCARRG | | | |
| | | | | | | | | | | | | | | | | ACGGCCCTCTATTACTGTGCGAGAAGG | | SGYCSGGTCY | | | |
| | | | | | | | | | | | | | | | | GGGAGTGGATATTGTAGTGGTGGCACC | | QIPADAFAIW | | | |
| | | | | | | | | | | | | | | | | TGCTACCAAATCCCCGCCGATGCTTTT | | GQGTTVTVSS | | | |
| | | | | | | | | | | | | | | | | GCTATCTGGGGCCAAGGGACCACGGTC | | | | | |
| | | | | | | | | | | | | | | | | ACCGTCTCCTCA | | | | | |
| ADI- | IGHV1- | QVQLVQSG | 35 | YTFTSYG | 367 | WVRQA | 433 | WISTYN | 705 | RVTMT | 947 | ARVFSF | 1204 | WGQGTL | 1286 | CAGGTCCAGCTGGTGCAGTCTGGAGCT | 1502 | QVQLVQSGAE | 1785 | | |
| 75878 | 18 | AEVKKPGA | | IS | | PGQGL | | GNTNYA | | TDTST | | YDSRAF | | VTVSS | | GAGGTGAAGAAGCCTGGGGCCTCAGTG | | VKKPGASVKV | | | |
| | | SVKVSCKA | | | | EWMG | | QKLQG | | GTAYM | | TIGGTA | | | | AAGGTCTCCTGCAAGGCTTCTGGTTAC | | SCKASGYTFT | | | |
| | | SG | | | | | | | | ELRSL | | YYFDY | | | | ACCTTTACCAGCTACGGTATCAGCTGG | | SYGISWVRQA | | | |
| | | | | | | | | | | RSDDT | | | | | | GTGCGACAGGCCCCTGGACAGGGGCTT | | PGQGLEWMGW | | | |
| | | | | | | | | | | AVYYC | | | | | | GAGTGGATGGGATGGATCAGCACTTAC | | ISTYNGNTNY | | | |
| | | | | | | | | | | | | | | | | AATGGTAACACAAACTATGCACAGAAG | | AQKLQGRVTM | | | |
| | | | | | | | | | | | | | | | | CTCCAGGGCAGAGTCACCATGACCACA | | TTDTSTGTAY | | | |
| | | | | | | | | | | | | | | | | GACACATCCACGGGCACAGCCTACATG | | MELRSLRSDD | | | |
| | | | | | | | | | | | | | | | | GAGTTGAGGAGCCTGAGATCTGACGAC | | TAVYYCARVF | | | |
| | | | | | | | | | | | | | | | | ACGGCCGTATATTACTGTGCGAGAGTT | | SFYDSRAFTI | | | |
| | | | | | | | | | | | | | | | | TTCAGTTTCTATGATAGTCGTGCTTTT | | GGTAYYFDYW | | | |
| | | | | | | | | | | | | | | | | ACCATCGGGGGGACTGCGTACTACTTT | | GQGTLVTVSS | | | |
| | | | | | | | | | | | | | | | | GACTACTGGGGCCAGGGAACCCTGGTC | | | | | |
| | | | | | | | | | | | | | | | | ACCGTCTCCTCA | | | | | |
| ADI- | IGHV3- | QVQLVQSG | 148 | FTFRNFG | 368 | WVRQA | 431 | TTFYDG | 706 | RFTVS | 948 | AKDGGY | 1205 | WGQGTL | 1286 | CAGGTCCAGCTGGTGCAGTCTGGGGGA | 1503 | QVQLVQSGGG | 1786 | | |
| 75718 | 30 | GGVVQPGM | | MH | | PGKGL | | SDKFYA | | RDNFD | | GDYEIE | | VTVSS | | GGCGTTGTCCAGCCTGGGATGTCCCTG | | VVQPGMSLRL | | | |
| | | SLRLSCAA | | | | EWVA | | DSVKG | | NILYL | | S | | | | AGACTCTCCTGTGCAGCCTCTAGATTC | | SCAASRFTFR | | | |
| | | SR | | | | | | | | QMNNL | | | | | | ACTTTTCGTAACTTTGGCATGCACTGG | | NFGMHWVRQA | | | |
| | | | | | | | | | | RPEDT | | | | | | GTCCGCCAGGCTCCCGGCAAGGGACTG | | PGKGLEWVAT | | | |
| | | | | | | | | | | AMYYC | | | | | | GAGTGGGTGGCAACTACATTTTATGAC | | TFYDGSDKFY | | | |
| | | | | | | | | | | | | | | | | GGCAGTGATAAATTCTATGCAGACTCC | | ADSVKGRFTV | | | |
| | | | | | | | | | | | | | | | | GTGAAGGGCCGATTCACCGTCTCCAGA | | SRDNFDNILY | | | |
| | | | | | | | | | | | | | | | | GACAATTTCGACAATATCCTGTATCTG | | LQMNNLRPED | | | |
| | | | | | | | | | | | | | | | | CAAATGAACAACCTGAGACCTGAGGAC | | TAMYYCAKDG | | | |
| | | | | | | | | | | | | | | | | ACGGCTATGTATTACTGTGCGAAAGAT | | GYGDYEIESW | | | |
| | | | | | | | | | | | | | | | | GGGGGCTACGGTGACTACGAAATTGAG | | GQGTLVTVSS | | | |
| | | | | | | | | | | | | | | | | TCCTGGGGCCAGGGAACCCTGGTCACC | | | | | |
| | | | | | | | | | | | | | | | | GTCTCCTCA | | | | | |
| ADI- | IGHV3- | QVQLVQSG | 149 | FTVSSNY | 369 | WVRQT | 448 | VIYPGG | 649 | RFTIS | 949 | ARFHDI | 1206 | WGQGTT | 1287 | CAGGTGCAGCTGGTGCAGTCTGGAGGA | 1504 | QVQLVQSGGG | 1787 | | |
| 75836 | 53 | GGLIQPGG | | MN | | PGKGL | | STFYAD | | RDNSK | | STRYSD | | VTVSS | | GGCTTGATCCAGCCTGGGGGGTCCCTG | | LIQPGGSLRL | | | |
| | | SLRLSCRA | | | | EWVS | | SVKG | | NTLYV | | AFDI | | | | AGACTCTCCTGTAGAGCCTCTGGGTTT | | SCRASGFTVS | | | |
| | | SG | | | | | | | | QLNSL | | | | | | ACCGTCAGTAGCAACTACATGAACTGG | | SNYMNWVRQT | | | |
| | | | | | | | | | | RAEDT | | | | | | GTCCGCCAGACTCCAGGGAAGGGGCTA | | PGKGLEWVSV | | | |
| | | | | | | | | | | AVYYC | | | | | | GAGTGGGTCTCAGTTATTTATCCCGGA | | IYPGGSTFYA | | | |
| | | | | | | | | | | | | | | | | GGTAGCACATTCTACGCAGACTCCGTG | | DSVKGRFTIS | | | |
| | | | | | | | | | | | | | | | | AAGGGCCGATTCACCATCTCCAGAGAC | | RDNSKNTLYV | | | |
| | | | | | | | | | | | | | | | | AATTCCAAGAACACGCTGTATGTTCAA | | QLNSLRAEDT | | | |
| | | | | | | | | | | | | | | | | CTGAACAGCCTGAGAGCCGAGGACACG | | AVYYCARFHD | | | |
| | | | | | | | | | | | | | | | | GCCGTGTATTACTGTGCGAGATTTCAC | | ISTRYSDAFD | | | |
| | | | | | | | | | | | | | | | | GATATTTCGACTCGTTACTCCGATGCT | | IWGQGTTVTV | | | |
| | | | | | | | | | | | | | | | | TTTGATATCTGGGGCCAAGGGACCACG | | SS | | | |
| | | | | | | | | | | | | | | | | GTCACCGTCTCCTCA | | | | | |
| ADI- | IGHV1- | QVQLVQSG | 150 | YTFTGYQ | 370 | WVRQA | 433 | RINPKS | 707 | RVTLT | 950 | ARGDLN | 1207 | WGQGTT | 1287 | CAGGTGCAGCTGGTGCAGTCTGGGGCT | 1505 | QVQLVQSGAE | 1788 | | |
| 75574 | 2 | AEVKKPGA | | MH | | PGQGL | | GSTNYA | | RDTSI | | I | | VTVSS | | GAGGTGAAGAAGCCTGGGGCCTCAGTG | | VKKPGASVRV | | | |
| | | SVRVSCKA | | | | EWMG | | QKFQG | | TTAYM | | | | | | AGGGTCTCCTGCAAGGCTTCTGAATAC | | SCKASEYTFT | | | |
| | | SE | | | | | | | | ELRRL | | | | | | ACCTTCACCGGCTACCAAATGCACTGG | | GYQMHWVRQA | | | |
| | | | | | | | | | | RSDDT | | | | | | GTGCGACAGGCCCCTGGACAAGGGCTT | | PGQGLEWMGR | | | |
| | | | | | | | | | | AVYYC | | | | | | GAGTGGATGGGACGGATCAACCCTAAG | | INPKSGSTNY | | | |
| | | | | | | | | | | | | | | | | AGTGGTAGCACAAACTATGCACAGAAG | | AQKFQGRVTL | | | |
| | | | | | | | | | | | | | | | | TTTCAGGGCAGGGTCACCTTGACCAGG | | TRDTSITTAY | | | |
| | | | | | | | | | | | | | | | | GACACGTCCATCACCACAGCCTACATG | | MELRRLRSDD | | | |
| | | | | | | | | | | | | | | | | GAGTTGAGGAGGCTGAGATCTGACGAC | | TAVYYCARGD | | | |
| | | | | | | | | | | | | | | | | ACGGCCGTCTATTACTGTGCGAGAGGG | | LNIWGQGTTV | | | |
| | | | | | | | | | | | | | | | | GACCTGAACATCTGGGGCCAAGGGACA | | TVSS | | | |
| | | | | | | | | | | | | | | | | ACGGTCACCGTCTCCTCA | | | | | |
| ADI- | IGHV2- | RSTLKESG | 151 | FSLSTSA | 371 | WIRQP | 441 | LIYWDD | 612 | RLSIT | 951 | AHGQYT | 1208 | LGRGTL | 1301 | AGGTCAACGCTGAAGGAGTCTGGTCCT | 1506 | RSTLKESGPT | 1789 | QITLKESG | 1875 |
| 75620 | 5 | PTLVKPTQ | | VGVG | | PGKAL | | DKRYSP | | KDTSK | | SSWIHW | | VTVSS | | ACGTTGGTAAAACCCACACAGACCCTC | | LVKPTQTLTL | | PTLVKPTQ | |
| | | TLTLTCTF | | | | EWLA | | SLKS | | NQVVL | | YFDL | | | | ACGCTGACCTGCACCTTCTCTGGGTTC | | TCTFSGFSLS | | TLTLTCTF | |
| | | SG | | | | | | | | RMTNM | | | | | | TCACTCAGCACTAGTGCAGTGGGTGTG | | TSAVGVGWIR | | SGFSLSTS | |
| | | | | | | | | | | DPVDT | | | | | | GGCTGGATCCGTCAGCCCCCTGGAAAG | | QPPGKALEWL | | AVGVGWIR | |
| | | | | | | | | | | ATYYC | | | | | | GCCCTGGAGTGGCTTGCACTCATTTAT | | ALIYWDDDKR | | QPPGKALE | |
| | | | | | | | | | | | | | | | | TGGGATGACGATAAGCGCTACAGCCCA | | YSPSLKSRLS | | WLALIYWD | |
| | | | | | | | | | | | | | | | | TCTCTGAAGAGCAGGCTCAGCATCACC | | ITKDTSKNQV | | DDKRYSPS | |
| | | | | | | | | | | | | | | | | AAGGACACCTCCAAAAACCAGGTGGTC | | VLRMTNMDPV | | LKSRLSIT | |
| | | | | | | | | | | | | | | | | CTTAGAATGACCAACATGGACCCTGTG | | DTATYYCAHG | | KDTSKNQV | |
| | | | | | | | | | | | | | | | | GACACAGCCACATATTACTGTGCACAC | | QYTSSWIHWY | | VLRMTNMD | |
| | | | | | | | | | | | | | | | | GGCCAATATACCAGCAGCTGGATCCAT | | FDLLGRGTLV | | PVDTATYY | |
| | | | | | | | | | | | | | | | | TGGTACTTCGATCTCTTGGGCCGTGGC | | TVSS | | CAHGQYTS | |
| | | | | | | | | | | | | | | | | ACCCTGGTCACCGTCTCCTCA | | | | SWIHWYFD | |
| | | | | | | | | | | | | | | | | | | | | LWGRGTLV | |
| | | | | | | | | | | | | | | | | | | | | TVSS | |
| ADI- | IGHV3- | RCSCRQSG | 152 | FTFSNYW | 333 | WVRQT | 500 | RINGDG | 708 | RFTVS | 952 | ARDLES | 1169 | WGQGTL | 1286 | AGGTGCAGCTGCAGGCAGTCTGGGGGA | 1507 | RCSCRQSGGG | 1790 | | |
| 75634 | 74 | GGLVQPGG | | MH | | PGKGL | | SSPTYA | | RDNAK | | GSFHPG | | VTVSS | | GGCTTAGTTCAGCCTGGGGGGTCCCTG | | LVQPGGSLRL | | | |
| | | SLRLSCAA | | | | VWVS | | DSVKG | | NTLYL | | LVRVP | | | | AGACTCTCCTGTGCAGCCTCTGGATTC | | SCAASGFTFS | | | |
| | | SG | | | | | | | | QMNSL | | | | | | ACCTTCAGTAACTACTGGATGCACTGG | | NYWMHWVRQT | | | |
| | | | | | | | | | | RVEDT | | | | | | GTCCGCCAAACTCCAGGGAAGGGGCTG | | PGKGLVWVSR | | | |
| | | | | | | | | | | AVYYC | | | | | | GTCTGGGTCTCACGTATTAATGGAGAT | | INGDGSSPTY | | | |
| | | | | | | | | | | | | | | | | GGGAGTAGTCCGACTTACGCGGACTCC | | ADSVKGRFTV | | | |
| | | | | | | | | | | | | | | | | GTGAAGGGCCGATTCACCGTCTCCAGA | | SRDNAKNTLY | | | |
| | | | | | | | | | | | | | | | | GACAACGCCAAGAACACGCTGTATCTG | | LQMNSLRVED | | | |
| | | | | | | | | | | | | | | | | CAAATGAACAGTCTGAGAGTCGAAGAC | | TAVYYCARDL | | | |
| | | | | | | | | | | | | | | | | ACGGCTGTGTACTACTGTGCAAGAGAC | | ESGSFHPGLV | | | |
| | | | | | | | | | | | | | | | | CTGGAAAGTGGGAGCTTTCATCCCGGC | | RVPWGQGTLV | | | |
| | | | | | | | | | | | | | | | | CTGGTTCGGGTCCCCTGGGGCCAGGGA | | TVSS | | | |
| | | | | | | | | | | | | | | | | ACCCTGGTCACCGTCTCCTCA | | | | | |
| ADI- | IGHV5- | QVQLVQSG | 153 | YSFTSYW | 372 | WVRQM | 476 | IIYPGD | 635 | QVTIS | 953 | ARFDGG | 1209 | WGQGAL | 1285 | CAGGTCCAGCTGGTGCAGTCTGGAGCA | 1508 | QVQLVQSGAE | 1791 | | |
| 75629 | 51 | AEVKKPGQ | | IG | | PGKGL | | SDTRYS | | ADKFI | | SYYDFD | | VTVSS | | GAGGTGAAGAAGCCCGGGCAGTCTCTG | | VKKPGQSLKI | | | |
| | | SLKISCKG | | | | EWMG | | PSFQG | | STAYL | | Y | | | | AAGATCTCCTGTAAGGGTTCTGGATAC | | SCKGSGYSFT | | | |
| | | SG | | | | | | | | QWSSL | | | | | | AGCTTTACCAGCTACTGGATCGGCTGG | | SYWIGWVRQM | | | |
| | | | | | | | | | | KASDT | | | | | | GTGCGCCAGATGCCCGGGAAAGGCCTG | | PGKGLEWMGI | | | |
| | | | | | | | | | | ATYYC | | | | | | GAGTGGATGGGGATCATCTATCCTGGT | | IYPGDSDTRY | | | |
| | | | | | | | | | | | | | | | | GACTCTGATACCAGATACAGCCCGTCC | | SPSFQGQVTI | | | |
| | | | | | | | | | | | | | | | | TTCCAAGGCCAGGTCACCATCTCAGCC | | SADKFISTAY | | | |
| | | | | | | | | | | | | | | | | GACAAGTTCATCAGCACCGCCTACCTG | | LQWSSLKASD | | | |
| | | | | | | | | | | | | | | | | CAGTGGAGCAGCCTGAAGGCCTCGGAC | | TATYYCARFD | | | |
| | | | | | | | | | | | | | | | | ACCGCCACGTATTACTGTGCGAGATTT | | GGSYYDFDYW | | | |
| | | | | | | | | | | | | | | | | GATGGTGGGAGCTACTACGACTTTGAC | | GQGALVTVSS | | | |
| | | | | | | | | | | | | | | | | TACTGGGGCCAGGGAGCCCTGGTCACC | | | | | |
| | | | | | | | | | | | | | | | | GTCTCCTCA | | | | | |
| ADI- | IGHV3- | QVQLQESG | 154 | FPLSYFW | 373 | WVRQT | 500 | RSSSDG | 709 | RFTVS | 954 | AREVSG | 1210 | WGQGTL | 1286 | CAGGTGCAGCTGCAGGAGTCCGGGGGA | 1509 | QVQLQESGGG | 1792 | | |
| 75834 | 74 | GGLVQPGG | | IH | | PGKGL | | SATSYA | | RDNAK | | SGWPFD | | VTVSS | | GGCTTAGTTCAGCCGGGGGGGTCCCTG | | LVQPGGSLRL | | | |
| | | SLRLSCAA | | | | VWVS | | DSVKG | | NTMYL | | S | | | | AGACTCTCCTGTGCAGCCTCTGGATTC | | SCAASGFPLS | | | |
| | | SG | | | | | | | | QMNSL | | | | | | CCCCTCAGTTACTTCTGGATTCACTGG | | YFWIHWVRQT | | | |
| | | | | | | | | | | RVEDT | | | | | | GTCCGCCAAACTCCAGGGAAGGGGCTG | | PGKGLVWVSR | | | |
| | | | | | | | | | | AVYFC | | | | | | GTGTGGGTCTCACGTAGTAGTAGTGAT | | SSSDGSATSY | | | |
| | | | | | | | | | | | | | | | | GGGAGCGCCACAAGCTACGCGGACTCC | | ADSVKGRFTV | | | |
| | | | | | | | | | | | | | | | | GTGAAGGGCCGATTCACCGTCTCCAGA | | SRDNAKNTMY | | | |
| | | | | | | | | | | | | | | | | GACAACGCCAAGAACACGATGTATCTG | | LQMNSLRVED | | | |
| | | | | | | | | | | | | | | | | CAAATGAACAGTCTGAGAGTCGAGGAC | | TAVYFCAREV | | | |
| | | | | | | | | | | | | | | | | ACGGCTGTATACTTTTGTGCAAGAGAG | | SGSGWPFDSW | | | |
| | | | | | | | | | | | | | | | | GTGTCTGGTAGTGGCTGGCCATTTGAC | | GQGTLVTVSS | | | |
| | | | | | | | | | | | | | | | | TCCTGGGGCCAGGGAACCCTGGTCACC | | | | | |
| | | | | | | | | | | | | | | | | GTCTCCTCA | | | | | |
| ADI- | IGHV1- | QVQLVQSG | 50 | GTFRSHS | 374 | WVRQA | 433 | RIIPIL | 710 | RVTIT | 955 | ARVGEM | 1211 | WGQGTT | 1287 | CAGGTCCAGCTGGTGCAGTCTGGGGCT | 1510 | QVQLVQSGAE | 1793 | | |
| 75747 | 69 | AEVKKPGS | | IS | | PGQGL | | GIATYP | | ADKST | | STAGND | | VTVSS | | GAGGTGAAGAAGCCTGGGTCCTCGGTG | | VKKPGSSVKV | | | |
| | | SVKVSCKA | | | | EWMG | | QKFQD | | STAYM | | AFDI | | | | AAGGTCTCCTGCAAGGCTTCTGGAGGC | | SCKASGGTFR | | | |
| | | SG | | | | | | | | ELSSL | | | | | | ACCTTCAGAAGTCATAGTATCAGTTGG | | SHSISWVRQA | | | |
| | | | | | | | | | | ISEDT | | | | | | GTGCGACAGGCCCCTGGACAAGGACTT | | PGQGLEWMGR | | | |
| | | | | | | | | | | AVYFC | | | | | | GAGTGGATGGGAAGGATCATCCCTATC | | IIPILGIATY | | | |
| | | | | | | | | | | | | | | | | CTTGGTATAGCAACCTACCCACAGAAG | | PQKFQDRVTI | | | |
| | | | | | | | | | | | | | | | | TTCCAGGACAGAGTCACGATTACCGCG | | TADKSTSTAY | | | |
| | | | | | | | | | | | | | | | | GACAAATCCACGAGCACAGCCTACATG | | MELSSLISED | | | |
| | | | | | | | | | | | | | | | | GAGCTGAGCAGCCTGATATCTGAGGAC | | TAVYFCARVG | | | |
| | | | | | | | | | | | | | | | | ACGGCCGTGTATTTCTGTGCGAGAGTG | | EMSTAGNDAF | | | |
| | | | | | | | | | | | | | | | | GGGGAGATGTCTACAGCCGGGAATGAT | | DIWGQGTTVT | | | |
| | | | | | | | | | | | | | | | | GCTTTTGATATCTGGGGCCAAGGGACC | | VSS | | | |
| | | | | | | | | | | | | | | | | ACGGTCACCGTCTCCTCA | | | | | |
| ADI- | IGHV1- | RSSWRQSG | 155 | GTFSNHF | 375 | WVRQA | 433 | RIIPVL | 711 | RVTIT | 956 | ARGSGY | 1212 | WGPGTL | 1302 | AGGTCCAGCTGGAGGCAGTCTGGGGCT | 1511 | RSSWRQSGAE | 1794 | | |
| 75648 | 69 | AEVKKPGS | | IS | | PGQGL | | GIADYA | | ADKST | | SGSGSN | | VTVSS | | GAGGTGAAGAAGCCTGGGTCCTCGGTG | | VKKPGSSVKV | | | |
| | | SVKVSCRA | | | | EWMG | | QKFQG | | STAYL | | YYFDP | | | | AAGGTCTCCTGCAGGGCTTCTGGAGGC | | SCRASGGTFS | | | |
| | | SG | | | | | | | | ELSSL | | | | | | ACCTTCAGCAATCATTTTATCAGCTGG | | NHFISWVRQA | | | |
| | | | | | | | | | | KSEDT | | | | | | GTGCGACAGGCCCCTGGACAAGGCCTT | | PGQGLEWMGR | | | |
| | | | | | | | | | | AIYFC | | | | | | GAGTGGATGGGAAGGATCATCCCTGTC | | IIPVLGIADY | | | |
| | | | | | | | | | | | | | | | | CTTGGTATAGCAGACTACGCACAGAAG | | AQKFQGRVTI | | | |
| | | | | | | | | | | | | | | | | TTCCAGGGCAGAGTCACGATTACCGCG | | TADKSTSTAY | | | |
| | | | | | | | | | | | | | | | | GACAAATCCACGAGCACAGCCTACCTG | | LELSSLKSED | | | |
| | | | | | | | | | | | | | | | | GAGCTGAGCAGCCTGAAATCTGAAGAC | | TAIYFCARGS | | | |
| | | | | | | | | | | | | | | | | ACGGCCATTTATTTCTGTGCGCGTGGT | | GYSGSGSNYY | | | |
| | | | | | | | | | | | | | | | | TCGGGGTACTCTGGTTCAGGGAGTAAC | | FDPWGPGTLV | | | |
| | | | | | | | | | | | | | | | | TACTACTTCGACCCCTGGGGCCCGGGA | | TVSS | | | |
| | | | | | | | | | | | | | | | | ACCCTGGTCACCGTCTCCTCA | | | | | |
| ADI- | IGHV2- | QVQLQESG | 156 | FSLNSAG | 376 | WVRQP | 501 | LIYWDD | 712 | RLAIT | 957 | ARHSIT | 1213 | WGPGTL | 1302 | CAGGTGCAGCTGCAGGAGTCCGGTCCT | 1512 | QVQLQESGPT | 1795 | | |
| 75862 | 5 | PTLVKPTQ | | VGVG | | PGKAL | | EKRYSP | | KDTSK | | TIFDY | | VTVSS | | ACGCTGGTGAAACCCACACAGACCCTC | | LVKPTQTLTL | | | |
| | | TLTLTCTF | | | | EWLA | | PLKT | | NQVVL | | | | | | ACGCTGACCTGCACCTTCTCTGGGTTC | | TCTFSGFSLN | | | |
| | | SG | | | | | | | | RMTNM | | | | | | TCGCTCAACTCTGCTGGAGTGGGTGTG | | SAGVGVGWVR | | | |
| | | | | | | | | | | DPVDT | | | | | | GGCTGGGTCCGCCAGCCCCCAGGAAAG | | QPPGKALEWL | | | |
| | | | | | | | | | | ATYYC | | | | | | GCCCTGGAGTGGCTTGCTCTCATTTAT | | ALIYWDDEKR | | | |
| | | | | | | | | | | | | | | | | TGGGATGATGAGAAGCGCTACAGCCCA | | YSPPLKTRLA | | | |
| | | | | | | | | | | | | | | | | CCTCTGAAGACCAGACTCGCCATCACC | | ITKDTSKNQV | | | |
| | | | | | | | | | | | | | | | | AAGGACACCTCCAAAAACCAGGTGGTC | | VLRMTNMDPV | | | |
| | | | | | | | | | | | | | | | | CTTAGAATGACCAACATGGACCCTGTG | | DTATYYCARH | | | |
| | | | | | | | | | | | | | | | | GACACAGCCACATATTATTGTGCACGT | | SITTIFDYWG | | | |
| | | | | | | | | | | | | | | | | CACTCGATTACGACGATCTTTGACTAC | | PGTLVTVSS | | | |
| | | | | | | | | | | | | | | | | TGGGGCCCGGGAACCCTGGTCACCGTC | | | | | |
| | | | | | | | | | | | | | | | | TCCTCA | | | | | |
| ADI- | IGHV1- | QVQLVQSG | 135 | YAFSNYN | 377 | WVRQA | 433 | IIYPTG | 713 | RVTMT | 958 | AREGVT | 1214 | WGQGAL | 1285 | CAGGTGCAGCTGGTGCAGTCTGGGGCT | 1513 | QVQLVQSGAE | 1796 | | |
| 75693 | 46 | AEVKKPGA | | LH | | PGQGL | | GGTRSA | | RDTST | | GTGYFD | | VTVSS | | GAGGTGAAAAAGCCTGGGGCCTCAGTG | | VKKPGASVRV | | | |
| | | SVRVSCKA | | | | EWMG | | QSVQG | | STIYL | | Y | | | | AGGGTTTCCTGCAAGGCCTCTGGATAT | | SCKASGYAFS | | | |
| | | SG | | | | | | | | DLSSL | | | | | | GCCTTCAGCAACTACAATCTGCACTGG | | NYNLHWVRQA | | | |
| | | | | | | | | | | RSEDT | | | | | | GTGCGACAGGCCCCTGGACAGGGGCTT | | PGQGLEWMGI | | | |
| | | | | | | | | | | AMYYC | | | | | | GAGTGGATGGGAATAATCTACCCTACT | | IYPTGGGTRS | | | |
| | | | | | | | | | | | | | | | | GGAGGTGGCACACGGTCCGCACAGAGT | | AQSVQGRVTM | | | |
| | | | | | | | | | | | | | | | | GTCCAGGGCAGAGTCACCATGACCAGG | | TRDTSTSTIY | | | |
| | | | | | | | | | | | | | | | | GACACGTCCACGAGCACAATTTACCTG | | LDLSSLRSED | | | |
| | | | | | | | | | | | | | | | | GACTTGAGCAGCCTGAGATCTGAGGAC | | TAMYYCAREG | | | |
| | | | | | | | | | | | | | | | | ACGGCCATGTATTATTGTGCTAGAGAG | | VTGTGYFDYW | | | |
| | | | | | | | | | | | | | | | | GGAGTGACTGGGACGGGCTACTTTGAC | | GQGALVTVSS | | | |
| | | | | | | | | | | | | | | | | TACTGGGGCCAGGGAGCCCTGGTCACC | | | | | |
| | | | | | | | | | | | | | | | | GTCTCCTCA | | | | | |
| ADI- | IGHV5- | QVQLQQSG | 157 | YSFTNYW | 378 | WVRQK | 502 | RIDPSD | 714 | HVTIS | 959 | ARHLRV | 1215 | WGQGTL | 1286 | CAGGTCCAGCTGCAGCAGTCCGGAGCA | 1514 | QVQLQQSGAE | 1797 | | |
| 75842 | 10-1 | AEVKKPGE | | IT | | PGQGL | | SYSNYS | | ADKSI | | VPGYYL | | VTVSS | | GAGGTGAAAAAGCCCGGGGAGTCTCTG | | VKKPGESLRI | | | |
| | | SLRISCKG | | | | EWMG | | PSFHG | | STAYL | | FDN | | | | AGGATCTCCTGTAAGGGCTCTGGATAC | | SCKGSGYSFT | | | |
| | | SG | | | | | | | | QWSSL | | | | | | AGCTTTACCAATTACTGGATCACCTGG | | NYWITWVRQK | | | |
| | | | | | | | | | | QASDT | | | | | | GTGCGCCAGAAGCCCGGGCAAGGCCTG | | PGQGLEWMGR | | | |
| | | | | | | | | | | AIYYC | | | | | | GAGTGGATGGGGAGGATTGATCCTAGT | | IDPSDSYSNY | | | |
| | | | | | | | | | | | | | | | | GACTCTTACAGCAACTACAGCCCGTCC | | SPSFHGHVTI | | | |
| | | | | | | | | | | | | | | | | TTCCACGGCCACGTCACCATCTCAGCT | | SADKSISTAY | | | |
| | | | | | | | | | | | | | | | | GACAAGTCCATCAGCACTGCCTACCTG | | LQWSSLQASD | | | |
| | | | | | | | | | | | | | | | | CAGTGGAGCAGCCTGCAGGCCTCGGAC | | TAIYYCARHL | | | |
| | | | | | | | | | | | | | | | | ACCGCCATCTATTATTGTGCGAGACAT | | RVVPGYYLFD | | | |
| | | | | | | | | | | | | | | | | CTACGGGTAGTACCAGGCTACTACCTC | | NWGQGTLVTV | | | |
| | | | | | | | | | | | | | | | | TTTGACAACTGGGGCCAGGGAACCCTG | | SS | | | |
| | | | | | | | | | | | | | | | | GTCACCGTCTCCTCA | | | | | |
| ADI- | IGHV3- | QVQLVESG | 100 | FTFDDYA | 214 | WVRQA | 437 | VISWNS | 715 | RFTIS | 960 | AREGCR | 1216 | WGQGTL | 1286 | CAGGTGCAGCTGGTGGAGTCTGGGGGA | 1515 | QVQLVESGGG | 1798 | | |
| 75828 | 9 | GGLVQPGR | | MH | | PGKGL | | DSIGYA | | RDNAK | | STTCYD | | VTVSS | | GGCTTGGTACAGCCTGGCAGGTCCCTG | | LVQPGRSLRL | | | |
| | | SLRLSCAA | | | | EWVS | | DSVKG | | NSFYL | | Y | | | | AGACTCTCCTGTGCAGCCTCTGGATTC | | SCAASGFTFD | | | |
| | | SG | | | | | | | | QMNSL | | | | | | ACCTTTGATGATTACGCCATGCACTGG | | DYAMHWVRQA | | | |
| | | | | | | | | | | RPEDT | | | | | | GTCCGGCAAGCTCCAGGGAAGGGCCTG | | PGKGLEWVSV | | | |
| | | | | | | | | | | ALYYC | | | | | | GAGTGGGTCTCCGTTATTAGTTGGAAT | | ISWNSDSIGY | | | |
| | | | | | | | | | | | | | | | | AGTGATAGCATAGGCTATGCGGACTCT | | ADSVKGRFTI | | | |
| | | | | | | | | | | | | | | | | GTGAAGGGCCGATTCACCATCTCCAGA | | SRDNAKNSFY | | | |
| | | | | | | | | | | | | | | | | GACAACGCCAAGAACTCCTTCTATCTG | | LQMNSLRPED | | | |
| | | | | | | | | | | | | | | | | CAAATGAACAGTCTGAGACCTGAGGAC | | TALYYCAREG | | | |
| | | | | | | | | | | | | | | | | ACGGCCTTGTATTACTGTGCAAGGGAG | | CRSTTCYDYW | | | |
| | | | | | | | | | | | | | | | | GGTTGTAGAAGTACCACCTGCTATGAC | | GQGTLVTVSS | | | |
| | | | | | | | | | | | | | | | | TACTGGGGCCAGGGAACCCTGGTCACC | | | | | |
| | | | | | | | | | | | | | | | | GTCTCCTCA | | | | | |
| ADI- | IGHV1- | QVQLQQSG | 86 | GTFSSYP | 379 | WVRQA | 433 | SIIPIL | 716 | RVTIN | 961 | ARDLGY | 1217 | WGQGTL | 1286 | CAGGTACAGCTGCAGCAGTCTGGGGCT | 1516 | QVQLQQSGAE | 1799 | | |
| 75632 | 69 | AEVKKPGS | | IS | | PGQGL | | GVAKYA | | ADKST | | SSGGAN | | VTVSS | | GAGGTGAAGAAGCCTGGGTCCTCGGTG | | VKKPGSSVKV | | | |
| | | SVKVSCKA | | | | EWMG | | QKFQG | | STAYM | | YYFDY | | | | AAGGTCTCCTGCAAGGCTTCTGGAGGC | | SCKASGGTFS | | | |
| | | ISG | | | | | | | | ELSSL | | | | | | ACCTTCAGCAGCTATCCTATCAGCTGG | | SYPISWVRQA | | | |
| | | | | | | | | | | RFEDT | | | | | | GTGCGACAGGCCCCTGGACAAGGGCTT | | PGQGLEWMGS | | | |
| | | | | | | | | | | AVYYC | | | | | | GAGTGGATGGGAAGTATCATCCCTATC | | IIPILGVAKY | | | |
| | | | | | | | | | | | | | | | | CTTGGTGTCGCAAAATACGCACAGAAG | | AQKFQGRVTI | | | |
| | | | | | | | | | | | | | | | | TTCCAGGGCAGAGTCACGATTAACGCG | | NADKSTSTAY | | | |
| | | | | | | | | | | | | | | | | GACAAATCCACGAGCACAGCCTACATG | | MELSSLRFED | | | |
| | | | | | | | | | | | | | | | | GAGCTGAGCAGCCTGAGATTTGAGGAC | | TAVYYCARDL | | | |
| | | | | | | | | | | | | | | | | ACGGCCGTGTATTACTGTGCGAGAGAT | | GYSSGGANYY | | | |
| | | | | | | | | | | | | | | | | TTGGGGTATAGCAGTGGCGGGGCCAAT | | FDYWGQGTLV | | | |
| | | | | | | | | | | | | | | | | TACTACTTTGACTACTGGGGCCAGGGA | | TVSS | | | |
| | | | | | | | | | | | | | | | | ACCCTGGTCACCGTCTCCTCA | | | | | |
| ADI- | IGHV3- | QVQLVESG | 158 | LTVSSNY | 380 | WVRQA | 437 | VIYSGG | 659 | RFTIS | 777 | ARMPYG | 1218 | WGQGTT | 1287 | CAGGTGCAGCTGGTGGAGTCTGGAGGA | 1517 | QVQLVESGGG | 1800 | | |
| 75855 | 53 | GGLIQPGG | | MS | | PGKGL | | STYYAD | | RDNSK | | TDV | | VTVSS | | GGCTTGATCCAGCCTGGGGGGTCCCTG | | LIQPGGSLRL | | | |
| | | SLRLSCEA | | | | EWVS | | SVKG | | NTLYL | | | | | | AGACTCTCCTGTGAAGCCTCTGGGCTC | | SCEASGLTVS | | | |
| | | SG | | | | | | | | QMNSL | | | | | | ACCGTCAGTAGCAACTACATGAGCTGG | | SNYMSWVRQA | | | |
| | | | | | | | | | | RAEDT | | | | | | GTCCGCCAGGCTCCAGGGAAGGGGCTG | | PGKGLEWVSV | | | |
| | | | | | | | | | | AVYYC | | | | | | GAGTGGGTCTCAGTTATTTATAGCGGT | | IYSGGSTYYA | | | |
| | | | | | | | | | | | | | | | | GGTAGCACATACTACGCAGACTCCGTG | | DSVKGRFTIS | | | |
| | | | | | | | | | | | | | | | | AAGGGCCGATTCACCATCTCCAGAGAC | | RDNSKNTLYL | | | |
| | | | | | | | | | | | | | | | | AATTCCAAGAACACGCTGTATCTTCAA | | QMNSLRAEDT | | | |
| | | | | | | | | | | | | | | | | ATGAACAGCCTGAGAGCCGAGGACACG | | AVYYCARMPY | | | |
| | | | | | | | | | | | | | | | | GCCGTGTATTACTGTGCGAGAATGCCT | | GTDVWGQGTT | | | |
| | | | | | | | | | | | | | | | | TACGGTACGGACGTCTGGGGCCAAGGG | | VTVSS | | | |
| | | | | | | | | | | | | | | | | ACCACGGTCACCGTCTCCTCA | | | | | |
| ADI- | IGHV4- | QVQLQQSG | 56 | GSISRGS | 381 | WIRQH | 450 | YIYSSG | 717 | RLTIS | 962 | ARHSVP | 1219 | WGQGNL | 1303 | CAGGTGCAGCTGCAGCAGTCGGGCCCA | 1518 | QVQLQQSGPG | 1801 | | |
| 75729 | 31 | PGLVKPSQ | | YYWS | | PGKGL | | STYYNP | | LDTSK | | YYFDY | | VTVSS | | GGACTGGTGAAGCCTTCACAGACCCTG | | LVKPSQTLSL | | | |
| | | TLSLTCTV | | | | EWIG | | SLES | | NQFSL | | | | | | TCCCTCACCTGCACTGTCTCTGGTGGC | | TCTVSGGSIS | | | |
| | | SG | | | | | | | | RLTSV | | | | | | TCCATCAGCAGGGGTTCTTACTACTGG | | RGSYYWSWIR | | | |
| | | | | | | | | | | TAADT | | | | | | AGCTGGATCCGCCAGCACCCAGGGAAG | | QHPGKGLEWI | | | |
| | | | | | | | | | | AVYFC | | | | | | GGCCTGGAGTGGATTGGTTACATCTAT | | GYIYSSGSTY | | | |
| | | | | | | | | | | | | | | | | TCCAGTGGGAGCACCTACTACAACCCG | | YNPSLESRLT | | | |
| | | | | | | | | | | | | | | | | TCCCTCGAGAGTCGACTTACCATATCA | | ISLDTSKNQF | | | |
| | | | | | | | | | | | | | | | | TTAGACACGTCTAAGAACCAGTTCTCC | | SLRLTSVTAA | | | |
| | | | | | | | | | | | | | | | | CTGAGGCTGACCTCTGTGACTGCCGCG | | DTAVYFCARH | | | |
| | | | | | | | | | | | | | | | | GACACGGCCGTCTATTTCTGTGCGAGG | | SVPYYFDYWG | | | |
| | | | | | | | | | | | | | | | | CATTCTGTGCCGTACTACTTTGACTAC | | QGNLVTVSS | | | |
| | | | | | | | | | | | | | | | | TGGGGCCAGGGAAACCTGGTCACCGTC | | | | | |
| | | | | | | | | | | | | | | | | TCCTCA | | | | | |
| ADI- | IGHV7- | QVQLVQSG | 159 | YTFNTYA | 382 | WVRQA | 433 | WINTNT | 718 | RFVFS | 963 | ARDEES | 1220 | WGQGTL | 1286 | CAGGTCCAGCTGGTGCAGTCTGGGTCT | 1519 | QVQLVQSGSE | 1802 | | |
| 75734 | 4-1 | SELKKPGA | | MN | | PGQGL | | GATTYA | | FDTSL | | LYEAVT | | VTVSS | | GAGTTGAAGAAGCCTGGGGCCTCAGTG | | LKKPGASVKV | | | |
| | | SVKVSCKA | | | | EWMG | | QGFTG | | TTAYL | | GTGWFD | | | | AAGGTTTCCTGCAAGGCTTCTGGATAT | | SCKASGYTFN | | | |
| | | SG | | | | | | | | QISSL | | P | | | | ACCTTCAATACCTACGCTATGAATTGG | | TYAMNWVRQA | | | |
| | | | | | | | | | | RAEDT | | | | | | GTGCGACAGGCCCCTGGACAAGGGCTT | | PGQGLEWMGW | | | |
| | | | | | | | | | | AVYFC | | | | | | GAGTGGATGGGATGGATCAACACCAAC | | INTNTGATTY | | | |
| | | | | | | | | | | | | | | | | ACTGGGGCCACAACGTATGCCCAGGGC | | AQGFTGRFVF | | | |
| | | | | | | | | | | | | | | | | TTCACAGGGCGTTTTGTCTTCTCCTTC | | SFDTSLTTAY | | | |
| | | | | | | | | | | | | | | | | GACACCTCTCTCACTACGGCATATCTG | | LQISSLRAED | | | |
| | | | | | | | | | | | | | | | | CAGATCAGCAGCCTAAGGGCTGAGGAC | | TAVYFCARDE | | | |
| | | | | | | | | | | | | | | | | ACTGCCGTGTATTTCTGTGCGAGAGAT | | ESLYEAVTGT | | | |
| | | | | | | | | | | | | | | | | GAGGAGTCGCTCTATGAAGCAGTGACT | | GWFDPWGQGT | | | |
| | | | | | | | | | | | | | | | | GGTACAGGCTGGTTCGACCCCTGGGGC | | LVTVSS | | | |
| | | | | | | | | | | | | | | | | CAGGGAACCCTGGTCACCGTCTCCTCA | | | | | |
| ADI- | IGHV3- | QVTLKESG | 160 | ADFSTYG | 383 | WVRQA | 431 | ALSHDG | 719 | RFTIS | 964 | AKDLIN | 1221 | WGQGTL | 1286 | CAGGTCACGCTGAAGGAGTCTGGGGGA | 1520 | QVTLKESGGG | 1803 | | |
| 75880 | 30 | GGVVQPGT | | MH | | PGKGL | | AYKFYA | | RDNSK | | YDPWSG | | VTVSS | | GGCGTGGTCCAGCCTGGGACGTCCCAG | | VVQPGTSQRV | | | |
| | | SQRVSCTV | | | | EWVA | | DSVKG | | KTAFL | | FFT | | | | AGAGTCTCCTGCACAGTCTCTGGAGCC | | SCTVSGADFS | | | |
| | | SG | | | | | | | | QMNSV | | | | | | GACTTCAGTACTTACGGCATGCACTGG | | TYGMHWVRQA | | | |
| | | | | | | | | | | RPEDT | | | | | | GTCCGCCAGGCTCCAGGCAAGGGGCTG | | PGKGLEWVAA | | | |
| | | | | | | | | | | AVYYC | | | | | | GAGTGGGTGGCAGCTCTCTCACATGAT | | LSHDGAYKFY | | | |
| | | | | | | | | | | | | | | | | GGAGCTTATAAATTCTATGCAGACTCA | | ADSVKGRFTI | | | |
| | | | | | | | | | | | | | | | | GTGAAGGGCCGATTCACCATCTCCAGA | | SRDNSKKTAF | | | |
| | | | | | | | | | | | | | | | | GACAATTCCAAGAAAACGGCGTTTCTG | | LQMNSVRPED | | | |
| | | | | | | | | | | | | | | | | CAAATGAACAGTGTGAGACCGGAGGAC | | TAVYYCAKDL | | | |
| | | | | | | | | | | | | | | | | ACGGCTGTCTATTACTGTGCGAAGGAC | | INYDPWSGFF | | | |
| | | | | | | | | | | | | | | | | CTGATTAACTACGATCCCTGGAGTGGC | | TWGQGTLVTV | | | |
| | | | | | | | | | | | | | | | | TTTTTCACTTGGGGCCAGGGAACCCTG | | SS | | | |
| | | | | | | | | | | | | | | | | GTCACCGTCTCCTCA | | | | | |
| ADI- | IGHV5- | QVQLVQSG | 161 | YSFSNYW | 384 | WVRQM | 476 | IIYPGD | 635 | HMTIS | 965 | ARQGTT | 1222 | WGQGTL | 1286 | CAGGTCCAGCTTGTGCAGTCTGGAGCA | 1521 | QVQLVQSGAE | 1804 | | |
| 75724 | 51 | AEVKKSGE | | IG | | PGKGL | | SDTRYS | | ADKSI | | VGHFDN | | VTVSS | | GAGGTGAAAAAGTCCGGGGAGTCTCTG | | VKKSGESLKI | | | |
| | | SLKISCKG | | | | EWMG | | PSFQG | | STAYL | | | | | | AAGATCTCCTGCAAGGGTTCTGGATAC | | SCKGSGYSFS | | | |
| | | SG | | | | | | | | QWNSL | | | | | | AGCTTTAGCAACTACTGGATCGGCTGG | | NYWIGWVRQM | | | |
| | | | | | | | | | | KASDT | | | | | | GTGCGCCAGATGCCCGGGAAAGGCCTG | | PGKGLEWMGI | | | |
| | | | | | | | | | | AMYYC | | | | | | GAGTGGATGGGGATCATCTATCCTGGT | | IYPGDSDTRY | | | |
| | | | | | | | | | | | | | | | | GACTCTGACACCAGATACAGCCCGTCC | | SPSFQGHMTI | | | |
| | | | | | | | | | | | | | | | | TTCCAAGGCCACATGACCATCTCAGCC | | SADKSISTAY | | | |
| | | | | | | | | | | | | | | | | GACAAGTCCATCAGTACCGCCTACCTG | | LQWNSLKASD | | | |
| | | | | | | | | | | | | | | | | CAGTGGAACAGCCTGAAGGCCTCGGAC | | TAMYYCARQG | | | |
| | | | | | | | | | | | | | | | | ACCGCCATGTATTACTGTGCGAGACAG | | TTVGHFDNWG | | | |
| | | | | | | | | | | | | | | | | GGAACGACAGTAGGGCACTTTGACAAC | | QGTLVTVSS | | | |
| | | | | | | | | | | | | | | | | TGGGGCCAGGGAACCCTGGTCACCGTC | | | | | |
| | | | | | | | | | | | | | | | | TCCTCA | | | | | |
| ADI- | IGHV1- | QVQLVQSG | 50 | GTFSSYT | 385 | WVRQA | 433 | RIFPIL | 720 | RVTIS | 966 | ARDIGY | 1223 | WGQGTL | 1286 | CAGGTGCAGCTGGTGCAGTCTGGGGCT | 1522 | QVQLVQSGAE | 1805 | | |
| 75737 | 69 | AEVKKPGS | | FS | | PGQGL | | GVANYA | | ADKST | | SDYGAT | | VTVSS | | GAAGTGAAGAAGCCTGGGTCCTCGGTG | | VKKPGSSVKV | | | |
| | | SVKVSCKA | | | | EWMG | | QKFQG | | TTAYM | | YWFDP | | | | AAGGTCTCCTGCAAGGCTTCTGGAGGC | | SCKASGGTFS | | | |
| | | SG | | | | | | | | ELSSL | | | | | | ACCTTCAGCAGCTACACTTTCAGCTGG | | SYTFSWVRQA | | | |
| | | | | | | | | | | TSEDT | | | | | | GTGCGACAGGCCCCTGGACAAGGGCTT | | PGQGLEWMGR | | | |
| | | | | | | | | | | AVYYC | | | | | | GAGTGGATGGGAAGGATCTTCCCTATC | | IFPILGVANY | | | |
| | | | | | | | | | | | | | | | | CTTGGTGTAGCAAACTACGCACAGAAG | | AQKFQGRVTI | | | |
| | | | | | | | | | | | | | | | | TTCCAGGGCAGAGTCACCATTTCCGCG | | SADKSTTTAY | | | |
| | | | | | | | | | | | | | | | | GACAAATCAACGACCACGGCCTACATG | | MELSSLTSED | | | |
| | | | | | | | | | | | | | | | | GAACTGAGCAGCTTGACATCTGAGGAC | | TAVYYCARDI | | | |
| | | | | | | | | | | | | | | | | ACGGCCGTCTATTATTGTGCGAGAGAT | | GYSDYGATYW | | | |
| | | | | | | | | | | | | | | | | ATCGGATACAGTGACTACGGGGCAACA | | FDPWGQGTLV | | | |
| | | | | | | | | | | | | | | | | TACTGGTTCGACCCCTGGGGCCAGGGA | | TVSS | | | |
| | | | | | | | | | | | | | | | | ACCCTGGTCACCGTCTCCTCA | | | | | |
| ADI- | IGHV3- | QVQLQQSG | 162 | FTFDDYA | 214 | WVRQA | 437 | GVTWNS | 721 | RFTIS | 967 | VKDRYN | 1224 | WGQGTT | 1287 | CAGGTGCAGCTGCAGCAGTCCGGGGGA | 1523 | QVQLQQSGGG | 1806 | | |
| 75610 | 9 | GGLVQPGR | | MH | | PGKGL | | GTIGYA | | RDNAK | | WKREYY | | VTVSS | | GGCTTGGTACAGCCTGGCAGGTCCCTG | | LVQPGRSLRL | | | |
| | | SLRLSCAA | | | | EWVS | | DSVKG | | NSLYL | | YGMDV | | | | AGACTCTCCTGTGCAGCCTCCGGATTC | | SCAASGFTFD | | | |
| | | SG | | | | | | | | HMRSL | | | | | | ACCTTTGATGATTATGCCATGCACTGG | | DYAMHWVRQA | | | |
| | | | | | | | | | | TPEDT | | | | | | GTCCGGCAAGCTCCAGGGAAGGGCCTG | | PGKGLEWVSG | | | |
| | | | | | | | | | | ALYYC | | | | | | GAGTGGGTCTCAGGTGTTACTTGGAAT | | VTWNSGTIGY | | | |
| | | | | | | | | | | | | | | | | AGTGGTACCATAGGTTACGCGGACTCT | | ADSVKGRFTI | | | |
| | | | | | | | | | | | | | | | | GTGAAGGGCCGATTCACCATCTCCAGA | | SRDNAKNSLY | | | |
| | | | | | | | | | | | | | | | | GACAACGCCAAGAACTCCCTATATCTG | | LHMRSLTPED | | | |
| | | | | | | | | | | | | | | | | CACATGCGCAGTTTGACACCTGAGGAC | | TALYYCVKDR | | | |
| | | | | | | | | | | | | | | | | ACGGCCCTTTATTACTGTGTAAAAGAT | | YNWKREYYYG | | | |
| | | | | | | | | | | | | | | | | CGCTATAACTGGAAAAGGGAGTACTAC | | MDVWGQGTTV | | | |
| | | | | | | | | | | | | | | | | TACGGTATGGACGTCTGGGGCCAAGGG | | TVSS | | | |
| | | | | | | | | | | | | | | | | ACCACGGTCACCGTCTCCTCA | | | | | |
| ADI- | IGHV3- | RCTLEESG | 163 | FTFSNFG | 386 | WVRQA | 431 | AISFDG | 722 | RFTIS | 968 | GKDLDI | 1225 | WGQGTT | 1287 | AGATGCACGCTGGAGGAGTCTGGGGGA | 1524 | RCTLEESGGG | 1807 | | |
| 75603 | 30 | GGVVQPGR | | MH | | PGKGL | | DITYYA | | RDDSK | | VVAVVG | | VTVSS | | GGCGTGGTCCAGCCTGGGAGGTCCCTG | | VVQPGRSLRL | | | |
| | | SLRLSCEA | | | | EWVA | | DSVKG | | NTLHL | | TPYYYY | | | | AGACTCTCTTGTGAAGCCTCTGGATTC | | SCEASGFTFS | | | |
| | | SG | | | | | | | | QIHSL | | GLDV | | | | ACCTTTAGTAATTTTGGCATGCACTGG | | NFGMHWVRQA | | | |
| | | | | | | | | | | RLEDT | | | | | | GTCCGCCAGGCTCCAGGCAAGGGGCTG | | PGKGLEWVAA | | | |
| | | | | | | | | | | ATYYC | | | | | | GAGTGGGTGGCAGCTATATCATTTGAT | | ISFDGDITYY | | | |
| | | | | | | | | | | | | | | | | GGAGATATCACATACTATGCAGACTCC | | ADSVKGRFTI | | | |
| | | | | | | | | | | | | | | | | GTGAAGGGCCGATTCACCATCTCCAGA | | SRDDSKNTLH | | | |
| | | | | | | | | | | | | | | | | GACGATTCCAAGAACACTCTGCATCTC | | LQIHSLRLED | | | |
| | | | | | | | | | | | | | | | | CAAATACACAGCCTGAGACTTGAGGAC | | TATYYCGKDL | | | |
| | | | | | | | | | | | | | | | | ACGGCTACTTATTACTGTGGGAAAGAT | | DIVVAVVGTP | | | |
| | | | | | | | | | | | | | | | | CTCGATATTGTGGTGGCGGTAGTTGGC | | YYYYGLDVWG | | | |
| | | | | | | | | | | | | | | | | ACCCCTTATTACTATTACGGTCTGGAC | | QGTTVTVSS | | | |
| | | | | | | | | | | | | | | | | GTCTGGGGCCAAGGGACCACGGTCACC | | | | | |
| | | | | | | | | | | | | | | | | GTCTCCTCA | | | | | |
| ADI- | IGHV3- | QVTLKESG | 164 | FTVSRFA | 387 | WVRQA | 431 | MISFDG | 723 | RFTIS | 969 | ARGDYY | 1226 | WGQGTL | 1286 | CAGGTCACGTTGAAGGAGTCTGGGGGA | 1525 | QVTLKESGGG | 1808 | | |
| 75649 | 30 | GGVVQPGR | | MH | | PGKGL | | SEKYYA | | RDNSK | | GSGSSY | | VTVSS | | GGCGTGGTCCAGCCTGGGAGGTCCCTG | | VVQPGRSLRL | | | |
| | | SLRLSCAV | | | | EWVA | | DSVKG | | ITLYL | | NPLPTF | | | | AGACTCTCCTGTGCAGTCTCTGGATTC | | SCAVSGFTVS | | | |
| | | SG | | | | | | | | QMNSL | | DY | | | | ACTGTCAGTAGATTTGCTATGCACTGG | | RFAMHWVRQA | | | |
| | | | | | | | | | | RAEDT | | | | | | GTCCGCCAGGCTCCAGGCAAGGGGCTG | | PGKGLEWVAM | | | |
| | | | | | | | | | | AMYYC | | | | | | GAGTGGGTGGCAATGATATCATTTGAT | | ISFDGSEKYY | | | |
| | | | | | | | | | | | | | | | | GGAAGTGAAAAATACTACGCAGACTCC | | ADSVKGRFTI | | | |
| | | | | | | | | | | | | | | | | GTGAAGGGCCGATTCACCATCTCCAGA | | SRDNSKITLY | | | |
| | | | | | | | | | | | | | | | | GACAACTCCAAGATCACACTGTATCTA | | LQMNSLRAED | | | |
| | | | | | | | | | | | | | | | | CAAATGAACAGCCTGAGAGCTGAGGAC | | TAMYYCARGD | | | |
| | | | | | | | | | | | | | | | | ACGGCTATGTATTACTGTGCGAGAGGA | | YYGSGSSYNP | | | |
| | | | | | | | | | | | | | | | | GATTACTATGGTTCAGGGAGTTCCTAT | | LPTFDYWGQG | | | |
| | | | | | | | | | | | | | | | | AATCCACTGCCCACCTTTGACTACTGG | | TLVTVSS | | | |
| | | | | | | | | | | | | | | | | GGCCAGGGAACCCTGGTCACCGTCTCC | | | | | |
| | | | | | | | | | | | | | | | | TCA | | | | | |
| ADI- | IGHV3- | QVQLVQSG | 165 | FTFSSYT | 388 | WVRQA | 503 | FISHDG | 724 | RFTIS | 777 | ARGDIL | 1227 | WGHGTT | 1304 | CAGGTGCAGCTGGTGCAGTCTGGGGGA | 1526 | QVQLVQSGGG | 1809 | | |
| 75625 | 30 | GGVVQPGR | | LH | | PGEGL | | GRIDYA | | RDNSK | | TGYPIS | | VTVSS | | GGCGTGGTCCAGCCTGGGAGGTCCCTG | | VVQPGRSLRL | | | |
| | | SLRLSCAA | | | | EWVS | | DSVKG | | NTLYL | | KDALDL | | | | AGACTCTCCTGTGCAGCGTCTGAATTC | | SCAASEFTFS | | | |
| | | SE | | | | | | | | QMNSL | | | | | | ACCTTCAGTAGTTATACTCTGCACTGG | | SYTLHWVRQA | | | |
| | | | | | | | | | | RAEDT | | | | | | GTCCGCCAGGCTCCAGGCGAGGGACTG | | PGEGLEWVSF | | | |
| | | | | | | | | | | AVYYC | | | | | | GAGTGGGTGTCATTTATATCACATGAT | | ISHDGGRIDY | | | |
| | | | | | | | | | | | | | | | | GGAGGTAGAATAGACTACGCAGACTCC | | ADSVKGRFTI | | | |
| | | | | | | | | | | | | | | | | GTGAAGGGCCGATTCACCATCTCCAGA | | SRDNSKNTLY | | | |
| | | | | | | | | | | | | | | | | GACAATTCCAAGAACACGCTGTATCTG | | LQMNSLRAED | | | |
| | | | | | | | | | | | | | | | | CAAATGAACAGCCTGAGAGCTGAGGAC | | TAVYYCARGD | | | |
| | | | | | | | | | | | | | | | | ACGGCTGTGTATTACTGTGCGAGAGGC | | ILTGYPISKD | | | |
| | | | | | | | | | | | | | | | | GACATTTTGACTGGGTACCCGATATCA | | ALDLWGHGTT | | | |
| | | | | | | | | | | | | | | | | AAGGATGCTCTTGATCTCTGGGGCCAC | | VTVSS | | | |
| | | | | | | | | | | | | | | | | GGGACCACGGTCACCGTCTCCTCA | | | | | |
| ADI- | IGHV3- | QVQLVQSG | 166 | FTFNSYW | 389 | WVRQA | 431 | SIKQDG | 725 | RFTIS | 970 | ARMPTV | 1228 | WGQGTL | 1286 | CAGGTGCAGCTGGTGCAGTCTGGGGGA | 1527 | QVQLVQSGGG | 1810 | | |
| 75589 | 7 | GGLVQPGG | | MS | | PGKGL | | SEKYYV | | RDNAK | | YSGYDK | | VTVSS | | GGCTTGGTCCAGCCGGGGGGGTCCCTG | | LVQPGGSLRL | | | |
| | | SLRLSCAA | | | | EWVA | | DSLKG | | NLLYL | | | | | | AGACTCTCCTGTGCAGCCTCTAGATTC | | SCAASRFTFN | | | |
| | | SR | | | | | | | | QMNIL | | | | | | ACCTTTAATAGTTATTGGATGAGTTGG | | SYWMSWVRQA | | | |
| | | | | | | | | | | RVEDT | | | | | | GTCCGCCAGGCTCCAGGGAAGGGACTG | | PGKGLEWVAS | | | |
| | | | | | | | | | | AVYYC | | | | | | GAGTGGGTGGCCAGCATAAAGCAAGAT | | IKQDGSEKYY | | | |
| | | | | | | | | | | | | | | | | GGAAGTGAGAAATACTATGTGGACTCT | | VDSLKGRFTI | | | |
| | | | | | | | | | | | | | | | | TTGAAGGGCCGATTCACCATTTCCAGA | | SRDNAKNLLY | | | |
| | | | | | | | | | | | | | | | | GACAACGCCAAGAATTTATTGTATCTG | | LQMNILRVED | | | |
| | | | | | | | | | | | | | | | | CAAATGAACATCCTGAGAGTCGAGGAC | | TAVYYCARMP | | | |
| | | | | | | | | | | | | | | | | ACGGCTGTATATTACTGTGCGAGGATG | | TVYSGYDKWG | | | |
| | | | | | | | | | | | | | | | | CCGACGGTTTATAGTGGCTACGATAAG | | QGTLVTVSS | | | |
| | | | | | | | | | | | | | | | | TGGGGCCAGGGAACCCTGGTCACCGTC | | | | | |
| | | | | | | | | | | | | | | | | TCCTCA | | | | | |
| ADI- | IGHV5- | QVQLVQSG | 167 | YRFGNHW | 390 | WVRQA | 504 | IIYPDD | 726 | QVTIS | 971 | VRRPRV | 1229 | WGQGTT | 1287 | CAGGTGCAGCTGGTGCAGTCTGGACCA | 1528 | QVQLVQSGPE | 1811 | | |
| 75763 | 51 | PEVKKSGE | | IG | | PGKGL | | SDTRYG | | VDKSI | | QGILVA | | VTVSS | | GAGGTGAAAAAGTCCGGGGAGTCTCTG | | VKKSGESLKI | | | |
| | | SLKISCKA | | | | EWMG | | PSFEG | | STAYL | | SDPFDI | | | | AAGATCTCCTGTAAGGCTTCTGGATAT | | SCKASGYRFG | | | |
| | | SG | | | | | | | | QWSSL | | | | | | AGGTTTGGCAACCATTGGATCGGCTGG | | NHWIGWVRQA | | | |
| | | | | | | | | | | KASDT | | | | | | GTGCGCCAGGCGCCCGGGAAAGGCCTG | | PGKGLEWMGI | | | |
| | | | | | | | | | | AMYYC | | | | | | GAGTGGATGGGGATCATCTATCCTGAT | | IYPDDSDTRY | | | |
| | | | | | | | | | | | | | | | | GACTCTGATACCAGATACGGCCCGTCC | | GPSFEGQVTI | | | |
| | | | | | | | | | | | | | | | | TTCGAAGGCCAGGTCACCATCTCAGTC | | SVDKSISTAY | | | |
| | | | | | | | | | | | | | | | | GACAAGTCCATCAGCACCGCCTACTTG | | LQWSSLKASD | | | |
| | | | | | | | | | | | | | | | | CAGTGGAGCAGCCTGAAGGCCTCGGAC | | TAMYYCVRRP | | | |
| | | | | | | | | | | | | | | | | ACCGCCATGTATTACTGTGTGAGACGA | | RVQGILVASD | | | |
| | | | | | | | | | | | | | | | | CCTAGGGTTCAGGGAATTCTTGTCGCG | | PFDIWGQGTT | | | |
| | | | | | | | | | | | | | | | | AGTGATCCTTTTGATATCTGGGGCCAA | | VTVSS | | | |
| | | | | | | | | | | | | | | | | GGGACAACGGTCACCGTCTCCTCA | | | | | |
| ADI- | IGHV3- | QVQLEQSG | 19 | FTLSSHS | 391 | WVRQA | 431 | LISLGA | 727 | RFTIS | 935 | TREISG | 1230 | WGQGTL | 1286 | CAGGTCCAGCTGGAGCAGTCTGGGGGA | 1529 | QVQLEQSGGG | 1812 | | |
| 75582 | 30 | GGVVQPGR | | MH | | PGKGL | | NNKYYA | | RDNSK | | GTKGMY | | VTVSS | | GGCGTGGTCCAGCCTGGGAGGTCCCTG | | VVQPGRSLRL | | | |
| | | SLRLSCAA | | | | EWVA | | DSVKG | | NTLYL | | SGSYFL | | | | AGACTCTCCTGTGCAGCCTCTGGATTC | | SCAASGFTLS | | | |
| | | SG | | | | | | | | QMNSL | | FSGFDY | | | | ACCCTCAGTAGTCATTCTATGCACTGG | | SHSMHWVRQA | | | |
| | | | | | | | | | | RAEDT | | | | | | GTCCGCCAGGCTCCAGGCAAGGGGCTG | | PGKGLEWVAL | | | |
| | | | | | | | | | | AIYYC | | | | | | GAGTGGGTGGCACTTATATCACTTGGT | | ISLGANNKYY | | | |
| | | | | | | | | | | | | | | | | GCAAATAATAAATACTACGCAGACTCC | | ADSVKGRFTI | | | |
| | | | | | | | | | | | | | | | | GTGAAGGGCCGATTCACCATCTCCAGA | | SRDNSKNTLY | | | |
| | | | | | | | | | | | | | | | | GACAATTCCAAGAACACGCTGTATCTG | | LQMNSLRAED | | | |
| | | | | | | | | | | | | | | | | CAAATGAACAGCCTGAGAGCTGAGGAC | | TAIYYCTREI | | | |
| | | | | | | | | | | | | | | | | ACGGCTATATATTACTGTACAAGAGAA | | SGGTKGMYSG | | | |
| | | | | | | | | | | | | | | | | ATATCCGGGGGTACTAAGGGCATGTAT | | SYFLFSGFDY | | | |
| | | | | | | | | | | | | | | | | AGTGGGAGCTACTTCCTCTTTTCCGGC | | WGQGTLVTVS | | | |
| | | | | | | | | | | | | | | | | TTTGACTACTGGGGCCAGGGAACCCTG | | S | | | |
| | | | | | | | | | | | | | | | | GTCACCGTCTCCTCA | | | | | |
| ADI- | IGHV2- | QVTLKQSG | 168 | FSLSSNG | 392 | WIRQP | 505 | VIYWDE | 728 | RLTIT | 972 | AHTTRY | 1231 | WGQGTL | 1286 | CAGGTCACGCTGAAGCAGTCTGGTCCT | 1530 | QVTLKQSGPT | 1813 | | |
| 75746 | 5 | PTVVKPTQ | | EGVA | | PGKAL | | EERYSP | | KDTSK | | SNRFDP | | VTVSS | | ACCGTGGTGAAACCCACACAGACCCTC | | VVKPTQTLTL | | | |
| | | TLTLTCNF | | | | EWFA | | SLKS | | NQVVL | | | | | | ACGCTGACCTGCAACTTCTCTGGGTTC | | TCNFSGFSLS | | | |
| | | SG | | | | | | | | TMTDM | | | | | | TCACTCAGCAGTAATGGAGAGGGTGTG | | SNGEGVAWIR | | | |
| | | | | | | | | | | DPVDT | | | | | | GCCTGGATCCGTCAGCCCCCAGGAAAG | | QPPGKALEWF | | | |
| | | | | | | | | | | GTYYC | | | | | | GCCCTGGAGTGGTTTGCAGTCATTTAT | | AVIYWDEEER | | | |
| | | | | | | | | | | | | | | | | TGGGATGAAGAGGAGCGCTACAGCCCA | | YSPSLKSRLT | | | |
| | | | | | | | | | | | | | | | | TCTCTCAAGAGCAGGCTAACCATCACC | | ITKDTSKNQV | | | |
| | | | | | | | | | | | | | | | | AAGGACACCTCTAAAAACCAGGTGGTC | | VLTMTDMDPV | | | |
| | | | | | | | | | | | | | | | | CTTACAATGACCGACATGGACCCTGTG | | DTGTYYCAHT | | | |
| | | | | | | | | | | | | | | | | GACACAGGCACATATTACTGTGCACAC | | TRYSNRFDPW | | | |
| | | | | | | | | | | | | | | | | ACTACTCGATATAGCAACAGGTTCGAC | | GQGTLVTVSS | | | |
| | | | | | | | | | | | | | | | | CCCTGGGGCCAGGGAACCCTGGTCACC | | | | | |
| | | | | | | | | | | | | | | | | GTCTCCTCA | | | | | |
| ADI- | IGHV2- | PGHIEGVW | 169 | FSLSTSG | 393 | WIRQP | 506 | RIDWDG | 729 | RLTIS | 973 | ARCQVG | 1232 | WGQGTL | 1286 | CCAGGTCACATTGAAGGAGTCTGGTCT | 1531 | PGHIEGVWSA | 1814 | | |
| 75726 | 70 | SALVKPTE | | MSVS | | PGGAL | | YKYYST | | KDTSK | | MENN | | VTVSS | | GCGCTGGTGAAGCCCACAGAGACCCTC | | LVKPTETLTL | | | |
| | | TLTLTCTL | | | | EWLA | | TLET | | NQVVL | | | | | | ACACTGACCTGCACCTTGTATGGGTTC | | TCTLYGFSLS | | | |
| | | YG | | | | | | | | SLTNM | | | | | | TCACTCAGCACTAGTGGAATGTCTGTG | | TSGMSVSWIR | | | |
| | | | | | | | | | | DPVDT | | | | | | AGCTGGATCCGTCAGCCCCCCGGGGGG | | QPPGGALEWL | | | |
| | | | | | | | | | | ATYYC | | | | | | GCCCTGGAGTGGCTTGCACGCATTGAT | | ARIDWDGYKY | | | |
| | | | | | | | | | | | | | | | | TGGGATGGTTATAAATATTACAGCACA | | YSTTLETRLT | | | |
| | | | | | | | | | | | | | | | | ACTCTGGAGACCAGGCTCACCATCTCC | | ISKDTSKNQV | | | |
| | | | | | | | | | | | | | | | | AAGGACACCTCCAAAAACCAGGTGGTC | | VLSLTNMDPV | | | |
| | | | | | | | | | | | | | | | | CTTTCACTGACCAACATGGACCCTGTG | | DTATYYCARC | | | |
| | | | | | | | | | | | | | | | | GACACAGCCACGTATTACTGTGCACGG | | QVGMENNWGQ | | | |
| | | | | | | | | | | | | | | | | TGCCAGGTGGGGATGGAGAACAACTGG | | GTLVTVSS | | | |
| | | | | | | | | | | | | | | | | GGCCAGGGAACCCTGGTCACCGTCTCC | | | | | |
| | | | | | | | | | | | | | | | | TCA | | | | | |
| ADI- | IGHV1- | QVQLLQSG | 170 | YTFTSYY | 299 | WVRQA | 507 | IVNPGG | 730 | RVSMT | 974 | ARTRIA | 1233 | WGQGTL | 1286 | CAGGTGCAGCTGCTGCAGTCTGGGGCT | 1532 | QVQLLQSGAE | 1815 | | |
| 75851 | 46 | AEVKEPGA | | MH | | PAQGL | | GDTSYA | | RDTSA | | AATDYF | | VTVSS | | GAGGTGAAGGAGCCTGGGGCCTCAGTG | | VKEPGASVKV | | | |
| | | SVKVSCKA | | | | EWMG | | QKFQG | | STVYL | | DY | | | | AAGGTTTCCTGCAAGGCATCTGGGTAC | | SCKASGYTFT | | | |
| | | SG | | | | | | | | ELSSL | | | | | | ACCTTCACCAGCTACTATATGCACTGG | | SYYMHWVRQA | | | |
| | | | | | | | | | | RSEDT | | | | | | GTGCGACAGGCCCCTGCACAAGGGCTT | | PAQGLEWMGI | | | |
| | | | | | | | | | | AIYYC | | | | | | GAGTGGATGGGAATAGTCAACCCTGGT | | VNPGGGDTSY | | | |
| | | | | | | | | | | | | | | | | GGTGGTGACACAAGCTACGCACAGAAG | | AQKFQGRVSM | | | |
| | | | | | | | | | | | | | | | | TTCCAGGGCAGAGTCTCCATGACCAGG | | TRDTSASTVY | | | |
| | | | | | | | | | | | | | | | | GACACGTCCGCGAGCACAGTCTACTTG | | LELSSLRSED | | | |
| | | | | | | | | | | | | | | | | GAGCTGAGCAGCCTGAGATCTGAGGAC | | TAIYYCARTR | | | |
| | | | | | | | | | | | | | | | | ACGGCCATTTATTACTGTGCGAGAACC | | IAAATDYFDY | | | |
| | | | | | | | | | | | | | | | | CGCATAGCAGCAGCCACGGACTACTTT | | WGQGTLVTVS | | | |
| | | | | | | | | | | | | | | | | GACTACTGGGGCCAGGGAACCCTGGTC | | S | | | |
| | | | | | | | | | | | | | | | | ACCGTCTCCTCA | | | | | |
| ADI- | IGHV1- | QVQLVQSG | 50 | GTFSSSA | 394 | WVRQA | 433 | GIIPIF | 731 | RVTIT | 975 | ATDHVT | 1234 | WGQGTT | 1287 | CAGGTGCAGCTGGTGCAGTCTGGGGCT | 1533 | QVQLVQSGAE | 1816 | | |
| 75853 | 69 | AEVKKPGS | | IN | | PGQGL | | GTTNYA | | ADELT | | SPLYGL | | VTVSS | | GAGGTGAAGAAGCCTGGGTCCTCGGTG | | VKKPGSSVKV | | | |
| | | SVKVSCKA | | | | EWMG | | QKFQG | | NTAYM | | DV | | | | AAGGTCTCCTGCAAGGCTTCTGGAGGC | | SCKASGGTFS | | | |
| | | SG | | | | | | | | ELSSL | | | | | | ACCTTCAGCAGTAGTGCTATCAACTGG | | SSAINWVRQA | | | |
| | | | | | | | | | | RSEDT | | | | | | GTGCGACAGGCCCCTGGACAAGGGCTT | | PGQGLEWMGG | | | |
| | | | | | | | | | | AVYYC | | | | | | GAGTGGATGGGAGGAATCATCCCTATT | | IIPIFGTTNY | | | |
| | | | | | | | | | | | | | | | | TTTGGTACAACAAACTACGCACAGAAG | | AQKFQGRVTI | | | |
| | | | | | | | | | | | | | | | | TTCCAGGGCAGAGTCACGATTACCGCG | | TADELTNTAY | | | |
| | | | | | | | | | | | | | | | | GACGAATTAACGAACACAGCCTACATG | | MELSSLRSED | | | |
| | | | | | | | | | | | | | | | | GAGCTGAGCAGCCTGAGATCTGAGGAC | | TAVYYCATDH | | | |
| | | | | | | | | | | | | | | | | ACGGCCGTGTATTACTGTGCGACAGAT | | VTSPLYGLDV | | | |
| | | | | | | | | | | | | | | | | CACGTTACTTCGCCCCTCTACGGTTTG | | WGQGTTVTVS | | | |
| | | | | | | | | | | | | | | | | GACGTCTGGGGCCAAGGGACCACGGTC | | S | | | |
| | | | | | | | | | | | | | | | | ACCGTCTCCTCA | | | | | |
| ADI- | IGHV3- | QVQLVQSG | 17 | FTFDDYA | 214 | WVRQA | 437 | GISGNS | 732 | RFTIS | 976 | AKTLAP | 1235 | WGQGTT | 1287 | CAGGTGCAGCTGGTGCAGTCTGGGGGA | 1534 | QVQLVQSGGG | 1817 | | |
| 75863 | 9 | GGLVQPGR | | MH | | PGKGL | | GTIGYA | | RDNAK | | DRAHYD | | VTVSS | | GGGTTGGTACAGCCTGGCAGGTCCCTG | | LVQPGRSLRL | | | |
| | | SLRLSCAA | | | | EWVS | | DSVKG | | NSLYL | | TANDAF | | | | AGACTCTCCTGTGCAGCCTCTGGATTC | | SCAASGFTFD | | | |
| | | SG | | | | | | | | QMNRL | | DI | | | | ACCTTTGATGATTATGCCATGCACTGG | | DYAMHWVRQA | | | |
| | | | | | | | | | | RAEDT | | | | | | GTCCGGCAAGCTCCAGGGAAGGGCCTG | | PGKGLEWVSG | | | |
| | | | | | | | | | | ALYYC | | | | | | GAGTGGGTCTCAGGTATTAGTGGGAAT | | ISGNSGTIGY | | | |
| | | | | | | | | | | | | | | | | AGTGGTACCATAGGCTATGCGGACTCT | | ADSVKGRFTI | | | |
| | | | | | | | | | | | | | | | | GTGAAGGGCCGATTCACCATCTCCAGA | | SRDNAKNSLY | | | |
| | | | | | | | | | | | | | | | | GACAACGCCAAGAACTCCCTCTATCTG | | LQMNRLRAED | | | |
| | | | | | | | | | | | | | | | | CAAATGAACAGACTGAGAGCTGAGGAC | | TALYYCAKTL | | | |
| | | | | | | | | | | | | | | | | ACGGCCTTGTATTACTGTGCAAAAACT | | APDRAHYDTA | | | |
| | | | | | | | | | | | | | | | | TTGGCCCCAGACAGGGCCCATTACGAT | | NDAFDIWGQG | | | |
| | | | | | | | | | | | | | | | | ACCGCGAACGATGCTTTTGATATCTGG | | TTVTVSS | | | |
| | | | | | | | | | | | | | | | | GGCCAAGGGACCACGGTCACCGTCTCC | | | | | |
| | | | | | | | | | | | | | | | | TCA | | | | | |
| ADI- | IGHV3- | QVQLVESG | 171 | FIFDDYA | 395 | WVRQA | 437 | GINWNS | 733 | RFTIS | 977 | AKYRVA | 1236 | WGQGTT | 1287 | CAGGTCCAGCTGGTGGAGTCTGGGGGA | 1535 | QVQLVESGGG | 1818 | | |
| 75753 | 9 | GGLVQPGR | | MH | | PGKGL | | GTIAYA | | RDNAK | | ELTNDV | | VTVSS | | GGCTTGGTACAGCCTGGCAGGTCACTG | | LVQPGRSLRV | | | |
| | | SLRVSCAA | | | | EWVS | | DSVKG | | NSLYL | | FDV | | | | AGAGTCTCCTGTGCAGCCTCTGGATTC | | SCAASGFIFD | | | |
| | | SG | | | | | | | | EMHSL | | | | | | ATCTTTGATGATTATGCCATGCACTGG | | DYAMHWVRQA | | | |
| | | | | | | | | | | KPDDT | | | | | | GTCCGGCAAGCTCCAGGGAAGGGCCTG | | PGKGLEWVSG | | | |
| | | | | | | | | | | ALYYC | | | | | | GAGTGGGTCTCAGGAATTAATTGGAAT | | INWNSGTIAY | | | |
| | | | | | | | | | | | | | | | | AGTGGTACCATAGCCTATGCGGACTCT | | ADSVKGRFTI | | | |
| | | | | | | | | | | | | | | | | GTGAAGGGCCGGTTCACCATCTCCAGA | | SRDNAKNSLY | | | |
| | | | | | | | | | | | | | | | | GACAACGCCAAGAACTCCCTGTATCTG | | LEMHSLKPDD | | | |
| | | | | | | | | | | | | | | | | GAAATGCACAGTCTGAAACCTGACGAC | | TALYYCAKYR | | | |
| | | | | | | | | | | | | | | | | ACGGCCTTATATTACTGTGCAAAATAC | | VAELTNDVFD | | | |
| | | | | | | | | | | | | | | | | AGGGTGGCGGAATTAACGAATGATGTT | | VWGQGTTVTV | | | |
| | | | | | | | | | | | | | | | | TTTGATGTCTGGGGCCAAGGGACCACG | | SS | | | |
| | | | | | | | | | | | | | | | | GTCACCGTCTCCTCA | | | | | |
| ADI- | IGHV3- | QVQLVQSG | 10 | FTFSNYA | 396 | WVRQA | 431 | VIWYDG | 734 | RFTIS | 779 | ARDENG | 1237 | WGQGTL | 1286 | CAGGTGCAGCTGGTGCAGTCTGGGGGG | 1536 | QVQLVQSGGG | 1819 | | |
| 75756 | 33 | GGVVQPGR | | MH | | PGKGL | | SFKFYA | | RDNSK | | HEVMVT | | VTVSS | | GGCGTGGTCCAGCCTGGGAGGTCCCTG | | VVQPGRSLRL | | | |
| | | SLRLSCAA | | | | EWVA | | DSVKG | | NTVYL | | HFDY | | | | AGACTCTCCTGTGCAGCGTCTGGATTC | | SCAASGFTFS | | | |
| | | SG | | | | | | | | QMNSL | | | | | | ACCTTCAGTAACTATGCCATGCACTGG | | NYAMHWVRQA | | | |
| | | | | | | | | | | RAEDT | | | | | | GTCCGCCAGGCTCCAGGCAAGGGGCTG | | PGKGLEWVAV | | | |
| | | | | | | | | | | AVYYC | | | | | | GAATGGGTGGCAGTTATTTGGTATGAT | | IWYDGSFKFY | | | |
| | | | | | | | | | | | | | | | | GGCAGTTTTAAATTCTATGCAGACTCC | | ADSVKGRFTI | | | |
| | | | | | | | | | | | | | | | | GTGAAGGGCCGATTCACCATCTCCAGA | | SRDNSKNTVY | | | |
| | | | | | | | | | | | | | | | | GACAATTCCAAGAACACGGTGTATCTG | | LQMNSLRAED | | | |
| | | | | | | | | | | | | | | | | CAAATGAACAGCCTGAGAGCCGAGGAC | | TAVYYCARDE | | | |
| | | | | | | | | | | | | | | | | ACGGCTGTGTATTACTGTGCGAGAGAT | | NGHEVMVTHF | | | |
| | | | | | | | | | | | | | | | | GAGAACGGACATGAAGTCATGGTTACT | | DYWGQGTLVT | | | |
| | | | | | | | | | | | | | | | | CACTTTGACTACTGGGGCCAGGGAACC | | VSS | | | |
| | | | | | | | | | | | | | | | | CTGGTCACCGTCTCCTCA | | | | | |
| ADI- | IGHV1- | QVPLKQSG | 172 | YTFTSYY | 397 | WVRQA | 433 | MINPTG | 735 | RVTMS | 978 | ARSQVV | 1238 | WGQGTL | 1286 | CAGGTGCCGCTGAAGCAGTCTGGGGCT | 1537 | QVPLKQSGAE | 1820 | | |
| 75769 | 46 | AEVKKPGA | | VH | | PGQGL | | GSTGYA | | RDTST | | PATSHL | | VTVSS | | GAGGTGAAGAAGCCTGGGGCCTCAGTG | | VKKPGASVKI | | | |
| | | SVKISCKA | | | | EWMG | | QKFQG | | STVYM | | DY | | | | AAGATTTCCTGCAAGGCATCTGGATAC | | SCKASGYTFT | | | |
| | | SG | | | | | | | | ELTSL | | | | | | ACCTTCACCAGCTACTATGTACACTGG | | SYYVHWVRQA | | | |
| | | | | | | | | | | RSEDT | | | | | | GTGCGACAGGCCCCTGGACAAGGGCTT | | PGQGLEWMGM | | | |
| | | | | | | | | | | AVYYC | | | | | | GAGTGGATGGGAATGATCAACCCTACT | | INPTGGSTGY | | | |
| | | | | | | | | | | | | | | | | GGTGGTAGCACAGGTTACGCACAGAAG | | AQKFQGRVTM | | | |
| | | | | | | | | | | | | | | | | TTCCAGGGCAGAGTCACCATGTCCAGG | | SRDTSTSTVY | | | |
| | | | | | | | | | | | | | | | | GACACGTCCACGAGCACAGTCTACATG | | MELTSLRSED | | | |
| | | | | | | | | | | | | | | | | GAACTGACCAGCCTGAGATCTGAGGAC | | TAVYYCARSQ | | | |
| | | | | | | | | | | | | | | | | ACGGCCGTTTATTACTGTGCGAGAAGC | | VVPATSHLDY | | | |
| | | | | | | | | | | | | | | | | CAAGTAGTGCCAGCTACTAGTCACCTT | | WGQGTLVTVS | | | |
| | | | | | | | | | | | | | | | | GACTACTGGGGCCAGGGAACCCTGGTC | | S | | | |
| | | | | | | | | | | | | | | | | ACCGTCTCCTCA | | | | | |
| ADI- | IGHV3- | QVQLVQSG | 10 | FTFSSYG | 262 | WVRQA | 431 | VIWYDG | 679 | RFTIS | 777 | ARAGYS | 1239 | WGKGTT | 1291 | CAGGTCCAGCTGGTGCAGTCTGGGGGA | 1538 | QVQLVQSGGG | 1821 | | |
| 75772 | 33 | GGVVQPGR | | MH | | PGKGL | | SNKYYA | | RDNSK | | SYYYYM | | VTVSS | | GGCGTGGTCCAGCCTGGGAGGTCCCTG | | VVQPGRSLRL | | | |
| | | SLRLSCAA | | | | EWVA | | DSVKG | | NTLYL | | DV | | | | AGACTCTCCTGTGCAGCGTCTGGATTC | | SCAASGFTFS | | | |
| | | SG | | | | | | | | QMNSL | | | | | | ACCTTCAGTAGCTATGGCATGCACTGG | | SYGMHWVRQA | | | |
| | | | | | | | | | | RAEDT | | | | | | GTCCGCCAGGCTCCAGGCAAGGGGCTG | | PGKGLEWVAV | | | |
| | | | | | | | | | | AVYYC | | | | | | GAGTGGGTGGCAGTTATATGGTATGAT | | IWYDGSNKYY | | | |
| | | | | | | | | | | | | | | | | GGAAGTAATAAATACTATGCAGACTCC | | ADSVKGRFTI | | | |
| | | | | | | | | | | | | | | | | GTGAAGGGCCGATTCACCATCTCCAGA | | SRDNSKNTLY | | | |
| | | | | | | | | | | | | | | | | GACAATTCCAAGAACACGCTGTATCTG | | LQMNSLRAED | | | |
| | | | | | | | | | | | | | | | | CAAATGAACAGCCTGAGAGCCGAGGAC | | TAVYYCARAG | | | |
| | | | | | | | | | | | | | | | | ACGGCTGTGTATTACTGTGCGAGAGCG | | YSSYYYYMDV | | | |
| | | | | | | | | | | | | | | | | GGGTACAGTAGCTACTACTACTACATG | | WGKGTTVTVS | | | |
| | | | | | | | | | | | | | | | | GACGTCTGGGGCAAAGGGACCACGGTC | | S | | | |
| | | | | | | | | | | | | | | | | ACCGTCTCCTCA | | | | | |
| ADI- | IGHV1- | QVQLQESG | 173 | GTFSTYH | 398 | WVRQA | 508 | GIIPLF | 736 | RVTIT | 979 | ASEDCS | 1240 | WGQGTL | 1286 | CAGGTGCAGCTGCAGGAGTCCGGGACT | 1539 | QVQLQESGTE | 1822 | | |
| 75777 | 69 | TEVKKPGS | | VS | | PGRGL | | GSANYT | | ADKST | | GGSCYF | | VTVSS | | GAGGTGAAGAAGCCTGGGTCCTCGGTG | | VKKPGSSVKV | | | |
| | | SVKVSCKA | | | | EWMG | | QRFQG | | RTVYM | | GVGSPY | | | | AAGGTCTCCTGCAAGGCCTCTGGAGGC | | SCKASGGTFS | | | |
| | | SG | | | | | | | | ELRSL | | ARGFET | | | | ACCTTCAGCACCTATCATGTCAGCTGG | | TYHVSWVRQA | | | |
| | | | | | | | | | | RSDDT | | | | | | GTGCGACAGGCCCCTGGACGAGGCCTT | | PGRGLEWMGG | | | |
| | | | | | | | | | | AVYYC | | | | | | GAGTGGATGGGAGGGATCATCCCTCTC | | IIPLFGSANY | | | |
| | | | | | | | | | | | | | | | | TTTGGTTCAGCAAACTACACACAGAGG | | TQRFQGRVTI | | | |
| | | | | | | | | | | | | | | | | TTCCAGGGCAGAGTCACGATTACCGCG | | TADKSTRTVY | | | |
| | | | | | | | | | | | | | | | | GACAAATCCACGCGCACAGTCTACATG | | MELRSLRSDD | | | |
| | | | | | | | | | | | | | | | | GAGTTGAGGAGTCTGAGATCTGACGAC | | TAVYYCASED | | | |
| | | | | | | | | | | | | | | | | ACGGCCGTATATTATTGTGCGAGCGAG | | CSGGSCYFGV | | | |
| | | | | | | | | | | | | | | | | GATTGTAGTGGTGGTAGCTGCTACTTC | | GSPYARGFET | | | |
| | | | | | | | | | | | | | | | | GGGGTTGGGAGTCCTTATGCACGAGGA | | WGQGTLVTVS | | | |
| | | | | | | | | | | | | | | | | TTCGAAACCTGGGGCCAGGGAACCCTG | | S | | | |
| | | | | | | | | | | | | | | | | GTCACCGTCTCCTCA | | | | | |
| ADI- | IGHV5- | QVQLVQSG | 174 | YSFTSYW | 399 | WVRQM | 476 | IIYPGD | 635 | QVTFS | 980 | ARRDSS | 1241 | WGKGTT | 1291 | CAGGTCCAGCTGGTGCAGTCTGGAGCA | 1540 | QVQLVQSGAE | 1823 | | |
| 75781 | 51 | AEVKKPGE | | IA | | PGKGL | | SDTRYS | | ADKSI | | WNDMDV | | VTVSS | | GAGGTGAAAAAGCCCGGGGAGTCTCTG | | VKKPGESLKI | | | |
| | | SLKISCKG | | | | EWMG | | PSFQG | | STAYL | | | | | | AAGATCTCCTGTAAGGGATCTGGATAC | | SCKGSGYSFT | | | |
| | | SG | | | | | | | | QWTSL | | | | | | AGCTTTACCAGCTACTGGATCGCCTGG | | SYWIAWVRQM | | | |
| | | | | | | | | | | KASDT | | | | | | GTGCGCCAGATGCCCGGGAAAGGCCTG | | PGKGLEWMGI | | | |
| | | | | | | | | | | AIYYC | | | | | | GAGTGGATGGGGATCATCTATCCTGGT | | IYPGDSDTRY | | | |
| | | | | | | | | | | | | | | | | GACTCTGATACCAGATACAGCCCGTCT | | SPSFQGQVTF | | | |
| | | | | | | | | | | | | | | | | TTCCAAGGCCAGGTCACCTTCTCAGCC | | SADKSISTAY | | | |
| | | | | | | | | | | | | | | | | GACAAGTCCATCAGCACCGCCTACCTG | | LQWTSLKASD | | | |
| | | | | | | | | | | | | | | | | CAGTGGACCAGCCTGAAGGCCTCGGAC | | TAIYYCARRD | | | |
| | | | | | | | | | | | | | | | | ACCGCCATTTATTACTGTGCGAGACGT | | SSWNDMDVWG | | | |
| | | | | | | | | | | | | | | | | GACAGCAGCTGGAACGACATGGACGTC | | KGTTVTVSS | | | |
| | | | | | | | | | | | | | | | | TGGGGCAAAGGGACCACGGTCACCGTC | | | | | |
| | | | | | | | | | | | | | | | | TCCTCA | | | | | |
| ADI- | IGHV3- | QVQLVESG | 175 | FTFEDFA | 400 | WVRQA | 437 | GISWNG | 737 | RFILS | 981 | AKDEGS | 1242 | WGQGTL | 1286 | CAGGTGCAGCTGGTGGAGTCTGGGGGA | 1541 | QVQLVESGGG | 1824 | | |
| 75752 | 9 | GGLVQPGR | | LH | | PGKGL | | GVIGYA | | RDNDK | | EGDQQP | | VTVSS | | GGCTTGGTACAGCCTGGCAGGTCCCTG | | LVQPGRSLTL | | | |
| | | SLTLSCAA | | | | EWVS | | DSVKG | | NSLYL | | LDY | | | | ACACTCTCCTGTGCAGCCTCTGGATTC | | SCAASGFTFE | | | |
| | | SG | | | | | | | | HMRGL | | | | | | ACCTTTGAAGATTTTGCCTTGCACTGG | | DFALHWVRQA | | | |
| | | | | | | | | | | RAEDT | | | | | | GTCCGGCAAGCTCCAGGGAAGGGCCTG | | PGKGLEWVSG | | | |
| | | | | | | | | | | ALYYC | | | | | | GAGTGGGTCTCAGGTATTAGTTGGAAT | | ISWNGGVIGY | | | |
| | | | | | | | | | | | | | | | | GGTGGTGTCATAGGCTATGCGGACTCT | | ADSVKGRFIL | | | |
| | | | | | | | | | | | | | | | | GTGAAGGGCCGATTCATCCTCTCCAGA | | SRDNDKNSLY | | | |
| | | | | | | | | | | | | | | | | GACAACGACAAGAATTCCCTGTATCTA | | LHMRGLRAED | | | |
| | | | | | | | | | | | | | | | | CATATGCGGGGTCTGAGAGCTGAGGAC | | TALYYCAKDE | | | |
| | | | | | | | | | | | | | | | | ACGGCCTTGTATTACTGTGCAAAAGAT | | GSEGDQQPLD | | | |
| | | | | | | | | | | | | | | | | GAAGGATCTGAGGGGGACCAGCAGCCC | | YWGQGTLVTV | | | |
| | | | | | | | | | | | | | | | | CTTGACTACTGGGGCCAGGGAACCCTG | | SS | | | |
| | | | | | | | | | | | | | | | | GTCACCGTCTCCTCA | | | | | |
| ADI- | IGHV3- | QVQLQQSG | 110 | FTFSNFW | 401 | WVRQA | 486 | RINSDG | 738 | RFTIS | 821 | ARDLES | 1169 | WGQGTL | 1286 | CAGGTGCAGCTGCAGCAGTCTGGGGGA | 1542 | QVQLQQSGGG | 1825 | | |
| 75676 | 74 | GGLVQPGG | | MH | | PGKGL | | GSTSYA | | RDNAK | | GSFHPG | | VTVSS | | GGCTTAGTTCAGCCTGGGGGGTCCCTG | | LVQPGGSLRL | | | |
| | | SLRLSCAA | | | | VWVS | | DSVKG | | NTLYL | | LVRVP | | | | AGACTCTCCTGTGCAGCCTCTGGATTC | | SCAASGFTFS | | | |
| | | SG | | | | | | | | QMNSL | | | | | | ACCTTCAGTAACTTCTGGATGCACTGG | | NFWMHWVRQA | | | |
| | | | | | | | | | | RAEDT | | | | | | GTCCGCCAAGCTCCAGGGAAGGGGCTG | | PGKGLVWVSR | | | |
| | | | | | | | | | | AVYYC | | | | | | GTGTGGGTCTCACGTATTAATAGTGAT | | INSDGGSTSY | | | |
| | | | | | | | | | | | | | | | | GGGGGTAGCACAAGCTACGCGGACTCC | | ADSVKGRFTI | | | |
| | | | | | | | | | | | | | | | | GTGAAGGGCCGATTCACCATCTCCAGA | | SRDNAKNTLY | | | |
| | | | | | | | | | | | | | | | | GACAACGCCAAGAACACGCTGTATCTG | | LQMNSLRAED | | | |
| | | | | | | | | | | | | | | | | CAAATGAACAGTCTGAGAGCCGAGGAC | | TAVYYCARDL | | | |
| | | | | | | | | | | | | | | | | ACGGCTGTATATTACTGTGCAAGAGAC | | ESGSFHPGLV | | | |
| | | | | | | | | | | | | | | | | CTGGAAAGTGGGAGCTTTCATCCCGGC | | RVPWGQGTLV | | | |
| | | | | | | | | | | | | | | | | CTGGTTCGGGTCCCCTGGGGCCAGGGA | | TVSS | | | |
| | | | | | | | | | | | | | | | | ACCCTGGTCACCGTCTCTTCA | | | | | |
| ADI- | IGHV- | QVQLVQSG | 50 | GTFSSFP | 402 | WVRQA | 433 | RIIPIL | 739 | RVTIT | 982 | ARDVGY | 1243 | WGQGTL | 1286 | CAGGTGCAGCTGGTGCAGTCTGGGGCT | 1543 | QVQLVQSGAE | 1826 | | |
| 75731 | 69 | AEVKKPGS | | IS | | PGQGL | | GVADYA | | ADKST | | SGSGSS | | VTVSS | | GAGGTGAAGAAGCCTGGGTCCTCGGTG | | VKKPGSSVKV | | | |
| | | SVKVSCKA | | | | EWMG | | QKFQG | | GTAYM | | YYFDS | | | | AAGGTCTCCTGCAAGGCTTCTGGAGGC | | SCKASGGTFS | | | |
| | | SG | | | | | | | | ELSSL | | | | | | ACCTTCAGCAGCTTTCCTATTAGTTGG | | SFPISWVRQA | | | |
| | | | | | | | | | | RSEDT | | | | | | GTGCGACAGGCCCCTGGACAAGGGCTT | | PGQGLEWMGR | | | |
| | | | | | | | | | | AVYYC | | | | | | GAGTGGATGGGAAGGATCATCCCTATC | | IIPILGVADY | | | |
| | | | | | | | | | | | | | | | | CTTGGTGTAGCAGACTACGCACAAAAG | | AQKFQGRVTI | | | |
| | | | | | | | | | | | | | | | | TTCCAGGGCAGAGTCACGATTACCGCG | | TADKSTGTAY | | | |
| | | | | | | | | | | | | | | | | GACAAATCCACGGGCACCGCGTATATG | | MELSSLRSED | | | |
| | | | | | | | | | | | | | | | | GAGTTGAGCAGCCTGAGATCTGAGGAC | | TAVYYCARDV | | | |
| | | | | | | | | | | | | | | | | ACGGCCGTATATTACTGTGCGAGAGAT | | GYSGSGSSYY | | | |
| | | | | | | | | | | | | | | | | GTGGGTTACTCTGGCTCGGGGAGTTCT | | FDSWGQGTLV | | | |
| | | | | | | | | | | | | | | | | TACTACTTTGACTCCTGGGGCCAGGGA | | TVSS | | | |
| | | | | | | | | | | | | | | | | ACCCTGGTCACCGTCTCCTCA | | | | | |
| ADI- | IGHV1- | QVQLQQSG | 86 | VPLSNYA | 403 | WVRQA | 509 | GITPFS | 740 | RVTIT | 983 | ALLNRG | 1244 | WGQGTT | 1287 | CAGGTGCAGCTGCAGCAGTCTGGGGCT | 1544 | QVQLQQSGAE | 1827 | | |
| 75837 | 69 | AEVKKPGS | | IS | | PGQGL | | GTAKHA | | ADEST | | YRSSWF | | VTVSS | | GAGGTGAAGAAGCCTGGGTCCTCGGTG | | VKKPGSSVKV | | | |
| | | SVKVSCKA | | | | DWLG | | QKFQD | | NTVFM | | ERGGYY | | | | AAGGTCTCCTGCAAGGCTTCTGGAGTC | | SCKASGVPLS | | | |
| | | SG | | | | | | | | ELSSL | | YYGMDV | | | | CCCCTCAGCAACTATGCTATCAGCTGG | | NYAISWVRQA | | | |
| | | | | | | | | | | RSEDS | | | | | | GTGCGGCAGGCCCCTGGACAAGGGCTT | | PGQGLDWLGG | | | |
| | | | | | | | | | | AVYYC | | | | | | GACTGGTTGGGAGGAATTACTCCGTTT | | ITPFSGTAKH | | | |
| | | | | | | | | | | | | | | | | TCTGGCACAGCCAAGCACGCACAGAAG | | AQKFQDRVTI | | | |
| | | | | | | | | | | | | | | | | TTCCAGGACAGAGTCACGATTACCGCG | | TADESTNTVF | | | |
| | | | | | | | | | | | | | | | | GACGAATCCACGAACACAGTCTTCATG | | MELSSLRSED | | | |
| | | | | | | | | | | | | | | | | GAGTTGAGCAGCCTGAGATCTGAGGAC | | SAVYYCALLN | | | |
| | | | | | | | | | | | | | | | | TCGGCCGTCTATTACTGTGCCCTCCTA | | RGYRSSWFER | | | |
| | | | | | | | | | | | | | | | | AATCGGGGATATCGCAGCAGCTGGTTT | | GGYYYYGMDV | | | |
| | | | | | | | | | | | | | | | | GAAAGGGGGGGTTACTATTACTACGGC | | WGQGTTVTVS | | | |
| | | | | | | | | | | | | | | | | ATGGACGTCTGGGGCCAAGGGACCACG | | S | | | |
| | | | | | | | | | | | | | | | | GTCACCGTCTCCTCA | | | | | |
| ADI- | IGHV3- | QVHAGAVW | 176 | FIFSNYA | 404 | WVRQA | 431 | VISFDG | 741 | RFTIS | 984 | AKRGLG | 1245 | WGQGTL | 1286 | CAGGTACACGCTGGTGCAGTCTGGGGG | 1545 | QVHAGAVWGR | 1828 | | |
| 75728 | 30 | GRRGPAWE | | MH | | PGKGL | | DNIYYA | | RDNSK | | YCSAGT | | VTVSS | | AGGCGTGGTCCAGCCTGGGAGGTCCTG | | RGPAWEVLRL | | | |
| | | VLRLSCEG | | | | EWVA | | DSVKG | | KTMYL | | CFGEGE | | | | CGACTCTCCTGTGAAGGGTCTGGATTC | | SCEGSGFIFS | | | |
| | | SG | | | | | | | | QMNSL | | GGEFDY | | | | ATCTTCAGCAATTATGCCATGCACTGG | | NYAMHWVRQA | | | |
| | | | | | | | | | | RADDT | | | | | | GTCCGCCAGGCTCCAGGCAAGGGGCTG | | PGKGLEWVAV | | | |
| | | | | | | | | | | AVYYC | | | | | | GAGTGGGTGGCTGTCATATCATTTGAT | | ISFDGDNIYY | | | |
| | | | | | | | | | | | | | | | | GGAGATAATATATACTATGCAGACTCC | | ADSVKGRFTI | | | |
| | | | | | | | | | | | | | | | | GTGAAGGGCCGATTCACCATCTCCAGA | | SRDNSKKTMY | | | |
| | | | | | | | | | | | | | | | | GACAATTCCAAGAAGACGATGTATCTG | | LQMNSLRADD | | | |
| | | | | | | | | | | | | | | | | CAAATGAACAGCCTGAGAGCTGATGAC | | TAVYYCAKRG | | | |
| | | | | | | | | | | | | | | | | ACGGCTGTGTATTACTGTGCGAAACGG | | LGYCSAGTCF | | | |
| | | | | | | | | | | | | | | | | GGACTAGGATATTGCAGTGCTGGTACG | | GEGEGGEFDY | | | |
| | | | | | | | | | | | | | | | | TGCTTCGGCGAGGGTGAGGGAGGCGAA | | WGQGTLVTVS | | | |
| | | | | | | | | | | | | | | | | TTCGACTACTGGGGCCAGGGAACCCTG | | S | | | |
| | | | | | | | | | | | | | | | | GTCACCGTCTCCTCA | | | | | |
| ADI- | IGHV4- | QVQLQQWG | 34 | GSFGVTF | 405 | WIRQT | 510 | EISQSG | 742 | RLSIS | 985 | ARGRGS | 1246 | WGQGAL | 1285 | CAGGTACAGCTGCAGCAGTGGGGCGCG | 1546 | QVQLQQWGAG | 1829 | | |
| 75601 | 34 | AGLLKPSE | | SGGSFTG | | PGKGL | | TTNSNP | | IDTSK | | GSGSDS | | VTVSS | | GGACTATTGAAGCCCTCGGAGACCCTG | | LLKPSETLSL | | | |
| | | TLSLTCAV | | HYWN | | EWLG | | SLKS | | SHFSL | | FDS | | | | TCCCTCACCTGCGCTGTCTCTGGTGGC | | TCAVSGGSFG | | | |
| | | SG | | | | | | | | KLRSV | | | | | | TCCTTCGGTGTGACTTTCTCTGGTGGG | | VTFSGGSFTG | | | |
| | | | | | | | | | | NAADT | | | | | | TCCTTCACTGGTCATTACTGGAACTGG | | HYWNWIRQTP | | | |
| | | | | | | | | | | AIYYC | | | | | | ATCCGCCAGACCCCAGGGAAGGGGCTG | | GKGLEWLGEI | | | |
| | | | | | | | | | | | | | | | | GAGTGGCTTGGAGAAATCAGTCAGAGT | | SQSGTTNSNP | | | |
| | | | | | | | | | | | | | | | | GGTACAACCAATTCCAACCCGTCCCTC | | SLKSRLSISI | | | |
| | | | | | | | | | | | | | | | | AAGAGTCGGCTCTCCATATCAATAGAC | | DTSKSHFSLK | | | |
| | | | | | | | | | | | | | | | | ACGTCCAAGAGCCATTTCTCCCTGAAG | | LRSVNAADTA | | | |
| | | | | | | | | | | | | | | | | CTGAGGTCTGTGAACGCCGCGGACACG | | IYYCARGRGS | | | |
| | | | | | | | | | | | | | | | | GCTATCTATTACTGTGCGAGAGGCCGC | | GSGSDSFDSW | | | |
| | | | | | | | | | | | | | | | | GGTTCCGGTTCAGGGAGTGACTCTTTT | | GQGALVTVSS | | | |
| | | | | | | | | | | | | | | | | GACTCCTGGGGCCAGGGGGCCCTGGTC | | | | | |
| | | | | | | | | | | | | | | | | ACCGTCTCCTCA | | | | | |
| ADI- | IGHV1- | QVQLVQSG | 35 | YTFTNYY | 406 | WVRQV | 511 | LINPSG | 743 | RVTMT | 986 | ARDPGV | 1247 | WGQGTL | 1286 | CAGGTCCAGCTGGTGCAGTCTGGGGCT | 1547 | QVQLVQSGAE | 1830 | | |
| 75870 | 46 | AEVKKPGA | | ML | | PGQGL | | GSTSYA | | RDTST | | VDPQYP | | VTVSS | | GAGGTGAAGAAGCCTGGGGCCTCAGTG | | VKKPGASVKV | | | |
| | | SVKVSCKA | | | | EWMG | | QKFQG | | STVYM | | HPLPRF | | | | AAGGTTTCCTGCAAGGCATCTGGATAC | | SCKASGYTFT | | | |
| | | SG | | | | | | | | ELSSL | | | | | | ACCTTCACCAACTACTATATGCTCTGG | | NYYMLWVRQV | | | |
| | | | | | | | | | | RSEDT | | | | | | GTGCGCCAGGTCCCTGGACAAGGGCTT | | PGQGLEWMGL | | | |
| | | | | | | | | | | AMYYC | | | | | | GAGTGGATGGGATTAATCAACCCTAGT | | INPSGGSTSY | | | |
| | | | | | | | | | | | | | | | | GGTGGTAGCACAAGCTACGCACAGAAG | | AQKFQGRVTM | | | |
| | | | | | | | | | | | | | | | | TTCCAGGGCAGAGTCACCATGACCAGG | | TRDTSTSTVY | | | |
| | | | | | | | | | | | | | | | | GACACGTCCACGAGCACAGTCTACATG | | MELSSLRSED | | | |
| | | | | | | | | | | | | | | | | GAGCTGAGCAGCCTGAGATCTGAGGAC | | TAMYYCARDP | | | |
| | | | | | | | | | | | | | | | | ACGGCCATGTATTACTGTGCGAGAGAT | | GVVDPQYPHP | | | |
| | | | | | | | | | | | | | | | | CCGGGTGTGGTGGACCCACAATACCCC | | LPRFWGQGTL | | | |
| | | | | | | | | | | | | | | | | CACCCCCTGCCTCGGTTCTGGGGCCAG | | VTVSS | | | |
| | | | | | | | | | | | | | | | | GGAACCCTGGTCACCGTCTCCTCA | | | | | |
| ADI- | IGHV1- | QVQLVQSG | 177 | GTFSSYS | 407 | WVRQA | 433 | TIIPIL | 744 | RVTIT | 987 | AREYCS | 1248 | WGQGTL | 1286 | CAGGTGCAGCTGGTGCAGTCTGGGGCT | 1548 | QVQLVQSGAE | 1831 | | |
| 75643 | 69 | AEVRVPGS | | IT | | PGQGL | | GVANYA | | ADKST | | GDSCRT | | VTVSS | | GAGGTGAGGGTGCCTGGGTCCTCGGTG | | VRVPGSSVKV | | | |
| | | SVKVSCKA | | | | EWMG | | PKFQG | | STAYM | | VNWFDP | | | | AAGGTCTCCTGCAAGGCTTCTGGAGGC | | SCKASGGTFS | | | |
| | | SG | | | | | | | | EVTSL | | | | | | ACCTTCAGTAGTTATAGTATCACCTGG | | SYSITWVRQA | | | |
| | | | | | | | | | | TSEDT | | | | | | GTGCGACAGGCCCCTGGACAAGGGCTT | | PGQGLEWMGT | | | |
| | | | | | | | | | | AIYYC | | | | | | GAGTGGATGGGAACGATCATCCCTATC | | IIPILGVANY | | | |
| | | | | | | | | | | | | | | | | CTTGGCGTAGCAAACTACGCACCGAAG | | APKFQGRVTI | | | |
| | | | | | | | | | | | | | | | | TTCCAGGGCAGAGTCACCATTACCGCG | | TADKSTSTAY | | | |
| | | | | | | | | | | | | | | | | GACAAATCCACGAGCACAGCCTACATG | | MEVTSLTSED | | | |
| | | | | | | | | | | | | | | | | GAGGTGACCAGCCTGACATCTGAGGAC | | TAIYYCAREY | | | |
| | | | | | | | | | | | | | | | | ACGGCCATATATTACTGTGCGAGAGAA | | CSGDSCRTVN | | | |
| | | | | | | | | | | | | | | | | TATTGTAGTGGTGACAGCTGCCGAACC | | WFDPWGQGTL | | | |
| | | | | | | | | | | | | | | | | GTTAACTGGTTCGACCCCTGGGGCCAG | | VTVSS | | | |
| | | | | | | | | | | | | | | | | GGAACCCTGGTCACCGTCTCCTCA | | | | | |
| ADI- | IGHV4- | QVQLQESG | 67 | GSINNYY | 408 | WIRQP | 445 | YVYFSG | 745 | RVAIS | 988 | ARGLTY | 1249 | WGQGTT | 1287 | CAGGTGCAGCTGCAGGAGTCGGGCCCA | 1549 | QVQLQESGPG | 1832 | | |
| 75740 | 59 | PGLVKPSE | | WN | | PGKGL | | STNYNP | | LDRSK | | NGYDVE | | VTVSS | | GGACTGGTGAAGCCTTCGGAGACCCTG | | LVKPSETLSL | | | |
| | | TLSLTCTV | | | | EWIG | | SLKS | | KQFSL | | AFDI | | | | TCCCTCACCTGCACTGTCTCTGGTGGC | | TCTVSGGSIN | | | |
| | | SG | | | | | | | | KLTSV | | | | | | TCCATCAATAATTACTACTGGAACTGG | | NYYWNWIRQP | | | |
| | | | | | | | | | | TAADT | | | | | | ATCCGGCAGCCCCCAGGGAAGGGACTG | | PGKGLEWIGY | | | |
| | | | | | | | | | | AVYYC | | | | | | GAGTGGATTGGGTATGTCTATTTCAGT | | VYFSGSTNYN | | | |
| | | | | | | | | | | | | | | | | GGGAGCACCAATTACAACCCCTCCCTC | | PSLKSRVAIS | | | |
| | | | | | | | | | | | | | | | | AAGAGTCGAGTCGCCATATCACTAGAC | | LDRSKKQFSL | | | |
| | | | | | | | | | | | | | | | | AGGTCCAAGAAGCAGTTCTCCCTGAAG | | KLTSVTAADT | | | |
| | | | | | | | | | | | | | | | | CTGACCTCTGTGACCGCTGCGGACACG | | AVYYCARGLT | | | |
| | | | | | | | | | | | | | | | | GCCGTGTATTACTGTGCAAGGGGCCTT | | YNGYDVEAFD | | | |
| | | | | | | | | | | | | | | | | ACATATAATGGCTACGATGTAGAAGCT | | IWGQGTTVTV | | | |
| | | | | | | | | | | | | | | | | TTTGATATTTGGGGCCAAGGGACCACG | | SS | | | |
| | | | | | | | | | | | | | | | | GTCACCGTCTCCTCA | | | | | |
| ADI- | IGHV4- | QVQLQQSG | 178 | GSVNTWS | 409 | WIRQR | 512 | HISYSG | 746 | RIAMS | 989 | ARLVRG | 1250 | WGQGTT | 1287 | CAGGTGCAGCTGCAGCAGTCTGGCCCA | 1550 | QVQLQQSGPG | 1833 | | |
| 75720 | 31 | PGLLKPSQ | | YYWG | | PGKGL | | STYYNP | | VDTSK | | GLSYGS | | VTVSS | | GGACTGCTGAAGCCTTCACAGACCCTG | | LLKPSQTLSL | | | |
| | | TLSLTCTV | | | | EWIG | | SLKS | | NQFSL | | DAFDL | | | | TCCCTCACCTGCACTGTCTCTGGTGGC | | TCTVSGGSVN | | | |
| | | SG | | | | | | | | KLRSV | | | | | | TCCGTCAATACTTGGAGTTACTACTGG | | TWSYYWGWIR | | | |
| | | | | | | | | | | TVADT | | | | | | GGCTGGATCCGCCAGCGCCCAGGGAAG | | QRPGKGLEWI | | | |
| | | | | | | | | | | AVYYC | | | | | | GGCCTGGAGTGGATTGGGCACATCTCT | | GHISYSGSTY | | | |
| | | | | | | | | | | | | | | | | TACAGTGGGAGCACCTACTACAACCCG | | YNPSLKSRIA | | | |
| | | | | | | | | | | | | | | | | TCCCTCAAGAGTCGAATTGCCATGTCA | | MSVDTSKNQF | | | |
| | | | | | | | | | | | | | | | | GTAGACACGTCTAAGAACCAGTTCTCC | | SLKLRSVTVA | | | |
| | | | | | | | | | | | | | | | | CTGAAACTGAGGTCTGTGACGGTCGCG | | DTAVYYCARL | | | |
| | | | | | | | | | | | | | | | | GACACGGCCGTGTATTACTGTGCGAGA | | VRGGLSYGSD | | | |
| | | | | | | | | | | | | | | | | CTTGTGAGGGGTGGACTCAGCTATGGC | | AFDLWGQGTT | | | |
| | | | | | | | | | | | | | | | | TCTGACGCTTTTGATCTCTGGGGCCAA | | VTVSS | | | |
| | | | | | | | | | | | | | | | | GGGACCACGGTCACCGTCTCCTCA | | | | | |
| ADI- | IGHV3- | QVQLVQSG | 179 | FTFSSYA | 199 | WVRQA | 431 | VIWNDG | 747 | RFSIS | 990 | LREYQL | 1251 | WGKGTT | 1291 | CAGGTGCAGCTGGTGCAGTCTGGGGGA | 1551 | QVQLVQSGGG | 1834 | | |
| 75794 | 33 | GGVVQPGR | | MH | | PGKGL | | SNKYYT | | RDDSK | | APPYYF | | VTVSS | | GGCGTGGTCCAGCCTGGGAGGTCCCTG | | VVQPGRSLRL | | | |
| | | SLRLSCVG | | | | EWVA | | DSVKG | | NTLDL | | MDV | | | | AGACTCTCCTGTGTAGGGTCTGGATTC | | SCVGSGFTFS | | | |
| | | SG | | | | | | | | QMNSL | | | | | | ACCTTCAGTAGCTATGCCATGCACTGG | | SYAMHWVRQA | | | |
| | | | | | | | | | | RAEDT | | | | | | GTCCGCCAGGCTCCAGGCAAGGGGCTG | | PGKGLEWVAV | | | |
| | | | | | | | | | | AVYYC | | | | | | GAGTGGGTGGCAGTTATTTGGAATGAT | | IWNDGSNKYY | | | |
| | | | | | | | | | | | | | | | | GGAAGTAATAAATATTATACAGACTCC | | TDSVKGRFSI | | | |
| | | | | | | | | | | | | | | | | GTGAAGGGCCGATTCAGTATCTCCAGA | | SRDDSKNTLD | | | |
| | | | | | | | | | | | | | | | | GACGATTCCAAGAACACGCTGGATCTG | | LQMNSLRAED | | | |
| | | | | | | | | | | | | | | | | CAAATGAACAGCCTGAGGGCCGAGGAC | | TAVYYCLREY | | | |
| | | | | | | | | | | | | | | | | ACGGCTGTCTATTATTGTTTGAGAGAA | | QLAPPYYFMD | | | |
| | | | | | | | | | | | | | | | | TATCAGCTTGCCCCCCCCTACTACTTC | | VWGKGTTVTV | | | |
| | | | | | | | | | | | | | | | | ATGGACGTCTGGGGCAAAGGGACCACG | | SS | | | |
| | | | | | | | | | | | | | | | | GTCACCGTCTCCTCA | | | | | |
| ADI- | IGHV3- | QVQLVQSG | 165 | FTFSRYA | 410 | WVRQA | 431 | VISFRE | 748 | RFTVS | 991 | ARGDIL | 1252 | WGQGTT | 1287 | CAGGTGCAGCTGGTGCAGTCTGGGGGA | 1552 | QVQLVQSGGG | 1835 | | |
| 75577 | 30 | GGVVQPGR | | MH | | PGKGL | | SDKNYA | | RDNSK | | TGYPTS | | VTVSS | | GGCGTGGTCCAGCCTGGGAGGTCCCTG | | VVQPGRSLRL | | | |
| | | SLRLSCAA | | | | EWVA | | DSVKG | | NMLYL | | KDAFDI | | | | AGACTCTCCTGTGCAGCCTCTGAATTC | | SCAASEFTFS | | | |
| | | SE | | | | | | | | QMNSL | | | | | | ACCTTCAGTCGCTATGCTATGCACTGG | | RYAMHWVRQA | | | |
| | | | | | | | | | | RAEDT | | | | | | GTCCGCCAGGCTCCAGGCAAGGGACTG | | PGKGLEWVAV | | | |
| | | | | | | | | | | AVYYC | | | | | | GAGTGGGTGGCTGTTATATCTTTTCGT | | ISFRESDKNY | | | |
| | | | | | | | | | | | | | | | | GAAAGTGATAAAAATTACGCAGACTCC | | ADSVKGRFTV | | | |
| | | | | | | | | | | | | | | | | GTGAAGGGCCGATTCACCGTCTCCAGA | | SRDNSKNMLY | | | |
| | | | | | | | | | | | | | | | | GACAATTCCAAGAATATGCTGTATCTG | | LQMNSLRAED | | | |
| | | | | | | | | | | | | | | | | CAAATGAACAGCCTGAGAGCTGAGGAC | | TAVYYCARGD | | | |
| | | | | | | | | | | | | | | | | ACGGCTGTATATTACTGTGCGCGAGGC | | ILTGYPTSKD | | | |
| | | | | | | | | | | | | | | | | GATATTTTGACTGGCTACCCGACATCA | | AFDIWGQGTT | | | |
| | | | | | | | | | | | | | | | | AAGGATGCTTTTGATATCTGGGGCCAA | | VTVSS | | | |
| | | | | | | | | | | | | | | | | GGGACCACGGTCACCGTCTCCTCA | | | | | |
| ADI- | IGHV3- | QVTLQQSG | 180 | FTFDDYA | 214 | WVRQA | 437 | GITWNS | 749 | RFIIS | 992 | AKDILS | 1253 | WGQGTT | 1287 | CAGGTCACGTTGCAGCAGTCTGGGGGA | 1553 | QVTLQQSGGG | 1836 | | |
| 75850 | 9 | GGLVQPGR | | MH | | PGKGL | | GIIGYA | | RDNAK | | ERHYFD | | VTVSS | | GGCTTGGTACAGCCTGGCAGGTCCCTG | | LVQPGRSLRL | | | |
| | | SLRLSCAA | | | | EWVS | | DSVKG | | NSLFL | | SSGSYG | | | | AGACTCTCCTGTGCAGCCTCTGGATTC | | SCAASGFTFD | | | |
| | | SG | | | | | | | | QMYSL | | MDV | | | | ACCTTTGATGATTATGCCATGCACTGG | | DYAMHWVRQA | | | |
| | | | | | | | | | | RAEDT | | | | | | GTCCGGCAAGCTCCAGGGAAGGGCCTG | | PGKGLEWVSG | | | |
| | | | | | | | | | | ALYFC | | | | | | GAGTGGGTCTCAGGTATTACTTGGAAT | | ITWNSGIIGY | | | |
| | | | | | | | | | | | | | | | | AGTGGTATCATAGGCTATGCGGACTCT | | ADSVKGRFII | | | |
| | | | | | | | | | | | | | | | | GTGAAGGGCCGATTCATCATCTCCAGA | | SRDNAKNSLF | | | |
| | | | | | | | | | | | | | | | | GACAACGCCAAGAACTCCCTGTTTCTT | | LQMYSLRAED | | | |
| | | | | | | | | | | | | | | | | CAAATGTACAGTCTGAGAGCTGAGGAC | | TALYFCAKDI | | | |
| | | | | | | | | | | | | | | | | ACGGCCTTGTATTTCTGTGCAAAAGAT | | LSERHYFDSS | | | |
| | | | | | | | | | | | | | | | | ATTTTAAGCGAGCGTCATTATTTTGAT | | GSYGMDVWGQ | | | |
| | | | | | | | | | | | | | | | | AGTAGTGGTTCCTACGGTATGGACGTC | | GTTVTVSS | | | |
| | | | | | | | | | | | | | | | | TGGGGCCAAGGGACCACGGTCACCGTC | | | | | |
| | | | | | | | | | | | | | | | | TCCTCA | | | | | |
| ADI- | IGHV1- | QVQLVQSG | 50 | GTFSSYP | 379 | WVRQA | 433 | RIIPIL | 750 | RVTIT | 832 | ARDIGY | 1254 | WGRGTL | 1288 | CAGGTCCAGCTTGTGCAGTCTGGGGCT | 1554 | QVQLVQSGAE | 1837 | | |
| 75770 | 69 | AEVKKPGS | | IS | | PGQGL | | GIPNYT | | ADKST | | SGYQSA | | VTVSS | | GAGGTGAAGAAGCCTGGGTCCTCGGTG | | VKKPGSSVKV | | | |
| | | SVKVSCKA | | | | EWMG | | QKFQG | | STAYM | | EYFDL | | | | AAGGTCTCCTGCAAGGCTTCTGGAGGC | | SCKASGGTFS | | | |
| | | SG | | | | | | | | ELSSL | | | | | | ACCTTCAGCAGCTATCCTATCAGCTGG | | SYPISWVRQA | | | |
| | | | | | | | | | | RSEDT | | | | | | GTGCGACAGGCCCCTGGACAAGGGCTT | | PGQGLEWMGR | | | |
| | | | | | | | | | | AVYYC | | | | | | GAGTGGATGGGAAGGATCATCCCTATC | | IIPILGIPNY | | | |
| | | | | | | | | | | | | | | | | CTTGGTATACCAAACTACACACAGAAG | | TQKFQGRVTI | | | |
| | | | | | | | | | | | | | | | | TTCCAGGGCAGAGTCACCATTACCGCG | | TADKSTSTAY | | | |
| | | | | | | | | | | | | | | | | GACAAATCCACGAGCACAGCCTACATG | | MELSSLRSED | | | |
| | | | | | | | | | | | | | | | | GAGCTGAGCAGCCTGAGATCTGAGGAC | | TAVYYCARDI | | | |
| | | | | | | | | | | | | | | | | ACGGCCGTGTATTACTGTGCGAGAGAT | | GYSGYQSAEY | | | |
| | | | | | | | | | | | | | | | | ATTGGATATAGTGGCTACCAATCGGCT | | FDLWGRGTLV | | | |
| | | | | | | | | | | | | | | | | GAATACTTCGATCTCTGGGGCCGTGGC | | TVSS | | | |
| | | | | | | | | | | | | | | | | ACCCTGGTCACCGTCTCCTCA | | | | | |
| ADI- | IGHV3- | QVQLVQSG | 181 | FTVSSNY | 369 | WVRQA | 437 | VIYSGG | 659 | RFTIS | 777 | ARDFYG | 1255 | WGQGTL | 1286 | CAGGTCCAGCTGGTGCAGTCTGGGGGA | 1555 | QVQLVQSGGG | 1838 | | |
| 75799 | 66 | GGLVQPGG | | MN | | PGKGL | | STYYAD | | RDNSK | | SGSPND | | VTVSS | | GGCTTGGTCCAGCCTGGGGGGTCCCTG | | LVQPGGSLRL | | | |
| | | SLRLSCVV | | | | EWVS | | SVKG | | NTLYL | | SHDY | | | | AGACTCTCCTGTGTAGTCTCTGGATTC | | SCVVSGFTVS | | | |
| | | SG | | | | | | | | QMNSL | | | | | | ACCGTCAGTAGCAACTACATGAACTGG | | SNYMNWVRQA | | | |
| | | | | | | | | | | RAEDT | | | | | | GTCCGCCAGGCTCCAGGGAAGGGGCTG | | PGKGLEWVSV | | | |
| | | | | | | | | | | AVYYC | | | | | | GAGTGGGTCTCAGTTATTTATAGCGGT | | IYSGGSTYYA | | | |
| | | | | | | | | | | | | | | | | GGTAGCACATACTACGCAGACTCCGTG | | DSVKGRFTIS | | | |
| | | | | | | | | | | | | | | | | AAGGGCAGATTCACCATCTCCAGAGAC | | RDNSKNTLYL | | | |
| | | | | | | | | | | | | | | | | AATTCCAAGAACACGCTGTATCTTCAA | | QMNSLRAEDT | | | |
| | | | | | | | | | | | | | | | | ATGAACAGCCTGAGAGCCGAGGACACG | | AVYYCARDFY | | | |
| | | | | | | | | | | | | | | | | GCTGTGTATTATTGTGCGAGAGATTTT | | GSGSPNDSHD | | | |
| | | | | | | | | | | | | | | | | TATGGTTCGGGGAGTCCTAATGACTCG | | YWGQGTLVTV | | | |
| | | | | | | | | | | | | | | | | CATGACTACTGGGGCCAGGGAACCCTG | | SS | | | |
| | | | | | | | | | | | | | | | | GTCACCGTCTCCTCA | | | | | |
| ADI- | IGHV1- | QVQLVQSG | 35 | YTFTTYG | 411 | WVRQA | 433 | WISAFN | 751 | RVTMT | 993 | ARGNCG | 1256 | WGKGTT | 1291 | CAGGTGCAGCTGGTGCAGTCTGGAGCT | 1556 | QVQLVQSGAE | 1839 | | |
| 75759 | 18 | AEVKKPGA | | IT | | PGQGL | | DNTNYA | | TDTST | | PNCAYY | | VTVSS | | GAGGTGAAGAAGCCTGGGGCCTCAGTG | | VKKPGASVKV | | | |
| | | SVKVSCKA | | | | EWMG | | QNFQG | | STAYM | | HYMDV | | | | AAGGTCTCCTGCAAGGCTTCTGGTTAC | | SCKASGYTFT | | | |
| | | SG | | | | | | | | ELRSL | | | | | | ACCTTTACCACTTATGGAATCACCTGG | | TYGITWVRQA | | | |
| | | | | | | | | | | RSDDT | | | | | | GTGCGACAGGCCCCTGGACAAGGGCTT | | PGQGLEWMGW | | | |
| | | | | | | | | | | AVYYC | | | | | | GAGTGGATGGGATGGATCAGCGCTTTC | | ISAFNDNTNY | | | |
| | | | | | | | | | | | | | | | | AACGATAACACAAACTATGCACAGAAT | | AQNFQGRVTM | | | |
| | | | | | | | | | | | | | | | | TTCCAGGGCAGAGTCACCATGACCACA | | TTDTSTSTAY | | | |
| | | | | | | | | | | | | | | | | GACACATCCACGAGCACAGCCTACATG | | MELRSLRSDD | | | |
| | | | | | | | | | | | | | | | | GAGTTGAGGAGCCTGAGATCTGACGAC | | TAVYYCARGN | | | |
| | | | | | | | | | | | | | | | | ACGGCCGTGTATTACTGTGCGAGGGGA | | CGPNCAYYHY | | | |
| | | | | | | | | | | | | | | | | AATTGTGGTCCTAATTGCGCCTATTAT | | MDVWGKGTTV | | | |
| | | | | | | | | | | | | | | | | CACTACATGGACGTCTGGGGCAAAGGG | | TVSS | | | |
| | | | | | | | | | | | | | | | | ACCACGGTCACCGTCTCCTCA | | | | | |
| ADI- | IGHV3- | QVQLVQSG | 17 | FTFEDYA | 208 | WIRQS | 513 | GISWNG | 752 | RFTIS | 994 | AKDEGS | 1257 | WGQGTL | 1286 | CAGGTGCAGCTGGTGCAGTCTGGGGGA | 1557 | QVQLVQSGGG | 1840 | | |
| 75803 | 9 | GGLVQPGR | | MH | | PGKGL | | GIIGYA | | RDNDK | | EGDQLP | | VTVSS | | GGCTTGGTACAGCCTGGCAGGTCCCTG | | LVQPGRSLRL | | | |
| | | SLRLSCAA | | | | EWVS | | DSVKG | | NSLYL | | LDY | | | | AGACTCTCCTGTGCAGCCTCTGGATTC | | SCAASGFTFE | | | |
| | | SG | | | | | | | | HIRSL | | | | | | ACCTTTGAGGATTATGCCATGCACTGG | | DYAMHWIRQS | | | |
| | | | | | | | | | | KAEDT | | | | | | ATCCGGCAATCTCCAGGGAAGGGCCTG | | PGKGLEWVSG | | | |
| | | | | | | | | | | ALYYC | | | | | | GAGTGGGTCTCAGGTATTAGTTGGAAT | | ISWNGGIIGY | | | |
| | | | | | | | | | | | | | | | | GGTGGTATCATAGGCTATGCGGACTCT | | ADSVKGRFTI | | | |
| | | | | | | | | | | | | | | | | GTGAAGGGCCGATTCACCATCTCCAGA | | SRDNDKNSLY | | | |
| | | | | | | | | | | | | | | | | GACAACGACAAGAACTCCCTGTATCTG | | LHIRSLKAED | | | |
| | | | | | | | | | | | | | | | | CATATTAGGAGTCTGAAAGCTGAGGAC | | TALYYCAKDE | | | |
| | | | | | | | | | | | | | | | | ACGGCCTTGTATTACTGTGCAAAAGAT | | GSEGDQLPLD | | | |
| | | | | | | | | | | | | | | | | GAAGGATCTGAGGGGGACCAGCTGCCC | | YWGQGTLVTV | | | |
| | | | | | | | | | | | | | | | | CTTGACTACTGGGGCCAGGGAACCCTG | | SS | | | |
| | | | | | | | | | | | | | | | | GTCACCGTCTCCTCA | | | | | |
| ADI- | IGHV1- | RCTLQQSG | 182 | GTFSGFP | 412 | WVRQA | 482 | RIIPIL | 739 | RVTLT | 995 | ARDAGY | 1258 | WGQGAL | 1285 | AGGTGCACGCTGCAGCAGTCTGGGGCT | 1558 | RCTLQQSGAE | 1841 | | |
| 75710 | 69 | AEVKKPGS | | IS | | PEQGL | | GVADYA | | ADKST | | SGSGSS | | VTVSS | | GAGGTGAAGAAGCCTGGGTCCTCGGTG | | VKKPGSSVKV | | | |
| | | SVKVSCKA | | | | EWMG | | QKFQG | | GTAYM | | YYFDY | | | | AAGGTCTCCTGCAAGGCTTCTGGAGGC | | SCKASGGTFS | | | |
| | | SG | | | | | | | | ELSSL | | | | | | ACCTTCAGCGGTTTTCCCATCAGCTGG | | GFPISWVRQA | | | |
| | | | | | | | | | | RSEDT | | | | | | GTGCGACAGGCCCCTGAACAAGGGCTT | | PEQGLEWMGR | | | |
| | | | | | | | | | | AVYYC | | | | | | GAGTGGATGGGAAGGATCATCCCTATC | | IIPILGVADY | | | |
| | | | | | | | | | | | | | | | | CTTGGTGTAGCAGACTACGCACAGAAA | | AQKFQGRVTL | | | |
| | | | | | | | | | | | | | | | | TTCCAGGGCAGAGTCACGCTTACCGCG | | TADKSTGTAY | | | |
| | | | | | | | | | | | | | | | | GACAAATCCACGGGCACAGCGTACATG | | MELSSLRSED | | | |
| | | | | | | | | | | | | | | | | GAGCTGAGCAGCCTGAGGTCTGAAGAC | | TAVYYCARDA | | | |
| | | | | | | | | | | | | | | | | ACGGCCGTGTATTACTGTGCGAGAGAT | | GYSGSGSSYY | | | |
| | | | | | | | | | | | | | | | | GCGGGTTACTCTGGTTCGGGGAGTTCT | | FDYWGQGALV | | | |
| | | | | | | | | | | | | | | | | TACTACTTTGACTACTGGGGCCAGGGA | | TVSS | | | |
| | | | | | | | | | | | | | | | | GCCCTGGTCACCGTCTCCTCA | | | | | |
| ADI- | IGHV3- | QVQLQESG | 183 | FTFDDYA | 336 | WVRQA | 437 | GATWNS | 753 | RFIIS | 996 | AKDYYG | 1259 | WGPGTT | 1295 | CAGGTCCAGCTGCAGGAGTCTGGGGGA | 1559 | QVQLQESGGG | 1842 | | |
| 75605 | 9 | GGLVQPGR | | IH | | PGKGL | | GTIGYA | | RDNAK | | SGSNSP | | VTVSS | | GGCTTGGTACAGCCTGGCAGGTCCCTG | | LVQPGRSLRL | | | |
| | | SLRLSCVA | | | | EWVS | | DSVEG | | NSLYL | | RDHYYG | | | | AGACTCTCCTGTGTAGCCTCTGGATTC | | SCVASGFTFD | | | |
| | | SG | | | | | | | | QMNSL | | MDV | | | | ACCTTTGATGATTATGCCATACACTGG | | DYAIHWVRQA | | | |
| | | | | | | | | | | RVEDT | | | | | | GTCCGGCAAGCTCCAGGGAAGGGCCTG | | PGKGLEWVSG | | | |
| | | | | | | | | | | ALYYC | | | | | | GAGTGGGTCTCAGGTGCTACTTGGAAT | | ATWNSGTIGY | | | |
| | | | | | | | | | | | | | | | | AGTGGTACCATAGGCTATGCGGACTCT | | ADSVEGRFII | | | |
| | | | | | | | | | | | | | | | | GTCGAGGGCCGATTCATCATCTCCAGA | | SRDNAKNSLY | | | |
| | | | | | | | | | | | | | | | | GACAACGCCAAGAACTCCCTGTATCTG | | LQMNSLRVED | | | |
| | | | | | | | | | | | | | | | | CAGATGAACAGTCTGAGAGTTGAGGAC | | TALYYCAKDY | | | |
| | | | | | | | | | | | | | | | | ACGGCCTTGTATTATTGTGCAAAAGAT | | YGSGSNSPRD | | | |
| | | | | | | | | | | | | | | | | TACTATGGTTCAGGGAGCAACAGTCCC | | HYYGMDVWGP | | | |
| | | | | | | | | | | | | | | | | AGGGACCACTATTACGGTATGGACGTC | | GTTVTVSS | | | |
| | | | | | | | | | | | | | | | | TGGGGCCCAGGGACCACGGTCACCGTC | | | | | |
| | | | | | | | | | | | | | | | | TCCTCA | | | | | |
| ADI- | IGHV1- | QVQLVQSG | 184 | GTFSTYT | 413 | WVRQA | 514 | GIIPLI | 754 | RVSIT | 997 | GGSSDP | 1260 | WGQGTL | 1286 | CAGGTGCAGCTGGTGCAGTCTGGGGCT | 1560 | QVQLVQSGAE | 1843 | | |
| 75680 | 69 | AEVKKPGS | | FS | | SGQGL | | GRANYA | | ADEPT | | PLRFWT | | VTVSS | | GAGGTGAAGAAGCCTGGGTCCTCGGTG | | VKKPGSSVKV | | | |
| | | SVKVSCKP | | | | EWMG | | QKFQG | | STVYL | | LDN | | | | AAGGTCTCCTGCAAGCCTGTTGGAGGC | | SCKPVGGTFS | | | |
| | | VG | | | | | | | | ELSRL | | | | | | ACCTTCAGCACCTATACTTTCAGTTGG | | TYTFSWVRQA | | | |
| | | | | | | | | | | KSEDT | | | | | | GTGCGACAGGCCTCTGGACAAGGGCTT | | SGQGLEWMGG | | | |
| | | | | | | | | | | AVYYC | | | | | | GAGTGGATGGGAGGGATTATCCCTTTG | | IIPLIGRANY | | | |
| | | | | | | | | | | | | | | | | ATTGGTAGAGCCAACTACGCACAGAAG | | AQKFQGRVSI | | | |
| | | | | | | | | | | | | | | | | TTCCAGGGCAGAGTCTCGATTACCGCG | | TADEPTSTVY | | | |
| | | | | | | | | | | | | | | | | GACGAACCCACGAGCACAGTCTATCTG | | LELSRLKSED | | | |
| | | | | | | | | | | | | | | | | GAACTGAGCAGACTGAAATCTGAAGAC | | TAVYYCGGSS | | | |
| | | | | | | | | | | | | | | | | ACGGCCGTCTATTATTGTGGGGGATCC | | DPPLRFWTLD | | | |
| | | | | | | | | | | | | | | | | TCCGACCCTCCACTACGATTTTGGACT | | NWGQGTLVTV | | | |
| | | | | | | | | | | | | | | | | CTTGACAACTGGGGCCAGGGAACCCTG | | SS | | | |
| | | | | | | | | | | | | | | | | GTCACCGTCTCCTCA | | | | | |
| ADI- | IGHV1- | QVQLVQSG | 184 | GTFSTYT | 414 | WVRQA | 514 | GIIPLI | 754 | RVSIT | 998 | GGSSDP | 1260 | WGQGTL | 1286 | CAGGTGCAGCTGGTGCAGTCTGGGGCT | 1561 | QVQLVQSGAE | 1844 | | |
| 75691 | 69 | AEVKKPGS | | FN | | SGQGL | | GRANYA | | ADEPT | | PLRFWT | | VTVSS | | GAGGTGAAGAAGCCTGGGTCCTCGGTG | | VKKPGSSVKV | | | |
| | | SVKVSCKP | | | | EWMG | | QKFQG | | STVYI | | LDN | | | | AAGGTCTCCTGCAAGCCTGTTGGAGGC | | SCKPVGGTFS | | | |
| | | VG | | | | | | | | ELSRL | | | | | | ACCTTCAGCACCTATACTTTCAACTGG | | TYTFNWVRQA | | | |
| | | | | | | | | | | KSEDT | | | | | | GTGCGACAGGCCTCTGGACAAGGGCTT | | SGQGLEWMGG | | | |
| | | | | | | | | | | AVYYC | | | | | | GAGTGGATGGGAGGGATCATCCCTTTA | | IIPLIGRANY | | | |
| | | | | | | | | | | | | | | | | ATTGGTAGAGCCAACTACGCACAGAAG | | AQKFQGRVSI | | | |
| | | | | | | | | | | | | | | | | TTCCAGGGCAGAGTCTCGATTACCGCG | | TADEPTSTVY | | | |
| | | | | | | | | | | | | | | | | GACGAACCCACCAGCACAGTCTACATA | | IELSRLKSED | | | |
| | | | | | | | | | | | | | | | | GAACTGAGCAGACTGAAATCTGAAGAC | | TAVYYCGGSS | | | |
| | | | | | | | | | | | | | | | | ACGGCCGTGTATTACTGTGGGGGATCC | | DPPLRFWTLD | | | |
| | | | | | | | | | | | | | | | | TCCGACCCTCCACTACGATTTTGGACT | | NWGQGTLVTV | | | |
| | | | | | | | | | | | | | | | | CTTGACAACTGGGGCCAGGGAACCCTG | | SS | | | |
| | | | | | | | | | | | | | | | | GTCACCGTCTCCTCA | | | | | |
| ADI- | IGHV3- | QVQLVQSG | 185 | FTFGDYA | 415 | WVRQA | 432 | FIRSKA | 755 | RFTIS | 999 | TREGGV | 1261 | WGQGTL | 1286 | CAGGTGCAGCTGGTGCAGTCTGGGGGA | 1562 | QVQLVQSGGG | 1845 | | |
| 75573 | 49 | GGLVQPGR | | MN | | PGKGL | | YGGTTE | | RDDSK | | GVYRDW | | VTVSS | | GGCTTGGTACAGCCAGGGCGGTCCCTG | | LVQPGRSLRL | | | |
| | | SLRLSCTA | | | | EWVG | | YAASVK | | SIAYL | | FDP | | | | AGACTCTCCTGTACAGCTTCTGGATTC | | SCTASGFTFG | | | |
| | | SG | | | | | | G | | QMNSL | | | | | | ACCTTTGGTGATTATGCTATGAACTGG | | DYAMNWVRQA | | | |
| | | | | | | | | | | KTEDT | | | | | | GTCCGCCAGGCTCCAGGGAAGGGGCTG | | PGKGLEWVGF | | | |
| | | | | | | | | | | AVYYC | | | | | | GAGTGGGTAGGTTTCATTAGAAGCAAA | | IRSKAYGGTT | | | |
| | | | | | | | | | | | | | | | | GCTTATGGTGGGACAACAGAATACGCC | | EYAASVKGRF | | | |
| | | | | | | | | | | | | | | | | GCGTCTGTGAAAGGCAGATTCACCATC | | TISRDDSKSI | | | |
| | | | | | | | | | | | | | | | | TCAAGAGATGATTCCAAAAGCATCGCC | | AYLQMNSLKT | | | |
| | | | | | | | | | | | | | | | | TATCTGCAAATGAACAGCCTGAAAACC | | EDTAVYYCTR | | | |
| | | | | | | | | | | | | | | | | GAGGACACAGCCGTGTATTACTGTACT | | EGGVGVYRDW | | | |
| | | | | | | | | | | | | | | | | AGAGAGGGGGGGGTGGGGGTATATCGG | | FDPWGQGTLV | | | |
| | | | | | | | | | | | | | | | | GACTGGTTCGACCCCTGGGGCCAGGGA | | TVSS | | | |
| | | | | | | | | | | | | | | | | ACCCTGGTCACCGTCTCCTCA | | | | | |
| ADI- | IGHV1- | QVQLQQSG | 86 | GTFNSYA | 416 | WVRQA | 433 | GIITVL | 756 | RVTIV | 1000 | ARVGEN | 1262 | WGQGTT | 1287 | CAGGTCCAGCTGCAGCAGTCTGGGGCT | 1563 | QVQLQQSGAE | 1846 | | |
| 75580 | 69 | AEVKKPGS | | VS | | PGQGL | | RTTKYA | | ADEST | | LVSLGG | | VTVSS | | GAGGTGAAGAAGCCCGGGTCCTCGGTG | | VKKPGSSVKV | | | |
| | | SVKVSCKA | | | | EWMG | | QRFQG | | GTAYM | | GDFHYY | | | | AAGGTCTCCTGCAAGGCTTCTGGAGGC | | SCKASGGTFN | | | |
| | | SG | | | | | | | | ELSSL | | GMDV | | | | ACCTTCAACAGCTATGCTGTCAGTTGG | | SYAVSWVRQA | | | |
| | | | | | | | | | | RFEDT | | | | | | GTGCGACAGGCCCCTGGACAAGGGCTT | | PGQGLEWMGG | | | |
| | | | | | | | | | | AVYYC | | | | | | GAGTGGATGGGAGGCATCATCACTGTC | | IITVLRTTKY | | | |
| | | | | | | | | | | | | | | | | CTTCGTACAACAAAGTATGCACAGAGG | | AQRFQGRVTI | | | |
| | | | | | | | | | | | | | | | | TTCCAGGGCAGAGTCACGATTGTTGCG | | VADESTGTAY | | | |
| | | | | | | | | | | | | | | | | GACGAATCCACGGGCACCGCCTACATG | | MELSSLRFED | | | |
| | | | | | | | | | | | | | | | | GAGCTGAGCAGCCTGAGATTTGAGGAC | | TAVYYCARVG | | | |
| | | | | | | | | | | | | | | | | ACGGCCGTGTACTACTGTGCGAGAGTG | | ENLVSLGGGD | | | |
| | | | | | | | | | | | | | | | | GGGGAGAACCTCGTTAGTCTCGGAGGG | | FHYYGMDVWG | | | |
| | | | | | | | | | | | | | | | | GGGGATTTCCACTACTACGGTATGGAC | | QGTTVTVSS | | | |
| | | | | | | | | | | | | | | | | GTCTGGGGCCAAGGGACCACGGTCACC | | | | | |
| | | | | | | | | | | | | | | | | GTCTCTTCA | | | | | |
| ADI- | IGHV7- | EVQLVQSG | 186 | YSFTSKS | 417 | WVRQA | 433 | WINTNT | 757 | RFVFS | 1001 | ARLVRS | 1263 | WGQGTT | 1287 | GAGGTCCAGCTGGTGCAGTCTGGGTCT | 1564 | EVQLVQSGSE | 1847 | | |
| 75576 | 4-1 | SELKKPGA | | IN | | PGQGL | | GDPTYA | | LDTSV | | TRYYDV | | VTVSS | | GAGTTGAAGAAGCCTGGGGCCTCAGTG | | LKKPGASVKV | | | |
| | | SVKVSCKA | | | | EWMG | | QGFIG | | STAYL | | GGFDI | | | | AAGGTTTCCTGCAAGGCTTCTGGATAC | | SCKASGYSFT | | | |
| | | SG | | | | | | | | QINSL | | | | | | AGCTTCACTAGTAAAAGTATTAATTGG | | SKSINWVRQA | | | |
| | | | | | | | | | | KAEDT | | | | | | GTGCGACAGGCCCCTGGACAAGGGCTT | | PGQGLEWMGW | | | |
| | | | | | | | | | | AVYFC | | | | | | GAGTGGATGGGATGGATCAACACCAAC | | INTNTGDPTY | | | |
| | | | | | | | | | | | | | | | | ACTGGGGACCCAACGTATGCCCAGGGC | | AQGFIGRFVF | | | |
| | | | | | | | | | | | | | | | | TTCATAGGACGGTTTGTCTTCTCCTTG | | SLDTSVSTAY | | | |
| | | | | | | | | | | | | | | | | GACACCTCTGTCAGCACGGCATATCTG | | LQINSLKAED | | | |
| | | | | | | | | | | | | | | | | CAGATCAACAGCCTAAAGGCTGAGGAC | | TAVYFCARLV | | | |
| | | | | | | | | | | | | | | | | ACTGCCGTTTATTTCTGTGCGAGACTC | | RSTRYYDVGG | | | |
| | | | | | | | | | | | | | | | | GTGCGTAGTACCAGGTACTACGACGTG | | FDIWGQGTTV | | | |
| | | | | | | | | | | | | | | | | GGCGGTTTTGATATCTGGGGCCAAGGG | | TVSS | | | |
| | | | | | | | | | | | | | | | | ACCACGGTCACCGTCTCCTCA | | | | | |
| ADI- | IGHV4- | QVQLQQSG | 56 | DSISSGG | 418 | WIRQH | 450 | YIYFTG | 758 | RVIIS | 1002 | ARAGTM | 1264 | WGQGTL | 1286 | CAGGTGCAGCTGCAGCAGTCGGGCCCA | 1565 | QVQLQQSGPG | 1848 | | |
| 75592 | 31 | PGLVKPSQ | | YYWS | | PGKGL | | STDYNP | | VDRFK | | YGDFDY | | VTVSS | | GGACTGGTGAAGCCTTCACAGACCCTG | | LVKPSQTLSL | | | |
| | | TLSLTCTV | | | | EWIG | | SLKS | | NQFSL | | | | | | TCCCTCACCTGCACTGTGTCTGGTGAC | | TCTVSGDSIS | | | |
| | | SG | | | | | | | | KLSSV | | | | | | TCCATCAGCAGTGGTGGTTACTACTGG | | SGGYYWSWIR | | | |
| | | | | | | | | | | SAADT | | | | | | AGCTGGATCCGCCAGCACCCAGGGAAG | | QHPGKGLEWI | | | |
| | | | | | | | | | | AVYYC | | | | | | GGCCTGGAGTGGATTGGGTACATCTAT | | GYIYFTGSTD | | | |
| | | | | | | | | | | | | | | | | TTCACTGGGAGCACCGACTACAACCCG | | YNPSLKSRVI | | | |
| | | | | | | | | | | | | | | | | TCCCTCAAGAGTCGAGTTATCATATCA | | ISVDRFKNQF | | | |
| | | | | | | | | | | | | | | | | GTAGACAGGTTCAAGAACCAGTTTTCA | | SLKLSSVSAA | | | |
| | | | | | | | | | | | | | | | | CTGAAACTGAGTTCTGTGTCTGCCGCG | | DTAVYYCARA | | | |
| | | | | | | | | | | | | | | | | GACACGGCCGTGTATTACTGTGCGAGA | | GTMYGDFDYW | | | |
| | | | | | | | | | | | | | | | | GCCGGGACTATGTATGGGGATTTTGAC | | GQGTLVTVSS | | | |
| | | | | | | | | | | | | | | | | TACTGGGGCCAGGGAACCCTGGTCACC | | | | | |
| | | | | | | | | | | | | | | | | GTCTCCTCA | | | | | |
| ADI- | IGHV2- | QITLKESG | 187 | FSLNTPR | 419 | WIRQP | 441 | HIFSND | 759 | RLTIS | 1003 | ARNMGL | 1265 | WGQGTL | 1286 | CAGATCACGTTGAAGGAGTCTGGTCCT | 1566 | QITLKESGPV | 1849 | | |
| 75597 | 26 | PVLVKPTE | | MGVS | | PGKAL | | EELYST | | RDTSK | | LAVAGI | | VTVSS | | GTGCTGGTGAAACCCACAGAGACCCTC | | LVKPTETLTL | | | |
| | | TLTLTCSV | | | | EWLA | | SLKS | | SQVLL | | QEGWFD | | | | ACGCTGACCTGCTCCGTCTCTGGCTTC | | TCSVSGFSLN | | | |
| | | SG | | | | | | | | TMTNM | | T | | | | TCTCTCAACACTCCTAGAATGGGTGTG | | TPRMGVSWIR | | | |
| | | | | | | | | | | GPADT | | | | | | AGTTGGATCCGTCAGCCCCCCGGGAAG | | QPPGKALEWL | | | |
| | | | | | | | | | | ATYYC | | | | | | GCCCTGGAGTGGCTTGCACACATTTTT | | AHIFSNDEEL | | | |
| | | | | | | | | | | | | | | | | TCGAATGACGAAGAATTGTACAGCACA | | YSTSLKSRLT | | | |
| | | | | | | | | | | | | | | | | TCTCTGAAGAGCAGGCTCACCATCTCC | | ISRDTSKSQV | | | |
| | | | | | | | | | | | | | | | | AGGGACACCTCCAAAAGCCAAGTGCTC | | LLTMTNMGPA | | | |
| | | | | | | | | | | | | | | | | CTTACCATGACCAACATGGGCCCTGCG | | DTATYYCARN | | | |
| | | | | | | | | | | | | | | | | GACACAGCCACTTATTACTGTGCACGG | | MGLLAVAGIQ | | | |
| | | | | | | | | | | | | | | | | AATATGGGTCTTCTGGCAGTGGCTGGT | | EGWFDTWGQG | | | |
| | | | | | | | | | | | | | | | | ATTCAAGAAGGTTGGTTCGACACCTGG | | TLVTVSS | | | |
| | | | | | | | | | | | | | | | | GGCCAGGGAACCCTGGTCACCGTCTCC | | | | | |
| | | | | | | | | | | | | | | | | TCA | | | | | |
| ADI- | IGHV1- | QVQLQQSG | 86 | GTFSSYP | 379 | WVRQA | 433 | SIIPIL | 760 | RVTIN | 1004 | ARDLGY | 1217 | WGQGTL | 1286 | CAGGTACAGCTGCAGCAGTCTGGGGCT | 1567 | QVQLQQSGAE | 1850 | | |
| 75636 | 69 | AEVKKPGS | | IS | | PGQGL | | GVANYA | | ADKST | | SSGGAN | | VTVSS | | GAGGTGAAGAAGCCTGGGTCCTCGGTG | | VKKPGSSVKV | | | |
| | | SVKVSCKA | | | | EWMG | | QKFQG | | STAYM | | YYFDY | | | | AAGGTCTCCTGCAAGGCTTCTGGAGGC | | SCKASGGTFS | | | |
| | | SG | | | | | | | | ELSSL | | | | | | ACCTTCAGCAGCTATCCTATCAGCTGG | | SYPISWVRQA | | | |
| | | | | | | | | | | RSEDT | | | | | | GTGCGACAGGCCCCTGGACAAGGGCTT | | PGQGLEWMGS | | | |
| | | | | | | | | | | AVYYC | | | | | | GAGTGGATGGGAAGTATCATCCCTATC | | IIPILGVANY | | | |
| | | | | | | | | | | | | | | | | CTTGGTGTCGCAAACTACGCACAGAAG | | AQKFQGRVTI | | | |
| | | | | | | | | | | | | | | | | TTCCAGGGCAGAGTCACGATTAACGCG | | NADKSTSTAY | | | |
| | | | | | | | | | | | | | | | | GACAAATCCACGAGCACAGCCTACATG | | MELSSLRSED | | | |
| | | | | | | | | | | | | | | | | GAGCTGAGCAGCCTGAGATCTGAGGAC | | TAVYYCARDL | | | |
| | | | | | | | | | | | | | | | | ACGGCCGTGTATTACTGTGCGAGAGAT | | GYSSGGANYY | | | |
| | | | | | | | | | | | | | | | | CTGGGGTATAGCAGTGGCGGGGCCAAT | | FDYWGQGTLV | | | |
| | | | | | | | | | | | | | | | | TACTACTTTGACTACTGGGGCCAGGGA | | TVSS | | | |
| | | | | | | | | | | | | | | | | ACCCTGGTCACCGTCTCCTCA | | | | | |
| ADI- | IGHV1- | QVQLVQSG | 35 | YTFTGYC | 420 | WLRQA | 515 | RINPNN | 761 | RVTMT | 1005 | ARDYSG | 1266 | RGRGTL | 1305 | CAGGTCCAGCTGGTGCAGTCTGGGGCT | 1568 | QVQLVQSGAE | 1851 | | |
| 75645 | 2 | AEVKKPGA | | IH | | PRQGL | | GGANYA | | SDTSI | | VYPMKP | | VTVSS | | GAGGTGAAGAAGCCTGGGGCCTCAGTG | | VKKPGASVKV | | | |
| | | SVKVSCKA | | | | EWMG | | QKFQG | | STAYM | | IWFDP | | | | AAGGTCTCCTGCAAGGCTTCTGGATAC | | SCKASGYTFT | | | |
| | | SG | | | | | | | | DLSRL | | | | | | ACCTTCACCGGCTACTGTATACACTGG | | GYCIHWLRQA | | | |
| | | | | | | | | | | TSDDT | | | | | | CTGCGACAGGCCCCTAGACAAGGGCTT | | PRQGLEWMGR | | | |
| | | | | | | | | | | AIYYC | | | | | | GAGTGGATGGGACGGATCAACCCCAAC | | INPNNGGANY | | | |
| | | | | | | | | | | | | | | | | AATGGTGGCGCAAACTACGCACAGAAG | | AQKFQGRVTM | | | |
| | | | | | | | | | | | | | | | | TTTCAGGGCAGGGTCACCATGACCAGC | | TSDTSISTAY | | | |
| | | | | | | | | | | | | | | | | GACACATCCATCAGCACAGCCTACATG | | MDLSRLTSDD | | | |
| | | | | | | | | | | | | | | | | GACCTGAGCAGGCTGACTTCTGACGAC | | TAIYYCARDY | | | |
| | | | | | | | | | | | | | | | | ACGGCCATATATTACTGTGCGAGAGAT | | SGVYPMKPIW | | | |
| | | | | | | | | | | | | | | | | TACTCGGGGGTGTATCCTATGAAGCCG | | FDPRGRGTLV | | | |
| | | | | | | | | | | | | | | | | ATCTGGTTCGACCCCAGGGGCCGGGGA | | TVSS | | | |
| | | | | | | | | | | | | | | | | ACCCTGGTCACCGTCTCCTCA | | | | | |
| ADI- | IGHV1- | QVQLQQSG | 188 | GDFSSYV | 421 | WVRQA | 433 | GIIPIF | 762 | RVTIT | 1006 | ARGTQD | 1267 | WGQGTL | 1286 | CAGGTACAGCTGCAGCAGTCTGGGGCT | 1569 | QVQLQQSGAE | 1852 | | |
| 75615 | 69 | AEVKKSGS | | MT | | PGQGL | | GTPNYA | | ADEST | | GATIDL | | VTVSS | | GAGGTGAAGAAGTCTGGGTCCTCGGTG | | VKKSGSSVKV | | | |
| | | SVKVSCKA | | | | EWMG | | QKFQG | | STAYM | | DY | | | | AAGGTCTCCTGCAAGGCCTCTGGAGGC | | SCKASGGDFS | | | |
| | | SG | | | | | | | | ELSSL | | | | | | GACTTCAGCAGCTATGTTATGACTTGG | | SYVMTWVRQA | | | |
| | | | | | | | | | | RSEDT | | | | | | GTGCGACAGGCCCCTGGACAGGGGCTT | | PGQGLEWMGG | | | |
| | | | | | | | | | | AVYYC | | | | | | GAGTGGATGGGAGGGATCATCCCTATC | | IIPIFGTPNY | | | |
| | | | | | | | | | | | | | | | | TTTGGGACACCAAACTACGCACAGAAA | | AQKFQGRVTI | | | |
| | | | | | | | | | | | | | | | | TTCCAGGGCAGAGTCACGATTACCGCG | | TADESTSTAY | | | |
| | | | | | | | | | | | | | | | | GACGAATCCACGAGTACAGCCTACATG | | MELSSLRSED | | | |
| | | | | | | | | | | | | | | | | GAGCTGAGCAGCCTAAGATCTGAAGAC | | TAVYYCARGT | | | |
| | | | | | | | | | | | | | | | | ACGGCCGTGTATTACTGTGCGAGAGGG | | QDGATIDLDY | | | |
| | | | | | | | | | | | | | | | | ACTCAAGATGGGGCTACAATTGATCTT | | WGQGTLVTVS | | | |
| | | | | | | | | | | | | | | | | GACTATTGGGGCCAGGGAACCCTGGTC | | S | | | |
| | | | | | | | | | | | | | | | | ACCGTCTCCTCA | | | | | |
| ADI- | IGHV4- | QVQLQQSG | 189 | GSISSYY | 263 | WIRQS | 434 | NMFYSG | 763 | RVTIS | 1007 | ARPYYD | 1268 | WGQGTT | 1287 | CAGGTGCAGCTGCAGCAGTCGGGCCCA | 1570 | QVQLQQSGPG | 1853 | | |
| 75844 | 59 | PGLVKPSE | | WS | | PGKGL | | ITNYNP | | IDTSK | | ILTGIR | | VTVSS | | GGACTGGTGAAGCCTTCGGAGACCCTG | | LVKPSETLSL | | | |
| | | TLSLICTV | | | | EWIG | | SLES | | NQLSL | | DDAFDI | | | | TCCCTCATCTGCACTGTCTCTGGCGGC | | ICTVSGGSIS | | | |
| | | SG | | | | | | | | KLSSV | | | | | | TCCATCAGTAGCTACTACTGGAGCTGG | | SYYWSWIRQS | | | |
| | | | | | | | | | | TAADT | | | | | | ATCCGGCAGTCCCCAGGGAAGGGACTG | | PGKGLEWIGN | | | |
| | | | | | | | | | | AVYYC | | | | | | GAGTGGATTGGGAATATGTTTTACAGT | | MFYSGITNYN | | | |
| | | | | | | | | | | | | | | | | GGGATCACCAACTACAACCCCTCCCTC | | PSLESRVTIS | | | |
| | | | | | | | | | | | | | | | | GAGAGTCGAGTCACCATATCAATAGAC | | IDTSKNQLSL | | | |
| | | | | | | | | | | | | | | | | ACGTCCAAGAACCAGCTCTCCCTGAAG | | KLSSVTAADT | | | |
| | | | | | | | | | | | | | | | | CTGAGCTCTGTGACCGCTGCGGACACG | | AVYYCARPYY | | | |
| | | | | | | | | | | | | | | | | GCCGTGTATTACTGTGCGAGGCCGTAT | | DILTGIRDDA | | | |
| | | | | | | | | | | | | | | | | TACGATATTTTGACTGGTATCCGAGAT | | FDIWGQGTTV | | | |
| | | | | | | | | | | | | | | | | GATGCTTTTGATATCTGGGGCCAAGGG | | TVSS | | | |
| | | | | | | | | | | | | | | | | ACCACGGTCACCGTCTCCTCA | | | | | |
| ADI- | IGHV5- | QVQLQQSG | 157 | YSFFHYW | 422 | WVRQM | 516 | TINPVN | 764 | QVTIS | 1008 | ATADRG | 1269 | WGQGTL | 1286 | CAGGTGCAGCTGCAGCAGTCCGGAGCA | 1571 | QVQLQQSGAE | 1854 | | |
| 75875 | 10-1 | AEVKKPGE | | IS | | PGKGL | | SYTNYN | | VDRSI | | | | VTVSS | | GAGGTGAAGAAACCCGGGGAGTCTCTG | | VKKPGESLRI | | | |
| | | SLRISCKG | | | | EWMA | | PSFQG | | NTVYL | | | | | | AGGATCTCCTGTAAGGGTTCTGGATAC | | SCKGSGYSFF | | | |
| | | SG | | | | | | | | QWSSL | | | | | | AGCTTTTTCCATTACTGGATCAGCTGG | | HYWISWVRQM | | | |
| | | | | | | | | | | RASDS | | | | | | GTGCGCCAGATGCCCGGGAAAGGCCTG | | PGKGLEWMAT | | | |
| | | | | | | | | | | AMYYC | | | | | | GAATGGATGGCGACCATTAATCCTGTT | | INPVNSYTNY | | | |
| | | | | | | | | | | | | | | | | AACTCTTATACCAACTACAACCCGTCC | | NPSFQGQVTI | | | |
| | | | | | | | | | | | | | | | | TTCCAAGGCCAAGTCACCATCTCAGTT | | SVDRSINTVY | | | |
| | | | | | | | | | | | | | | | | GACAGGTCCATCAACACTGTCTACCTG | | LQWSSLRASD | | | |
| | | | | | | | | | | | | | | | | CAATGGAGCAGTCTGAGGGCCTCGGAC | | SAMYYCATAD | | | |
| | | | | | | | | | | | | | | | | AGCGCCATGTATTACTGTGCGACCGCG | | RGWGQGTLVT | | | |
| | | | | | | | | | | | | | | | | GATAGGGGTTGGGGCCAGGGAACCCTG | | VSS | | | |
| | | | | | | | | | | | | | | | | GTCACCGTCTCCTCA | | | | | |
| ADI- | IGHV1- | QVPLVQSG | 190 | GTFSSYS | 356 | WVRQA | 433 | RIIPLL | 765 | RVTIT | 832 | ARENCF | 1270 | WGQGTT | 1287 | CAGGTCCCGCTGGTGCAGTCTGGGGCT | 1572 | QVPLVQSGAE | 1855 | | |
| 75714 | 69 | AEVKKPGS | | IS | | PGQGL | | GIPNYA | | ADKST | | GTSCST | | VTVSS | | GAGGTGAAGAAGCCTGGGTCCTCGGTG | | VKKPGSSVKV | | | |
| | | SVKVSCKA | | | | EWMG | | QKMQG | | STAYM | | PWGAFD | | | | AAGGTCTCCTGCAAGGCTTCTGGAGGC | | SCKASGGTFS | | | |
| | | SG | | | | | | | | ELSSL | | I | | | | ACCTTCAGCAGCTATTCTATCAGCTGG | | SYSISWVRQA | | | |
| | | | | | | | | | | RSEDT | | | | | | GTGCGACAGGCCCCTGGACAAGGACTT | | PGQGLEWMGR | | | |
| | | | | | | | | | | AVYYC | | | | | | GAGTGGATGGGAAGGATCATCCCTCTC | | IIPLLGIPNY | | | |
| | | | | | | | | | | | | | | | | CTTGGTATACCAAACTACGCACAGAAG | | AQKMQGRVTI | | | |
| | | | | | | | | | | | | | | | | ATGCAGGGCAGAGTCACGATTACCGCG | | TADKSTSTAY | | | |
| | | | | | | | | | | | | | | | | GACAAATCAACGAGCACAGCCTACATG | | MELSSLRSED | | | |
| | | | | | | | | | | | | | | | | GAGCTGAGCAGCCTGAGATCTGAGGAC | | TAVYYCAREN | | | |
| | | | | | | | | | | | | | | | | ACGGCCGTGTATTACTGTGCGAGAGAA | | CFGTSCSTPW | | | |
| | | | | | | | | | | | | | | | | AATTGTTTTGGTACCTCCTGCTCTACC | | GAFDIWGQGT | | | |
| | | | | | | | | | | | | | | | | CCGTGGGGTGCTTTTGATATCTGGGGC | | TVTVSS | | | |
| | | | | | | | | | | | | | | | | CAAGGGACCACGGTCACCGTCTCCTCA | | | | | |
| ADI- | IGHV4- | QVQLQQWG | 43 | GSFSGYY | 206 | WIRQP | 445 | EINHSG | 527 | RVTIS | 1009 | ARDSTI | 1271 | WGQGTL | 1286 | CAGGTGCAGCTGCAGCAGTGGGGCGCA | 1573 | QVQLQQWGAG | 1856 | | |
| 75688 | 34 | AGLLKPSE | | WS | | PGKGL | | STNYNP | | VDTSK | | YSSGWW | | VTVSS | | GGACTGTTGAAGCCTTCGGAGACCCTG | | LLKPSETLSL | | | |
| | | TLSLTCAV | | | | EWIG | | SLKS | | NQFSL | | SVVGSS | | | | TCCCTCACCTGCGCTGTCTATGGTGGG | | TCAVYGGSFS | | | |
| | | YG | | | | | | | | KLSSV | | LVGPAY | | | | TCCTTCAGTGGTTACTACTGGAGCTGG | | GYYWSWIRQP | | | |
| | | | | | | | | | | TAADT | | YFDY | | | | ATCCGCCAGCCCCCAGGGAAGGGGCTG | | PGKGLEWIGE | | | |
| | | | | | | | | | | AVYYC | | | | | | GAGTGGATTGGGGAAATCAATCATAGT | | INHSGSTNYN | | | |
| | | | | | | | | | | | | | | | | GGAAGCACCAACTACAACCCGTCCCTC | | PSLKSRVTIS | | | |
| | | | | | | | | | | | | | | | | AAGAGTCGAGTCACCATATCAGTAGAC | | VDTSKNQFSL | | | |
| | | | | | | | | | | | | | | | | ACGTCCAAGAACCAGTTCTCCCTGAAG | | KLSSVTAADT | | | |
| | | | | | | | | | | | | | | | | CTGAGCTCTGTGACCGCCGCGGACACG | | AVYYCARDST | | | |
| | | | | | | | | | | | | | | | | GCTGTGTATTACTGTGCGAGAGACTCG | | IYSSGWWSVV | | | |
| | | | | | | | | | | | | | | | | ACCATATATAGCAGTGGCTGGTGGTCC | | GSSLVGPAYY | | | |
| | | | | | | | | | | | | | | | | GTAGTTGGTTCGAGTTTAGTCGGGCCC | | FDYWGQGTLV | | | |
| | | | | | | | | | | | | | | | | GCTTACTACTTTGACTACTGGGGCCAG | | TVSS | | | |
| | | | | | | | | | | | | | | | | GGAACCCTGGTCACCGTCTCCTCA | | | | | |
| ADI- | HV5- | QVQLVQSG | 174 | YSFTSYW | 372 | WVRQM | 496 | IIYPGD | 635 | QVTIS | 1010 | ARGMLD | 1272 | WGHGTT | 1304 | CAGGTGCAGCTGGTGCAGTCTGGAGCA | 1574 | QVQLVQSGAE | 1857 | | |
| 75637 | 51 | AEVKKPGE | | IG | | PGKGL | | SDTRYS | | ADKSI | | TFDI | | VTVSS | | GAGGTGAAAAAGCCGGGGGAGTCTCTG | | VKKPGESLKI | | | |
| | | SLKISCKG | | | | EWLG | | PSFQG | | STAYL | | | | | | AAGATCTCCTGTAAGGGTTCTGGATAC | | SCKGSGYSFT | | | |
| | | SG | | | | | | | | QWSSL | | | | | | AGCTTTACCAGCTACTGGATCGGCTGG | | SYWIGWVRQM | | | |
| | | | | | | | | | | KASDT | | | | | | GTGCGCCAGATGCCCGGGAAAGGCCTG | | PGKGLEWLGI | | | |
| | | | | | | | | | | AMYYC | | | | | | GAGTGGCTGGGGATCATCTATCCTGGT | | IYPGDSDTRY | | | |
| | | | | | | | | | | | | | | | | GACTCTGATACCAGATACAGCCCGTCC | | SPSFQGQVTI | | | |
| | | | | | | | | | | | | | | | | TTCCAAGGCCAGGTCACCATCTCAGCC | | SADKSISTAY | | | |
| | | | | | | | | | | | | | | | | GACAAGTCCATCAGCACCGCCTACCTG | | LQWSSLKASD | | | |
| | | | | | | | | | | | | | | | | CAGTGGAGCAGCCTGAAGGCCTCGGAC | | TAMYYCARGM | | | |
| | | | | | | | | | | | | | | | | ACCGCCATGTATTACTGTGCGAGGGGA | | LDTFDIWGHG | | | |
| | | | | | | | | | | | | | | | | ATGTTAGACACTTTTGATATCTGGGGC | | TTVTVSS | | | |
| | | | | | | | | | | | | | | | | CACGGGACCACGGTCACCGTCTCCTCA | | | | | |
| ADI- | IGHV5- | QVQLVQSG | 191 | YIFTTYW | 423 | WVRQM | 476 | RIDPSD | 766 | HVTFS | 1011 | ARVFTE | 1273 | WGQGTT | 1287 | CAGGTCCAGCTTGTGCAGTCTGGAGCA | 1575 | QVQLVQSGAE | 1858 | | |
| 75745 | 10-1 | AEVKKPGE | | IT | | PGKGL | | SYTNYS | | SDKSI | | PITVAH | | VTVSS | | GAAGTGAAAAAGCCCGGGGAGTCTCTG | | VKKPGESLRI | | | |
| | | SLRISCQG | | | | EWMG | | PSFQG | | STAYL | | DAFDI | | | | AGGATCTCCTGTCAGGGTTCTGGATAC | | SCQGSGYIFT | | | |
| | | SG | | | | | | | | QWSSL | | | | | | ATCTTTACCACCTATTGGATCACTTGG | | TYWITWVRQM | | | |
| | | | | | | | | | | KASDT | | | | | | GTGCGCCAGATGCCCGGGAAAGGCCTG | | PGKGLEWMGR | | | |
| | | | | | | | | | | AIYYC | | | | | | GAGTGGATGGGACGCATTGATCCTAGT | | IDPSDSYTNY | | | |
| | | | | | | | | | | | | | | | | GACTCTTATACCAACTACAGCCCGTCC | | SPSFQGHVTF | | | |
| | | | | | | | | | | | | | | | | TTCCAAGGCCACGTCACCTTCTCATCT | | SSDKSISTAY | | | |
| | | | | | | | | | | | | | | | | GACAAGTCAATCAGCACTGCCTACCTG | | LQWSSLKASD | | | |
| | | | | | | | | | | | | | | | | CAGTGGAGCAGCCTGAAGGCCTCGGAC | | TAIYYCARVF | | | |
| | | | | | | | | | | | | | | | | ACCGCCATTTATTACTGTGCGAGAGTG | | TEPITVAHDA | | | |
| | | | | | | | | | | | | | | | | TTTACGGAGCCGATAACAGTGGCCCAT | | FDIWGQGTTV | | | |
| | | | | | | | | | | | | | | | | GATGCTTTTGATATCTGGGGCCAAGGG | | TVSS | | | |
| | | | | | | | | | | | | | | | | ACAACGGTCACCGTCTCCTCA | | | | | |
| ADI- | IGHV1- | RCPLVQSG | 192 | GTFNSYT | 424 | WVRQA | 517 | RVIPLR | 767 | RVTIT | 1012 | AREGTY | 1274 | WGKGTT | 1291 | AGGTGCCCGCTGGTGCAGTCTGGGGCT | 1576 | RCPLVQSGAE | 1859 | | |
| 75665 | 69 | AEVKKPGS | | IS | | PGQGV | | NIADYA | | ADKST | | GYEWHF | | VTVSS | | GAGGTGAAGAAGCCTGGGTCCTCGGTG | | VKKPGSSVKV | | | |
| | | SVKVSCKA | | | | EWMG | | QKFQG | | STVYM | | HYYMDV | | | | AAGGTCTCCTGCAAGGCTTCTGGAGGC | | SCKASGGTFN | | | |
| | | SG | | | | | | | | ELSSL | | | | | | ACCTTCAACAGTTACACTATCAGTTGG | | SYTISWVRQA | | | |
| | | | | | | | | | | RSEDT | | | | | | GTGCGACAGGCCCCCGGACAAGGGGTT | | PGQGVEWMGR | | | |
| | | | | | | | | | | AVYYC | | | | | | GAGTGGATGGGAAGGGTCATCCCTCTC | | VIPLRNIADY | | | |
| | | | | | | | | | | | | | | | | CGCAATATAGCAGACTACGCACAGAAG | | AQKFQGRVTI | | | |
| | | | | | | | | | | | | | | | | TTCCAGGGCAGAGTCACGATTACCGCG | | TADKSTSTVY | | | |
| | | | | | | | | | | | | | | | | GACAAATCCACGAGCACAGTCTACATG | | MELSSLRSED | | | |
| | | | | | | | | | | | | | | | | GAGCTGAGCAGCCTGAGATCTGAGGAC | | TAVYYCAREG | | | |
| | | | | | | | | | | | | | | | | ACGGCCGTGTATTATTGTGCGAGAGAG | | TYGYEWHFHY | | | |
| | | | | | | | | | | | | | | | | GGGACGTATGGTTACGAGTGGCACTTC | | YMDVWGKGTT | | | |
| | | | | | | | | | | | | | | | | CACTACTACATGGACGTCTGGGGCAAA | | VTVSS | | | |
| | | | | | | | | | | | | | | | | GGGACCACGGTCACCGTCTCCTCA | | | | | |
| ADI- | IGHV3- | RCTLQQSG | 193 | FTFNNAW | 425 | WVRQA | 431 | RIKSYV | 768 | RFTIS | 1013 | VTERRV | 1275 | WGKGTT | 1291 | AGGTGCACGCTGCAGCAGTCTGGGGGA | 1577 | RCTLQQSGGG | 1860 | | |
| 75812 | 15 | GGLVKPGE | | MS | | PGKGL | | NGGTTD | | RDDSK | | EVGATE | | VTVSS | | GGCTTGGTAAAGCCGGGGGAGTCCCTT | | LVKPGESLRL | | | |
| | | SLRLSCAA | | | | EWVA | | YVAPVK | | NTLFL | | VSYYYM | | | | AGACTCTCCTGTGCAGCCTCTGGATTC | | SCAASGFTFN | | | |
| | | SG | | | | | | G | | QMKSL | | DV | | | | ACTTTCAATAACGCCTGGATGAGTTGG | | NAWMSWVRQA | | | |
| | | | | | | | | | | KTEDT | | | | | | GTCCGCCAGGCTCCAGGGAAGGGGCTG | | PGKGLEWVAR | | | |
| | | | | | | | | | | AVYYC | | | | | | GAGTGGGTTGCCCGTATTAAAAGTTAT | | IKSYVNGGTT | | | |
| | | | | | | | | | | | | | | | | GTTAACGGTGGGACAACAGACTACGTT | | DYVAPVKGRF | | | |
| | | | | | | | | | | | | | | | | GCACCCGTGAAAGGCAGATTCACCATC | | TISRDDSKNT | | | |
| | | | | | | | | | | | | | | | | TCAAGAGATGATTCTAAAAACACTCTG | | LFLQMKSLKT | | | |
| | | | | | | | | | | | | | | | | TTTCTGCAAATGAAGAGCCTGAAAACC | | EDTAVYYCVT | | | |
| | | | | | | | | | | | | | | | | GAGGACACAGCCGTCTATTACTGTGTC | | ERRVEVGATE | | | |
| | | | | | | | | | | | | | | | | ACTGAGCGACGTGTAGAAGTGGGAGCT | | VSYYYMDVWG | | | |
| | | | | | | | | | | | | | | | | ACTGAGGTCTCCTACTACTACATGGAC | | KGTTVTVSS | | | |
| | | | | | | | | | | | | | | | | GTCTGGGGCAAAGGGACCACGGTCACC | | | | | |
| | | | | | | | | | | | | | | | | GTCTCCTCA | | | | | |
| ADI- | IGHV3- | QVQLVQSG | 13 | FTFSSYA | 199 | WVRQA | 518 | VINSDG | 769 | RFTIS | 1014 | ARESMD | 1276 | WGRGTL | 1288 | CAGGTGCAGCTGGTGCAGTCTGGGGGA | 1578 | QVQLVQSGGG | 1861 | | |
| 75788 | 64 | GGLVKPGG | | MH | | PGKGL | | GSPYYA | | RDNSK | | QTAYFD | | VTVSS | | GGCTTGGTCAAACCTGGGGGGTCCCTG | | LVKPGGSLRL | | | |
| | | SLRLSCAA | | | | EFVS | | NAVKG | | NKVFL | | Y | | | | AGACTCTCCTGTGCAGCCTCTGGGTTC | | SCAASGFTFS | | | |
| | | SG | | | | | | | | QMGSL | | | | | | ACCTTCAGTTCCTATGCTATGCACTGG | | SYAMHWVRQA | | | |
| | | | | | | | | | | RAEDM | | | | | | GTCCGCCAGGCTCCAGGGAAGGGACTG | | PGKGLEFVSV | | | |
| | | | | | | | | | | AVYYC | | | | | | GAATTTGTTTCAGTTATTAATAGTGAT | | INSDGGSPYY | | | |
| | | | | | | | | | | | | | | | | GGGGGTAGCCCATATTATGCAAACGCT | | ANAVKGRFTI | | | |
| | | | | | | | | | | | | | | | | GTGAAGGGCAGATTCACCATCTCCAGA | | SRDNSKNKVF | | | |
| | | | | | | | | | | | | | | | | GACAATTCCAAGAACAAGGTGTTTCTG | | LQMGSLRAED | | | |
| | | | | | | | | | | | | | | | | CAAATGGGCAGCCTGAGAGCTGAGGAC | | MAVYYCARES | | | |
| | | | | | | | | | | | | | | | | ATGGCTGTATATTACTGTGCGAGAGAG | | MDQTAYFDYW | | | |
| | | | | | | | | | | | | | | | | TCTATGGACCAGACGGCTTACTTTGAC | | GRGTLVTVSS | | | |
| | | | | | | | | | | | | | | | | TACTGGGGCCGGGGAACCCTGGTCACC | | | | | |
| | | | | | | | | | | | | | | | | GTCTCCTCA | | | | | |
| ADI- | IGHV3- | RSSCMQSG | 194 | FTFSRFA | 248 | WVRQA | 431 | VVSFDG | 770 | RFTIS | 779 | ARGAYY | 1277 | WGQGAL | 1285 | AGGTCCAGCTGCATGCAGTCTGGGGAG | 1579 | RSSCMQSGEA | 1862 | | |
| 75599 | 30 | EAWSSWGV | | MH | | PGKGL | | SNKYYA | | RDNSK | | GSGSYY | | VTVSS | | GCGTGGTCCAGCTGGGGGGTCCCTGAG | | WSSWGVPETL | | | |
| | | PETL- | | | | EWVA | | DSMKG | | NTVYL | | NPLPTF | | | | ACTCTCTGTGCAGCCTCTAACTTCACT | | CAASNFTFSR | | | |
| | | CAASN | | | | | | | | QMNSL | | DY | | | | TTCAGTAGGTTTGCTATGCACTGGGTC | | FAMHWVRQAP | | | |
| | | | | | | | | | | RAEDT | | | | | | CGCCAGGCTCCAGGCAAGGGGCTGGAG | | GKGLEWVAVV | | | |
| | | | | | | | | | | AVYYC | | | | | | TGGGTGGCAGTTGTATCATTTGATGGA | | SFDGSNKYYA | | | |
| | | | | | | | | | | | | | | | | AGTAATAAATACTACGCAGACTCCATG | | DSMKGRFTIS | | | |
| | | | | | | | | | | | | | | | | AAGGGCCGCTTCACCATCTCCAGAGAC | | RDNSKNTVYL | | | |
| | | | | | | | | | | | | | | | | AATTCCAAGAACACGGTGTATCTGCAA | | QMNSLRAEDT | | | |
| | | | | | | | | | | | | | | | | ATGAACAGCCTGAGAGCTGAGGACACG | | AVYYCARGAY | | | |
| | | | | | | | | | | | | | | | | GCTGTGTATTACTGTGCGAGAGGAGCT | | YGSGSYYNPL | | | |
| | | | | | | | | | | | | | | | | TACTATGGTTCAGGGAGTTATTATAAC | | PTFDYWGQGA | | | |
| | | | | | | | | | | | | | | | | CCACTGCCCACGTTTGACTACTGGGGC | | LVTVSS | | | |
| | | | | | | | | | | | | | | | | CAGGGAGCCCTGGTCACCGTCTCCTCA | | | | | |
| ADI- | IGHV5- | QVQLVQSG | 174 | YSFTSYW | 372 | WVRQM | 476 | IIYPGD | 635 | QVTIS | 1010 | ARTMLD | 1278 | WGQGTT | 1287 | CAGGTCCAGCTGGTGCAGTCTGGAGCA | 1580 | QVQLVQSGAE | 1863 | | |
| 75664 | 51 | AEVKKPGE | | IG | | PGKGL | | SDTRYS | | ADKSI | | DAFDI | | VTVSS | | GAGGTGAAAAAGCCCGGGGAGTCTCTG | | VKKPGESLKI | | | |
| | | SLKISCKG | | | | EWMG | | PSFQG | | STAYL | | | | | | AAGATCTCCTGTAAGGGTTCTGGATAC | | SCKGSGYSFT | | | |
| | | SG | | | | | | | | QWSSL | | | | | | AGCTTTACCAGCTACTGGATCGGCTGG | | SYWIGWVRQM | | | |
| | | | | | | | | | | KASDT | | | | | | GTGCGCCAGATGCCCGGGAAAGGCCTG | | PGKGLEWMGI | | | |
| | | | | | | | | | | AMYYC | | | | | | GAGTGGATGGGGATCATCTATCCTGGT | | IYPGDSDTRY | | | |
| | | | | | | | | | | | | | | | | GACTCTGATACCAGATACAGCCCGTCC | | SPSFQGQVTI | | | |
| | | | | | | | | | | | | | | | | TTCCAAGGCCAGGTCACCATCTCAGCC | | SADKSISTAY | | | |
| | | | | | | | | | | | | | | | | GACAAGTCCATCAGCACCGCCTACCTG | | LQWSSLKASD | | | |
| | | | | | | | | | | | | | | | | CAGTGGAGCAGCCTGAAGGCCTCGGAC | | TAMYYCARTM | | | |
| | | | | | | | | | | | | | | | | ACCGCCATGTATTACTGTGCGAGGACT | | LDDAFDIWGQ | | | |
| | | | | | | | | | | | | | | | | ATGCTTGATGATGCTTTTGATATCTGG | | GTTVTVSS | | | |
| | | | | | | | | | | | | | | | | GGCCAAGGGACAACGGTCACCGTCTCC | | | | | |
| | | | | | | | | | | | | | | | | TCA | | | | | |
| ADI- | IGHV4- | QVQLQQSG | 195 | DSISSYY | 320 | WIRQP | 445 | YIYYSG | 771 | RVTIS | 1009 | ARGENY | 1279 | WGQGTL | 1286 | CAGGTGCAGCTGCAGCAGTCGGGCCCA | 1581 | QVQLQQSGPG | 1864 | | |
| 75646 | 59 | PGLVKPSE | | WS | | PGKGL | | STNYNP | | VDTSK | | GDYFDF | | VTVSS | | GGACTGGTGAAGCCTTCGGAGACCCTG | | LVKPSETLSL | | | |
| | | TLSLTCTV | | | | EWIG | | SLKS | | NQFSL | | | | | | TCCCTCACCTGCACTGTCTCTGGTGAC | | TCTVSGDSIS | | | |
| | | SG | | | | | | | | KLSSV | | | | | | TCCATCAGTAGTTACTACTGGAGCTGG | | SYYWSWIRQP | | | |
| | | | | | | | | | | TAADT | | | | | | ATCCGGCAGCCCCCAGGGAAGGGACTG | | PGKGLEWIGY | | | |
| | | | | | | | | | | AVYYC | | | | | | GAGTGGATTGGGTATATCTATTACAGT | | IYYSGSTNYN | | | |
| | | | | | | | | | | | | | | | | GGGAGCACCAACTACAACCCCTCCCTC | | PSLKSRVTIS | | | |
| | | | | | | | | | | | | | | | | AAGAGTCGAGTCACCATATCAGTAGAC | | VDTSKNQFSL | | | |
| | | | | | | | | | | | | | | | | ACGTCCAAGAACCAGTTCTCCCTGAAG | | KLSSVTAADT | | | |
| | | | | | | | | | | | | | | | | CTGAGCTCTGTGACCGCTGCGGACACG | | AVYYCARGEN | | | |
| | | | | | | | | | | | | | | | | GCCGTGTATTACTGTGCGAGAGGGGAA | | YGDYFDFWGQ | | | |
| | | | | | | | | | | | | | | | | AACTACGGTGACTACTTTGACTTCTGG | | GTLVTVSS | | | |
| | | | | | | | | | | | | | | | | GGCCAGGGAACCCTGGTCACCGTCTCC | | | | | |
| | | | | | | | | | | | | | | | | TCA | | | | | |
| ADI- | IGHV3- | QVQLVQSG | 13 | FTFNIAW | 426 | WVRQA | 432 | RIQSKN | 772 | RFTIS | 1015 | VGPGYC | 1280 | WGQGTL | 1286 | CAGGTGCAGCTGGTGCAGTCTGGGGGA | 1582 | QVQLVQSGGG | 1865 | | |
| 75723 | 15 | GGLVKPGG | | MS | | PGKGL | | VGGTTD | | RDDSK | | SSTSCY | | VTVSS | | GGCTTGGTAAAGCCTGGGGGGTCCCTT | | LVKPGGSLRL | | | |
| | | SLRLSCAA | | | | EWVG | | YAAPVK | | KMLYL | | ASHHDI | | | | AGACTCTCCTGTGCAGCCTCTGGATTC | | SCAASGFTFN | | | |
| | | SG | | | | | | G | | QMNSL | | LTGYYL | | | | ACTTTCAATATCGCCTGGATGAGCTGG | | IAWMSWVRQA | | | |
| | | | | | | | | | | KTEDT | | PDY | | | | GTCCGCCAGGCTCCAGGGAAGGGGCTG | | PGKGLEWVGR | | | |
| | | | | | | | | | | AVYFC | | | | | | GAGTGGGTTGGTCGTATTCAAAGTAAA | | IQSKNVGGTT | | | |
| | | | | | | | | | | | | | | | | AATGTTGGTGGGACAACAGATTACGCT | | DYAAPVKGRF | | | |
| | | | | | | | | | | | | | | | | GCACCCGTGAAAGGCAGATTCACCATC | | TISRDDSKKM | | | |
| | | | | | | | | | | | | | | | | TCAAGAGATGATTCAAAAAAAATGCTG | | LYLQMNSLKT | | | |
| | | | | | | | | | | | | | | | | TATCTGCAAATGAACAGCCTGAAAACC | | EDTAVYFCVG | | | |
| | | | | | | | | | | | | | | | | GAGGACACAGCCGTGTATTTTTGTGTT | | PGYCSSTSCY | | | |
| | | | | | | | | | | | | | | | | GGACCCGGATATTGTAGTAGTACCAGC | | ASHHDILTGY | | | |
| | | | | | | | | | | | | | | | | TGCTATGCGAGTCATCACGATATTTTG | | YLPDYWGQGT | | | |
| | | | | | | | | | | | | | | | | ACTGGTTATTACCTCCCTGACTACTGG | | LVTVSS | | | |
| | | | | | | | | | | | | | | | | GGCCAGGGAACCCTGGTCACCGTCTCC | | | | | |
| | | | | | | | | | | | | | | | | TCA | | | | | |
| ADI- | IGHV3- | QITLKESG | 196 | FTFRTFA | 427 | WVRQA | 431 | VISFDG | 773 | RFTIS | 1016 | ARGDYY | 1281 | WGQGSL | 1289 | CAGATCACGTTGAAGGAGTCTGGGGGA | 1583 | QITLKESGGG | 1866 | | |
| 75595 | 30 | GGVVQPGR | | MH | | PGKGL | | NNKYYV | | RDNSK | | GSGKYF | | VTVSS | | GGCGTGGTCCAGCCTGGGAGGTCCCTG | | VVQPGRSLRL | | | |
| | | SLRLSCVA | | | | EWVA | | DSVKG | | NTVYL | | NPLPTF | | | | AGACTCTCCTGTGTAGCCTCTAGATTC | | SCVASRFTFR | | | |
| | | SR | | | | | | | | QMNSL | | DY | | | | ACCTTCAGGACTTTTGCTATGCACTGG | | TFAMHWVRQA | | | |
| | | | | | | | | | | RSEDT | | | | | | GTCCGCCAGGCTCCGGGCAAGGGGCTG | | PGKGLEWVAV | | | |
| | | | | | | | | | | AVYYC | | | | | | GAGTGGGTGGCAGTTATATCATTTGAT | | ISFDGNNKYY | | | |
| | | | | | | | | | | | | | | | | GGAAATAATAAATATTATGTAGACTCC | | VDSVKGRFTI | | | |
| | | | | | | | | | | | | | | | | GTGAAGGGCCGATTCACCATCTCCAGA | | SRDNSKNTVY | | | |
| | | | | | | | | | | | | | | | | GACAATTCCAAGAACACGGTGTATCTG | | LQMNSLRSED | | | |
| | | | | | | | | | | | | | | | | CAAATGAACAGCCTGAGAAGTGAGGAC | | TAVYYCARGD | | | |
| | | | | | | | | | | | | | | | | ACGGCTGTGTATTACTGTGCGAGAGGA | | YYGSGKYFNP | | | |
| | | | | | | | | | | | | | | | | GATTACTATGGTTCAGGGAAATATTTT | | LPTFDYWGQG | | | |
| | | | | | | | | | | | | | | | | AATCCACTGCCCACCTTTGACTACTGG | | SLVTVSS | | | |
| | | | | | | | | | | | | | | | | GGCCAGGGATCCCTGGTCACCGTCTCC | | | | | |
| | | | | | | | | | | | | | | | | TCA | | | | | |
| ADI- | IGHV3- | QVPLKQSG | 197 | SDFSTYG | 428 | WVRQA | 431 | ALSHDG | 774 | RFTIS | 1017 | AKDLIT | 1282 | WGQGTL | 1286 | CAGGTCCCGCTGAAGCAGTCTGGGGGA | 1584 | QVPLKQSGGG | 1867 | | |
| 75824 | 30 | GGVVQPGR | | MH | | PGKGL | | GYKYYA | | RDNSK | | YDFWSG | | VTVSS | | GGCGTGGTCCAGCCTGGGAGGTCCCAG | | VVQPGRSQRV | | | |
| | | SQRVSCTV | | | | EWVA | | DSVKG | | KTVYL | | FFT | | | | AGAGTCTCCTGCACAGTCTCTGGATCC | | SCTVSGSDFS | | | |
| | | SG | | | | | | | | QMNSV | | | | | | GACTTCAGTACTTACGGCATGCACTGG | | TYGMHWVRQA | | | |
| | | | | | | | | | | RPEDT | | | | | | GTCCGCCAGGCTCCAGGCAAGGGGCTG | | PGKGLEWVAA | | | |
| | | | | | | | | | | AVYYC | | | | | | GAGTGGGTGGCAGCTCTATCACATGAT | | LSHDGGYKYY | | | |
| | | | | | | | | | | | | | | | | GGAGGTTATAAATACTATGCAGACTCA | | ADSVKGRFTI | | | |
| | | | | | | | | | | | | | | | | GTGAAGGGCCGATTCACCATCTCCAGA | | SRDNSKKTVY | | | |
| | | | | | | | | | | | | | | | | GACAATTCCAAGAAAACGGTGTATCTG | | LQMNSVRPED | | | |
| | | | | | | | | | | | | | | | | CAAATGAACAGTGTGAGACCTGAGGAC | | TAVYYCAKDL | | | |
| | | | | | | | | | | | | | | | | ACGGCTGTCTATTACTGTGCGAAGGAC | | ITYDFWSGFF | | | |
| | | | | | | | | | | | | | | | | CTGATTACGTACGATTTCTGGAGTGGC | | TWGQGTLVTV | | | |
| | | | | | | | | | | | | | | | | TTTTTCACTTGGGGCCAGGGAACCCTG | | SS | | | |
| | | | | | | | | | | | | | | | | GTCACCGTCTCCTCA | | | | | |
| ADI- | IGHV5- | QVQLVQSG | 174 | YSFTSYW | 372 | WVRQM | 476 | IIYPGD | 775 | QVTIS | 1010 | ASSYCS | 1283 | WGQGTL | 1286 | CAGGTCCAGCTTGTGCAGTCTGGAGCA | 1585 | QVQLVQSGAE | 1868 | | |
| 75749 | 51 | AEVKKPGE | | IG | | PGKGL | | SDIRYS | | ADKSI | | STSCYA | | VTVSS | | GAGGTGAAAAAGCCCGGGGAGTCTCTG | | VKKPGESLKI | | | |
| | | SLKISCKG | | | | EWMG | | PSFQG | | STAYL | | AKY | | | | AAGATCTCCTGTAAGGGTTCTGGATAC | | SCKGSGYSFT | | | |
| | | SG | | | | | | | | QWSSL | | | | | | AGCTTTACCAGCTACTGGATCGGCTGG | | SYWIGWVRQM | | | |
| | | | | | | | | | | KASDT | | | | | | GTGCGCCAGATGCCCGGGAAAGGCCTG | | PGKGLEWMGI | | | |
| | | | | | | | | | | AMYYC | | | | | | GAGTGGATGGGGATCATCTATCCTGGT | | IYPGDSDIRY | | | |
| | | | | | | | | | | | | | | | | GACTCTGATATCAGATACAGCCCGTCC | | SPSFQGQVTI | | | |
| | | | | | | | | | | | | | | | | TTCCAAGGCCAGGTCACCATCTCAGCC | | SADKSISTAY | | | |
| | | | | | | | | | | | | | | | | GACAAGTCCATCAGCACCGCCTACCTG | | LQWSSLKASD | | | |
| | | | | | | | | | | | | | | | | CAGTGGAGCAGCCTGAAGGCCTCGGAC | | TAMYYCASSY | | | |
| | | | | | | | | | | | | | | | | ACCGCCATGTATTACTGTGCGAGCTCA | | CSSTSCYAAK | | | |
| | | | | | | | | | | | | | | | | TATTGTAGTAGTACCAGCTGCTATGCT | | YWGQGTLVTV | | | |
| | | | | | | | | | | | | | | | | GCCAAGTACTGGGGCCAGGGAACCCTG | | SS | | | |
| | | | | | | | | | | | | | | | | GTCACCGTCTCCTCA | | | | | |
| ADI- | IGHV1- | QVQLVQSG | 50 | GPFSTYA | 429 | WVRQA | 433 | EIIPIS | 776 | RVTIS | 1018 | ARVGRY | 1284 | WGQGTL | 1286 | CAGGTGCAGCTGGTGCAGTCTGGGGCT | 1586 | QVQLVQSGAE | 1869 | | |
| 75867 | 69 | AEVKKPGS | | IS | | PGQGL | | GTANYA | | ADEST | | YYDTSG | | VTVSS | | GAGGTGAAGAAGCCTGGGTCCTCGGTG | | VKKPGSSVKV | | | |
| | | SVKVSCKA | | | | EWMG | | QKFQG | | STAYM | | YYYTYF | | | | AAGGTCTCCTGCAAGGCTTCTGGAGGC | | SCKASGGPFS | | | |
| | | SG | | | | | | | | ELSSL | | DY | | | | CCCTTCAGCACCTATGCTATCAGCTGG | | TYAISWVRQA | | | |
| | | | | | | | | | | RSEDT | | | | | | GTGCGACAGGCCCCTGGACAAGGGCTT | | PGQGLEWMGE | | | |
| | | | | | | | | | | AVYYC | | | | | | GAGTGGATGGGAGAGATCATCCCTATC | | IIPISGTANY | | | |
| | | | | | | | | | | | | | | | | TCTGGTACAGCAAACTACGCACAGAAG | | AQKFQGRVTI | | | |
| | | | | | | | | | | | | | | | | TTCCAGGGCAGAGTCACGATTAGCGCG | | SADESTSTAY | | | |
| | | | | | | | | | | | | | | | | GACGAATCTACGAGCACAGCCTACATG | | MELSSLRSED | | | |
| | | | | | | | | | | | | | | | | GAGCTGAGCAGCCTGAGATCTGAGGAC | | TAVYYCARVG | | | |
| | | | | | | | | | | | | | | | | ACGGCCGTGTATTATTGTGCGAGAGTC | | RYYYDTSGYY | | | |
| | | | | | | | | | | | | | | | | GGTCGCTATTACTATGATACTAGTGGT | | YTYFDYWGQG | | | |
| | | | | | | | | | | | | | | | | TATTACTACACATACTTTGACTACTGG | | TLVTVSS | | | |
| | | | | | | | | | | | | | | | | GGCCAGGGAACCCTGGTCACCGTCTCC | | | | | |
| | | | | | | | | | | | | | | | | TTCA | | | | | |
| VYD224 | IGHV4- | QVQLQQWG | 93 | GAFSGYF | 295 | WIRQS | 471 | EVTHSG | 624 | RVTMS | 1019 | ARGDFY | 1124 | WGQGTL | 1286 | CAGGTGCAGCTACAACAGTGGGGCGCA | 1587 | QVQLQQWGAG | 1870 | QVQLQQWG | 1870 |
| (ADI- | 34 | AGLLKPSE | | WN | | PVKGL | | NTNYNP | | VDASK | | STRLAF | | VTVSS | | GGACTGCTGAAGCCTTCGGAGACCCTG | | LLKPSETLSL | | AGLLKPSE | |
| 80707) | | TLSLTCGV | | | | EWIG | | SLKS | | NEFSL | | DV | | | | TCCCTCACCTGCGGTGTCCACGATGGG | | TCGVHDGAFS | | TLSLTCGV | |
| | | HD | | | | | | | | QLTSV | | | | | | GCCTTCAGTGGTTACTTCTGGAACTGG | | GYFWNWIRQS | | HDGAFSGY | |
| | | | | | | | | | | TAADT | | | | | | ATCCGCCAGTCCCCAGTGAAGGGGCTG | | PVKGLEWIGE | | FWNWIRQS | |
| | | | | | | | | | | AVYYC | | | | | | GAGTGGATTGGGGAAGTCACTCATAGT | | VTHSGNTNYN | | PVKGLEWI | |
| | | | | | | | | | | | | | | | | GGCAACACCAACTACAACCCGTCCCTC | | PSLKSRVTMS | | GEVTHSGN | |
| | | | | | | | | | | | | | | | | AAGAGTCGAGTCACCATGTCAGTAGAC | | VDASKNEFSL | | TNYNPSLK | |
| | | | | | | | | | | | | | | | | GCGTCCAAGAACGAATTCTCCCTGCAA | | QLTSVTAADT | | SRVTMSVD | |
| | | | | | | | | | | | | | | | | CTGACCTCTGTGACCGCCGCGGACACG | | AVYYCARGDF | | ASKNEFSL | |
| | | | | | | | | | | | | | | | | GCTGTGTATTACTGTGCGAGGGGCGAC | | YSTRLAFDVW | | QLTSVTAA | |
| | | | | | | | | | | | | | | | | TTTTATAGCACCAGGCTCGCTTTTGAT | | GQGTLVTVSS | | DTAVYYCA | |
| | | | | | | | | | | | | | | | | GTCTGGGGCCAAGGGACACTGGTCACC | | | | RGDFYSTR | |
| | | | | | | | | | | | | | | | | GTCTCTTCA | | | | LAFDVWGQ | |
| | | | | | | | | | | | | | | | | | | | | GTLVTVSS | |
| VYD225 | | QVQLQESG | 21 | ASISQHD | 430 | WVRQS | 438 | AIFHSG | 538 | RLTIS | 1020 | ARARGI | 1039 | WGQGTL | 1286 | caggtccaactgcaagaatctggcccc | 1588 | QVQLQESGPG | 1871 | | |
| | | PGLVKPSG | | WWT | | PGKGL | | TTNYNP | | VDTSK | | LDF | | VTVSS | | gggctcgtcaagccttctggaactttg | | LVKPSGTLSL | | | |
| | | TLSLTCAV | | | | EWIG | | SLRS | | SHFSL | | | | | | tccctgacatgcgccgtgtctggcgcg | | TCAVSGASIS | | | |
| | | SG | | | | | | | | KLTSV | | | | | | tcaatatcacagcatgactggtggacc | | QHDWWTWVRQ | | | |
| | | | | | | | | | | TAADT | | | | | | tgggttaggcagagccccggcaagggg | | SPGKGLEWIG | | | |
| | | | | | | | | | | AVYYC | | | | | | ctcgagtggattggagccatatttcat | | AIFHSGTTNY | | | |
| | | | | | | | | | | | | | | | | tctggcacaaccaactacaacccttct | | NPSLRSRLTI | | | |
| | | | | | | | | | | | | | | | | ttgcggagccggttgaccattagcgtg | | SVDTSKSHFS | | | |
| | | | | | | | | | | | | | | | | gacacctccaaatcacatttttcgctg | | LKLTSVTAAD | | | |
| | | | | | | | | | | | | | | | | aagctcacctccgtcactgccgctgac | | TAVYYCARAR | | | |
| | | | | | | | | | | | | | | | | accgctgtgtattactgtgcacgggct | | GILDFWGQGT | | | |
| | | | | | | | | | | | | | | | | cgtggaatcctggatttctggggccag | | LVTVSS | | | |
| | | | | | | | | | | | | | | | | gggacacttgtcacggtatccagc | | | | | |

TABLE 4

| | | | SEQ | | SEQ | | SEQ | | SEQ | | SEQ | | SEQ | | SEQ |
|---|---|---|---|---|---|---|---|---|---|---|---|---|---|---|---|
| | VL | VL | ID | VL | ID | VL | ID | VL | ID | VL | ID | VL | ID | VL | ID |
| Clone ID | Germline | FR1 | NO: | CDR1 | NO: | FR2 | NO: | CDR2 | NO: | FR3 | NO: | CDR3 | NO: | FR4 | NO: |
| ADI-75846 | IGKV1-33 | DIQLTQ | 1876 | QASQDIT | 2048 | WYQQKP | 2257 | DAVNLE | 2382 | GVPSRFSG | 2528 | QQYDN | 2700 | FGGGTK | 2936 |
| | | SPSSLS | | NYLS | | GKAPKL | | T | | SGSGTDFT | | LPLT | | VEIK | |
| | | ASVGDR | | | | LIY | | | | FTISSLQP | | | | | |
| | | VTITC | | | | | | | | EDFATYYC | | | | | |
| ADI-75829 | IGKV3D- | EIAMTQ | 1877 | RASQSVN | 2049 | WYQQKP | 2258 | GASTRA | 2383 | GIPARFSG | 2529 | QQYNI | 2701 | FGQGTK | 2937 |
| | 15 | SPATLS | | SNLA | | GQAPRL | | T | | SGSGTEFT | | WPLYT | | VEIK | |
| | | VSPGER | | | | LIY | | | | LTISSLQS | | | | | |
| | | ATLSC | | | | | | | | EDFAVYFC | | | | | |
| ADI-75811 | IGKV1D- | DIQMTQ | 1878 | RASQSIS | 2050 | WYQQKP | 2257 | SASSLQ | 2384 | GVPSRFSG | 2530 | QQSYN | 2702 | FGQGTK | 2937 |
| | 39 | SPSSLS | | SYLN | | GKAPKL | | S | | SGSGTDFS | | TPPWT | | VEIK | |
| | | ASVGDR | | | | LIY | | | | LTISSLQP | | | | | |
| | | VTITC | | | | | | | | EDFATYYC | | | | | |
| ADI-75585 | IGKV1- | DIQLTQ | 1876 | RASQAIS | 2051 | WYQQKP | 2259 | AASILE | 2385 | GVPSRFSG | 2531 | QQYYS | 2703 | FGGGTK | 2938 |
| | NL1 | SPSSLS | | NSLA | | GKAPKL | | S | | SGSGTDYT | | SLGRT | | VDIK | |
| | | ASVGDR | | | | LLY | | | | LTISSLQP | | | | | |
| | | VTITC | | | | | | | | EDFATYYC | | | | | |
| ADI-75869 | IGKV1-5 | DIQMTQ | 1879 | RASQSIS | 2052 | WYQQKP | 2257 | KASSLE | 2386 | GVPSRFSG | 2532 | QQYDS | 2704 | FGQGTK | 2937 |
| | | SPSTLS | | RWLA | | GKAPKL | | S | | SGSGTEFT | | YPWT | | VEIK | |
| | | ASVGDR | | | | LIY | | | | LTISSLQP | | | | | |
| | | VTITC | | | | | | | | DDFATYYC | | | | | |
| ADI-75817 | IGKV2D- | DIQMTQ | 1880 | RSSQSLL | 2053 | WYLQKP | 2260 | LGSNRA | 2387 | GVPDRFSG | 2533 | MQGLQ | 2705 | FGGGTK | 2936 |
| | 28 | SPNSLP | | HTNGYNY | | GQSPQL | | S | | SGSGTDFT | | TPPT | | VEIK | |
| | | VTPGEP | | LD | | LIY | | | | LKISRVEA | | | | | |
| | | ASISC | | | | | | | | EDVGVYYC | | | | | |
| ADI-75590 | IGKV1D- | EIQMTQ | 1881 | RASQGIG | 2054 | WYRQRP | 2261 | DASSLE | 2388 | GVPSRFSG | 2534 | QQFNN | 2706 | FGGGTK | 2936 |
| | 13 | SPSSLS | | SALA | | GKPPKL | | G | | SGSGTDFT | | RIT | | VEIK | |
| | | ASVGDR | | | | LIS | | | | LTISSLQP | | | | | |
| | | VTITC | | | | | | | | EDFATYYC | | | | | |
| ADI-75823 | IGKV1D- | DITMTQ | 1882 | RASQSIR | 2055 | WYQQKP | 2257 | DASSLQ | 2389 | GVPSRFSG | 2534 | QQSYN | 2702 | FGQGTK | 2937 |
| | 39 | SPSSLS | | RFLN | | GKAPKL | | S | | SGSGTDFT | | TPPWT | | VEIK | |
| | | ASVGDR | | | | LIY | | | | LTISSLQP | | | | | |
| | | VTITC | | | | | | | | EDFATYYC | | | | | |
| ADI-75569 | IGLV3-21 | SYVLTQ | 1883 | EGNYIGG | 2056 | WYQQRP | 2262 | DDFGRP | 2390 | GIPERFSG | 2535 | QVWDT | 2707 | FGGGTK | 2939 |
| | | PPSVSV | | QSVN | | GQAPVV | | S | | SNSGNTAT | | SSDRI | | LTVL | |
| | | APGQTA | | | | VLY | | | | LTINWVEA | | L | | | |
| | | RITC | | | | | | | | GDEADYYC | | | | | |
| ADI-75623 | IGKV1D- | DMTMTQ | 1884 | RASQSIS | 2057 | WYQQKP | 2263 | AASSLQ | 2391 | GVPSRFSG | 2536 | QQSYT | 2708 | FGQGTR | 2940 |
| | 39 | SPSSLS | | KFLN | | GKAPNL | | S | | SGSGTDFT | | MPPVT | | LEIK | |
| | | ASVGDR | | | | LIY | | | | LTINSLQP | | | | | |
| | | VTITC | | | | | | | | EDFATYYC | | | | | |
| ADI-75626 | IGKV1D- | DIQMTQ | 1878 | RASQSIS | 2058 | WFQQRP | 2264 | AASTLQ | 2392 | GVPSRFSG | 2534 | QQSFV | 2709 | FGRGTK | 2941 |
| | 39 | SPSSLS | | DFLS | | GKAPKL | | S | | SGSGTDFT | | TPYT | | VEIK | |
| | | ASVGDR | | | | LIY | | | | LTISSLQP | | | | | |
| | | VTITC | | | | | | | | EDFATYYC | | | | | |

| | | SEQ | | SEQ | Reverted | SEQ |
|---|---|---|---|---|---|---|
| | | ID | | ID | VL | ID |
| Clone ID | VL DNA | NO: | VL Protein | NO: | Protein | NO: |
| ADI-75846 | GACATCCAGTTGACCCAGTCTCCATCCTCCCTGTCTGCATCTGTAGGAGACAGAGTCACCA | 2962 | DIQLTQSPSSLSASVGDRVTITCQASQD | 3245 | | |
| | TCACTTGCCAGGCGAGTCAGGACATTACCAACTATTTATCTTGGTATCAACAGAAACCAGG | | ITNYLSWYQQKPGKAPKLLIYDAVNLET | | | |
| | GAAAGCCCCTAAGCTCCTGATCTACGATGCAGTCAATTTGGAAACAGGGGTCCCATCAAGG | | GVPSRFSGSGSGTDFTFTISSLQPEDFA | | | |
| | TTCAGTGGCAGTGGATCTGGGACAGATTTTACTTTCACCATCAGCAGCCTGCAGCCTGAAG | | TYYCQQYDNLPLTFGGGTKVEIK | | | |
| | ATTTTGCAACATATTATTGTCAACAATATGATAATCTCCCGCTCACTTTCGGCGGAGGGAC | | | | | |
| | CAAGGTGGAAATCAAA | | | | | |
| ADI-75829 | GAAATTGCAATGACGCAGTCTCCAGCCACCCTGTCTGTGTCTCCAGGGGAAAGAGCCACCC | 2963 | EIAMTQSPATLSVSPGERATLSCRASQS | 3246 | | |
| | TCTCCTGCAGGGCCAGCCAGAGTGTTAACAGCAACTTAGCCTGGTACCAGCAGAAACCTGG | | VNSNLAWYQQKPGQAPRLLIYGASTRAT | | | |
| | CCAGGCTCCCAGGCTCCTCATCTATGGTGCATCCACCAGGGCCACTGGTATCCCAGCCAGG | | GIPARFSGSGSGTEFTLTISSLQSEDFA | | | |
| | TTCAGTGGCAGTGGGTCTGGGACAGAGTTCACTCTCACCATCAGCAGCCTGCAGTCTGAAG | | VYFCQQYNIWPLYTFGQGTKVEIK | | | |
| | ATTTTGCAGTTTATTTCTGTCAGCAGTATAATATCTGGCCTCTATACACTTTTGGCCAGGG | | | | | |
| | GACCAAGGTGGAAATCAAA | | | | | |
| ADI-75811 | GACATCCAGATGACCCAGTCTCCATCCTCCCTGTCTGCATCTGTAGGAGACAGAGTCACCA | 2964 | DIQMTQSPSSLSASVGDRVTITCRASQS | 3247 | | |
| | TCACTTGCCGGGCAAGTCAGAGCATAAGCAGCTATTTAAATTGGTATCAGCAGAAACCAGG | | ISSYLNWYQQKPGKAPKLLIYSASSLQS | | | |
| | GAAAGCCCCTAAGCTCCTGATCTATTCTGCATCCAGTTTGCAAAGTGGGGTCCCATCAAGG | | GVPSRFSGSGSGTDFSLTISSLQPEDFA | | | |
| | TTCAGTGGCAGTGGATCTGGGACAGATTTCAGTCTCACCATCAGCAGTCTGCAACCTGAAG | | TYYCQQSYNTPPWTFGQGTKVEIK | | | |
| | ATTTTGCAACTTACTACTGTCAACAGAGTTACAATACCCCTCCGTGGACGTTCGGCCAAGG | | | | | |
| | GACCAAGGTGGAGATCAAA | | | | | |
| ADI-75585 | GACATCCAGTTGACCCAGTCTCCATCCTCCCTGTCTGCATCTGTAGGAGACAGAGTCACCA | 2965 | DIQLTQSPSSLSASVGDRVTITCRASQA | 3248 | | |
| | TCACTTGCCGGGCGAGTCAGGCCATTAGCAATTCTTTAGCCTGGTATCAGCAGAAACCAGG | | ISNSLAWYQQKPGKAPKLLLYAASILES | | | |
| | GAAAGCCCCTAAGCTCCTGCTCTATGCTGCATCCATATTGGAGAGTGGGGTCCCATCCAGG | | GVPSRFSGSGSGTDYTLTISSLQPEDFA | | | |
| | TTCAGTGGCAGTGGATCTGGGACGGATTACACTCTCACTATCAGCAGCCTGCAGCCTGAAG | | TYYCQQYYSSLGRTFGGGTKVDIK | | | |
| | ATTTTGCAACTTATTACTGTCAACAGTATTATAGTAGTCTCGGGCGCACTTTCGGCGGAGG | | | | | |
| | GACCAAAGTGGATATCAAA | | | | | |
| ADI-75869 | GACATCCAGATGACCCAGTCTCCTTCCACCCTGTCTGCATCTGTAGGAGACAGAGTCACCA | 2966 | DIQMTQSPSTLSASVGDRVTITCRASQS | 3249 | | |
| | TCACTTGCCGGGCCAGTCAGAGTATTAGTAGGTGGTTGGCCTGGTATCAGCAGAAACCAGG | | ISRWLAWYQQKPGKAPKLLIYKASSLES | | | |
| | GAAAGCCCCTAAGCTCCTGATCTATAAGGCGTCTAGTTTAGAAAGTGGGGTCCCATCAAGG | | GVPSRFSGSGSGTEFTLTISSLQPDDFA | | | |
| | TTCAGCGGCAGTGGATCTGGGACAGAATTCACTCTCACCATCAGCAGCCTGCAGCCTGATG | | TYYCQQYDSYPWTFGQGTKVEIK | | | |
| | ATTTTGCAACTTATTACTGCCAACAGTATGATAGTTATCCGTGGACCTTCGGCCAAGGGAC | | | | | |
| | CAAGGTGGAAATCAAA | | | | | |
| ADI-75817 | GACATCCAGATGACCCAGTCTCCAAACTCCCTGCCCGTCACCCCTGGAGAGCCGGCCTCCA | 2967 | DIQMTQSPNSLPVTPGEPASISCRSSQS | 3250 | | |
| | TCTCCTGCAGGTCTAGTCAGAGCCTCCTGCACACTAATGGATACAACTATTTGGATTGGTA | | LLHTNGYNYLDWYLQKPGQSPQLLIYLG | | | |
| | CCTGCAGAAGCCAGGGCAGTCTCCACAGCTCCTGATCTATTTGGGTTCTAATCGGGCCTCC | | SNRASGVPDRFSGSGSGTDFTLKISRVE | | | |
| | GGGGTCCCTGACAGGTTCAGTGGCAGTGGATCAGGCACAGATTTTACACTGAAAATCAGCA | | AEDVGVYYCMQGLQTPPTFGGGTKVEIK | | | |
| | GAGTGGAGGCTGAGGATGTTGGGGTTTATTACTGCATGCAAGGTCTACAAACTCCTCCCAC | | | | | |
| | TTTCGGCGGAGGGACCAAGGTGGAGATCAAA | | | | | |
| ADI-75590 | GAAATCCAAATGACCCAGTCTCCTTCCTCCCTGTCTGCTTCTGTAGGAGACAGAGTCACCA | 2968 | EIQMTQSPSSLSASVGDRVTITCRASQG | 3251 | | |
| | TCACTTGCCGGGCAAGTCAGGGCATTGGCAGTGCTTTAGCCTGGTATCGGCAGAGGCCAGG | | IGSALAWYRQRPGKPPKLLISDASSLEG | | | |
| | GAAACCTCCTAAGCTCCTAATCTCTGATGCCTCCAGTTTGGAAGGTGGGGTCCCATCAAGG | | GVPSRFSGSGSGTDFTLTISSLQPEDFA | | | |
| | TTCAGCGGCAGTGGATCTGGGACAGATTTCACGCTCACCATCAGCAGCCTGCAGCCTGAAG | | TYYCQQFNNRITFGGGTKVEIK | | | |
| | ATTTTGCAACTTATTACTGTCAGCAGTTTAACAACCGGATAACTTTCGGCGGAGGGACCAA | | | | | |
| | GGTGGAAATCAAA | | | | | |
| ADI-75823 | GACATCACGATGACCCAGTCTCCATCCTCCCTGTCTGCATCTGTAGGAGACAGAGTCACCA | 2969 | DITMTQSPSSLSASVGDRVTITCRASQS | 3252 | | |
| | TCACTTGCCGGGCAAGTCAGAGCATTAGAAGATTTAAATTGGTATCAGCAGAAACCAGG | | IRRFLNWYQQKPGKAPKLLIYDASSLQS | | | |
| | GAAAGCCCCTAAGCTCCTGATCTATGATGCATCCAGTTTGCAAAGTGGGGTCCCATCAAGG | | GVPSRFSGSGSGTDFTLTISSLQPEDFA | | | |
| | TTCAGTGGCAGTGGATCTGGGACAGATTTCACTCTCACCATCAGCAGTCTGCAACCTGAAG | | TYYCQQSYNTPPWTFGQGTKVEIK | | | |
| | ATTTTGCAACTTACTACTGTCAGCAGAGTTACAATACCCCCCCGTGGACGTTCGGCCAAGG | | | | | |
| | GACCAAGGTGGAAATCAAA | | | | | |
| ADI-75569 | TCGTATGTGCTGACTCAGCCACCCTCGGTGTCAGTGGCCCCAGGACAGACGGCCAGGATTA | 2970 | SYVLTQPPSVSVAPGQTARITCEGNYIG | 3253 | | |
| | CCTGTGAGGGAAACTACATTGGAGGTCAAAGTGTAAACTGGTACCAGCAGAGGCCAGGCCA | | GQSVNWYQQRPGQAPVVVLYDDFGRPSG | | | |
| | GGCCCCTGTGGTGGTCCTCTATGATGATTTCGGCCGGCCCTCAGGGATCCCTGAGCGATTC | | IPERFSGSNSGNTATLTINWVEAGDEAD | | | |
| | TCTGGCTCCAACTCTGGGAACACGGCCACCCTGACCATCAACTGGGTCGAAGCCGGGGATG | | YYCQVWDTSSDRILFGGGTKLTVL | | | |
| | AGGCCGACTATTATTGTCAGGTGTGGGATACTAGTAGTGACCGAATACTGTTCGGCGGAGG | | | | | |
| | GACCAAGCTGACCGTCCTA | | | | | |
| ADI-75623 | GACATGACAATGACGCAGTCTCCATCCTCCCTGTCTGCATCTGTAGGAGACAGAGTCACCA | 2971 | DMTMTQSPSSLSASVGDRVTITCRASQS | 3254 | | |
| | TCACTTGCCGGGCAAGTCAGAGCATTAGCAAGTTTTTAAATTGGTATCAGCAGAAACCAGG | | ISKFLNWYQQKPGKAPNLLIYAASSLQS | | | |
| | GAAAGCCCCTAATCTCCTGATCTATGCTGCATCCAGTTTGCAAAGTGGGGTCCCATCAAGG | | GVPSRFSGSGSGTDFTLTINSLQPEDFA | | | |
| | TTCAGTGGCAGTGGATCTGGGACAGATTTCACTCTCACCATCAACAGTCTGCAACCTGAAG | | TYYCQQSYTMPPVTFGQGTRLEIK | | | |
| | ATTTTGCAACTTACTACTGTCAACAGAGTTACACTATGCCTCCGGTCACCTTCGGCCAAGG | | | | | |
| | GACACGACTGGAGATTAAA | | | | | |
| ADI-75626 | GACATCCAGATGACCCAGTCTCCATCCTCCCTGTCTGCGTCTGTCGGAGACAGAGTCACCA | 2972 | DIQMTQSPSSLSASVGDRVTITCRASQS | 3255 | | |
| | TCACTTGCCGGGCAAGTCAGAGCATTAGCGACTTTTTAAGTTGGTTCCAGCAGAGACCAGG | | ISDFLSWFQQRPGKAPKLLIYAASTLQS | | | |
| | GAAAGCCCCTAAGCTCCTGATCTATGCTGCATCAACTTTACAAAGTGGGGTCCCATCGAGG | | GVPSRFSGSGSGTDFTLTISSLQPEDFA | | | |
| | TTCAGTGGCAGTGGATCTGGGACAGATTTCACTCTCACCATCAGCAGTCTGCAACCTGAAG | | TYYCQQSFVTPYTFGRGTKVEIK | | | |
| | ATTTTGCAACTTACTACTGTCAACAGAGTTTCGTAACCCCGTACACTTTTGGCCGGGGGAC | | | | | |
| | CAAGGTGGAAATCAAA | | | | | |

| | | | SEQ | | SEQ | | SEQ | | SEQ | | SEQ | | SEQ | | SEQ |
|---|---|---|---|---|---|---|---|---|---|---|---|---|---|---|---|
| | VL | VL | ID | VL | ID | VL | ID | VL | ID | VL | ID | VL | ID | VL | ID |
| Clone ID | Germline | FR1 | NO: | CDR1 | NO: | FR2 | NO: | CDR2 | NO: | FR3 | NO: | CDR3 | NO: | FR4 | NO: |
| ADI-75622 | IGKV1-12 | DIQMTQ | 1885 | RASQGLS | 2059 | WYQQKP | 2257 | AASSLQ | 2391 | GVPSRFSG | 2534 | QQANS | 2710 | FGGGTK | 2936 |
| | | SPSSVS | | RWLA | | GKAPKL | | S | | SGSGTDFT | | FPLT | | VEIK | |
| | | ASVGDR | | | | LIY | | | | LTISSLQP | | | | | |
| | | VTITC | | | | | | | | EDFATYYC | | | | | |
| ADI-75598 | IGKV1-33 | DIKLTQ | 1886 | QASHDIN | 2060 | WYQQKP | 2257 | EASNLE | 2393 | GVPSRFSG | 2537 | QQYDN | 2711 | FGQGTR | 2940 |
| | | SPSSLS | | NYLN | | GKAPKL | | T | | SGSGTDFT | | LPIT | | LEIK | |
| | | ASVGDR | | | | LIY | | | | FTISSLQP | | | | | |
| | | VTITC | | | | | | | | EDIATYYC | | | | | |
| ADI-75572 | IGLV2-8 | ELVLTQ | 1887 | TGTSSDV | 2061 | WYQQHP | 2265 | EVNKRP | 2394 | GVPDRFSG | 2538 | SSYAG | 2712 | FGGGTK | 2939 |
| | | SPSASG | | GGYNYVS | | GKAPKL | | S | | SKSGNTAS | | PFWV | | LTVL | |
| | | SPGQSV | | | | MIY | | | | LTVSGLQA | | | | | |
| | | TISC | | | | | | | | EDEADYYC | | | | | |
| ADI-75819 | IGKV1- | DIQMTQ | 1878 | RASQGIS | 2062 | WYQQKP | 2259 | SASTLE | 2395 | GVPSRFSG | 2539 | QEYYS | 2713 | FGPGTK | 2942 |
| | NL1 | SPSSLS | | NSLA | | GKAPKL | | S | | SGSGTDFT | | TRT | | VEIK | |
| | | ASVGDR | | | | LLY | | | | LTITSLQP | | | | | |
| | | VTITC | | | | | | | | EDFATYYC | | | | | |
| ADI-75616 | IGKV1D- | DIQMTQ | 1878 | RASQGIN | 2063 | WYQQKP | 2259 | DASSLE | 2396 | GVPSRFSG | 2540 | QQFNN | 2714 | FGGGTK | 2938 |
| | 13 | SPSSLS | | SALA | | GKAPKL | | N | | GGSGTDFT | | LIT | | VDIK | |
| | | ASVGDR | | | | LLY | | | | LTITSLQP | | | | | |
| | | VTITC | | | | | | | | EDFATYYC | | | | | |
| ADI-75581 | IGKV1D- | EIQMTQ | 1881 | RAGQSIA | 2064 | WYQQKP | 2257 | AASSLQ | 2391 | GVPSRFSG | 2541 | QQSYS | 2715 | FGQGTR | 2940 |
| | 39 | SPSSLS | | TYLN | | GKAPKL | | S | | SGSGADFT | | TPIT | | LEIK | |
| | | ASVGDR | | | | LIY | | | | LTISSLQP | | | | | |
| | | VTITC | | | | | | | | EDFATYYC | | | | | |
| ADI-75613 | IGKV1-33 | DIQLTQ | 1876 | QASQDIN | 2065 | WYQQKP | 2266 | DASNLE | 2397 | GVPSRFSG | 2542 | QQYDN | 2716 | FGGGTK | 2936 |
| | | SPSSLS | | NYLI | | GKAPRV | | A | | SGSGTDFT | | VPLI | | VEIK | |
| | | ASVGDR | | | | LIY | | | | FTISSLQP | | | | | |
| | | VTITC | | | | | | | | EDIATYFC | | | | | |
| ADI-75872 | IGKV1D- | EIVLTQ | 1888 | RASQSIS | 2066 | WYQQKP | 2257 | AASSLQ | 2391 | GVPSRFSG | 2543 | QQSYT | 2717 | FGQGTK | 2937 |
| | 39 | SPSSLS | | TYLN | | GKAPKL | | S | | SGSGTDFT | | APGYT | | VEIK | |
| | | ASVGDR | | | | LIY | | | | LTVSSLQP | | | | | |
| | | VTITC | | | | | | | | EDFATYFC | | | | | |
| VYD223 | IGKV1- | EIVMTQ | 1889 | RASQGIT | 2067 | WYQQKP | 2267 | AASTLE | 2398 | GVPPRFRG | 2544 | QQYFD | 2718 | FGQGTK | 2937 |
| (ADI- | NL1 | SPSSLS | | NSLA | | GKAPNL | | S | | SGSGTDFT | | SPHT | | VEIK | |
| 75865) | | ASVGDT | | | | LLY | | | | LTISSLQP | | | | | |
| | | VTITC | | | | | | | | EDFATFYC | | | | | |
| ADI-75822 | IGLV3-21 | EIVLTQ | 1890 | GGNNIGS | 2068 | WLQQKP | 2268 | DDSDRP | 2399 | GIPERFSG | 2545 | QVWDS | 2719 | FGTGTQ | 2943 |
| | | SPSVSV | | RSVH | | GQAPVL | | S | | SNSGNTAT | | YSNND | | LTVL | |
| | | APGQTA | | | | VVY | | | | LTISRVEA | | V | | | |
| | | RITC | | | | | | | | GDEADYYC | | | | | |
| ADI-75843 | IGKV1- | EIVMTQ | 1891 | RASQGIS | 2062 | WYQQKP | 2259 | AASTLE | 2398 | GVPSRFSG | 2531 | QQYYS | 2720 | FGQGTK | 2944 |
| | NL1 | SPSSLS | | NSLA | | GKAPKL | | S | | SGSGTDYT | | TRS | | VDIK | |
| | | ASVGDR | | | | LLY | | | | LTISSLQP | | | | | |
| | | VTITC | | | | | | | | EDFATYYC | | | | | |

| | | SEQ | | SEQ | Reverted | SEQ |
|---|---|---|---|---|---|---|
| | | ID | | ID | VL | ID |
| Clone ID | VL DNA | NO: | VL Protein | NO: | Protein | NO: |
| ADI-75622 | GACATCCAGATGACCCAGTCTCCATCTTCCGTGTCTGCATCTGTGGGAGACAGAGTCACAA | 2973 | DIQMTQSPSSVSASVGDRVTITCRASQG | 3256 | | |
| | TCACTTGTCGGGCGAGTCAGGGTCTTAGTAGATGGTTAGCCTGGTATCAGCAGAAACCAGG | | LSRWLAWYQQKPGKAPKLLIYAASSLQS | | | |
| | GAAAGCCCCTAAGCTCCTGATCTATGCTGCATCTAGTTTGCAAAGTGGGGTCCCGTCAAGG | | GVPSRFSGSGSGTDFTLTISSLQPEDFA | | | |
| | TTCAGCGGCAGTGGATCTGGGACAGATTTCACTCTCACCATCAGCAGCCTGCAGCCTGAAG | | TYYCQQANSFPLTFGGGTKVEIK | | | |
| | ACTTTGCAACTTACTATTGTCAACAGGCTAACAGTTTCCCCCTCACTTTCGGCGGTGGGAC | | | | | |
| | CAAGGTGGAAATCAAA | | | | | |
| ADI-75598 | GACATCAAATTGACCCAGTCTCCATCCTCCCTGTCTGCCTCTGTAGGAGACAGAGTCACCA | 2974 | DIKLTQSPSSLSASVGDRVTITCQASHD | 3257 | | |
| | TCACTTGCCAGGCGAGTCACGACATTAACAACTATTTAAATTGGTATCAGCAAAAACCAGG | | INNYLNWYQQKPGKAPKLLIYEASNLET | | | |
| | GAAAGCCCCTAAACTCCTGATCTACGAAGCATCCAACTTGGAGACAGGGGTCCCATCAAGA | | GVPSRFSGSGSGTDFTFTISSLQPEDIA | | | |
| | TTCAGTGGAAGTGGATCTGGGACAGACTTTACTTTCACCATCAGCAGCCTGCAGCCTGAAG | | TYYCQQYDNLPITFGQGTRLEIK | | | |
| | ATATTGCAACATATTACTGTCAACAATATGATAATCTCCCCATCACCTTCGGCCAAGGGAC | | | | | |
| | ACGACTGGAGATTAAA | | | | | |
| ADI-75572 | GAGCTTGTGCTGACTCAGTCCCCCTCCGCGTCCGGGTCTCCTGGACAGTCAGTCACCATCT | 2975 | ELVLTQSPSASGSPGQSVTISCTGTSSD | 3258 | | |
| | CCTGCACTGGAACCAGTAGTGACGTTGGTGGTTATAACTATGTCTCCTGGTACCAACAACA | | VGGYNYVSWYQQHPGKAPKLMIYEVNKR | | | |
| | CCCCGGCAAAGCCCCCAAACTCATGATTTATGAGGTCAATAAGCGGCCCTCAGGGGTCCCT | | PSGVPDRFSGSKSGNTASLTVSGLQAED | | | |
| | GATCGTTTCTCTGGCTCCAAGTCTGGCAACACGGCCTCCCTGACCGTCTCTGGGCTCCAGG | | EADYYCSSYAGPFWVFGGGTKLTVL | | | |
| | CTGAGGATGAGGCTGATTATTATTGTAGCTCATATGCAGGCCCCTTTTGGGTGTTCGGCGG | | | | | |
| | AGGCACCAAGCTCACCGTCCTA | | | | | |
| ADI-75819 | GACATCCAGATGACCCAGTCTCCATCCTCCCTGTCTGCATCTGTGGGAGACAGAGTCACCA | 2976 | DIQMTQSPSSLSASVGDRVTITCRASQG | 3259 | | |
| | TCACTTGCCGGGCGAGTCAGGGCATTAGTAATTCTTTAGCCTGGTATCAGCAGAAACCAGG | | ISNSLAWYQQKPGKAPKLLLYSASTLES | | | |
| | GAAAGCCCCTAAGCTCCTGCTCTATTCTGCATCCACATTGGAAAGTGGGGTCCCATCCAGG | | GVPSRFSGSGSGTDFTLTITSLQPEDFA | | | |
| | TTCAGTGGCAGTGGATCTGGGACGGATTTCACTCTCACCATCACCAGCCTGCAGCCTGAAG | | TYYCQEYYSTRTFGPGTKVEIK | | | |
| | ATTTTGCAACTTATTACTGTCAAGAGTATTATAGTACCCGGACTTTCGGCCCTGGGACCAA | | | | | |
| | GGTGGAGATCAAA | | | | | |
| ADI-75616 | GACATCCAGATGACCCAGTCTCCATCCTCCCTGTCTGCATCTGTAGGAGACAGAGTCACCA | 2977 | DIQMTQSPSSLSASVGDRVTITCRASQG | 3260 | | |
| | TCACTTGCCGGGCAAGTCAGGGCATTAACAGTGCTTTAGCCTGGTATCAGCAGAAACCAGG | | INSALAWYQQKPGKAPKLLLYDASSLEN | | | |
| | GAAAGCTCCTAAACTCCTGCTCTATGATGCCTCCAGTTTGGAAAATGGGGTCCCATCAAGG | | GVPSRFSGGGSGTDFTLTITSLQPEDFA | | | |
| | TTCAGCGGCGGTGGATCTGGGACAGATTTCACTCTCACCATCACCAGCCTGCAGCCTGAAG | | TYYCQQFNNLITFGGGTKVDIK | | | |
| | ATTTTGCAACTTATTATTGTCAACAATTTAATAATCTGATCACTTTCGGCGGAGGGACCAA | | | | | |
| | AGTGGATATCAAA | | | | | |
| ADI-75581 | GAAATCCAGATGACCCAGTCTCCATCCTCCCTGTCTGCATCTGTAGGAGACAGAGTCACCA | 2978 | EIQMTQSPSSLSASVGDRVTITCRAGQS | 3261 | | |
| | TCACTTGCCGGGCAGGTCAGAGCATTGCCACCTATTTAAATTGGTATCAGCAGAAACCAGG | | IATYLNWYQQKPGKAPKLLIYAASSLQS | | | |
| | GAAAGCCCCTAAGCTCCTGATCTATGCTGCATCCAGTTTGCAAAGTGGGGTCCCATCAAGG | | GVPSRFSGSGSGADFTLTISSLQPEDFA | | | |
| | TTCAGTGGCAGTGGATCTGGGGCAGATTTCACTCTCACCATCAGCAGTCTGCAACCTGAAG | | TYYCQQSYSTPITFGQGTRLEIK | | | |
| | ATTTTGCAACTTACTACTGTCAACAGAGTTACAGTACCCCTATCACCTTCGGCCAAGGGAC | | | | | |
| | ACGACTGGAGATTAAA | | | | | |
| ADI-75613 | GACATCCAATTGACCCAGTCTCCATCCTCCCTGTCTGCATCTGTAGGAGACAGAGTCACCA | 2979 | DIQLTQSPSSLSASVGDRVTITCQASQD | 3262 | | |
| | TCACTTGCCAGGCGAGTCAGGACATTAACAACTATTTAATTTGGTATCAGCAAAAACCAGG | | INNYLIWYQQKPGKAPRVLIYDASNLEA | | | |
| | CAAAGCCCCTAGGGTCCTGATCTACGATGCATCCAATTTGGAAGCAGGGGTCCCATCAAGG | | GVPSRFSGSGSGTDFTFTISSLQPEDIA | | | |
| | TTCAGTGGAAGTGGATCTGGGACAGATTTTACTTTCACCATCAGCAGCCTGCAGCCTGAAG | | TYFCQQYDNVPLIFGGGTKVEIK | | | |
| | ATATTGCTACATATTTCTGTCAACAATATGATAATGTCCCCCTCATTTTCGGCGGAGGGAC | | | | | |
| | CAAGGTGGAAATCAAA | | | | | |
| ADI-75872 | GAAATCGTGTTGACCCAGTCTCCATCCTCCCTGTCTGCATCTGTTGGAGACAGAGTCACCA | 2980 | EIVLTQSPSSLSASVGDRVTITCRASQS | 3263 | | |
| | TCACTTGCCGGGCAAGTCAGAGCATTAGCACCTATTTAAATTGGTATCAGCAGAAACCAGG | | ISTYLNWYQQKPGKAPKLLIYAASSLQS | | | |
| | GAAAGCCCCTAAGCTCCTGATCTATGCTGCATCCAGTTTGCAAAGTGGGGTCCCATCAAGG | | GVPSRFSGSGSGTDFTLTVSSLQPEDFA | | | |
| | TTCAGTGGCAGTGGGTCTGGGACAGATTTCACTCTCACCGTCAGCAGTCTGCAACCTGAAG | | TYFCQQSYTAPGYTFGQGTKVEIK | | | |
| | ATTTTGCAACTTACTTCTGTCAACAGAGTTACACTGCCCCTGGGTACACTTTTGGCCAGGG | | | | | |
| | GACCAAGGTGGAGATCAAA | | | | | |
| VYD223 | GAAATTGTGATGACCCAGTCTCCATCCTCCCTGTCTGCATCTGTAGGAGACACAGTCACCA | 2981 | EIVMTQSPSSLSASVGDTVTITCRASQG | 3264 | DIQMTQSPS | 3525 |
| (ADI- | TCACTTGCCGGGCGAGTCAGGGCATTACCAATTCCTTAGCCTGGTATCAGCAGAAACCAGG | | ITNSLAWYQQKPGKAPNLLLYAASTLES | | SLSASVGDT | |
| 75865) | GAAAGCCCCTAACCTCCTGCTCTATGCCGCATCCACATTGGAAAGTGGGGTCCCACCCAGG | | GVPPRFRGSGSGTDFTLTISSLQPEDFA | | VTITCRASQ | |
| | TTCCGTGGCAGCGGATCTGGGACGGATTTCACTCTCACCATCAGCAGCCTGCAGCCTGAAG | | TFYCQQYFDSPHTFGQGTKVEIK | | GITNSLAWY | |
| | ATTTTGCAACTTTTTACTGTCAACAGTATTTTGATAGCCCTCACACTTTTGGCCAGGGGAC | | | | QQKPGKAPN | |
| | CAAGGTGGAAATCAAA | | | | LLLYAASTL | |
| | | | | | ESGVPPRFR | |
| | | | | | GSGSGTDFT | |
| | | | | | LTISSLQPE | |
| | | | | | DFATFYCQQ | |
| | | | | | YFDSPHTFG | |
| | | | | | QGTKVEIK | |
| ADI-75822 | GAAATTGTGTTGACGCAGTCTCCCTCGGTGTCAGTGGCCCCAGGACAGACGGCCAGGATTA | 2982 | EIVLTQSPSVSVAPGQTARITCGGNNIG | 3265 | | |
| | CCTGTGGGGGAAACAACATTGGAAGTAGAAGTGTGCACTGGCTCCAGCAGAAGCCAGGCCA | | SRSVHWLQQKPGQAPVLVVYDDSDRPSG | | | |
| | GGCCCCTGTGCTGGTCGTCTATGATGATAGCGACCGGCCCTCAGGGATCCCTGAGCGATTC | | IPERFSGSNSGNTATLTISRVEAGDEAD | | | |
| | TCAGGCTCCAACTCTGGGAACACGGCCACCCTGACCATCAGCAGGGTCGAAGCCGGGGATG | | YYCQVWDSYSNNDVFGTGTQLTVL | | | |
| | AGGCCGACTATTACTGTCAGGTGTGGGATAGTTATAGTAATAACGATGTCTTCGGAACTGG | | | | | |
| | GACCCAGCTGACCGTCCTC | | | | | |
| ADI-75843 | GAAATTGTGATGACCCAGTCTCCATCCTCCCTGTCTGCATCTGTAGGAGACAGAGTCACCA | 2983 | EIVMTQSPSSLSASVGDRVTITCRASQG | 3266 | | |
| | TCACTTGCCGGGCGAGTCAGGGCATTAGCAATTCTTTGGCCTGGTATCAGCAGAAACCAGG | | ISNSLAWYQQKPGKAPKLLLYAASTLES | | | |
| | GAAAGCCCCTAAGCTCCTGCTCTATGCTGCATCCACGTTGGAAAGTGGGGTCCCATCCAGG | | GVPSRFSGSGSGTDYTLTISSLQPEDFA | | | |
| | TTCAGTGGCAGTGGATCTGGGACGGATTACACTCTCACCATCAGCAGCCTGCAGCCTGAAG | | TYYCQQYYSTRSFGQGTKVDIK | | | |
| | ATTTTGCAACTTATTACTGTCAACAGTATTATAGTACCAGGTCGTTCGGCCAAGGGACCAA | | | | | |
| | GGTGGATATCAAA | | | | | |

| | | | SEQ | | SEQ | | SEQ | | SEQ | | SEQ | | SEQ | | SEQ |
|---|---|---|---|---|---|---|---|---|---|---|---|---|---|---|---|
| | VL | VL | ID | VL | ID | VL | ID | VL | ID | VL | ID | VL | ID | VL | ID |
| Clone ID | Germline | FR1 | NO: | CDR1 | NO: | FR2 | NO: | CDR2 | NO: | FR3 | NO: | CDR3 | NO: | FR4 | NO: |
| ADI-75584 | IGLV3-25 | TYELTQ | 1892 | SGDSLPR | 2069 | WYQQKP | 2269 | KDSERP | 2400 | GIPERFSG | 2546 | QSADS | 2721 | FGGGTK | 2939 |
| | | PPSVSV | | QYAY | | GQAPVM | | S | | STSGTTVT | | GSYHV | | LTVL | |
| | | SPGQTA | | | | VIH | | | | LTISGVQA | | I | | | |
| | | RITC | | | | | | | | EDEADYYC | | | | | |
| ADI-75655 | IGKV1D- | DIQMTQ | 1878 | RAGQGIG | 2070 | WYQQKP | 2259 | DASSLE | 2396 | GVPSRFSG | 2534 | QQFNK | 2722 | FGGGTK | 2938 |
| | 13 | SPSSLS | | TALA | | GKAPKL | | N | | SGSGTDFT | | LVT | | VDIK | |
| | | ASVGDR | | | | LLY | | | | LTISSLQP | | | | | |
| | | VTITC | | | | | | | | EDFATYYC | | | | | |
| ADI-75641 | IGLV3-21 | SHVLTQ | 1893 | GEDDIGS | 2071 | WYQQKP | 2270 | YDRDRP | 2401 | GIPERFSG | 2547 | QVWDN | 2723 | FGGGTK | 2939 |
| | | PPSVSV | | KSVH | | GQAPML | | S | | SNSGNTAT | | SWV | | LTVL | |
| | | APGKTA | | | | IIY | | | | LTISSVEA | | | | | |
| | | KITC | | | | | | | | GDEADYYC | | | | | |
| ADI-75565 | IGKV1-13 | DIVMTQ | 1894 | RASQDIG | 2072 | WYQQKP | 2271 | DASSLG | 2402 | GVPSRFSG | 2548 | QQFNS | 2724 | FGGGTK | 2936 |
| | | SPSSLS | | SALA | | GNAPRF | | S | | SGSGTDFT | | LVT | | VEIK | |
| | | ASVGDS | | | | LIS | | | | LTIRGLQP | | | | | |
| | | TITC | | | | | | | | ADFATYYC | | | | | |
| ADI-75783 | IGKV1D- | DIQMTQ | 1895 | RASQTIN | 2073 | WYQQKP | 2257 | GASSLQ | 2403 | GVPSRFSG | 2549 | QQTYS | 2725 | FGPGTK | 2942 |
| | 39 | SPSSLS | | TYLN | | GKAPKL | | S | | SGSGTDFT | | TPGVT | | VEIK | |
| | | ASVGDR | | | | LIY | | | | LSISGVQP | | | | | |
| | | VTISC | | | | | | | | EDFATYYC | | | | | |
| ADI-75805 | IGKV1D- | DIQMTQ | 1896 | RASQSMT | 2074 | WYQQKP | 2272 | GASSLH | 2404 | GVPSRFSG | 2534 | QQSYS | 2726 | FGQGTK | 2937 |
| | 39 | SPSSLS | | NSLN | | GKAPKL | | S | | SGSGTDFT | | NPWT | | VEIK | |
| | | ASVGDR | | | | LIH | | | | LTISSLQP | | | | | |
| | | VTIAC | | | | | | | | EDFATYYC | | | | | |
| ADI-75588 | IGKV1- | DIQMTQ | 1878 | RASQGIS | 2062 | WYQQQP | 2273 | AVSTLE | 2405 | GVPSRFSG | 2550 | QEYYS | 2713 | FGQGTK | 2937 |
| | NL1 | SPSSLS | | NSLA | | GKAPKL | | S | | SGSGTDYT | | TRT | | VEIK | |
| | | ASVGDR | | | | LLY | | | | LTINSLQP | | | | | |
| | | VTITC | | | | | | | | EDFATYYC | | | | | |
| ADI-75871 | IGKV1- | DIQMTQ | 1897 | RASQDIT | 2075 | WYQQRP | 2274 | AASTLE | 2398 | GVPSRFTG | 2551 | QQYYS | 2727 | FGQGTK | 2937 |
| | NL1 | SPSSLS | | NSLA | | GKAPKL | | S | | SGSGTDFT | | ALRRT | | VEIK | |
| | | ASVGDR | | | | LLY | | | | LTISSLQP | | | | | |
| | | TITC | | | | | | | | EDFATYYC | | | | | |
| ADI-75868 | IGKV1- | EIPLTQ | 1898 | RASQGIR | 2076 | WYQQKP | 2259 | AASRLQ | 2406 | GVPSRFSG | 2531 | QQYYN | 2728 | FGQGTK | 2937 |
| | NL1 | SPSSLS | | NSLA | | GKAPKL | | S | | SGSGTDYT | | TPPWT | | VEIK | |
| | | ASVGDR | | | | LLY | | | | LTISSLQP | | | | | |
| | | VTITC | | | | | | | | EDFATYYC | | | | | |
| ADI-75653 | IGKV1D- | DIQMTQ | 1899 | RASQSIS | 2050 | WYQQKP | 2257 | GASSLH | 2407 | GVPSRFSG | 2534 | QQSYS | 2729 | FGQGTK | 2937 |
| | 39 | SPSSLP | | SYLN | | GKAPKL | | T | | SGSGTDFT | | TPRT | | VEIK | |
| | | ASVGDR | | | | LIY | | | | LTISSLQP | | | | | |
| | | VTITC | | | | | | | | EDFATYYC | | | | | |
| ADI-75826 | IGKV1D- | EIVLTQ | 1888 | RASQSIS | 2077 | WYQQKP | 2257 | AASSLQ | 2391 | GVPSRFSG | 2552 | QQSYN | 2702 | FGQGTK | 2937 |
| | 39 | SPSSLS | | NYLN | | GKAPKL | | S | | SGSGTDFT | | TPPWT | | VEIK | |
| | | ASVGDR | | | | LIY | | | | LTISSLQP | | | | | |
| | | VTITC | | | | | | | | EDLATYYC | | | | | |
| ADI-75709 | IGKV1D- | DITLTQ | 1900 | RASQSIS | 2078 | WYQQKP | 2275 | AASNLQ | 2408 | GVPSRFSG | 2534 | QQSYN | 2702 | FGPGTK | 2942 |
| | 39 | SPSSLS | | RHLS | | GRAPKL | | S | | SGSGTDFT | | TPPWT | | VEIK | |
| | | ASVGDR | | | | LIY | | | | LTISSLQP | | | | | |
| | | VTITC | | | | | | | | EDFATYYC | | | | | |

| | | SEQ | | SEQ | Reverted | SEQ |
|---|---|---|---|---|---|---|
| | | ID | | ID | VL | ID |
| Clone ID | VL DNA | NO: | VL Protein | NO: | Protein | NO: |
| ADI-75584 | ACCTATGAGCTGACTCAGCCACCCTCGGTGTCAGTGTCCCCAGGACAGACGGCCAGGATCA | 2984 | TYELTQPPSVSVSPGQTARITCSGDSLP | 3267 | | |
| | CCTGCTCTGGAGATTCATTGCCAAGGCAATATGCTTATTGGTACCAACAGAAGCCAGGCCA | | RQYAYWYQQKPGQAPVMVIHKDSERPSG | | | |
| | GGCCCCTGTGATGGTAATACATAAAGACAGTGAGAGGCCCTCAGGGATCCCTGAGCGATTC | | IPERFSGSTSGTTVTLTISGVQAEDEAD | | | |
| | TCTGGCTCCACCTCAGGGACAACAGTCACGTTGACCATCAGTGGAGTCCAGGCAGAAGACG | | YYCQSADSGSYHVIFGGGTKLTVL | | | |
| | AGGCTGACTATTACTGTCAATCAGCAGACAGTGGTAGTTATCATGTGATATTCGGCGGAGG | | | | | |
| | GACCAAGCTGACCGTCCTA | | | | | |
| ADI-75655 | GACATCCAGATGACCCAGTCTCCATCCTCCCTGTCTGCATCTGTAGGAGACAGAGTCACCA | 2985 | DIQMTQSPSSLSASVGDRVTITCRAGQG | 3268 | | |
| | TCACTTGCCGGGCAGGTCAGGGCATTGGCACAGCTTTAGCCTGGTATCAGCAGAAACCAGG | | IGTALAWYQQKPGKAPKLLLYDASSLEN | | | |
| | GAAAGCTCCTAAGCTCCTGCTCTATGATGCCTCCAGTTTGGAAAATGGGGTCCCATCCAGG | | GVPSRFSGSGSGTDFTLTISSLQPEDFA | | | |
| | TTCAGCGGCAGTGGATCTGGGACAGATTTCACTCTCACCATCAGCAGCCTGCAGCCTGAAG | | TYYCQQFNKLVTFGGGTKVDIK | | | |
| | ATTTTGCAACTTACTACTGTCAACAGTTTAATAAATTGGTCACTTTTGGCGGAGGGACCAA | | | | | |
| | GGTGGATATCAAA | | | | | |
| ADI-75641 | TCGCATGTGCTGACTCAGCCACCCTCCGTGTCAGTGGCCCCAGGAAAGACGGCCAAGATTA | 2986 | SHVLTQPPSVSVAPGKTAKITCGEDDIG | 3269 | | |
| | CCTGTGGGGAAGACGACATTGGAAGTAAAAGTGTGCACTGGTACCAGCAGAAGCCAGGCCA | | SKSVHWYQQKPGQAPMLIIYYDRDRPSG | | | |
| | GGCCCCTATGCTGATCATCTATTATGATAGGGACCGGCCCTCAGGGATCCCTGAGCGATTC | | IPERFSGSNSGNTATLTISSVEAGDEAD | | | |
| | TCTGGCTCCAACTCTGGGAACACGGCCACCCTGACCATCAGCAGCGTCGAAGCCGGGGATG | | YYCQVWDNSWVFGGGTKLTVL | | | |
| | AGGCCGACTATTACTGTCAGGTGTGGGATAATAGTTGGGTGTTCGGCGGAGGGACCAAGCT | | | | | |
| | CACCGTCCTA | | | | | |
| ADI-75565 | GACATCGTGATGACCCAGTCTCCGTCCTCCCTGTCTGCTTCTGTGGGGGACAGCATCACCA | 2987 | DIVMTQSPSSLSASVGDSITITCRASQD | 3270 | | |
| | TCACTTGCCGGGCAAGTCAGGACATTGGCAGTGCTTTAGCCTGGTATCAGCAGAAACCGGG | | IGSALAWYQQKPGNAPRFLISDASSLGS | | | |
| | GAATGCTCCTAGGTTCCTGATCTCTGATGCCTCCAGTTTGGGAAGTGGGGTCCCATCACGG | | GVPSRFSGSGSGTDFTLTIRGLQPADFA | | | |
| | TTCAGCGGCAGTGGATCTGGGACAGATTTCACTCTCACCATCAGAGGCCTGCAGCCTGCAG | | TYYCQQFNSLVTFGGGTKVEIK | | | |
| | ATTTTGCAACTTATTACTGTCAACAGTTTAATAGCCTGGTCACTTTCGGCGGAGGGACCAA | | | | | |
| | GGTGGAAATCAAA | | | | | |
| ADI-75783 | GACATCCAGATGACCCAGTCTCCATCCTCCCTGTCTGCATCTGTAGGCGACAGAGTCACCA | 2988 | DIQMTQSPSSLSASVGDRVTISCRASQT | 3271 | | |
| | TCTCTTGCCGGGCAAGTCAGACCATTAACACCTATTTAAATTGGTATCAGCAGAAACCAGG | | INTYLNWYQQKPGKAPKLLIYGASSLQS | | | |
| | GAAAGCCCCTAAGCTCCTGATCTATGGTGCATCGAGTTTGCAAAGTGGGGTCCCGTCAAGA | | GVPSRFSGSGSGTDFTLSISGVQPEDFA | | | |
| | TTCAGTGGCAGTGGATCGGGGACAGATTTCACTCTCAGCATCAGCGGTGTCCAACCTGAAG | | TYYCQQTYSTPGVTFGPGTKVEIK | | | |
| | ACTTTGCAACTTACTATTGTCAACAGACTTACAGTACCCCTGGGGTCACTTTCGGCCCTGG | | | | | |
| | GACCAAGGTGGAAATCAAA | | | | | |
| ADI-75805 | GACATCCAGATGACCCAGTCTCCATCGTCCCTGTCTGCATCTGTAGGAGACAGAGTCACCA | 2989 | DIQMTQSPSSLSASVGDRVTIACRASQS | 3272 | | |
| | TCGCTTGCCGGGCAAGTCAGAGCATGACAAACTCTTTAAATTGGTATCAGCAGAAACCAGG | | MTNSLNWYQQKPGKAPKLLIHGASSLHS | | | |
| | AAAAGCCCCTAAGCTCCTGATCCATGGTGCATCCAGTTTGCATAGTGGGGTCCCATCAAGG | | GVPSRFSGSGSGTDFTLTISSLQPEDFA | | | |
| | TTCAGTGGCAGTGGATCTGGGACAGATTTCACTCTCACCATCAGCAGTCTGCAACCTGAAG | | TYYCQQSYSNPWTFGQGTKVEIK | | | |
| | ATTTTGCAACTTACTACTGTCAACAGAGTTACAGTAATCCGTGGACATTCGGCCAAGGGAC | | | | | |
| | CAAGGTGGAGATCAAA | | | | | |
| ADI-75588 | GACATCCAGATGACCCAGTCTCCATCTTCCCTGTCTGCATCTGTAGGAGACAGAGTCACCA | 2990 | DIQMTQSPSSLSASVGDRVTITCRASQG | 3273 | | |
| | TCACTTGCCGGGCGAGTCAGGGCATTAGCAATTCTTTAGCCTGGTATCAGCAGCAACCAGG | | ISNSLAWYQQQPGKAPKLLLYAVSTLES | | | |
| | GAAAGCCCCTAAGCTCCTGCTTTATGCTGTATCCACATTGGAAAGTGGGGTCCCATCCAGG | | GVPSRFSGSGSGTDYTLTINSLQPEDFA | | | |
| | TTCAGTGGCAGTGGATCTGGGACGGATTACACTCTCACCATCAACAGCCTGCAGCCTGAAG | | TYYCQEYYSTRTFGQGTKVEIK | | | |
| | ATTTTGCAACTTATTACTGTCAAGAGTATTATAGTACCCGGACGTTCGGTCAAGGGACCAA | | | | | |
| | GGTGGAGATCAAA | | | | | |
| ADI-75871 | GACATCCAGATGACCCAGTCTCCATCCTCCCTGTCTGCATCTGTCGGAGACAGAATCACCA | 2991 | DIQMTQSPSSLSASVGDRITITCRASQD | 3274 | | |
| | TCACTTGCCGGGCGAGTCAGGGCATTAGCAATTCTTTAGCCTGGTATCAGCAGCAACCAGG | | ITNSLAWYQQRPGKAPKLLLYAASTLES | | | |
| | GAAAGCCCCTAAGCTCCTGCTCTATGCTGCATCCACATTGGAAAGTGGGGTCCCATCCCGG | | GVPSRFTGSGSGTDFTLTISSLQPEDFA | | | |
| | TTCACTGGCAGTGGATCTGGGACGGATTTCACTCTCACCATCAGCAGCCTGCAGCCTGAAG | | TYYCQQYYSALRRTFGQGTKVEIK | | | |
| | ATTTTGCGACTTATTACTGTCAACAGTATTATAGTGCCCTCCGGAGGACTTTTGGCCAGGG | | | | | |
| | GACCAAGGTGGAGATCAAA | | | | | |
| ADI-75868 | GAAATCCCATTGACCCAGTCTCCATCCTCCCTGTCTGCTTCTGTAGGAGACAGAGTCACCA | 2992 | EIPLTQSPSSLSASVGDRVTITCRASQG | 3275 | | |
| | TCACTTGCCGGGCGAGTCAGGGCATTAGGAATTCTTTAGCCTGGTATCAGCAAAAACCAGG | | IRNSLAWYQQKPGKAPKLLLYAASRLQS | | | |
| | GAAAGCCCCTAAGCTCCTGCTCTATGCTGCATCCAGATTGCAAAGTGGGGTCCCATCCAGG | | GVPSRFSGSGSGTDYTLTISSLQPEDFA | | | |
| | TTCAGTGGCAGTGGATCTGGGACAGATTACACTCTCACCATCAGCAGCCTGCAGCCTGAAG | | TYYCQQYYNTPPWTFGQGTKVEIK | | | |
| | ATTTTGCAACTTATTACTGTCAACAGTATTATAATACCCCTCCGTGGACGTTCGGCCAAGG | | | | | |
| | GACCAAGGTGGAAATCAAA | | | | | |
| ADI-75653 | GACATCCAGATGACCCAGTCTCCATCCTCCCTGCCTGCATCTGTAGGAGACAGAGTCACCA | 2993 | DIQMTQSPSSLPASVGDRVTITCRASQS | 3276 | | |
| | TCACTTGCCGGGCAAGTCAGAGCATTAGCAGTTATTTAAATTGGTATCAGCAAAAACCAGG | | ISSYLNWYQQKPGKAPKLLIYGASSLHT | | | |
| | GAAAGCCCCTAAGCTCCTGATTTATGGTGCATCCAGTTTGCATACTGGGGTCCCATCAAGG | | GVPSRFSGSGSGTDFTLTISSLQPEDFA | | | |
| | TTCAGTGGCAGTGGATCTGGGACAGATTTCACTCTCACCATCAGCAGTCTGCAACCTGAAG | | TYYCQQSYSTPRTFGQGTKVEIK | | | |
| | ATTTTGCAACTTACTACTGTCAACAGAGTTACAGTACCCCTCGGACTTTTGGCCAGGGGAC | | | | | |
| | CAAGGTGGAAATCAAA | | | | | |
| ADI-75826 | GAAATTGTGCTGACGCAGTCTCCATCCTCCCTGTCTGCATCTGTAGGAGACAGAGTCACCA | 2994 | EIVLTQSPSSLSASVGDRVTITCRASQS | 3277 | | |
| | TCACTTGCCGGGCAAGTCAGAGCATTAGCAACTATTTAAATTGGTATCAGCAGAAACCAGG | | ISNYLNWYQQKPGKAPKLLIYAASSLQS | | | |
| | GAAAGCCCCTAAGCTCCTGATCTATGCTGCATCCAGTTTGCAAAGTGGGGTCCCATCAAGG | | GVPSRFSGSGSGTDFTLTISSLQPEDLA | | | |
| | TTCAGTGGCAGTGGATCTGGGACAGATTTCACTCTCACCATCAGCAGTCTGCAACCTGAAG | | TYYCQQSYNTPPWTFGQGTKVEIK | | | |
| | ATCTTGCAACTTACTACTGTCAACAGAGTTACAATACTCCTCCTTGGACGTTCGGCCAAGG | | | | | |
| | GACCAAGGTGGAAATCAAA | | | | | |
| ADI-75709 | GACATCACACTGACCCAGTCTCCATCCTCCCTGTCTGCATCTGTGGGAGACAGAGTCACCA | 2995 | DITLTQSPSSLSASVGDRVTITCRASQS | 3278 | | |
| | TCACTTGCCGGGCAAGTCAGAGCATTAGCAGACATTTGAGTTGGTATCAGCAGAAGCCAGG | | ISRHLSWYQQKPGRAPKLLIYAASNLQS | | | |
| | GAGAGCCCCTAAGCTCCTGATCTATGCTGCATCCAATTTGCAAAGTGGGGTCCCATCAAGG | | GVPSRFSGSGSGTDFTLTISSLQPEDFA | | | |
| | TTTAGTGGCAGTGGATCTGGGACAGATTTCACTCTCACCATCAGCAGTCTGCAACCTGAAG | | TYYCQQSYNTPPWTFGPGTKVEIK | | | |
| | ATTTTGCAACTTACTACTGTCAACAGAGTTACAATACCCCCCCGTGGACGTTCGGCCCAGG | | | | | |
| | GACCAAGGTGGAAATCAAA | | | | | |

| | | | SEQ | | SEQ | | SEQ | | SEQ | | SEQ | | SEQ | | SEQ |
|---|---|---|---|---|---|---|---|---|---|---|---|---|---|---|---|
| | VL | VL | ID | VL | ID | VL | ID | VL | ID | VL | ID | VL | ID | VL | ID |
| Clone ID | Germline | FR1 | NO: | CDR1 | NO: | FR2 | NO: | CDR2 | NO: | FR3 | NO: | CDR3 | NO: | FR4 | NO: |
| ADI-75685 | IGLV2-23 | QPVLIQ | 1901 | TGTSSDV | 2061 | WYQQHP | 2276 | DVSKRP | 2409 | GASDRFSG | 2553 | CSYAG | 2730 | FGGGTK | 2939 |
| | | PASVSG | | GGYNYVS | | GKAPKV | | S | | SKSGNTAS | | SRGWL | | LTVL | |
| | | SPGQSI | | | | LTY | | | | LTISGLQA | | | | | |
| | | TISC | | | | | | | | EDEADYYC | | | | | |
| ADI-75831 | IGKV1D- | DIVMTQ | 1902 | RAGQSIS | 2079 | WYQQKP | 2257 | AVSTLQ | 2410 | GVPSRFSA | 2554 | QQSYS | 2731 | FGGGTK | 2936 |
| | 39 | SPSSLS | | DFLN | | GKAPKL | | S | | SGSGTDFA | | SPLT | | VEIK | |
| | | ASVGDR | | | | LIY | | | | LTISSLQP | | | | | |
| | | VTITC | | | | | | | | EDFATYYC | | | | | |
| ADI-75873 | IGKV1- | DIQMTQ | 1878 | RASQDIK | 2080 | WYQQKP | 2259 | VASRLE | 2411 | GVPSRFSG | 2555 | QQYYN | 2732 | FGQGTK | 2937 |
| | NL1 | SPSSLS | | YSLA | | GKAPKL | | S | | SGSGTDYS | | TPVT | | VEIK | |
| | | ASVGDR | | | | LLY | | | | LTISSLQP | | | | | |
| | | VTITC | | | | | | | | EDFATYYC | | | | | |
| ADI-75621 | IGLV3-21 | SYELTQ | 1903 | GGNNVGS | 2081 | WYQQRP | 2277 | DNDARP | 2412 | GIPERFSA | 2556 | QVWDS | 2733 | FGTGTK | 2945 |
| | | PPSVSV | | KTVH | | GQAPVL | | S | | YDSGNTAT | | GSDHY | | VTVL | |
| | | APGQTA | | | | VVY | | | | LTITRVEA | | V | | | |
| | | KITC | | | | | | | | GDEADYYC | | | | | |
| ADI-75755 | IGKV1D- | DIQMTQ | 1878 | RASQSIR | 2082 | WYQQKP | 2257 | DASSLQ | 2413 | GVPSRFSG | 2531 | QQSYN | 2702 | FGQGTK | 2937 |
| | 39 | SPSSLS | | NYLN | | GKAPKL | | R | | SGSGTDYT | | TPPWT | | VEIK | |
| | | ASVGDR | | | | LIY | | | | LTISSLQP | | | | | |
| | | VTITC | | | | | | | | EDFATYYC | | | | | |
| ADI-75702 | IGKV1-12 | DIQMTQ | 1885 | RASQGIS | 2083 | WYQQKP | 2257 | AASSLQ | 2391 | GVPSRFSG | 2534 | QQADS | 2734 | FGGGTK | 2936 |
| | | SPSSVS | | RWLA | | GKAPKL | | S | | SGSGTDFT | | FPLT | | VEIK | |
| | | ASVGDR | | | | LIY | | | | LTISSLQP | | | | | |
| | | VTITC | | | | | | | | EDFATYYC | | | | | |
| ADI-75778 | IGKV1D- | DIQMTQ | 1878 | RASQSIR | 2082 | WYQQKP | 2257 | DASSLQ | 2413 | GVPSRFSG | 2531 | QQSYN | 2702 | FGQGTK | 2937 |
| | 39 | SPSSLS | | NYLN | | GKAPKL | | R | | SGSGTDYT | | TPPWT | | VEIK | |
| | | ASVGDR | | | | LIY | | | | LTISSLQP | | | | | |
| | | VTITC | | | | | | | | EDFATYYC | | | | | |
| ADI-75575 | IGKV1-33 | DIQLTQ | 1876 | QASQDIT | 2084 | WYQQRP | 2278 | DASYLE | 2414 | GVPSRFSG | 2557 | QQYES | 2735 | FGGGTK | 2938 |
| | | SPSSLS | | KNLN | | GKAPKL | | T | | SGSGTDFT | | LPPT | | VDIK | |
| | | ASVGDR | | | | LIF | | | | ITISSLQP | | | | | |
| | | VTITC | | | | | | | | EDFATYFC | | | | | |
| ADI-75690 | IGLV5-52 | QPVLTQ | 1904 | MILSSGFS | 2085 | WYQQKP | 2279 | YHSDSN | 2415 | GVPSRFSG | 2558 | GTWHS | 2736 | FGGGTK | 2939 |
| | | PPSHSA | | VGDFWIR | | GNPPRY | | KGQGS | | SNDASANA | | NSKTQ | | LTVL | |
| | | SSGTSV | | | | LLY | | | | GILRISGL | | V | | | |
| | | RLTC | | | | | | | | QPEDEADY | | | | | |
| | | | | | | | | | | YC | | | | | |
| ADI-75735 | IGKV1-33 | DIQMTQ | 1878 | QASQHIS | 2086 | WYQHRP | 2280 | DASNLE | 2416 | GVPSRFSG | 2537 | QQYGS | 2737 | FGQGTR | 2940 |
| | | SPSSLS | | NYLN | | GKAPKL | | T | | SGSGTDFT | | LPIT | | LEIK | |
| | | ASVGDR | | | | LIY | | | | FTISSLQP | | | | | |
| | | VTITC | | | | | | | | EDIATYYC | | | | | |
| ADI-75859 | IGKV1- | ETTLTQ | 1905 | RASQGIS | 2062 | WYQQKP | 2259 | AASTLE | 2398 | GVPSRFSG | 2559 | QQYYS | 2738 | FGQGTI | 2946 |
| | NL1 | SPSSLS | | NSLA | | GKAPKL | | S | | SGSGTDFT | | SVRFT | | LDLN | |
| | | ASVGDR | | | | LLY | | | | LTIASLQP | | | | | |
| | | VTITC | | | | | | | | EDFATYYC | | | | | |
| ADI-75857 | IGKV1- | DIPMTQ | 1906 | RASQGIS | 2062 | WYQQKP | 2281 | AASTLE | 2398 | GVPSRFSG | 2534 | QQYYS | 2739 | FGQGTK | 2937 |
| | NL1 | SPSTLS | | NSLA | | GRAPKL | | S | | SGSGTDFT | | TPPRT | | VEIK | |
| | | ASVGDR | | | | LLY | | | | LTISSLQP | | | | | |
| | | VTITC | | | | | | | | EDFATYYC | | | | | |

| | | SEQ | | SEQ | Reverted | SEQ |
|---|---|---|---|---|---|---|
| | | ID | | ID | VL | ID |
| Clone ID | VL DNA | NO: | VL Protein | NO: | Protein | NO: |
| ADI-75685 | CAGCCTGTGCTGATTCAGCCTGCCTCCGTGTCTGGGTCTCCTGGACAGTCGATCACCATCT | 2996 | QPVLIQPASVSGSPGQSITISCTGTSSD | 3279 | | |
| | CCTGCACTGGAACCAGCAGTGATGTTGGTGGTTACAATTATGTCTCCTGGTACCAACAACA | | VGGYNYVSWYQQHPGKAPKVLTYDVSKR | | | |
| | CCCAGGCAAAGCCCCCAAAGTCCTGACTTATGATGTCAGTAAGCGGCCCTCAGGGGCTTCT | | PSGASDRFSGSKSGNTASLTISGLQAED | | | |
| | GATCGCTTCTCTGGCTCCAAGTCTGGCAACACGGCCTCCCTGACAATCTCTGGGCTCCAGG | | EADYYCCSYAGSRGWLFGGGTKLTVL | | | |
| | CTGAGGACGAGGCTGACTATTACTGCTGCTCATATGCAGGTAGTAGAGGTTGGCTATTCGG | | | | | |
| | CGGAGGGACCAAGCTCACCGTCCTA | | | | | |
| ADI-75831 | GACATCGTGATGACCCAGTCTCCATCTTCCCTGTCTGCATCTGTAGGAGACAGAGTCACCA | 2997 | DIVMTQSPSSLSASVGDRVTITCRAGQS | 3280 | | |
| | TCACTTGCCGGGCAGGTCAGAGCATTAGCGACTTTTTAAATTGGTATCAGCAGAAACCAGG | | ISDFLNWYQQKPGKAPKLLIYAVSTLQS | | | |
| | GAAAGCCCCTAAGCTCCTGATCTATGCTGTATCCACTTTGCAAAGTGGGGTCCCTTCAAGG | | GVPSRFSASGSGTDFALTISSLQPEDFA | | | |
| | TTCAGTGCCAGTGGATCTGGGACAGATTTCGCTCTCACCATCAGCAGTCTCCAACCTGAAG | | TYYCQQSYSSPLTFGGGTKVEIK | | | |
| | ATTTTGCAACTTACTACTGTCAACAGAGTTACAGTTCCCCCCTCACTTTCGGCGGAGGGAC | | | | | |
| | CAAGGTGGAAATCAAA | | | | | |
| ADI-75873 | GACATCCAGATGACCCAGTCTCCATCCTCCCTGTCTGCATCTGTAGGAGACAGAGTCACCA | 2998 | DIQMTQSPSSLSASVGDRVTITCRASQD | 3281 | | |
| | TCACTTGCCGGGCGAGTCAGGACATTAAGTATTCTTTAGCCTGGTATCAGCAGAAACCAGG | | IKYSLAWYQQKPGKAPKLLLYVASRLES | | | |
| | GAAAGCCCCTAAGCTCCTCCTCTATGTTGCATCCAGATTGGAGAGTGGCGTCCCATCCAGG | | GVPSRFSGSGSGTDYSLTISSLQPEDFA | | | |
| | TTCAGTGGCAGTGGATCTGGGACGGATTACAGTCTCACCATCAGCAGCCTGCAGCCTGAAG | | TYYCQQYYNTPVTFGQGTKVEIK | | | |
| | ATTTTGCAACTTATTACTGTCAACAATATTATAATACCCCCGTGACGTTCGGCCAAGGGAC | | | | | |
| | CAAGGTGGAAATCAAA | | | | | |
| ADI-75621 | TCGTATGAGCTGACTCAGCCACCCTCGGTGTCAGTGGCCCCAGGACAGACGGCCAAGATTA | 2999 | SYELTQPPSVSVAPGQTAKITCGGNNVG | 3282 | | |
| | CCTGTGGGGGAAACAATGTTGGAAGTAAAACTGTGCACTGGTATCAGCAGAGGCCAGGCCA | | SKTVHWYQQRPGQAPVLVVYDNDARPSG | | | |
| | GGCCCCTGTGCTGGTCGTCTATGATAATGACGCCCGGCCCTCAGGGATTCCTGAGCGATTC | | IPERFSAYDSGNTATLTITRVEAGDEAD | | | |
| | TCTGCCTACGATTCTGGGAACACGGCCACCCTGACCATCACCAGGGTCGAGGCCGGGGATG | | YYCQVWDSGSDHYVFGTGTKVTVL | | | |
| | AGGCCGACTATTACTGTCAGGTGTGGGATAGTGGCAGTGATCATTATGTCTTCGGAACTGG | | | | | |
| | GACCAAGGTCACCGTCCTA | | | | | |
| ADI-75755 | GACATCCAGATGACCCAGTCTCCATCCTCCCTGTCTGCATCTGTAGGAGACAGAGTCACCA | 3000 | DIQMTQSPSSLSASVGDRVTITCRASQS | 3283 | | |
| | TCACTTGCCGGGCAAGTCAGAGCATTAGGAACTATTTAAATTGGTATCAGCAGAAACCAGG | | IRNYLNWYQQKPGKAPKLLIYDASSLQR | | | |
| | GAAAGCCCCTAAACTCCTGATCTATGATGCATCCAGTCTCCAACGTGGGGTCCCATCGAGG | | GVPSRFSGSGSGTDYTLTISSLQPEDFA | | | |
| | TTCAGTGGCAGTGGATCTGGGACAGATTACACTCTCACCATCAGCAGTCTGCAACCTGAAG | | TYYCQQSYNTPPWTFGQGTKVEIK | | | |
| | ATTTTGCAACTTACTACTGTCAACAGAGTTACAATACTCCTCCGTGGACGTTCGGCCAAGG | | | | | |
| | GACCAAGGTGGAAATCAAA | | | | | |
| ADI-75702 | GACATCCAGATGACCCAGTCTCCATCTTCCGTGTCTGCATCTGTAGGAGATAGAGTCACCA | 3001 | DIQMTQSPSSVSASVGDRVTITCRASQG | 3284 | | |
| | TCACTTGTCGGGCGAGTCAGGGTATTAGCAGGTGGTTAGCCTGGTATCAGCAGAAACCAGG | | ISRWLAWYQQKPGKAPKLLIYAASSLQS | | | |
| | GAAAGCCCCCAAGCTCCTGATCTATGCTGCATCCAGTTTGCAAAGTGGGGTCCCATCAAGG | | GVPSRFSGSGSGTDFTLTISSLQPEDFA | | | |
| | TTCAGCGGCAGTGGATCTGGGACAGATTTCACTCTCACCATCAGCAGCCTGCAGCCTGAAG | | TYYCQQADSFPLTFGGGTKVEIK | | | |
| | ATTTTGCAACTTACTATTGTCAACAGGCTGACAGTTTCCCCCTCACTTTCGGCGGAGGGAC | | | | | |
| | CAAGGTGGAAATCAAA | | | | | |
| ADI-75778 | GACATCCAGATGACCCAGTCTCCATCCTCCCTGTCTGCATCTGTAGGAGACAGAGTCACCA | 3000 | DIQMTQSPSSLSASVGDRVTITCRASQS | 3283 | | |
| | TCACTTGCCGGGCAAGTCAGAGCATTAGGAACTATTTAAATTGGTATCAGCAGAAACCAGG | | IRNYLNWYQQKPGKAPKLLIYDASSLQR | | | |
| | GAAAGCCCCTAAACTCCTGATCTATGATGCATCCAGTCTCCAACGTGGGGTCCCATCGAGG | | GVPSRFSGSGSGTDYTLTISSLQPEDFA | | | |
| | TTCAGTGGCAGTGGATCTGGGACAGATTACACTCTCACCATCAGCAGTCTGCAACCTGAAG | | TYYCQQSYNTPPWTFGQGTKVEIK | | | |
| | ATTTTGCAACTTACTACTGTCAACAGAGTTACAATACTCCTCCGTGGACGTTCGGCCAAGG | | | | | |
| | GACCAAGGTGGAAATCAAA | | | | | |
| ADI-75575 | GACATCCAGTTGACCCAGTCTCCATCCTCCCTGTCTGCATCTGTAGGAGACAGAGTCACCA | 3002 | DIQLTQSPSSLSASVGDRVTITCQASQD | 3285 | | |
| | TCACTTGCCAGGCGAGTCAGGACATTACCAAAAATTTAAATTGGTATCAGCAGAGACCAGG | | ITKNLNWYQQRPGKAPKLLIFDASYLET | | | |
| | GAAGGCCCCTAAGCTCCTGATCTTCGATGCGTCCTATTTGGAAACAGGGGTCCCGTCAAGG | | GVPSRFSGSGSGTDFTITISSLQPEDFA | | | |
| | TTCAGTGGAAGTGGATCTGGGACAGATTTTACTATCACCATCAGCAGCCTGCAGCCTGAAG | | TYFCQQYESLPPTFGGGTKVDIK | | | |
| | ATTTTGCAACATATTTCTGTCAACAATATGAAAGTCTCCCTCCTACTTTCGGCGGAGGGAC | | | | | |
| | CAAAGTGGATATCAAA | | | | | |
| ADI-75690 | CAGCCTGTGCTGACTCAGCCCCCTTCCCATTCTGCATCTTCTGGAACATCAGTCAGACTCA | 3003 | QPVLTQPPSHSASSGTSVRLTCMLSSGF | 3286 | | |
| | CCTGCATGCTGAGCAGTGGCTTCAGTGTTGGGGACTTCTGGATAAGGTGGTACCAACAAAA | | SVGDFWIRWYQQKPGNPPRYLLYYHSDS | | | |
| | GCCAGGGAACCCTCCCCGGTATCTCCTGTACTACCACTCAGACTCCAATAAGGGCCAAGGC | | NKGQGSGVPSRFSGSNDASANAGILRIS | | | |
| | TCTGGAGTTCCCAGCCGCTTCTCTGGATCCAACGATGCATCAGCCAATGCAGGGATTCTGC | | GLQPEDEADYYCGTWHSNSKTQVFGGGT | | | |
| | GTATCTCTGGGCTCCAGCCTGAGGATGAGGCTGACTATTACTGTGGTACATGGCACAGCAA | | KLTVL | | | |
| | CTCTAAGACTCAGGTGTTCGGCGGAGGGACCAAGCTCACCGTCCTA | | | | | |
| ADI-75735 | GACATCCAGATGACCCAGTCTCCATCCTCCCTGTCTGCATCTGTAGGAGACAGAGTCACCA | 3004 | DIQMTQSPSSLSASVGDRVTITCQASQH | 3287 | | |
| | TCACTTGCCAGGCGAGTCAGCACATTAGCAACTATTTAAATTGGTATCAGCACAGACCAGG | | ISNYLNWYQHRPGKAPKLLIYDASNLET | | | |
| | GAAAGCCCCTAAGCTCCTGATCTACGATGCATCCAATTTGGAAACAGGGGTCCCATCAAGG | | GVPSRFSGSGSGTDFTFTISSLQPEDIA | | | |
| | TTCAGTGGAAGTGGATCTGGGACAGATTTCACTTTCACGATCAGCAGCCTGCAGCCGGAAG | | TYYCQQYGSLPITFGQGTRLEIK | | | |
| | ATATTGCAACATATTATTGTCAGCAATACGGTAGTCTCCCGATCACCTTCGGCCAAGGGAC | | | | | |
| | ACGACTGGAGATTAAA | | | | | |
| ADI-75859 | GAAACGACACTCACGCAGTCTCCATCCTCCCTGTCTGCATCTGTGGGAGACAGAGTCACCA | 3005 | ETTLTQSPSSLSASVGDRVTITCRASQG | 3288 | | |
| | TCACTTGCCGGGCGAGTCAGGGCATTAGCAATTCTTTAGCCTGGTATCAGCAGAAACCAGG | | ISNSLAWYQQKPGKAPKLLLYAASTLES | | | |
| | GAAAGCCCCTAAACTCCTGCTCTATGCTGCATCCACATTGGAAAGTGGGGTCCCATCCAGG | | GVPSRFSGSGSGTDFTLTIASLQPEDFA | | | |
| | TTCAGTGGCAGTGGATCTGGGACGGATTTCACTCTCACCATCGCCAGCCTGCAGCCTGAAG | | TYYCQQYYSSVRFTFGQGTILDLN | | | |
| | ATTTTGCAACATATTACTGTCAACAGTATTATAGTTCCGTCCGGTTCACTTTTGGCCAGGG | | | | | |
| | GACCATTCTGGATCTCAAC | | | | | |
| ADI-75857 | GACATCCCGATGACCCAGTCTCCATCGACCCTGTCTGCATCTGTAGGAGACAGAGTCACCA | 3006 | DIPMTQSPSTLSASVGDRVTITCRASQG | 3289 | | |
| | TAACTTGCCGGGCGAGCCAGGGCATCAGCAATTCTTTAGCCTGGTATCAGCAGAAACCAGG | | ISNSLAWYQQKPGRAPKLLLYAASTLES | | | |
| | GAGAGCCCCTAAGCTCCTGCTCTATGCTGCATCCACATTGGAAAGTGGGGTCCCATCCAGG | | GVPSRFSGSGSGTDFTLTISSLQPEDFA | | | |
| | TTCAGTGGCAGTGGATCTGGGACGGATTTCACCCTCACCATCAGCAGCCTGCAGCCTGAAG | | TYYCQQYYSTPPRTFGQGTKVEIK | | | |
| | ATTTTGCAACTTATTACTGTCAACAGTATTATAGTACCCCCCCACGGACGTTCGGCCAAGG | | | | | |
| | GACCAAGGTGGAAATCAAA | | | | | |

| | | | SEQ | | SEQ | | SEQ | | SEQ | | SEQ | | SEQ | | SEQ |
|---|---|---|---|---|---|---|---|---|---|---|---|---|---|---|---|
| | VL | VL | ID | VL | ID | VL | ID | VL | ID | VL | ID | VL | ID | VL | ID |
| Clone ID | Germline | FR1 | NO: | CDR1 | NO: | FR2 | NO: | CDR2 | NO: | FR3 | NO: | CDR3 | NO: | FR4 | NO: |
| ADI-75596 | IGKV1D- | DIQLTQ | 1876 | RASQTIN | 2087 | WYQHKP | 2282 | AASTLQ | 2417 | GVPSRFSG | 2560 | QQSYN | 2740 | FGQGTK | 2937 |
| | 39 | SPSSLS | | SFVN | | GKAPEL | | R | | SGTGTDFT | | SPRT | | VEIK | |
| | | ASVGDR | | | | LIY | | | | LTISSLQP | | | | | |
| | | VTITC | | | | | | | | EDFATYFC | | | | | |
| ADI-75838 | IGKV1D- | DIQMTQ | 1907 | RASQSIN | 2088 | WYQQKP | 2257 | VASSLQ | 2418 | GVPSRFSG | 2534 | QQSYS | 2741 | FGQGTK | 2937 |
| | 39 | SPSSLS | | SYLN | | GKAPKL | | S | | SGSGTDFT | | TPPWT | | VEIK | |
| | | ASIGDR | | | | LIY | | | | LTISSLQP | | | | | |
| | | VTITC | | | | | | | | EDFATYYC | | | | | |
| ADI-75607 | IGLV3-21 | SYVLTQ | 1883 | KGDDIGS | 2089 | WYQQKP | 2283 | DDTDRP | 2419 | GIPERFSG | 2561 | QVWDS | 2742 | FGGGTK | 2939 |
| | | PPSVSV | | KNVH | | GQAPVL | | S | | SNSGNPAT | | NIDHP | | LTVL | |
| | | APGQTA | | | | VVY | | | | LTISRVEA | | WV | | | |
| | | RITC | | | | | | | | GDEADYYC | | | | | |
| ADI-75570 | IGKV1-12 | DIQMTQ | 1885 | RASQGLS | 2059 | WYQQKP | 2257 | AASSLQ | 2391 | GVPSRFSG | 2534 | QQANS | 2710 | FGGGTK | 2936 |
| | | SPSSVS | | RWLA | | GKAPKL | | S | | SGSGTDFT | | FPLT | | VEIK | |
| | | ASVGDR | | | | LIY | | | | LTISSLQP | | | | | |
| | | VTITC | | | | | | | | EDFATYYC | | | | | |
| ADI-75833 | IGKV1D- | DIQMTQ | 1908 | RASQSIS | 2090 | WYRQKP | 2284 | AASRLQ | 2406 | GVPSRFSG | 2534 | QQSYS | 2743 | FGQGTR | 2940 |
| | 39 | SPSSLS | | SFLN | | GKAPEL | | S | | SGSGTDFT | | MPPIT | | LEIK | |
| | | TSVGDR | | | | LIY | | | | LTISSLQP | | | | | |
| | | VTITC | | | | | | | | EDFATYYC | | | | | |
| ADI-75845 | IGKV1- | DIQMTQ | 1878 | PASQGIS | 2091 | WYQQKP | 2259 | ATSTLE | 2420 | GVPSRFSG | 2562 | QQYYS | 2744 | FGQGTK | 2937 |
| | NL1 | SPSSLS | | NSLA | | GKAPKL | | S | | GGSGTDYT | | FRT | | VEIK | |
| | | ASVGDR | | | | LLY | | | | LTISGLQP | | | | | |
| | | VTITC | | | | | | | | EDFATYYC | | | | | |
| ADI-75606 | IGLV3-25 | TYMLTQ | 1909 | SGDAFPN | 2092 | WYQLKP | 2285 | KDSERP | 2400 | GIPERFSG | 2563 | QSADS | 2745 | FGGGTK | 2947 |
| | | PPSVSV | | QYAY | | GQAPVA | | S | | SSSGTTAT | | RGTV | | VTVL | |
| | | SPGQTA | | | | VIY | | | | LTINEVQA | | | | | |
| | | RITC | | | | | | | | EDEADYYC | | | | | |
| ADI-75568 | IGKV1- | EIPMTQ | 1910 | RASQGIR | 2076 | WYQQKL | 2286 | AASTLE | 2398 | GVPSRFSG | 2564 | QQYYD | 2746 | FGQGTK | 2944 |
| | NL1 | SPSYLS | | NSLA | | GKAPKL | | S | | SGSGTDYT | | IRT | | VDIK | |
| | | ASVGDR | | | | LLY | | | | LTISSLQP | | | | | |
| | | VTITC | | | | | | | | EDFATYFC | | | | | |
| ADI-75633 | IGLV3-21 | SYELTQ | 1911 | GGDSLGS | 2093 | WYQQKP | 2287 | DDSDRP | 2399 | GIPERFSG | 2565 | QVWDS | 2747 | FGGGTQ | 2948 |
| | | PPSVSV | | KNVH | | GQAPVL | | S | | SNSGNTAT | | NIGHP | | LTVL | |
| | | APGQTA | | | | VVF | | | | LTISRVEA | | WV | | | |
| | | RLTC | | | | | | | | GDEADYWC | | | | | |
| ADI-75617 | IGKV1D- | DIQLTQ | 1876 | RASQTVG | 2094 | WYQQKP | 2288 | TAPEME | 2421 | GVPPRFSG | 2566 | QQSHT | 2748 | FGQGTK | 2937 |
| | 39 | SPSSLS | | AFLN | | GKAPKL | | G | | TGSGTDFT | | IPYT | | VEIK | |
| | | ASVGDR | | | | LVF | | | | LTISSLQP | | | | | |
| | | VTITC | | | | | | | | EDFATYFC | | | | | |
| ADI-75579 | IGKV1D- | EIPMTQ | 1912 | RASQSIG | 2095 | WYRQKP | 2289 | AASTLQ | 2417 | GVPSRFSG | 2567 | QQSYT | 2749 | FGQGTK | 2937 |
| | 39 | SPSSLS | | SFLN | | GKAPNL | | R | | SGSGTDFT | | THMYT | | VEIK | |
| | | ASVGDR | | | | LIY | | | | LTISSLQP | | | | | |
| | | VTITC | | | | | | | | EDFATYFC | | | | | |
| ADI-75807 | IGKV4-1 | DIQLTQ | 1913 | KSSQSVV | 2096 | WYQQKP | 2290 | WASTRE | 2422 | GVPARFSG | 2568 | QQYYI | 2750 | FGGGTK | 2938 |
| | | SPDSLA | | YSSNNKN | | GQPPKL | | S | | SGSGTDFT | | TPLT | | VDIK | |
| | | VSLGER | | YLA | | LIY | | | | LTISSLQA | | | | | |
| | | ATITC | | | | | | | | EDVAVYYC | | | | | |

| | | SEQ | | SEQ | Reverted | SEQ |
|---|---|---|---|---|---|---|
| | | ID | | ID | VL | ID |
| Clone ID | VL DNA | NO: | VL Protein | NO: | Protein | NO: |
| ADI-75596 | GACATCCAGTTGACCCAGTCTCCATCCTCCCTGTCTGCATCTGTAGGAGATAGAGTCACCA | 3007 | DIQLTQSPSSLSASVGDRVTITCRASQT | 3290 | | |
| | TCACTTGCCGGGCAAGTCAGACCATTAACAGCTTTGTTAATTGGTATCAGCACAAGCCAGG | | INSFVNWYQHKPGKAPELLIYAASTLQR | | | |
| | GAAAGCCCCTGAGCTCCTGATCTATGCTGCATCCACTTTGCAAAGGGGGGTCCCATCAAGG | | GVPSRFSGSGTGTDFTLTISSLQPEDFA | | | |
| | TTCAGTGGCAGTGGAACTGGGACAGATTTCACTCTCACCATCAGCAGTCTGCAACCTGAAG | | TYFCQQSYNSPRTFGQGTKVEIK | | | |
| | ATTTTGCAACGTACTTCTGTCAACAGAGTTACAATTCCCCTAGGACGTTCGGCCAAGGGAC | | | | | |
| | CAAGGTGGAGATCAAA | | | | | |
| ADI-75838 | GACATCCAGATGACCCAGTCTCCATCCTCCCTGTCTGCATCTGTGGGAGACAGAGTCACCA | 3008 | DIQMTQSPSSLSASIGDRVTITCRASQS | 3291 | | |
| | TCACTTGCCCGGCGAGTCAGGGCATTAGCAATTCTTTAGCCTGGTATCAGCAAAAACCAGG | | INSYLNWYQQKPGKAPKLLIYVASSLQS | | | |
| | GAAAGCCCCTAAGCTCCTGCTCTATGCTACATCCACATTGGAAAGTGGGGTCCCATCCAGG | | GVPSRFSGSGSGTDFTLTISSLQPEDFA | | | |
| | TTCAGTGGCGGTGGATCTGGGACGGATTACACTCTCACCATCAGCGGCCTGCAGCCTGAAG | | TYYCQQSYSTPPWTFGQGTKVEIK | | | |
| | ATTTTGCAACTTATTACTGTCAACAGTATTATAGTTTTCGGACGTTCGGCCAAGGGACCAA | | | | | |
| | GGTGGAAATCAAA | | | | | |
| ADI-75607 | TCGTATGTGCTGACTCAGCCACCCTCGGTGTCAGTGGCCCCAGGACAGACGGCCAGGATTA | 3009 | SYVLTQPPSVSVAPGQTARITCKGDDIG | 3292 | | |
| | CCTGTAAGGGAGACGACATTGGAAGTAAAAATGTGCACTGGTACCAGCAGAAGCCAGGCCA | | SKNVHWYQQKPGQAPVLVVYDDTDRPSG | | | |
| | GGCCCCTGTGCTGGTCGTCTATGATGATACCGACCGGCCCTCAGGGATCCCTGAGCGATTC | | IPERFSGSNSGNPATLTISRVEAGDEAD | | | |
| | TCTGGCTCCAACTCTGGGAACCCGGCCACCCTGACCATCAGCAGGGTCGAAGCCGGGGATG | | YYCQVWDSNIDHPWVFGGGTKLTVL | | | |
| | AGGCCGACTATTACTGTCAGGTATGGGATAGTAATATTGATCATCCTTGGGTGTTCGGCGG | | | | | |
| | AGGGACCAAGCTCACCGTCCTA | | | | | |
| ADI-75570 | GACATCCAGATGACCCAGTCTCCATCTTCCGTGTCTGCATCTGTAGGAGACAGAGTCACAA | 3010 | DIQMTQSPSSVSASVGDRVTITCRASQG | 3256 | | |
| | TCACTTGTCGGGCGAGCCAGGGTCTTAGCAGATGGTTAGCCTGGTATCAGCAGAAACCAGG | | LSRWLAWYQQKPGKAPKLLIYAASSLQS | | | |
| | GAAAGCCCCTAAACTCCTGATCTATGCTGCATCTAGTTTGCAGAGTGGGGTCCCATCAAGG | | GVPSRFSGSGSGTDFTLTISSLQPEDFA | | | |
| | TTCAGCGGCAGTGGATCTGGGACAGATTTCACTCTCACCATCAGCAGCCTGCAGCCTGAAG | | TYYCQQANSFPLTFGGGTKVEIK | | | |
| | ACTTTGCAACTTACTATTGTCAACAGGCTAACAGTTTCCCACTCACTTTCGGCGGAGGGAC | | | | | |
| | CAAGGTGGAGATCAAA | | | | | |
| ADI-75833 | GACATCCAGATGACCCAGTCTCCATCCTCCCTGTCTACATCTGTGGGAGACAGAGTCACCA | 3011 | DIQMTQSPSSLSTSVGDRVTITCRASQS | 3293 | | |
| | TCACTTGTCGGGCAAGTCAGAGCATTAGTAGTTTTTTAAATTGGTATCGGCAGAAACCAGG | | ISSFLNWYRQKPGKAPELLIYAASRLQS | | | |
| | GAAAGCCCCTGAACTCCTGATCTATGCTGCATCCAGGTTGCAAAGTGGGGTCCCATCAAGG | | GVPSRFSGSGSGTDFTLTISSLQPEDFA | | | |
| | TTCAGTGGCAGTGGATCTGGGACAGATTTCACTCTCACCATCAGCAGTCTGCAACCCGAAG | | TYYCQQSYSMPPITFGQGTRLEIK | | | |
| | ATTTTGCAACTTACTACTGTCAACAGAGTTACAGTATGCCTCCGATCACCTTCGGCCAAGG | | | | | |
| | GACACGACTGGAGATTAAA | | | | | |
| ADI-75845 | GACATCCAGATGACCCAGTCTCCATCCTCCCTGTCTGCATCTGTGGGAGACAGAGTCACCA | 3012 | DIQMTQSPSSLSASVGDRVTITCPASQG | 3294 | | |
| | TCACTTGCCCGGCGAGTCAGGGCATTAGCAATTCTTTAGCCTGGTATCAGCAAAAACCAGG | | ISNSLAWYQQKPGKAPKLLLYATSTLES | | | |
| | GAAAGCCCCTAAGCTCCTGCTCTATGCTACATCCACATTGGAAAGTGGGGTCCCATCCAGG | | GVPSRFSGGGSGTDYTLTISGLQPEDFA | | | |
| | TTCAGTGGCGGTGGATCTGGGACGGATTACACTCTCACCATCAGCGGCCTGCAGCCTGAAG | | TYYCQQYYSFRTFGQGTKVEIK | | | |
| | ATTTTGCAACTTATTACTGTCAACAGTATTATAGTTTTCGGACGTTCGGCCAAGGGACCAA | | | | | |
| | GGTGGAAATCAAA | | | | | |
| ADI-75606 | ACGTATATGCTGACTCAGCCCCCCTCGGTGTCAGTGTCCCCAGGACAGACGGCCAGGATCA | 3013 | TYMLTQPPSVSVSPGQTARITCSGDAFP | 3295 | | |
| | CCTGCTCTGGAGATGCATTCCCAAACCAATATGCTTATTGGTACCAACTGAAGCCAGGCCA | | NQYAYWYQLKPGQAPVAVIYKDSERPSG | | | |
| | GGCCCCTGTAGCGGTGATATATAAAGACAGTGAGAGGCCCTCAGGGATCCCTGAGCGATTC | | IPERFSGSSSGTTATLTINEVQAEDEAD | | | |
| | TCTGGCTCCAGCTCAGGGACAACAGCCACGTTGACCATCAATGAAGTCCAGGCAGAGGACG | | YYCQSADSRGTVFGGGTKVTVL | | | |
| | AGGCTGACTATTACTGTCAATCAGCAGACAGCCGGGGGACGGTGTTCGGCGGAGGGACCAA | | | | | |
| | GGTCACCGTCCTA | | | | | |
| ADI-75568 | GAAATCCCGATGACCCAGTCTCCATCCTACCTGTCTGCATCTGTAGGAGACAGAGTCACCA | 3014 | EIPMTQSPSYLSASVGDRVTITCRASQG | 3296 | | |
| | TCACTTGCCGGGCGAGTCAGGGCATTAGGAACTCTTTAGCCTGGTATCAGCAGAAATTAGG | | IRNSLAWYQQKLGKAPKLLLYAASTLES | | | |
| | GAAAGCCCCTAAGCTCCTGCTCTATGCTGCATCCACATTGGAAAGTGGGGTCCCATCCAGG | | GVPSRFSGSGSGTDYTLTISSLQPEDFA | | | |
| | TTCAGTGGCAGTGGATCTGGGACGGATTACACTCTCACCATCAGCAGCCTGCAGCCTGAAG | | TYFCQQYYDIRTFGQGTKVDIK | | | |
| | ATTTCGCAACTTATTTCTGTCAACAGTATTATGATATTCGGACGTTCGGCCAAGGGACCAA | | | | | |
| | GGTGGATATCAAA | | | | | |
| ADI-75633 | TCGTATGAGCTGACTCAGCCACCCTCGGTGTCCGTGGCCCCAGGACAGACGGCCAGACTTA | 3015 | SYELTQPPSVSVAPGQTARLTCGGDSLG | 3297 | | |
| | CCTGTGGGGGAGACAGCCTTGGAAGTAAAAATGTGCACTGGTACCAGCAGAAGCCAGGCCA | | SKNVHWYQQKPGQAPVLVVFDDSDRPSG | | | |
| | GGCCCCTGTGTTGGTCGTCTTTGATGATAGCGACCGGCCCTCAGGGATCCCTGAGCGATTC | | IPERFSGSNSGNTATLTISRVEAGDEAD | | | |
| | TCTGGCTCCAACTCTGGGAACACGGCCACCCTGACCATCAGCAGGGTCGAAGCCGGGGATG | | YWCQVWDSNIGHPWVFGGGTQLTVL | | | |
| | AGGCCGACTATTGGTGTCAGGTGTGGGATAGTAATATTGGTCATCCTTGGGTGTTCGGCGG | | | | | |
| | AGGCACCCAGCTGACCGTCCTA | | | | | |
| ADI-75617 | GACATCCAGTTGACGCAGTCTCCGTCCTCCCTGTCTGCTTCTGTGGGAGACAGAGTCACCA | 3016 | DIQLTQSPSSLSASVGDRVTITCRASQT | 3298 | | |
| | TCACTTGCCGGGCAAGTCAGACCGTTGGGGCCTTTTTAAATTGGTATCAGCAGAAACCAGG | | VGAFLNWYQQKPGKAPKLLVFTAPEMEG | | | |
| | GAAAGCCCCTAAGCTCCTGGTCTTTACTGCACCCGAGATGGAAGGCGGAGTCCCCCCGAGG | | GVPPRFSGTGSGTDFTLTISSLQPEDFA | | | |
| | TTCAGTGGCACTGGATCTGGCACAGATTTCACTCTCACCATCAGCAGTCTACAACCTGAAG | | TYFCQQSHTIPYTFGQGTKVEIK | | | |
| | ACTTTGCAACTTACTTCTGTCAACAGAGTCACACTATCCCATACACTTTTGGCCAGGGGAC | | | | | |
| | CAAGGTGGAGATCAAA | | | | | |
| ADI-75579 | GAAATCCCGATGACCCAGTCTCCATCCTCCCTGTCTGCATCTGTAGGAGACAGAGTCACCA | 3017 | EIPMTQSPSSLSASVGDRVTITCRASQS | 3299 | | |
| | TCACTTGCCGGGCAAGTCAGAGCATTGGCAGCTTTTTAAATTGGTATCGCCAGAAACCAGG | | IGSFLNWYRQKPGKAPNLLIYAASTLQR | | | |
| | GAAAGCCCCGAACCTCCTGATCTATGCTGCGTCCACTTTGCAAAGGGGAGTCCCTTCAAGG | | GVPSRFSGSGSGTDFTLTISSLQPEDFA | | | |
| | TTCAGTGGCAGTGGATCTGGGACAGATTTCACTCTCACCATCAGCAGTCTGCAACCTGAGG | | TYFCQQSYTTHMYTFGQGTKVEIK | | | |
| | ATTTTGCAACTTACTTTTGTCAACAGAGTTACACTACTCATATGTACACTTTTGGCCAGGG | | | | | |
| | GACCAAGGTGGAGATCAAA | | | | | |
| ADI-75807 | GACATCCAGTTGACCCAGTCTCCAGACTCCCTGGCTGTGTCTCTGGGCGAGAGGGCCACCA | 3018 | DIQLTQSPDSLAVSLGERATITCKSSQS | 3300 | | |
| | TCACCTGCAAGTCCAGCCAGAGTGTTGTATACAGCTCCAACAATAAGAACTACTTAGCTTG | | VVYSSNNKNYLAWYQQKPGQPPKLLIYW | | | |
| | GTACCAGCAAAAACCAGGACAGCCTCCTAAGCTGCTCATTTACTGGGCATCTACCCGGGAA | | ASTRESGVPARFSGSGSGTDFTLTISSL | | | |
| | TCCGGGGTCCCTGCCCGATTCAGTGGCAGCGGGTCTGGGACAGATTTCACTCTCACCATCA | | QAEDVAVYYCQQYYITPLTFGGGTKVDI | | | |
| | GCAGCCTGCAGGCTGAAGATGTGGCAGTTTATTACTGTCAGCAATATTATATTACTCCTCT | | K | | | |
| | CACTTTCGGCGGAGGGACCAAAGTGGATATCAAA | | | | | |

| | | | SEQ | | SEQ | | SEQ | | SEQ | | SEQ | | SEQ | | SEQ |
|---|---|---|---|---|---|---|---|---|---|---|---|---|---|---|---|
| | VL | VL | ID | VL | ID | VL | ID | VL | ID | VL | ID | VL | ID | VL | ID |
| Clone ID | Germline | FR1 | NO: | CDR1 | NO: | FR2 | NO: | CDR2 | NO: | FR3 | NO: | CDR3 | NO: | FR4 | NO: |
| ADI-75780 | IGKV1D- | DIQMTQ | 1896 | RASQSMT | 2097 | WYQQRP | 2278 | GASSLH | 2404 | GVPSRFSG | 2534 | QQSYS | 2751 | FGQGTK | 2937 |
| | 39 | SPSSLS | | SSLN | | GKAPKL | | S | | SGSGTDFT | | TPWT | | VEIK | |
| | | ASVGDR | | | | LIF | | | | LTISSLQP | | | | | |
| | | VTIAC | | | | | | | | EDFATYYC | | | | | |
| ADI-75748 | IGKV1D- | EMTLTQ | 1914 | RASHRID | 2098 | WYQQKP | 2291 | VASTLQ | 2423 | GVPSRFTG | 2551 | QQSYT | 2752 | FGPGTK | 2942 |
| | 39 | SPSSLS | | RYLN | | GQAPKL | | S | | SGSGTDFT | | TPRT | | VEIK | |
| | | ASVGDR | | | | LIY | | | | LTISSLQP | | | | | |
| | | VTITC | | | | | | | | EDFATYYC | | | | | |
| ADI-75820 | IGLV3-25 | SYELTQ | 1915 | CGDALPN | 2099 | WYQQKP | 2292 | KDSERP | 2400 | GIPERFSG | 2546 | QSADS | 2753 | FGGGTK | 2947 |
| | | PPSVSV | | QYTY | | GQAPVV | | S | | STSGTTVT | | SGVV | | VTVL | |
| | | SPGQTA | | | | IIY | | | | LTISGVQA | | | | | |
| | | RITC | | | | | | | | EDEADYYC | | | | | |
| ADI-75612 | IGKV3D- | VSPGER | 1916 | RASQSVS | 2100 | WYQQKP | 2293 | DASTRA | 2424 | GIPARFSG | 2569 | QQYNN | 2754 | FGQGTK | 2937 |
| | 15 | EMTLTQ | | SSLA | | GQPPRL | | T | | SGSGTEFT | | WPTWT | | VEIK | |
| | | SPATLS | | | | LIY | | | | LTISSLQS | | | | | |
| | | ATLSC | | | | | | | | EDFAVYYC | | | | | |
| ADI-75696 | IGKV1-12 | DIQMTQ | 1885 | RASQDIG | 2101 | WYQQKP | 2294 | AAASLQ | 2425 | GVPSRFSG | 2570 | QQATS | 2755 | FGGGTK | 2936 |
| | | SPSSVS | | SWLA | | GKAPRL | | S | | SGSGTEFT | | FPLT | | VEIK | |
| | | ASVGDR | | | | LIY | | | | LTISRLQP | | | | | |
| | | VTITC | | | | | | | | EDFATYYC | | | | | |
| ADI-75571 | IGKV1- | EIQMTQ | 1881 | RASQGIS | 2062 | WYQQRR | 2295 | AASTLE | 2398 | GVPSRFSG | 2534 | QQYYS | 2756 | FGGGTK | 2936 |
| | NL1 | SPSSLS | | NSLA | | GKAPKL | | S | | SGSGTDFT | | PPPLT | | VEIK | |
| | | ASVGDR | | | | LLY | | | | LTISSLQP | | | | | |
| | | VTITC | | | | | | | | EDFATYYC | | | | | |
| ADI-75766 | IGKV1D- | ASVGDR | 1917 | RASQAIS | 2102 | WYQQKP | 2257 | AASSLH | 2426 | GVPSRFSG | 2536 | QQSYT | 2757 | FGGGTK | 2936 |
| | 39 | EIQLTQ | | SYLN | | GKAPKL | | S | | SGSGTDFT | | IPTLT | | VEIK | |
| | | SPSSLS | | | | LIY | | | | LTINSLQP | | | | | |
| | | VTITC | | | | | | | | EDFATYYC | | | | | |
| ADI-75635 | IGKV1- | DIQMTQ | 1878 | RASQGIG | 2103 | WYQQKP | 2296 | AASTLE | 2398 | GVPSRFSG | 2534 | QQYYT | 2758 | FGQGTK | 2937 |
| | NL1 | SPSSLS | | NSLA | | GKAPKF | | S | | SGSGTDFT | | TRT | | VEIK | |
| | | ASVGDR | | | | LLY | | | | LTISSLQP | | | | | |
| | | VTITC | | | | | | | | EDFATYYC | | | | | |
| ADI-75864 | IGLV2-14 | QSVLTQ | 1918 | GVFNYVS | 2104 | WYQQHP | 2265 | EVSNRP | 2427 | GVSNRFSG | 2571 | SSYTT | 2759 | FGGGTQ | 2948 |
| | | PASVSG | | TATTSDV | | GKAPKL | | S | | SKSGNTAS | | SSTV | | LTVL | |
| | | SPGQSI | | | | MIY | | | | LTISGLQA | | | | | |
| | | TISC | | | | | | | | EDEADYFC | | | | | |
| ADI-75877 | IGLV3-21 | SYELTQ | 1919 | GGNNIGS | 2105 | WYQQKP | 2283 | EDSDRP | 2428 | GIPERFSG | 2572 | QVWDG | 2760 | FGTGTK | 2949 |
| | | PPSVSV | | ESVH | | GQAPVL | | S | | STSGNTAT | | ISVHY | | LTVL | |
| | | APGQTA | | | | VVY | | | | LTISRVEA | | V | | | |
| | | RITC | | | | | | | | GDEADYYC | | | | | |
| ADI-75827 | IGKV3D- | EIAMTQ | 1877 | RASESVS | 2106 | WYQQKP | 2258 | GASTRA | 2383 | GIPARFSG | 2529 | QQYID | 2761 | FGQGTK | 2937 |
| | 15 | SPATLS | | SNLA | | GQAPRL | | T | | SGSGTEFT | | WPPGY | | VEIK | |
| | | VSPGER | | | | LIY | | | | LTISSLQS | | T | | | |
| | | ATLSC | | | | | | | | EDFAVYFC | | | | | |

| | | SEQ | | SEQ | Reverted | SEQ |
|---|---|---|---|---|---|---|
| | | ID | | ID | VL | ID |
| Clone ID | VL DNA | NO: | VL Protein | NO: | Protein | NO: |
| ADI-75780 | GACATCCAGATGACCCAGTCTCCATCCTCCCTGTCTGCATCTGTAGGAGACAGAGTCACCA | 3019 | DIQMTQSPSSLSASVGDRVTIACRASQS | 3301 | | |
| | TCGCTTGCCGGGCAAGTCAGAGCATGACGAGCTCTTTAAATTGGTATCAGCAGAGACCAGG | | MTSSLNWYQQRPGKAPKLLIFGASSLHS | | | |
| | GAAAGCCCCTAAGCTCCTGATCTTTGGTGCATCCAGTTTGCATAGTGGGGTCCCATCAAGG | | GVPSRFSGSGSGTDFTLTISSLQPEDFA | | | |
| | TTCAGTGGCAGTGGATCTGGGACAGATTTCACTCTCACCATCAGCAGTCTGCAACCTGAAG | | TYYCQQSYSTPWTFGQGTKVEIK | | | |
| | ATTTTGCAACTTACTACTGTCAACAGAGTTACAGTACCCCGTGGACGTTCGGCCAAGGGAC | | | | | |
| | CAAGGTGGAAATCAAA | | | | | |
| ADI-75748 | GAAATGACACTCACGCAGTCTCCATCCTCCCTGTCTGCATCTGTAGGAGACAGAGTCACCA | 3020 | EMTLTQSPSSLSASVGDRVTITCRASHR | 3302 | | |
| | TCACTTGTCGGGCAAGTCACAGGATTGACAGGTATTTAAATTGGTATCAGCAGAAACCAGG | | IDRYLNWYQQKPGQAPKLLIYVASTLQS | | | |
| | GCAAGCCCCCAAGCTCCTGATCTATGTAGCATCCACTTTGCAAAGTGGGGTCCCATCAAGG | | GVPSRFTGSGSGTDFTLTISSLQPEDFA | | | |
| | TTCACTGGCAGTGGATCTGGGACAGATTTCACTCTCACTATCAGCAGTCTGCAACCTGAGG | | TYYCQQSYTTPRTFGPGTKVEIK | | | |
| | ATTTTGCAACTTACTACTGTCAACAGAGTTACACTACCCCTCGGACTTTCGGCCCTGGGAC | | | | | |
| | CAAGGTGGAGATCAAA | | | | | |
| ADI-75820 | TCGTATGAGCTGACTCAGCCACCCTCGGTGTCAGTGTCCCCAGGACAGACGGCCAGGATCA | 3021 | SYELTQPPSVSVSPGQTARITCCGDALP | 3303 | | |
| | CCTGCTGTGGAGATGCATTGCCAAACCAATATACTTATTGGTACCAGCAGAAGCCAGGCCA | | NQYTYWYQQKPGQAPVVIIYKDSERPSG | | | |
| | GGCCCCTGTGGTGATAATATATAAAGACAGTGAGAGGCCCTCAGGGATCCCTGAGCGATTC | | IPERFSGSTSGTTVTLTISGVQAEDEAD | | | |
| | TCTGGCTCCACCTCAGGGACAACAGTCACGTTGACCATCAGTGGAGTCCAGGCAGAAGACG | | YYCQSADSSGVVFGGGTKVTVL | | | |
| | AGGCTGACTATTACTGTCAATCAGCAGACAGCAGTGGTGTTGTATTCGGCGGAGGGACCAA | | | | | |
| | GGTCACCGTCCTA | | | | | |
| ADI-75612 | GAAATGACACTGACGCAGTCTCCAGCCACCCTGTCTGTGTCTCCAGGGGAAAGAGCCACCC | 3022 | EMTLTQSPATLSVSPGERATLSCRASQS | 3304 | | |
| | TCTCCTGCAGGGCCAGTCAGAGTGTCAGCAGCAGCTTAGCCTGGTACCAGCAGAAACCTGG | | VSSSLAWYQQKPGQPPRLLIYDASTRAT | | | |
| | CCAGCCTCCCAGGCTCCTCATCTATGATGCATCCACCAGGGCCACTGGTATCCCAGCCAGG | | GIPARFSGSGSGTEFTLTISSLQSEDFA | | | |
| | TTCAGTGGCAGTGGGTCTGGGACAGAGTTCACTCTCACCATCAGCAGCCTGCAGTCTGAAG | | VYYCQQYNNWPTWTFGQGTKVEIK | | | |
| | ATTTCGCAGTTTATTACTGTCAGCAGTATAATAACTGGCCTACGTGGACGTTCGGCCAAGG | | | | | |
| | GACCAAGGTGGAGATCAAA | | | | | |
| ADI-75696 | GACATCCAGATGACCCAGTCTCCATCTTCCGTGTCTGCATCTGTAGGAGACCGAGTCACCA | 3023 | DIQMTQSPSSVSASVGDRVTITCRASQD | 3305 | DIQMTQSPS | 3305 |
| | TCACTTGTCGGGCGAGTCAGGATATTGGCAGCTGGCTAGCCTGGTATCAGCAGAAACCAGG | | IGSWLAWYQQKPGKAPRLLIYAAASLQS | | SVSASVGDR | |
| | GAAAGCCCCTAGACTCCTGATCTATGCTGCAGCCAGTTTGCAAAGTGGGGTCCCATCAAGG | | GVPSRFSGSGSGTEFTLTISRLQPEDFA | | VTITCRASQ | |
| | TTCAGCGGCAGTGGCTCTGGGACAGAATTCACTCTCACCATCAGCAGGCTACAGCCTGAAG | | TYYCQQATSFPLTFGGGTKVEIK | | DIGSWLAWY | |
| | ATTTTGCAACTTACTATTGTCAACAGGCTACCAGTTTTCCGCTCACTTTCGGCGGAGGGAC | | | | QQKPGKAPR | |
| | CAAGGTGGAAATCAAA | | | | LLIYAAASL | |
| | | | | | QSGVPSRFS | |
| | | | | | GSGSGTEFT | |
| | | | | | LTISRLQPE | |
| | | | | | DFATYYCQQ | |
| | | | | | ATSFPLTFG | |
| | | | | | GGTKVEIK | |
| ADI-75571 | GAAATCCAGATGACCCAGTCTCCATCCTCCCTGTCTGCATCTGTTGGAGACAGAGTCACCA | 3024 | EIQMTQSPSSLSASVGDRVTITCRASQG | 3306 | | |
| | TCACTTGCCGGGCGAGTCAGGGCATTAGCAATTCCTTAGCCTGGTATCAACAGAGACGAGG | | ISNSLAWYQQRRGKAPKLLLYAASTLES | | | |
| | GAAAGCCCCTAAGCTCCTGCTCTATGCTGCATCCACTTTGGAAAGTGGGGTCCCATCCAGG | | GVPSRFSGSGSGTDFTLTISSLQPEDFA | | | |
| | TTCAGTGGCAGTGGATCTGGGACGGATTTCACTCTCACCATCAGCAGCCTCCAGCCTGAGG | | TYYCQQYYSPPPLTFGGGTKVEIK | | | |
| | ATTTTGCAACTTATTACTGTCAACAGTACTATAGTCCCCCTCCGCTCACTTTCGGCGGAGG | | | | | |
| | GACCAAGGTGGAAATCAAA | | | | | |
| ADI-75766 | GAAATCCAATTGACCCAGTCTCCATCCTCCCTGTCTGCATCTGTGGGAGACAGAGTCACCA | 3025 | EIQLTQSPSSLSASVGDRVTITCRASQA | 3307 | | |
| | TCACTTGCCGGGCAAGTCAGGCCATTAGCAGTTATTTAAATTGGTATCAGCAGAAACCAGG | | ISSYLNWYQQKPGKAPKLLIYAASSLHS | | | |
| | GAAAGCCCCTAAGCTCCTCATCTATGCTGCATCCAGTTTGCACAGTGGGGTCCCATCAAGG | | GVPSRFSGSGSGTDFTLTINSLQPEDFA | | | |
| | TTCAGTGGCAGTGGATCTGGGACAGATTTCACTCTCACCATCAACAGTCTGCAACCTGAAG | | TYYCQQSYTIPTLTFGGGTKVEIK | | | |
| | ATTTTGCAACTTACTACTGTCAACAGAGTTACACTATCCCTACGCTCACTTTCGGCGGAGG | | | | | |
| | GACCAAGGTGGAGATCAAA | | | | | |
| ADI-75635 | GACATCCAGATGACCCAGTCTCCATCCTCCCTGTCTGCATCTGTAGGAGACAGAGTCACCA | 3026 | DIQMTQSPSSLSASVGDRVTITCRASQG | 3308 | | |
| | TCACTTGCCGGGCGAGTCAGGGCATTGGCAATTCTTTAGCCTGGTATCAGCAGAAACCAGG | | IGNSLAWYQQKPGKAPKFLLYAASTLES | | | |
| | GAAAGCCCCTAAGTTCCTGCTCTATGCTGCATCCACATTGGAAAGTGGGGTCCCATCCAGG | | GVPSRFSGSGSGTDFTLTISSLQPEDFA | | | |
| | TTCAGTGGCAGTGGATCTGGGACGGATTTCACTCTCACCATCAGCAGCCTGCAACCTGAAG | | TYYCQQYYTTRTFGQGTKVEIK | | | |
| | ATTTTGCAACTTATTACTGTCAACAATACTATACTACCCGGACGTTCGGCCAAGGGACCAA | | | | | |
| | GGTGGAAATCAAA | | | | | |
| ADI-75864 | CAGTCTGTGCTGACTCAGCCTGCCTCCGTGTCTGGGTCTCCTGGACAGTCGATCACCATCT | 3027 | QSVLTQPASVSGSPGQSITISCTATTSD | 3309 | QSALTQPAS | 3526 |
| | CCTGCACTGCAACCACCAGTGACGTTGGTGTTTTTAACTATGTCTCGTGGTACCAACAGCA | | VGVFNYVSWYQQHPGKAPKLMIYEVSNR | | VSGSPGQSI | |
| | CCCAGGCAAGGCCCCCAAACTCATGATTTATGAGGTCAGTAATCGGCCCTCAGGGGTTTCT | | PSGVSNRFSGSKSGNTASLTISGLQAED | | TISCTATTS | |
| | AATCGCTTCTCTGGCTCCAAGTCTGGCAACACGGCCTCCCTGACCATCTCTGGGCTCCAGG | | EADYFCSSYTTSSTVFGGGTQLTVL | | DVGVFNYVS | |
| | CTGAGGACGAGGCTGATTATTTCTGCAGCTCATATACAACCAGCAGCACGGTGTTCGGCGG | | | | WYQQHPGKA | |
| | AGGGACCCAGCTGACCGTCCTA | | | | PKLMIYEVS | |
| | | | | | NRPSGVSNR | |
| | | | | | FSGSKSGNT | |
| | | | | | ASLTISGLQ | |
| | | | | | AEDEADYFC | |
| | | | | | SSYTTSSTV | |
| | | | | | FGGGTQLTVL | |
| ADI-75877 | TCGTATGAGCTGACTCAGCCACCCTCGGTGTCAGTGGCCCCAGGACAGACGGCCAGGATTA | 3028 | SYELTQPPSVSVAPGQTARITCGGNNIG | 3310 | | |
| | CCTGTGGGGGAAACAACATTGGAAGTGAAAGTGTCCACTGGTACCAGCAGAAGCCAGGCCA | | SESVHWYQQKPGQAPVLVVYEDSDRPSG | | | |
| | GGCCCCTGTGCTGGTCGTCTATGAGGACAGCGACCGGCCCTCAGGGATCCCTGAGCGATTC | | IPERFSGSTSGNTATLTISRVEAGDEAD | | | |
| | TCTGGCTCCACCTCTGGGAACACGGCCACCCTGACCATCAGCAGGGTCGAAGCCGGGGATG | | YYCQVWDGISVHYVFGTGTKLTVL | | | |
| | AGGCCGATTATTACTGTCAGGTGTGGGATGGTATTAGTGTTCATTATGTCTTCGGAACTGG | | | | | |
| | GACCAAGCTCACCGTCCTA | | | | | |
| ADI-75827 | GAAATTGCGATGACGCAGTCTCCAGCCACCCTGTCTGTGTCTCCAGGGGAAAGAGCCACCC | 3029 | EIAMTQSPATLSVSPGERATLSCRASES | 3311 | | |
| | TCTCCTGCAGGGCCAGTGAGAGTGTTAGCAGCAACTTAGCCTGGTACCAGCAGAAACCTGG | | VSSNLAWYQQKPGQAPRLLIYGASTRAT | | | |
| | CCAGGCTCCCAGACTCCTCATCTATGGTGCATCCACCAGGGCCACTGGTATCCCAGCCAGG | | GIPARFSGSGSGTEFTLTISSLQSEDFA | | | |
| | TTCAGTGGCAGTGGGTCTGGGACAGAGTTCACTCTCACCATCAGCAGCCTGCAGTCTGAAG | | VYFCQQYIDWPPGYTFGQGTKVEIK | | | |
| | ATTTTGCAGTTTATTTCTGTCAGCAGTATATTGACTGGCCTCCGGGGTACACTTTTGGCCA | | | | | |
| | GGGGACCAAGGTGGAGATCAA | | | | | |

| | | | SEQ | | SEQ | | SEQ | | SEQ | | SEQ | | SEQ | | SEQ |
|---|---|---|---|---|---|---|---|---|---|---|---|---|---|---|---|
| | VL | VL | ID | VL | ID | VL | ID | VL | ID | VL | ID | VL | ID | VL | ID |
| Clone ID | Germline | FR1 | NO: | CDR1 | NO: | FR2 | NO: | CDR2 | NO: | FR3 | NO: | CDR3 | NO: | FR4 | NO: |
| ADI-75683 | IGKV1D- | EIQMTQ | 1920 | RASQSIS | 2050 | WYQQKP | 2257 | GASSLH | 2429 | GVPSRFSG | 2534 | QQSYT | 2752 | FGQGTK | 2944 |
| | 39 | SPSSLP | | SYLN | | GKAPKL | | A | | SGSGTDFT | | TPRT | | VDIK | |
| | | ASVGDR | | | | LIY | | | | LTISSLQP | | | | | |
| | | VTITC | | | | | | | | EDFATYYC | | | | | |
| ADI-75776 | IGKV1D- | DIQLTQ | 1876 | RASQRVS | 2107 | WFQQKP | 2297 | AASSLQ | 2391 | GVPSRFSG | 2573 | QQSYD | 2762 | FGQGTR | 2940 |
| | 39 | SPSSLS | | SYLN | | GKAPRL | | S | | SGSGTDFT | | AIT | | LEIK | |
| | | ASVGDR | | | | LIF | | | | LTISSLEP | | | | | |
| | | VTITC | | | | | | | | EDFATYYC | | | | | |
| ADI-75785 | IGKV1-12 | DITMTQ | 1921 | RASQSIG | 2108 | WYQQKP | 2257 | AASILQ | 2430 | GVPSRFSG | 2534 | QQADS | 2763 | FGPGTK | 2950 |
| | | SPSSVS | | SWLG | | GKAPKL | | S | | SGSGTDFT | | FPPA | | VDIK | |
| | | ASVGDR | | | | LIY | | | | LTISSLQP | | | | | |
| | | VSITC | | | | | | | | EDFATYYC | | | | | |
| ADI-75594 | IGKV1- | EIPMTQ | 1912 | RASQGIG | 2103 | WYQQKP | 2296 | AASTLE | 2398 | GVPSRFSG | 2534 | QQYYT | 2758 | FGQGTK | 2944 |
| | NL1 | SPSSLS | | NSLA | | GKAPKF | | S | | SGSGTDFT | | TRT | | VDIK | |
| | | ASVGDR | | | | LLY | | | | LTISSLQP | | | | | |
| | | VTITC | | | | | | | | EDFATYYC | | | | | |
| ADI-75801 | IGLV6-57 | NLMLTQ | 1922 | TRSSGSI | 2109 | WYQQRP | 2298 | EDNQRP | 2431 | GVPDRFSG | 2574 | QSYDT | 2764 | FGGGTK | 2939 |
| | | PHSVSE | | ASNYVQ | | GSAPTT | | S | | SIDSSSNS | | RLRGV | | LTVL | |
| | | SPGKTV | | | | VIY | | | | ASLTISGL | | | | | |
| | | TISC | | | | | | | | KTEDEADY | | | | | |
| | | | | | | | | | | YC | | | | | |
| ADI-75624 | IGKV2D- | VTPGEP | 1923 | KSSQSLL | 2110 | WYLQKP | 2260 | LGSNRA | 2387 | GVPDRFSG | 2575 | MQALQ | 2765 | FGQGTR | 2940 |
| | 28 | EIVMTQ | | HSNGYKY | | GQSPQL | | S | | SGSGTDFT | | TPIT | | LEIK | |
| | | SPLSLP | | LD | | LIY | | | | LKISRVEA | | | | | |
| | | ASISC | | | | | | | | EDVGIYYC | | | | | |
| ADI-75764 | IGKV1-33 | DIQLTQ | 1876 | QASQDIG | 2111 | WFQQKA | 2299 | EASNLE | 2393 | GVPSRFSG | 2576 | QQYDS | 2766 | FGPGTK | 2950 |
| | | SPSSLS | | NYLS | | GKAPRL | | T | | SGSGTDFA | | LLT | | VDIK | |
| | | ASVGDR | | | | LMY | | | | LTISSLQP | | | | | |
| | | VTITC | | | | | | | | EDIATYYC | | | | | |
| ADI-75806 | IGKV1D- | DIQLTQ | 1876 | RASQSVN | 2112 | WFQQKP | 2300 | AASSLQ | 2391 | GVPSRFSG | 2577 | QQSYA | 2767 | FGPGTK | 2942 |
| | 39 | SPSSLS | | NYLN | | GKAPKL | | S | | SGSGTDYT | | TPLT | | VEIK | |
| | | ASVGDR | | | | LIY | | | | LAISSLQP | | | | | |
| | | VTITC | | | | | | | | EDFATYYC | | | | | |
| ADI-75630 | IGKV1- | DIPLTQ | 1924 | RASQDIS | 2113 | WYQQKP | 2259 | TASTLE | 2432 | GVPSRFSG | 2531 | QQYYS | 2768 | FGGGTK | 2938 |
| | NL1 | SPSSLS | | NSLA | | GKAPKL | | S | | SGSGTDYT | | ALGRT | | VDIK | |
| | | ASVGDR | | | | LLY | | | | LTISSLQP | | | | | |
| | | VTITC | | | | | | | | EDFATYYC | | | | | |
| ADI-75609 | IGLV1-36 | QSVLTQ | 1925 | SGSSSNI | 2114 | WYQQLP | 2301 | YDDLLP | 2433 | GVSDRFSG | 2578 | VTFDD | 2769 | FGGGTK | 2939 |
| | | PPSVSA | | EINAVN | | GKAPKL | | S | | SKSGTSAS | | RLDGW | | LTVL | |
| | | APRQRV | | | | LIY | | | | LAISGLQS | | V | | | |
| | | TISC | | | | | | | | EDEADYYC | | | | | |
| ADI-75671 | IGKV1D- | EIKMTQ | 1926 | RASQSIT | 2115 | WYQQKP | 2257 | GASSLH | 2407 | GVPSRFSG | 2579 | QQSYT | 2752 | FGQGTK | 2937 |
| | 39 | SPSSLP | | SYLN | | GKAPKL | | T | | SGSGTHFT | | TPRT | | VEIK | |
| | | ASVGDR | | | | LIY | | | | LTISSLQP | | | | | |
| | | VTITC | | | | | | | | EDFATYFC | | | | | |
| ADI-75660 | IGKV1D- | EIQMTQ | 1881 | RASQGIS | 2116 | WYQQKP | 2257 | DASSLE | 2434 | GVPSRFSG | 2534 | QQFNH | 2770 | FGQGTR | 2940 |
| | 13 | SPSSLS | | FALA | | GKAPKL | | S | | SGSGTDFT | | YPIT | | LEIK | |
| | | ASVGDR | | | | LIY | | | | LTISSLQP | | | | | |
| | | VTITC | | | | | | | | EDFATYYC | | | | | |

| | | SEQ | | SEQ | Reverted | SEQ |
|---|---|---|---|---|---|---|
| | | ID | | ID | VL | ID |
| Clone ID | VL DNA | NO: | VL Protein | NO: | Protein | NO: |
| ADI-75683 | GAAATCCAAATGACCCAGTCTCCATCCTCCCTGCCTGCATCTGTAGGAGACAGAGTCACCA | 3030 | EIQMTQSPSSLPASVGDRVTITCRASQS | 3312 | | |
| | TCACTTGCCGGGCAAGTCAGAGCATTAGCAGTTATTTAAATTGGTATCAGCAAAAACCAGG | | ISSYLNWYQQKPGKAPKLLIYGASSLHA | | | |
| | GAAAGCCCCTAAGCTCCTGATTTATGGTGCATCCAGTTTGCATGCTGGGGTCCCATCAAGG | | GVPSRFSGSGSGTDFTLTISSLQPEDFA | | | |
| | TTCAGTGGCAGTGGATCTGGGACAGATTTCACTCTCACCATCAGCAGTCTGCAACCTGAAG | | TYYCQQSYTTPRTFGQGTKVDIK | | | |
| | ATTTTGCAACTTACTACTGTCAACAGAGTTACACTACCCCTCGGACTTTTGGCCAGGGGAC | | | | | |
| | CAAGGTGGATATCAAA | | | | | |
| ADI-75776 | GACATCCAGTTGACCCAGTCTCCATCGTCCCTGTCTGCATCTGTAGGAGACAGAGTCACCA | 3031 | DIQLTQSPSSLSASVGDRVTITCRASQR | 3313 | | |
| | TCACTTGCCGGGCAAGTCAGAGAGTTAGCAGCTATTTAAATTGGTTTCAACAGAAACCAGG | | VSSYLNWFQQKPGKAPRLLIFAASSLQS | | | |
| | GAAAGCCCCTAGGCTCCTGATCTTTGCTGCATCCAGTTTGCAAAGTGGGGTCCCTTCAAGG | | GVPSRFSGSGSGTDFTLTISSLEPEDFA | | | |
| | TTCAGTGGCAGTGGATCTGGGACAGATTTCACTCTCACCATCAGCAGTCTGGAACCTGAAG | | TYYCQQSYDAITFGQGTRLEIK | | | |
| | ATTTTGCAACTTACTACTGTCAACAGAGTTATGATGCGATTACCTTCGGCCAAGGGACACG | | | | | |
| | ACTGGAGATTAAA | | | | | |
| ADI-75785 | GACATCACGATGACCCAGTCTCCATCTTCCGTGTCTGCATCTGTAGGAGACAGAGTCTCCA | 3032 | DITMTQSPSSVSASVGDRVSITCRASQS | 3314 | | |
| | TCACTTGTCGGGCGAGTCAAAGTATTGGCAGCTGGTTAGGCTGGTATCAGCAGAAACCAGG | | IGSWLGWYQQKPGKAPKLLIYAASILQS | | | |
| | GAAAGCCCCTAAACTCCTGATCTATGCTGCGTCCATTTTGCAAAGTGGGGTCCCATCAAGG | | GVPSRFSGSGSGTDFTLTISSLQPEDFA | | | |
| | TTCAGCGGCAGTGGATCTGGGACAGATTTCACTCTCACCATCAGTAGCCTGCAGCCTGAAG | | TYYCQQADSFPPAFGPGTKVDIK | | | |
| | ATTTTGCGACTTACTATTGTCAACAGGCTGACAGTTTCCCTCCGGCTTTCGGCCCTGGGAC | | | | | |
| | CAAAGTGGATATCAAA | | | | | |
| ADI-75594 | GAAATCCCGATGACCCAGTCTCCATCCTCCCTGTCTGCATCTGTAGGAGACAGAGTCACCA | 3033 | EIPMTQSPSSLSASVGDRVTITCRASQG | 3315 | | |
| | TCACTTGCCGGGCGAGTCAGGGCATTGGCAATTCTTTAGCCTGGTATCAGCAGAAACCGGG | | IGNSLAWYQQKPGKAPKELLYAASTLES | | | |
| | GAAAGCCCCTAAGTTCCTGCTCTATGCTGCATCCACATTGGAAAGTGGGGTCCCATCCAGG | | GVPSRFSGSGSGTDFTLTISSLQPEDFA | | | |
| | TTCAGTGGCAGTGGATCTGGGACGGATTTCACTCTCACCATCAGCAGCCTGCAACCTGAAG | | TYYCQQYYTTRTFGQGTKVDIK | | | |
| | ATTTTGCAACTTATTACTGTCAACAATACTATACTACCCGGACGTTCGGCCAAGGGACCAA | | | | | |
| | GGTGGATATCAAA | | | | | |
| ADI-75801 | AATCTTATGCTGACTCAGCCCCACTCTGTGTCGGAGTCTCCGGGGAAGACGGTAACCATCT | 3034 | NLMLTQPHSVSESPGKTVTISCTRSSGS | 3316 | | |
| | CCTGCACCCGCAGCAGTGGCAGCATTGCCAGCAACTATGTGCAGTGGTACCAGCAGCGCCC | | IASNYVQWYQQRPGSAPTTVIYEDNQRP | | | |
| | GGGCAGTGCCCCCACCACTGTGATCTATGAGGATAACCAGAGACCCTCTGGGGTCCCTGAT | | SGVPDRFSGSIDSSSNSASLTISGLKTE | | | |
| | CGTTTCTCTGGCTCCATCGACAGCTCCTCCAACTCTGCCTCCCTCACCATCTCTGGACTGA | | DEADYYCQSYDTRLRGVFGGGTKLTVL | | | |
| | AGACTGAGGACGAGGCTGACTACTACTGTCAGTCTTATGATACCAGGCTTCGAGGCGTTTT | | | | | |
| | CGGCGGAGGGACCAAGCTCACCGTCCTA | | | | | |
| ADI-75624 | GAAATTGTGATGACGCAGTCTCCACTCTCCCTGCCCGTCACCCCTGGAGAGCCGGCCTCCA | 3035 | EIVMTQSPLSLPVTPGEPASISCKSSQS | 3317 | | |
| | TCTCCTGCAAGTCTAGTCAGAGCCTCCTGCATAGTAATGGATACAAGTATTTGGATTGGTA | | LLHSNGYKYLDWYLQKPGQSPQLLIYLG | | | |
| | CCTGCAGAAGCCAGGGCAGTCTCCACAGCTCCTGATCTATTTGGGTTCTAATCGGGCCTCC | | SNRASGVPDRFSGSGSGTDFTLKISRVE | | | |
| | GGGGTCCCTGACAGGTTCAGTGGCAGTGGATCAGGCACAGATTTTACACTGAAAATCAGCA | | AEDVGIYYCMQALQTPITFGQGTRLEIK | | | |
| | GAGTGGAGGCTGAGGATGTTGGGATTTATTACTGCATGCAAGCTCTACAAACTCCGATCAC | | | | | |
| | CTTCGGCCAAGGGACACGACTGGAGATTAAA | | | | | |
| ADI-75764 | GACATCCAGTTGACCCAGTCTCCATCCTCCCTGTCTGCATCTGTTGGAGACAGAGTCACCA | 3036 | DIQLTQSPSSLSASVGDRVTITCQASQD | 3318 | | |
| | TCACTTGCCAGGCGAGTCAGGACATTGGCAATTATTTAAGTTGGTTTCAGCAGAAAGCAGG | | IGNYLSWFQQKAGKAPRLLMYEASNLET | | | |
| | GAAAGCCCCTAGGCTCCTGATGTACGAAGCATCCAATTTGGAAACAGGTGTCCCATCAAGG | | GVPSRFSGSGSGTDFALTISSLQPEDIA | | | |
| | TTCAGTGGAAGTGGATCTGGGACAGATTTTGCGCTCACCATCAGCAGCCTGCAGCCGGAAG | | TYYCQQYDSLLTFGPGTKVDIK | | | |
| | ATATTGCAACATATTACTGTCAACAGTATGACAGTCTACTCACTTTCGGCCCTGGGACCAA | | | | | |
| | GGTGGATATCAAA | | | | | |
| ADI-75806 | GACATCCAATTGACCCAGTCTCCATCCTCCCTGTCTGCATCTGTAGGAGACAGAGTCACCA | 3037 | DIQLTQSPSSLSASVGDRVTITCRASQS | 3319 | | |
| | TCACTTGCCGGGCAAGTCAGAGCGTTAACAACTATTTAAATTGGTTTCAGCAGAAACCAGG | | VNNYLNWFQQKPGKAPKLLIYAASSLQS | | | |
| | GAAAGCCCCTAAGCTCCTGATCTATGCTGCATCCAGCTTGCAAAGTGGGGTCCCCTCAAGG | | GVPSRFSGSGSGTDYTLAISSLQPEDFA | | | |
| | TTCAGTGGCAGTGGATCTGGGACAGATTACACTCTCGCCATCAGCAGTCTACAACCTGAAG | | TYYCQQSYATPLTFGPGTKVEIK | | | |
| | ATTTTGCAACTTACTACTGTCAACAGAGTTACGCTACCCCTCTCACTTTCGGCCCTGGGAC | | | | | |
| | CAAGGTGGAAATCAAA | | | | | |
| ADI-75630 | GACATCCCATTGACCCAGTCTCCATCCTCCCTGTCTGCATCTGTAGGAGACAGAGTCACCA | 3038 | DIPLTQSPSSLSASVGDRVTITCRASQD | 3320 | | |
| | TCACTTGCCGGGCGAGTCAGGACATTAGCAATTCTTTAGCCTGGTATCAGCAGAAACCAGG | | ISNSLAWYQQKPGKAPKLLLYTASTLES | | | |
| | GAAAGCCCCTAAGCTCCTGCTCTATACTGCTTCCACATTGGAAAGTGGGGTCCCATCCAGG | | GVPSRFSGSGSGTDYTLTISSLQPEDFA | | | |
| | TTCAGTGGCAGTGGATCTGGGACCGATTACACTCTCACCATCAGCAGCCTGCAGCCTGAAG | | TYYCQQYYSALGRTFGGGTKVDIK | | | |
| | ATTTTGCAACTTATTACTGTCAGCAGTATTATAGTGCCCTCGGGCGCACTTTCGGCGGAGG | | | | | |
| | GACCAAAGTGGATATCAAA | | | | | |
| ADI-75609 | CAGTCTGTGCTGACTCAGCCGCCCTCGGTGTCTGCAGCCCCCAGGCAGAGGGTCACCATCT | 3039 | QSVLTQPPSVSAAPRQRVTISCSGSSSN | 3321 | | |
| | CCTGTTCTGGCAGCAGCTCCAACATCGAGATTAATGCTGTAAACTGGTACCAGCAACTCCC | | IEINAVNWYQQLPGKAPKLLIYYDDLLP | | | |
| | AGGAAAGGCTCCCAAGCTCCTCATCTATTATGATGATCTGTTGCCCTCAGGGGTCTCTGAC | | SGVSDRFSGSKSGTSASLAISGLQSEDE | | | |
| | CGATTCTCTGGCTCCAAGTCTGGCACCTCAGCCTCCCTGGCCATCAGTGGGCTCCAGTCTG | | ADYYCVTFDDRLDGWVFGGGTKLTVL | | | |
| | AGGATGAGGCTGATTATTACTGTGTCACATTTGATGACAGGCTGGATGGCTGGGTGTTCGG | | | | | |
| | CGGAGGGACCAAGCTCACCGTCCTA | | | | | |
| ADI-75671 | GAAATCAAGATGACGCAGTCTCCATCCTCCCTGCCTGCATCTGTAGGAGACAGAGTCACCA | 3040 | EIKMTQSPSSLPASVGDRVTITCRASQS | 3322 | | |
| | TCACTTGCCGGGCAAGTCAGAGCATTACCAGTTATTTAAATTGGTATCAGCAGAAACCAGG | | ITSYLNWYQQKPGKAPKLLIYGASSLHT | | | |
| | GAAAGCCCCTAAGCTCCTGATCTATGGTGCATCCAGTTTGCATACTGGGGTCCCCTCAAGG | | GVPSRFSGSGSGTHFTLTISSLQPEDFA | | | |
| | TTCAGTGGCAGTGGATCTGGGACACATTTCACTCTCACCATCAGCAGTCTGCAACCTGAAG | | TYFCQQSYTTPRTFGQGTKVEIK | | | |
| | ATTTTGCAACTTACTTCTGTCAACAGAGTTACACTACCCCTCGGACTTTTGGCCAGGGGAC | | | | | |
| | CAAGGTGGAAATCAAA | | | | | |
| ADI-75660 | GAAATCCAGATGACCCAGTCTCCATCCTCCCTGTCTGCATCTGTTGGAGACAGAGTCACCA | 3041 | EIQMTQSPSSLSASVGDRVTITCRASQG | 3323 | | |
| | TCACTTGCCGGGCAAGTCAGGGCATTAGCTTTGCTTTAGCCTGGTATCAGCAAAAACCAGG | | ISFALAWYQQKPGKAPKLLIYDASSLES | | | |
| | GAAAGCTCCTAAGCTCCTGATCTATGATGCCTCCAGTTTGGAAAGTGGGGTCCCATCAAGG | | GVPSRFSGSGSGTDFTLTISSLQPEDFA | | | |
| | TTCAGCGGCAGTGGATCTGGGACAGATTTCACTCTCACCATCAGCAGCCTGCAGCCTGAAG | | TYYCQQFNHYPITFGQGTRLEIK | | | |
| | ATTTTGCAACTTATTACTGTCAACAGTTTAATCATTATCCGATCACCTTCGGCCAAGGGAC | | | | | |
| | ACGACTGGAGATTAAA | | | | | |

| | | | SEQ | | SEQ | | SEQ | | SEQ | | SEQ | | SEQ | | SEQ |
|---|---|---|---|---|---|---|---|---|---|---|---|---|---|---|---|
| | VL | VL | ID | VL | ID | VL | ID | VL | ID | VL | ID | VL | ID | VL | ID |
| Clone ID | Germline | FR1 | NO: | CDR1 | NO: | FR2 | NO: | CDR2 | NO: | FR3 | NO: | CDR3 | NO: | FR4 | NO: |
| ADI-75802 | IGKV1D- | EIVMTQ | 1891 | RASQSIR | 2117 | WFQQKP | 2300 | SASTLQ | 2435 | GVPSRFSG | 2580 | QQSYN | 2702 | FGQGTK | 2937 |
| | 39 | SPSSLS | | SYLN | | GKAPKL | | S | | SASGTDFT | | TPPWT | | VEIK | |
| | | ASVGDR | | | | LIY | | | | LTISSLQP | | | | | |
| | | VTITC | | | | | | | | EDFATYYC | | | | | |
| ADI-75614 | IGKV4-1 | DIQMTQ | 1927 | MSSQSVL | 2118 | WYQQRP | 2302 | WASTRK | 2436 | GVPDRFSG | 2581 | QQYYR | 2771 | FGGGTK | 2936 |
| | | SPDSLA | | DSSNNKN | | GQPPKL | | S | | SGSGTDFT | | TPLT | | VEIK | |
| | | VSLGER | | FLA | | IIY | | | | LTISSLQP | | | | | |
| | | ATINC | | | | | | | | EDVAVYYC | | | | | |
| ADI-75661 | IGKV1-5 | DIQMTQ | 1928 | RASQSIS | 2052 | WYQQKP | 2257 | MASSLE | 2437 | GVPSRFSG | 2532 | QQYNS | 2772 | FGQGTK | 2937 |
| | | SPSTLS | | RWLA | | GKAPKL | | S | | SGSGTEFT | | YWT | | VEIK | |
| | | ASVGDR | | | | LIY | | | | LTISSLQP | | | | | |
| | | VTISC | | | | | | | | DDFATYYC | | | | | |
| ADI-75697 | IGKV1- | DIQMTQ | 1929 | RASQGIS | 2062 | WYQQKP | 2303 | VASTWE | 2438 | GVPTRFSG | 2582 | QQYYS | 2773 | FGGGTK | 2936 |
| | NL1 | SPSSLS | | NSLA | | GKAPKL | | S | | SGYGTDFT | | PPPPT | | VEIK | |
| | | ASVGDG | | | | LVY | | | | LTISSLQP | | | | | |
| | | VTITC | | | | | | | | EDFATYYC | | | | | |
| ADI-75700 | IGKV3-11 | EIALTQ | 1930 | RASQSVS | 2119 | WYQQKP | 2258 | DASKRA | 2439 | GIPARFNG | 2583 | QQRST | 2774 | FGGGTK | 2938 |
| | | SPATLS | | TYLA | | GQAPRL | | T | | SGSGTDFT | | WPT | | VDIK | |
| | | LSPGER | | | | LIY | | | | LTISSLEP | | | | | |
| | | ATLSC | | | | | | | | EDFAVYYC | | | | | |
| ADI-75787 | IGKV1D- | DIQLTQ | 1876 | RASQSIG | 2120 | WYQQKP | 2263 | AASNLQ | 2408 | GVPSRFSG | 2567 | QQSYS | 2775 | FGQGTK | 2937 |
| | 39 | SPSSLS | | SYLN | | GKAPNL | | S | | SGSGTDFT | | APPWT | | VEIK | |
| | | ASVGDR | | | | LIY | | | | LTISSLQP | | | | | |
| | | VTITC | | | | | | | | EDFATYFC | | | | | |
| ADI-75642 | IGLV3-21 | QSVLTQ | 1931 | GGNNIGS | 2121 | WYQQKP | 2304 | YDNDRP | 2440 | GIPERFSG | 2584 | QVWDT | 2776 | FGGGTK | 2939 |
| | | PPSVSV | | QSVH | | GQAPVL | | S | | SNSGNTAT | | SGDHW | | LTVL | |
| | | APGKTA | | | | VIY | | | | LTISRVEA | | V | | | |
| | | RITQ | | | | | | | | GDEADFYC | | | | | |
| ADI-75861 | IGKV1D- | DIQMTQ | 1907 | RASQSVS | 2122 | WYQQKP | 2257 | SASGLQ | 2441 | GVPSRFSG | 2534 | QQSYN | 2777 | FGPGTK | 2942 |
| | 39 | SPSSLS | | TFLN | | GKAPKL | | S | | SGSGTDFT | | MFT | | VEIK | |
| | | ASIGDR | | | | LIY | | | | LTISSLQP | | | | | |
| | | VTITC | | | | | | | | EDFATYYC | | | | | |
| ADI-75578 | IGKV1D- | DIPMTQ | 1932 | RASQTIT | 2123 | WYQQKP | 2257 | AASSLQ | 2391 | GVPSRFSG | 2567 | QQSYT | 2749 | FGQGTK | 2944 |
| | 39 | SPSSLS | | RYLN | | GKAPKL | | S | | SGSGTDFT | | THMYT | | VDIK | |
| | | ASVGDR | | | | LIY | | | | LTISSLQP | | | | | |
| | | VTISC | | | | | | | | EDFATYFC | | | | | |
| ADI-75808 | IGLV2-14 | QPVLTQ | 1933 | TGTSSDL | 2124 | WYQHFP | 2305 | EFTNRP | 2442 | GVSNRFSG | 2585 | SAYTS | 2778 | FGGGTK | 2947 |
| | | PASVSG | | GAFNHVS | | GKAPKL | | S | | SKSDKTAS | | TSTV | | VTVL | |
| | | SPGQSI | | | | LIY | | | | LTIFGLQA | | | | | |
| | | TISC | | | | | | | | EDEADYYC | | | | | |
| ADI-75848 | IGKV1- | EIVMTQ | 1934 | RASQGIS | 2062 | WYQQKP | 2259 | AASTLE | 2398 | GVPSRFSG | 2536 | QQYYS | 2779 | FGQGTK | 2937 |
| | NL1 | SPSSLS | | NSLA | | GKAPKL | | S | | SGSGTDFT | | PPPRT | | VEIK | |
| | | ASVGDR | | | | LLY | | | | LTINSLQP | | | | | |
| | | ITITC | | | | | | | | EDFATYYC | | | | | |
| ADI-75832 | IGKV3-20 | EIVMTQ | 1935 | RASQSV- | 2125 | WYQQRP | 2306 | DASSRA | 2443 | GIPDRFSG | 2586 | QQYGS | 2780 | FGQGTK | 2937 |
| | | SPGTLS | | SGYLA | | GQAPRL | | T | | SGSGTDFT | | SPRT | | VEIK | |
| | | LSPGER | | | | LIY | | | | LTISRLEP | | | | | |
| | | ATLSC | | | | | | | | EDFAVYFC | | | | | |

| | | SEQ | | SEQ | Reverted | SEQ |
|---|---|---|---|---|---|---|
| | | ID | | ID | VL | ID |
| Clone ID | VL DNA | NO: | VL Protein | NO: | Protein | NO: |
| ADI-75802 | GAAATTGTGATGACGCAGTCTCCATCCTCCCTGTCTGCATCTGTAGGAGACAGAGTCACCA | 3042 | EIVMTQSPSSLSASVGDRVTITCRASQS | 3324 | | |
| | TCACTTGCCGGGCAAGTCAGAGCATTAGAAGTTATTTAAATTGGTTTCAACAGAAACCAGG | | IRSYLNWFQQKPGKAPKLLIYSASTLQS | | | |
| | AAAAGCCCCTAAACTCCTTATCTATAGTGCATCCACTTTGCAAAGTGGGGTCCCATCAAGG | | GVPSRFSGSASGTDFTLTISSLQPEDFA | | | |
| | TTCAGTGGCAGTGCATCTGGGACAGATTTCACTCTCACCATCAGCAGTCTGCAACCTGAAG | | TYYCQQSYNTPPWTFGQGTKVEIK | | | |
| | ATTTTGCAACTTACTACTGTCAACAGAGTTACAATACCCCTCCGTGGACGTTCGGCCAAGG | | | | | |
| | GACCAAGGTGGAGATCAAA | | | | | |
| ADI-75614 | GACATCCAAATGACCCAGTCTCCAGACTCCCTGGCTGTGTCTCTGGGCGAGAGGGCCACCA | 3043 | DIQMTQSPDSLAVSLGERATINCMSSQS | 3325 | | |
| | TCAACTGCATGTCCAGCCAGAGTGTTTTAGACAGCTCCAACAATAAGAACTTCTTAGCTTG | | VLDSSNNKNFLAWYQQRPGQPPKLIIYW | | | |
| | GTACCAGCAGAGACCAGGACAGCCTCCTAAGCTGATCATTTACTGGGCATCTACCCGGAAA | | ASTRKSGVPDRFSGSGSGTDFTLTISSL | | | |
| | TCCGGGGTCCCTGACCGATTCAGTGGCAGCGGGTCTGGGACAGATTTCACTCTCACAATCA | | QPEDVAVYYCQQYYRTPLTFGGGTKVEI | | | |
| | GCAGCCTGCAGCCTGAAGATGTGGCAGTTTATTACTGTCAGCAATATTACAGAACTCCTCT | | K | | | |
| | CACTTTCGGCGGAGGGACCAAGGTGGAAATCAAA | | | | | |
| ADI-75661 | GACATCCAGATGACCCAGTCTCCTTCCACCCTGTCTGCATCTGTAGGGGACAGAGTCACCA | 3044 | DIQMTQSPSTLSASVGDRVTISCRASQS | 3326 | | |
| | TCAGTTGCCGGGCCAGTCAGAGTATTAGTAGGTGGTTGGCCTGGTATCAGCAGAAACCAGG | | ISRWLAWYQQKPGKAPKLLIYMASSLES | | | |
| | GAAAGCCCCTAAGCTCCTGATCTATATGGCGTCCAGTTTAGAAAGTGGGGTCCCATCGAGG | | GVPSRFSGSGSGTEFTLTISSLQPDDFA | | | |
| | TTCAGCGGCAGTGGATCTGGGACAGAATTCACTCTCACCATCAGCAGCCTTCAGCCTGATG | | TYYCQQYNSYWTFGQGTKVEIK | | | |
| | ATTTTGCAACTTATTACTGCCAACAATATAATAGTTATTGGACGTTCGGCCAAGGGACCAA | | | | | |
| | GGTGGAAATCAAA | | | | | |
| ADI-75697 | GACATCCAGATGACCCAGTCTCCATCCTCCCTGTCTGCATCTGTTGGAGACGGAGTCACCA | 3045 | DIQMTQSPSSLSASVGDGVTITCRASQG | 3327 | | |
| | TCACTTGCCGGGCGAGTCAGGGGATTAGCAATTCTTTAGCTTGGTATCAGCAGAAACCGGG | | ISNSLAWYQQKPGKAPKLLVYVASTWES | | | |
| | GAAAGCCCCTAAGCTCCTCGTCTATGTCGCATCCACATGGGAAAGTGGGGTCCCAACCAGG | | GVPTRFSGSGYGTDFTLTISSLQPEDFA | | | |
| | TTCAGTGGCAGTGGATATGGGACGGATTTCACTCTCACCATCAGCAGCCTGCAGCCTGAAG | | TYYCQQYYSPPPPTFGGGTKVEIK | | | |
| | ATTTTGCAACTTATTACTGTCAACAGTATTATAGTCCCCCGCCGCCCACCTTCGGCGGAGG | | | | | |
| | GACCAAGGTGGAGATCAAA | | | | | |
| ADI-75700 | GAAATCGCGCTGACGCAGTCTCCAGCCACCCTGTCTTTGTCTCCAGGGGAAAGAGCCACCC | 3046 | EIALTQSPATLSLSPGERATLSCRASQS | 3328 | | |
| | TCTCCTGCAGGGCCAGTCAGAGTGTTAGCACCTACTTAGCCTGGTACCAACAGAAACCTGG | | VSTYLAWYQQKPGQAPRLLIYDASKRAT | | | |
| | CCAGGCTCCCAGGCTCCTCATCTATGATGCATCCAAGAGGGCCACTGGCATCCCAGCCAGG | | GIPARFNGSGSGTDFTLTISSLEPEDFA | | | |
| | TTCAATGGCAGTGGGTCTGGGACAGACTTCACTCTCACCATCAGCAGCCTCGAGCCTGAAG | | VYYCQQRSTWPTFGGGTKVDIK | | | |
| | ATTTTGCAGTTTATTACTGTCAGCAGCGTAGCACCTGGCCCACTTTCGGCGGAGGGACCAA | | | | | |
| | GGTGGATATCAAA | | | | | |
| ADI-75787 | GACATCCAGTTGACCCAGTCTCCATCCTCCCTGTCTGCATCTGTAGGAGACAGAGTCACCA | 3047 | DIQLTQSPSSLSASVGDRVTITCRASQS | 3329 | | |
| | TCACTTGCCGGGCAAGTCAGAGCATTGGCAGCTATTTAAATTGGTATCAGCAGAAACCAGG | | IGSYLNWYQQKPGKAPNLLIYAASNLQS | | | |
| | GAAAGCCCCTAACCTCCTGATCTATGCTGCATCCAATTTGCAAAGTGGAGTCCCATCAAGG | | GVPSRFSGSGSGTDFTLTISSLQPEDFA | | | |
| | TTCAGTGGCAGTGGATCTGGGACAGATTTCACTCTCACCATCAGCAGTCTGCAGCCTGAAG | | TYFCQQSYSAPPWTFGQGTKVEIK | | | |
| | ATTTTGCAACTTACTTCTGTCAGCAGAGTTACAGTGCCCCTCCTTGGACATTCGGCCAGGG | | | | | |
| | GACCAAGGTGGAGATCAAA | | | | | |
| ADI-75642 | CAGTCTGTGCTGACTCAGCCACCCTCAGTGTCAGTGGCCCCAGGAAAGACGGCCAGGATTA | 3048 | QSVLTQPPSVSVAPGKTARITCGGNNIG | 3330 | | |
| | CCTGTGGGGGAAACAACATTGGAAGTCAAAGTGTGCACTGGTACCAGCAGAAGCCAGGCCA | | SQSVHWYQQKPGQAPVLVIYYDNDRPSG | | | |
| | GGCCCCCGTGCTGGTCATCTATTATGATAACGACCGGCCCTCTGGGATCCCTGAGCGATTC | | IPERFSGSNSGNTATLTISRVEAGDEAD | | | |
| | TCTGGCTCCAACTCTGGGAACACGGCCACCCTGACCATCAGCAGGGTCGAAGCCGGGGATG | | FYCQVWDTSGDHWVFGGGTKLTVL | | | |
| | AGGCCGACTTTTACTGTCAGGTGTGGGATACTAGTGGTGATCATTGGGTGTTCGGCGGAGG | | | | | |
| | CACCAAGCTCACCGTCCTA | | | | | |
| ADI-75861 | GACATCCAGATGACCCAGTCTCCATCCTCCCTGTCTGCATCTATAGGAGACAGAGTCACCA | 3049 | DIQMTQSPSSLSASIGDRVTITCRASQS | 3331 | | |
| | TCACTTGCCGGGCAAGTCAGAGCGTTAGCACCTTTTTAAATTGGTATCAGCAGAAGCCAGG | | VSTFLNWYQQKPGKAPKLLIYSASGLQS | | | |
| | AAAAGCCCCAAAGCTCCTGATTTATTCTGCATCCGGTTTGCAAAGTGGGGTCCCATCAAGG | | GVPSRFSGSGSGTDFTLTISSLQPEDFA | | | |
| | TTCAGTGGCAGTGGATCTGGGACAGATTTCACTCTCACCATCAGCAGTCTGCAACCTGAAG | | TYYCQQSYNMFTFGPGTKVEIK | | | |
| | ATTTTGCAACTTACTACTGTCAACAGAGTTACAATATGTTCACTTTCGGCCCTGGGACCAA | | | | | |
| | GGTGGAAATCAAA | | | | | |
| ADI-75578 | GACATCCCGATGACCCAGTCTCCATCCTCCCTGTCTGCATCTGTAGGAGACAGAGTCACCA | 3050 | DIPMTQSPSSLSASVGDRVTISCRASQT | 3332 | | |
| | TCTCTTGCCGGGCAAGTCAGACCATTACCAGGTATTTAAATTGGTATCAGCAAAAACCAGG | | ITRYLNWYQQKPGKAPKLLIYAASSLQS | | | |
| | GAAAGCCCCTAAGCTCCTGATCTATGCTGCATCCAGTTTGCAAAGTGGGGTCCCATCAAGG | | GVPSRFSGSGSGTDFTLTISSLQPEDFA | | | |
| | TTCAGTGGCAGTGGATCTGGGACAGATTTCACTCTCACCATCAGCAGTCTGCAACCTGAGG | | TYFCQQSYTTHMYTFGQGTKVDIK | | | |
| | ATTTTGCAACTTACTTCTGTCAGCAGAGTTATACTACCCACATGTACACTTTTGGCCAGGG | | | | | |
| | GACCAAGGTGGATATCAAA | | | | | |
| ADI-75808 | CAGCCTGTGCTGACTCAGCCTGCCTCCGTGTCTGGGTCTCCTGGACAGTCGATCACCATCT | 3051 | QPVLTQPASVSGSPGQSITISCTGTSSD | 3333 | | |
| | CCTGCACTGGAACCAGCAGTGACCTTGGTGCTTTTAACCATGTCTCCTGGTACCAACACTT | | LGAFNHVSWYQHFPGKAPKLLIYEFTNR | | | |
| | CCCAGGCAAGGCCCCCAAACTTTTGATTTATGAGTTCACTAATCGGCCCTCAGGGGTTTCT | | PSGVSNRFSGSKSDKTASLTIFGLQAED | | | |
| | AATCGCTTCTCCGGCTCCAAGTCTGACAAGACGGCCTCCCTGACCATCTTTGGGCTCCAGG | | EADYYCSAYTSTSTVFGGGTKVTVL | | | |
| | CTGAGGACGAGGCTGATTATTACTGCAGTGCATATACATCCACCAGCACAGTATTCGGCGG | | | | | |
| | AGGGACCAAGGTCACCGTCCTA | | | | | |
| ADI-75848 | GAAATTGTGATGACCCAGTCTCCATCCTCCCTGTCTGCATCTGTAGGAGACAGAATCACCA | 3052 | EIVMTQSPSSLSASVGDRITITCRASQG | 3334 | | |
| | TCACTTGCCGGGCGAGTCAGGGCATTAGCAATTCTTTAGCCTGGTATCAGCAGAAACCAGG | | ISNSLAWYQQKPGKAPKLLLYAASTLES | | | |
| | GAAAGCCCCTAAGCTCCTGCTCTATGCTGCATCCACATTGGAAAGTGGGGTCCCATCCAGG | | GVPSRFSGSGSGTDFTLTINSLQPEDFA | | | |
| | TTCAGTGGCAGTGGATCTGGGACGGATTTCACTCTCACCATCAACAGCCTGCAGCCTGAAG | | TYYCQQYYSPPPRTFGQGTKVEIK | | | |
| | ATTTTGCAACTTATTACTGTCAACAGTATTATAGTCCCCCTCCCCGGACGTTCGGCCAAGG | | | | | |
| | GACCAAGGTGGAAATCAAA | | | | | |
| ADI-75832 | GAAATTGTGATGACCCAGTCTCCAGGCACCCTGTCTTTGTCTCCAGGGGAAAGAGCCACCC | 3053 | EIVMTQSPGTLSLSPGERATLSCRASQS | 3335 | | |
| | TCTCCTGCAGGGCCAGTCAGAGTGTTAGCGGCTACTTAGCCTGGTACCAGCAGAGACCTGG | | VSGYLAWYQQRPGQAPRLLIYDASSRAT | | | |
| | CCAGGCTCCCAGGCTCCTCATCTATGATGCATCCAGCAGGGCCACTGGCATCCCAGACAGG | | GIPDRFSGSGSGTDFTLTISRLEPEDFA | | | |
| | TTCAGTGGCAGTGGGTCTGGGACAGACTTCACTCTCACCATCAGCAGACTGGAGCCTGAGG | | VYFCQQYGSSPRTFGQGTKVEIK | | | |
| | ATTTTGCAGTGTATTTCTGTCAGCAGTATGGTAGCTCACCTCGAACGTTCGGCCAAGGGAC | | | | | |
| | CAAGGTGGAAATCAAA | | | | | |

| | | | SEQ | | SEQ | | SEQ | | SEQ | | SEQ | | SEQ | | SEQ |
|---|---|---|---|---|---|---|---|---|---|---|---|---|---|---|---|
| | VL | VL | ID | VL | ID | VL | ID | VL | ID | VL | ID | VL | ID | VL | ID |
| Clone ID | Germline | FR1 | NO: | CDR1 | NO: | FR2 | NO: | CDR2 | NO: | FR3 | NO: | CDR3 | NO: | FR4 | NO: |
| ADI-75618 | IGKV1-5 | DIQMTQ | 1879 | RASQSID | 2126 | WYQQKP | 2257 | KTSSLE | 2444 | GVPSRFSG | 2532 | QHFNS | 2781 | FGQGTK | 2944 |
| | | SPSTLS | | DWLA | | GKAPKL | | S | | SGSGTEFT | | YLMYT | | VDIK | |
| | | ASVGDR | | | | LIY | | | | LTISSLQP | | | | | |
| | | VTITC | | | | | | | | DDFATYYC | | | | | |
| ADI-75830 | IGLV3-21 | QPVLTQ | 1936 | GAHDIGS | 2127 | WYQQKP | 2283 | DDSDRP | 2399 | GIPERVSG | 2587 | QVWDT | 2776 | FGGGTK | 2939 |
| | | PPSVSV | | KSVH | | GQAPVL | | S | | SNSGNTAT | | SGDHW | | LTVL | |
| | | APGQTA | | | | VVY | | | | LTISRVEA | | V | | | |
| | | GITC | | | | | | | | GDEADYYC | | | | | |
| ADI-75628 | IGKV1-33 | DIRMTQ | 1937 | QASQDIN | 2128 | WYQQKP | 2257 | DASNLE | 2416 | GVPSRFSG | 2588 | QSYDN | 2782 | FGPGTK | 2942 |
| | | SPSSLS | | TYLN | | GKAPKL | | T | | SGSGTHFT | | PPPT | | VEIK | |
| | | ASVGDR | | | | LIY | | | | FTITSLQP | | | | | |
| | | VTITC | | | | | | | | EDIATYYC | | | | | |
| ADI-75640 | IGKV3D- | DMTMTQ | 1938 | RASQSIS | 2129 | WYQQKP | 2258 | GASTRA | 2383 | GISARFSG | 2589 | QQYNN | 2783 | FGQGTK | 2937 |
| | 15 | SPATLS | | SNLA | | GQAPRL | | T | | SGSGTKFT | | WPPWT | | VEIK | |
| | | VSLGER | | | | LIY | | | | LTISSLQS | | | | | |
| | | VTLSC | | | | | | | | EDFAVYYC | | | | | |
| ADI-75657 | IGKV2D- | DIVMTQ | 1939 | KSSQSLL | 2130 | WYLQKP | 2260 | LGSNRA | 2387 | GVPDRFSG | 2575 | MQALQ | 2765 | FGQGTR | 2940 |
| | 28 | SPLTLP | | HSNGHKY | | GQSPQL | | S | | SGSGTDFT | | TPIT | | LEIK | |
| | | VTPGEP | | LD | | LIY | | | | LKISRVEA | | | | | |
| | | ASISC | | | | | | | | EDVGIYYC | | | | | |
| ADI-75713 | IGLV1-51 | QSVVTQ | 1940 | SGTSSNI | 2131 | WYQHLP | 2307 | DNDKRP | 2445 | GIPDRFSG | 2590 | ATWDD | 2784 | FGGGTQ | 2948 |
| | | PPSVSA | | GNNYVS | | GTAPKL | | S | | SKSGTSAT | | SLSVG | | LTVL | |
| | | APGQRV | | | | LIY | | | | LGITGLQS | | I | | | |
| | | TISC | | | | | | | | GDEADYYC | | | | | |
| ADI-75692 | IGLV1-36 | QPVLTQ | 1941 | FGSSSNI | 2132 | WYQQLP | 2308 | YDDLLP | 2433 | GVSDRFSG | 2578 | AAWDD | 2785 | FGPGTK | 2951 |
| | | PPSVSE | | GHNAVN | | GKAPKL | | S | | SKSGTSAS | | RLNGY | | VTVL | |
| | | APRQRV | | | | IIY | | | | LAISGLQS | | V | | | |
| | | TISC | | | | | | | | EDEADYYC | | | | | |
| ADI-75587 | IGKV1D- | ASVGDR | 1912 | RASQTIS | 2133 | WYQQKP | 2257 | AASSLQ | 2391 | GVPSRFSG | 2534 | QQSYS | 2775 | FAQGTK | 2952 |
| | 39 | EIPMTQ | | RFLN | | GKAPKL | | S | | SGSGTDFT | | APPWT | | VDIK | |
| | | SPSSLS | | | | LIY | | | | LTISSLQP | | | | | |
| | | VTITC | | | | | | | | EDFATYYC | | | | | |
| ADI-75775 | IGKV1D- | DIQMTQ | 1895 | RASQSIS | 2134 | WYQQRP | 2309 | AASTLQ | 2392 | GVPSRFSG | 2591 | QQSYV | 2786 | FGPGTK | 2942 |
| | 39 | SPSSLS | | RYLN | | GKAPKL | | S | | SGSGTDFT | | SPPWT | | VEIK | |
| | | ASVGDR | | | | LIY | | | | LTISSLQP | | | | | |
| | | VTISC | | | | | | | | EDFATYIC | | | | | |
| ADI-75758 | IGKV1D- | DIQMTQ | 1878 | RASQRIS | 2135 | WYQQRP | 2310 | NASSFE | 2446 | GVPSRFSG | 2534 | QQSYS | 2787 | FGQGTK | 2937 |
| | 39 | SPSSLS | | SYLN | | GKAPNF | | S | | SGSGTDFT | | DPYT | | VEIK | |
| | | ASVGDR | | | | LIY | | | | LTISSLQP | | | | | |
| | | VTITC | | | | | | | | EDFATYYC | | | | | |
| ADI-75793 | IGKV1-9 | DIKMTQ | 1942 | RASQGIS | 2136 | WYQQKP | 2257 | AASTLQ | 2392 | GVPSRFSG | 2592 | QQLNT | 2788 | FGPGTK | 2942 |
| | | SPSFLS | | SYLA | | GKAPKL | | S | | SGSGTEFT | | HPPP | | VEIK | |
| | | ASVGDR | | | | LIY | | | | LTISSLQP | | | | | |
| | | VTITC | | | | | | | | EDFATYYC | | | | | |
| ADI-75804 | IGKV1D- | DIVMTQ | 1902 | RASQSIS | 2066 | WYQQKP | 2311 | AASSLQ | 2391 | GVPSRFSG | 2534 | QQSYT | 2789 | FGQGTK | 2937 |
| | 39 | SPSSLS | | TYLN | | EKAPKL | | S | | SGSGTDFT | | SPAYT | | VEIK | |
| | | ASVGDR | | | | LIY | | | | LTISSLQP | | | | | |
| | | VTITC | | | | | | | | EDFATYYC | | | | | |

| | | SEQ | | SEQ | Reverted | SEQ |
|---|---|---|---|---|---|---|
| | | ID | | ID | VL | ID |
| Clone ID | VL DNA | NO: | VL Protein | NO: | Protein | NO: |
| ADI-75618 | GACATCCAGATGACCCAGTCTCCTTCCACCCTGTCTGCATCTGTGGGAGACAGAGTCACCA | 3054 | DIQMTQSPSTLSASVGDRVTITCRASQS | 3336 | | |
| | TCACTTGCCGGGCCAGTCAGAGTATTGATGACTGGTTGGCCTGGTATCAGCAGAAACCAGG | | IDDWLAWYQQKPGKAPKLLIYKTSSLES | | | |
| | GAAAGCCCCTAAACTCCTGATCTATAAGACGTCTAGTTTAGAAAGTGGGGTCCCATCAAGA | | GVPSRFSGSGSGTEFTLTISSLQPDDFA | | | |
| | TTCAGCGGCAGTGGATCTGGGACAGAATTCACTCTCACCATCAGCAGCCTGCAGCCTGATG | | TYYCQHFNSYLMYTFGQGTKVDIK | | | |
| | ATTTTGCAACTTATTACTGCCAACACTTTAATAGTTACCTCATGTACACTTTTGGCCAGGG | | | | | |
| | GACCAAGGTGGATATCAAA | | | | | |
| ADI-75830 | CAGCCTGTGCTGACTCAGCCCCCCTCGGTGTCAGTGGCCCCAGGACAGACGGCCGGGATTA | 3055 | QPVLTQPPSVSVAPGQTAGITCGAHDIG | 3337 | | |
| | CCTGTGGGGCACACGACATTGGAAGTAAGAGTGTGCACTGGTACCAGCAAAAGCCAGGCCA | | SKSVHWYQQKPGQAPVLVVYDDSDRPSG | | | |
| | GGCCCCTGTGCTGGTCGTCTATGATGATAGCGACCGGCCCTCAGGGATCCCTGAGCGAGTC | | IPERVSGSNSGNTATLTISRVEAGDEAD | | | |
| | TCTGGCTCCAACTCTGGAAACACGGCCACCCTGACCATCAGCAGGGTCGAAGCCGGGGATG | | YYCQVWDTSGDHWVFGGGTKLTVL | | | |
| | AGGCCGACTATTACTGTCAGGTGTGGGATACTAGTGGTGATCATTGGGTGTTCGGCGGAGG | | | | | |
| | GACCAAGCTCACCGTCCTA | | | | | |
| ADI-75628 | GACATCCGGATGACCCAGTCTCCATCCTCCCTGTCTGCATCTGTAGGAGACAGAGTCACCA | 3056 | DIRMTQSPSSLSASVGDRVTITCQASQD | 3338 | | |
| | TCACTTGCCAGGCGAGTCAGGACATTAACACCTATTTAAATTGGTATCAGCAGAAACCAGG | | INTYLNWYQQKPGKAPKLLIYDASNLET | | | |
| | GAAAGCCCCTAAACTCCTGATCTACGATGCATCCAATTTGGAAACAGGGGTCCCATCAAGG | | GVPSRFSGSGSGTHFTFTITSLQPEDIA | | | |
| | TTCAGTGGAAGTGGATCTGGGACACATTTTACTTTCACCATCACCAGCCTGCAGCCTGAAG | | TYYCQSYDNPPPTFGPGTKVEIK | | | |
| | ACATTGCAACATATTACTGTCAATCCTATGATAATCCCCCTCCGACTTTCGGCCCTGGGAC | | | | | |
| | CAAGGTGGAGATCAAA | | | | | |
| ADI-75640 | GACATGACGATGACGCAGTCTCCAGCCACCCTGTCTGTGTCTCTAGGAGAAAGAGTCACCC | 3057 | DMTMTQSPATLSVSLGERVTLSCRASQS | 3339 | | |
| | TCTCCTGCAGGGCCAGTCAGAGTATTAGCAGCAACTTAGCCTGGTACCAGCAGAAACCTGG | | ISSNLAWYQQKPGQAPRLLIYGASTRAT | | | |
| | CCAGGCTCCCAGGCTCCTCATCTATGGTGCATCCACCAGGGCCACTGGTATCTCAGCCAGG | | GISARFSGSGSGTKFTLTISSLQSEDFA | | | |
| | TTCAGTGGCAGTGGGTCTGGGACAAAATTCACTCTCACCATCAGCAGCCTGCAGTCTGAAG | | VYYCQQYNNWPPWTFGQGTKVEIK | | | |
| | ATTTTGCAGTTTATTACTGTCAGCAATATAATAACTGGCCTCCGTGGACGTTCGGCCAGGG | | | | | |
| | GACCAAGGTGGAAATCAAA | | | | | |
| ADI-75657 | GACATTGTGATGACGCAGTCTCCACTCACCCTGCCCGTCACCCCTGGAGAGCCGGCCTCCA | 3058 | DIVMTQSPLTLPVTPGEPASISCKSSQS | 3340 | | |
| | TCTCCTGCAAGTCTAGTCAGAGCCTCCTGCATAGTAATGGACACAAGTACTTGGATTGGTA | | LLHSNGHKYLDWYLQKPGQSPQLLIYLG | | | |
| | CCTGCAGAAGCCAGGGCAGTCTCCACAGCTCCTGATCTATTTGGGTTCTAATCGGGCCTCC | | SNRASGVPDRFSGSGSGTDFTLKISRVE | | | |
| | GGGGTCCCTGACAGGTTCAGTGGCAGTGGATCAGGCACAGATTTCACACTGAAAATCAGCA | | AEDVGIYYCMQALQTPITFGQGTRLEIK | | | |
| | GAGTGGAGGCTGAGGATGTTGGGATTTATTACTGCATGCAAGCTCTACAAACTCCGATCAC | | | | | |
| | CTTCGGCCAAGGGACACGACTGGAGATTAAA | | | | | |
| ADI-75713 | CAGTCAGTGGTGACTCAGCCACCCTCAGTGTCTGCGGCCCCAGGACAGAGGGTCACCATCT | 3059 | QSVVTQPPSVSAAPGQRVTISCSGTSSN | 3341 | | |
| | CCTGCTCTGGAACCAGCTCCAACATTGGGAATAATTATGTATCCTGGTACCAGCACCTCCC | | IGNNYVSWYQHLPGTAPKLLIYDNDKRP | | | |
| | AGGAACAGCCCCCAAACTCCTCATTTATGACAATGATAAGCGACCCTCAGGGATTCCTGAC | | SGIPDRFSGSKSGTSATLGITGLQSGDE | | | |
| | CGATTCTCTGGCTCCAAGTCTGGCACGTCAGCCACCCTGGGCATCACCGGTCTCCAGAGTG | | ADYYCATWDDSLSVGIFGGGTQLTVL | | | |
| | GGGACGAGGCCGATTATTATTGCGCTACATGGGATGACAGCCTGAGTGTGGGGATTTTCGG | | | | | |
| | CGGAGGCACCCAGCTGACCGTCCTC | | | | | |
| ADI-75692 | CAGCCTGTGCTGACTCAGCCCCCCTCGGTGTCTGAAGCAGGCAGAGGGTCACCATCT | 3060 | QPVLTQPPSVSEAPRQRVTISCFGSSSN | 3342 | | |
| | CCTGTTTTGGGAGCAGCTCCAACATCGGACATAATGCTGTAAACTGGTATCAGCAGCTCCC | | IGHNAVNWYQQLPGKAPKLIIYYDDLLP | | | |
| | AGGAAAGGCTCCCAAACTTATCATCTACTATGATGATCTGCTGCCCTCAGGGGTCTCCGAC | | SGVSDRFSGSKSGTSASLAISGLQSEDE | | | |
| | CGATTCTCTGGCTCCAAGTCTGGCACCTCAGCCTCCCTGGCCATCAGTGGGCTCCAGTCTG | | ADYYCAAWDDRLNGYVFGPGTKVTVL | | | |
| | AGGATGAGGCTGATTATTACTGTGCAGCATGGGATGACAGGCTGAATGGTTATGTCTTCGG | | | | | |
| | ACCTGGGACCAAGGTCACCGTCCTA | | | | | |
| ADI-75587 | GAAATCCCGATGACCCAGTCTCCATCCTCCCTGTCTGCATCTGTAGGAGACAGAGTCACCA | 3061 | EIPMTQSPSSLSASVGDRVTITCRASQT | 3343 | | |
| | TCACTTGCCGGGCAAGTCAGACCATTAGTAGGTTTTTAAATTGGTATCAGCAGAAACCAGG | | ISRFLNWYQQKPGKAPKLLIYAASSLQS | | | |
| | GAAAGCCCCTAAACTCCTGATCTATGCTGCATCCAGTTTGCAAAGTGGGGTCCCATCAAGG | | GVPSRFSGSGSGTDFTLTISSLQPEDFA | | | |
| | TTCAGTGGCAGTGGATCTGGGACAGATTTCACTCTCACCATCAGCAGTCTGCAACCTGAAG | | TYYCQQSYSAPPWTFAQGTKVDIK | | | |
| | ATTTTGCAACTTACTACTGTCAACAGAGTTACAGTGCCCCTCCGTGGACTTTTGCCCAGGG | | | | | |
| | GACCAAGGTGGATATCAAA | | | | | |
| ADI-75775 | GACATCCAGATGACCCAGTCTCCATCCTCCCTGTCTGCATCTGTAGGGGACAGAGTCACCA | 3062 | DIQMTQSPSSLSASVGDRVTISCRASQS | 3344 | | |
| | TCAGTTGCCGGGCAAGTCAGAGCATTAGCAGGTATTTAAATTGGTATCAGCAGAGACCAGG | | ISRYLNWYQQRPGKAPKLLIYAASTLQS | | | |
| | GAAAGCCCCTAAACTCCTGATCTATGCTGCATCCACTTTGCAAAGTGGGGTCCCATCAAGA | | GVPSRFSGSGSGTDFTLTISSLQPEDFA | | | |
| | TTCAGTGGCAGTGGATCTGGGACAGACTTCACTCTTACCATCAGCAGTCTGCAACCTGAAG | | TYICQQSYVSPPWTFGPGTKVEIK | | | |
| | ATTTTGCAACTTACATCTGTCAACAGAGTTACGTTAGCCCCCCGTGGACGTTCGGCCCAGG | | | | | |
| | GACCAAGGTGGAAATCAAA | | | | | |
| ADI-75758 | GACATCCAGATGACCCAGTCTCCATCCTCCCTGTCTGCATCTGTAGGAGACAGAGTCACCA | 3063 | DIQMTQSPSSLSASVGDRVTITCRASQR | 3345 | | |
| | TCACTTGCCGGGCAAGTCAGAGGATTAGTAGCTATTTAAATTGGTATCAGCAGAGACCAGG | | ISSYLNWYQQRPGKAPNFLIYNASSFES | | | |
| | GAAAGCCCCTAACTTCCTGATCTATAATGCATCCAGTTTTGAAAGTGGGGTCCCATCAAGG | | GVPSRFSGSGSGTDFTLTISSLQPEDFA | | | |
| | TTCAGTGGCAGTGGATCTGGGACAGATTTCACTCTCACCATCAGCAGTCTGCAACCTGAAG | | TYYCQQSYSDPYTFGQGTKVEIK | | | |
| | ATTTTGCAACTTACTACTGTCAACAGAGTTACAGTGACCCATACACTTTTGGCCAGGGGAC | | | | | |
| | CAAAGTGGAAATCAAA | | | | | |
| ADI-75793 | GACATCAAGATGACCCAGTCTCCATCCTTCCTGTCTGCATCTGTAGGAGACAGAGTCACCA | 3064 | DIKMTQSPSFLSASVGDRVTITCRASQG | 3346 | | |
| | TCACTTGCCGGGCCAGTCAGGGCATTAGCAGTTATTTAGCCTGGTATCAGCAAAAGCCAGG | | ISSYLAWYQQKPGKAPKLLIYAASTLQS | | | |
| | GAAAGCCCCTAAACTCCTAATCTATGCTGCATCCACTTTGCAAAGTGGGGTCCCATCAAGG | | GVPSRFSGSGSGTEFTLTISSLQPEDFA | | | |
| | TTCAGCGGCAGTGGATCTGGGACAGAATTCACTCTCACAATCAGCAGCCTGCAGCCTGAAG | | TYYCQQLNTHPPPFGPGTKVEIK | | | |
| | ATTTTGCAACTTATTACTGTCAACAGCTTAATACTCACCCTCCCCCTTTCGGCCCTGGGAC | | | | | |
| | CAAGGTGGAGATCAAA | | | | | |
| ADI-75804 | GACATCGTGATGACGCAGTCTCCATCCTCCCTGTCTGCATCTGTAGGAGACAGAGTCACCA | 3065 | DIVMTQSPSSLSASVGDRVTITCRASQS | 3347 | | |
| | TCACTTGCCGGGCAAGTCAGAGCATTAGCACGTATTTAAATTGGTATCAGCAGAAACCAGA | | ISTYLNWYQQKPEKAPKLLIYAASSLQS | | | |
| | GAAAGCCCCTAAGCTCCTGATCTATGCTGCATCCAGTTTGCAAAGTGGGGTCCCATCAAGG | | GVPSRFSGSGSGTDFTLTISSLQPEDFA | | | |
| | TTCAGTGGCAGCGGATCTGGGACAGATTTCACTCTCACCATCAGCAGTCTGCAACCTGAAG | | TYYCQQSYTSPAYTFGQGTKVEIK | | | |
| | ATTTTGCAACTTACTACTGTCAACAGAGTTACACTTCCCCTGCGTACACGTTTGGCCAGGG | | | | | |
| | GACCAAGGTGGAGATCAAA | | | | | |

| | | | SEQ | | SEQ | | SEQ | | SEQ | | SEQ | | SEQ | | SEQ |
|---|---|---|---|---|---|---|---|---|---|---|---|---|---|---|---|
| | VL | VL | ID | VL | ID | VL | ID | VL | ID | VL | ID | VL | ID | VL | ID |
| Clone ID | Germline | FR1 | NO: | CDR1 | NO: | FR2 | NO: | CDR2 | NO: | FR3 | NO: | CDR3 | NO: | FR4 | NO: |
| ADI-75658 | IGKV1-9 | DIKMTQ | 1942 | RASQGIS | 2137 | WYQQKS | 2312 | GASTLQ | 2447 | GVPSRFSG | 2592 | QHLNS | 2790 | FGQGTR | 2940 |
| | | SPSFLS | | TDLA | | GKAPKL | | S | | SGSGTEFT | | DAIT | | LEIK | |
| | | ASVGDR | | | | LIY | | | | LTISSLQP | | | | | |
| | | VTITC | | | | | | | | EDFATYYC | | | | | |
| ADI-75768 | IGKV1-9 | DIQMTQ | 1943 | RASQGIS | 2138 | WYQQKP | 2257 | AASTLQ | 2392 | GVPSRFSG | 2593 | QHLDT | 2791 | FGRGTK | 2941 |
| | | SPSFLS | | RYLA | | GKAPKL | | S | | SGSGTEFT | | DSGT | | VEIK | |
| | | AFVGDR | | | | LIY | | | | LTISSLQT | | | | | |
| | | VTITC | | | | | | | | EDFATYYC | | | | | |
| ADI-75810 | IGKV4-1 | DIQMTQ | 1927 | KSNQSVL | 2139 | WYQQKP | 2290 | WASTRE | 2422 | GIPDRFSG | 2594 | QQYYN | 2732 | FGQGTK | 2937 |
| | | SPDSLA | | YSS-- | | GQPPKL | | S | | SGSGTDFT | | TPVT | | VEIK | |
| | | VSLGER | | KNFLG | | LIY | | | | LTISSLQA | | | | | |
| | | ATINC | | | | | | | | EDVAVYYC | | | | | |
| ADI-75784 | IGKV1-9 | DIKMTQ | 1944 | RASQGIS | 2140 | WYQQKP | 2257 | GASTLQ | 2447 | GVPLRFSG | 2595 | QHLDS | 2792 | FGQGTK | 2944 |
| | | TPSFLS | | SFLA | | GKAPKL | | S | | SGSGTEFT | | YPRYT | | VDIK | |
| | | ASVGDR | | | | LIY | | | | LTISSLQP | | | | | |
| | | VTITC | | | | | | | | EDFATYYC | | | | | |
| ADI-75619 | IGKV1- | EIQLTQ | 1917 | RASQGIS | 2062 | WYQQKP | 2259 | AASTLE | 2398 | GVPSRFSG | 2530 | QEYYD | 2793 | FGQGTK | 2944 |
| | NL1 | SPSSLS | | NSLA | | GKAPKL | | S | | SGSGTDFS | | TRT | | VDIK | |
| | | ASVGDR | | | | LLY | | | | LTISSLQP | | | | | |
| | | VTITC | | | | | | | | EDFATYYC | | | | | |
| ADI-75738 | IGKV3-11 | EIVLTQ | 1945 | RASQSVS | 2119 | WYQQRP | 2306 | DASNRA | 2448 | GIPARFSG | 2596 | QQRSN | 2794 | FGGGTK | 2936 |
| | | SPATLS | | TYLA | | GQAPRL | | T | | SGSETDFT | | WLT | | VEIK | |
| | | LSPGER | | | | LIY | | | | LTISSLEP | | | | | |
| | | ATLSC | | | | | | | | EDFAVYYC | | | | | |
| ADI-75790 | IGLV2-14 | QSALIQ | 1946 | GAYIYVS | 2141 | WYQQHP | 2313 | EVTKRP | 2449 | GISNRFSG | 2597 | SSYTT | 2795 | FGGGTQ | 2948 |
| | | PASVSG | | TATSSDV | | GKAPKL | | S | | SKSGNTAS | | SGVV | | LTVL | |
| | | SPGQSI | | | | TIY | | | | LTISGLQA | | | | | |
| | | TISC | | | | | | | | EDEAHYYC | | | | | |
| ADI-75719 | IGKV1D- | DIPMTQ | 1947 | RASQSIT | 2142 | WYQQKP | 2257 | AASSLQ | 2391 | GVPSRFSG | 2598 | QQSYN | 2702 | FGQGTK | 2937 |
| | 39 | SPSSLS | | TYLN | | GKAPKL | | S | | SGSGTDFT | | TPPWT | | VEIK | |
| | | ASVGDR | | | | LIY | | | | LTITSLQP | | | | | |
| | | VTITC | | | | | | | | EDFAIYYC | | | | | |
| ADI-75742 | IGLV1-40 | QSVLTQ | 1948 | GAGYDVH | 2143 | WYQQLP | 2314 | DNTNRP | 2450 | GVPDRFSG | 2599 | QSYDS | 2796 | FGTGTK | 2945 |
| | | PPSVSG | | TGSNSNI | | GTAPKL | | S | | SKSGTSAS | | SLTGS | | VTVL | |
| | | APGQRV | | | | LIY | | | | LAITGLQA | | V | | | |
| | | TISC | | | | | | | | EDEADYYC | | | | | |
| ADI-75779 | IGKV1-12 | EIPMTQ | 1949 | RASQGIG | 2144 | WYQQKP | 2257 | AASILQ | 2430 | GVPSRFSG | 2592 | QQADS | 2763 | FGPGTK | 2942 |
| | | SPSSVS | | SWLG | | GKAPKL | | S | | SGSGTEFT | | FPPA | | VEIK | |
| | | ASVGDR | | | | LIY | | | | LTISSLQP | | | | | |
| | | VTIAC | | | | | | | | EDFATYYC | | | | | |
| ADI-75650 | IGKV2-30 | EIVLTQ | 1950 | RSSESLS | 2145 | WFQQRP | 2315 | KVSNRD | 2451 | GVPDRFSG | 2533 | MQGTH | 2797 | FGQGTK | 2937 |
| | | SPLSLP | | YSDGNTY | | GQSPRR | | S | | SGSGTDFT | | WPPT | | VEIK | |
| | | VTLGQP | | LN | | LIY | | | | LKISRVEA | | | | | |
| | | ASISC | | | | | | | | EDVGVYYC | | | | | |
| ADI-75593 | IGKV1-5 | DIQMTQ | 1879 | RASQSID | 2126 | WYQQKP | 2257 | KTSTLE | 2452 | GVPSRFSG | 2532 | QHFNS | 2781 | FGQGTK | 2937 |
| | | SPSTLS | | DWLA | | GKAPKL | | S | | SGSGTEFT | | YLMYT | | VEIK | |
| | | ASVGDR | | | | LIY | | | | LTISSLQP | | | | | |
| | | VTITC | | | | | | | | DDFATYYC | | | | | |

| | | SEQ | | SEQ | Reverted | SEQ |
|---|---|---|---|---|---|---|
| | | ID | | ID | VL | ID |
| Clone ID | VL DNA | NO: | VL Protein | NO: | Protein | NO: |
| ADI-75658 | GACATCAAGATGACCCAGTCTCCATCCTTCCTGTCTGCATCTGTAGGAGACAGAGTCACCA | 3066 | DIKMTQSPSFLSASVGDRVTITCRASQG | 3348 | | |
| | TCACTTGCCGGGCCAGTCAGGGCATTAGTACTGATTTAGCCTGGTATCAGCAAAAATCAGG | | ISTDLAWYQQKSGKAPKLLIYGASTLQS | | | |
| | GAAAGCCCCCAAGCTCCTGATCTATGGTGCATCCACTTTGCAAAGTGGGGTCCCATCAAGG | | GVPSRFSGSGSGTEFTLTISSLQPEDFA | | | |
| | TTCAGCGGCAGTGGATCTGGGACAGAATTCACTCTCACAATCAGCAGCCTGCAGCCTGAAG | | TYYCQHLNSDAITFGQGTRLEIK | | | |
| | ATTTTGCAACTTATTACTGTCAACACCTTAATAGTGACGCGATCACCTTCGGCCAAGGGAC | | | | | |
| | ACGACTGGAGATTAAA | | | | | |
| ADI-75768 | GACATCCAGATGACCCAGTCTCCATCCTTCCTGTCTGCATTTGTAGGAGACAGAGTCACCA | 3067 | DIQMTQSPSFLSAFVGDRVTITCRASQG | 3349 | | |
| | TCACTTGCCGGGCCAGTCAGGGCATTAGCAGGTATTTAGCCTGGTATCAGCAAAAACCAGG | | ISRYLAWYQQKPGKAPKLLIYAASTLQS | | | |
| | GAAAGCCCCTAAGCTCCTGATCTATGCTGCCTCCACTTTACAAAGTGGGGTCCCATCAAGG | | GVPSRFSGSGSGTEFTLTISSLQTEDFA | | | |
| | TTCAGCGGCAGTGGATCTGGGACAGAATTCACTCTCACAATCAGCAGCCTGCAGACTGAAG | | TYYCQHLDTDSGTFGRGTKVEIK | | | |
| | ATTTTGCAACTTATTACTGTCAACACCTTGATACTGACTCGGGGACGTTCGGCCGAGGGAC | | | | | |
| | CAAGGTGGAAATCAAA | | | | | |
| ADI-75810 | GACATCCAGATGACCCAGTCTCCAGACTCCCTGGCTGTGTCTCTGGGCGAGAGGGCCACCA | 3068 | DIQMTQSPDSLAVSLGERATINCKSNQS | 3350 | | |
| | TCAACTGCAAGTCCAACCAGAGTGTTTTATACAGTTCTAAGAACTTCTTAGGTTGGTACCA | | VLYSSKNFLGWYQQKPGQPPKLLIYWAS | | | |
| | GCAGAAACCAGGACAGCCTCCTAAACTGCTCATTTACTGGGCATCTACCCGGGAATCCGGG | | TRESGIPDRFSGSGSGTDFTLTISSLQA | | | |
| | ATCCCTGACCGATTCAGTGGCAGCGGCTCTGGGACAGATTTCACTCTCACCATCAGCAGCC | | EDVAVYYCQQYYNTPVTFGQGTKVEIK | | | |
| | TGCAGGCTGAAGATGTGGCAGTTTATTACTGTCAGCAATATTATAATACTCCTGTGACGTT | | | | | |
| | CGGCCAAGGGACCAAGGTGGAGATCAAA | | | | | |
| ADI-75784 | GACATCAAGATGACCCAGACTCCATCCTTCCTGTCTGCATCTGTGGGAGACAGAGTCACCA | 3069 | DIKMTQTPSFLSASVGDRVTITCRASQG | 3351 | | |
| | TCACTTGCCGGGCCAGTCAGGGCATTAGCAGTTTTTTAGCCTGGTATCAGCAAAAACCAGG | | ISSFLAWYQQKPGKAPKLLIYGASTLQS | | | |
| | GAAAGCCCCTAAGCTCCTGATCTATGGTGCATCCACTTTGCAAAGTGGGGTCCCATTAAGG | | GVPLRFSGSGSGTEFTLTISSLQPEDFA | | | |
| | TTCAGCGGCAGTGGATCTGGGACAGAATTCACTCTCACAATCAGCAGCCTGCAGCCTGAAG | | TYYCQHLDSYPRYTFGQGTKVDIK | | | |
| | ATTTTGCAACTTATTACTGTCAACACCTTGATAGTTACCCTCGGTACACTTTTGGCCAGGG | | | | | |
| | GACCAAGGTGGATATCAAA | | | | | |
| ADI-75619 | GAAATCCAATTGACCCAGTCTCCATCCTCCCTGTCTGCATCTGTCGGAGACAGAGTCACCA | 3070 | EIQLTQSPSSLSASVGDRVTITCRASQG | 3352 | | |
| | TCACTTGCCGGGCGAGTCAGGGCATTAGCAATTCTTTAGCCTGGTATCAGCAGAAACCAGG | | ISNSLAWYQQKPGKAPKLLLYAASTLES | | | |
| | GAAAGCCCCTAAGCTCCTGCTCTATGCTGCGTCTACGTTGGAAAGTGGGGTCCCATCCCGG | | GVPSRFSGSGSGTDFSLTISSLQPEDFA | | | |
| | TTCAGTGGGAGTGGATCTGGGACGGACTTCTCTCTCACCATCAGCAGCCTGCAGCCTGAGG | | TYYCQEYYDTRTFGQGTKVDIK | | | |
| | ATTTTGCAACTTATTACTGTCAAGAGTATTATGATACCCGGACGTTCGGCCAAGGGACCAA | | | | | |
| | GGTGGATATCAAA | | | | | |
| ADI-75738 | GAAATTGTGTTGACACAGTCTCCAGCCACCCTGTCTTTGTCTCCAGGGGAAAGAGCCACCC | 3071 | EIVLTQSPATLSLSPGERATLSCRASQS | 3353 | | |
| | TCTCCTGCAGGGCCAGTCAGAGTGTTAGCACCTACTTAGCCTGGTACCAACAGAGACCTGG | | VSTYLAWYQQRPGQAPRLLIYDASNRAT | | | |
| | CCAGGCTCCCAGGCTCCTCATCTATGATGCATCCAACAGGGCCACTGGCATCCCAGCCAGG | | GIPARFSGSGSETDFTLTISSLEPEDFA | | | |
| | TTCAGTGGCAGTGGGTCTGAGACAGACTTCACTCTCACCATCAGCAGCCTGGAGCCTGAAG | | VYYCQQRSNWLTFGGGTKVEIK | | | |
| | ATTTTGCAGTTTATTATTGTCAACAGCGGAGCAACTGGCTCACTTTCGGCGGGGGACCAA | | | | | |
| | GGTGGAAATCAAA | | | | | |
| ADI-75790 | CAGTCTGCTCTGATTCAGCCTGCCTCCGTGTCTGGGTCTCCTGGACAGTCGATCACCATCT | 3072 | QSALIQPASVSGSPGQSITISCTATSSD | 3354 | | |
| | CCTGCACTGCAACCAGTAGTGACGTTGGTGCTTATATCTATGTCTCGTGGTACCAACAACA | | VGAYIYVSWYQQHPGKAPKLTIYEVTKR | | | |
| | CCCAGGCAAAGCCCCCAAACTCACGATTTATGAGGTCACTAAACGGCCGTCAGGGATTTCT | | PSGISNRFSGSKSGNTASLTISGLQAED | | | |
| | AATCGCTTCTCTGGCTCCAAGTCTGGCAACACGGCCTCCCTGACCATCTCTGGGCTCCAGG | | EAHYYCSSYTTSGVVFGGGTQLTVL | | | |
| | CTGAGGACGAGGCTCATTATTACTGCAGCTCATATACAACTAGCGGCGTGGTATTCGGCGG | | | | | |
| | AGGCACCCAGCTGACCGTCCTA | | | | | |
| ADI-75719 | GACATCCCGATGACCCAGTCTCCATCCTCCCTGTCTGCATCTGTAGGAGACAGAGTCACCA | 3073 | DIPMTQSPSSLSASVGDRVTITCRASQS | 3355 | | |
| | TCACTTGCCGGGCAAGTCAGAGCATAACCACTTATTTAAATTGGTATCAGCAGAAACCAGG | | ITTYLNWYQQKPGKAPKLLIYAASSLQS | | | |
| | GAAAGCCCCTAAGCTCCTGATCTATGCTGCATCCAGTTTGCAAAGTGGGGTCCCATCAAGG | | GVPSRFSGSGSGTDFTLTITSLQPEDFA | | | |
| | TTCAGTGGCAGTGGATCTGGGACAGATTTCACTCTCACCATCACCAGTCTGCAACCTGAAG | | IYYCQQSYNTPPWTFGQGTKVEIK | | | |
| | ACTTTGCAATTTACTACTGTCAACAGAGTTACAATACCCCTCCGTGGACGTTCGGCCAAGG | | | | | |
| | GACCAAGGTGGAGATCAAA | | | | | |
| ADI-75742 | CAGTCTGTGTTGACGCAGCCGCCCTCAGTGTCTGGGGCCCCAGGGCAGAGGGTCACCATCT | 3074 | EADYYCQSYDSSLTGSVFGTGTKVTVL | 3356 | | |
| | CCTGCACTGGGAGCAACTCCAACATCGGGGCAGGTTATGATGTACACTGGTACCAGCAGCT | | QSVLTQPPSVSGAPGQRVTISCTGSNSN | | | |
| | TCCAGGAACAGCCCCCAAACTCCTCATCTATGATAACACCAATCGGCCCTCAGGGGTCCCT | | IGAGYDVHWYQQLPGTAPKLLIYDNTNR | | | |
| | GACCGATTCTCTGGGTCCAAGTCTGGCACCTCAGCCTCCCTGGCCATCACTGGGCTCCAGG | | PSGVPDRFSGSKSGTSASLAITGLQAED | | | |
| | CTGAGGATGAGGCTGATTATTACTGCCAGTCCTATGACAGCAGCCTGACTGGTTCTGTCTT | | | | | |
| | CGGAACTGGGACCAAGGTCACCGTCCTA | | | | | |
| ADI-75779 | GAAATCCCGATGACCCAGTCTCCATCTTCCGTGTCTGCATCTGTAGGAGACAGAGTCACCA | 3075 | EIPMTQSPSSVSASVGDRVTIACRASQG | 3357 | | |
| | TCGCTTGTCGGGCGAGTCAGGGTATTGGCAGCTGGTTAGGCTGGTATCAGCAGAAACCAGG | | IGSWLGWYQQKPGKAPKLLIYAASILQS | | | |
| | GAAAGCCCCTAAGCTCCTGATCTATGCTGCGTCCATTTTGCAAAGTGGAGTCCCATCAAGG | | GVPSRFSGSGSGTEFTLTISSLQPEDFA | | | |
| | TTCAGCGGCAGTGGATCTGGGACAGAATTCACTCTCACCATCAGCAGCCTGCAGCCTGAAG | | TYYCQQADSFPPAFGPGTKVEIK | | | |
| | ATTTTGCAACTTACTATTGTCAACAGGCTGACAGTTTCCCTCCGGCTTTCGGCCCTGGGAC | | | | | |
| | CAAGGTGGAAATCAAA | | | | | |
| ADI-75650 | GAAATTGTGTTGACACAGTCTCCGCTCTCCCTGCCCGTCACCCTTGGACAGCCGGCCTCCA | 3076 | EIVLTQSPLSLPVTLGQPASISCRSSES | 3358 | | |
| | TCTCCTGCAGGTCTAGTGAAAGCCTCTCATACAGTGATGGAAACACCTACTTGAATTGGTT | | LSYSDGNTYLNWFQQRPGQSPRRLIYKV | | | |
| | TCAGCAGAGGCCAGGCCAATCTCCAAGGCGCCTTATTTATAAGGTTTCTAACCGGGACTCT | | SNRDSGVPDRFSGSGSGTDFTLKISRVE | | | |
| | GGGGTCCCAGACAGATTCAGCGGCAGTGGGTCAGGCACTGATTTCACATTGAAAATCAGCA | | AEDVGVYYCMQGTHWPPTFGQGTKVEIK | | | |
| | GGGTGGAGGCTGAGGATGTTGGGGTTTATTACTGCATGCAAGGTACACACTGGCCTCCGAC | | | | | |
| | GTTCGGCCAAGGGACCAAGGTGGAAATCAAA | | | | | |
| ADI-75593 | GACATCCAGATGACCCAGTCTCCTTCCACCCTGTCTGCATCTGTGGGAGACAGAGTCACCA | 3077 | DIQMTQSPSTLSASVGDRVTITCRASQS | 3359 | | |
| | TCACTTGCCGGGCCAGTCAGAGTATTGATGACTGGTTGGCCTGGTATCAGCAGAAACCAGG | | IDDWLAWYQQKPGKAPKLLIYKTSTLES | | | |
| | GAAAGCCCCTAAACTCCTGATCTATAAGACGTCTACTTTAGAAAGTGGGGTCCCATCAAGA | | GVPSRFSGSGSGTEFTLTISSLQPDDFA | | | |
| | TTCAGCGGCAGTGGATCTGGGACAGAATTCACTCTCACCATCAGCAGCCTGCAGCCTGATG | | TYYCQHFNSYLMYTFGQGTKVEIK | | | |
| | ATTTTGCAACTTATTACTGCCAACACTTTAATAGTTACCTCATGTACACTTTTGGCCAGGG | | | | | |
| | GACCAAGGTGGAGATCAAA | | | | | |

| | | | SEQ | | SEQ | | SEQ | | SEQ | | SEQ | | SEQ | | SEQ |
|---|---|---|---|---|---|---|---|---|---|---|---|---|---|---|---|
| | VL | VL | ID | VL | ID | VL | ID | VL | ID | VL | ID | VL | ID | VL | ID |
| Clone ID | Germline | FR1 | NO: | CDR1 | NO: | FR2 | NO: | CDR2 | NO: | FR3 | NO: | CDR3 | NO: | FR4 | NO: |
| ADI-75814 | IGKV1-5 | DIQMTQ | 1951 | RASQSIS | 2146 | WYQQKP | 2316 | KATHLE | 2453 | GVPSRFSG | 2532 | QQYNS | 2798 | FGQGTK | 2944 |
| | | SPSTLS | | TWLA | | GKAPKV | | T | | SGSGTEFT | | YYT | | VDIK | |
| | | ASVGDR | | | | LIY | | | | LTISSLQP | | | | | |
| | | VTVTC | | | | | | | | DDFATYYC | | | | | |
| ADI-75662 | IGLV3-21 | SYVLTQ | 1883 | GGNDLGS | 2147 | WYQQKP | 2287 | DDSDRP | 2399 | GIPERFSG | 2600 | QVWDS | 2742 | FGGGTK | 2939 |
| | | PPSVSV | | KNVH | | GQAPVL | | S | | SNSGNTAT | | NIDHP | | LTVL | |
| | | APGQTA | | | | VVF | | | | LTISRVET | | WV | | | |
| | | RITC | | | | | | | | GDEADYYC | | | | | |
| ADI-75627 | IGKV1-33 | DIQMTQ | 1878 | QASQDIN | 2148 | WYQQKP | 2257 | DASNLE | 2416 | GVPSRFSG | 2537 | QYYDN | 2799 | FGPGTK | 2942 |
| | | SPSSLS | | NYLN | | GKAPKL | | T | | SGSGTDFT | | PPPT | | VEIK | |
| | | ASVGDR | | | | LIY | | | | FTISSLQP | | | | | |
| | | VTITC | | | | | | | | EDIATYYC | | | | | |
| ADI-75792 | IGLV1-40 | QPVLTQ | 1952 | GGGYDVH | 2149 | WYQQLP | 2317 | LNNNRP | 2454 | GVPDRFSG | 2601 | QSYDS | 2800 | FGGGTQ | 2948 |
| | | PPSVSG | | TGSTSNI | | GEAPKL | | S | | SKSGTSAS | | SLSVW | | LTVL | |
| | | APGRGV | | | | LIY | | | | LAITGLQP | | V | | | |
| | | TISC | | | | | | | | VDEADYYC | | | | | |
| ADI-75791 | IGLV3-9 | QSVLTQ | 1953 | GLNIIPG | 2150 | WYQQKP | 2318 | RDNIRP | 2455 | GISERFSV | 2602 | QIWDI | 2801 | FGGGTQ | 2948 |
| | | PLSVSV | | KNVH | | GQAPIL | | S | | SHSGNMAT | | NTVI | | LTVL | |
| | | ALGQTA | | | | VIY | | | | LTISRAQA | | | | | |
| | | RIPC | | | | | | | | GDEADYYC | | | | | |
| ADI-75721 | IGLV3-21 | QYVLTQ | 1954 | GGNNIGS | 2151 | WYLQRP | 2319 | FNSDRP | 2456 | GIPGRFSG | 2603 | QVWDS | 2802 | FGGGTK | 2939 |
| | | PPSVSV | | KHVH | | GQAPVL | | S | | SNSGNTAT | | NTDHR | | LTVL | |
| | | APGETA | | | | VIS | | | | LTISRVEA | | V | | | |
| | | RITC | | | | | | | | GDEADYYC | | | | | |
| ADI-75761 | IGLV3-25 | DIRMTQ | 1955 | SGDALPN | 2152 | WYQQKS | 2320 | RDTERP | 2457 | GIPERFSG | 2604 | QSADY | 2803 | FGGGTK | 2939 |
| | | SPSVSV | | QYTY | | GQAPVL | | S | | SSSGTAVT | | SGTCV | | LTVL | |
| | | SPGQTA | | | | VIY | | | | LTISGVQA | | | | | |
| | | RITC | | | | | | | | EDEADYYC | | | | | |
| ADI-75682 | IGKV1D- | DIQLTQ | 1956 | RASQSIS | 2153 | WYQQKP | 2321 | AASSLQ | 2391 | GVPSRFSG | 2605 | QQSYS | 2804 | FGQGTR | 2940 |
| | 39 | SPSSLS | | TFLN | | GKVPNL | | S | | SGSGTDFT | | TPS | | LEIK | |
| | | ASVGDR | | | | LIY | | | | LTINGLQP | | | | | |
| | | VTVTC | | | | | | | | EDFATYYC | | | | | |
| ADI-75847 | IGKV1-9 | DIVLTQ | 1957 | RASQGIS | 2154 | WYQQKP | 2257 | AASTLQ | 2392 | GVPSRFSG | 2606 | QQLNS | 2805 | FGGGTK | 2938 |
| | | SPSSLS | | SHLA | | GKAPKL | | S | | SGSGTDFT | | DSPT | | VDIK | |
| | | ASVGDR | | | | LIY | | | | LTISSLQP | | | | | |
| | | VTITC | | | | | | | | EDFASYYC | | | | | |
| ADI-75852 | IGKV3-11 | EIALTQ | 1930 | RASQSVN | 2155 | WYQQKP | 2258 | DAYNRA | 2458 | GIPARFSG | 2607 | QQRLH | 2806 | FGPGTK | 2942 |
| | | SPATLS | | SYLA | | GQAPRL | | T | | SGSGTDFT | | PPFT | | VEIK | |
| | | LSPGER | | | | LIY | | | | LTISSLEP | | | | | |
| | | ATLSC | | | | | | | | EDFAVYYC | | | | | |
| ADI-75715 | IGKV1D- | DIQMTQ | 1878 | RASQSIS | 2156 | WYQQKP | 2257 | AASTLQ | 2392 | GVPSRFSG | 2608 | QQSYS | 2807 | FGQGTR | 2940 |
| | 39 | SPSSLS | | RFLS | | GKAPKL | | S | | SGSGTDFT | | TPPVT | | LEIK | |
| | | ASVGDR | | | | LIY | | | | LIISSLQP | | | | | |
| | | VTITC | | | | | | | | EDFATYFC | | | | | |
| ADI-75854 | IGLV3-25 | SYVLTQ | 1958 | SGDVLSK | 2157 | WYQQKP | 2304 | KDTERP | 2459 | GIPERLSG | 2609 | VSADS | 2808 | FGTGTK | 2949 |
| | | PPSVSV | | QYAY | | GQAPVL | | S | | SSSGTTVT | | SGVYV | | LTVL | |
| | | SPGQTA | | | | VIY | | | | LTISGVQA | | | | | |
| | | RITC | | | | | | | | EDEADYYC | | | | | |

| | | SEQ | | SEQ | Reverted | SEQ |
|---|---|---|---|---|---|---|
| | | ID | | ID | VL | ID |
| Clone ID | VL DNA | NO: | VL Protein | NO: | Protein | NO: |
| ADI-75814 | GACATCCAGATGACCCAGTCTCCTTCCACCCTGTCTGCATCTGTTGGAGACAGAGTCACCG | 3078 | DIQMTQSPSTLSASVGDRVTVTCRASQS | 3360 | | |
| | TCACTTGCCGGGCCAGTCAGAGTATTAGTACCTGGTTGGCCTGGTATCAGCAGAAACCAGG | | ISTWLAWYQQKPGKAPKVLIYKATHLET | | | |
| | GAAAGCCCCTAAGGTCCTGATCTATAAGGCAACTCATTTAGAAACTGGGGTCCCATCAAGG | | GVPSRFSGSGSGTEFTLTISSLQPDDFA | | | |
| | TTCAGCGGCAGTGGATCTGGGACAGAATTCACTCTCACCATCAGCAGCCTGCAGCCTGATG | | TYYCQQYNSYYTFGQGTKVDIK | | | |
| | ATTTTGCAACTTATTACTGCCAACAGTATAATAGTTATTACACTTTTGGCCAGGGGACCAA | | | | | |
| | GGTGGATATCAAA | | | | | |
| ADI-75662 | TCGTATGTGCTGACTCAGCCACCCTCGGTGTCAGTGGCCCCAGGACAGACGGCCAGGATTA | 3079 | SYVLTQPPSVSVAPGQTARITCGGNDLG | 3361 | | |
| | CCTGTGGGGGAAACGACCTTGGAAGTAAAAATGTGCACTGGTACCAGCAGAAGCCAGGCCA | | SKNVHWYQQKPGQAPVLVVFDDSDRPSG | | | |
| | GGCCCCTGTGCTGGTCGTCTTTGATGATAGCGACCGGCCCTCAGGGATCCCTGAGCGATTC | | IPERFSGSNSGNTATLTISRVETGDEAD | | | |
| | TCTGGCTCCAACTCTGGGAACACGGCCACCCTGACCATCAGCAGGGTCGAAACCGGGGATG | | YYCQVWDSNIDHPWVFGGGTKLTVL | | | |
| | AGGCCGACTATTACTGTCAGGTGTGGGATAGTAATATTGATCATCCTTGGGTGTTCGGCGG | | | | | |
| | AGGGACCAAGCTCACCGTCCTA | | | | | |
| ADI-75627 | GACATCCAGATGACCCAGTCTCCATCCTCCCTGTCTGCATCTGTCGGAGACAGAGTCACCA | 3080 | DIQMTQSPSSLSASVGDRVTITCQASQD | 3362 | | |
| | TCACTTGCCAGGCGAGTCAGGACATTAACAACTATTTAAATTGGTATCAGCAGAAACCAGG | | INNYLNWYQQKPGKAPKLLIYDASNLET | | | |
| | AAAAGCCCCTAAGCTCCTCATCTACGATGCATCCAATTTGGAAACAGGGGTCCCATCAAGG | | GVPSRFSGSGSGTDFTFTISSLQPEDIA | | | |
| | TTCAGTGGAAGTGGATCTGGGACAGATTTTACTTTCACCATCAGCAGCCTGCAGCCTGAAG | | TYYCQYYDNPPPTFGPGTKVEIK | | | |
| | ATATTGCAACATATTACTGTCAATATTATGATAATCCCCCTCCGACTTTCGGCCCTGGGAC | | | | | |
| | CAAGGTGGAAATCAAA | | | | | |
| ADI-75792 | CAGCCTGTGCTGACTCAGCCGCCCTCAGTGTCTGGGGCCCCAGGGCGGGGGGTCACCATCT | 3081 | QPVLTQPPSVSGAPGRGVTISCTGSTSN | 3363 | | |
| | CCTGCACTGGGAGCACCTCCAACATCGGGGGAGGTTATGATGTGCACTGGTACCAGCAGCT | | IGGGYDVHWYQQLPGEAPKLLIYLNNNR | | | |
| | TCCAGGAGAGGCCCCCAAACTCCTCATCTATCTTAACAATAATCGGCCCTCAGGGGTCCCT | | PSGVPDRFSGSKSGTSASLAITGLQPVD | | | |
| | GACCGATTCTCTGGCTCCAAGTCTGGCACCTCAGCCTCCCTGGCCATCACTGGGCTCCAGC | | EADYYCQSYDSSLSVWVFGGGTQLTVL | | | |
| | CTGTCGATGAGGCTGATTATTACTGCCAGTCGTATGACAGCAGCCTGAGTGTTTGGGTGTT | | | | | |
| | CGGCGGAGGCACCCAGCTCACCGTCCTA | | | | | |
| ADI-75791 | CAGTCTGTGCTGACTCAGCCCCTCTCAGTGTCAGTGGCCCTGGGACAGACGGCCAGGATTC | 3082 | QSVLTQPLSVSVALGQTARIPCGLNIIP | 3364 | | |
| | CCTGTGGACTGAACATCATTCCTGGTAAAAATGTGCACTGGTACCAGCAGAAGCCAGGCCA | | GKNVHWYQQKPGQAPILVIYRDNIRPSG | | | |
| | GGCCCCTATACTGGTCATCTATAGGGATAACATCCGGCCCTCTGGAATCTCTGAGCGATTC | | ISERFSVSHSGNMATLTISRAQAGDEAD | | | |
| | TCTGTCTCCCACTCGGGGAACATGGCCACCCTGACCATCAGTAGAGCCCAAGCCGGGGATG | | YYCQIWDINTVIFGGGTQLTVL | | | |
| | AGGCTGACTATTACTGTCAGATTTGGGACATCAACACTGTGATATTCGGCGGAGGGACCCA | | | | | |
| | GCTGACCGTCCTA | | | | | |
| ADI-75721 | GACATCCGGATGACCCAGTCTCCCTCGGTGTCAGTGTCCCCGGGACAGACGGCCAGGATCA | 3083 | QYVLTQPPSVSVAPGETARITCGGNNIG | 3365 | | |
| | CCTGCTCTGGAGATGCATTGCCAAATCAATATACTTATTGGTACCAACAAAAGTCAGGCCA | | SKHVHWYLQRPGQAPVLVISFNSDRPSG | | | |
| | GGCCCCTGTGTTGGTGATATATAGAGACACTGAGAGGCCCTCAGGGATCCCTGAGCGATTC | | IPGRFSGSNSGNTATLTISRVEAGDEAD | | | |
| | TCTGGCTCCAGCTCAGGGACGGCAGTCACGTTGACCATCAGTGGAGTCCAGGCAGAAGACG | | YYCQVWDSNTDHRVFGGGTKLTVL | | | |
| | AGGCTGACTATTACTGTCAATCAGCAGACTATAGCGGTACTTGCGTGTTCGGCGGGGGGAC | | | | | |
| | CAAGCTGACCGTCCTA | | | | | |
| ADI-75761 | GACATCCGGATGACCCAGTCTCCCTCGGTGTCAGTGTCCCCGGGACAGACGGCCAGGATCA | 3084 | DIRMTQSPSVSVSPGQTARITCSGDALP | 3366 | | |
| | CCTGCTCTGGAGATGCATTGCCAAATCAATATACTTATTGGTACCAACAAAAGTCAGGCCA | | NQYTYWYQQKSGQAPVLVIYRDTERPSG | | | |
| | GGCCCCTGTGTTGGTGATATATAGAGACACTGAGAGGCCCTCAGGGATCCCTGAGCGATTC | | IPERFSGSSSGTAVTLTISGVQAEDEAD | | | |
| | TCTGGCTCCAGCTCAGGGACGGCAGTCACGTTGACCATCAGTGGAGTCCAGGCAGAAGACG | | YYCQSADYSGTCVFGGGTKLTVL | | | |
| | AGGCTGACTATTACTGTCAATCAGCAGACTATAGCGGTACTTGCGTGTTCGGCGGGGGGAC | | | | | |
| | CAAGCTGACCGTCCTA | | | | | |
| ADI-75682 | GACATCCAGTTGACCCAGTCTCCATCCTCCCTGTCTGCATCTGTAGGAGACAGAGTCACCG | 3085 | DIQLTQSPSSLSASVGDRVTVTCRASQS | 3367 | | |
| | TCACTTGCCGGGCAAGTCAGAGCATTAGCACCTTTTTAAATTGGTATCAACAGAAACCAGG | | ISTFLNWYQQKPGKVPNLLIYAASSLQS | | | |
| | GAAAGTCCCTAACCTCCTGATCTATGCTGCATCCAGCTTGCAAAGTGGGGTCCCATCAAGG | | GVPSRFSGSGSGTDFTLTINGLQPEDFA | | | |
| | TTCAGTGGGAGTGGATCTGGGACAGATTTCACTCTCACCATCAACGGTCTGCAACCTGAAG | | TYYCQQSYSTPSFGQGTRLEIK | | | |
| | ATTTTGCAACTTACTACTGTCAGCAGAGTTACAGTACCCCTTCCTTCGGCCAAGGGACACG | | | | | |
| | ACTGGAGATTAAA | | | | | |
| ADI-75847 | GACATTGTGTTGACCCAGTCTCCATCCTCCCTGTCTGCATCTGTAGGAGACAGAGTCACCA | 3086 | DIVLTQSPSSLSASVGDRVTITCRASQG | 3368 | | |
| | TCACTTGCCGGGCCAGTCAGGGCATTAGCAGTCATTTAGCCTGGTATCAGCAAAAACCAGG | | ISSHLAWYQQKPGKAPKLLIYAASTLQS | | | |
| | GAAAGCCCCTAAGCTTCTGATCTATGCTGCATCCACTTTGCAAAGTGGGGTCCCATCAAGG | | GVPSRFSGSGSGTDFTLTISSLQPEDFA | | | |
| | TTCAGCGGCAGTGGATCTGGGACAGATTTCACTCTCACCATCAGCAGCCTGCAGCCTGAAG | | SYYCQQLNSDSPTFGGGTKVDIK | | | |
| | ATTTTGCAAGTTATTACTGTCAACAGCTTAATAGTGACTCCCCCACTTTCGGCGGAGGGAC | | | | | |
| | CAAAGTGGATATCAAA | | | | | |
| ADI-75852 | GAAATTGCACTGACGCAGTCTCCAGCCACCCTGTCTTTGTCTCCAGGGGAAAGAGCCACCC | 3087 | EIALTQSPATLSLSPGERATLSCRASQS | 3369 | | |
| | TCTCCTGCAGGGCCAGTCAGAGTGTTAACAGCTACTTAGCCTGGTACCAACAGAAACCTGG | | VNSYLAWYQQKPGQAPRLLIYDAYNRAT | | | |
| | CCAGGCTCCCAGGCTCCTCATCTATGATGCATACAACAGGGCCACTGGCATCCCAGCCAGG | | GIPARFSGSGSGTDFTLTISSLEPEDFA | | | |
| | TTCAGTGGCAGTGGGTCTGGGACAGACTTCACTCTCACCATCAGCAGCCTAGAGCCTGAGG | | VYYCQQRLHPPFTFGPGTKVEIK | | | |
| | ATTTTGCAGTTTATTACTGTCAGCAACGTCTCCACCCGCCATTCACTTTCGGCCCTGGGAC | | | | | |
| | CAAGGTGGAGATCAAA | | | | | |
| ADI-75715 | GACATCCAGATGACCCAGTCTCCATCCTCCCTGTCTGCATCTGTAGGAGACAGAGTCACCA | 3088 | DIQMTQSPSSLSASVGDRVTITCRASQS | 3370 | | |
| | TCACTTGCCGGGCAAGTCAGAGCATTAGTAGATTTTTAAGTTGGTATCAGCAGAAACCAGG | | ISRFLSWYQQKPGKAPKLLIYAASTLQS | | | |
| | GAAAGCCCCTAAGCTCCTGATCTATGCTGCATCCACTTTGCAGAGTGGGGTCCCATCAAGG | | GVPSRFSGSGSGTDFTLIISSLQPEDFA | | | |
| | TTCAGTGGCAGTGGATCTGGGACAGATTTCACTCTCATTATCAGCAGTCTGCAACCTGAAG | | TYFCQQSYSTPPVTFGQGTRLEIK | | | |
| | ATTTTGCAACCTACTTCTGTCAACAGAGTTACAGTACCCCTCCGGTCACCTTCGGCCAAGG | | | | | |
| | GACACGACTGGAGATTAAA | | | | | |
| ADI-75854 | TCCTATGTGCTGACACAGCCACCCTCGGTGTCAGTGTCCCCAGGACAGACGGCCAGGATCA | 3089 | SYVLTQPPSVSVSPGQTARITCSGDVLS | 3371 | | |
| | CCTGCTCCGGAGATGTATTGTCAAAGCAATACGCTTATTGGTACCAACAGAAACCAGGCCA | | KQYAYWYQQKPGQAPVLVIYKDTERPSG | | | |
| | GGCCCCTGTGTTGGTGATATATAAAGACACTGAGAGGCCCTCAGGGATCCCTGAGCGATTG | | IPERLSGSSSGTTVTLTISGVQAEDEAD | | | |
| | TCTGGCTCCAGCTCAGGGACAACAGTCACGTTGACCATCAGTGGAGTCCAGGCAGAAGACG | | YYCVSADSSGVYVFGTGTKLTVL | | | |
| | AGGCTGACTATTATTGTGTATCAGCAGACAGTAGTGGTGTTTATGTCTTCGGAACTGGGAC | | | | | |
| | CAAGCTGACCGTCCTA | | | | | |

| | | | SEQ | | SEQ | | SEQ | | SEQ | | SEQ | | SEQ | | SEQ |
|---|---|---|---|---|---|---|---|---|---|---|---|---|---|---|---|
| | VL | VL | ID | VL | ID | VL | ID | VL | ID | VL | ID | VL | ID | VL | ID |
| Clone ID | Germline | FR1 | NO: | CDR1 | NO: | FR2 | NO: | CDR2 | NO: | FR3 | NO: | CDR3 | NO: | FR4 | NO: |
| ADI-75701 | IGLV1-40 | QSVLTQ | 1948 | TGSSSNI | 2158 | WYQQIP | 2322 | ANDNRP | 2460 | GVPDRFSG | 2599 | QSYDS | 2809 | FGGGTK | 2939 |
| | | PPSVSG | | GAGHDVN | | GTAPKL | | S | | SKSGTSAS | | GLSGS | | LTVL | |
| | | APGQRV | | | | LIS | | | | LAITGLQA | | VL | | | |
| | | TISC | | | | | | | | EDEADYYC | | | | | |
| ADI-75681 | IGKV1-33 | DIQMTQ | 1878 | QASQDIN | 2159 | WYQQKP | 2323 | DASNLE | 2461 | GVPSRFSG | 2610 | QQYDN | 2810 | FGPGTK | 2942 |
| | | SPSSLS | | KFLN | | GKAPTL | | P | | SGSGTDFT | | VPPT | | VEIK | |
| | | ASVGDR | | | | LIY | | | | FTITSLQP | | | | | |
| | | VTITC | | | | | | | | EDIATYYC | | | | | |
| ADI-75757 | IGKV1-33 | EIQMTQ | 1881 | QASQDIN | 2160 | WYQQKP | 2316 | DASNLE | 2416 | GVPSRFSG | 2611 | QQYDN | 2811 | FGGGTK | 2936 |
| | | SPSSLS | | KYLN | | GKAPKV | | T | | SGSGTDFT | | LPQT | | VEIK | |
| | | ASVGDR | | | | LIY | | | | FTISGLQP | | | | | |
| | | VTITC | | | | | | | | EDIATYYC | | | | | |
| ADI-75656 | IGKV1-5 | TCVMTQ | 1959 | RTSQSIS | 2161 | WYQQKP | 2257 | KASSLE | 2386 | GVPPRFSG | 2612 | QQYKS | 2812 | FGQGTK | 2937 |
| | | SPSTLS | | TWLA | | GKAPKL | | S | | SGSGTEFT | | FWT | | VEIK | |
| | | ASVGDR | | | | LIY | | | | LTISSLQP | | | | | |
| | | VTITC | | | | | | | | DDFATYYC | | | | | |
| ADI-75677 | IGKV1-5 | DIVMTQ | 1960 | RASQSIS | 2146 | WYQQKP | 2257 | KASSLE | 2386 | GVPSRFSG | 2532 | QQYNS | 2772 | FGQGTK | 2944 |
| | | TPPTLS | | TWLA | | GKAPKL | | S | | SGSGTEFT | | YWT | | VDIK | |
| | | ASVGDR | | | | LIY | | | | LTISSLQP | | | | | |
| | | VTITC | | | | | | | | DDFATYYC | | | | | |
| ADI-75860 | IGLV1-44 | QSVLTQ | 1961 | SGSSSNI | 2162 | WYQQFP | 2324 | TNNQRR | 2462 | GVPDRFSG | 2613 | AAWDD | 2813 | FGGGTK | 2939 |
| | | PPSASG | | GSNSVN | | GTAPKL | | PS | | SKSGTSAS | | SLNGV | | LTVL | |
| | | TPGQRV | | | | LIY | | | | LAISDLQS | | V | | | |
| | | VISC | | | | | | | | EDEADYHC | | | | | |
| ADI-75672 | IGKV1D- | EIQMTQ | 1881 | RASQSIS | 2050 | WYQQKP | 2325 | AASSLQ | 2391 | GVPSRFSG | 2614 | QQSYS | 2814 | FGQGTK | 2937 |
| | 39 | SPSSLS | | SYLN | | GKAPKL | | S | | SGSGTDFT | | LPEYT | | VEIK | |
| | | ASVGDR | | | | LMY | | | | LTISNLQP | | | | | |
| | | VTITC | | | | | | | | EDFATYYC | | | | | |
| ADI-75684 | IGLV1-44 | SYELTQ | 1962 | SGSSSNI | 2162 | WYQQLP | 2314 | SNNQRP | 2463 | GVPDRFSG | 2615 | ATWDD | 2815 | FGGGTQ | 2953 |
| | | PPSASG | | GSNSVN | | GTAPKL | | S | | SKSGTSAS | | SLTGP | | VTVL | |
| | | TPGQRV | | | | LIY | | | | LAISGLQS | | V | | | |
| | | TISC | | | | | | | | EDEADYYC | | | | | |
| ADI-75733 | IGKV3-20 | EMTLTQ | 1963 | RASQSV- | 2163 | WYQQKP | 2258 | GASSRA | 2464 | GIPDRFSG | 2616 | QQYGS | 2780 | FGQGTK | 2937 |
| | | SPGTLS | | SSYLA | | GQAPRL | | T | | SGSGTDFT | | SPRT | | VEIK | |
| | | LSPGER | | | | LIY | | | | LTISRLEP | | | | | |
| | | ATLSC | | | | | | | | EDFAVYYC | | | | | |
| ADI-75732 | IGKV1D- | DIVMTQ | 1902 | RANQTIS | 2164 | WYQQKP | 2257 | AASSLQ | 2391 | GVPSRFSG | 2617 | QQSYS | 2816 | FGLGTK | 2954 |
| | 39 | SPSSLS | | NYLN | | GKAPKL | | S | | SGSGTDFT | | SPPT | | VEIK | |
| | | ASVGDR | | | | LIY | | | | LTISSLQP | | | | | |
| | | VTITC | | | | | | | | EDFAIYFC | | | | | |
| ADI-75722 | IGLV2-14 | SLLLTQ | 1964 | TGASSDV | 2165 | WYQQHP | 2265 | EVTNRP | 2465 | GVSDRFSG | 2618 | SSYTS | 2817 | FGGGTK | 2939 |
| | | PASVSG | | GAYIYVS | | GKAPKL | | S | | SKSGNTAS | | SSAV | | LTVL | |
| | | SPGQSI | | | | MIY | | | | LTISGLQA | | | | | |
| | | TISC | | | | | | | | EDEADYYC | | | | | |
| ADI-75674 | IGKV4-1 | DIQMTQ | 1965 | MSSQSVL | 2166 | WYQQKP | 2326 | WASTRK | 2436 | GVPDRFSG | 2619 | QQYYR | 2771 | FGGGTK | 2936 |
| | | SPDSLA | | DSSNDKN | | GQPPKL | | S | | SGSGTDFT | | TPLT | | VEIK | |
| | | VSLGER | | FLA | | FIY | | | | LTISSLQA | | | | | |
| | | ATIKC | | | | | | | | EDVAVYYC | | | | | |

| | | SEQ | | SEQ | Reverted | SEQ |
|---|---|---|---|---|---|---|
| | | ID | | ID | VL | ID |
| Clone ID | VL DNA | NO: | VL Protein | NO: | Protein | NO: |
| ADI-75701 | CAGTCTGTGTTGACGCAGCCGCCCTCAGTGTCTGGAGCCCCAGGGCAGAGGGTCACCATCT | 3090 | QSVLTQPPSVSGAPGQRVTISCTGSSSN | 3372 | | |
| | CCTGCACTGGGAGCAGCTCCAACATCGGGGCAGGTCATGATGTGAATTGGTACCAGCAAAT | | IGAGHDVNWYQQIPGTAPKLLISANDNR | | | |
| | TCCAGGAACAGCCCCCAAACTCCTCATCTCTGCTAACGACAACCGGCCCTCAGGGGTCCCT | | PSGVPDRFSGSKSGTSASLAITGLQAED | | | |
| | GACCGATTCTCTGGCTCCAAGTCTGGCACCTCAGCCTCCCTGGCCATCACTGGGCTCCAGG | | EADYYCQSYDSGLSGSVLFGGGTKLTVL | | | |
| | CTGAGGATGAGGCTGATTATTACTGCCAGTCCTATGACAGCGGACTGAGTGGTTCTGTGCT | | | | | |
| | ATTCGGCGGAGGGACCAAGCTGACCGTCCTA | | | | | |
| ADI-75681 | GACATCCAGATGACCCAGTCTCCATCCTCCCTGTCTGCATCTGTAGGAGACAGAGTCACCA | 3091 | DIQMTQSPSSLSASVGDRVTITCQASQD | 3373 | | |
| | TCACTTGCCAGGCGAGTCAGGACATTAACAAGTTTTTAAATTGGTATCAGCAGAAACCAGG | | INKFLNWYQQKPGKAPTLLIYDASNLEP | | | |
| | GAAAGCCCCTACGCTCCTGATCTACGATGCATCCAATTTGGAACCAGGGGTCCCATCAAGG | | GVPSRFSGSGSGTDFTFTITSLQPEDIA | | | |
| | TTCAGTGGAAGTGGATCTGGGACAGATTTTACTTTCACCATCACCAGCCTGCAGCCTGAAG | | TYYCQQYDNVPPTFGPGTKVEIK | | | |
| | ATATTGCAACATATTACTGTCAACAGTATGATAATGTTCCTCCGACTTTCGGCCCTGGGAC | | | | | |
| | CAAGGTGGAAATCAAA | | | | | |
| ADI-75757 | GAAATCCAAATGACCCAGTCTCCATCCTCCCTGTCTGCATCTGTAGGAGACAGAGTCACCA | 3092 | EIQMTQSPSSLSASVGDRVTITCQASQD | 3374 | | |
| | TCACTTGCCAGGCGAGTCAGGACATTAACAAGTATTTAAATTGGTATCAGCAGAAACCAGG | | INKYLNWYQQKPGKAPKVLIYDASNLET | | | |
| | GAAAGCCCCTAAGGTCCTGATCTACGATGCATCCAATTTGGAAACAGGAGTCCCATCAAGG | | GVPSRFSGSGSGTDFTFTISGLQPEDIA | | | |
| | TTCAGTGGAAGTGGATCTGGGACAGATTTTACTTTCACCATCAGCGGCCTGCAGCCTGAAG | | TYYCQQYDNLPQTFGGGTKVEIK | | | |
| | ATATTGCAACATATTACTGTCAACAGTATGATAATCTCCCTCAGACTTTCGGCGGAGGGAC | | | | | |
| | CAAGGTGGAAATCAAA | | | | | |
| ADI-75656 | ACATGCGTGATGACGCAGTCTCCTTCCACCCTGTCTGCATCTGTAGGAGACAGAGTCACCA | 3093 | TCVMTQSPSTLSASVGDRVTITCRTSQS | 3375 | | |
| | TCACTTGCCGGACCAGTCAGAGTATTAGTACCTGGTTGGCCTGGTATCAGCAGAAACCAGG | | ISTWLAWYQQKPGKAPKLLIYKASSLES | | | |
| | GAAAGCCCCTAAGCTCCTGATCTATAAGGCGTCTAGTTTAGAAAGTGGGGTCCCACCAAGG | | GVPPRFSGSGSGTEFTLTISSLQPDDFA | | | |
| | TTCAGCGGCAGTGGATCTGGGACAGAATTCACTCTCACCATCAGCAGCCTGCAGCCTGATG | | TYYCQQYKSFWTFGQGTKVEIK | | | |
| | ATTTTGCTACTTATTACTGCCAGCAGTATAAAAGTTTTTGGACGTTCGGCCAAGGGACCAA | | | | | |
| | GGTGGAAATCAAA | | | | | |
| ADI-75677 | GACATCGTGATGACCCAGACTCCTCCCACCCTGTCTGCATCTGTAGGAGACAGAGTCACCA | 3094 | DIVMTQTPPTLSASVGDRVTITCRASQS | 3376 | | |
| | TCACTTGCCGGGCCAGTCAGAGTATTAGTACCTGGTTGGCCTGGTATCAGCAGAAACCAGG | | ISTWLAWYQQKPGKAPKLLIYKASSLES | | | |
| | GAAAGCCCCTAAGCTCCTGATCTATAAGGCGTCTAGTTTAGAGAGTGGGGTCCCATCAAGG | | GVPSRFSGSGSGTEFTLTISSLQPDDFA | | | |
| | TTCAGCGGCAGTGGATCTGGGACAGAGTTCACTCTCACCATCAGCAGCCTGCAGCCTGATG | | TYYCQQYNSYWTFGQGTKVDIK | | | |
| | ATTTTGCAACTTATTACTGCCAACAGTATAATAGTTATTGGACGTTCGGCCAAGGGACCAA | | | | | |
| | GGTGGATATCAAA | | | | | |
| ADI-75860 | CAGTCTGTGTTGACGCAGCCGCCCTCAGCGTCTGGGACCCCCGGGCAGAGGGTCGTCATTT | 3095 | QSVLTQPPSASGTPGQRVVISCSGSSSN | 3377 | | |
| | CTTGTTCTGGGAGCAGCTCCAACATCGGAAGTAATAGTGTAAACTGGTACCAGCAATTTCC | | IGSNSVNWYQQFPGTAPKLLIYTNNQRR | | | |
| | AGGAACGGCCCCCAAACTCCTCATCTATACTAATAATCAGCGGCGGCCCTCAGGGGTCCCT | | PSGVPDRFSGSKSGTSASLAISDLQSED | | | |
| | GACCGATTCTCTGGCTCCAAGTCTGGCACCTCAGCCTCCCTGGCCATCAGTGACCTCCAGT | | EADYHCAAWDDSLNGVVFGGGTKLTVL | | | |
| | CTGAGGATGAGGCTGATTATCACTGTGCAGCATGGGATGACAGCCTGAATGGTGTGGTCTT | | | | | |
| | CGGCGGAGGGACCAAGCTCACCGTCCTA | | | | | |
| ADI-75672 | GAAATCCAGATGACCCAGTCTCCATCCTCCCTGTCTGCATCTGTAGGAGACAGAGTCACCA | 3096 | EIQMTQSPSSLSASVGDRVTITCRASQS | 3378 | | |
| | TCACTTGCCGGGCAAGTCAGAGCATTAGTAGTTATTTAAATTGGTATCAGCAGAAACCAGG | | ISSYLNWYQQKPGKAPKLLMYAASSLQS | | | |
| | GAAAGCCCCTAAGCTCCTGATGTATGCTGCATCCAGTTTGCAAAGTGGGGTCCCATCAAGG | | GVPSRFSGSGSGTDFTLTISNLQPEDFA | | | |
| | TTCAGTGGCAGTGGATCTGGGACAGATTTCACTCTCACCATCAGCAATCTGCAACCTGAAG | | TYYCQQSYSLPEYTFGQGTKVEIK | | | |
| | ATTTTGCAACCTACTACTGTCAACAGAGTTACAGTTTGCCCGAGTACACTTTTGGCCAGGG | | | | | |
| | GACCAAGGTGGAGATCAAA | | | | | |
| ADI-75684 | TCGTATGAGCTGACACAGCCACCCTCAGCGTCTGGGACCCCCGGGCAGAGGGTCACCATCT | 3097 | SYELTQPPSASGTPGQRVTISCSGSSSN | 3379 | | |
| | CTTGTTCTGGAAGCAGCTCCAACATCGGAAGTAATTCTGTAAACTGGTACCAGCAACTCCC | | IGSNSVNWYQQLPGTAPKLLIYSNNQRP | | | |
| | AGGAACGGCCCCCAAACTCCTCATCTATAGTAATAATCAGCGGCCCTCAGGGGTCCCTGAC | | SGVPDRFSGSKSGTSASLAISGLQSEDE | | | |
| | CGATTCTCTGGCTCCAAGTCTGGCACCTCAGCCTCCCTGGCCATCAGTGGGCTCCAGTCTG | | ADYYCATWDDSLTGPVFGGGTQVTVL | | | |
| | AGGATGAGGCTGATTATTACTGCGCAACATGGGATGACAGCCTGACTGGTCCGGTGTTCGG | | | | | |
| | CGGAGGGACCCAGGTGACCGTCCTC | | | | | |
| ADI-75733 | GAAATGACACTGACGCAGTCTCCAGGCACCCTGTCTTTGTCTCCAGGGGAAAGAGCCACCC | 3098 | EMTLTQSPGTLSLSPGERATLSCRASQS | 3380 | | |
| | TCTCCTGCAGGGCCAGTCAGAGTGTTAGCAGCTACTTAGCCTGGTACCAACAGAAACCTGG | | VSSYLAWYQQKPGQAPRLLIYGASSRAT | | | |
| | CCAGGCTCCCAGGCTCCTCATCTATGGTGCATCCAGCAGGGCCACTGGCATCCCAGACAGG | | GIPDRFSGSGSGTDFTLTISRLEPEDFA | | | |
| | TTCAGTGGCAGTGGGTCTGGGACAGACTTCACTCTCACCATCAGCAGACTGGAGCCTGAAG | | VYYCQQYGSSPRTFGQGTKVEIK | | | |
| | ATTTTGCAGTGTATTACTGTCAGCAGTATGGTAGCTCACCGAGGACGTTCGGCCAAGGGAC | | | | | |
| | CAAGGTGGAGATCAAA | | | | | |
| ADI-75732 | GACATCGTGATGACCCAGTCTCCATCTTCCCTGTCTGCATCTGTGGGAGACAGAGTCACCA | 3099 | DIVMTQSPSSLSASVGDRVTITCRANQT | 3381 | | |
| | TCACTTGCCGGGCAAACCAGACCATTAGCAACTATTTAAATTGGTATCAGCAGAAACCAGG | | ISNYLNWYQQKPGKAPKLLIYAASSLQS | | | |
| | GAAAGCCCCTAAACTCCTGATCTATGCTGCATCCAGTTTGCAAAGTGGGGTCCCGTCAAGG | | GVPSRFSGSGSGTDFTLTISSLQPEDFA | | | |
| | TTCAGTGGCAGTGGATCTGGGACAGATTTCACTCTCACCATCAGCAGTCTGCAACCTGAAG | | IYFCQQSYSSPPTFGLGTKVEIK | | | |
| | ATTTTGCAATTTATTTCTGTCAACAGAGTTACAGTTCCCCTCCGACGTTCGGCCTAGGGAC | | | | | |
| | CAAGGTGGAAATCAAA | | | | | |
| ADI-75722 | AGCCTGCTCCTGACTCAGCCTGCCTCCGTGTCTGGGTCTCCTGGACAGTCGATCACCATCT | 3100 | SLLLTQPASVSGSPGQSITISCTGASSD | 3382 | | |
| | CCTGCACTGGAGCCAGCAGTGACGTTGGTGCTTATATCTATGTCTCCTGGTACCAACAGCA | | VGAYIYVSWYQQHPGKAPKLMIYEVTNR | | | |
| | CCCAGGCAAAGCCCCCAAACTCATGATTTATGAGGTCACTAATCGGCCCTCAGGGGTTTCT | | PSGVSDRFSGSKSGNTASLTISGLQAED | | | |
| | GATCGCTTCTCTGGCTCCAAGTCTGGCAACACGGCCTCCCTGACCATCTCTGGGCTCCAGG | | EADYYCSSYTSSSAVFGGGTKLTVL | | | |
| | CTGAGGACGAGGCTGATTATTACTGCAGCTCATATACAAGCAGCAGCGCGGTATTCGGCGG | | | | | |
| | AGGGACCAAGCTCACCGTCCTA | | | | | |
| ADI-75674 | GACATCCAGATGACCCAGTCTCCAGACTCCCTGGCTGTGTCTCTGGGCGAGAGGGCCACCA | 3101 | DIQMTQSPDSLAVSLGERATIKCMSSQS | 3383 | | |
| | TCAAGTGCATGTCCAGCCAGAGTGTCTTAGACAGCTCCAACGATAAGAACTTCTTAGCTTG | | VLDSSNDKNFLAWYQQKPGQPPKLFIYW | | | |
| | GTATCAGCAGAAACCAGGACAGCCTCCTAAGTTGTTCATTTACTGGGCATCTACCCGGAAA | | ASTRKSGVPDRFSGSGSGTDFTLTISSL | | | |
| | TCCGGGGTCCCTGACCGATTCAGTGGCAGCGGGTCCGGGACAGATTTCACTCTCACAATCA | | QAEDVAVYYCQQYYRTPLTFGGGTKVEI | | | |
| | GCAGCCTGCAGGCTGAAGATGTGGCAGTTTATTACTGTCAGCAATATTATAGAACTCCTCT | | K | | | |
| | CACTTTCGGCGGAGGGACCAAGGTGGAAATCAAA | | | | | |

| | | | SEQ | | SEQ | | SEQ | | SEQ | | SEQ | | SEQ | | SEQ |
|---|---|---|---|---|---|---|---|---|---|---|---|---|---|---|---|
| | VL | VL | ID | VL | ID | VL | ID | VL | ID | VL | ID | VL | ID | VL | ID |
| Clone ID | Germline | FR1 | NO: | CDR1 | NO: | FR2 | NO: | CDR2 | NO: | FR3 | NO: | CDR3 | NO: | FR4 | NO: |
| ADI-75638 | IGKV1-33 | DIQMTQ | 1966 | QASQDIN | 2167 | WYQQKA | 2327 | DASILE | 2466 | GVPSRFSG | 2620 | QQFDN | 2818 | FGQGTK | 2944 |
| | | SPSSLS | | KYLA | | GRAPKL | | T | | SGSGTHFT | | VPYT | | VDIK | |
| | | ASVGDR | | | | LIY | | | | LTINSLQT | | | | | |
| | | VAITC | | | | | | | | EDIATYYC | | | | | |
| ADI-75800 | IGKV3-11 | DIQVTQ | 1967 | RASQSVS | 2168 | WYQHKP | 2328 | DASNRA | 2448 | GIPARFSG | 2607 | QLRSN | 2819 | FGPGTK | 2942 |
| | | SPATLS | | SYLA | | GQAPRL | | T | | SGSGTDFT | | WPPFT | | VEIK | |
| | | LSPGER | | | | LIY | | | | LTISSLEP | | | | | |
| | | ATLSC | | | | | | | | EDFAVYYC | | | | | |
| ADI-75675 | IGKV1D- | DIVMTQ | 1968 | RASQTVR | 2169 | WYQQKP | 2288 | TAPTVE | 2467 | GVPPRFSA | 2621 | QQSYS | 2820 | FGQGTK | 2955 |
| | 39 | SPSSLS | | SFLN | | GKAPKL | | G | | TGSGTDFT | | IPYT | | LEIK | |
| | | ASVGDR | | | | LVF | | | | LSISGLQP | | | | | |
| | | VSITC | | | | | | | | EDFATYFC | | | | | |
| ADI-75818 | IGKV1-33 | DIQMTQ | 1878 | QASQDIS | 2170 | WYQQKP | 2257 | DALNLK | 2468 | GVPSRFSG | 2537 | QQYNN | 2821 | FGQGTK | 2937 |
| | | SPSSLS | | DYLN | | GKAPKL | | S | | SGSGTDFT | | FPYT | | VEIK | |
| | | ASVGDR | | | | LIY | | | | FTISSLQP | | | | | |
| | | VTITC | | | | | | | | EDIATYYC | | | | | |
| ADI-75741 | IGLV1-40 | QSVVTQ | 1969 | GAGYDVH | 2171 | WYQQLP | 2314 | DNSNRP | 2469 | GVPDRFSG | 2622 | QSYDS | 2822 | FGTGTK | 2949 |
| | | PPSVSG | | TGTNSNI | | GTAPKL | | S | | SKSDTSAS | | SLIGS | | LTVL | |
| | | ALGQRV | | | | LIY | | | | LAITGLQA | | I | | | |
| | | TISC | | | | | | | | EDEADYYC | | | | | |
| ADI-75795 | IGLV2-8 | QPVLTQ | 1970 | TGTSSDV | 2172 | WYQQYP | 2329 | EVNKRP | 2394 | GVPDRFSG | 2623 | SSYAG | 2823 | FGGGTK | 2939 |
| | | PPSASG | | GAHNYVS | | DKAPKL | | S | | SKSGDTAS | | SNNWV | | LTVL | |
| | | SPGQSV | | | | MIY | | | | LTVSGLQA | | | | | |
| | | TISC | | | | | | | | EDEADYYC | | | | | |
| ADI-75816 | IGKV3-20 | EIALTQ | 1971 | RASQSVS | 2173 | WYQQKP | 2258 | GASSRA | 2464 | GIPDRFSG | 2624 | QHYGS | 2824 | FGQGTK | 2937 |
| | | SPGTLS | | SNYLA | | GQAPRL | | T | | GGSGTDFT | | SPPYT | | VEIK | |
| | | LSPGER | | | | LIY | | | | LTISRLEP | | | | | |
| | | ATLSC | | | | | | | | EDFAVYYC | | | | | |
| ADI-75725 | IGLV1-40 | QSVVTQ | 1972 | TGTNSNI | 2171 | WYQQLP | 2314 | DINNRP | 2470 | GVPDRFSG | 2625 | QSYDS | 2825 | FGTGTK | 2949 |
| | | PPSVSG | | GAGYDVH | | GTAPKL | | S | | SKSDTSAS | | GLTSP | | LTVL | |
| | | APGQRV | | | | LIY | | | | LAITGLQA | | V | | | |
| | | TISC | | | | | | | | EDEADYFC | | | | | |
| ADI-75686 | IGKV1- | EIQLTQ | 1917 | RASQGIS | 2062 | WYQQIP | 2330 | AASILE | 2385 | GVPSRFRG | 2626 | QQYYS | 2703 | FGGGTK | 2936 |
| | NL1 | SPSSLS | | NSLA | | GKAPKL | | S | | SGSGTDFT | | SLGRT | | VEIK | |
| | | ASVGDR | | | | LLY | | | | LTISSLQP | | | | | |
| | | VTITC | | | | | | | | EDFATYYC | | | | | |
| ADI-75717 | IGLV1-40 | QSVLTQ | 1948 | GAGYDVH | 2143 | WYQQLP | 2331 | VNNNRP | 2471 | GVPDRFSG | 2622 | QSYDS | 2826 | FGGGTK | 2939 |
| | | PPSVSG | | TGSNSNI | | GRAPKL | | S | | SKSDTSAS | | SLSAS | | LTVL | |
| | | APGQRV | | | | LIY | | | | LAITGLQA | | V | | | |
| | | TISC | | | | | | | | EDEADYYC | | | | | |
| ADI-75771 | IGLV2-14 | QPVLTQ | 1973 | TGTSSDV | 2061 | WYQQHP | 2332 | EVSNRP | 2427 | GVSNRFSG | 2627 | SSYTS | 2827 | FGGGTK | 2939 |
| | | PASVSG | | GGYNYVS | | GKVPKL | | S | | SKSGSTAS | | SDSWV | | LTVL | |
| | | SPGQSI | | | | MIY | | | | LTISGLQS | | | | | |
| | | TIPC | | | | | | | | EDEADYYC | | | | | |
| ADI-75651 | IGLV3-21 | SYELTQ | 1919 | GGSNIGS | 2174 | WYQQKP | 2283 | DDSDRP | 2399 | GIPERFSG | 2628 | QVWDS | 2828 | FGGGTK | 2939 |
| | | PPSVSV | | KSVH | | GQAPVL | | S | | SNSGDTAT | | SSDHW | | LTVL | |
| | | APGQTA | | | | VVY | | | | LTISRVEA | | V | | | |
| | | RITC | | | | | | | | GDEADYYC | | | | | |

| | | SEQ | | SEQ | Reverted | SEQ |
|---|---|---|---|---|---|---|
| | | ID | | ID | VL | ID |
| Clone ID | VL DNA | NO: | VL Protein | NO: | Protein | NO: |
| ADI-75638 | GACATCCAGATGACCCAGTCTCCATCCTCCCTGTCTGCGTCTGTAGGAGACAGAGTCGCCA | 3102 | DIQMTQSPSSLSASVGDRVAITCQASQD | 3384 | | |
| | TCACTTGCCAGGCGAGTCAGGACATTAATAAGTATTTAGCTTGGTATCAGCAGAAAGCAGG | | INKYLAWYQQKAGRAPKLLIYDASILET | | | |
| | GAGAGCCCCTAAGCTCCTGATCTACGATGCCTCCATTTTGGAAACAGGGGTCCCATCAAGG | | GVPSRFSGSGSGTHFTLTINSLQTEDIA | | | |
| | TTCAGTGGAAGTGGATCTGGGACACATTTTACTTTGACCATCAACAGCCTGCAGACTGAAG | | TYYCQQFDNVPYTFGQGTKVDIK | | | |
| | ATATTGCAACATATTACTGTCAACAGTTTGATAATGTCCCGTACACTTTTGGCCAGGGGAC | | | | | |
| | CAAGGTGGATATCAAA | | | | | |
| ADI-75800 | GACATCCAGGTGACCCAGTCTCCAGCCACCCTGTCTTTGTCTCCAGGGGAAAGAGCCACCC | 3103 | DIQVTQSPATLSLSPGERATLSCRASQS | 3385 | | |
| | TCTCCTGCAGGGCCAGTCAGAGTGTTAGCAGTTACTTAGCCTGGTACCAACACAAACCTGG | | VSSYLAWYQHKPGQAPRLLIYDASNRAT | | | |
| | CCAGGCTCCCAGGCTCCTCATCTATGATGCATCCAACAGGGCCACTGGCATCCCAGCCAGG | | GIPARFSGSGSGTDFTLTISSLEPEDFA | | | |
| | TTCAGTGGCAGTGGGTCTGGGACAGACTTCACTCTCACCATCAGCAGCCTAGAGCCTGAAG | | VYYCQLRSNWPPFTFGPGTKVEIK | | | |
| | ATTTTGCAGTTTATTACTGTCAGCTACGTAGCAACTGGCCTCCATTCACTTTCGGCCCTGG | | | | | |
| | GACCAAGGTGGAAATCAAA | | | | | |
| ADI-75675 | GATATTGTGATGACCCAGTCTCCGTCCTCCCTGTCTGCTTCTGTGGGAGACAGAGTCTCCA | 3104 | DIVMTQSPSSLSASVGDRVSITCRASQT | 3386 | | |
| | TCACTTGCCGGGCAAGTCAGACCGTAAGAAGTTTTTTAAATTGGTATCAGCAGAAACCAGG | | VRSFLNWYQQKPGKAPKLLVFTAPTVEG | | | |
| | GAAAGCCCCTAAACTCCTGGTCTTTACTGCACCCACTGTGGAAGGTGGAGTCCCCCCGAGG | | GVPPRFSATGSGTDFTLSISGLQPEDFA | | | |
| | TTCAGTGCCACTGGATCTGGCACAGATTTCACTCTCTCCATCAGCGGTCTACAACCTGAGG | | TYFCQQSYSIPYTFGQGTKLEIK | | | |
| | ATTTTGCAACTTACTTCTGTCAACAGAGTTACAGTATCCCGTACACTTTTGGCCAGGGGAC | | | | | |
| | CAAGCTGGAGATCAAA | | | | | |
| ADI-75818 | GACATCCAGATGACCCAGTCTCCATCCTCCCTGTCTGCATCTGTAGGAGACAGAGTAACCA | 3105 | DIQMTQSPSSLSASVGDRVTITCQASQD | 3387 | | |
| | TCACTTGCCAGGCGAGTCAGGACATTAGCGACTATCTAAATTGGTATCAGCAGAAACCAGG | | ISDYLNWYQQKPGKAPKLLIYDALNLKS | | | |
| | GAAAGCCCCTAAACTCCTGATCTACGATGCATTGAATTTGAAATCAGGGGTCCCCTCAAGG | | GVPSRFSGSGSGTDFTFTISSLQPEDIA | | | |
| | TTCAGTGGAAGTGGATCTGGGACAGATTTTACTTTCACCATCAGCAGCCTGCAGCCTGAAG | | TYYCQQYNNFPYTFGQGTKVEIK | | | |
| | ATATTGCAACATATTACTGTCAACAGTACAATAATTTCCCGTACACTTTTGGCCAGGGGAC | | | | | |
| | CAAGGTGGAAATCAAA | | | | | |
| ADI-75741 | CAGTCTGTGGTGACGCAGCCGCCCTCAGTGTCTGGGGCCCTAGGGCAGAGGGTCACCATCT | 3106 | QSVVTQPPSVSGALGQRVTISCTGTNSN | 3388 | | |
| | CCTGCACTGGGACCAACTCCAACATCGGGGCAGGTTATGATGTACACTGGTACCAGCAGCT | | IGAGYDVHWYQQLPGTAPKLLIYDNSNR | | | |
| | TCCAGGAACAGCCCCCAAACTCCTCATCTATGATAATAGTAATCGGCCCTCAGGGGTCCCT | | PSGVPDRFSGSKSDTSASLAITGLQAED | | | |
| | GACCGATTCTCTGGCTCCAAGTCTGACACCTCAGCCTCCCTGGCCATCACTGGGCTCCAGG | | EADYYCQSYDSSLIGSIFGTGTKLTVL | | | |
| | CTGAGGATGAGGCTGATTATTACTGCCAGTCCTATGACAGCAGCCTGATTGGTTCTATCTT | | | | | |
| | CGGGACTGGGACCAAGCTCACCGTCCTA | | | | | |
| ADI-75795 | CAGCCTGTGCTGACTCAGCCCCCCTCCGCGTCCGGGTCTCCTGGACAGTCAGTCACCATCT | 3107 | QPVLTQPPSASGSPGQSVTISCTGTSSD | 3389 | | |
| | CCTGCACTGGAACCAGCAGTGACGTTGGTGCTCATAACTATGTCTCCTGGTACCAACAGTA | | VGAHNYVSWYQQYPDKAPKLMIYEVNKR | | | |
| | CCCAGACAAAGCCCCCAAACTCATGATTTATGAGGTCAATAAGCGGCCCTCAGGGGTCCCT | | PSGVPDRFSGSKSGDTASLTVSGLQAED | | | |
| | GATCGCTTCTCTGGCTCCAAGTCTGGCGACACGGCCTCCCTGACCGTCTCTGGACTCCAGG | | EADYYCSSYAGSNNWVFGGGTKLTVL | | | |
| | CTGAGGATGAGGCTGATTATTATTGCAGCTCATATGCAGGCAGCAACAATTGGGTGTTCGG | | | | | |
| | CGGAGGGACCAAGCTCACCGTCCTA | | | | | |
| ADI-75816 | GAAATTGCACTGACGCAGTCTCCAGGCACCCTGTCTTTGTCTCCAGGGGAAAGAGCCACCC | 3108 | EIALTQSPGTLSLSPGERATLSCRASQS | 3390 | | |
| | TCTCCTGCAGGGCCAGTCAGAGTGTTAGCAGCAACTACTTAGCCTGGTACCAGCAGAAACC | | VSSNYLAWYQQKPGQAPRLLIYGASSRA | | | |
| | TGGCCAGGCTCCCAGGCTCCTCATCTATGGTGCATCCAGCAGGGCCACTGGCATCCCAGAC | | TGIPDRFSGGGSGTDFTLTISRLEPEDF | | | |
| | AGGTTCAGTGGCGGTGGGTCTGGGACAGACTTCACTCTCACCATCAGCAGACTGGAGCCTG | | AVYYCQHYGSSPPYTFGQGTKVEIK | | | |
| | AAGATTTTGCAGTGTATTACTGTCAGCATTATGGGAGCTCACCTCCGTACACTTTTGGCCA | | | | | |
| | GGGGACCAAGGTGGAAATCAAA | | | | | |
| ADI-75725 | CAGTCTGTCGTGACGCAGCCGCCCTCAGTGTCTGGGGCCCCAGGGCAGAGGGTCACCATCT | 3109 | QSVVTQPPSVSGAPGQRVTISCTGTNSN | 3391 | | |
| | CCTGCACTGGGACCAACTCCAACATCGGGGCAGGTTATGATGTCCACTGGTACCAGCAACT | | IGAGYDVHWYQQLPGTAPKLLIYDINNR | | | |
| | TCCAGGAACAGCCCCCAAACTCCTCATCTATGATATCAACAATCGGCCCTCAGGGGTCCCT | | PSGVPDRFSGSKSDTSASLAITGLQAED | | | |
| | GACCGATTCTCTGGCTCCAAGTCTGACACCTCAGCCTCCCTGGCCATCACTGGGCTCCAGG | | EADYFCQSYDSGLTSPVFGTGTKLTVL | | | |
| | CTGAGGATGAGGCTGATTATTTCTGCCAGTCCTATGACAGCGGCCTGACTAGTCCTGTCTT | | | | | |
| | CGGAACTGGGACCAAGCTCACCGTCCTA | | | | | |
| ADI-75686 | GAAATCCAGTTGACCCAGTCTCCATCCTCCCTGTCTGCATCTGTCGGAGACAGAGTCACCA | 3110 | EIQLTQSPSSLSASVGDRVTITCRASQG | 3392 | | |
| | TCACTTGCCGGGCGAGTCAGGGCATTAGCAATTCTTTAGCCTGGTATCAACAGATACCAGG | | ISNSLAWYQQIPGKAPKLLLYAASILES | | | |
| | TAAAGCCCCTAAGCTCCTACTCTATGCTGCATCCATATTGGAAAGTGGGGTCCCATCCAGG | | GVPSRFRGSGSGTDFTLTISSLQPEDFA | | | |
| | TTCAGGGGCAGTGGCTCTGGGACGGATTTCACTCTCACCATCAGCAGCCTGCAGCCTGAAG | | TYYCQQYYSSLGRTFGGGTKVEIK | | | |
| | ATTTTGCAACTTATTACTGTCAACAGTATTATAGTTCCCTCGGGCGCACTTTCGGCGGAGG | | | | | |
| | GACCAAGGTGGAAATCAAA | | | | | |
| ADI-75717 | CAGTCTGTCTTGACGCAGCCGCCCTCAGTGTCTGGGGCCCCAGGGCAGAGGGTCACCATCT | 3111 | QSVLTQPPSVSGAPGQRVTISCTGSNSN | 3393 | | |
| | CCTGCACTGGGAGCAACTCCAACATCGGGGCAGGTTATGATGTGCACTGGTACCAGCAGCT | | IGAGYDVHWYQQLPGRAPKLLIYVNNNR | | | |
| | TCCAGGAAGAGCCCCCAAACTCCTCATCTATGTTAACAACAATCGACCCTCAGGGGTCCCT | | PSGVPDRFSGSKSDTSASLAITGLQAED | | | |
| | GACCGATTCTCTGGCTCCAAGTCTGACACCTCAGCCTCCCTGGCCATCACTGGGCTCCAGG | | EADYYCQSYDSSLSASVFGGGTKLTVL | | | |
| | CTGAGGATGAGGCTGACTATTACTGCCAGTCCTATGACAGCAGCCTGAGTGCCTCGGTTTT | | | | | |
| | CGGCGGAGGGACCAAGCTCACCGTCCTA | | | | | |
| ADI-75771 | CAGCCTGTGCTGACTCAGCCTGCCTCCGTGTCTGGGTCTCCTGGACAGTCGATCACCATCC | 3112 | QPVLTQPASVSGSPGQSITIPCTGTSSD | 3394 | | |
| | CCTGCACTGGAACCAGCAGTGACGTTGGTGGTTATAATTATGTCTCCTGGTACCAACAGCA | | VGGYNYVSWYQQHPGKVPKLMIYEVSNR | | | |
| | CCCAGGCAAAGTCCCCAAACTCATGATTTATGAGGTCAGTAATCGGCCCTCAGGGGTTTCT | | PSGVSNRFSGSKSGSTASLTISGLQSED | | | |
| | AATCGCTTCTCTGGCTCCAAGTCTGGCAGCACGGCCTCCCTGACCATCTCTGGGCTCCAGT | | EADYYCSSYTSSDSWVFGGGTKLTVL | | | |
| | CTGAGGACGAGGCTGATTATTATTGCAGCTCATATACAAGTAGCGACTCTTGGGTGTTCGG | | | | | |
| | CGGAGGGACCAAGCTCACCGTCCTA | | | | | |
| ADI-75651 | TCGTATGAGCTGACTCAGCCACCCTCGGTGTCAGTGGCCCCAGGACAGACGGCCAGGATTA | 3113 | SYELTQPPSVSVAPGQTARITCGGSNIG | 3395 | | |
| | CCTGTGGGGGAAGCAACATTGGAAGTAAAAGTGTGCACTGGTACCAGCAGAAGCCAGGCCA | | SKSVHWYQQKPGQAPVLVVYDDSDRPSG | | | |
| | GGCCCCTGTGCTGGTCGTCTATGATGATAGCGACCGGCCCTCAGGGATCCCTGAGCGATTC | | IPERFSGSNSGDTATLTISRVEAGDEAD | | | |
| | TCTGGCTCCAACTCTGGGGACACGGCCACCCTGACCATCAGCAGGGTCGAAGCCGGGGATG | | YYCQVWDSSSDHWVFGGGTKLTVL | | | |
| | AGGCCGACTATTACTGTCAGGTGTGGGATAGTAGTAGTGATCATTGGGTGTTCGGCGGAGG | | | | | |
| | GACCAAGCTCACCGTCCTA | | | | | |

| | | | SEQ | | SEQ | | SEQ | | SEQ | | SEQ | | SEQ | | SEQ |
|---|---|---|---|---|---|---|---|---|---|---|---|---|---|---|---|
| | VL | VL | ID | VL | ID | VL | ID | VL | ID | VL | ID | VL | ID | VL | ID |
| Clone ID | Germline | FR1 | NO: | CDR1 | NO: | FR2 | NO: | CDR2 | NO: | FR3 | NO: | CDR3 | NO: | FR4 | NO: |
| ADI-75813 | IGKV1D- | DIRMTQ | 1974 | RASQSIT | 2175 | WYQQKP | 2257 | AASSLQ | 2391 | GVPSRFSG | 2629 | LQTYS | 2829 | FGQGTK | 2937 |
| | 39 | SPSSLS | | SYLH | | GKAPKL | | S | | SGSGTDFT | | THSWT | | VEIK | |
| | | ASVGDS | | | | LIY | | | | LTITSLKP | | | | | |
| | | VTITC | | | | | | | | EDFATYYC | | | | | |
| ADI-75750 | IGKV1D- | DILMTQ | 1975 | RASQSIN | 2176 | WYQQKP | 2333 | AASSLQ | 2391 | GVPSRFGG | 2630 | QQSYS | 2830 | FGQGTK | 2937 |
| | 39 | SPSSLS | | HYLN | | GKAPKL | | S | | SGSETDFT | | TPHGS | | VEIK | |
| | | ASVGDR | | | | LIS | | | | LTISSLEP | | | | | |
| | | VTITC | | | | | | | | EDFATYYC | | | | | |
| ADI-75608 | IGKV1D- | EIVLTQ | 1976 | RASQSVG | 2177 | WYQQKP | 2257 | AASNLQ | 2408 | GVPSRFSG | 2606 | QQSYT | 2749 | FGQGTK | 2937 |
| | 39 | SPSSLS | | RYLN | | GKAPKL | | S | | SGSGTDFT | | THMYT | | VEIK | |
| | | ATVGDR | | | | LIY | | | | LTISSLQP | | | | | |
| | | VTITC | | | | | | | | EDFASYYC | | | | | |
| ADI-75663 | IGKV1- | DIQMTQ | 1878 | RASQGIS | 2062 | WYQQLP | 2334 | AASILE | 2385 | GVPSRFRG | 2626 | QQYYS | 2703 | FGGGTK | 2936 |
| | NL1 | SPSSLS | | NSLA | | GKAPKL | | S | | SGSGTDFT | | SLGRT | | VEIK | |
| | | ASVGDR | | | | LLY | | | | LTISSLQP | | | | | |
| | | VTITC | | | | | | | | EDFATYYC | | | | | |
| ADI-75652 | IGKV1-33 | DIQMTQ | 1977 | QASQDIN | 2160 | WYQQKP | 2257 | DASNLE | 2416 | GVPSRFSG | 2631 | HQYDN | 2831 | FGQGTK | 2937 |
| | | SPSSLS | | KYLN | | GKAPKL | | T | | SGSGRHFT | | LPRT | | VEIK | |
| | | ASVGDS | | | | LIY | | | | FTISSLQP | | | | | |
| | | VTITC | | | | | | | | EDIGTYYC | | | | | |
| ADI-75567 | IGKV4-1 | DIPMTQ | 1978 | RSSQSVL | 2178 | WYQQKP | 2290 | WASTRE | 2422 | GVPDRFSG | 2632 | QQYYS | 2832 | FGPGTK | 2942 |
| | | SPDSLA | | YSSNDQN | | GQPPKL | | S | | SGSGTHFT | | SPPT | | VEIK | |
| | | VSLGER | | YLA | | LIY | | | | LTISSLQA | | | | | |
| | | ATINC | | | | | | | | EDVAVYYC | | | | | |
| ADI-75670 | IGKV1D- | EIQMTQ | 1979 | RASQSIS | 2050 | WYQQKP | 2257 | HALSLQ | 2472 | GVPSRFSG | 2534 | QQSYT | 2833 | FGQGTK | 2944 |
| | 39 | SPSSLS | | SYLN | | GKAPKL | | S | | SGSGTDFT | | TPYT | | VDIK | |
| | | AYVGDR | | | | LIY | | | | LTISSLQP | | | | | |
| | | VTITC | | | | | | | | EDFATYYC | | | | | |
| ADI-75602 | IGKV4-1 | DIQLTQ | 1980 | RSSQSVL | 2178 | WYQQKP | 2290 | WASTRE | 2422 | GVPDRFSG | 2632 | QQYYS | 2832 | FGPGTK | 2950 |
| | | TPDSLA | | YSSNDQN | | GQPPKL | | S | | SGSGTHFT | | SPPT | | VDIK | |
| | | VSLGER | | YLA | | LIY | | | | LTISSLQA | | | | | |
| | | ATINC | | | | | | | | EDVAVYYC | | | | | |
| ADI-75774 | IGKV1-9 | EIEMTQ | 1981 | RASQGIS | 2140 | WYQQKP | 2257 | GASTLQ | 2447 | GVPLRFSG | 2595 | QHLDS | 2792 | FGQGTK | 2937 |
| | | SPSFLS | | SFLA | | GKAPKL | | S | | SGSGTEFT | | YPRYT | | VEIK | |
| | | ASVGDR | | | | LIY | | | | LTISSLQP | | | | | |
| | | VTITC | | | | | | | | EDFATYYC | | | | | |
| ADI-75736 | IGKV3-11 | EIVLTQ | 1945 | RASQSVS | 2168 | WYQQKP | 2258 | DASNRA | 2448 | GIPARFSG | 2607 | QQRSN | 2834 | FGGGTK | 2938 |
| | | SPATLS | | SYLA | | GQAPRL | | T | | SGSGTDFT | | WPPGL | | VDIK | |
| | | LSPGER | | | | LIY | | | | LTISSLEP | | T | | | |
| | | ATLSC | | | | | | | | EDFAVYYC | | | | | |
| ADI-75586 | IGLV2-14 | QPVLTQ | 1933 | TGTSSDI | 2179 | WYQQHP | 2335 | DVTNRP | 2473 | GVSYRFSG | 2633 | SSYTS | 2835 | FGTGTK | 2949 |
| | | PASVSG | | GDYNYVS | | GKAPKL | | S | | FKSGNTAS | | SDTYV | | LTVL | |
| | | SPGQSI | | | | MVY | | | | LTISGLQA | | | | | |
| | | TISC | | | | | | | | EDEADYYC | | | | | |

| | | SEQ | | SEQ | Reverted | SEQ |
|---|---|---|---|---|---|---|
| | | ID | | ID | VL | ID |
| Clone ID | VL DNA | NO: | VL Protein | NO: | Protein | NO: |
| ADI-75813 | GACATCCGGATGACCCAGTCTCCATCCTCCCTGTCTGCATCTGTAGGAGACAGCGTCACCA | 3114 | DIRMTQSPSSLSASVGDSVTITCRASQS | 3396 | | |
| | TCACTTGCCGGGCAAGTCAGAGCATTACCAGCTATTTACATTGGTATCAGCAGAAACCAGG | | ITSYLHWYQQKPGKAPKLLIYAASSLQS | | | |
| | GAAAGCCCCTAAGCTCCTGATCTATGCTGCATCCAGTTTGCAAAGTGGGGTCCCATCAAGG | | GVPSRFSGSGSGTDFTLTITSLKPEDFA | | | |
| | TTCAGTGGCAGTGGATCTGGGACAGATTTCACTCTCACCATCACCAGTCTGAAACCTGAAG | | TYYCLQTYSTHSWTFGQGTKVEIK | | | |
| | ATTTTGCAACTTACTACTGTCTACAGACTTACAGTACCCATTCGTGGACGTTCGGCCAAGG | | | | | |
| | GACCAAGGTGGAAATCAAA | | | | | |
| ADI-75750 | GACATCCTGATGACCCAGTCTCCATCCTCCCTGTCTGCATCTGTTGGAGACAGAGTCACCA | 3115 | DILMTQSPSSLSASVGDRVTITCRASQS | 3397 | | |
| | TCACTTGCCGGGCAAGTCAGAGCATTAACCACTATTTAAATTGGTATCAGCAGAAGCCAGG | | INHYLNWYQQKPGKAPKLLISAASSLQS | | | |
| | GAAGGCCCCCAAGCTCCTGATCTCTGCTGCATCCAGTTTGCAAAGTGGGGTCCCATCAAGG | | GVPSRFGGSGSETDFTLTISSLEPEDFA | | | |
| | TTCGGTGGCAGTGGATCTGAGACAGATTTCACTCTCACCATCAGCAGTCTGGAACCTGAAG | | TYYCQQSYSTPHGSFGQGTKVEIK | | | |
| | ATTTTGCAACTTACTACTGTCAACAGAGTTACAGTACCCCCCATGGGAGTTTTGGCCAGGG | | | | | |
| | GACCAAGGTGGAAATCAAA | | | | | |
| ADI-75608 | GAAATCGTGTTGACCCAGTCTCCATCCTCGCTGTCTGCAACTGTAGGAGACAGAGTCACCA | 3116 | EIVLTQSPSSLSATVGDRVTITCRASQS | 3398 | | |
| | TCACTTGCCGGGCAAGTCAGAGCGTTGGCAGGTATTTAAATTGGTATCAGCAGAAACCAGG | | VGRYLNWYQQKPGKAPKLLIYAASNLQS | | | |
| | GAAAGCCCCTAAACTCCTGATCTATGCTGCATCCAATTTGCAAAGTGGGGTCCCGTCAAGG | | GVPSRFSGSGSGTDFTLTISSLQPEDFA | | | |
| | TTCAGTGGCAGTGGATCTGGGACAGATTTCACTCTCACCATCAGCAGTCTGCAACCTGAAG | | SYYCQQSYTTHMYTFGQGTKVEIK | | | |
| | ATTTTGCAAGTTACTACTGTCAACAGAGTTACACGACCCACATGTACACTTTTGGCCAGGG | | | | | |
| | GACCAAGGTGGAGATCAAA | | DIQMTQSPSSLSASVGDRVTITCRASQG | | | |
| ADI-75663 | GACATCCAGATGACCCAGTCTCCATCCTCCCTGTCTGCATCTGTCGGAGACAGAGTCACCA | 3117 | ISNSLAWYQQLPGKAPKLLLYAASILES | 3399 | | |
| | TCACTTGCCGGGCGAGTCAGGGCATTAGCAATTCTTTAGCCTGGTATCAACAACTACCAGG | | GVPSRFRGSGSGTDFTLTISSLQPEDFA | | | |
| | GAAAGCCCCTAAACTCCTGCTCTATGCTGCATCCATATTGGAAAGTGGGGTCCCATCCAGG | | TYYCQQYYSSLGRTFGGGTKVEIK | | | |
| | TTCAGGGGCAGTGGTTCTGGGACGGATTTCACTCTCACCATCAGCAGCCTGCAGCCTGAAG | | | | | |
| | ATTTTGCAACTTATTACTGTCAACAGTATTATAGTTCCCTCGGGCGCACTTTCGGCGGAGG | | | | | |
| | GACCAAGGTGGAGATCAAA | | | | | |
| ADI-75652 | GACATCCAGATGACCCAGTCTCCATCCTCCCTGTCTGCATCTGTAGGAGACAGCGTCACCA | 3118 | DIQMTQSPSSLSASVGDSVTITCQASQD | 3400 | | |
| | TCACTTGCCAGGCGAGTCAGGACATTAACAAGTATTTAAATTGGTATCAGCAGAAACCAGG | | INKYLNWYQQKPGKAPKLLIYDASNLET | | | |
| | GAAAGCCCCTAAGCTCCTGATCTACGATGCATCCAATTTGGAAACAGGGGTCCCATCAAGG | | GVPSRFSGSGSGRHFTFTISSLQPEDIG | | | |
| | TTCAGTGGAAGTGGATCTGGGAGACATTTTACTTTCACCATCAGCAGCCTGCAGCCTGAAG | | TYYCHQYDNLPRTFGQGTKVEIK | | | |
| | ATATTGGAACATATTACTGTCACCAGTATGATAATCTCCCTAGGACGTTCGGCCAAGGGAC | | | | | |
| | CAAGGTGGAAATCAAA | | | | | |
| ADI-75567 | GACATCCCGATGACCCAGTCTCCAGATTCCCTGGCTGTGTCTCTGGGCGAGAGGGCCACCA | 3119 | DIPMTQSPDSLAVSLGERATINCRSSQS | 3401 | | |
| | TCAACTGCAGGTCCAGCCAGAGTGTTTTGTACAGCTCCAACGATCAGAACTACTTAGCTTG | | VLYSSNDQNYLAWYQQKPGQPPKLLIYW | | | |
| | GTACCAGCAGAAACCAGGACAGCCTCCTAAGTTGCTCATTTACTGGGCATCTACCCGGGAA | | ASTRESGVPDRFSGSGSGTHFTLTISSL | | | |
| | TCCGGGGTCCCTGACCGATTCAGTGGCAGCGGGTCTGGGACACATTTCACTCTCACCATCA | | QAEDVAVYYCQQYYSSPPTFGPGTKVEI | | | |
| | GCAGCCTGCAGGCTGAAGATGTGGCAGTTTATTACTGTCAGCAATATTATAGTAGTCCTCC | | K | | | |
| | CACTTTCGGCCCTGGGACCAAGGTGGAAATCAAA | | | | | |
| ADI-75670 | GAAATCCAGATGACCCAGTCTCCATCCTCCCTGTCTGCATATGTAGGAGACAGAGTCACCA | 3120 | EIQMTQSPSSLSAYVGDRVTITCRASQS | 3402 | | |
| | TCACTTGCCGGGCAAGTCAGAGCATTAGCAGCTATTTGAATTGGTATCAGCAGAAACCAGG | | ISSYLNWYQQKPGKAPKLLIYHALSLQS | | | |
| | GAAAGCCCCTAAACTCCTGATCTATCATGCACTCAGTTTGCAAAGTGGGGTCCCATCAAGG | | GVPSRFSGSGSGTDFTLTISSLQPEDFA | | | |
| | TTCAGTGGCAGTGGATCTGGGACAGATTTCACTCTCACCATCAGCAGTCTGCAACCTGAAG | | TYYCQQSYTTPYTFGQGTKVDIK | | | |
| | ATTTTGCAACTTACTACTGTCAACAGAGTTACACTACCCCGTACACTTTTGGCCAGGGGAC | | | | | |
| | CAAGGTGGATATCAAA | | | | | |
| ADI-75602 | GACATCCAGTTGACCCAGACTCCAGATTCCCTGGCTGTGTCTCTGGGCGAGAGGGCCACCA | 3121 | DIQLTQTPDSLAVSLGERATINCRSSQS | 3403 | | |
| | TCAACTGCAGGTCCAGCCAGAGTGTTTTGTACAGCTCCAACGATCAGAACTACTTAGCTTG | | VLYSSNDQNYLAWYQQKPGQPPKLLIYW | | | |
| | GTACCAGCAGAAACCAGGACAGCCTCCTAAGTTGCTCATTTACTGGGCATCTACCCGGGAA | | ASTRESGVPDRFSGSGSGTHFTLTISSL | | | |
| | TCCGGGGTCCCTGACCGATTCAGTGGCAGCGGGTCTGGGACACATTTCACTCTCACCATCA | | QAEDVAVYYCQQYYSSPPTFGPGTKVDI | | | |
| | GCAGCCTGCAGGCTGAAGATGTGGCAGTTTATTACTGTCAGCAATATTATAGTAGTCCTCC | | K | | | |
| | CACTTTCGGCCCTGGGACCAAAGTGGATATCAAA | | | | | |
| ADI-75774 | GAAATCGAGATGACCCAGTCTCCATCCTTCCTGTCTGCATCTGTAGGAGACAGAGTCACCA | 3122 | EIEMTQSPSFLSASVGDRVTITCRASQG | 3404 | | |
| | TCACTTGCCGGGCCAGTCAGGGCATTAGCAGTTTTTTAGCCTGGTATCAGCAAAAACCAGG | | ISSFLAWYQQKPGKAPKLLIYGASTLQS | | | |
| | GAAAGCCCCTAAGCTCCTGATCTATGGTGCATCCACTTTGCAAAGTGGGGTCCCATTAAGG | | GVPLRFSGSGSGTEFTLTISSLQPEDFA | | | |
| | TTCAGCGGCAGTGGATCTGGGACAGAATTCACTCTCACAATCAGCAGCCTGCAGCCTGAAG | | TYYCQHLDSYPRYTFGQGTKVEIK | | | |
| | ATTTTGCAACTTATTACTGTCAACACCTTGATAGTTACCCTCGGTACACTTTTGGCCAGGG | | | | | |
| | GACCAAGGTGGAAATCAAA | | | | | |
| ADI-75736 | GAAATTGTATTGACGCAGTCTCCAGCCACCCTGTCTTTGTCTCCAGGGGAAAGAGCCACCC | 3123 | EIVLTQSPATLSLSPGERATLSCRASQS | 3405 | | |
| | TCTCCTGCAGGGCCAGTCAGAGTGTTAGCAGCTACTTAGCCTGGTACCAACAGAAACCTGG | | VSSYLAWYQQKPGQAPRLLIYDASNRAT | | | |
| | CCAGGCTCCCAGGCTCCTCATCTATGATGCATCCAACAGGGCCACTGGCATCCCAGCCAGG | | GIPARFSGSGSGTDFTLTISSLEPEDFA | | | |
| | TTCAGTGGCAGTGGGTCTGGGACAGACTTCACTCTCACCATCAGCAGCCTAGAGCCTGAAG | | VYYCQQRSNWPPGLTFGGGTKVDIK | | | |
| | ATTTTGCAGTTTATTACTGTCAGCAGCGTAGCAACTGGCCTCCGGGGCTCACTTTCGGCGG | | | | | |
| | AGGGACCAAAGTGGATATCAAA | | | | | |
| ADI-75586 | CAGCCTGTGCTGACTCAGCCTGCCTCCGTGTCTGGGTCTCCTGGACAGTCGATCACCATCT | 3124 | QPVLTQPASVSGSPGQSITISCTGTSSD | 3406 | | |
| | CCTGCACTGGAACCAGCAGTGACATTGGTGATTATAACTATGTCTCCTGGTACCAACAACA | | IGDYNYVSWYQQHPGKAPKLMVYDVTNR | | | |
| | CCCAGGCAAAGCCCCCAAACTCATGGTCTATGATGTCACTAATCGGCCCTCAGGGGTTTCT | | PSGVSYRFSGFKSGNTASLTISGLQAED | | | |
| | TATCGCTTCTCTGGCTTCAAGTCTGGCAACACGGCCTCCCTGACCATCTCTGGACTCCAGG | | EADYYCSSYTSSDTYVFGTGTKLTVL | | | |
| | CTGAGGACGAGGCTGATTATTACTGCAGCTCATATACAAGCAGCGACACATATGTCTTCGG | | | | | |
| | AACTGGGACCAAGCTCACCGTCCTA | | | | | |

| | | | SEQ | | SEQ | | SEQ | | SEQ | | SEQ | | SEQ | | SEQ |
|---|---|---|---|---|---|---|---|---|---|---|---|---|---|---|---|
| | VL | VL | ID | VL | ID | VL | ID | VL | ID | VL | ID | VL | ID | VL | ID |
| Clone ID | Germline | FR1 | NO: | CDR1 | NO: | FR2 | NO: | CDR2 | NO: | FR3 | NO: | CDR3 | NO: | FR4 | NO: |
| ADI-75687 | IGKV1- | DIQMTQ | 1878 | RASQGIS | 2062 | WYQHIP | 2336 | AASILE | 2385 | GVPSRFRG | 2634 | QQYYS | 2703 | FGGGTK | 2936 |
| | NL1 | SPSSLS | | NSLA | | GKAPKL | | S | | SGSGTDFT | | SLGRT | | VEIK | |
| | | ASVGDR | | | | LLY | | | | LTISSLQP | | | | | |
| | | VTITC | | | | | | | | EDFASYYC | | | | | |
| ADI-75694 | IGLV3-21 | QPVLTQ | 1982 | GGDNIGS | 2180 | WYQQKP | 2283 | DDSDRP | 2399 | GIPERFFG | 2635 | QVWDS | 2836 | FGTGTK | 2949 |
| | | PPSVSV | | KGVH | | GQAPVL | | S | | SNSGNTAT | | TSDHP | | LTVL | |
| | | APGQTA | | | | VVY | | | | LTISRVEA | | AYV | | | |
| | | RITC | | | | | | | | GDEADYFC | | | | | |
| ADI-75711 | IGLV3-21 | QSELTQ | 1983 | GGNNIGS | 2181 | WYQQRP | 2277 | DDSGRP | 2474 | GIPERFSG | 2636 | QVWDS | 2837 | FGGGTK | 2939 |
| | | PPSVSV | | NSVH | | GQAPVL | | S | | SKSGNTAT | | SSDPV | | LTVL | |
| | | APRQTA | | | | VVY | | | | LTISRVEA | | V | | | |
| | | RITC | | | | | | | | GDEADYYC | | | | | |
| ADI-75704 | IGLV2-14 | QPVLTQ | 1933 | TGTSSDV | 2182 | WYQLHP | 2337 | EVNNRP | 2475 | GISTRFSG | 2637 | SSYTS | 2838 | FGTGTK | 2945 |
| | | PASVSG | | GSYDYVS | | GKAPKL | | S | | SKSGNTAS | | NIV | | VTVL | |
| | | SPGQSI | | | | MIY | | | | LTISGLQA | | | | | |
| | | TISC | | | | | | | | EDEADYYC | | | | | |
| ADI-75631 | IGKV2D- | DIVMTQ | 1984 | RSNQSLL | 2183 | WYLHKP | 2338 | LGSNRA | 2387 | GVPDRFSG | 2638 | VQALQ | 2839 | FGQGTK | 2937 |
| | 28 | SPLSLP | | HSHGYIY | | GQSPQL | | S | | SGSGTDFT | | TPFMY | | VEIK | |
| | | VTPGEP | | LD | | LIY | | | | LSISRVEP | | T | | | |
| | | ASISC | | | | | | | | EDVGVYYC | | | | | |
| ADI-75773 | IGLV1-40 | QSVLTQ | 1948 | TGSNSNI | 2143 | WYQQLP | 2314 | DNNNRP | 2476 | GVPDRFSG | 2622 | QSYDS | 2840 | FGGGTQ | 2948 |
| | | PPSVSG | | GAGYDVH | | GTAPKL | | S | | SKSDTSAS | | SLSDS | | LTVL | |
| | | APGQRV | | | | LIY | | | | LAITGLQA | | V | | | |
| | | TISC | | | | | | | | EDEADYYC | | | | | |
| ADI-75798 | IGKV1-33 | EIQMTQ | 1985 | QASQDIS | 2184 | WYQQKP | 2257 | DASNLE | 2416 | GVPSRFSG | 2639 | QQYDN | 2841 | FGGGTK | 2936 |
| | | TPSSLS | | KFLN | | GKAPKL | | T | | SGSGTGFT | | LPVT | | VEIK | |
| | | ASVGDR | | | | LIY | | | | FTISSLQP | | | | | |
| | | VTITC | | | | | | | | EDIATYYC | | | | | |
| ADI-75782 | IGLV1-40 | QSVLTQ | 1948 | TGSRSNI | 2185 | WYQQLP | 2339 | GNSNRP | 2477 | GVPDRFSG | 2640 | QSYDS | 2842 | FGTGTK | 2949 |
| | | PPSVSG | | GAGYDVH | | GTVPKL | | S | | SKSGSSAS | | SLTFS | | LTVL | |
| | | APGQRV | | | | LIY | | | | LAITGLQA | | AFYV | | | |
| | | ITISC | | | | | | | | EDEAVYYC | | | | | |
| ADI-75858 | IGKV1D- | DIVMTQ | 1986 | RASQSIS | 2134 | WYQQKP | 2272 | TASTLQ | 2478 | GVPSRFSG | 2614 | QQSYT | 2843 | FGQGTK | 2937 |
| | 39 | SPSSLS | | RYLN | | GKAPKL | | T | | SGSGTDFT | | TPPLW | | VEIK | |
| | | ASVGAR | | | | LIH | | | | LTISNLQP | | T | | | |
| | | VTITC | | | | | | | | EDFATYYC | | | | | |
| ADI-75712 | IGLV1-40 | QSVVTQ | 1972 | TGSSSSI | 2186 | WYQQLP | 2314 | ANSNRP | 2479 | GVPDRFSG | 2641 | QSYAS | 2844 | FGGGTK | 2939 |
| | | PPSVSG | | GAGYDVH | | GTAPKL | | S | | SKSGTSAS | | SVSGV | | LTVL | |
| | | APGQRV | | | | LIY | | | | LAITGFQA | | I | | | |
| | | TISC | | | | | | | | EDEDDYYC | | | | | |
| ADI-75716 | IGKV1-9 | DIQMTQ | 1987 | RASQGIS | 2187 | WYQQKP | 2257 | AASTLQ | 2392 | GVPSRFSG | 2642 | QQLNS | 2845 | FGQGTR | 2940 |
| | | SPSFLS | | NYLA | | GKAPKL | | S | | GGSGTEFT | | NPPIT | | LEIK | |
| | | ASVGDR | | | | LIY | | | | LTISSLQP | | | | | |
| | | VTITC | | | | | | | | EDFATYYC | | | | | |

| | | SEQ | | SEQ | Reverted | SEQ |
|---|---|---|---|---|---|---|
| | | ID | | ID | VL | ID |
| Clone ID | VL DNA | NO: | VL Protein | NO: | Protein | NO: |
| ADI-75687 | GACATCCAGATGACCCAGTCTCCATCCTCCCTGTCTGCATCTGTCGGAGACAGAGTCACCA | 3125 | DIQMTQSPSSLSASVGDRVTITCRASQG | 3407 | | |
| | TCACTTGCCGGGCGAGTCAGGGCATTAGCAATTCTTTAGCCTGGTATCAACACATACCAGG | | ISNSLAWYQHIPGKAPKLLLYAASILES | | | |
| | GAAAGCCCCTAAGCTCCTACTCTATGCTGCATCCATATTGGAAAGTGGGGTCCCATCCAGG | | GVPSRFRGSGSGTDFTLTISSLQPEDFA | | | |
| | TTCAGGGGCAGTGGCTCTGGGACGGATTTCACTCTCACCATCAGCAGCCTGCAGCCTGAAG | | SYYCQQYYSSLGRTFGGGTKVEIK | | | |
| | ATTTTGCAAGTTATTACTGTCAACAGTATTACAGTTCCCTCGGGCGCACTTTCGGCGGAGG | | | | | |
| | GACCAAGGTGGAAATCAAA | | | | | |
| ADI-75694 | CAGCCAGTGCTGACTCAGCCCCCCTCGGTGTCAGTGGCCCCGGGACAGACGGCCAGGATTA | 3126 | QPVLTQPPSVSVAPGQTARITCGGDNIG | 3408 | | |
| | CCTGTGGGGGAGACAACATTGGGAGCAAAGGTGTTCACTGGTACCAGCAGAAGCCAGGCCA | | SKGVHWYQQKPGQAPVLVVYDDSDRPSG | | | |
| | GGCCCCTGTGTTGGTCGTTTATGATGATAGCGACCGGCCCTCAGGGATCCCTGAGCGATTC | | IPERFFGSNSGNTATLTISRVEAGDEAD | | | |
| | TTTGGCTCCAACTCGGGGAACACGGCCACCCTGACCATCAGCAGGGTCGAAGCCGGGGATG | | YFCQVWDSTSDHPAYVFGTGTKLTVL | | | |
| | AGGCCGACTACTTCTGTCAGGTGTGGGATAGTACGAGTGATCATCCGGCTTATGTCTTCGG | | | | | |
| | AACTGGGACCAAGCTCACCGTCCTA | | | | | |
| ADI-75711 | CAGTCTGAGCTGACTCAGCCACCCTCGGTGTCAGTGGCCCCACGACAGACGGCCAGGATTA | 3127 | QSELTQPPSVSVAPRQTARITCGGNNIG | 3409 | | |
| | CCTGTGGGGGAAACAACATTGGAAGTAATAGTGTGCATTGGTACCAGCAGAGGCCAGGCCA | | SNSVHWYQQRPGQAPVLVVYDDSGRPSG | | | |
| | GGCCCCTGTGCTGGTCGTCTATGATGATAGCGGCCGGCCCTCAGGGATCCCTGAGCGATTT | | IPERFSGSKSGNTATLTISRVEAGDEAD | | | |
| | TCTGGCTCCAAGTCTGGGAACACGGCCACCCTGACCATCAGCAGGGTCGAAGCCGGGGATG | | YYCQVWDSSSDPVVFGGGTKLTVL | | | |
| | AGGCCGACTATTACTGTCAGGTGTGGGATAGTAGTAGTGATCCTGTGGTTTTCGGCGGAGG | | | | | |
| | GACCAAGCTCACCGTCCTA | | | | | |
| ADI-75704 | CAGCCTGTCCTGACTCAGCCTGCCTCCGTGTCTGGGTCTCCTGGACAGTCGATCACCATCT | 3128 | QPVLTQPASVSGSPGQSITISCTGTSSD | 3410 | | |
| | CCTGCACTGGAACCAGCAGTGACGTTGGTAGTTATGACTATGTCTCCTGGTACCAACTACA | | VGSYDYVSWYQLHPGKAPKLMIYEVNNR | | | |
| | CCCAGGCAAAGCCCCCAAACTCATGATTTATGAGGTCAATAATCGGCCCTCAGGGATTTCT | | PSGISTRFSGSKSGNTASLTISGLQAED | | | |
| | ACTCGCTTCTCTGGCTCCAAGTCTGGCAACACGGCCTCCCTGACCATCTCTGGGCTCCAGG | | EADYYCSSYTSNIVFGTGTKVTVL | | | |
| | CTGAGGACGAGGCTGATTATTACTGCAGCTCATATACAAGCAACATCGTCTTCGGAACTGG | | | | | |
| | GACCAAGGTCACCGTCCTA | | | | | |
| ADI-75631 | GACATTGTGATGACGCAGTCTCCACTCTCCCTGCCCGTCACCCCTGGAGAGCCGGCCTCCA | 3129 | DIVMTQSPLSLPVTPGEPASISCRSNQS | 3411 | | |
| | TCTCCTGCAGGTCTAATCAGAGCCTCCTGCATAGTCATGGATACATCTATTTGGATTGGTA | | LLHSHGYIYLDWYLHKPGQSPQLLIYLG | | | |
| | CCTGCATAAGCCAGGGCAGTCTCCGCAGCTCCTGATCTATTTGGGTTCTAATCGGGCCTCC | | SNRASGVPDRFSGSGSGTDFTLSISRVE | | | |
| | GGGGTCCCTGACAGGTTCAGTGGCAGTGGATCAGGCACAGATTTTACACTGAGTATCAGCA | | PEDVGVYYCVQALQTPFMYTFGQGTKVE | | | |
| | GAGTGGAGCCTGAGGATGTTGGGGTTTATTACTGCGTGCAAGCTCTACAGACTCCCTTCAT | | IK | | | |
| | GTACACTTTTGGCCAGGGGACCAAGGTGGAGATCAAA | | | | | |
| ADI-75773 | CAGTCTGTGTTGACGCAGCCGCCCTCAGTGTCTGGGGCCCCAGGGCAGAGGGTCACCATCT | 3130 | QSVLTQPPSVSGAPGQRVTISCTGSNSN | 3412 | | |
| | CCTGCACTGGGAGCAACTCCAACATCGGGGCAGGTTATGATGTTCACTGGTATCAGCAGCT | | IGAGYDVHWYQQLPGTAPKLLIYDNNNR | | | |
| | TCCAGGAACAGCCCCCAAACTCCTCATCTATGACAACAACAATCGGCCCTCAGGGGTCCCT | | PSGVPDRFSGSKSDTSASLAITGLQAED | | | |
| | GACCGATTCTCTGGCTCCAAGTCTGACACCTCAGCCTCCCTGGCCATCACTGGGCTCCAGG | | EADYYCQSYDSSLSDSVFGGGTQLTVL | | | |
| | CTGAGGATGAGGCTGATTATTACTGCCAGTCCTATGACAGCAGCCTGAGTGATTCGGTGTT | | | | | |
| | CGGCGGAGGCACCCAGCTGACCGTCCTC | | | | | |
| ADI-75798 | GAAATCCAGATGACCCAGACTCCATCCTCCCTGTCTGCATCTGTAGGAGACAGAGTCACCA | 3131 | EIQMTQTPSSLSASVGDRVTITCQASQD | 3413 | | |
| | TCACTTGCCAGGCGAGTCAGGACATTAGCAAGTTTTTAAATTGGTATCAGCAGAAACCAGG | | ISKFLNWYQQKPGKAPKLLIYDASNLET | | | |
| | GAAAGCCCCTAAGCTCCTGATCTACGATGCATCTAATCTGGAAACAGGGGTCCCATCAAGG | | GVPSRFSGSGSGTGFTFTISSLQPEDIA | | | |
| | TTCAGTGGAAGTGGATCTGGGACAGGTTTTACTTTCACCATCAGCAGCCTGCAGCCTGAAG | | TYYCQQYDNLPVTFGGGTKVEIK | | | |
| | ATATTGCAACGTATTACTGTCAACAGTATGATAATCTTCCGGTTACTTTCGGCGGAGGGAC | | | | | |
| | CAAGGTGGAGATCAAA | | | | | |
| ADI-75782 | CAGTCTGTGCTGACGCAGCCGCCCTCAGTGTCTGGGGCCCCAGGGCAGAGGGTCACCATCT | 3132 | QSVLTQPPSVSGAPGQRVTISCTGSRSN | 3414 | | |
| | CCTGCACTGGGAGCAGGTCCAACATCGGGGCAGGTTATGATGTACACTGGTACCAGCAGCT | | IGAGYDVHWYQQLPGTVPKLLIYGNSNR | | | |
| | TCCAGGAACAGTCCCCAAACTCCTCATCTATGGCAACAGCAATCGGCCCTCAGGGGTCCCT | | PSGVPDRFSGSKSGSSASLAITGLQAED | | | |
| | GACCGATTCTCTGGCTCCAAGTCTGGCTCCTCAGCTTCCCTGGCCATCACTGGGCTCCAGG | | EAVYYCQSYDSSLTFSAFYVFGTGTKLT | | | |
| | CTGAGGATGAGGCTGTTTATTACTGCCAGTCCTATGACAGCAGCCTGACTTTTTCGGCTTT | | VL | | | |
| | TTATGTCTTCGGAACTGGGACCAAGCTCACCGTCCTA | | | | | |
| ADI-75858 | GACATCGTGATGACCCAGTCTCCATCCTCCCTGTCTGCCTCTGTAGGAGCCAGAGTCACCA | 3133 | DIVMTQSPSSLSASVGARVTITCRASQS | 3415 | | |
| | TCACTTGCCGGGCAAGTCAGAGCATTAGCAGATATTTAAATTGGTATCAGCAGAAACCAGG | | ISRYLNWYQQKPGKAPKLLIHTASTLQT | | | |
| | GAAAGCCCCTAAGCTCCTGATCCATACTGCATCCACTTTGCAAACTGGGGTCCCATCAAGG | | GVPSRFSGSGSGTDFTLTISNLQPEDFA | | | |
| | TTCAGTGGCAGTGGGTCTGGGACAGATTTCACTCTCACCATCAGCAATCTGCAACCTGAAG | | TYYCQQSYTTPPLWTFGQGTKVEIK | | | |
| | ATTTTGCAACTTACTACTGTCAACAGAGTTACACTACCCCTCCATTGTGGACGTTCGGCCA | | | | | |
| | GGGGACCAAGGTGGAAATCAAA | | | | | |
| ADI-75712 | CAGTCTGTGGTGACGCAGCCGCCCTCAGTGTCTGGGGCCCCAGGGCAGAGGGTCACCATCT | 3134 | QSVVTQPPSVSGAPGQRVTISCTGSSSS | 3416 | | |
| | CCTGCACTGGGAGCAGCTCCAGCATCGGGGCAGGTTATGATGTACACTGGTACCAGCAGCT | | IGAGYDVHWYQQLPGTAPKLLIYANSNR | | | |
| | TCCAGGAACAGCCCCCAAACTCCTCATCTATGCTAACAGCAATCGGCCCTCAGGGGTCCCT | | PSGVPDRFSGSKSGTSASLAITGFQAED | | | |
| | GACCGATTTTCTGGCTCCAAGTCTGGCACCTCAGCCTCCCTGGCCATCACTGGGTTCCAGG | | EDDYYCQSYASSVSGVIFGGGTKLTVL | | | |
| | CTGAGGATGAGGATGATTATTATTGCCAGTCCTATGCCAGCAGCGTGAGTGGTGTGATATT | | | | | |
| | CGGCGGAGGGACCAAGCTGACCGTCCTA | | | | | |
| ADI-75716 | GACATCCAGATGACCCAGTCTCCATCCTTCCTGTCTGCATCTGTAGGAGACAGAGTCACCA | 3135 | DIQMTQSPSFLSASVGDRVTITCRASQG | 3417 | | |
| | TCACTTGCCGGGCCAGTCAGGGCATTAGCAATTATTTAGCCTGGTATCAGCAAAAACCAGG | | ISNYLAWYQQKPGKAPKLLIYAASTLQS | | | |
| | GAAAGCCCCTAAGCTCCTGATCTATGCTGCATCCACTTTGCAAAGTGGGGTCCCATCAAGG | | GVPSRFSGGGSGTEFTLTISSLQPEDFA | | | |
| | TTCAGCGGCGGTGGATCTGGGACAGAATTCACTCTCACAATCAGCAGCCTGCAGCCTGAAG | | TYYCQQLNSNPPITFGQGTRLEIK | | | |
| | ATTTTGCAACTTATTACTGTCAACAGCTTAATAGTAACCCCCCTATCACCTTCGGCCAAGG | | | | | |
| | GACACGACTGGAGATTAAA | | | | | |

| | | | SEQ | | SEQ | | SEQ | | SEQ | | SEQ | | SEQ | | SEQ |
|---|---|---|---|---|---|---|---|---|---|---|---|---|---|---|---|
| | VL | VL | ID | VL | ID | VL | ID | VL | ID | VL | ID | VL | ID | VL | ID |
| Clone ID | Germline | FR1 | NO: | CDR1 | NO: | FR2 | NO: | CDR2 | NO: | FR3 | NO: | CDR3 | NO: | FR4 | NO: |
| ADI-75689 | IGLV3-21 | SHVLTQ | 1988 | GGNNIGS | 2188 | WYQQKP | 2340 | DDSDRP | 2399 | GIPERFSG | 2643 | QVWDS | 2846 | FGTGTK | 2945 |
| | | PPSVSV | | KNVH | | GQAPEL | | S | | SNSGNTAT | | TTDLL | | VTVL | |
| | | APGQTA | | | | VVY | | | | LTISRVEA | | YV | | | |
| | | RITC | | | | | | | | GDEADYFC | | | | | |
| ADI-75669 | IGLV1-36 | QSVLTQ | 1989 | GNNAVN | 2189 | WYQQFP | 2341 | YDDLLP | 2433 | GVSDRFSG | 2578 | AAWDD | 2847 | FGGGTK | 2939 |
| | | PPSVSE | | SGSSSNI | | GKAPKL | | S | | SKSGTSAS | | RLNGV | | LTVL | |
| | | APRQRV | | | | LIY | | | | LAISGLQS | | I | | | |
| | | TISC | | | | | | | | EDEADYYC | | | | | |
| ADI-75839 | IGKV1-5 | DIQMTQ | 1879 | RASQSIS | 2190 | WYQQKP | 2257 | KSSSLE | 2480 | GVPSRFSG | 2532 | QQYNS | 2798 | FGQGTK | 2937 |
| | | SPSTLS | | SWLA | | GKAPKL | | S | | SGSGTEFT | | YYT | | VEIK | |
| | | ASVGDR | | | | LIY | | | | LTISSLQP | | | | | |
| | | VTITC | | | | | | | | DDFATYYC | | | | | |
| ADI-75754 | IGKV3-20 | EMTMTQ | 1990 | RASESVS | 2191 | WHQQRP | 2342 | GASSRP | 2481 | GIPDRFSG | 2616 | HQFAS | 2848 | FGQGTR | 2940 |
| | | SPGTLS | | SEYLA | | GQAPRL | | T | | SGSGTDFT | | APIT | | | |
| | | LSPGER | | | | LIY | | | | LTISRLEP | | | | LEIK | |
| | | ATLSC | | | | | | | | EDFAVYYC | | | | | |
| ADI-75743 | IGKV3-20 | ETTLTQ | 1991 | RASESVR | 2192 | WYQQSP | 2343 | GA- | 2482 | GIPDRFSG | 2644 | QQYAR | 2849 | FGQGTK | 2937 |
| | | SPGTLV | | SSYLA | | GQTPRL | | SRAT | | SGSGTDFT | | SPWT | | VEIK | |
| | | LSPGER | | | | LIY | | | | LTITRLEP | | | | | |
| | | ATLSC | | | | | | | | EDFAVYYC | | | | | |
| ADI-75841 | IGLV6-57 | NFMLTQ | 1992 | TRSSGSL | 2193 | WYQLRP | 2344 | EDNQRP | 2431 | GVPDRFSG | 2574 | QSWDS | 2850 | FGGGTK | 2939 |
| | | PHSVSE | | ATNYVQ | | GSSPST | | S | | SIDSSSNS | | SALWV | | LTVL | |
| | | SPGKTV | | | | VIY | | | | ASLTISGL | | | | | |
| | | TISC | | | | | | | | KTEDEADY | | | | | |
| ADI-75879 | IGKV3-20 | EIAMTQ | 1993 | RASESVS | 2194 | WYQQKP | 2258 | GASSRA | 2464 | GIPDRFSG | 2645 | QQYGS | 2851 | FGPGTK | 2942 |
| | | SPGTLS | | SSYLA | | GQAPRL | | T | | SGSGTDFT | | SPV | | VEIK | |
| | | LSPGQR | | | | LIY | | | | LTISRLEP | | | | | |
| | | ATLSC | | | | | | | | EDYAVYYC | | | | | |
| ADI-75703 | IGKV1D- | DIPMTQ | 1994 | RASQSIS | 2195 | WYQQKP | 2345 | IASNLQ | 2483 | GVPSRFSG | 2534 | QQSYT | 2852 | FGGGTK | 2936 |
| | 39 | SPSSLS | | NFLN | | GRAPNL | | R | | SGSGTDFT | | TPPT | | VEIK | |
| | | ASVGDS | | | | LIY | | | | LTISSLQP | | | | | |
| | | VTITC | | | | | | | | EDFATYYC | | | | | |
| ADI-75739 | IGLV1-40 | QSVLTQ | 1948 | TGSNSNI | 2196 | WYQQLP | 2314 | GNTNRP | 2484 | GVPDRFSG | 2622 | QSYDS | 2853 | FGGGTK | 2947 |
| | | PPSVSG | | GAGYDIH | | GTAPKL | | S | | SKSDTSAS | | SLSGV | | VTVL | |
| | | APGQRV | | | | LIY | | | | LAITGLQA | | V | | | |
| | | TISC | | | | | | | | EDEADYYC | | | | | |
| ADI-75762 | IGLV2-11 | QSALTQ | 1995 | TGTSSDV | 2061 | WYQQHP | 2265 | DVSKRP | 2409 | GVPDRFSG | 2646 | CSYVG | 2854 | FGTGTK | 2949 |
| | | PRSVSG | | GGYNYVS | | GKAPKL | | S | | SKSGNTAS | | SYSYV | | LTVL | |
| | | SPGQSV | | | | MIY | | | | LTMSGLQA | | | | | |
| | | TISC | | | | | | | | EDEADYYC | | | | | |
| ADI-75815 | IGKV3-11 | EIVMTQ | 1996 | RASQSVS | 2168 | WYQQKP | 2258 | DASNRA | 2448 | GIPARFTG | 2647 | QQRIH | 2855 | FGPGTK | 2942 |
| | | SPATLS | | SYLA | | GQAPRL | | T | | SGSGTDFT | | PPFT | | VEIK | |
| | | LSPGER | | | | LIY | | | | LTISSLEP | | | | | |
| | | ATLSC | | | | | | | | EDFAVYYC | | | | | |
| ADI-75765 | IGKV1-16 | DIQLTQ | 1876 | RASQGIS | 2187 | WFQQKP | 2346 | DASTLQ | 2485 | GVPSKFSG | 2648 | QQYDS | 2856 | FGGGTK | 2936 |
| | | SPSSLS | | NYLA | | GKAPKS | | N | | SGSGTHFT | | YPLT | | VEIK | |
| | | ASVGDR | | | | LIY | | | | LTISSLQP | | | | | |
| | | VTITC | | | | | | | | EDFATYYC | | | | | |

| | | SEQ | | SEQ | Reverted | SEQ |
|---|---|---|---|---|---|---|
| | | ID | | ID | VL | ID |
| Clone ID | VL DNA | NO: | VL Protein | NO: | Protein | NO: |
| ADI-75689 | AGCCATGTGCTGACTCAGCCACCCTCGGTGTCAGTGGCCCCAGGACAGACGGCCAGGATTA | 3136 | SHVLTQPPSVSVAPGQTARITCGGNNIG | 3418 | | |
| | CCTGTGGGGGAAACAACATTGGAAGTAAAAATGTGCACTGGTACCAGCAGAAGCCAGGCCA | | SKNVHWYQQKPGQAPELVVYDDSDRPSG | | | |
| | GGCCCCTGAACTGGTCGTCTATGACGATAGCGACCGGCCCTCAGGGATCCCTGAGCGATTC | | IPERFSGSNSGNTATLTISRVEAGDEAD | | | |
| | TCTGGCTCCAACTCTGGGAACACGGCCACCCTGACCATCAGCAGGGTCGAAGCCGGGGATG | | YFCQVWDSTTDLLYVFGTGTKVTVL | | | |
| | AGGCCGACTACTTCTGTCAGGTGTGGGATAGTACTACTGATCTTCTTTATGTCTTCGGAAC | | | | | |
| | TGGGACCAAGGTCACCGTCCTA | | | | | |
| ADI-75669 | CAGTCTGTGCTGACTCAGCCCCCCTCGGTGTCTGAAGCCCCCAGGCAGAGGGTCACCATCT | 3137 | QSVLTQPPSVSEAPRQRVTISCSGSSSN | 3419 | | |
| | CCTGTTCTGGAAGCAGCTCCAACATCGGAAATAATGCTGTAAACTGGTACCAGCAGTTCCC | | IGNNAVNWYQQFPGKAPKLLIYYDDLLP | | | |
| | AGGAAAGGCTCCCAAACTCCTCATCTATTATGATGATCTGCTGCCCTCAGGGGTCTCTGAC | | SGVSDRFSGSKSGTSASLAISGLQSEDE | | | |
| | CGATTCTCTGGCTCCAAGTCTGGCACCTCAGCCTCCCTGGCCATCAGTGGGCTCCAGTCTG | | ADYYCAAWDDRLNGVIFGGGTKLTVL | | | |
| | AGGATGAGGCTGATTATTACTGTGCAGCATGGGATGACAGGCTCAATGGTGTGATCTTCGG | | | | | |
| | CGGGGGGACCAAGCTCACCGTCCTA | | | | | |
| ADI-75839 | GACATCCAGATGACCCAGTCTCCTTCCACCCTGTCTGCATCTGTAGGAGACAGAGTCACCA | 3138 | DIQMTQSPSTLSASVGDRVTITCRASQS | 3420 | | |
| | TCACTTGCCGGGCCAGTCAGAGTATTAGTAGCTGGTTGGCCTGGTATCAGCAGAAGCCAGG | | ISSWLAWYQQKPGKAPKLLIYKSSSLES | | | |
| | GAAAGCCCCTAAGCTCCTGATCTATAAGTCATCTAGTTTAGAAAGTGGGGTCCCATCAAGG | | GVPSRFSGSGSGTEFTLTISSLQPDDFA | | | |
| | TTCAGCGGCAGTGGATCTGGGACAGAATTCACTCTCACCATCAGCAGCCTGCAGCCTGATG | | TYYCQQYNSYYTFGQGTKVEIK | | | |
| | ATTTTGCAACTTATTACTGCCAACAGTATAATAGTTATTACACTTTTGGCCAGGGGACCAA | | | | | |
| | GGTGGAAATCAAA | | | | | |
| ADI-75754 | GAAATGACAATGACGCAGTCTCCAGGCACCCTGTCTTTGTCTCCAGGGGAAAGAGCCACCC | 3139 | EMTMTQSPGTLSLSPGERATLSCRASES | 3421 | | |
| | TCTCCTGCAGGGCCAGTGAGAGCGTTAGCAGCGAGTACCTAGCCTGGCACCAGCAGAGACC | | VSSEYLAWHQQRPGQAPRLLIYGASSRP | | | |
| | TGGCCAGGCTCCCAGGCTCCTCATCTATGGTGCATCCAGCAGGCCCACGGGCATCCCAGAC | | TGIPDRFSGSGSGTDFTLTISRLEPEDF | | | |
| | AGGTTCAGTGGCAGTGGGTCTGGGACAGACTTCACTCTCACCATCAGCAGACTGGAGCCTG | | AVYYCHQFASAPITFGQGTRLEIK | | | |
| | AAGATTTTGCAGTGTATTACTGTCACCAGTTTGCTAGCGCACCGATCACCTTCGGCCAAGG | | | | | |
| | GACACGACTGGAGATTAAA | | | | | |
| ADI-75743 | GAAACGACACTCACGCAGTCTCCAGGCACCCTGGTTTTGTCTCCAGGGGAAAGAGCCACCC | 3140 | ETTLTQSPGTLVLSPGERATLSCRASES | 3422 | | |
| | TCTCCTGCAGGGCCAGTGAGAGTGTTCGGAGCAGCTATTTAGCCTGGTACCAGCAGAGTCC | | VRSSYLAWYQQSPGQTPRLLIYGASRAT | | | |
| | TGGCCAGACTCCCAGGCTCCTCATCTATGGTGCATCCAGGGCCACTGGCATCCCAGACAGG | | GIPDRFSGSGSGTDFTLTITRLEPEDFA | | | |
| | TTCAGTGGTAGTGGGTCTGGGACAGACTTCACTCTCACCATCACCAGATTGGAGCCTGAAG | | VYYCQQYARSPWTFGQGTKVEIK | | | |
| | ATTTTGCAGTGTATTACTGTCAGCAGTATGCTAGGTCACCGTGGACGTTCGGCCAAGGGAC | | | | | |
| | CAAGGTGGAGATCAAA | | | | | |
| ADI-75841 | AATTTTATGCTGACTCAGCCCCACTCTGTGTCGGAGTCTCCGGGGAAGACGGTAACCATCT | 3141 | NFMLTQPHSVSESPGKTVTISCTRSSGS | 3423 | | |
| | CCTGCACCCGCAGTAGTGGCAGCCTTGCCACCAACTATGTGCAGTGGTACCAGCTGCGCCC | | LATNYVQWYQLRPGSSPSTVIYEDNQRP | | | |
| | GGGCAGTTCCCCCAGCACTGTGATCTATGAGGATAACCAAAGACCCTCTGGGGTCCCTGAT | | SGVPDRFSGSIDSSSNSASLTISGLKTE | | | |
| | CGGTTCTCTGGCTCCATCGACAGCTCCTCCAACTCTGCCTCCCTCACCATCTCTGGACTGA | | DEADYYCQSWDSSALWVFGGGTKLTVL | | | |
| | AGACTGAGGACGAGGCTGACTACTACTGTCAGTCTTGGGATAGCAGCGCTCTTTGGGTGTT | | | | | |
| | CGGCGGAGGGACCAAGCTCACCGTCCTA | | | | | |
| ADI-75879 | GAAATTGCGATGACCCAGTCTCCAGGCACCCTGTCTTTGTCTCCAGGGCAAAGAGCCACCC | 3142 | EIAMTQSPGTLSLSPGQRATLSCRASES | 3424 | | |
| | TCTCCTGCAGGGCCAGTGAGAGTGTTAGCAGCAGCTACTTAGCCTGGTACCAGCAGAAACC | | VSSSYLAWYQQKPGQAPRLLIYGASSRA | | | |
| | TGGCCAGGCTCCCAGGCTCCTCATCTATGGTGCATCCAGCAGGGCCACTGGCATCCCAGAC | | TGIPDRFSGSGSGTDFTLTISRLEPEDY | | | |
| | AGGTTCAGTGGCAGTGGGTCTGGGACAGACTTCACTCTCACCATCAGCAGACTGGAGCCTG | | AVYYCQQYGSSPVFGPGTKVEIK | | | |
| | AAGATTATGCAGTATATTACTGTCAGCAGTATGGTAGCTCACCTGTTTTCGGCCCTGGGAC | | | | | |
| | CAAAGTGGAAATCAAA | | | | | |
| ADI-75703 | GACATCCCGATGACCCAGTCTCCATCCTCCCTGTCTGCTTCTGTAGGAGACAGCGTCACCA | 3143 | DIPMTQSPSSLSASVGDSVTITCRASQS | 3425 | | |
| | TCACTTGCCGGGCAAGTCAGAGCATTAGCAACTTTTTAAATTGGTATCAGCAGAAACCAGG | | ISNFLNWYQQKPGRAPNLLIYIASNLQR | | | |
| | GAGAGCCCCTAACCTCCTGATCTACATTGCATCCAATTTGCAACGTGGGGTCCCATCAAGG | | GVPSRFSGSGSGTDFTLTISSLQPEDFA | | | |
| | TTCAGTGGCAGTGGGTCTGGGACAGATTTCACTCTCACCATCAGCAGTCTGCAACCTGAAG | | TYYCQQSYTTPPTFGGGTKVEIK | | | |
| | ATTTTGCAACTTACTACTGTCAACAGAGTTACACTACTCCTCCGACTTTCGGCGGAGGGAC | | | | | |
| | CAAGGTGGAGATCAAA | | | | | |
| ADI-75739 | CAGTCTGTCTTGACGCAGCCGCCCTCAGTGTCTGGGGCCCCAGGGCAGAGGGTCACCATCT | 3144 | QSVLTQPPSVSGAPGQRVTISCTGSNSN | 3426 | | |
| | CCTGCACTGGGAGCAACTCCAACATCGGAGCAGGTTATGATATACACTGGTACCAGCAGCT | | IGAGYDIHWYQQLPGTAPKLLIYGNTNR | | | |
| | TCCAGGAACGGCCCCCAAACTCCTCATCTATGGTAACACCAATCGGCCCTCAGGGGTCCCT | | PSGVPDRFSGSKSDTSASLAITGLQAED | | | |
| | GACCGATTCTCTGGCTCCAAGTCTGACACCTCAGCCTCCCTGGCCATCACTGGGCTCCAGG | | EADYYCQSYDSSLSGVVFGGGTKVTVL | | | |
| | CTGAGGATGAGGCTGATTATTACTGCCAGTCTTATGACAGCAGCCTGAGTGGTGTGGTATT | | | | | |
| | CGGCGGAGGGACCAAGGTGACCGTCCTA | | | | | |
| ADI-75762 | CAGTCTGCGCTGACTCAGCCTCGCTCAGTGTCCGGGTCTCCTGGACAGTCAGTCACCATCT | 3145 | QSALTQPRSVSGSPGQSVTISCTGTSSD | 3427 | | |
| | CCTGCACTGGAACCAGCAGTGATGTTGGTGGTTATAACTATGTCTCCTGGTACCAACAACA | | VGGYNYVSWYQQHPGKAPKLMIYDVSKR | | | |
| | CCCAGGCAAAGCCCCCAAACTCATGATTTATGATGTCAGTAAGCGGCCCTCAGGGGTCCCT | | PSGVPDRFSGSKSGNTASLTMSGLQAED | | | |
| | GATCGCTTCTCTGGCTCCAAGTCTGGCAACACGGCCTCCCTGACCATGTCTGGGCTCCAGG | | EADYYCCSYVGSYSYVFGTGTKLTVL | | | |
| | CTGAGGATGAGGCTGATTATTACTGCTGCTCATATGTAGGCAGCTATAGTTATGTCTTCGG | | | | | |
| | AACTGGGACCAAGCTCACCGTCCTA | | | | | |
| ADI-75815 | GAAATTGTGATGACGCAGTCTCCAGCCACCCTGTCTTTGTCTCCAGGGGAAAGAGCCACCC | 3146 | EIVMTQSPATLSLSPGERATLSCRASQS | 3428 | | |
| | TCTCCTGCAGGGCCAGTCAGAGTGTTAGCAGCTACTTAGCCTGGTACCAACAGAAACCTGG | | VSSYLAWYQQKPGQAPRLLIYDASNRAT | | | |
| | CCAGGCTCCCAGGCTCCTCATCTATGATGCTTCCAACAGGGCCACTGGCATCCCAGCCAGG | | GIPARFTGSGSGTDFTLTISSLEPEDFA | | | |
| | TTCACTGGCAGTGGGTCTGGGACAGACTTCACTCTCACCATCAGCAGCCTAGAGCCTGAAG | | VYYCQQRIHPPFTFGPGTKVEIK | | | |
| | ATTTTGCAGTTTATTACTGTCAGCAACGTATCCACCCGCCATTCACTTTCGGCCCTGGGAC | | | | | |
| | CAAGGTGGAGATCAAA | | | | | |
| ADI-75765 | GACATCCAGTTGACCCAGTCTCCATCCTCACTGTCTGCATCTGTAGGAGACAGAGTCACCA | 3147 | DIQLTQSPSSLSASVGDRVTITCRASQG | 3429 | | |
| | TCACTTGTCGGGCGAGTCAGGGCATTAGCAATTATTTAGCCTGGTTTCAACAGAAACCAGG | | ISNYLAWFQQKPGKAPKSLIYDASTLQN | | | |
| | GAAAGCCCCTAAGTCCCTCATCTATGATGCATCCACTTTGCAAAATGGGGTCCCATCAAAG | | GVPSKFSGSGSGTHFTLTISSLQPEDFA | | | |
| | TTCAGCGGCAGTGGATCTGGGACACATTTCACTCTCACCATCAGCAGCCTGCAGCCTGAAG | | TYYCQQYDSYPLTFGGGTKVEIK | | | |
| | ATTTTGCAACTTATTACTGCCAACAATATGATAGTTACCCGCTCACTTTCGGCGGAGGGAC | | | | | |
| | CAAGGTGGAAATCAAA | | | | | |

| | | | SEQ | | SEQ | | SEQ | | SEQ | | SEQ | | SEQ | | SEQ |
|---|---|---|---|---|---|---|---|---|---|---|---|---|---|---|---|
| | VL | VL | ID | VL | ID | VL | ID | VL | ID | VL | ID | VL | ID | VL | ID |
| Clone ID | Germline | FR1 | NO: | CDR1 | NO: | FR2 | NO: | CDR2 | NO: | FR3 | NO: | CDR3 | NO: | FR4 | NO: |
| ADI-75705 | IGKV3-20 | EMQLTQ | 1997 | RASQSLN | 2197 | WYQQKP | 2258 | AASSRA | 2486 | GIPDRFSG | 2649 | QQYGY | 2857 | FGGGTK | 2938 |
| | | TPGTLS | | SKYFA | | GQAPRL | | T | | SGYGTDFT | | SPAT | | VDIK | |
| | | LSPGEG | | | | LIY | | | | LTITRLEP | | | | | |
| | | ATVSC | | | | | | | | EDFAVYFC | | | | | |
| ADI-75678 | IGKV1D- | DIQMTQ | 1878 | RASQSIS | 2090 | WYQQKP | 2257 | AASSLQ | 2391 | GVPSRVSG | 2650 | QQSYS | 2858 | FGQGTK | 2937 |
| | 39 | SPSSLS | | SFLN | | GKAPKL | | S | | SGSGTEFT | | SPMYT | | VEIK | |
| | | ASVGDR | | | | LIY | | | | LTISSLQP | | | | | |
| | | VTITC | | | | | | | | DDFATYYC | | | | | |
| ADI-75707 | IGKV1D- | EIPMTQ | 1998 | RASQSIS | 2153 | WYQQKP | 2347 | AASNLQ | 2408 | GVPSRFSG | 2534 | QQSYS | 2859 | FGQGTK | 2937 |
| | 39 | SPSSLS | | ITFLN | | GKAPNL | | S | | SGSGTDFT | | SPCS | | VEIK | |
| | | ASVGDT | | | | LVY | | | | LTISSLQP | | | | | |
| | | VTITC | | | | | | | | EDFATYYC | | | | | |
| ADI-75796 | IGLV6-57 | NLMLTQ | 1999 | ASYYVQ | 2198 | WYQHRP | 2348 | EDNQRP | 2431 | GVPDRFSG | 2574 | HSYDS | 2860 | FGGGTK | 2939 |
| | | PHSVSA | | TRSGGSI | | GSAPTI | | S | | SIDSSSNS | | SNPVV | | LTVL | |
| | | SPGKTV | | | | VIY | | | | ASLTISGL | | | | | |
| | | TISC | | | | | | | | KTEDEADY | | | | | |
| | | | | | | | | | | YC | | | | | |
| ADI-75673 | IGLV2-11 | QPVLTQ | 2000 | TGTTSDV | 2199 | WYPPHP | 2349 | DVSKRP | 2409 | GVPDRFSG | 2651 | CSYAG | 2861 | FGTGTK | 2949 |
| | | PRSVSG | | GSYNYVS | | GKAPKL | | S | | SKSGNTAS | | TYI | | LTVL | |
| | | SPGQSV | | | | MIY | | | | LTISGLQA | | | | | |
| | | TISC | | | | | | | | EDEADYYC | | | | | |
| ADI-75566 | IGKV1-33 | EIQLTQ | 1917 | QASQDIN | 2160 | WYQQKP | 2257 | GATNLE | 2487 | GVPSRFSG | 2652 | QYYDN | 2799 | FGPGTK | 2942 |
| | | SPSSLS | | KYLN | | GKAPKL | | T | | SGSGTDFS | | PPPT | | VEIK | |
| | | ASVGDR | | | | LIY | | | | FTINSLQP | | | | | |
| | | VTITC | | | | | | | | EDIATYYC | | | | | |
| ADI-75706 | IGLV1-40 | QSVLTQ | 1948 | TGSNSNI | 2196 | WYQQLP | 2314 | ANTNRP | 2488 | GVPDRFSG | 2622 | QSYDS | 2862 | FGGGTK | 2947 |
| | | PPSVSG | | GAGYDIH | | GTAPKL | | S | | SKSDTSAS | | SLSGV | | VTVL | |
| | | APGQRV | | | | LIY | | | | LAITGLQA | | L | | | |
| | | TISC | | | | | | | | EDEADYYC | | | | | |
| ADI-75699 | IGLV1-40 | QPVLTQ | 2001 | TGSNSNI | 2143 | WYQQLP | 2314 | DNNNRP | 2476 | GVPDRFSG | 2622 | QSYDS | 2840 | FGYGTK | 2956 |
| | | PPSVSA | | GAGYDVH | | GTAPKL | | S | | SKSDTSAS | | SLSDS | | LTVL | |
| | | APGQRV | | | | LIY | | | | LAITGLQA | | V | | | |
| | | TISC | | | | | | | | EDEADYYC | | | | | |
| ADI-75591 | IGKV3D- | EIVLTQ | 2002 | RASQSIN | 2200 | WFQQKP | 2350 | GASARA | 2489 | GIPARFGG | 2653 | LQYHN | 2863 | FGQGTK | 2937 |
| | 15 | SPATLS | | SDLA | | GQAPRL | | A | | SGSGTEFT | | RPPWT | | VEIK | |
| | | VSPGER | | | | LMF | | | | LTISGLQS | | | | | |
| | | ASLSC | | | | | | | | EDFAVYYC | | | | | |
| ADI-75698 | IGLV1-40 | QSVLTQ | 1948 | TGSSSNI | 2201 | WYQQLP | 2314 | GNTHRP | 2490 | GVPDRFSG | 2599 | QSYDS | 2864 | FGGGTK | 2939 |
| | | PPSVSG | | GAGYDVH | | GTAPKL | | S | | SKSGTSAS | | SLIGS | | LTVL | |
| | | APGQRV | | | | LIY | | | | LAITGLQA | | V | | | |
| | | TISC | | | | | | | | EDEADYYC | | | | | |
| ADI-75878 | IGKV3D- | EMTMTQ | 2003 | RASQSVS | 2202 | WYQQKP | 2258 | GASTRA | 2383 | GIPARFSG | 2569 | QQYDN | 2865 | FGQGTK | 2937 |
| | 15 | SPATLS | | TNLA | | GQAPRL | | T | | SGSGTEFT | | WPPTW | | VEIK | |
| | | VSPGER | | | | LIY | | | | LTISSLQS | | T | | | |
| | | ATLSC | | | | | | | | EDFAVYYC | | | | | |
| ADI-75718 | IGKV3D- | EMTLTQ | 2004 | RASQSLS | 2203 | WYQQRP | 2351 | GASGRA | 2491 | GLPDRFSG | 2654 | QQYDS | 2866 | FGQGTK | 2937 |
| | 15 | SPATLS | | NKLA | | GQAPTL | | T | | SGYGTEFT | | WPRT | | VEIK | |
| | | VSPGET | | | | LIH | | | | LTIRRLQS | | | | | |
| | | VTLSC | | | | | | | | EDFAVYYC | | | | | |

| | | SEQ | | SEQ | Reverted | SEQ |
|---|---|---|---|---|---|---|
| | | ID | | ID | VL | ID |
| Clone ID | VL DNA | NO: | VL Protein | NO: | Protein | NO: |
| ADI-75705 | GAAATGCAACTCACGCAGACTCCAGGCACCCTGTCTTTGTCTCCAGGAGAAGGAGCCACCG | 3148 | EMQLTQTPGTLSLSPGEGATVSCRASQS | 3430 | | |
| | TCTCCTGCAGGGCCAGTCAGAGTCTTAACAGCAAGTACTTCGCCTGGTACCAGCAGAAACC | | LNSKYFAWYQQKPGQAPRLLIYAASSRA | | | |
| | GGGCCAGGCTCCCAGGCTCCTCATCTATGCTGCGTCCAGCAGGGCCACTGGCATCCCAGAC | | TGIPDRFSGSGYGTDFTLTITRLEPEDF | | | |
| | AGGTTCAGTGGCAGTGGGTATGGGACAGACTTCACTCTCACCATCACCAGACTGGAGCCTG | | AVYFCQQYGYSPATFGGGTKVDIK | | | |
| | AAGATTTTGCAGTTTATTTCTGTCAGCAATATGGTTACTCACCGGCCACTTTCGGCGGAGG | | | | | |
| | GACCAAAGTGGATATCAAA | | | | | |
| ADI-75678 | GACATCCAGATGACCCAGTCTCCATCCTCCCTGTCTGCCTCTGTAGGAGACAGAGTCACCA | 3149 | DIQMTQSPSSLSASVGDRVTITCRASQS | 3431 | | |
| | TCACTTGCCGGGCAAGTCAGAGCATTAGCAGCTTTTTAAATTGGTATCAGCAGAAACCGGG | | ISSFLNWYQQKPGKAPKLLIYAASSLQS | | | |
| | GAAAGCCCCTAAGCTCCTGATTTATGCTGCATCCAGTTTGCAAAGTGGGGTCCCATCAAGG | | GVPSRVSGSGSGTEFTLTISSLQPDDFA | | | |
| | GTCAGTGGCAGTGGATCTGGGACAGAATTCACTCTCACCATCAGCAGCCTGCAACCTGACG | | TYYCQQSYSSPMYTFGQGTKVEIK | | | |
| | ATTTTGCAACTTACTACTGTCAACAGAGTTACAGTAGCCCCATGTACACTTTTGGCCAGGG | | | | | |
| | GACCAAGGTGGAGATCAAA | | | | | |
| ADI-75707 | GAAATCCCGATGACCCAGTCTCCATCCTCCCTGTCTGCATCTGTAGGAGACACAGTCACCA | 3150 | EIPMTQSPSSLSASVGDTVTITCRASQS | 3432 | | |
| | TCACTTGCCGGGCAAGTCAGAGCATTAGCACCTTTTTAAATTGGTATCAGCAGAAACCAGG | | ISTFLNWYQQKPGKAPNLLVYAASNLQS | | | |
| | GAAAGCCCCTAACCTCCTCGTCTATGCTGCATCCAATTTGCAAAGTGGGGTCCCATCAAGG | | GVPSRFSGSGSGTDFTLTISSLQPEDFA | | | |
| | TTCAGTGGCAGTGGATCTGGGACAGATTTCACTCTCACCATCAGCAGTCTGCAACCTGAAG | | TYYCQQSYSSPCSFGQGTKVEIK | | | |
| | ATTTTGCAACTTACTACTGTCAACAGAGTTACAGTTCCCCGTGCAGTTTTGGCCAGGGGAC | | | | | |
| | CAAGGTGGAAATCAAA | | | | | |
| ADI-75796 | AATCTTATGCTGACTCAGCCCCACTCTGTGTCGGCGTCTCCGGGGAAGACGGTAACCATCT | 3151 | NLMLTQPHSVSASPGKTVTISCTRSGGS | 3433 | | |
| | CCTGCACCCGCAGCGGTGGCAGTATTGCCAGCTACTATGTGCAGTGGTACCAGCACCGCCC | | IASYYVQWYQHRPGSAPTIVIYEDNQRP | | | |
| | GGGCAGTGCCCCCACCATTGTGATTTATGAGGATAACCAAAGACCCTCTGGGGTCCCTGAT | | SGVPDRFSGSIDSSSNSASLTISGLKTE | | | |
| | CGGTTCTCTGGCTCCATCGACAGCTCCTCCAACTCCGCCTCCCTCACCATCTCTGGACTGA | | DEADYYCHSYDSSNPVVFGGGTKLTVL | | | |
| | AGACTGAGGACGAGGCTGACTACTACTGTCACTCTTATGACAGCAGCAATCCTGTGGTCTT | | | | | |
| | CGGCGGAGGGACCAAGCTCACCGTCCTA | | | | | |
| ADI-75673 | CAGCCTGTGCTGACTCAGCCTCGCTCAGTGTCCGGGTCTCCTGGACAGTCAGTCACCATCT | 3152 | QPVLTQPRSVSGSPGQSVTISCTGTTSD | 3434 | | |
| | CCTGCACTGGAACCACCAGTGATGTTGGTAGTTATAACTATGTCTCCTGGTACCCCCCGCA | | VGSYNYVSWYPPHPGKAPKLMIYDVSKR | | | |
| | CCCAGGCAAAGCCCCCAAACTCATGATTTATGATGTCAGTAAGCGGCCCTCAGGGGTCCCT | | PSGVPDRFSGSKSGNTASLTISGLQAED | | | |
| | GATCGCTTCTCTGGCTCCAAGTCTGGCAACACGGCCTCCCTGACCATCTCTGGGCTCCAGG | | EADYYCCSYAGTYIFGTGTKLTVL | | | |
| | CTGAGGATGAGGCTGATTATTACTGCTGTTCATATGCAGGCACCTACATCTTCGGAACTGG | | | | | |
| | GACCAAGCTCACCGTCCTA | | | | | |
| ADI-75566 | GAAATCCAATTGACCCAGTCTCCATCCTCCCTGTCTGCATCTGTAGGAGACAGAGTCACCA | 3153 | EIQLTQSPSSLSASVGDRVTITCQASQD | 3435 | | |
| | TCACTTGCCAGGCGAGTCAGGACATTAACAAGTATTTAAATTGGTATCAGCAGAAACCAGG | | INKYLNWYQQKPGKAPKLLIYGATNLET | | | |
| | GAAAGCCCCTAAGCTCCTGATCTACGGTGCAACCAATTTGGAGACAGGGGTCCCATCAAGG | | GVPSRFSGSGSGTDFSFTINSLQPEDIA | | | |
| | TTCAGTGGAAGTGGATCTGGGACAGATTTTAGTTTCACCATCAACAGCCTGCAGCCTGAAG | | TYYCQYYDNPPPTFGPGTKVEIK | | | |
| | ATATTGCAACATATTACTGTCAATATTATGATAATCCCCCTCCGACTTTCGGCCCTGGGAC | | | | | |
| | CAAGGTGGAGATCAAA | | | | | |
| ADI-75706 | CAGTCTGTGTTGACGCAGCCGCCCTCAGTGTCTGGGGCCCCAGGGCAGAGGGTCACCATCT | 3154 | QSVLTQPPSVSGAPGQRVTISCTGSNSN | 3436 | | |
| | CCTGCACTGGGAGCAACTCCAACATCGGAGCAGGTTATGATATACACTGGTACCAGCAGCT | | IGAGYDIHWYQQLPGTAPKLLIYANTNR | | | |
| | TCCAGGAACAGCCCCCAAACTCCTCATCTATGCTAACACCAATCGGCCCTCAGGGGTCCCT | | PSGVPDRFSGSKSDTSASLAITGLQAED | | | |
| | GACCGATTCTCTGGCTCCAAGTCTGACACCTCAGCCTCCCTGGCCATCACTGGGCTCCAGG | | EADYYCQSYDSSLSGVLFGGGTKVTVL | | | |
| | CTGAGGATGAGGCTGATTATTACTGCCAGTCTTATGACAGCAGCCTGAGTGGTGTGCTATT | | | | | |
| | CGGCGGAGGGACCAAGGTCACCGTCCTA | | | | | |
| ADI-75699 | CAGCCTGTGTTGACGCAGCCGCCCTCAGTGTCTGCGGCCCCAGGGCAGAGGGTCACCATCT | 3155 | QPVLTQPPSVSAAPGQRVTISCTGSNSN | 3437 | | |
| | CCTGCACTGGGAGCAACTCCAACATCGGGGCAGGTTATGATGTACACTGGTACCAGCAACT | | IGAGYDVHWYQQLPGTAPKLLIYDNNNR | | | |
| | TCCAGGAACAGCCCCCAAACTCCTCATCTATGATAACAACAATCGGCCCTCAGGGGTCCCT | | PSGVPDRFSGSKSDTSASLAITGLQAED | | | |
| | GACCGATTCTCTGGCTCCAAGTCTGACACCTCAGCCTCCCTGGCCATCACTGGGCTCCAGG | | EADYYCQSYDSSLSDSVFGYGTKLTVL | | | |
| | CTGAGGATGAGGCTGATTATTACTGCCAGTCCTATGACAGCAGCCTGAGTGATTCTGTCTT | | | | | |
| | CGGATATGGGACCAAGCTGACCGTCCTA | | | | | |
| ADI-75591 | GAAATTGTGTTGACGCAGTCTCCAGCCACACTGTCTGTGTCTCCAGGGGAAAGAGCCTCCC | 3156 | EIVLTQSPATLSVSPGERASLSCRASQS | 3438 | | |
| | TCTCCTGCAGGGCCAGTCAGAGTATTAACAGCGACTTAGCCTGGTTCCAGCAGAAACCTGG | | INSDLAWFQQKPGQAPRLLMFGASARAA | | | |
| | CCAGGCTCCCAGGCTCCTCATGTTTGGTGCGTCTGCCAGGGCCGCTGGTATCCCAGCCAGG | | GIPARFGGSGSGTEFTLTISGLQSEDFA | | | |
| | TTCGGTGGCAGTGGGTCTGGGACAGAGTTCACTCTCACCATCAGCGGCCTGCAGTCTGAAG | | VYYCLQYHNRPPWTFGQGTKVEIK | | | |
| | ATTTTGCAGTTTATTACTGTCTGCAGTATCATAACAGGCCTCCGTGGACGTTCGGCCAAGG | | | | | |
| | GACCAAGGTGGAAATCAAA | | | | | |
| ADI-75698 | CAGTCTGTGTTGACGCAGCCGCCCTCAGTGTCTGGGGCCCCAGGGCAGAGGGTCACAATCT | 3157 | QSVLTQPPSVSGAPGQRVTISCTGSSSN | 3439 | | |
| | CCTGCACTGGGAGCAGCTCCAACATCGGGGCAGGTTATGATGTACACTGGTACCAGCAGCT | | IGAGYDVHWYQQLPGTAPKLLIYGNTHR | | | |
| | TCCAGGAACAGCCCCCAAACTCCTCATTTATGGTAACACCCATCGGCCCTCAGGGGTCCCT | | PSGVPDRFSGSKSGTSASLAITGLQAED | | | |
| | GACCGATTCTCTGGCTCCAAGTCTGGCACCTCAGCCTCCCTGGCCATCACTGGACTCCAGG | | EADYYCQSYDSSLIGSVFGGGTKLTVL | | | |
| | CTGAGGATGAGGCTGATTATTACTGCCAGTCCTATGACAGCAGCCTGATTGGTTCGGTGTT | | | | | |
| | CGGCGGAGGGACCAAGCTCACCGTCCTA | | | | | |
| ADI-75878 | GAAATGACAATGACGCAGTCTCCAGCCACCCTGTCTGTGTCTCCAGGGGAAAGAGCCACCC | 3158 | EMTMTQSPATLSVSPGERATLSCRASQS | 3440 | | |
| | TCTCCTGCAGGGCCAGTCAGAGTGTTAGCACCAACTTAGCCTGGTACCAGCAGAAACCTGG | | VSTNLAWYQQKPGQAPRLLIYGASTRAT | | | |
| | CCAGGCTCCCAGGCTCCTCATCTATGGTGCATCCACCAGGGCCACTGGTATCCCAGCCAGG | | GIPARFSGSGSGTEFTLTISSLQSEDFA | | | |
| | TTCAGTGGCAGTGGGTCTGGGACAGAGTTCACTCTCACCATCAGCAGCCTGCAGTCTGAAG | | VYYCQQYDNWPPTWTFGQGTKVEIK | | | |
| | ATTTTGCAGTTTATTACTGTCAACAGTATGATAACTGGCCTCCCACGTGGACGTTCGGCCA | | | | | |
| | AGGGACCAAGGTGGAAATCAAA | | | | | |
| ADI-75718 | GAAATGACACTGACGCAGTCTCCAGCCACCCTGTCTGTGTCTCCAGGGGAGACAGTCACCC | 3159 | EMTLTQSPATLSVSPGETVTLSCRASQS | 3441 | | |
| | TCTCCTGCAGGGCCAGTCAGAGTCTCAGTAATAAGTTAGCCTGGTACCAACAGAGACCTGG | | LSNKLAWYQQRPGQAPTLLIHGASGRAT | | | |
| | CCAGGCTCCCACCCTCCTCATCCATGGTGCTTCCGGCAGGGCCACTGGTCTCCCAGACCGG | | GLPDRFSGSGYGTEFTLTIRRLQSEDFA | | | |
| | TTCAGTGGCAGTGGGTATGGGACAGAGTTCACTCTCACCATCCGCCGCCTGCAGTCTGAAG | | VYYCQQYDSWPRTFGQGTKVEIK | | | |
| | ACTTTGCAGTTTATTACTGTCAGCAGTATGATTCCTGGCCTCGGACGTTCGGCCAAGGGAC | | | | | |
| | CAAGGTGGAAATCAAA | | | | | |

| | | | SEQ | | SEQ | | SEQ | | SEQ | | SEQ | | SEQ | | SEQ |
|---|---|---|---|---|---|---|---|---|---|---|---|---|---|---|---|
| | VL | VL | ID | VL | ID | VL | ID | VL | ID | VL | ID | VL | ID | VL | ID |
| Clone ID | Germline | FR1 | NO: | CDR1 | NO: | FR2 | NO: | CDR2 | NO: | FR3 | NO: | CDR3 | NO: | FR4 | NO: |
| ADI-75836 | IGLV1-40 | ------ | 2005 | LGAAPTS | 2204 | GTSSFQ | 2352 | GNNNRP | 2492 | GVPDRFSG | 2655 | QSYDS | 2867 | FGGGTQ | 2948 |
| | | - | | GQVMMYT | | PLAPKL | | S | | SKSGTSAS | | RLSGV | | LTVL | |
| | | QCLGPQ | | | | LIY | | | | LAVTGLQA | | V | | | |
| | | GRGSPS | | | | | | | | EDEADYYC | | | | | |
| | | PA | | | | | | | | | | | | | |
| ADI-75574 | IGLV1-36 | QSVLTQ | 1989 | SGSSSNI | 2205 | WYQQLP | 2353 | YDHLLP | 2493 | GVSDRFSG | 2656 | AAWDD | 2868 | FGGGTK | 2939 |
| | | PPSVSE | | GKNAVN | | AQAPKL | | S | | SRSGTSAS | | SLNGL | | LTVL | |
| | | APRQRV | | | | LIY | | | | LAISGLQS | | V | | | |
| | | TISC | | | | | | | | EDEADYYC | | | | | |
| ADI-75620 | IGLV1-36 | QHELTQ | 2006 | SGSSANI | 2206 | WYQQLP | 2301 | YDDLLP | 2433 | GVSDRFSG | 2578 | ASWDD | 2869 | FGGGTK | 2939 |
| | | PPSVSE | | GHNAVN | | GKAPKL | | S | | SKSGTSAS | | RLNGP | | LTVL | |
| | | APRQRV | | | | LIY | | | | LAISGLQS | | V | | | |
| | | TISC | | | | | | | | EDEADYYC | | | | | |
| ADI-75634 | IGKV4-1 | TIVMTQ | 2007 | RSSQSVL | 2207 | WYQQKP | 2290 | WASTRE | 2422 | GVPDRFSG | 2632 | QQYYS | 2832 | FGPGTK | 2942 |
| | | SPDSVA | | YSSNNKN | | GQPPKL | | S | | SGSGTHFT | | SPPT | | VEIK | |
| | | VSLGER | | YLT | | LIY | | | | LTISSLQA | | | | | |
| | | ATINC | | | | | | | | EDVAVYYC | | | | | |
| ADI-75629 | IGKV1D- | EIQMTQ | 1881 | RASQSIS | 2050 | WYQQKP | 2354 | AASSLQ | 2391 | GVPSRFSG | 2657 | QQGYS | 2870 | FGQGTK | 2937 |
| | 39 | SPSSLS | | SYLN | | GKAPKL | | S | | SGSGTDFT | | TPYT | | VEIK | |
| | | ASVGDR | | | | LIN | | | | LTISSLQP | | | | | |
| | | VTITC | | | | | | | | EDFATYHC | | | | | |
| ADI-75834 | IGLV3-21 | SYVLTQ | 1883 | GGNNIGS | 2208 | WYQQKP | 2283 | DNSDRP | 2494 | GIPARFSG | 2658 | HVWDS | 2871 | FGTGTQ | 2943 |
| | | PPSVSV | | KSVH | | GQAPVL | | S | | SNSGNTAT | | SSDLH | | LTVL | |
| | | APGQTA | | | | VVY | | | | LTISRVEV | | V | | | |
| | | RITC | | | | | | | | GDEADYHC | | | | | |
| ADI-75747 | IGLV1-40 | QSVVTQ | 1972 | TGSNSNI | 2143 | WYQQLP | 2314 | DNNNRP | 2476 | GVPDRFSG | 2622 | QSYDS | 2872 | FGGGTQ | 2948 |
| | | PPSVSG | | GAGYDVH | | GTAPKL | | S | | SKSDTSAS | | SLIGS | | LTVL | |
| | | APGQRV | | | | LIY | | | | LAITGLQA | | L | | | |
| | | TISC | | | | | | | | EDEADYYC | | | | | |
| ADI-75648 | IGLV1-40 | QSVVTQ | 1972 | AGSNSNI | 2209 | WYQQLP | 2355 | GNTNRP | 2484 | GVPDRFSG | 2622 | QSYDS | 2840 | FGGGTK | 2939 |
| | | PPSVSG | | GAGYDVH | | GTAPQL | | S | | SKSDTSAS | | SLSDS | | LTVL | |
| | | APGQRV | | | | LIY | | | | LAITGLQA | | V | | | |
| | | TISC | | | | | | | | EDEADYYC | | | | | |
| ADI-75862 | IGLV2-11 | QSVLTQ | 2008 | TGNSSDV | 2210 | WYQQHP | 2356 | DVTKRP | 2495 | GVPNRFSG | 2659 | CSYSG | 2873 | FGPGTQ | 2957 |
| | | PRSVSG | | GDYNYVS | | GTAPKL | | S | | SKSGNTAS | | TYIPL | | LTVL | |
| | | SPGQSV | | | | MIY | | | | LTISGLQA | | I | | | |
| | | TISC | | | | | | | | EDEADYSC | | | | | |
| ADI-75693 | IGLV3-21 | SYVLTQ | 1883 | GGNNIGS | 2208 | WYQQKP | 2283 | DDSDRP | 2399 | GIPERFSG | 2660 | QVWDG | 2874 | FGTGTK | 2945 |
| | | PPSVSV | | KSVH | | GQAPVL | | S | | SNSGNTAT | | SSDHF | | VTVL | |
| | | APGQTA | | | | VVY | | | | LTISRVEV | | YV | | | |
| | | RITC | | | | | | | | GDEADYYC | | | | | |
| ADI-75842 | IGLV2-8 | EPVLTQ | 2009 | TRTSNDV | 2211 | WYQLHP | 2357 | EVNKRP | 2394 | GVPDRFSG | 2651 | SSHTV | 2875 | FGAGTK | 2958 |
| | | PPSASG | | GNYNYVS | | GKAPKA | | S | | SKSGNTAS | | NNNFV | | LTVL | |
| | | SPGQSV | | | | LIY | | | | LTISGLQA | | | | | |
| | | TISC | | | | | | | | EDEADYYC | | | | | |

| | | SEQ | | SEQ | Reverted | SEQ |
|---|---|---|---|---|---|---|
| | | ID | | ID | VL | ID |
| Clone ID | VL DNA | NO: | VL Protein | NO: | Protein | NO: |
| ADI-75836 | CAGTGTCTGGGGCCCCAGGGCAGAGGGTCACCATCTCCTGCACTGGGAGCAGCTCCAACAT | 3160 | QCLGPQGRGSPSPALGAAPTSGQVMMYT | 3442 | | |
| | CGGGGCAGGTTATGATGTACACTGGTACCAGCAGCTTCCAGCCCCTAGCCCCCAAACTCCT | | GTSSFQPLAPKLLIYGNNNRPSGVPDRF | | | |
| | CATCTATGGTAATAACAATCGGCCCTCAGGGGTCCCTGACCGATTCTCTGGCTCCAAGTCT | | SGSKSGTSASLAVTGLQAEDEADYYCQS | | | |
| | GGCACCTCAGCCTCCCTGGCCGTCACTGGGCTCCAGGCTGAGGATGAGGCTGATTATTACT | | YDSRLSGVVFGGGTQLTVL | | | |
| | GCCAGTCCTATGACAGCAGACTGAGTGGTGTGGTATTTGGCGGAGGGACCCAGCTCACCGT | | | | | |
| | CTTA | | | | | |
| ADI-75574 | CAGTCTGTGCTGACTCAGCCCCCCTCGGTGTCTGAAGCCCCCAGGCAGAGGGTCACCATCT | 3161 | QSVLTQPPSVSEAPRQRVTISCSGSSSN | 3443 | | |
| | CCTGTTCTGGAAGCAGCTCCAACATCGGAAAAAATGCTGTAAACTGGTACCAGCAGCTCCC | | IGKNAVNWYQQLPAQAPKLLIYYDHLLP | | | |
| | AGCACAGGCTCCCAAACTCCTCATCTACTATGATCATCTGTTGCCCTCAGGGGTCTCTGAC | | SGVSDRFSGSRSGTSASLAISGLQSEDE | | | |
| | CGATTCTCTGGCTCCAGGTCTGGCACCTCAGCCTCCCTGGCCATCAGTGGGCTCCAGTCTG | | ADYYCAAWDDSLNGLVFGGGTKLTVL | | | |
| | AGGATGAGGCTGATTATTACTGTGCAGCATGGGATGACAGCCTGAATGGCCTTGTATTCGG | | | | | |
| | CGGAGGGACCAAGCTCACCGTCCTA | | | | | |
| ADI-75620 | CAGCATGAGCTGACTCAGCCACCCTCGGTGTCTGAAGCCCCCAGGCAGAGGGTCACCATCT | 3162 | QHELTQPPSVSEAPRQRVTISCSGSSAN | 3444 | QSVLTQPPS | 3527 |
| | CCTGTTCTGGAAGCAGCGCCAACATCGGACATAATGCTGTGAACTGGTACCAGCAGCTCCC | | IGHNAVNWYQQLPGKAPKLLIYYDDLLP | | VSEAPRQRV | |
| | AGGAAAGGCTCCCAAGCTCCTCATCTATTATGATGATCTGCTGCCCTCAGGGGTCTCTGAC | | SGVSDRFSGSKSGTSASLAISGLQSEDE | | TISCSGSSA | |
| | CGATTCTCTGGCTCCAAGTCTGGCACCTCAGCCTCCCTGGCCATCAGTGGGCTCCAGTCTG | | ADYYCASWDDRLNGPVFGGGTKLTVL | | NIGHNAVNW | |
| | AGGATGAGGCTGATTATTACTGTGCATCATGGGATGACAGGCTGAATGGTCCGGTGTTCGG | | | | YQQLPGKAP | |
| | CGGAGGGACCAAGCTGACCGTCCTA | | | | KLLIYYDDL | |
| | | | | | LPSGVSDRF | |
| | | | | | SGSKSGTSA | |
| | | | | | SLAISGLQS | |
| | | | | | EDEADYYCA | |
| | | | | | SWDDRLNGP | |
| | | | | | VFGGGTKLT | |
| | | | | | VL | |
| ADI-75634 | ACAATCGTGATGACGCAGTCTCCAGATTCCGTGGCTGTGTCTCTGGGCGAGAGGGCCACCA | 3163 | TIVMTQSPDSVAVSLGERATINCRSSQS | 3445 | | |
| | TCAACTGCAGGTCCAGCCAGAGTGTTTTATACAGCTCCAACAATAAGAATTACTTAACTTG | | VLYSSNNKNYLTWYQQKPGQPPKLLIYW | | | |
| | GTACCAGCAAAAACCAGGACAGCCTCCTAAGTTACTCATTTACTGGGCATCTACCCGGGAA | | ASTRESGVPDRFSGSGSGTHFTLTISSL | | | |
| | TCCGGGGTCCCTGACCGATTCAGTGGCAGCGGGTCTGGGACGCATTTCACTCTCACCATCA | | QAEDVAVYYCQQYYSSPPTFGPGTKVEI | | | |
| | GCAGCCTGCAGGCTGAAGATGTGGCGGTTTATTATTGTCAGCAGTATTATAGTAGTCCTCC | | K | | | |
| | CACTTTCGGCCCTGGGACCAAGGTGGAGATCAAA | | | | | |
| ADI-75629 | GAAATCCAAATGACGCAGTCTCCATCCTCCCTGTCTGCATCTGTAGGAGACAGAGTCACCA | 3164 | EIQMTQSPSSLSASVGDRVTITCRASQS | 3446 | | |
| | TCACTTGCCGGGCAAGTCAGAGCATTAGCAGCTATTTAAATTGGTATCAGCAGAAACCAGG | | ISSYLNWYQQKPGKAPKLLINAASSLQS | | | |
| | GAAAGCCCCTAAGCTCCTGATTAATGCGGCATCCAGTTTGCAAAGTGGGGTCCCATCAAGG | | GVPSRFSGSGSGTDFTLTISSLQPEDFA | | | |
| | TTCAGTGGCAGTGGATCTGGGACAGATTTCACTCTCACCATCAGCAGTCTGCAACCTGAAG | | TYHCQQGYSTPYTFGQGTKVEIK | | | |
| | ATTTTGCAACTTACCACTGTCAACAGGGATACAGTACCCCGTACACTTTTGGCCAGGGGAC | | | | | |
| | CAAGGTGGAAATCAAA | | | | | |
| ADI-75834 | TCGTATGTGCTGACTCAGCCACCCTCGGTGTCAGTGGCCCCAGGACAGACGGCCAGGATTA | 3165 | SYVLTQPPSVSVAPGQTARITCGGNNIG | 3447 | | |
| | CGTGTGGGGGAAATAACATTGGAAGTAAAAGTGTGCACTGGTACCAGCAGAAGCCCGGCCA | | SKSVHWYQQKPGQAPVLVVYDNSDRPSG | | | |
| | GGCCCCTGTGCTGGTCGTCTATGATAATAGCGACCGGCCCTCAGGGATCCCTGCGCGATTC | | IPARFSGSNSGNTATLTISRVEVGDEAD | | | |
| | TCTGGCTCCAATTCTGGGAACACGGCCACCCTGACCATCAGCAGGGTCGAAGTCGGGGATG | | YHCHVWDSSSDLHVFGTGTQLTVL | | | |
| | AGGCCGACTATCACTGTCACGTGTGGGATAGTAGTAGTGATCTTCATGTCTTCGGAACTGG | | | | | |
| | GACCCAGCTCACCGTCCTA | | | | | |
| ADI-75747 | CAGTCTGTCGTGACGCAGCCGCCCTCAGTGTCTGGGGCCCCAGGGCAGAGGGTCACCATCT | 3166 | QSVVTQPPSVSGAPGQRVTISCTGSNSN | 3448 | | |
| | CCTGCACTGGGAGCAACTCCAATATCGGGGCAGGTTATGATGTACACTGGTACCAGCAGCT | | IGAGYDVHWYQQLPGTAPKLLIYDNNNR | | | |
| | TCCAGGAACAGCCCCCAAACTCCTCATCTATGATAATAACAATCGGCCCTCAGGGGTCCCT | | PSGVPDRFSGSKSDTSASLAITGLQAED | | | |
| | GACCGATTCTCTGGCTCCAAGTCTGACACCTCAGCCTCCCTGGCCATCACTGGGCTCCAGG | | EADYYCQSYDSSLIGSLFGGGTQLTVL | | | |
| | CTGAGGATGAGGCTGATTATTACTGCCAGTCCTATGACAGCAGCCTGATTGGTTCGCTGTT | | | | | |
| | CGGCGGAGGGACCCAGCTCACCGTCCTC | | | | | |
| ADI-75648 | CAGTCTGTGGTGACTCAGCCGCCCTCAGTGTCTGGGGCCCCAGGTCAGAGGGTCACCATCT | 3167 | QSVVTQPPSVSGAPGQRVTISCAGSNSN | 3449 | | |
| | CCTGCGCTGGGAGCAACTCCAACATCGGGGCAGGTTATGATGTTCACTGGTACCAGCAGCT | | IGAGYDVHWYQQLPGTAPQLLIYGNTNR | | | |
| | TCCAGGAACAGCCCCCCAACTCCTCATCTATGGTAACACCAATCGGCCCTCAGGGGTCCCT | | PSGVPDRFSGSKSDTSASLAITGLQAED | | | |
| | GACCGGTTCTCTGGCTCCAAGTCTGACACCTCAGCCTCCCTGGCCATCACTGGGCTCCAGG | | EADYYCQSYDSSLSDSVFGGGTKLTVL | | | |
| | CTGAGGATGAGGCCGATTATTACTGCCAGTCCTATGACAGCAGCCTGAGTGATTCGGTGTT | | | | | |
| | CGGCGGAGGGACCAAGCTCACCGTCCTA | | | | | |
| ADI-75862 | CAGTCTGTGCTGACTCAGCCTCGCTCAGTGTCCGGGTCTCCTGGACAGTCAGTCACCATCT | 3168 | QSVLTQPRSVSGSPGQSVTISCTGNSSD | 3450 | | |
| | CCTGCACTGGAAATAGCAGTGATGTTGGTGATTATAATTATGTCTCCTGGTACCAACAACA | | VGDYNYVSWYQQHPGTAPKLMIYDVTKR | | | |
| | CCCCGGCACAGCCCCCAAACTCATGATTTATGATGTCACTAAGCGGCCCTCAGGGGTCCCT | | PSGVPNRFSGSKSGNTASLTISGLQAED | | | |
| | AATCGCTTCTCTGGCTCCAAGTCTGGCAACACGGCCTCCCTGACCATCTCTGGGCTCCAGG | | EADYSCCSYSGTYIPLIFGPGTQLTVL | | | |
| | CTGAGGATGAGGCTGATTATTCCTGCTGTTCATATTCAGGAACCTACATTCCTTTAATCTT | | | | | |
| | CGGACCTGGCACCCAGCTGACCGTCCTC | | | | | |
| ADI-75693 | TCGTATGTGCTGACTCAGCCACCCTCGGTGTCAGTGGCCCCAGGACAGACGGCCAGGATTA | 3169 | SYVLTQPPSVSVAPGQTARITCGGNNIG | 3451 | | |
| | CCTGTGGGGGAAACAATATTGGAAGTAAAAGTGTGCACTGGTACCAGCAGAAGCCAGGCCA | | SKSVHWYQQKPGQAPVLVVYDDSDRPSG | | | |
| | GGCCCCTGTGCTGGTCGTCTATGATGATAGCGACCGGCCCTCAGGGATCCCTGAGCGATTC | | IPERFSGSNSGNTATLTISRVEVGDEAD | | | |
| | TCTGGCTCCAACTCTGGAAACACGGCCACACTGACCATCAGCAGGGTCGAAGTCGGGGATG | | YYCQVWDGSSDHFYVFGTGTKVTVL | | | |
| | AGGCCGACTATTACTGTCAGGTGTGGGATGGTAGTAGTGATCATTTTTATGTCTTCGGAAC | | | | | |
| | TGGGACCAAGGTCACCGTCCTA | | | | | |
| ADI-75842 | GAGCCTGTGTTGACTCAGCCTCCCTCCGCGTCCGGGTCTCCTGGACAGTCAGTCACCATCT | 3170 | EPVLTQPPSASGSPGQSVTISCTRTSND | 3452 | | |
| | CCTGCACTAGAACCAGCAATGACGTTGGTAATTATAACTATGTCTCCTGGTACCAGCTGCA | | VGNYNYVSWYQLHPGKAPKALIYEVNKR | | | |
| | CCCAGGCAAAGCCCCCAAAGCCTTGATTTATGAGGTCAATAAGCGGCCCTCAGGGGTCCCT | | PSGVPDRFSGSKSGNTASLTISGLQAED | | | |
| | GATCGCTTCTCTGGCTCCAAGTCTGGCAACACGGCCTCCCTGACCATCTCTGGGCTCCAGG | | EADYYCSSHTVNNNFVFGAGTKLTVL | | | |
| | CTGAGGATGAGGCTGATTATTACTGCAGCTCACATACAGTCAATAACAATTTTGTCTTCGG | | | | | |
| | AGCTGGGACCAAGCTCACCGTCCTA | | | | | |

| | | | SEQ | | SEQ | | SEQ | | SEQ | | SEQ | | SEQ | | SEQ |
|---|---|---|---|---|---|---|---|---|---|---|---|---|---|---|---|
| | VL | VL | ID | VL | ID | VL | ID | VL | ID | VL | ID | VL | ID | VL | ID |
| Clone ID | Germline | FR1 | NO: | CDR1 | NO: | FR2 | NO: | CDR2 | NO: | FR3 | NO: | CDR3 | NO: | FR4 | NO: |
| ADI-75828 | IGLV3-21 | QSVLTQ | 2010 | GGNNIGS | 2208 | WYQQKP | 2358 | DDSDRP | 2399 | GIPERFSG | 2545 | QVWDS | 2876 | FGGGTK | 2939 |
| | | PPSVSV | | KSVH | | GQAPVL | | S | | SNSGNTAT | | SSDLH | | LTVL | |
| | | APGQTA | | | | VVN | | | | LTISRVEA | | W | | | |
| | | RITC | | | | | | | | GDEADYYC | | | | | |
| ADI-75632 | IGLV1-40 | SAVLTQ | 2011 | TGSSSNI | 2201 | WYQQLP | 2359 | GNSNRP | 2477 | GVPDRFSG | 2661 | QSYDS | 2877 | FGGGTK | 2939 |
| | | PPSVSG | | GAGYDVH | | RTAPKL | | S | | SKSGTSAS | | SASGS | | LTVL | |
| | | APGQRI | | | | LIY | | | | LAITGVQG | | V | | | |
| | | TISC | | | | | | | | EDEGDYYC | | | | | |
| ADI-75855 | IGKV1-33 | DIQMTQ | 1878 | QASQDIS | 2212 | WYQQKP | 2257 | DASNLE | 2416 | GVPSRFSG | 2662 | QQYDN | 2878 | FGQGTR | 2940 |
| | | SPSSLS | | NYLN | | GKAPKL | | T | | SGSGTEFT | | LPII | | LEIK | |
| | | ASVGDR | | | | LIY | | | | FTINSLQP | | | | | |
| | | VTITC | | | | | | | | EDIATYYC | | | | | |
| ADI-75729 | IGLV1-40 | QYVVTQ | 2012 | TESRSNI | 2213 | GYQQFP | 2360 | GNNIRP | 2496 | RVHDRLFG | 2663 | QSYDS | 2879 | FGIGTK | 2959 |
| | | PPSVFG | | GAGFDVQ | | GTAPKL | | S | | SKCDTSAS | | MLSDP | | VTVL | |
| | | ARGQRV | | | | IIY | | | | MAITGIQG | | YV | | | |
| | | TISC | | | | | | | | EDEAYYYC | | | | | |
| ADI-75734 | IGKV1D- | DIQLTQ | 1876 | RASHRID | 2098 | WYQQKP | 2291 | VASTLQ | 2423 | GVPSRFTG | 2551 | QQSYT | 2752 | FGPGTK | 2942 |
| | 39 | SPSSLS | | RYLN | | GQAPKL | | S | | SGSGTDFT | | TPRT | | VEIK | |
| | | ASVGDR | | | | LIY | | | | LTISSLQP | | | | | |
| | | VTITC | | | | | | | | EDFATYYC | | | | | |
| ADI-75880 | IGLV1-44 | SYELTQ | 1962 | SGSTSNI | 2214 | WYQHLP | 2307 | SDDLRP | 2497 | GVPDRFSG | 2664 | ATWDD | 2880 | FGGGTQ | 2948 |
| | | PPSASG | | GSNTVK | | GTAPKL | | S | | SKSGTSAS | | TLAGP | | LTVL | |
| | | TPGQRV | | | | LIY | | | | LAISALQS | | V | | | |
| | | TISC | | | | | | | | EDESHYYC | | | | | |
| ADI-75724 | IGLV3-21 | SYVLTQ | 2013 | GGNNIGT | 2215 | WYQQKP | 2304 | YDSDRP | 2498 | GTPERFSG | 2665 | QVWDS | 2881 | FGEGTK | 2960 |
| | | PPSVSV | | KSVH | | GQAPVL | | S | | SNSGNTAT | | NSDHR | | VTVL | |
| | | APGKTA | | | | VIY | | | | LTISRVEA | | V | | | |
| | | SLTC | | | | | | | | GDEADYYC | | | | | |
| ADI-75737 | IGLV1-40 | QSVVTQ | 2014 | TGSSSNI | 2201 | WYQQVP | 2361 | RNTHRP | 2499 | GVPDRFSG | 2666 | QSYDS | 2840 | FGGGTK | 2947 |
| | | PPSVSG | | GAGYDVH | | GKAPTL | | S | | SRSGTSAS | | SLSDS | | VTVL | |
| | | APGQRV | | | | LIY | | | | LAITGLQA | | V | | | |
| | | TIPC | | | | | | | | EDEADYYC | | | | | |
| ADI-75610 | IGLV3-21 | ETTLTQ | 2015 | EGDNIGR | 2216 | WYQQKP | 2362 | GDGDRP | 2500 | GIPERLSG | 2667 | QVWDS | 2882 | FGGGTQ | 2948 |
| | | SPSVSV | | KSVH | | AQAPVL | | S | | STSGNTAT | | SSDLV | | LTVL | |
| | | APGQTA | | | | VVY | | | | LTISRVEA | | L | | | |
| | | RITC | | | | | | | | GDEADYYC | | | | | |
| ADI-75603 | IGLV1-44 | SYELTQ | 1962 | SGSSSNI | 2217 | WYQQLP | 2314 | SNNQRP | 2463 | GIPDRFSG | 2668 | AAWDD | 2883 | FGGGTK | 2947 |
| | | PPSASG | | GSNTVN | | GTAPKL | | S | | SKSGTSAS | | SLNGR | | VTVL | |
| | | TPGQRV | | | | LIY | | | | LVISGLQS | | LL | | | |
| | | TISC | | | | | | | | EDEAGYYC | | | | | |
| ADI-75649 | IGLV1-47 | SYELTQ | 1962 | SGSSSNI | 2218 | WYQQLP | 2314 | GDIQRP | 2501 | GVPDRFSG | 2669 | ATRDD | 2884 | FGGGTQ | 2948 |
| | | PPSASG | | GSNYVC | | GTAPKL | | S | | SKSGTSAS | | GRWV | | LTVL | |
| | | TPGQRV | | | | LIY | | | | LAISGLRS | | | | | |
| | | TISC | | | | | | | | EDEADYYC | | | | | |
| ADI-75625 | IGKV1D- | DIQMTQ | 1878 | RASQSTS | 2219 | WYQQKP | 2257 | AASTLQ | 2392 | GVPSRFSG | 2534 | QQSYT | 2885 | FGQGTK | 2937 |
| | 39 | SPSSLS | | IYLN | | GKAPKL | | S | | SGSGTDFT | | TRWT | | VEIK | |
| | | ASVGDR | | | | LIY | | | | LTISSLQP | | | | | |
| | | VTITC | | | | | | | | EDFATYYC | | | | | |

| | | SEQ | | SEQ | Reverted | SEQ |
|---|---|---|---|---|---|---|
| | | ID | | ID | VL | ID |
| Clone ID | VL DNA | NO: | VL Protein | NO: | Protein | NO: |
| ADI-75828 | CAGTCTGTGCTGACTCAGCCACCCTCGGTGTCAGTGGCCCCAGGACAGACGGCCAGAATTA | 3171 | SKSVHWYQQKPGQAPVLVVNDDSDRPSG | 3453 | | |
| | CCTGTGGGGGAAACAACATTGGAAGTAAAAGTGTGCACTGGTACCAGCAGAAGCCAGGCCA | | IPERFSGSNSGNTATLTISRVEAGDEAD | | | |
| | GGCCCCTGTGCTGGTCGTCAATGATGATAGCGACCGGCCCTCAGGGATCCCTGAGCGATTC | | YYCQVWDSSSDLHVVFGGGTKLTVL | | | |
| | TCTGGCTCCAACTCTGGGAACACGGCCACCCTGACCATCAGCAGGGTCGAAGCCGGGGATG | | QSVLTQPPSVSVAPGQTARITCGGNNIG | | | |
| | AGGCCGACTATTACTGTCAGGTGTGGGATAGTAGTAGTGATCTTCATGTGGTATTCGGCGG | | | | | |
| | AGGGACCAAGCTCACCGTCCTA | | | | | |
| ADI-75632 | TCAGCTGTGCTGACTCAGCCACCCTCAGTGTCTGGGGCCCCAGGGCAGAGGATCACCATCT | 3172 | SAVLTQPPSVSGAPGQRITISCTGSSSN | 3454 | | |
| | CCTGCACTGGGAGCAGCTCCAACATCGGGGCAGGTTATGATGTACACTGGTACCAGCAGCT | | IGAGYDVHWYQQLPRTAPKLLIYGNSNR | | | |
| | TCCACGAACAGCCCCCAAACTCCTCATATATGGTAACAGCAATCGGCCCTCAGGGGTCCCT | | PSGVPDRFSGSKSGTSASLAITGVQGED | | | |
| | GACAGATTCTCTGGGTCCAAGTCTGGCACATCAGCCTCCCTGGCCATCACTGGGGTCCAGG | | EGDYYCQSYDSSASGSVFGGGTKLTVL | | | |
| | GTGAGGATGAGGGTGATTATTACTGCCAGTCGTATGACAGCAGCGCGAGTGGTTCGGTGTT | | | | | |
| | CGGCGGAGGGACCAAGCTCACCGTCCTA | | | | | |
| ADI-75855 | GACATCCAGATGACCCAGTCTCCATCCTCCCTGTCTGCATCTGTAGGAGACAGAGTCACCA | 3173 | DIQMTQSPSSLSASVGDRVTITCQASQD | 3455 | | |
| | TCACTTGCCAGGCGAGTCAGGACATTAGCAACTATTTAAATTGGTATCAGCAGAAACCAGG | | ISNYLNWYQQKPGKAPKLLIYDASNLET | | | |
| | GAAAGCCCCTAAGCTCCTGATCTACGATGCATCCAATTTGGAAACAGGGGTCCCATCAAGG | | GVPSRFSGSGSGTEFTFTINSLQPEDIA | | | |
| | TTCAGTGGAAGTGGATCTGGGACAGAATTTACTTTCACCATCAACAGCCTGCAGCCTGAAG | | TYYCQQYDNLPIIFGQGTRLEIK | | | |
| | ATATTGCAACATATTACTGTCAACAGTATGATAATCTCCCGATCATCTTCGGCCAAGGGAC | | | | | |
| | ACGACTGGAGATTAAA | | | | | |
| ADI-75729 | CAGTATGTGGTGACGCAGCCGCCTTCAGTGTTTGGGGCCAGAGGGCAGAGGGTCACCATCT | 3174 | QYVVTQPPSVFGARGQRVTISCTESRSN | 3456 | | |
| | CATGCACTGAGAGCAGATCCAACATCGGGGCAGGTTTTGATGTACAAGGGTACCAGCAATT | | IGAGFDVQGYQQFPGTAPKLIIYGNNIR | | | |
| | TCCAGGCACAGCCCCCAAACTCATCATCTATGGTAACAACATTCGGCCGTCACGGGTCCAT | | PSRVHDRLFGSKCDTSASMAITGIQGED | | | |
| | GACCGATTGTTTGGCTCCAAGTGTGACACCTCAGCCTCCATGGCCATCACTGGGATCCAGG | | EAYYYCQSYDSMLSDPYVFGIGTKVTVL | | | |
| | GTGAGGATGAGGCTTATTATTACTGCCAGTCCTATGACAGTATGCTGAGTGACCCTTATGT | | | | | |
| | TTTCGGAATAGGGACCAAGGTAACCGTCTTA | | | | | |
| ADI-75734 | GACATCCAGTTGACCCAGTCTCCATCCTCCCTGTCTGCATCTGTAGGAGACAGAGTCACCA | 3175 | DIQLTQSPSSLSASVGDRVTITCRASHR | 3457 | | |
| | TCACTTGTCGGGCAAGTCACAGGATTGACAGGTATTTAAATTGGTATCAGCAGAAACCAGG | | IDRYLNWYQQKPGQAPKLLIYVASTLQS | | | |
| | GCAAGCCCCCAAGCTCCTGATCTATGTAGCATCCACTTTGCAAAGTGGGGTCCCATCAAGG | | GVPSRFTGSGSGTDFTLTISSLQPEDFA | | | |
| | TTCACTGGCAGTGGATCTGGGACAGATTTCACTCTCACTATCAGCAGTCTGCAACCTGAGG | | TYYCQQSYTTPRTFGPGTKVEIK | | | |
| | ATTTTGCAACTTACTACTGTCAACAGAGTTACACTACCCCTCGGACTTTCGGCCCTGGGAC | | | | | |
| | CAAGGTGGAAATCAAA | | | | | |
| ADI-75880 | TCGTATGAGCTGACTCAGCCACCCTCAGCGTCTGGGACCCCCGGGCAGAGGGTCACCATCT | 3176 | SYELTQPPSASGTPGQRVTISCSGSTSN | 3458 | | |
| | CTTGTTCTGGAAGCACCTCCAACATCGGGAGTAATACTGTAAAATGGTACCAGCACCTCCC | | IGSNTVKWYQHLPGTAPKLLIYSDDLRP | | | |
| | AGGAACGGCCCCCAAACTCCTCATCTATAGTGATGATCTGCGACCCTCAGGGGTCCCTGAC | | SGVPDRFSGSKSGTSASLAISALQSEDE | | | |
| | CGATTCTCTGGCTCCAAGTCTGGCACCTCAGCCTCCCTGGCCATCAGTGCGCTCCAGTCTG | | SHYYCATWDDTLAGPVFGGGTQLTVL | | | |
| | AGGATGAGTCTCATTATTACTGTGCAACGTGGGATGACACTTTGGCTGGTCCGGTGTTCGG | | | | | |
| | CGGAGGCACCCAGCTCACCGTCCTA | | | | | |
| ADI-75724 | TCGTATGTGCTGACTCAGCCCCCCTCAGTGTCAGTGGCCCCAGGAAAGACGGCCAGCCTTA | 3177 | TKSVHWYQQKPGQAPVLVIYYDSDRPSG | 3459 | | |
| | CCTGTGGGGGAAACAACATTGGAACTAAGAGTGTGCACTGGTACCAGCAGAAGCCAGGCCA | | TPERFSGSNSGNTATLTISRVEAGDEAD | | | |
| | GGCCCCTGTGCTGGTCATCTATTATGATAGCGACCGGCCCTCAGGGACCCCTGAGCGATTC | | YYCQVWDSNSDHRVFGEGTKVTVL | | | |
| | TCTGGCTCCAACTCTGGGAACACGGCCACCCTGACCATCAGCAGGGTCGAAGCCGGGGATG | | SYVLTQPPSVSVAPGKTASLTCGGNNIG | | | |
| | AGGCCGACTATTACTGTCAGGTGTGGGATAGTAATAGTGATCATCGGGTCTTCGGCGAAGG | | | | | |
| | GACCAAGGTGACCGTCCTA | | | | | |
| ADI-75737 | CAGTCTGTCGTGACGCAGCCGCCCTCAGTGTCTGGGGCCCCAGGGCAGAGGGTCACCATCC | 3178 | QSVVTQPPSVSGAPGQRVTIPCTGSSSN | 3460 | | |
| | CCTGCACTGGGAGCAGCTCCAACATCGGGGCAGGTTATGATGTTCACTGGTACCAGCAGGT | | IGAGYDVHWYQQVPGKAPTLLIYRNTHR | | | |
| | CCCGGGAAAAGCCCCCACACTCCTCATCTATCGTAACACTCATCGGCCCTCAGGGGTCCCT | | PSGVPDRFSGSRSGTSASLAITGLQAED | | | |
| | GACCGATTCTCTGGCTCCAGGTCTGGCACCTCAGCCTCCCTGGCCATCACTGGACTCCAGG | | EADYYCQSYDSSLSDSVFGGGTKVTVL | | | |
| | CTGAGGATGAGGCTGATTATTACTGCCAGTCCTATGACAGCAGCCTGAGTGATTCGGTGTT | | | | | |
| | CGGCGGAGGGACCAAGGTCACCGTCCTA | | | | | |
| ADI-75610 | GAAACGACACTCACGCAGTCTCCTTCGGTGTCAGTGGCCCCAGGACAGACGGCCAGGATTA | 3179 | ETTLTQSPSVSVAPGQTARITCEGDNIG | 3461 | | |
| | CCTGTGAGGGAGACAACATTGGAAGGAAAAGTGTGCACTGGTACCAGCAGAAGCCAGCCCA | | RKSVHWYQQKPAQAPVLVVYGDGDRPSG | | | |
| | GGCCCCTGTGCTTGTCGTCTATGGTGATGGCGACCGGCCCTCAGGGATCCCTGAGCGACTC | | IPERLSGSTSGNTATLTISRVEAGDEAD | | | |
| | TCTGGCTCCACCTCTGGGAACACGGCCACCCTGACCATCAGCAGGGTCGAAGCCGGGGATG | | YYCQVWDSSSDLVLFGGGTQLTVL | | | |
| | AGGCCGACTATTACTGTCAGGTGTGGGACAGTAGTAGTGATCTCGTGCTGTTCGGCGGAGG | | | | | |
| | CACCCAGCTGACCGTCCTC | | | | | |
| ADI-75603 | TCCTATGAGCTGACACAGCCACCCTCGGCGTCTGGGACCCCCGGGCAGAGGGTCACCATCT | 3180 | SYELTQPPSASGTPGQRVTISCSGSSSN | 3462 | | |
| | CTTGTTCTGGAAGCAGCTCCAACATCGGAAGTAATACTGTAAACTGGTACCAGCAACTCCC | | IGSNTVNWYQQLPGTAPKLLIYSNNQRP | | | |
| | AGGAACGGCCCCCAAACTCCTCATCTATAGTAATAATCAGCGGCCCTCAGGGATCCCTGAC | | SGIPDRFSGSKSGTSASLVISGLQSEDE | | | |
| | CGATTCTCTGGCTCCAAGTCTGGCACCTCCGCCTCCCTGGTCATCAGTGGGCTCCAGTCTG | | AGYYCAAWDDSLNGRLLFGGGTKVTVL | | | |
| | AGGATGAGGCTGGTTATTACTGTGCAGCATGGGATGACAGCCTGAATGGTCGTCTACTATT | | | | | |
| | CGGCGGAGGGACCAAGGTGACCGTCCTA | | | | | |
| ADI-75649 | TCCTATGAGCTGACTCAGCCACCCTCAGCGTCTGGGACCCCCGGGCAGAGGGTCACCATCT | 3181 | SYELTQPPSASGTPGQRVTISCSGSSSN | 3463 | | |
| | CTTGTTCTGGAAGCAGCTCCAACATCGGAAGTAATTATGTATGCTGGTACCAGCAGCTCCC | | IGSNYVCWYQQLPGTAPKLLIYGDIQRP | | | |
| | AGGAACGGCCCCCAAACTCCTCATCTATGGTGATATTCAGCGGCCCTCAGGGGTCCCTGAC | | SGVPDRFSGSKSGTSASLAISGLRSEDE | | | |
| | CGATTCTCTGGCTCCAAGTCTGGCACCTCAGCCTCCCTGGCCATCAGTGGGCTCCGGTCCG | | ADYYCATRDDGRWVFGGGTQLTVL | | | |
| | AAGATGAGGCTGATTATTACTGTGCAACACGGGATGACGGCCGTTGGGTGTTCGGCGGAGG | | | | | |
| | GACCCAGCTGACCGTCCTA | | | | | |
| ADI-75625 | GACATCCAGATGACCCAGTCTCCATCCTCCCTGTCTGCATCTGTGGGAGACAGAGTCACCA | 3182 | DIQMTQSPSSLSASVGDRVTITCRASQS | 3464 | | |
| | TCACTTGCCGGGCAAGTCAGAGCACTAGCATCTATTTAAATTGGTATCAGCAGAAACCAGG | | TSIYLNWYQQKPGKAPKLLIYAASTLQS | | | |
| | GAAAGCCCCTAAGCTCCTAATCTATGCTGCATCCACTTTACAAAGTGGGGTCCCATCAAGG | | GVPSRFSGSGSGTDFTLTISSLQPEDFA | | | |
| | TTCAGTGGCAGTGGATCTGGGACAGATTTCACTCTCACCATCAGCAGTCTGCAACCTGAAG | | TYYCQQSYTTRWTFGQGTKVEIK | | | |
| | ATTTTGCAACTTACTACTGTCAACAGAGTTACACTACCCGGTGGACGTTCGGCCAAGGGAC | | | | | |
| | CAAGGTGGAAATCAAA | | | | | |

| | | | SEQ | | SEQ | | SEQ | | SEQ | | SEQ | | SEQ | | SEQ |
|---|---|---|---|---|---|---|---|---|---|---|---|---|---|---|---|
| | VL | VL | ID | VL | ID | VL | ID | VL | ID | VL | ID | VL | ID | VL | ID |
| Clone ID | Germline | FR1 | NO: | CDR1 | NO: | FR2 | NO: | CDR2 | NO: | FR3 | NO: | CDR3 | NO: | FR4 | NO: |
| ADI-75589 | IGLV6-57 | KFMLTQ | 2016 | TGSSGSI | 2220 | WYQQRP | 2363 | EDDQRP | 2502 | GVPDRFSG | 2574 | QSYHS | 2886 | FGGGTK | 2939 |
| | | PHSVSE | | ANNYVQ | | GRAPTT | | S | | SIDSSSNS | | RNLWV | | LTVL | |
| | | APGKTV | | | | IIY | | | | ASLTISGL | | | | | |
| | | TISC | | | | | | | | KTEDEADY | | | | | |
| | | | | | | | | | | YC | | | | | |
| ADI-75763 | IGLV3-21 | QSVLTQ | 2017 | GGNSIGS | 2221 | WYQQKP | 2364 | DARDRP | 2503 | GIPERFSG | 2670 | QVWDS | 2887 | FGTGTK | 2949 |
| | | PPSVSV | | KSVH | | GQAPVL | | S | | SNSVNTAT | | SSDHY | | LTVL | |
| | | APGQTA | | | | VVS | | | | LTISRVEA | | V | | | |
| | | RIAC | | | | | | | | GDEADYYC | | | | | |
| ADI-75582 | IGLV3-1 | QPVLTQ | 2018 | SGDKLGD | 2222 | WYQKKP | 2365 | QDSERP | 2504 | GIPERFSG | 2671 | QAWDS | 2888 | FGGGTK | 2947 |
| | | PPSVSV | | KYAC | | GQSPVL | | S | | SNSGNTAT | | STAHW | | VTVL | |
| | | SPGQTA | | | | VIY | | | | LTISGTQA | | V | | | |
| | | TITC | | | | | | | | MDEADYYC | | | | | |
| ADI-75746 | IGLV6-57 | NFMLTQ | 1992 | TRSSGSI | 2109 | WYQQRP | 2366 | EDNERP | 2505 | GVPDRFSG | 2672 | QSYAS | 2889 | FGGGTK | 2939 |
| | | PHSVSE | | ASNYVQ | | GSAPTT | | S | | SIDRSSNS | | SPFYW | | LTVL | |
| | | SPGKTV | | | | VIF | | | | ASLTISAL | | V | | | |
| | | TISC | | | | | | | | KTEDEADY | | | | | |
| | | | | | | | | | | YC | | | | | |
| ADI-75726 | IGKV1D- | DIQVTQ | 2019 | RASQNIV | 2223 | WYQQKP | 2367 | AASSLQ | 2391 | GVPSRFSG | 2534 | QQSYS | 2729 | FGQGTK | 2944 |
| | 39 | SPSSLS | | SYLN | | GKAPKL | | S | | SGSGTDFT | | TPRT | | VDIK | |
| | | ASVGDR | | | | LMF | | | | LTISSLQP | | | | | |
| | | VTITC | | | | | | | | EDFATYYC | | | | | |
| ADI-75851 | IGLV3-21 | SYELTQ | 1919 | GGNNIGS | 2208 | WYQQKP | 2283 | DDSDRP | 2399 | GIPERFSG | 2673 | QVWDS | 2890 | FGTGTK | 2949 |
| | | PPSVSV | | KSVH | | GQAPVL | | S | | SNSGNTAT | | SSVHY | | LTVL | |
| | | APGQTA | | | | VVY | | | | LTISRVEV | | V | | | |
| | | RITC | | | | | | | | GDEADYFC | | | | | |
| ADI-75853 | IGKV1D- | DIEMTQ | 2020 | RASQSIS | 2134 | WYQQKP | 2257 | AASSLQ | 2391 | GVPSRFSG | 2534 | QQSYR | 2891 | FGPGTK | 2942 |
| | 39 | SPSSLS | | RYLN | | GKAPKL | | S | | SGSGTDFT | | TPPLT | | VEIK | |
| | | ASVGDR | | | | LIY | | | | LTISSLQP | | | | | |
| | | VTISC | | | | | | | | EDFATYYC | | | | | |
| ADI-75863 | IGLV3-21 | SYVLTQ | 2021 | GGNNIGS | 2208 | WYQQKP | 2283 | DDSDRP | 2399 | GIPERFSG | 2674 | QVWDS | 2892 | FGGGTK | 2939 |
| | | PPSVSV | | KSVH | | GQAPVL | | S | | SSSGNTAT | | SSDLV | | LTVL | |
| | | APGQTA | | | | WVY | | | | LTLSRVEA | | I | | | |
| | | RIPC | | | | | | | | GDEADYYC | | | | | |
| ADI-75753 | IGLV1-40 | QSVLTQ | 1948 | T- | 2224 | WYQQFP | 2368 | GNNIRP | 2496 | GVPDRFSG | 2599 | QSSDT | 2893 | FGGGTQ | 2948 |
| | | PPSVSG | | ASSNIGA | | GRAPKL | | S | | SKSGTSAS | | SLSDW | | LTVL | |
| | | APGQRV | | GYDVH | | LIY | | | | LAITGLQA | | V | | | |
| | | TISC | | | | | | | | EDEADYYC | | | | | |
| ADI-75756 | IGKV1D- | ASVGDR | 1881 | RASQSIS | 2225 | WYQQKP | 2257 | TASSLQ | 2506 | GVPSRFSG | 2606 | QQSYE | 2894 | FGQGTK | 2937 |
| | 39 | EIQMTQ | | RHLN | | GKAPKL | | S | | SGSGTDFT | | TPPWT | | VEIK | |
| | | SPSSLS | | | | LIY | | | | LTISSLQP | | | | | |
| | | VTITC | | | | | | | | EDFASYYC | | | | | |
| ADI-75769 | IGKV1-5 | DIQMTQ | 1879 | RASQSIG | 2226 | WYQQKP | 2369 | DASSLE | 2507 | GVPSRFSG | 2675 | QQYNG | 2895 | FGGGTK | 2936 |
| | | SPSTLS | | SWLA | | GKAPKL | | T | | SGSGTEFT | | YSPGL | | VEIK | |
| | | ASVGDR | | | | VIY | | | | LTISSLQP | | T | | | |
| | | VTITC | | | | | | | | DDFASYYC | | | | | |
| ADI-75772 | IGKV1D- | DIQMTQ | 1878 | RASQSIS | 2050 | WYQQKP | 2257 | AASVLQ | 2508 | GVPSRFSG | 2676 | QQSYS | 2896 | FGQGTK | 2937 |
| | 39 | SPSSLS | | SYLN | | GKAPKL | | S | | SGSETDFT | | NFRT | | VEIK | |
| | | ASVGDR | | | | LIY | | | | LTISSLQP | | | | | |
| | | VTITC | | | | | | | | EDFATYYC | | | | | |

| | | SEQ | | SEQ | Reverted | SEQ |
|---|---|---|---|---|---|---|
| | | ID | | ID | VL | ID |
| Clone ID | VL DNA | NO: | VL Protein | NO: | Protein | NO: |
| ADI-75589 | AAGTTTATGCTGACTCAGCCCCACTCTGTGTCGGAGGCTCCGGGGAAGACGGTAACCATCT | 3183 | KFMLTQPHSVSEAPGKTVTISCTGSSGS | 3465 | | |
| | CCTGCACCGGCAGCAGTGGCAGCATTGCCAACAACTATGTGCAGTGGTATCAGCAGCGCCC | | IANNYVQWYQQRPGRAPTTIIYEDDQRP | | | |
| | GGGCAGAGCCCCCACCACTATTATCTATGAGGATGACCAAAGACCCTCTGGGGTCCCTGAT | | SGVPDRFSGSIDSSSNSASLTISGLKTE | | | |
| | CGCTTCTCTGGCTCCATCGACAGTTCCTCCAACTCTGCCTCCCTCACCATCTCCGGGCTGA | | DEADYYCQSYHSRNLWVFGGGTKLTVL | | | |
| | AGACTGAGGACGAGGCTGACTACTACTGTCAGTCTTATCATAGCCGCAATCTTTGGGTGTT | | | | | |
| | CGGCGGAGGCACCAAGCTCACCGTCCTA | | | | | |
| ADI-75763 | CAGTCTGTGCTGACTCAGCCACCCTCGGTGTCAGTGGCCCCTGGACAGACGGCCAGGATTG | 3184 | QSVLTQPPSVSVAPGQTARIACGGNSIG | 3466 | | |
| | CCTGTGGGGGAAACAGCATTGGAAGTAAAAGTGTGCACTGGTACCAGCAGAAGCCAGGCCA | | SKSVHWYQQKPGQAPVLVVSDARDRPSG | | | |
| | GGCCCCTGTGCTGGTCGTCTCTGATGCTCGCGACCGGCCCTCAGGGATCCCTGAGCGATTC | | IPERFSGSNSVNTATLTISRVEAGDEAD | | | |
| | TCTGGCTCCAACTCTGTGAACACGGCCACCCTGACCATCAGCAGGGTCGAAGCCGGGGATG | | YYCQVWDSSSDHYVFGTGTKLTVL | | | |
| | AGGCCGACTATTATTGTCAGGTGTGGGATAGTAGTAGTGACCATTATGTCTTCGGAACTGG | | | | | |
| | GACCAAGCTCACCGTCCTA | | | | | |
| ADI-75582 | CAGCCTGTGCTGACTCAGCCACCCTCAGTGTCCGTGTCCCCAGGACAGACAGCCACCATCA | 3185 | QPVLTQPPSVSVSPGQTATITCSGDKLG | 3467 | | |
| | CCTGCTCTGGAGATAAATTGGGGGATAAATATGCTTGCTGGTATCAGAAGAAGCCAGGCCA | | DKYACWYQKKPGQSPVLVIYQDSERPSG | | | |
| | GTCCCCTGTATTGGTCATCTATCAAGATTCCGAGCGGCCCTCAGGGATCCCTGAGCGATTC | | IPERFSGSNSGNTATLTISGTQAMDEAD | | | |
| | TCTGGCTCCAACTCTGGGAACACAGCCACTCTGACCATCAGCGGGACCCAGGCTATGGATG | | YYCQAWDSSTAHWVFGGGTKVTVL | | | |
| | AGGCTGACTATTACTGTCAGGCGTGGGACAGCAGCACTGCCCATTGGGTGTTCGGCGGAGG | | | | | |
| | GACCAAGGTGACCGTCCTA | | | | | |
| ADI-75746 | AATTTTATGCTGACTCAGCCCCACTCTGTGTCGGAGTCTCCGGGGAAGACAGTAACCATCT | 3186 | NFMLTQPHSVSESPGKTVTISCTRSSGS | 3468 | | |
| | CCTGCACCCGCAGCAGTGGCAGCATTGCCAGCAACTATGTGCAGTGGTACCAGCAGCGCCC | | IASNYVQWYQQRPGSAPTTVIFEDNERP | | | |
| | GGGGAGTGCCCCCACCACTGTGATCTTTGAGGATAATGAGAGACCCTCTGGGGTCCCTGAT | | SGVPDRFSGSIDRSSNSASLTISALKTE | | | |
| | CGGTTCTCTGGCTCCATCGACAGGTCCTCCAACTCTGCCTCCCTCACCATCTCTGCACTGA | | DEADYYCQSYASSPFYWVFGGGTKLTVL | | | |
| | AGACTGAGGACGAGGCTGACTACTATTGTCAGTCTTATGCTAGCAGCCCCTTCTATTGGGT | | | | | |
| | GTTTGGCGGAGGGACCAAGCTGACCGTCCTA | | | | | |
| ADI-75726 | GACATCCAGGTGACCCAGTCTCCATCCTCCCTGTCTGCATCTGTAGGAGACAGAGTCACCA | 3187 | DIQVTQSPSSLSASVGDRVTITCRASQN | 3469 | | |
| | TCACTTGCCGGGCAAGTCAGAACATTGTCAGCTATTTAAATTGGTATCAGCAGAAACCAGG | | IVSYLNWYQQKPGKAPKLLMFAASSLQS | | | |
| | GAAAGCCCCTAAGCTCCTGATGTTTGCTGCATCCAGTTTGCAAAGTGGGGTCCCATCAAGG | | GVPSRFSGSGSGTDFTLTISSLQPEDFA | | | |
| | TTCAGTGGCAGTGGATCTGGGACAGATTTCACTCTCACCATCAGCAGTCTGCAACCTGAAG | | TYYCQQSYSTPRTFGQGTKVDIK | | | |
| | ACTTTGCAACTTACTACTGTCAACAGAGTTATAGTACCCCTCGAACGTTCGGCCAAGGGAC | | | | | |
| | CAAAGTGGATATCAAA | | | | | |
| ADI-75851 | TCGTATGAGCTGACTCAGCCACCCTCGGTGTCAGTGGCCCCAGGACAGACGGCCAGGATTA | 3188 | SYELTQPPSVSVAPGQTARITCGGNNIG | 3470 | | |
| | CCTGTGGGGGAAACAACATTGGAAGTAAAAGTGTGCACTGGTACCAGCAGAAGCCAGGCCA | | SKSVHWYQQKPGQAPVLVVYDDSDRPSG | | | |
| | GGCCCCTGTACTGGTCGTCTATGATGATAGCGACCGGCCCTCAGGGATCCCTGAGCGATTC | | IPERFSGSNSGNTATLTISRVEVGDEAD | | | |
| | TCTGGCTCCAACTCTGGGAACACGGCCACCCTGACCATCAGCAGGGTCGAAGTCGGGGATG | | YFCQVWDSSSVHYVFGTGTKLTVL | | | |
| | AGGCCGACTATTTCTGTCAGGTGTGGGATAGTAGTAGTGTTCATTATGTCTTCGGAACTGG | | | | | |
| | GACCAAGCTCACCGTCCTA | | | | | |
| ADI-75853 | GACATCGAGATGACCCAGTCTCCATCCTCCCTGTCTGCATCTGTAGGAGACAGAGTCACCA | 3189 | DIEMTQSPSSLSASVGDRVTISCRASQS | 3471 | | |
| | TCTCCTGCCGGGCAAGTCAGAGCATTAGCAGGTATTTAAATTGGTATCAGCAGAAACCAGG | | ISRYLNWYQQKPGKAPKLLIYAASSLQS | | | |
| | GAAAGCCCCTAAGCTCCTGATCTATGCTGCATCCAGTTTGCAAAGTGGGGTCCCATCAAGG | | GVPSRFSGSGSGTDFTLTISSLQPEDFA | | | |
| | TTCAGTGGCAGTGGATCTGGGACAGATTTCACTCTCACCATCAGCAGTCTGCAACCTGAAG | | TYYCQQSYRTPPLTFGPGTKVEIK | | | |
| | ATTTTGCAACTTACTACTGTCAACAGAGTTACAGAACCCCCCCCCTCACTTTCGGCCCTGG | | | | | |
| | GACCAAGGTGGAAATCAAA | | | | | |
| ADI-75863 | TCGTATGTGCTGACTCAGCCACCCTCGGTGTCAGTGGCCCCAGGACAGACGGCCAGGATTC | 3190 | SYVLTQPPSVSVAPGQTARIPCGGNNIG | 3472 | | |
| | CCTGTGGGGGAAACAACATTGGAAGTAAAAGTGTGCACTGGTACCAGCAGAAGCCAGGCCA | | SKSVHWYQQKPGQAPVLVVYDDSDRPSG | | | |
| | GGCCCCTGTGCTGGTCGTCTATGATGATAGCGACCGGCCCTCAGGGATCCCTGAGCGATTC | | IPERFSGSSSGNTATLTLSRVEAGDEAD | | | |
| | TCTGGCTCCAGCTCTGGGAACACGGCCACCCTGACCCTCAGCAGGGTCGAAGCCGGGGATG | | YYCQVWDSSSDLVIFGGGTKLTVL | | | |
| | AGGCCGACTATTACTGTCAAGTGTGGGATAGTAGTAGTGATCTTGTGATATTCGGCGGAGG | | | | | |
| | GACCAAGCTCACCGTCCTA | | | | | |
| ADI-75753 | CAGTCTGTGTTGACGCAGCCGCCCTCAGTGTCTGGGGCCCCAGGGCAGAGGGTCACCATCT | 3191 | QSVLTQPPSVSGAPGQRVTISCTASSNI | 3473 | | |
| | CCTGCACTGCGAGCAGCAACATCGGGGCAGGTTATGATGTACACTGGTATCAGCAGTTTCC | | GAGYDVHWYQQFPGRAPKLLIYGNNIRP | | | |
| | AGGAAGAGCCCCCAAACTCCTCATCTATGGTAACAACATTCGGCCCTCAGGGGTCCCTGAC | | SGVPDRFSGSKSGTSASLAITGLQAEDE | | | |
| | CGATTCTCTGGTTCCAAGTCTGGCACCTCAGCCTCCCTGGCCATCACTGGGCTCCAGGCTG | | ADYYCQSSDTSLSDWVFGGGTQLTVL | | | |
| | AGGATGAGGCTGATTATTACTGCCAGTCGTCTGACACCAGCCTGAGTGATTGGGTGTTCGG | | | | | |
| | CGGAGGCACCCAGCTCACCGTCCTC | | | | | |
| ADI-75756 | GAAATCCAGATGACCCAGTCTCCATCCTCCCTGTCTGCATCTGTAGGAGACAGAGTCACCA | 3192 | EIQMTQSPSSLSASVGDRVTITCRASQS | 3474 | | |
| | TCACTTGCCGGGCAAGTCAGAGCATTAGCAGGCACTTAAATTGGTATCAGCAGAAACCAGG | | ISRHLNWYQQKPGKAPKLLIYTASSLQS | | | |
| | GAAAGCCCCTAAGCTCCTGATCTATACTGCATCCAGTTTGCAAAGTGGGGTCCCATCAAGG | | GVPSRFSGSGSGTDFTLTISSLQPEDFA | | | |
| | TTCAGTGGCAGTGGATCTGGGACAGATTTCACTCTCACCATCAGCAGTCTGCAACCTGAAG | | SYYCQQSYETPPWTFGQGTKVEIK | | | |
| | ATTTTGCAAGTTACTACTGTCAACAGAGTTACGAAACCCCTCCGTGGACGTTCGGCCAAGG | | | | | |
| | GACCAAGGTGGAAATCAAA | | | | | |
| ADI-75769 | GACATCCAGATGACCCAGTCTCCTTCCACCCTGTCTGCATCTGTAGGAGACAGAGTCACCA | 3193 | DIQMTQSPSTLSASVGDRVTITCRASQS | 3475 | | |
| | TCACTTGCCGGGCCAGTCAGAGTATCGGTAGCTGGTTGGCCTGGTATCAGCAGAAACCAGG | | IGSWLAWYQQKPGKAPKLVIYDASSLET | | | |
| | GAAAGCCCCTAAGTTAGTGATCTATGATGCCTCCAGTTTGGAAACTGGGGTCCCATCAAGG | | GVPSRFSGSGSGTEFTLTISSLQPDDFA | | | |
| | TTCAGCGGCAGTGGATCTGGGACAGAATTCACTCTCACCATCAGCAGCCTGCAGCCTGATG | | SYYCQQYNGYSPGLTFGGGTKVEIK | | | |
| | ATTTTGCATCTTATTACTGCCAACAGTATAATGGTTATTCTCCGGGGCTCACTTTCGGCGG | | | | | |
| | AGGGACCAAGGTGGAAATCAAA | | | | | |
| ADI-75772 | GACATCCAGATGACCCAGTCTCCATCCTCCCTGTCTGCATCTGTCGGAGACAGAGTCACCA | 3194 | DIQMTQSPSSLSASVGDRVTITCRASQS | 3476 | | |
| | TCACTTGCCGGGCAAGTCAGAGCATTAGCAGCTATTTAAATTGGTATCAGCAGAAACCAGG | | ISSYLNWYQQKPGKAPKLLIYAASVLQS | | | |
| | GAAAGCCCCTAAACTCCTGATCTATGCTGCATCCGTTTTGCAAAGTGGGGTCCCATCAAGG | | GVPSRFSGSGSETDFTLTISSLQPEDFA | | | |
| | TTCAGTGGCAGTGGATCTGAGACAGATTTCACTCTCACGATCAGTAGTCTGCAACCTGAAG | | TYYCQQSYSNFRTFGQGTKVEIK | | | |
| | ATTTTGCAACTTACTACTGTCAACAGAGTTACAGTAATTTTCGGACTTTTGGCCAGGGGAC | | | | | |
| | CAAGGTGGAGATCAAA | | | | | |

| | | | SEQ | | SEQ | | SEQ | | SEQ | | SEQ | | SEQ | | SEQ |
|---|---|---|---|---|---|---|---|---|---|---|---|---|---|---|---|
| | VL | VL | ID | VL | ID | VL | ID | VL | ID | VL | ID | VL | ID | VL | ID |
| Clone ID | Germline | FR1 | NO: | CDR1 | NO: | FR2 | NO: | CDR2 | NO: | FR3 | NO: | CDR3 | NO: | FR4 | NO: |
| ADI-75777 | IGKV3D- | ETTLTQ | 2022 | RASQSVS | 2227 | WYQQKP | 2258 | GASSRA | 2464 | GIPARFSG | 2677 | QQYNN | 2897 | FGQGTK | 2937 |
| | 15 | SPATLS | | SNLA | | GQAPRL | | T | | SGSGTEFT | | WPRT | | VEIK | |
| | | VSPGER | | | | LIY | | | | LTISSLQS | | | | | |
| | | ATLSC | | | | | | | | EDFAVYHC | | | | | |
| ADI-75781 | IGKV1D- | DIVMTQ | 1902 | RASQSIG | 2120 | WYQQKP | 2257 | AASSLP | 2509 | GVPSRFSG | 2678 | QQSYS | 2898 | FGQGTR | 2940 |
| | 39 | SPSSLS | | SYLN | | GKAPKL | | S | | SGFGTDFT | | APPNT | | LEIK | |
| | | ASVGDR | | | | LIY | | | | LTISSLQP | | | | | |
| | | VTITC | | | | | | | | EDFATYYC | | | | | |
| ADI-75752 | IGLV3-21 | SHVLTQ | 2023 | GGTNIGG | 2228 | WYQQKP | 2283 | DDGDRP | 2510 | GIPGRISG | 2679 | QVWHS | 2899 | FGGGTK | 2939 |
| | | PPSVSA | | RSVH | | GQAPVL | | S | | SNSGNTAT | | SSDSW | | LTVL | |
| | | APGQTA | | | | VVY | | | | LTISRVVA | | V | | | |
| | | RITQ | | | | | | | | GDEADYYC | | | | | |
| ADI-75676 | IGKV4-1 | DIPMTQ | 1978 | KSSQNVL | 2229 | WYQQKP | 2290 | WASSRE | 2511 | GVPDRFSG | 2680 | QQYYS | 2832 | FGPGTK | 2942 |
| | | SPDSLA | | YSSNNKN | | GQPPKL | | S | | SGSGTDFT | | SPPT | | VEIK | |
| | | VSLGER | | YLA | | LIY | | | | LTITRLQA | | | | | |
| | | ATINC | | | | | | | | EDVAVYYC | | | | | |
| ADI-75731 | IGLV1-40 | QSVVTQ | 1972 | TGTNSNI | 2171 | WYQQLP | 2314 | ANINRP | 2512 | GVPDRFSG | 2599 | QSYDS | 2900 | FGGRTK | 2961 |
| | | PPSVSG | | GAGYDVH | | GTAPKL | | S | | SKSGTSAS | | SLTAP | | LTVL | |
| | | APGQRV | | | | LIY | | | | LAITGLQA | | L | | | |
| | | TISC | | | | | | | | EDEADYYC | | | | | |
| ADI-75837 | IGLV3-21 | SYELTQ | 2024 | GGNNIGS | 2208 | WYQQKP | 2283 | DDSDRP | 2399 | GIPERFSG | 2545 | QVWDT | 2901 | FGGGTK | 2939 |
| | | PPSVSV | | KSVH | | GQAPVL | | S | | SNSGNTAT | | SSDHQ | | LTVL | |
| | | APGQTA | | | | VVY | | | | LTISRVEA | | V | | | |
| | | MITC | | | | | | | | GDEADYYC | | | | | |
| ADI-75728 | IGKV3-20 | TMTLTQ | 2025 | RASQSVS | 2230 | WYQQKP | 2258 | GASSRA | 2513 | GIPDRFIG | 2681 | QQYGS | 2902 | FGPGTK | 2942 |
| | | SPGTLS | | SSYLA | | GQAPRL | | A | | SGSGTDFT | | SPPFT | | VEIK | |
| | | LSPGER | | | | LIY | | | | LTISRLEP | | | | | |
| | | ATLSC | | | | | | | | EDFAVYYC | | | | | |
| ADI-75601 | IGKV1D- | DIQLTQ | 2026 | RASQTVR | 2231 | WYQQKP | 2288 | AA--- | 2514 | GDPPRFSA | 2682 | QQSYS | 2820 | FGQGTK | 2937 |
| | 39 | SPSSLS | | TFLN | | GKAPKL | | PG | | TGSGTDFT | | IPYT | | VEIK | |
| | | ASVGDR | | | | LVF | | | | LTISSLQP | | | | | |
| | | VSITC | | | | | | | | EDFAIYFC | | | | | |
| ADI-75870 | IGLV1-44 | SYELTQ | 1962 | SGSSSNI | 2232 | WYQQLP | 2370 | NYNQRP | 2515 | GVPDRFSG | 2615 | AAWDD | 2813 | FGGGTK | 2939 |
| | | PPSASG | | GSNAVN | | GTAPKL | | S | | SKSGTSAS | | SLNGV | | LTVL | |
| | | TPGQRV | | | | LMY | | | | LAISGLQS | | V | | | |
| | | TISC | | | | | | | | EDEADYYC | | | | | |
| ADI-75643 | IGLV1-40 | QSVLTQ | 2027 | TGSNSNI | 2143 | WYQQLP | 2314 | GNTNRP | 2484 | GVPDRFSG | 2622 | QSYDS | 2903 | FGGGTK | 2939 |
| | | PPSVSG | | GAGYDVH | | GTAPKL | | S | | SKSDTSAS | | GLTGS | | LTVL | |
| | | APGQRV | | | | LIY | | | | LAITGLQA | | L | | | |
| | | IISC | | | | | | | | EDEADYYC | | | | | |
| ADI-75740 | IGKV2D- | DIVMTQ | 1984 | RSSQSLL | 2233 | WYLQKP | 2260 | LGSNRA | 2387 | GVPDRFSG | 2533 | MQALQ | 2904 | FGQGTK | 2937 |
| | 28 | SPLSLP | | HSNGYKY | | GQSPQL | | S | | SGSGTDFT | | APPT | | VEIK | |
| | | VTPGEP | | LD | | LIY | | | | LKISRVEA | | | | | |
| | | ASISC | | | | | | | | EDVGVYYC | | | | | |
| ADI-75720 | IGKV1D- | DITLTQ | 1900 | RASQSVS | 2234 | WYQQKP | 2371 | AASSLQ | 2391 | GVPLRFSV | 2683 | QQSYS | 2905 | FGGGTK | 2936 |
| | 39 | SPSSLS | | NYLN | | GKAPEL | | S | | SGSGTAFN | | TPLT | | VEIK | |
| | | ASVGDR | | | | LIY | | | | LTISSLQP | | | | | |
| | | VTITC | | | | | | | | GDFATYYC | | | | | |

| | | SEQ | | SEQ | Reverted | SEQ |
|---|---|---|---|---|---|---|
| | | ID | | ID | VL | ID |
| Clone ID | VL DNA | NO: | VL Protein | NO: | Protein | NO: |
| ADI-75777 | GAAACGACACTCACGCAGTCTCCAGCCACCCTGTCTGTGTCTCCAGGAGAAAGAGCCACCC | 3195 | ETTLTQSPATLSVSPGERATLSCRASQS | 3477 | | |
| | TCTCCTGTAGGGCCAGTCAGAGTGTTAGCAGCAACTTAGCCTGGTACCAACAGAAACCTGG | | VSSNLAWYQQKPGQAPRLLIYGASSRAT | | | |
| | CCAGGCTCCCAGGCTCCTCATCTATGGTGCATCCAGCAGGGCCACTGGTATCCCAGCCAGG | | GIPARFSGSGSGTEFTLTISSLQSEDFA | | | |
| | TTCAGTGGCAGTGGGTCTGGGACAGAGTTCACTCTCACCATCAGCAGCCTGCAGTCTGAAG | | VYHCQQYNNWPRTFGQGTKVEIK | | | |
| | ATTTTGCAGTTTATCACTGTCAGCAGTATAATAACTGGCCTAGAACTTTTGGCCAGGGGAC | | | | | |
| | CAAGGTGGAGATCAAA | | | | | |
| ADI-75781 | GACATCGTGATGACCCAGTCTCCATCCTCCCTGTCTGCATCTGTGGGAGACAGAGTCACCA | 3196 | DIVMTQSPSSLSASVGDRVTITCRASQS | 3478 | | |
| | TCACTTGCCGGGCAAGTCAGAGCATTGGCAGCTATTTAAATTGGTATCAGCAAAAACCAGG | | IGSYLNWYQQKPGKAPKLLIYAASSLPS | | | |
| | GAAAGCCCCTAAGCTCCTGATCTATGCTGCATCCAGTTTGCCAAGTGGGGTCCCATCAAGG | | GVPSRFSGSGFGTDFTLTISSLQPEDFA | | | |
| | TTCAGTGGCAGCGGATTTGGGACAGATTTCACTCTCACCATCAGCAGTCTGCAACCTGAGG | | TYYCQQSYSAPPNTFGQGTRLEIK | | | |
| | ATTTTGCAACTTACTACTGTCAACAGAGTTACAGTGCCCCTCCGAACACCTTCGGCCAAGG | | | | | |
| | GACACGACTGGAGATTAAA | | | | | |
| ADI-75752 | TCGCATGTGCTGACTCAGCCACCCTCGGTGTCAGCGGCCCCAGGACAGACGGCCAGGATTA | 3197 | SHVLTQPPSVSAAPGQTARITCGGTNIG | 3479 | | |
| | CCTGTGGGGGAACCAATATTGGAGGTAGAAGTGTGCACTGGTACCAGCAGAAGCCAGGCCA | | GRSVHWYQQKPGQAPVLVVYDDGDRPSG | | | |
| | GGCCCCTGTGCTGGTCGTCTATGATGATGGCGACCGGCCCTCAGGGATCCCTGGGCGAATC | | IPGRISGSNSGNTATLTISRVVAGDEAD | | | |
| | TCTGGCTCCAACTCTGGGAACACGGCCACCCTGACCATCAGCAGGGTCGTAGCCGGGGATG | | YYCQVWHSSSDSWVFGGGTKLTVL | | | |
| | AGGCCGACTATTACTGTCAGGTGTGGCATAGTAGTAGTGATTCCTGGGTGTTCGGCGGAGG | | | | | |
| | GACCAAGCTCACCGTCCTA | | | | | |
| ADI-75676 | GACATCCCGATGACCCAGTCTCCAGACTCCCTGGCTGTGTCTCTGGGCGAGAGGGCCACCA | 3198 | DIPMTQSPDSLAVSLGERATINCKSSQN | 3480 | | |
| | TCAACTGCAAGTCCAGCCAGAATGTTTTATACAGCTCCAACAATAAGAACTACTTAGCTTG | | VLYSSNNKNYLAWYQQKPGQPPKLLIYW | | | |
| | GTACCAGCAGAAACCAGGACAGCCTCCTAAGCTGCTCATTTACTGGGCATCTTCCCGGGAA | | ASSRESGVPDRFSGSGSGTDFTLTITRL | | | |
| | TCCGGGGTCCCTGACCGATTCAGTGGCAGCGGGTCTGGGACAGATTTCACTCTCACCATCA | | QAEDVAVYYCQQYYSSPPTFGPGTKVEI | | | |
| | CCCGCCTGCAGGCTGAAGATGTGGCAGTGTATTACTGTCAGCAATATTATAGTAGTCCTCC | | K | | | |
| | CACTTTCGGCCCTGGGACCAAGGTGGAGATCAAA | | | | | |
| ADI-75731 | CAGTCTGTGGTGACGCAGCCGCCCTCAGTGTCTGGGGCCCCAGGGCAGAGGGTCACCATCT | 3199 | QSVVTQPPSVSGAPGQRVTISCTGTNSN | 3481 | | |
| | CCTGCACTGGGACCAACTCCAACATCGGGGCCGGTTATGATGTACACTGGTACCAGCAGCT | | IGAGYDVHWYQQLPGTAPKLLIYANINR | | | |
| | TCCAGGAACAGCCCCCAAACTCCTCATCTATGCTAACATCAATCGGCCCTCGGGGGTCCCT | | PSGVPDRFSGSKSGTSASLAITGLQAED | | | |
| | GACCGATTCTCTGGCTCCAAGTCTGGCACCTCAGCCTCCCTGGCCATCACTGGGCTCCAGG | | EADYYCQSYDSSLTAPLFGGRTKLTVL | | | |
| | CTGAGGATGAGGCTGATTATTACTGCCAGTCCTATGACAGCAGCCTGACTGCTCCGTTATT | | | | | |
| | CGGCGGACGGACCAAGCTCACCGTCCTC | | | | | |
| ADI-75837 | TCGCATGTGCTGACTCAGCCACCCTCGGTGTCAGCGGCCCCAGGACAGACGGCCAGGATTA | 3200 | SYELTQPPSVSVAPGQTAMITCGGNNIG | 3482 | | |
| | CCTGTGGGGGAACCAATATTGGAGGTAGAAGTGTGCACTGGTACCAGCAGAAGCCAGGCCA | | SKSVHWYQQKPGQAPVLVVYDDSDRPSG | | | |
| | GGCCCCTGTGCTGGTCGTCTATGATGATGGCGACCGGCCCTCAGGGATCCCTGGGCGAATC | | IPERFSGSNSGNTATLTISRVEAGDEAD | | | |
| | TCTGGCTCCAACTCTGGGAACACGGCCACCCTGACCATCAGCAGGGTCGTAGCCGGGGATG | | YYCQVWDTSSDHQVFGGGTKLTVL | | | |
| | AGGCCGACTATTACTGTCAGGTGTGGCATAGTAGTAGTGATTCCTGGGTGTTCGGCGGAGG | | | | | |
| | GACCAAGCTCACCGTCCTA | | | | | |
| ADI-75728 | ACAATGACACTGACGCAGTCTCCAGGCACCCTGTCTTTGTCTCCAGGGGAAAGAGCCACCC | 3201 | TMTLTQSPGTLSLSPGERATLSCRASQS | 3483 | | |
| | TCTCCTGCAGGGCCAGTCAGAGTGTTAGCAGCAGCTACTTAGCCTGGTATCAGCAGAAACC | | VSSSYLAWYQQKPGQAPRLLIYGASSRA | | | |
| | TGGCCAGGCTCCCAGGCTCCTCATCTATGGTGCATCCAGCAGGGCCGCTGGCATCCCAGAC | | AGIPDRFIGSGSGTDFTLTISRLEPEDF | | | |
| | AGATTCATTGGCAGTGGGTCTGGGACAGACTTCACTCTCACCATCAGCAGGCTGGAGCCTG | | AVYYCQQYGSSPPFTFGPGTKVEIK | | | |
| | AGGATTTTGCAGTGTATTACTGTCAGCAGTATGGTAGCTCACCTCCATTCACTTTCGGCCC | | | | | |
| | TGGGACCAAGGTGGAAATCAAA | | | | | |
| ADI-75601 | GAAACGACACTCACGCAGTCTCCAGCCACCCTGTCTGTGTCTCCAGGAGAAAGAGCCACCC | 3202 | DIQLTQSPSSLSASVGDRVSITCRASQT | 3484 | | |
| | TCTCCTGTAGGGCCAGTCAGAGTGTTAGCAGCAACTTAGCCTGGTACCAACAGAAACCTGG | | VRTFLNWYQQKPGKAPKLLVFAAPGGDP | | | |
| | CCAGGCTCCCAGGCTCCTCATCTATGGTGCATCCAGCAGGGCCACTGGTATCCCAGCCAGG | | PRFSATGSGTDFTLTISSLQPEDFAIYF | | | |
| | TTCAGTGGCAGTGGGTCTGGGACAGAGTTCACTCTCACCATCAGCAGCCTGCAGTCTGAAG | | CQQSYSIPYTFGQGTKVEIK | | | |
| | ATTTTGCAGTTTATCACTGTCAGCAGTATAATAACTGGCCTAGAACTTTTGGCCAGGGGAC | | | | | |
| | CAAGGTGGAGATCAAA | | | | | |
| ADI-75870 | TCGTATGAGCTGACTCAGCCACCCTCAGCGTCTGGGACCCCCGGGCAGAGGGTCACCATCT | 3203 | SYELTQPPSASGTPGQRVTISCSGSSSN | 3485 | | |
| | CTTGTTCTGGGAGCAGCTCCAACATCGGAAGTAATGCTGTAAACTGGTACCAGCAGCTCCC | | IGSNAVNWYQQLPGTAPKLLMYNYNQRP | | | |
| | AGGAACGGCCCCCAAACTCCTCATGTATAATTATAATCAGCGGCCCTCAGGGGTCCCTGAC | | SGVPDRFSGSKSGTSASLAISGLQSEDE | | | |
| | CGATTCTCTGGCTCCAAGTCTGGCACCTCAGCCTCCCTGGCCATCAGTGGGCTCCAGTCTG | | ADYYCAAWDDSLNGVVFGGGTKLTVL | | | |
| | AGGATGAGGCTGATTATTACTGTGCAGCATGGGATGACAGCCTGAATGGTGTGGTTTTCGG | | | | | |
| | CGGAGGGACCAAGCTCACCGTCCTA | | | | | |
| ADI-75643 | CAGTCTGTGTTGACGCAGCCGCCCTCAGTGTCTGGGGCCCCAGGGCAGAGGGTCATCATCT | 3204 | QSVLTQPPSVSGAPGQRVIISCTGSNSN | 3486 | | |
| | CCTGCACTGGGAGCAACTCCAACATCGGGGCAGGTTATGATGTACACTGGTACCAGCAGCT | | IGAGYDVHWYQQLPGTAPKLLIYGNTNR | | | |
| | TCCAGGAACAGCCCCCAAACTCCTCATCTATGGTAACACCAATCGGCCCTCAGGGGTCCCT | | PSGVPDRFSGSKSDTSASLAITGLQAED | | | |
| | GACCGGTTCTCTGGCTCCAAGTCTGACACCTCAGCCTCCCTGGCCATCACTGGACTCCAGG | | EADYYCQSYDSGLTGSLFGGGTKLTVL | | | |
| | CTGAGGATGAGGCTGATTATTACTGCCAGTCCTATGACAGCGGCCTGACTGGTTCGCTTTT | | | | | |
| | CGGCGGAGGGACCAAGCTGACCGTCCTA | | | | | |
| ADI-75740 | GACATTGTGATGACTCAGTCTCCACTCTCCCTGCCCGTCACCCCTGGAGAGCCGGCCTCCA | 3205 | DIVMTQSPLSLPVTPGEPASISCRSSQS | 3487 | | |
| | TCTCCTGCAGGTCTAGTCAGAGCCTCCTGCATAGTAATGGATACAAGTATTTGGATTGGTA | | LLHSNGYKYLDWYLQKPGQSPQLLIYLG | | | |
| | CCTGCAGAAGCCAGGGCAGTCTCCACAGCTCCTGATCTATTTGGGTTCTAATCGGGCCTCC | | SNRASGVPDRFSGSGSGTDFTLKISRVE | | | |
| | GGGGTCCCTGACAGGTTCAGTGGCAGTGGATCAGGCACAGATTTTACACTGAAAATCAGCA | | AEDVGVYYCMQALQAPPTFGQGTKVEIK | | | |
| | GAGTGGAGGCTGAGGATGTTGGGGTTTATTACTGCATGCAAGCTCTACAAGCTCCTCCGAC | | | | | |
| | GTTCGGCCAAGGGACCAAGGTGGAGATCAAA | | | | | |
| ADI-75720 | GACATCACACTGACGCAGTCTCCATCCTCCCTGTCTGCATCTGTAGGGGACAGAGTCACCA | 3206 | DITLTQSPSSLSASVGDRVTITCRASQS | 3488 | | |
| | TCACTTGCCGGGCAAGTCAGAGCGTTAGCAATTATTTAAATTGGTATCAGCAAAAACCAGG | | VSNYLNWYQQKPGKAPELLIYAASSLQS | | | |
| | GAAAGCCCCTGAGCTCCTGATCTATGCTGCATCCAGTTTGCAAAGTGGCGTCCCATTAAGG | | GVPLRFSVSGSGTAFNLTISSLQPGDFA | | | |
| | TTCAGTGTCAGTGGATCTGGGACAGCTTTCAATCTCACAATCAGTAGTCTGCAGCCTGGAG | | TYYCQQSYSTPLTFGGGTKVEIK | | | |
| | ATTTCGCAACTTACTACTGTCAACAGAGTTACAGTACCCCGCTCACTTTCGGCGGAGGGAC | | | | | |
| | CAAGGTGGAAATCAAA | | | | | |

| | | | SEQ | | SEQ | | SEQ | | SEQ | | SEQ | | SEQ | | SEQ |
|---|---|---|---|---|---|---|---|---|---|---|---|---|---|---|---|
| | VL | VL | ID | VL | ID | VL | ID | VL | ID | VL | ID | VL | ID | VL | ID |
| Clone ID | Germline | FR1 | NO: | CDR1 | NO: | FR2 | NO: | CDR2 | NO: | FR3 | NO: | CDR3 | NO: | FR4 | NO: |
| ADI-75794 | IGLV7-43 | QTVVTQ | 2028 | TNGYYPT | 2235 | WFQQKP | 2372 | STNNKH | 2516 | WTPARFSG | 2684 | LLYYG | 2906 | FGGGTK | 2939 |
| | | EPSLTV | | ASSTGTV | | GQAPRA | | S | | SLLGGKAA | | GVRV | | LTVL | |
| | | SPGGTV | | | | LIY | | | | LTLSGVQP | | | | | |
| | | TLTC | | | | | | | | EDEADYYC | | | | | |
| ADI-75577 | IGKV1D- | EIPMTQ | 1912 | RASQGIS | 2236 | WYQQRP | 2309 | AASSLQ | 2391 | GVPSRFSG | 2685 | QQSYT | 2885 | FGQGTK | 2937 |
| | 39 | SPSSLS | | NYLN | | GKAPKL | | S | | SGFGTDFT | | TRWT | | VEIK | |
| | | ASVGDR | | | | LIY | | | | LTISSLQP | | | | | |
| | | VTITC | | | | | | | | DDFATYYC | | | | | |
| ADI-75850 | IGLV3-21 | QPELTQ | 2029 | GGDNIGT | 2237 | WYQQRP | 2373 | DNSDRP | 2494 | GIPERFSG | 2584 | QVWDS | 2907 | FGGGTK | 2947 |
| | | PPSVSV | | KSVH | | GQAPVL | | S | | SNSGNTAT | | VTDHV | | VTVL | |
| | | APGQTA | | | | VVF | | | | LTISRVEA | | L | | | |
| | | RITC | | | | | | | | GDEADFYC | | | | | |
| ADI-75770 | IGLV1-40 | QSVLTQ | 1948 | TGSNSNI | 2143 | WYQQLP | 2314 | ANANRP | 2517 | GVPDRFSG | 2666 | QSYDS | 2908 | FGGGTQ | 2948 |
| | | PPSVSG | | GAGYDVH | | GTAPKL | | S | | SRSGTSAS | | SLSGS | | LTVL | |
| | | APGQRV | | | | LIY | | | | LAITGLQA | | V | | | |
| | | TISC | | | | | | | | EDEADYYC | | | | | |
| ADI-75799 | IGKV1-33 | DILMTQ | 1975 | QASQDIN | 2148 | WYQQKP | 2257 | DASNLE | 2416 | GVPSRFSG | 2537 | QQYDN | 2909 | FGQGTK | 2937 |
| | | SPSSLS | | NYLN | | GKAPKL | | T | | SGSGTDFT | | LPRT | | VEIK | |
| | | ASVGDR | | | | LIY | | | | FTISSLQP | | | | | |
| | | VTITC | | | | | | | | EDIATYYC | | | | | |
| ADI-75759 | IGKV1-5 | EITLTQ | 2030 | RASQSIR | 2238 | WYQQKP | 2257 | KASTLE | 2518 | GVPSRFSG | 2686 | QQYNT | 2910 | FGQGTK | 2937 |
| | | SPSTLS | | SWLA | | GKAPKL | | S | | SGSETEFT | | DRYT | | VEIK | |
| | | ASVGDS | | | | LIY | | | | LTIRSLQP | | | | | |
| | | VTITC | | | | | | | | EDFATYYC | | | | | |
| ADI-75803 | IGLV3-21 | TYVLTQ | 2031 | GGHNIGG | 2239 | WYQQKP | 2283 | DDGDRP | 2510 | GIPERISG | 2687 | QVWHS | 2899 | FGGGTK | 2939 |
| | | PPSVSV | | KSVH | | GQAPVL | | S | | SNSGNTAT | | SSDSW | | LTVL | |
| | | APGQPA | | | | VVY | | | | LTISRVEA | | V | | | |
| | | RITC | | | | | | | | GDEADYYC | | | | | |
| ADI-75710 | IGLV1-40 | QSVLTQ | 1948 | TGTNSNI | 2171 | WYQQLP | 2314 | GNINRP | 2519 | GVPDRFSG | 2688 | QSYDS | 2911 | FGGRTK | 2961 |
| | | PPSVSG | | GAGYDVH | | GTAPKL | | S | | SKSGSSAS | | SLSGS | | LTVL | |
| | | APGQRV | | | | LIY | | | | LAITGLQA | | L | | | |
| | | TISC | | | | | | | | EDEADYYC | | | | | |
| ADI-75605 | IGLV3-21 | QHVLTQ | 2032 | GGNNIGS | 2208 | WYQQKP | 2283 | DDSDRP | 2399 | GIPERFSG | 2689 | QVWDS | 2912 | FGGGTK | 2939 |
| | | PPSVSV | | KSVH | | GQAPVL | | S | | SNSGTTAT | | NNDHV | | LTVL | |
| | | APGQTA | | | | VVY | | | | LTISRVEA | | V | | | |
| | | RITC | | | | | | | | GDEADYFC | | | | | |
| ADI-75680 | IGKV3D- | EIVLTQ | 2033 | RASQSVS | 2240 | WYQQQP | 2374 | DASTRA | 2424 | GIPARFSG | 2690 | QQYND | 2913 | FGGGTK | 2936 |
| | 15 | SPATLS | | SDLA | | GQAPRL | | T | | SGSGTEFT | | WLT | | VEIK | |
| | | VSPGER | | | | LIY | | | | LTISSLQS | | | | | |
| | | ATLSC | | | | | | | | EDFVVYYC | | | | | |
| ADI-75691 | IGKV3D- | EIVMTQ | 2034 | RASQSVS | 2240 | WYQQQP | 2374 | DASTRA | 2424 | GIPARFSG | 2690 | QQYND | 2913 | FGGGTK | 2936 |
| | 15 | SPATLS | | SDLA | | GQAPRL | | T | | SGSGTEFT | | WLT | | VEIK | |
| | | VSPGER | | | | LIY | | | | LTISSLQS | | | | | |
| | | ATLSC | | | | | | | | EDFVVYYC | | | | | |
| ADI-75573 | IGKV1D- | DIQLTQ | 1876 | RASQSIS | 2077 | WYQQKP | 2375 | AASSLQ | 2391 | GVPSRFSG | 2691 | QQSYS | 2914 | FGQGTK | 2937 |
| | 39 | SPSSLS | | NYLN | | GKAPKL | | S | | SGSGTDFT | | TPVT | | VEIK | |
| | | ASVGDR | | | | QIY | | | | LTISSLQV | | | | | |
| | | VTITC | | | | | | | | EDFATYYC | | | | | |

| | | SEQ | | SEQ | Reverted | SEQ |
|---|---|---|---|---|---|---|
| | | ID | | ID | VL | ID |
| Clone ID | VL DNA | NO: | VL Protein | NO: | Protein | NO: |
| ADI-75794 | CAGACTGTGGTGACCCAGGAGCCCTCACTGACTGTGTCCCCAGGAGGGACAGTCACTCTCA | 3207 | QTVVTQEPSLTVSPGGTVTLTCASSTGT | 3489 | | |
| | CCTGTGCTTCCAGCACTGGAACAGTCACCAATGGTTACTATCCAACCTGGTTCCAGCAGAA | | VTNGYYPTWFQQKPGQAPRALIYSTNNK | | | |
| | ACCTGGACAAGCACCCAGGGCATTGATTTATAGTACAAACAACAAACACTCCTGGACCCCT | | HSWTPARFSGSLLGGKAALTLSGVQPED | | | |
| | GCCCGGTTCTCAGGCTCCCTCCTTGGGGGCAAAGCTGCCCTGACACTGTCAGGTGTGCAGC | | EADYYCLLYYGGVRVFGGGTKLTVL | | | |
| | CTGAGGACGAGGCTGACTATTACTGCCTGCTCTACTACGGTGGTGTTCGAGTCTTCGGCGG | | | | | |
| | AGGGACCAAGCTGACCGTCCTA | | | | | |
| ADI-75577 | GAAATCCCAATGACACAGTCTCCATCCTCCCTGTCTGCATCTGTAGGAGACAGAGTCACCA | 3208 | EIPMTQSPSSLSASVGDRVTITCRASQG | 3490 | | |
| | TCACTTGCCGGGCAAGTCAGGGCATTAGCAACTATTTAAATTGGTATCAACAGAGACCAGG | | ISNYLNWYQQRPGKAPKLLIYAASSLQS | | | |
| | GAAAGCCCCTAAACTCCTTATCTATGCTGCATCCAGTTTGCAAAGTGGGGTCCCATCAAGG | | GVPSRFSGSGFGTDFTLTISSLQPDDFA | | | |
| | TTCAGTGGCAGTGGATTTGGGACAGATTTCACTCTCACCATCAGCAGTCTGCAACCTGACG | | TYYCQQSYTTRWTFGQGTKVEIK | | | |
| | ACTTTGCAACTTACTACTGTCAACAGAGTTACACTACCCGGTGGACGTTCGGCCAAGGGAC | | | | | |
| | CAAGGTGGAGATCAAA | | | | | |
| ADI-75850 | CAGCCTGAGCTGACTCAGCCACCCTCGGTGTCAGTGGCCCCAGGACAGACGGCCAGGATTA | 3209 | QPELTQPPSVSVAPGQTARITCGGDNIG | 3491 | | |
| | CCTGTGGGGGTGACAACATTGGAACTAAAAGTGTGCACTGGTACCAGCAGAGGCCAGGCCA | | TKSVHWYQQRPGQAPVLVVFDNSDRPSG | | | |
| | GGCCCCTGTGCTGGTCGTCTTTGATAATTCCGACCGGCCCTCAGGGATCCCTGAGCGATTC | | IPERFSGSNSGNTATLTISRVEAGDEAD | | | |
| | TCTGGCTCCAATTCTGGGAACACGGCCACCCTGACCATCAGCAGGGTCGAAGCCGGGGATG | | FYCQVWDSVTDHVLFGGGTKVTVL | | | |
| | AGGCCGACTTTTACTGTCAGGTGTGGGATAGTGTTACTGATCATGTGCTTTTCGGCGGAGG | | | | | |
| | GACCAAGGTCACCGTCCTA | | | | | |
| ADI-75770 | CAGTCTGTGTTGACGCAGCCGCCCTCAGTGTCTGGGGCCCCAGGGCAGAGGGTCACCATCT | 3210 | QSVLTQPPSVSGAPGQRVTISCTGSNSN | 3492 | | |
| | CCTGCACTGGGAGCAACTCCAACATCGGGGCAGGTTATGATGTACACTGGTACCAGCAGCT | | IGAGYDVHWYQQLPGTAPKLLIYANANR | | | |
| | TCCAGGAACAGCCCCCAAACTCCTCATCTATGCTAACGCCAATCGGCCCTCAGGGGTCCCT | | PSGVPDRFSGSRSGTSASLAITGLQAED | | | |
| | GACCGATTCTCTGGCTCCAGGTCTGGCACCTCAGCCTCCCTGGCCATCACTGGGCTCCAGG | | EADYYCQSYDSSLSGSVFGGGTQLTVL | | | |
| | CTGAGGATGAGGCTGATTATTACTGTCAGTCCTATGACAGCAGCCTGAGTGGTTCGGTGTT | | | | | |
| | CGGCGGAGGCACCCAGCTGACCGTCCTC | | | | | |
| ADI-75799 | GACATCCTGATGACCCAGTCTCCATCCTCCCTGTCTGCATCTGTAGGAGACAGAGTCACCA | 3211 | DILMTQSPSSLSASVGDRVTITCQASQD | 3493 | | |
| | TCACTTGCCAGGCGAGTCAGGACATTAACAACTATTTAAATTGGTATCAGCAGAAACCAGG | | INNYLNWYQQKPGKAPKLLIYDASNLET | | | |
| | GAAAGCCCCTAAGCTCCTGATCTACGATGCATCCAATTTGGAAACAGGGGTCCCATCAAGG | | GVPSRFSGSGSGTDFTFTISSLQPEDIA | | | |
| | TTCAGTGGAAGTGGATCTGGGACAGATTTTACTTTCACCATCAGCAGCCTGCAGCCTGAAG | | TYYCQQYDNLPRTFGQGTKVEIK | | | |
| | ATATTGCAACATATTACTGTCAACAGTATGATAATCTCCCTCGGACGTTCGGCCAAGGGAC | | | | | |
| | CAAGGTGGAAATCAAA | | | | | |
| ADI-75759 | GAAATCACACTGACCCAGTCTCCTTCCACCCTGTCTGCATCTGTGGGAGACAGCGTCACTA | 3212 | EITLTQSPSTLSASVGDSVTITCRASQS | 3494 | | |
| | TCACTTGTCGGGCCAGTCAGAGTATTAGAAGCTGGTTGGCCTGGTATCAGCAGAAACCAGG | | IRSWLAWYQQKPGKAPKLLIYKASTLES | | | |
| | GAAAGCCCCTAAGCTCCTGATCTATAAGGCGTCTACTTTAGAAAGTGGGGTCCCATCAAGG | | GVPSRFSGSGSETEFTLTIRSLQPEDFA | | | |
| | TTCAGCGGCAGTGGATCTGAGACAGAATTCACACTCACCATCAGAAGCCTGCAGCCTGAAG | | TYYCQQYNTDRYTFGQGTKVEIK | | | |
| | ATTTTGCAACTTATTACTGCCAACAGTATAATACTGATCGGTACACTTTTGGCCAGGGGAC | | | | | |
| | CAAGGTGGAAATCAAA | | | | | |
| ADI-75803 | ACGTATGTGCTGACTCAGCCACCCTCGGTGTCAGTGGCCCCAGGACAGCCGGCCAGGATTA | 3213 | TYVLTQPPSVSVAPGQPARITCGGHNIG | 3495 | | |
| | CCTGTGGGGGACACAATATTGGAGGTAAAAGTGTGCACTGGTACCAGCAGAAGCCAGGCCA | | GKSVHWYQQKPGQAPVLVVYDDGDRPSG | | | |
| | GGCCCCTGTGCTGGTCGTCTATGATGATGGCGACCGGCCCTCAGGGATCCCTGAGCGAATC | | IPERISGSNSGNTATLTISRVEAGDEAD | | | |
| | TCTGGCTCCAACTCTGGGAACACGGCCACCCTGACCATCAGCAGGGTCGAAGCCGGGGATG | | YYCQVWHSSSDSWVFGGGTKLTVL | | | |
| | AGGCCGACTATTACTGTCAGGTGTGGCATAGTAGTAGTGATTCCTGGGTGTTCGGCGGAGG | | | | | |
| | GACCAAGCTCACCGTCCTA | | | | | |
| ADI-75710 | CAGTCTGTCTTGACGCAGCCGCCCTCAGTGTCTGGGGCCCCAGGGCAGAGGGTCACCATCT | 3214 | QSVLTQPPSVSGAPGQRVTISCTGTNSN | 3496 | | |
| | CCTGCACTGGGACCAACTCCAACATCGGGGCAGGTTATGATGTACACTGGTACCAGCAGCT | | IGAGYDVHWYQQLPGTAPKLLIYGNINR | | | |
| | TCCAGGAACAGCCCCCAAACTCCTCATCTATGGTAACATCAATCGGCCCTCAGGGGTCCCT | | PSGVPDRFSGSKSGSSASLAITGLQAED | | | |
| | GACCGATTCTCTGGCTCCAAGTCTGGCTCCTCTGCCTCCCTGGCCATCACTGGGCTCCAGG | | EADYYCQSYDSSLSGSLFGGRTKLTVL | | | |
| | CTGAGGATGAGGCTGATTATTACTGCCAGTCCTATGACAGCAGTCTGAGTGGTTCGTTATT | | | | | |
| | CGGCGGACGCACCAAGCTGACCGTCCTA | | | | | |
| ADI-75605 | CAGCATGTGCTGACTCAGCCGCCCTCGGTGTCAGTGGCCCCAGGACAGACGGCCAGGATTA | 3215 | QHVLTQPPSVSVAPGQTARITCGGNNIG | 3497 | | |
| | CCTGTGGGGGCAACAACATTGGAAGTAAAAGTGTGCACTGGTACCAGCAGAAGCCAGGCCA | | SKSVHWYQQKPGQAPVLVVYDDSDRPSG | | | |
| | GGCCCCTGTGCTGGTCGTCTATGATGATAGCGACCGGCCCTCAGGGATCCCTGAGCGATTT | | IPERFSGSNSGTTATLTISRVEAGDEAD | | | |
| | TCTGGCTCCAACTCTGGGACCACGGCCACCCTGACCATCAGCAGGGTCGAGGCCGGGGATG | | YFCQVWDSNNDHVVFGGGTKLTVL | | | |
| | AGGCCGACTATTTTTGTCAGGTGTGGGATAGTAATAATGATCATGTGGTATTCGGCGGAGG | | | | | |
| | GACCAAGCTCACCGTCCTA | | | | | |
| ADI-75680 | GAAATTGTGCTGACTCAGTCTCCAGCCACCCTGTCTGTGTCTCCAGGGGAAAGAGCCACCC | 3216 | EIVLTQSPATLSVSPGERATLSCRASQS | 3498 | | |
| | TCTCCTGCAGGGCCAGTCAGAGTGTTAGCAGCGACTTAGCCTGGTACCAGCAGCAACCTGG | | VSSDLAWYQQQPGQAPRLLIYDASTRAT | | | |
| | CCAGGCTCCCAGACTCCTCATCTATGATGCATCCACCAGGGCCACTGGTATCCCAGCCAGG | | GIPARFSGSGSGTEFTLTISSLQSEDFV | | | |
| | TTCAGTGGCAGTGGGTCTGGGACAGAGTTCACTCTCACCATCAGCAGCCTGCAGTCTGAAG | | VYYCQQYNDWLTFGGGTKVEIK | | | |
| | ATTTTGTAGTTTATTACTGTCAGCAGTACAATGACTGGCTCACTTTCGGGGAGGGACCAA | | | | | |
| | GGTGGAAATCAAA | | | | | |
| ADI-75691 | GAAATTGTGATGACGCAGTCTCCAGCCACCCTGTCTGTGTCTCCAGGGGAAAGAGCCACCC | 3217 | EIVMTQSPATLSVSPGERATLSCRASQS | 3499 | | |
| | TCTCCTGCAGGGCCAGTCAGAGTGTTAGCAGCGACTTAGCCTGGTACCAGCAGCAACCTGG | | VSSDLAWYQQQPGQAPRLLIYDASTRAT | | | |
| | CCAGGCTCCCAGACTCCTCATCTATGATGCATCCACCAGGGCCACTGGTATCCCAGCCAGG | | GIPARFSGSGSGTEFTLTISSLQSEDFV | | | |
| | TTCAGTGGCAGTGGGTCTGGGACAGAGTTCACTCTCACCATCAGCAGCCTGCAGTCTGAAG | | VYYCQQYNDWLTFGGGTKVEIK | | | |
| | ATTTTGTAGTTTATTACTGTCAGCAGTACAATGACTGGCTCACTTTCGGCGGAGGGACCAA | | | | | |
| | GGTGGAAATCAAA | | | | | |
| ADI-75573 | GACATCCAGTTGACCCAGTCTCCATCCTCCCTGTCTGCATCTGTAGGAGACAGAGTCACCA | 3218 | DIQLTQSPSSLSASVGDRVTITCRASQS | 3500 | | |
| | TCACTTGCCGGGCAAGTCAGAGCATTAGCAATTATTTAAATTGGTATCAGCAGAAACCAGG | | ISNYLNWYQQKPGKAPKLQIYAASSLQS | | | |
| | GAAAGCCCCTAAGCTCCAGATCTATGCTGCATCCAGTTTGCAAAGTGGGGTCCCATCAAGG | | GVPSRFSGSGSGTDFTLTISSLQVEDFA | | | |
| | TTCAGTGGCAGTGGATCTGGGACAGATTTCACTCTCACCATCAGCAGTCTGCAAGTTGAAG | | TYYCQQSYSTPVTFGQGTKVEIK | | | |
| | ATTTTGCAACTTATTACTGTCAACAGAGTTACAGTACCCCTGTCACTTTTGGCCAGGGGAC | | | | | |
| | CAAGGTGGAGATCAAA | | | | | |

| | | | SEQ | | SEQ | | SEQ | | SEQ | | SEQ | | SEQ | | SEQ |
|---|---|---|---|---|---|---|---|---|---|---|---|---|---|---|---|
| | VL | VL | ID | VL | ID | VL | ID | VL | ID | VL | ID | VL | ID | VL | ID |
| Clone ID | Germline | FR1 | NO: | CDR1 | NO: | FR2 | NO: | CDR2 | NO: | FR3 | NO: | CDR3 | NO: | FR4 | NO: |
| ADI-75580 | IGKV2D- | VTPGEP | 1984 | RSSQSLL | 2241 | WYLQKP | 2260 | LGTNRA | 2520 | GVPDRFSG | 2575 | MQALQ | 2915 | FGGGTK | 2936 |
| | 28 | DIVMTQ | | HSNGYTY | | GQSPQL | | S | | SGSGTDFT | | TPLT | | VEIK | |
| | | SPLSLP | | LD | | LIY | | | | LKISRVEA | | | | | |
| | | ASISC | | | | | | | | EDVGIYYC | | | | | |
| ADI-75576 | IGLV3-21 | YYMLTQ | 2035 | GGNDIGG | 2242 | WYQQRP | 2277 | DDSDRP | 2399 | GIPERFSG | 2545 | QMWDS | 2916 | FGGGTK | 2947 |
| | | PPSVSV | | KAVH | | GQAPVL | | S | | SNSGNTAT | | RSDHP | | VTVL | |
| | | APGQTA | | | | VVY | | | | LTISRVEA | | V | | | |
| | | RLTC | | | | | | | | GDEADYYC | | | | | |
| ADI-75592 | IGKV1D- | DIRMTQ | 2036 | RASQSIS | 2243 | WYQQKP | 2275 | AASSLQ | 2391 | GVPSRFSG | 2692 | QQGST | 2917 | FGRGTK | 2941 |
| | 39 | SPSSLS | | TILN | | GRAPKL | | S | | GGSGTDFT | | TPQT | | VEIK | |
| | | ASIGDR | | | | LIY | | | | LTISSLQP | | | | | |
| | | VTITC | | | | | | | | EDFATYYC | | | | | |
| ADI-75597 | IGKV1-12 | DIQMTQ | 1885 | RASQGIS | 2244 | WYQQKP | 2257 | AASSLQ | 2391 | GVPSRFSG | 2534 | QQANS | 2918 | FGGGTK | 2936 |
| | | SPSSVS | | SWLA | | GKAPKL | | S | | SGSGTDFT | | FPIT | | VEIK | |
| | | ASVGDR | | | | LIY | | | | LTISSLQP | | | | | |
| | | VTITC | | | | | | | | EDFATYYC | | | | | |
| ADI-75636 | IGKV1D- | EIVMTQ | 1891 | RASHRID | 2098 | WYQQKP | 2291 | VASTLQ | 2423 | GVPSRFTG | 2551 | QQSYT | 2752 | FGPGTK | 2942 |
| | 39 | SPSSLS | | RYLN | | GQAPKL | | S | | SGSGTDFT | | TPRT | | VEIK | |
| | | ASVGDR | | | | LIY | | | | LTISSLQP | | | | | |
| | | VTITC | | | | | | | | EDFATYYC | | | | | |
| ADI-75645 | IGKV2-40 | EIVMTQ | 1923 | RSSQSLL | 2245 | WYLQKP | 2376 | TLSYRA | 2521 | GVPDRFSG | 2693 | MQRIE | 2919 | FGQGTK | 2937 |
| | | SPLSLP | | DSDDVYT | | GQSPQL | | S | | SGSGTNFT | | FPYT | | VEIK | |
| | | VTPGEP | | YLD | | LMY | | | | LKINRVKT | | | | | |
| | | ASISC | | | | | | | | EDVGVYYC | | | | | |
| ADI-75615 | IGLV3-1 | PSELTQ | 2037 | SGENLGR | 2246 | WYQQRS | 2377 | RDDKRP | 2522 | GIPERFSG | 2671 | QAWDS | 2920 | FGTGTK | 2945 |
| | | PPSVSV | | KYVC | | GQSPVL | | S | | SNSGNTAT | | RTAQV | | VTVL | |
| | | SPGQTA | | | | VIY | | | | LTISGTQA | | | | | |
| | | SITC | | | | | | | | MDEADYYC | | | | | |
| ADI-75844 | IGKV1D- | DIQMTQ | 1878 | RASQTIN | 2247 | WYQQKP | 2263 | AASSLQ | 2391 | GVPSRFSG | 2534 | QQSYS | 2921 | FGQGTR | 2940 |
| | 39 | SPSSLS | | NYLT | | GKAPNL | | S | | SGSGTDFT | | SPIT | | LEIK | |
| | | ASVGDR | | | | LIY | | | | LTISSLQP | | | | | |
| | | VTITC | | | | | | | | EDFATYYC | | | | | |
| ADI-75875 | IGLV6-57 | KPVLTQ | 2038 | TRSSGSI | 2109 | WYQQRP | 2378 | EDNQRP | 2431 | GVPDRFSG | 2694 | QSYDS | 2922 | FGGGTK | 2939 |
| | | PHSVSE | | ASNYVQ | | GSSPST | | S | | SIDSSSNS | | SLWV | | LTVL | |
| | | SPGKTV | | | | VIY | | | | ASLTISGL | | | | | |
| | | TISC | | | | | | | | QTDDEADY | | | | | |
| | | | | | | | | | | YC | | | | | |
| ADI-75714 | IGLV1-40 | QSVLTQ | 1948 | TGSNSNI | 2143 | WYQQLP | 2314 | GNNNRP | 2492 | GVPDRFSG | 2695 | QSYDS | 2840 | FGGGTK | 2947 |
| | | PPSVSG | | GAGYDVH | | GTAPKL | | S | | SKSVTSAS | | SLSDS | | VTVL | |
| | | APGQRV | | | | LIY | | | | LAITGLQA | | V | | | |
| | | TISC | | | | | | | | EDEADYYC | | | | | |
| ADI-75688 | IGKV3-20 | EIVMTQ | 1935 | RASQSVS | 2230 | WYQQKP | 2258 | GASSRA | 2464 | GIPDRFSG | 2616 | QQYGS | 2923 | FGQGTK | 2937 |
| | | SPGTLS | | SSYLA | | GQAPRL | | T | | SGSGTDFT | | SPGT | | VEIK | |
| | | LSPGER | | | | LIY | | | | LTISRLEP | | | | | |
| | | ATLSC | | | | | | | | EDFAVYYC | | | | | |
| ADI-75637 | IGKV1D- | DITMTQ | 2039 | RASQGIS | 2248 | WCQQKP | 2379 | AASSLQ | 2391 | GVPSRFSG | 2614 | QQSYS | 2751 | FGQGTK | 2937 |
| | 39 | SPSSLS | | TSLN | | GKAPKL | | S | | SGSGTDFT | | TPWT | | VEIK | |
| | | ASVGDR | | | | LIS | | | | LTISNLQP | | | | | |
| | | VTIAC | | | | | | | | EDFATYYC | | | | | |

| | | SEQ | | SEQ | Reverted | SEQ |
|---|---|---|---|---|---|---|
| | | ID | | ID | VL | ID |
| Clone ID | VL DNA | NO: | VL Protein | NO: | Protein | NO: |
| ADI-75580 | GACATTGTGATGACCCAGTCTCCACTCTCCCTGCCCGTCACCCCTGGAGAGCCGGCCTCCA | 3219 | DIVMTQSPLSLPVTPGEPASISCRSSQS | 3501 | | |
| | TCTCCTGCAGGTCTAGTCAGAGCCTCCTGCATAGTAATGGATACACCTATTTGGATTGGTA | | LLHSNGYTYLDWYLQKPGQSPQLLIYLG | | | |
| | CCTGCAGAAGCCAGGGCAGTCTCCACAGCTCCTGATCTATTTGGGTACTAATCGGGCCTCC | | TNRASGVPDRFSGSGSGTDFTLKISRVE | | | |
| | GGGGTCCCTGACAGGTTCAGTGGCAGTGGATCAGGCACAGATTTTACACTGAAAATCAGCA | | AEDVGIYYCMQALQTPLTFGGGTKVEIK | | | |
| | GAGTGGAGGCTGAAGATGTTGGGATTTATTACTGCATGCAAGCTCTACAAACTCCGCTCAC | | | | | |
| | TTTCGGCGGAGGGACCAAGGTGGAGATCAAA | | | | | |
| ADI-75576 | TATTATATGCTGACTCAGCCCCCCTCGGTGTCAGTGGCCCCAGGACAGACGGCCAGGCTTA | 3220 | YYMLTQPPSVSVAPGQTARLTCGGNDIG | 3502 | | |
| | CCTGTGGGGGAAACGACATTGGAGGTAAAGCTGTGCACTGGTACCAGCAGAGGCCAGGCCA | | GKAVHWYQQRPGQAPVLVVYDDSDRPSG | | | |
| | GGCCCCTGTGCTGGTCGTCTATGATGATAGCGACCGGCCCTCAGGGATCCCTGAGCGATTC | | IPERFSGSNSGNTATLTISRVEAGDEAD | | | |
| | TCTGGCTCCAACTCTGGGAACACGGCCACCCTGACCATCAGCAGGGTCGAAGCCGGGGATG | | YYCQMWDSRSDHPVFGGGTKVTVL | | | |
| | AGGCCGACTATTACTGTCAAATGTGGGATAGTCGTAGTGATCATCCGGTGTTCGGCGGAGG | | | | | |
| | GACCAAGGTGACCGTCCTC | | | | | |
| ADI-75592 | GACATCCGGATGACCCAGTCTCCATCCTCCCTGTCTGCATCTATAGGAGACAGAGTCACCA | 3221 | DIRMTQSPSSLSASIGDRVTITCRASQS | 3503 | | |
| | TCACTTGCCGGGCAAGTCAGAGCATTAGTACCATTTTAAATTGGTATCAGCAGAAACCAGG | | ISTILNWYQQKPGRAPKLLIYAASSLQS | | | |
| | GAGAGCCCCTAAGCTCCTGATCTATGCTGCATCCAGTTTGCAAAGTGGGGTCCCATCAAGG | | GVPSRFSGGGSGTDFTLTISSLQPEDFA | | | |
| | TTCAGTGGCGGTGGATCTGGGACAGATTTCACTCTCACCATCAGCAGTCTGCAACCTGAAG | | TYYCQQGSTTPQTFGRGTKVEIK | | | |
| | ATTTTGCAACGTACTACTGTCAGCAGGGTTCCACTACCCCTCAGACGTTCGGCCGTGGGAC | | | | | |
| | CAAGGTGGAGATCAAA | | | | | |
| ADI-75597 | GACATCCAGATGACCCAGTCTCCATCTTCCGTGTCTGCATCTGTAGGAGACAGAGTCACCA | 3222 | DIQMTQSPSSVSASVGDRVTITCRASQG | 3504 | | |
| | TCACTTGTCGGGCGAGTCAGGGTATTAGCAGCTGGTTAGCCTGGTATCAGCAGAAACCAGG | | ISSWLAWYQQKPGKAPKLLIYAASSLQS | | | |
| | GAAAGCCCCTAAGCTCCTGATCTATGCTGCATCCAGTTTGCAAAGTGGGGTCCCATCAAGG | | GVPSRFSGSGSGTDFTLTISSLQPEDFA | | | |
| | TTCAGCGGCAGTGGATCTGGGACAGATTTCACTCTCACCATCAGCAGCCTGCAGCCTGAAG | | TYYCQQANSFPITFGGGTKVEIK | | | |
| | ATTTTGCAACTTACTATTGTCAACAGGCTAACAGTTTCCCTATCACCTTTGGCGGAGGGAC | | | | | |
| | CAAGGTGGAAATCAAA | | | | | |
| ADI-75636 | GAAATTGTGATGACCCAGTCTCCATCCTCCCTGTCTGCATCTGTAGGAGACAGAGTCACCA | 3223 | EIVMTQSPSSLSASVGDRVTITCRASHR | 3505 | | |
| | TCACTTGTCGGGCAAGTCACAGGATTGACAGGTATTTAAATTGGTATCAGCAGAAACCAGG | | IDRYLNWYQQKPGQAPKLLIYVASTLQS | | | |
| | GCAAGCCCCCAAGCTCCTGATCTATGTAGCATCCACTTTGCAAAGTGGGGTCCCATCAAGG | | GVPSRFTGSGSGTDFTLTISSLQPEDFA | | | |
| | TTCACTGGCAGTGGATCTGGGACAGATTTCACTCTCACTATCAGCAGTCTGCAACCTGAGG | | TYYCQQSYTTPRTFGPGTKVEIK | | | |
| | ATTTTGCAACTTACTACTGTCAACAGAGTTACACTACCCCTCGGACTTTCGGCCCTGGGAC | | | | | |
| | CAAGGTGGAAATCAAA | | | | | |
| ADI-75645 | GAAATTGTGATGACACAGTCTCCACTCTCCCTGCCCGTCACCCCTGGAGAGCCGGCCTCCA | 3224 | EIVMTQSPLSLPVTPGEPASISCRSSQS | 3506 | | |
| | TCTCCTGCAGGTCTAGTCAGAGCCTCTTGGATAGTGATGATGTATACACCTATTTGGACTG | | LLDSDDVYTYLDWYLQKPGQSPQLLMYT | | | |
| | GTACCTGCAGAAGCCAGGGCAGTCTCCACAGCTCCTGATGTATACACTTTCCTATCGGGCC | | LSYRASGVPDRFSGSGSGTNFTLKINRV | | | |
| | TCTGGAGTCCCAGACAGGTTCAGTGGCAGTGGGTCAGGCACTAATTTCACACTGAAAATCA | | KTEDVGVYYCMQRIEFPYTFGQGTKVEI | | | |
| | ATAGGGTAAAGACTGAGGACGTTGGAGTTTATTACTGCATGCAACGTATAGAGTTCCCCTA | | K | | | |
| | CACTTTTGGCCAGGGGACCAAGGTGGAAATCAAA | | | | | |
| ADI-75615 | CCGTCTGAGCTGACTCAGCCACCCTCAGTGTCCGTGTCCCCAGGACAGACAGCCAGCATCA | 3225 | PSELTQPPSVSVSPGQTASITCSGENLG | 3507 | | |
| | CCTGCTCTGGAGAAAATTTGGGACGTAAATATGTTTGTTGGTATCAACAGAGGTCAGGCCA | | RKYVCWYQQRSGQSPVLVIYRDDKRPSG | | | |
| | GTCCCCTGTGCTGGTTATCTATCGAGATGACAAGCGGCCCTCAGGGATCCCTGAGCGATTC | | IPERFSGSNSGNTATLTISGTQAMDEAD | | | |
| | TCTGGCTCCAATTCTGGGAACACAGCCACTCTGACCATCAGCGGGACCCAGGCTATGGATG | | YYCQAWDSRTAQVFGTGTKVTVL | | | |
| | AGGCTGACTATTACTGTCAGGCGTGGGACAGCAGGACTGCACAGGTCTTCGGAACTGGGAC | | | | | |
| | CAAGGTGACCGTCCTA | | | | | |
| ADI-75844 | GACATCCAGATGACCCAGTCTCCATCCTCCCTGTCTGCATCTGTAGGGGACAGAGTCACCA | 3226 | DIQMTQSPSSLSASVGDRVTITCRASQT | 3508 | | |
| | TCACTTGCCGGGCAAGTCAGACCATTAACAACTATTTAACTTGGTATCAGCAGAAACCAGG | | INNYLTWYQQKPGKAPNLLIYAASSLQS | | | |
| | GAAAGCCCCTAACCTCCTGATCTATGCTGCATCCAGTTTGCAAAGTGGGGTCCCATCAAGG | | GVPSRFSGSGSGTDFTLTISSLQPEDFA | | | |
| | TTCAGTGGCAGTGGATCTGGGACAGATTTCACTCTCACCATCAGCAGTCTGCAACCTGAAG | | TYYCQQSYSSPITFGQGTRLEIK | | | |
| | ATTTTGCAACTTACTACTGTCAACAGAGTTACAGTTCCCCTATCACCTTCGGCCAAGGGAC | | | | | |
| | ACGACTGGAGATTAAA | | | | | |
| ADI-75875 | AAGCCTGTGCTGACTCAGCCCCACTCTGTGTCGGAGTCTCCGGGGAAGACAGTAACCATCT | 3227 | KPVLTQPHSVSESPGKTVTISCTRSSGS | 3509 | | |
| | CCTGCACCCGCAGCAGTGGCAGCATTGCCAGCAACTATGTGCAGTGGTACCAGCAGCGCCC | | IASNYVQWYQQRPGSSPSTVIYEDNQRP | | | |
| | GGGCAGTTCACCTTCCACTGTTATCTATGAGGATAACCAAAGACCCTCTGGGGTCCCTGAT | | SGVPDRFSGSIDSSSNSASLTISGLQTD | | | |
| | CGGTTCTCTGGCTCCATCGACAGCTCCTCCAACTCTGCCTCCCTCACCATCTCTGGACTGC | | DEADYYCQSYDSSLWVFGGGTKLTVL | | | |
| | AGACTGACGACGAGGCTGACTACTACTGTCAGTCTTATGATAGCAGCCTTTGGGTGTTCGG | | | | | |
| | CGGAGGGACCAAGCTCACCGTCTTA | | | | | |
| ADI-75714 | CAGTCTGTGTTGACGCAGCCGCCCTCAGTGTCTGGGGCCCCAGGGCAGAGGGTCACCATCT | 3228 | QSVLTQPPSVSGAPGQRVTISCTGSNSN | 3510 | | |
| | CCTGCACTGGGAGCAACTCCAACATCGGGGCAGGTTATGATGTACACTGGTACCAGCAACT | | IGAGYDVHWYQQLPGTAPKLLIYGNNNR | | | |
| | TCCAGGAACAGCCCCCAAACTCCTCATCTATGGTAACAACAATCGGCCCTCAGGGGTCCCT | | PSGVPDRFSGSKSVTSASLAITGLQAED | | | |
| | GACCGATTCTCTGGCTCCAAGTCTGTCACCTCAGCCTCCCTGGCCATCACTGGGCTCCAGG | | EADYYCQSYDSSLSDSVFGGGTKVTVL | | | |
| | CTGAGGATGAGGCTGATTATTACTGCCAGTCCTATGACAGCAGCCTGAGTGATTCGGTGTT | | | | | |
| | CGGCGGAGGGACCAAGGTGACCGTCCTA | | | | | |
| ADI-75688 | GAAATTGTGATGACCCAGTCTCCAGGCACCCTGTCTTTGTCTCCAGGGGAAAGAGCCACCC | 3229 | EIVMTQSPGTLSLSPGERATLSCRASQS | 3511 | | |
| | TCTCCTGCAGGGCCAGTCAGAGTGTTAGCAGCAGCTACTTAGCCTGGTACCAGCAGAAACC | | VSSSYLAWYQQKPGQAPRLLIYGASSRA | | | |
| | TGGCCAGGCTCCCAGGCTCCTCATCTATGGTGCATCCAGCAGGGCCACTGGCATCCCAGAC | | TGIPDRFSGSGSGTDFTLTISRLEPEDF | | | |
| | AGGTTCAGTGGCAGTGGGTCTGGGACAGACTTCACTCTCACCATCAGCAGACTGGAGCCTG | | AVYYCQQYGSSPGTFGQGTKVEIK | | | |
| | AAGATTTTGCAGTGTATTACTGTCAGCAGTATGGTAGCTCACCTGGAACTTTTGGCCAGGG | | | | | |
| | GACCAAGGTGGAGATCAAA | | | | | |
| ADI-75637 | GACATCACGATGACGCAGTCTCCATCCTCCCTGTCTGCATCTGTAGGAGACAGAGTCACCA | 3230 | DITMTQSPSSLSASVGDRVTIACRASQG | 3512 | | |
| | TCGCTTGCCGGGCAAGTCAGGGCATTAGCACCTCTTTAAATTGGTGTCAGCAGAAACCAGG | | ISTSLNWCQQKPGKAPKLLISAASSLQS | | | |
| | GAAAGCCCCTAAGCTCCTGATCTCTGCTGCATCCAGTTTGCAAAGTGGGGTCCCATCAAGG | | GVPSRFSGSGSGTDFTLTISNLQPEDFA | | | |
| | TTCAGTGGCAGTGGATCTGGGACAGATTTCACTCTCACCATCAGCAATCTGCAACCTGAAG | | TYYCQQSYSTPWTFGQGTKVEIK | | | |
| | ATTTTGCAACTTACTACTGTCAACAGAGTTATAGTACCCCGTGGACGTTCGGCCAAGGGAC | | | | | |
| | CAAGGTGGAAATCAAA | | | | | |

| | | | SEQ | | SEQ | | SEQ | | SEQ | | SEQ | | SEQ | | SEQ |
|---|---|---|---|---|---|---|---|---|---|---|---|---|---|---|---|
| | VL | VL | ID | VL | ID | VL | ID | VL | ID | VL | ID | VL | ID | VL | ID |
| Clone ID | Germline | FR1 | NO: | CDR1 | NO: | FR2 | NO: | CDR2 | NO: | FR3 | NO: | CDR3 | NO: | FR4 | NO: |
| ADI-75745 | IGKV1D- | EIVMTQ | 1891 | RASQSIG | 2249 | WYQQKS | 2312 | ATSSLH | 2523 | GVPSRFSG | 2696 | QQSYN | 2924 | FGQGTK | 2937 |
| | 39 | SPSSLS | | TYLN | | GKAPKL | | S | | SGYGTDFT | | SPGFS | | VEIK | |
| | | ASVGDR | | | | LIY | | | | LTIDSVQP | | | | | |
| | | VTITC | | | | | | | | EDFATYYC | | | | | |
| ADI-75665 | IGLV1-40 | QSVVTQ | 1972 | TGSSSNI | 2250 | WYQQLP | 2314 | GDNNRP | 2524 | GVPDRFSG | 2697 | QSYDS | 2925 | FGGGTK | 2939 |
| | | PPSVSG | | GTGYDVH | | GTAPKL | | S | | SKSGTSAS | | TLIGP | | LTVL | |
| | | APGQRV | | | | LIY | | | | LAITGLQP | | V | | | |
| | | TISC | | | | | | | | DDEAAYYC | | | | | |
| ADI-75812 | IGLV6-57 | NFMLTQ | 1992 | TRSSGYI | 2251 | WYQQRP | 2380 | EDNQRP | 2431 | GVPERFSA | 2698 | QSYES | 2926 | FGGGTK | 2939 |
| | | PHSVSE | | ASNYVL | | GSAPTI | | S | | SVDSSSNS | | DTVI | | LTVL | |
| | | SPGKTV | | | | VIS | | | | ASLTISGL | | | | | |
| | | TISC | | | | | | | | KTEDEADY | | | | | |
| | | | | | | | | | | YC | | | | | |
| ADI-75788 | IGLV3-21 | SPVLTQ | 2040 | GGDNIGS | 2252 | WYQQKP | 2283 | DDTDRP | 2419 | GIPERFSG | 2545 | QVWDT | 2927 | FGTGTK | 2949 |
| | | PPSVSV | | KNVH | | GQAPVL | | S | | SNSGNTAT | | SGDHY | | LTVL | |
| | | APGQTA | | | | VVY | | | | LTISRVEA | | V | | | |
| | | RITC | | | | | | | | GDEADYYC | | | | | |
| ADI-75599 | IGLV1-47 | PSELTQ | 2041 | SGSSSNI | 2253 | WYQQLP | 2314 | SNNQRP | 2463 | GVPDRFSG | 2669 | AAWDD | 2928 | FGGGTK | 2939 |
| | | PPSASG | | GSNSVY | | GTAPKL | | S | | SKSGTSAS | | SRWV | | LTVL | |
| | | TPGQGV | | | | LIY | | | | LAISGLRS | | | | | |
| | | TISC | | | | | | | | EDEADYYC | | | | | |
| ADI-75664 | IGKV3-20 | EIAMTQ | 2042 | RASQSVS | 2230 | WYQQKP | 2258 | GASSRA | 2464 | GIPDRFSG | 2616 | QQYGS | 2929 | FGQGTK | 2937 |
| | | SPGTLS | | SSYLA | | GQAPRL | | T | | SGSGTDFT | | SPYT | | VEIK | |
| | | LSPGER | | | | LIY | | | | LTISRLEP | | | | | |
| | | ATLSC | | | | | | | | EDFAVYYC | | | | | |
| ADI-75646 | IGKV4-1 | DIQMTQ | 1927 | KSSQSVL | 2254 | WYQQKP | 2290 | WASTRE | 2422 | GVPDRFSG | 2619 | QQYYT | 2930 | FGPGTK | 2942 |
| | | SPDSLA | | YSSNNKN | | GQPPKL | | S | | SGSGTDFT | | PPLT | | VEIK | |
| | | VSLGER | | YLA | | LIY | | | | LTISSLQA | | | | | |
| | | ATINC | | | | | | | | EDVAVYYC | | | | | |
| ADI-75723 | IGLV6-57 | TFMLTQ | 2043 | TRSSGSI | 2109 | WYQQRP | 2298 | QDNERP | 2525 | GVPDRFSG | 2574 | QSYDT | 2931 | FGGGTK | 2939 |
| | | PHSVSE | | ASNYVQ | | GSAPTT | | S | | SIDSSSNS | | SNEV | | LTVL | |
| | | SPGKTV | | | | VIY | | | | ASLTISGL | | | | | |
| | | TISC | | | | | | | | KTEDEADY | | | | | |
| | | | | | | | | | | YC | | | | | |
| ADI-75595 | IGLV1-47 | QSVLTQ | 2044 | SGRSSNI | 2255 | WYQQFP | 2324 | GDDQRP | 2526 | GVPDRFSG | 2669 | ATWDD | 2932 | FGGGTK | 2939 |
| | | PPSASG | | GSNSVN | | GTAPKL | | S | | SKSGTSAS | | SGWV | | LTVL | |
| | | TPGQRV | | | | LIY | | | | LAISGLRS | | | | | |
| | | TITC | | | | | | | | EDEADYYC | | | | | |
| ADI-75824 | IGLV1-44 | SHELTQ | 2045 | SGSTSNI | 2214 | WYQHLP | 2307 | SDDQRP | 2527 | GVPDRFSG | 2699 | AAWDD | 2933 | FGGGTK | 2939 |
| | | PPSASG | | GSNTVK | | GTAPKL | | S | | SKSGTSAS | | TLAGP | | LTVL | |
| | | TPGQRV | | | | LIY | | | | LAISGLQS | | V | | | |
| | | TISC | | | | | | | | EDESDYYC | | | | | |
| ADI-75749 | IGKV4-1 | DIVMTQ | 2046 | KSSQSVL | 2256 | WYQQRP | 2381 | WASTRE | 2422 | GVPDRFSG | 2619 | QQYYS | 2934 | FGPGTK | 2950 |
| | | SPDSLA | | YRSKNKN | | GQPPKL | | S | | SGSGTDFT | | SPS | | VDIK | |
| | | VSLGER | | YLA | | LIY | | | | LTISSLQA | | | | | |
| | | ATINC | | | | | | | | EDVAVYYC | | | | | |
| ADI-75867 | IGKV1D- | DIQMTQ | 1896 | RASQSIS | 2066 | WYQQKP | 2316 | AASSLP | 2509 | GVPSRFRG | 2626 | QQSYN | 2935 | FGQGTK | 2937 |
| | 39 | SPSSLS | | TYLN | | GKAPKV | | S | | SGSGTDFT | | APRT | | VEIK | |
| | | ASVGDR | | | | LIY | | | | LTISSLQP | | | | | |
| | | VTIAC | | | | | | | | EDFATYYC | | | | | |

| | | SEQ | | SEQ | Reverted | SEQ |
|---|---|---|---|---|---|---|
| | | ID | | ID | VL | ID |
| Clone ID | VL DNA | NO: | VL Protein | NO: | Protein | NO: |
| ADI-75745 | GAAATTGTGATGACGCAGTCTCCATCCTCCCTGTCTGCATCTGTAGGAGACAGAGTCACCA | 3231 | EIVMTQSPSSLSASVGDRVTITCRASQS | 3513 | | |
| | TCACTTGCCGGGCAAGTCAGAGCATTGGCACCTATTTAAATTGGTATCAGCAGAAATCAGG | | IGTYLNWYQQKSGKAPKLLIYATSSLHS | | | |
| | GAAAGCCCCTAAACTCCTCATCTATGCTACATCCAGTTTGCATAGTGGTGTCCCATCAAGG | | GVPSRFSGSGYGTDFTLTIDSVQPEDFA | | | |
| | TTCAGTGGCAGTGGATATGGGACAGATTTCACTCTCACCATCGACAGTGTGCAACCTGAAG | | TYYCQQSYNSPGFSFGQGTKVEIK | | | |
| | ATTTTGCAACTTATTACTGTCAACAGAGTTACAATAGCCCTGGGTTCAGTTTTGGCCAGGG | | | | | |
| | GACCAAGGTGGAAATCAAA | | | | | |
| ADI-75665 | CAGTCTGTCGTGACGCAGCCGCCCTCAGTGTCTGGGGCCCCAGGGCAGAGGGTCACCATCT | 3232 | QSVVTQPPSVSGAPGQRVTISCTGSSSN | 3514 | | |
| | CCTGCACTGGGAGCAGCTCCAACATCGGGACAGGTTATGATGTACACTGGTACCAACAACT | | IGTGYDVHWYQQLPGTAPKLLIYGDNNR | | | |
| | TCCAGGAACAGCCCCCAAACTCCTCATCTATGGTGACAACAATCGGCCCTCAGGAGTCCCT | | PSGVPDRFSGSKSGTSASLAITGLQPDD | | | |
| | GACCGATTCTCTGGCTCCAAGTCTGGCACCTCAGCCTCCCTGGCCATCACTGGGCTCCAGC | | EAAYYCQSYDSTLIGPVFGGGTKLTVL | | | |
| | CTGACGATGAGGCTGCTTATTACTGCCAGTCCTATGACAGCACCCTGATTGGTCCGGTATT | | | | | |
| | CGGCGGAGGGACCAAGCTCACCGTCCTA | | | | | |
| ADI-75812 | AATTTTATGCTGACTCAGCCCCACTCTGTGTCGGAGTCTCCGGGGAAGACGGTAACCATCT | 3233 | NFMLTQPHSVSESPGKTVTISCTRSSGY | 3515 | | |
| | CCTGCACCCGCAGCAGTGGCTACATTGCCAGCAACTATGTGCTATGGTACCAACAGCGCCC | | IASNYVLWYQQRPGSAPTIVISEDNQRP | | | |
| | GGGCAGTGCCCCCACCATTGTGATCTCTGAGGATAACCAAAGACCCTCTGGGGTCCCTGAG | | SGVPERFSASVDSSSNSASLTISGLKTE | | | |
| | CGGTTCTCTGCCTCCGTCGACAGCTCCTCCAACTCTGCCTCCCTCACCATCTCTGGACTGA | | DEADYYCQSYESDTVIFGGGTKLTVL | | | |
| | AGACTGAGGACGAGGCTGACTACTACTGTCAGTCTTATGAAAGTGACACTGTGATTTTCGG | | | | | |
| | CGGAGGCACCAAGCTCACCGTCCTA | | | | | |
| ADI-75788 | TCGCCTGTGCTGACTCAGCCACCCTCGGTGTCAGTGGCCCCTGGGCAGACGGCCAGGATCA | 3234 | SPVLTQPPSVSVAPGQTARITCGGDNIG | 3516 | | |
| | CCTGTGGGGGAGACAACATTGGAAGTAAAAATGTCCACTGGTACCAGCAGAAGCCAGGCCA | | SKNVHWYQQKPGQAPVLVVYDDTDRPSG | | | |
| | GGCCCCTGTGCTGGTCGTCTATGATGATACCGACCGGCCCTCAGGGATCCCTGAGCGATTC | | IPERFSGSNSGNTATLTISRVEAGDEAD | | | |
| | TCTGGCTCCAATTCTGGGAACACGGCCACCCTGACCATCAGCAGGGTCGAAGCCGGGGATG | | YYCQVWDTSGDHYVFGTGTKLTVL | | | |
| | AGGCCGACTATTACTGTCAGGTGTGGGATACTAGTGGTGATCATTATGTCTTCGGAACTGG | | | | | |
| | GACCAAGCTCACCGTCCTA | | | | | |
| ADI-75599 | CCGTCTGAGCTGACTCAGCCACCCTCAGCGTCTGGGACCCCCGGGCAGGGGGTCACCATCT | 3235 | PSELTQPPSASGTPGQGVTISCSGSSSN | 3517 | | |
| | CTTGCTCTGGAAGCAGCTCCAACATCGGAAGTAATTCTGTATACTGGTACCAGCAGCTCCC | | IGSNSVYWYQQLPGTAPKLLIYSNNQRP | | | |
| | AGGAACGGCCCCCAAACTCCTCATCTATAGTAATAATCAGCGGCCCTCAGGGGTCCCTGAC | | SGVPDRFSGSKSGTSASLAISGLRSEDE | | | |
| | CGATTCTCTGGCTCCAAGTCTGGCACCTCAGCCTCCCTGGCCATCAGTGGGCTCCGGTCCG | | ADYYCAAWDDSRWVFGGGTKLTVL | | | |
| | AGGATGAGGCTGATTATTACTGTGCAGCATGGGATGACAGCCGTTGGGTGTTCGGCGGAGG | | | | | |
| | GACCAAGCTCACCGTCCTA | | | | | |
| ADI-75664 | GAAATTGCAATGACGCAGTCTCCAGGCACCCTGTCTTTGTCTCCAGGGGAAAGAGCCACCC | 3236 | EIAMTQSPGTLSLSPGERATLSCRASQS | 3518 | | |
| | TCTCCTGCAGGGCCAGTCAGAGTGTTAGCAGCAGCTACTTAGCCTGGTACCAGCAGAAACC | | VSSSYLAWYQQKPGQAPRLLIYGASSRA | | | |
| | TGGCCAGGCTCCCAGGCTCCTCATCTATGGTGCATCCAGCAGGGCCACTGGCATCCCAGAC | | TGIPDRFSGSGSGTDFTLTISRLEPEDF | | | |
| | AGGTTCAGTGGCAGTGGGTCTGGGACAGACTTCACTCTCACCATCAGCAGACTGGAGCCTG | | AVYYCQQYGSSPYTFGQGTKVEIK | | | |
| | AAGATTTTGCAGTGTATTACTGTCAGCAGTATGGTAGCTCACCGTACACTTTTGGCCAGGG | | | | | |
| | GACCAAGGTGGAAATCAAA | | | | | |
| ADI-75646 | GACATCCAGATGACCCAGTCTCCAGACTCCCTGGCTGTGTCTCTGGGCGAGAGGGCCACCA | 3237 | DIQMTQSPDSLAVSLGERATINCKSSQS | 3519 | | |
| | TCAACTGCAAGTCCAGCCAGAGTGTTTTATACAGCTCCAACAATAAGAACTACTTAGCTTG | | VLYSSNNKNYLAWYQQKPGQPPKLLIYW | | | |
| | GTACCAGCAGAAACCAGGACAGCCTCCTAAGCTGCTCATTTACTGGGCATCTACCCGGGAA | | ASTRESGVPDRFSGSGSGTDFTLTISSL | | | |
| | TCCGGGGTCCCTGACCGATTCAGTGGCAGCGGGTCTGGGACAGATTTCACTCTCACCATCA | | QAEDVAVYYCQQYYTPPLTFGPGTKVEI | | | |
| | GCAGCCTGCAGGCTGAAGATGTGGCAGTTTATTACTGTCAGCAATATTATACTCCTCCTCT | | K | | | |
| | CACTTTCGGCCCTGGGACCAAGGTGGAAATCAAA | | | | | |
| ADI-75723 | ACTTTTATGCTGACTCAGCCCCACTCTGTGTCGGAGTCTCCGGGGAAGACGGTAACCATCT | 3238 | TFMLTQPHSVSESPGKTVTISCTRSSGS | 3520 | | |
| | CCTGCACCCGCAGCAGTGGCAGCATTGCCAGCAACTATGTGCAGTGGTACCAGCAGCGCCC | | IASNYVQWYQQRPGSAPTTVIYQDNERP | | | |
| | GGGCAGTGCCCCCACCACTGTGATCTATCAGGATAATGAAAGACCCTCTGGAGTCCCTGAT | | SGVPDRFSGSIDSSSNSASLTISGLKTE | | | |
| | CGGTTCTCTGGCTCCATCGACAGTTCTTCCAACTCTGCCTCCCTCACCATCTCTGGACTGA | | DEADYYCQSYDTSNEVFGGGTKLTVL | | | |
| | AGACTGAGGACGAGGCTGACTACTACTGTCAGTCTTATGATACTAGCAATGAGGTGTTCGG | | | | | |
| | CGGAGGGACCAAGCTCACCGTCCTA | | | | | |
| ADI-75595 | CAGTCTGTGCTGACTCAGCCACCCTCAGCGTCTGGGACCCCCGGGCAGAGGGTCACCATCA | 3239 | QSVLTQPPSASGTPGQRVTITCSGRSSN | 3521 | | |
| | CTTGTTCTGGAAGGAGCTCCAACATTGGAAGTAATTCTGTAAACTGGTATCAACAGTTCCC | | IGSNSVNWYQQFPGTAPKLLIYGDDQRP | | | |
| | AGGAACGGCCCCCAAACTCCTCATCTATGGTGATGATCAACGGCCCTCAGGGGTCCCGGAC | | SGVPDRFSGSKSGTSASLAISGLRSEDE | | | |
| | CGATTTTCTGGCTCCAAGTCTGGCACCTCAGCCTCCCTGGCCATCAGTGGGCTCCGGTCCG | | ADYYCATWDDSGWVFGGGTKLTVL | | | |
| | AAGATGAGGCTGATTATTATTGTGCAACATGGGATGACAGCGGTTGGGTGTTCGGCGGAGG | | | | | |
| | GACCAAGCTCACCGTCCTA | | | | | |
| ADI-75824 | TCGCATGAGCTGACTCAGCCACCCTCAGCGTCTGGGACCCCCGGGCAGAGGGTCACCATCT | 3240 | SHELTQPPSASGTPGQRVTISCSGSTSN | 3522 | | |
| | CTTGTTCTGGAAGCACCTCCAACATCGGGAGTAATACTGTAAAATGGTACCAGCACCTCCC | | IGSNTVKWYQHLPGTAPKLLIYSDDQRP | | | |
| | AGGAACGGCCCCCAAACTCCTCATCTATAGTGATGATCAGCGGCCCTCAGGGGTCCCTGAC | | SGVPDRFSGSKSGTSASLAISGLQSEDE | | | |
| | CGATTCTCTGGCTCCAAGTCTGGCACCTCAGCCTCCCTGGCCATCAGTGGGCTCCAGTCTG | | SDYYCAAWDDTLAGPVFGGGTKLTVL | | | |
| | AGGATGAGTCTGATTATTACTGTGCAGCATGGGATGACACTTTGGCTGGTCCGGTGTTCGG | | | | | |
| | CGGAGGGACCAAGCTCACCGTCCTA | | | | | |
| ADI-75749 | GATATTGTGATGACCCAGTCTCCAGACTCCCTGGCTGTGTCTCTGGGCGAGAGGGCCACCA | 3241 | DIVMTQSPDSLAVSLGERATINCKSSQS | 3523 | | |
| | TCAACTGCAAGTCCAGCCAGAGTGTTTTATACAGGTCCAAAAATAAGAACTACTTAGCTTG | | VLYRSKNKNYLAWYQQRPGQPPKLLIYW | | | |
| | GTACCAGCAGAGACCAGGACAGCCTCCTAAGCTGCTCATTTACTGGGCATCTACCCGGGAA | | ASTRESGVPDRFSGSGSGTDFTLTISSL | | | |
| | TCCGGGGTCCCTGACCGATTCAGTGGCAGCGGGTCTGGGACAGATTTCACTCTCACCATCA | | QAEDVAVYYCQQYYSSPSFGPGTKVDIK | | | |
| | GCAGCCTGCAGGCTGAAGATGTGGCAGTTTATTACTGTCAGCAATATTATAGTTCTCCCTC | | | | | |
| | TTTCGGCCCTGGGACCAAAGTGGATATCAAA | | | | | |
| ADI-75867 | GACATCCAGATGACCCAGTCTCCATCTTCCCTGTCTGCATCTGTAGGAGACAGAGTCACCA | 3242 | DIQMTQSPSSLSASVGDRVTIACRASQS | 3524 | | |
| | TCGCTTGCCGGGCAAGTCAGAGCATTAGCACCTATTTAAATTGGTATCAGCAGAAACCAGG | | ISTYLNWYQQKPGKAPKVLIYAASSLPS | | | |
| | GAAAGCCCCTAAGGTCCTGATCTATGCTGCATCCAGTTTACCAAGTGGGGTCCCATCAAGG | | GVPSRFRGSGSGTDFTLTISSLQPEDFA | | | |
| | TTCCGTGGCAGTGGATCTGGGACAGATTTCACTCTCACCATCAGCAGTCTGCAACCTGAAG | | TYYCQQSYNAPRTFGQGTKVEIK | | | |
| | ATTTTGCAACTTACTACTGTCAACAGAGTTACAATGCCCCTCGGACGTTCGGCCAAGGGAC | | | | | |
| | CAAGGTGGAAATCAAA | | | | | |

| | | | SEQ | | SEQ | | SEQ | | SEQ | | SEQ | | SEQ | | SEQ |
|---|---|---|---|---|---|---|---|---|---|---|---|---|---|---|---|
| | VL | VL | ID | VL | ID | VL | ID | VL | ID | VL | ID | VL | ID | VL | ID |
| Clone ID | Germline | FR1 | NO: | CDR1 | NO: | FR2 | NO: | CDR2 | NO: | FR3 | NO: | CDR3 | NO: | FR4 | NO: |
| VYD224 | IGKV3-11 | EIVLTQ | 1945 | RASQSVS | 2119 | WYQQRP | 2306 | DASNRA | 2448 | GIPARFSG | 2596 | QQRSN | 2794 | FGGGTK | 2936 |
| (ADI- | | SPATLS | | TYLA | | GQAPRL | | T | | SGSETDFT | | WLT | | VEIK | |
| 80707) | | LSPGER | | | | LIY | | | | LTISSLEP | | | | | |
| | | ATLSC | | | | | | | | EDFAVYYC | | | | | |
| VYD225 | | DIQMT | 2047 | ITNSLA | 2067 | WYQQ | 2267 | AASTL | 2398 | GVPPRF | 2544 | QQYF | 2718 | FGQGT | 2937 |
| | | QSPS | | RASQG | | KPGK | | ES | | RGSGSG | | DSPH | | KVEIK | |
| | | SLSAS | | | | APNLL | | | | TDFTLTI | | T | | | |
| | | VGDT | | | | LY | | | | SSLQPE | | | | | |
| | | VTITC | | | | | | | | DFATFY | | | | | |
| | | | | | | | | | | C | | | | | |

| | | SEQ | | SEQ | Reverted | SEQ |
|---|---|---|---|---|---|---|
| | | ID | | ID | VL | ID |
| Clone ID | VL DNA | NO: | VL Protein | NO: | Protein | NO: |
| VYD224 | GAAATTGTGTTGACACAGTCTCCAGCCACCCTGTCTTTGTCTCCAGGGGAAAGAGCCACCC | 3243 | EIVLTQSPATLSLSPGERATLSCRASQS | 3353 | EIVLTQSPA | 3353 |
| (ADI- | TCTCCTGCAGGGCCAGTCAGAGTGTTAGCACCTACTTAGCCTGGTACCAACAGAGACCTGG | | VSTYLAWYQQRPGQAPRLLIYDASNRAT | | TLSLSPGER | |
| 80707) | CCAGGCTCCCAGGCTCCTCATCTATGATGCATCCAACAGGGCCACTGGCATCCCAGCCAGG | | GIPARFSGSGSETDFTLTISSLEPEDFA | | ATLSCRASQ | |
| | TTCAGTGGCAGTGGGTCTGAGACAGACTTCACTCTCACCATCAGCAGCCTGGAGCCTGAAG | | VYYCQQRSNWLTFGGGTKVEIK | | SVSTYLAWY | |
| | ATTTTGCAGTTTATTATTGTCAACAGCGGAGCAACTGGCTCACTTTCGGCGGAGGGACCAA | | | | QQRPGQAPR | |
| | GGTGGAGATCAAA | | | | LLIYDASNR | |
| VYD225 | GACATTCAGATGACTCAGTCGCCTTCATCTCTGTCTGCATCTGTCGGC | 3244 | DIQMTQSPSSLSASVGDTVTITCR | 3525 | | |
| | GATACTGTTACTATCACATGTAGAGCCAGCCAGGGAATTACGAATTCAC | | ASQGITNSLAWYQQKPGKAPNLL | | | |
| | TTGCTTGGTATCAGCAAAAACCTGGAAAAGCACCTAACCTCTTGCTCTA | | LYAASTLESGVPPRFRGSGSGTD | | | |
| | CGCGGCGTCCACCTTGGAATCTGGTGTCCCACCACGATTTCGGGGCA | | FTLTISSLQPEDFATFYCQQYFDS | | | |
| | GTGGAAGTGGCACAGACTTTACTCTCACCATCTCGAGCTTGCAACCTG | | PHTFGQGTKVEIK | | | |
| | AGGATTTCGCTACATTTTACTGTCAACAATATTTCGACTCTCCCCACAC | | | | | |
| | CTTCGGCCAAGGCACAAAGGTGGAGATTAAA | | | | | |

TABLE 5

| | VH | VH | | SEQ | | SEQ | | SEQ | | SEQ | | SEQ | | SEQ | |
|---|---|---|---|---|---|---|---|---|---|---|---|---|---|---|---|
| | CDR3 | Germ- | VH | ID | VH | ID | VH | ID | VH | ID | VH | ID | VH | ID | VH |
| Clone ID | Lineage | line | FR1 | NO: | CDR1 | NO: | FR2 | NO: | CDR2 | NO: | FR3 | NO: | CDR3 | NO: | FR4 |
| ADI-81604 | 62 | IGHV5- | QVQLV | 174 | YSFTSY | 372 | WVRQMP | 476 | IIYPGD | 635 | QVTISA | 1010 | ARGEGYG | 6474 | WGQGTM |
| | | 51 | QSGAE | | WIG | | GKGLEW | | SDTRYS | | DKSIST | | DYADAFD | | VTVSS |
| | | | VKKPG | | | | MG | | PSFQG | | AYLQWS | | I | | |
| | | | ESLKI | | | | | | | | SLKASD | | | | |
| | | | SCKGS | | | | | | | | TAMYYC | | | | |
| | | | G | | | | | | | | | | | | |
| ADI-81710 | 80 | IGHV5- | QVQLV | 5313 | YSFTTY | 5515 | WVRQMP | 476 | IIYPGD | 635 | QVTISA | 6174 | ARRIRTY | 6475 | WGQGTL |
| | | 51 | QSGAE | | WIG | | GKGLEW | | SDTRYS | | DKSMTT | | PPCFDY | | VTVSS |
| | | | VKKPG | | | | MG | | PSFQG | | AYLQWS | | | | |
| | | | ESLKI | | | | | | | | SLKASD | | | | |
| | | | SCKIS | | | | | | | | TAMYFC | | | | |
| | | | G | | | | | | | | | | | | |
| ADI-81579 | 40 | IGHV4- | QVQLQ | 5314 | ASVSGE | 5516 | WIRQPP | 5773 | YFYSTG | 5869 | RVTISV | 6175 | ARADRRL | 6476 | WGQGTT |
| | | 61 | QSGPG | | GNYWT | | GKRLES | | KTNYNP | | DKSKNL | | PNDAFDV | | VTVSS |
| | | | LVKPS | | | | IA | | SLKS | | FSLRLD | | | | |
| | | | ETLSL | | | | | | | | SVTAAD | | | | |
| | | | TCSVS | | | | | | | | TALYYC | | | | |
| | | | G | | | | | | | | | | | | |
| ADI-81656 | 29 | IGHV1- | QVQLV | 50 | GTFSSY | 5517 | WVRQVP | 511 | RVIPFL | 5870 | RLTIAV | 6176 | AEHYHES | 6477 | WGQGTM |
| | | 69 | QSGAE | | GIS | | GQGLEW | | RILDYA | | DTSTST | | RFGGGIS | | VTVSS |
| | | | VKKPG | | | | MG | | PKFQG | | AYLELS | | DDAFNI | | |
| | | | SSVKV | | | | | | | | SLRSED | | | | |
| | | | SCKAS | | | | | | | | TAVYYC | | | | |
| | | | G | | | | | | | | | | | | |
| ADI-81640 | 13 | IGHV3- | QVQLL | 5315 | LIISDH | 5518 | WVRQAP | 432 | RSANRV | 5871 | RFTISR | 6177 | VVIAGTY | 6478 | WGQGTL |
| | | 72 | ESGGG | | YID | | GKGLEW | | NSYTAL | | DDSKNT | | GS | | VTVSS |
| | | | LVQPG | | | | VG | | YAASVM | | LFLQMT | | | | |
| | | | GSLRL | | | | | | G | | SLKTDD | | | | |
| | | | SCAIS | | | | | | | | TAVYHC | | | | |
| | | | G | | | | | | | | | | | | |
| ADI-81586 | 47 | IGHV4- | QVQLQ | 5316 | GSVNGD | 5519 | WIRQPP | 5774 | EISHDG | 5872 | RVSISL | 6178 | ARGLSAV | 6479 | WGQGTL |
| | | 34 | QWGAG | | YWS | | GKGLEL | | TTKYKS | | DTSKNQ | | VTVSGWF | | VTVSS |
| | | | LLKPS | | | | IG | | ALES | | FSLKLS | | DS | | |
| | | | ETLSL | | | | | | | | SVTAAD | | | | |
| | | | TCAFS | | | | | | | | TAMYYC | | | | |
| | | | G | | | | | | | | | | | | |
| ADI-81663 | 35 | IGHV3- | EVQLQ | 5317 | FTFSDH | 5520 | WVRQAP | 432 | RTRNKA | 5873 | RFTISR | 6179 | ARVGAAL | 6480 | WGQGTL |
| | | 72 | ESGGG | | FMD | | GKGLEW | | NSYTTE | | DDSKNS | | GGVCDY | | VTVSS |
| | | | LVQPG | | | | VG | | YAASVK | | LYLQMN | | | | |
| | | | GSLRL | | | | | | G | | SLKTED | | | | |
| | | | SCAAS | | | | | | | | TAVYYC | | | | |
| | | | G | | | | | | | | | | | | |
| | SEQ | | | | | | | SEQ | | | SEQ | VH | | VH Amino | |
| | ID | | | | | | | ID | | | ID | Nucleotide | | Acid | |
| Clone ID | NO: | VH DNA | | | | | | NO: | VH Protein | | NO: | Substitution | | Substitution | |
| ADI-81604 | 1299 | CAGGTCCAGCTGGTGCAGTCTGGAGCAGAGGTGAAAAAGCC | | | | | | 6832 | QVQLVQSGAEVKKP | | 7185 | 0 | | 0 | |
| | | CGGGGAGTCTCTGAAGATCTCCTGTAAGGGTTCTGGATACA | | | | | | | GESLKISCKGSGYS | | | | | | |
| | | GCTTTACCAGCTACTGGATCGGCTGGGTGCGCCAGATGCCC | | | | | | | FTSYWIGWVRQMPG | | | | | | |
| | | GGGAAAGGCCTGGAGTGGATGGGGATCATCTATCCTGGTGA | | | | | | | KGLEWMGIIYPGDS | | | | | | |
| | | CTCTGATACCAGATACAGCCCGTCCTTCCAAGGCCAGGTCA | | | | | | | DTRYSPSFQGQVTI | | | | | | |
| | | CCATCTCAGCCGACAAGTCCATCAGCACCGCCTACCTGCAG | | | | | | | SADKSISTAYLQWS | | | | | | |
| | | TGGAGCAGCCTGAAGGCCTCGGACACCGCCATGTATTACTG | | | | | | | SLKASDTAMYYCAR | | | | | | |
| | | TGCGAGGGGGGAAGGGTACGGTGACTACGCAGATGCTTTTG | | | | | | | GEGYGDYADAFDIW | | | | | | |
| | | ATATCTGGGGCCAAGGGACAATGGTCACCGTCTCCTCA | | | | | | | GQGTMVTVSS | | | | | | |
| ADI-81710 | 1286 | CAGGTCCAGCTGGTGCAGTCTGGAGCAGAGGTGAAAAAGCC | | | | | | 6833 | QVQLVQSGAEVKKP | | 7186 | 7 | | 5 | |
| | | CGGGGAGTCTCTGAAGATCTCCTGTAAAATCTCTGGATACA | | | | | | | GESLKISCKISGYS | | | | | | |
| | | GCTTTACCACCTACTGGATCGGCTGGGTGCGCCAGATGCCC | | | | | | | FTTYWIGWVRQMPG | | | | | | |
| | | GGGAAAGGCCTGGAGTGGATGGGCATCATCTATCCTGGTGA | | | | | | | KGLEWMGIIYPGDS | | | | | | |
| | | CTCTGATACCAGATACAGCCCGTCCTTCCAAGGCCAGGTCA | | | | | | | DTRYSPSFQGQVTI | | | | | | |
| | | CCATCTCAGCCGACAAGTCCATGACCACCGCCTACCTGCAG | | | | | | | SADKSMTTAYLQWS | | | | | | |
| | | TGGAGCAGCCTGAAGGCCTCGGACACCGCCATGTATTTCTG | | | | | | | SLKASDTAMYFCAR | | | | | | |
| | | TGCGAGACGAATTAGGACCTACCCCCCCTGCTTTGACTACT | | | | | | | RIRTYPPCFDYWGQ | | | | | | |
| | | GGGGCCAGGGAACCCTGGTCACCGTCTCCTCA | | | | | | | GTLVTVSS | | | | | | |
| ADI-81579 | 1287 | CAGGTACAGCTGCAGCAGTCGGGCCCAGGGCTGGTGAAGCC | | | | | | 6834 | QVQLQQSGPGLVKP | | 7187 | 27 | | 18 | |
| | | TTCGGAGACCCTGTCCCTCACGTGCTCTGTCTCTGGTGCCT | | | | | | | SETLSLTCSVSGAS | | | | | | |
| | | CCGTCAGCGGTGAGGGTAACTACTGGACCTGGATCCGGCAG | | | | | | | VSGEGNYWTWIRQP | | | | | | |
| | | CCCCCAGGGAAACGACTGGAGTCCATTGCCTATTTCTATTC | | | | | | | PGKRLESIAYFYST | | | | | | |
| | | TACTGGGAAAACCAACTACAACCCCTCCCTCAAGAGTCGAG | | | | | | | GKTNYNPSLKSRVT | | | | | | |
| | | TCACCATATCTGTGGACAAGTCCAAAAATCTTTTCTCCCTG | | | | | | | ISVDKSKNLFSLRL | | | | | | |
| | | AGGCTGGATTCTGTGACTGCTGCGGACACGGCCCTTTATTA | | | | | | | DSVTAADTALYYCA | | | | | | |
| | | CTGTGCCAGAGCGGACCGCCGACTACCGAATGATGCTTTTG | | | | | | | RADRRLPNDAFDVW | | | | | | |
| | | ATGTTTGGGGCCAAGGGACCACGGTCACCGTCTCCTCA | | | | | | | GQGTTVTVSS | | | | | | |
| ADI-81656 | 1299 | CAGGTCCAGCTGGTGCAGTCTGGGGCTGAGGTGAAGAAGCC | | | | | | 6835 | QVQLVQSGAEVKKP | | 7188 | 16 | | 13 | |
| | | TGGGTCCTCGGTGAAGGTCTCCTGCAAGGCTTCTGGAGGCA | | | | | | | GSSVKVSCKASGGT | | | | | | |
| | | CCTTCAGCAGCTATGGCATTAGCTGGGTGCGACAGGTCCCT | | | | | | | FSSYGISWVRQVPG | | | | | | |
| | | GGACAAGGGCTTGAGTGGATGGGAAGGGTCATCCCCTTCCT | | | | | | | QGLEWMGRVIPFLR | | | | | | |
| | | TCGTATACTTGACTATGCACCGAAGTTCCAGGGCAGACTCA | | | | | | | ILDYAPKFQGRLTI | | | | | | |
| | | CGATTGCCGTGGACACATCCACGAGCACAGCCTACCTGGAA | | | | | | | AVDTSTSTAYLELS | | | | | | |
| | | CTGAGCAGCCTCAGATCTGAAGACACGGCCGTGTATTATTG | | | | | | | SLRSEDTAVYYCAE | | | | | | |
| | | TGCGGAACATTACCATGAAAGTCGTTTTGGGGGTGGGATCA | | | | | | | HYHESRFGGGISDD | | | | | | |
| | | GCGATGATGCCTTTAATATCTGGGGCCAAGGGACAATGGTC | | | | | | | AFNIWGQGTMVTVS | | | | | | |
| | | ACCGTCTCCTCA | | | | | | | S | | | | | | |
| ADI-81640 | 1286 | CAGGTGCAGCTGTTGGAGTCTGGGGGAGGCTTGGTCCAACC | | | | | | 6836 | QVQLLESGGGLVQP | | 7189 | 24 | | 17 | |
| | | TGGAGGGTCCCTGAGACTCTCCTGTGCAATCTCCGGACTCA | | | | | | | GGSLRLSCAISGLI | | | | | | |
| | | TTATCAGTGACCATTACATAGACTGGGTCCGCCAGGCTCCA | | | | | | | ISDHYIDWVRQAPG | | | | | | |
| | | GGAAAGGGGCTGGAGTGGGTTGGCCGTTCTGCAAACAGAGT | | | | | | | KGLEWVGRSANRVN | | | | | | |
| | | TAACAGTTACACCGCACTCTACGCCGCGTCTGTGATGGGCA | | | | | | | SYTALYAASVMGRF | | | | | | |
| | | GATTCACCATCTCCAGAGATGATTCAAAGAATACCCTGTTT | | | | | | | TISRDDSKNTLFLQ | | | | | | |
| | | CTTCAAATGACCAGTCTGAAAACCGACGACACGGCCGTTTA | | | | | | | MTSLKTDDTAVYHC | | | | | | |
| | | TCACTGTGTTGTCATTGCTGGGACTTATGGCTCCTGGGGCC | | | | | | | VVIAGTYGSWGQGT | | | | | | |
| | | AGGGAACCCTGGTCACCGTCTCCTCA | | | | | | | LVTVSS | | | | | | |
| ADI-81586 | 1286 | CAGGTGCAGCTACAGCAGTGGGGCGCAGGACTGCTGAAGCC | | | | | | 6837 | QVQLQQWGAGLLKP | | 7190 | 21 | | 17 | |
| | | TTCGGAGACCCTGTCCCTCACCTGCGCTTTTTCTGGTGGGT | | | | | | | SETLSLTCAFSGGS | | | | | | |
| | | CCGTCAATGGTGACTACTGGAGCTGGATCCGCCAGCCCCCA | | | | | | | VNGDYWSWIRQPPG | | | | | | |
| | | GGGAAGGGGCTGGAGTTGATTGGGGAGATCAGCCATGATGG | | | | | | | KGLELIGEISHDGT | | | | | | |
| | | AACCACCAAGTACAAGTCGGCCCTCGAGAGTCGAGTCAGTA | | | | | | | TKYKSALESRVSIS | | | | | | |
| | | TATCTTTAGACACGTCCAAGAACCAGTTCTCCCTGAAGTTG | | | | | | | LDTSKNQFSLKLSS | | | | | | |
| | | AGTTCTGTGACCGCCGCGGACACGGCTATGTATTACTGTGC | | | | | | | VTAADTAMYYCARG | | | | | | |
| | | GAGAGGCCTGTCGGCAGTGGTTACTGTTTCTGGGTGGTTCG | | | | | | | LSAVVTVSGWFDSW | | | | | | |
| | | ACTCCTGGGGCCAGGGAACCCTGGTCACCGTCTCCTCA | | | | | | | GQGTLVTVSS | | | | | | |
| ADI-81663 | 1286 | GAGGTGCAGCTGCAGGAGTCTGGGGGAGGCTTGGTCCAGCC | | | | | | 6838 | EVQLQESGGGLVQP | | 7191 | 1 | | 1 | |
| | | TGGAGGGTCCCTGAGACTCTCCTGTGCAGCCTCTGGCTTCA | | | | | | | GGSLRLSCAASGFT | | | | | | |
| | | CCTTCAGTGACCACTTCATGGACTGGGTCCGCCAGGCTCCA | | | | | | | FSDHFMDWVRQAPG | | | | | | |
| | | GGGAAGGGGCTGGAGTGGGTTGGCCGTACTAGAAACAAAGC | | | | | | | KGLEWVGRTRNKAN | | | | | | |
| | | TAACAGTTACACCACAGAATACGCCGCGTCTGTGAAAGGCA | | | | | | | SYTTEYAASVKGRF | | | | | | |
| | | GATTCACCATCTCAAGAGATGATTCAAAGAACTCACTGTAT | | | | | | | TISRDDSKNSLYLQ | | | | | | |
| | | CTGCAAATGAATAGCCTGAAAACCGAGGACACGGCCGTGTA | | | | | | | MNSLKTEDTAVYYC | | | | | | |
| | | TTACTGTGCTAGAGTGGGAGCTGCACTCGGCGGGGTTTGTG | | | | | | | ARVGAALGGVCDYW | | | | | | |
| | | ACTACTGGGGCCAGGGAACCCTGGTCACCGTCTCCTCA | | | | | | | GQGTLVTVSS | | | | | | |
| | VH | VH | | SEQ | | SEQ | | SEQ | | SEQ | | SEQ | | SEQ | |
| | CDR3 | Germ- | VH | ID | VH | ID | VH | ID | VH | ID | VH | ID | VH | ID | VH |
| Clone ID | Lineage | line | FR1 | NO: | CDR1 | NO: | FR2 | NO: | CDR2 | NO: | FR3 | NO: | CDR3 | NO: | FR4 |
| ADI-81829 | 8 | IGHV1- | EVQLV | 5318 | YTFPAY | 5521 | WVRQVP | 5775 | WINPRY | 5874 | RFTMSS | 6180 | ARSGFCD | 6481 | WGQGTL |
| | | 3 | QSGAE | | SIH | | GQRLEW | | GNTKSS | | DTGATT | | GTSCFSG | | VTVSS |
| | | | VRKPG | | | | LG | | QNLQG | | VFMELR | | DY | | |
| | | | ASVKV | | | | | | | | GLTSDD | | | | |
| | | | SCKTV | | | | | | | | TAVYYC | | | | |
| | | | G | | | | | | | | | | | | |
| ADI-81786 | 62 | IGHV4- | EVQLL | 5319 | GSISSH | 5522 | WIRQSP | 434 | NIYHSG | 5875 | RVSITV | 6181 | ARGPHER | 6482 | WGQGTL |
| | | 59 | ESGPG | | YWS | | GKGLEW | | STNYNP | | DTSRTQ | | WFKNWFD | | VTVSS |
| | | | LVKPS | | | | IG | | SLKS | | FSLKLS | | P | | |
| | | | ETLSL | | | | | | | | SVTAAD | | | | |
| | | | ICSIS | | | | | | | | TAVYYC | | | | |
| | | | G | | | | | | | | | | | | |
| ADI-81651 | 24 | IGHV1- | EVQLV | 5320 | YPFTGR | 5523 | WVRQAP | 453 | WINPSS | 5876 | RITLTR | 6182 | TRDPTAG | 6483 | WGQGTL |
| | | 2 | QSGAE | | YMH | | GQGLDW | | GYTNSA | | DTSTTT | | AGDY | | VTVSS |
| | | | VKKPG | | | | MG | | QKFQG | | IFMELN | | | | |
| | | | ASVKV | | | | | | | | SLRSDD | | | | |
| | | | SCKAS | | | | | | | | TAIYYC | | | | |
| | | | G | | | | | | | | | | | | |
| ADI-81725 | 2 | IGHV3- | EVQLV | 5321 | FTFEDY | 208 | WVRQTP | 474 | GISWNG | 633 | RFIISR | 884 | TKAQAPL | 6484 | WGPGTT |
| | | 9 | ESGGG | | AMH | | GKGPEW | | GIMGYA | | DNAKNS | | DSGDFGG | | VTVSS |
| | | | LVQPG | | | | VS | | ASVEG | | LYLQMM | | GFHI | | |
| | | | RSLRL | | | | | | | | RLRAED | | | | |
| | | | SCAAS | | | | | | | | TAFYYC | | | | |
| | | | G | | | | | | | | | | | | |
| ADI-81706 | 76 | IGHV2- | QVPLK | 5322 | FSLATS | 5524 | WIRQPP | 441 | RIDWED | 5877 | RLTISK | 6183 | ARVGDRF | 6485 | WGNGTT |
| | | 70 | ESGPA | | GMRVS | | GKALEW | | DKVYST | | ATSKNQ | | GYQYMDV | | VTVSS |
| | | | LVKPT | | | | LA | | SLKN | | VVLTMT | | | | |
| | | | QTLTL | | | | | | | | DMDPVD | | | | |
| | | | TCTFS | | | | | | | | TATYYC | | | | |
| | | | G | | | | | | | | | | | | |
| ADI-81881 | 58 | IGHV3- | EVQLV | 81 | ITVSSN | 339 | WVRRAP | 5776 | VLYSGG | 5878 | RFTISR | 6184 | ARGDGGG | 6486 | WGQGTT |
| | | 53 | ETGGG | | YMT | | GKGLEW | | STYYAD | | DNSKNT | | DYPYGMD | | VTVSS |
| | | | LIQPG | | | | VS | | SVKG | | LFLQMN | | V | | |
| | | | GSLRL | | | | | | | | SLKAED | | | | |
| | | | SCAAS | | | | | | | | TADYYC | | | | |
| | | | G | | | | | | | | | | | | |
| ADI-81607 | 65 | IGHV3- | QVPLV | 5323 | FTFDDY | 214 | WVRQAP | 437 | GISWNG | 5879 | RFTISR | 6185 | GKGSTSS | 6487 | WGHGTL |
| | | 9 | ESGGG | | AMH | | GKGLEW | | GSIAYA | | DNAKNS | | YYGYFDP | | VTVSS |
| | | | LVQPG | | | | VS | | DSVKG | | LYLQMN | | | | |
| | | | RSLRL | | | | | | | | SLRPED | | | | |
| | | | SCAAS | | | | | | | | TAFYYC | | | | |
| | | | G | | | | | | | | | | | | |
| ADI-81766 | 42 | IGHV3- | EVQLL | 5324 | FTFDDY | 214 | WVRQVP | 436 | GVTWNS | 5880 | RFFISR | 6186 | AKDGGGR | 6488 | WGKGTT |
| | | 9 | ESGGG | | AMH | | GKGLEW | | GTIDYA | | DNAKNS | | LLYFEME | | VTVSS |
| | | | LVQPG | | | | VS | | DSVKG | | LYLQMN | | HYYMDV | | |
| | | | RSLRL | | | | | | | | SLRAED | | | | |
| | | | SCAAS | | | | | | | | TALYYC | | | | |
| | | | G | | | | | | | | | | | | |
| | SEQ | | | | | | | SEQ | | | SEQ | VH | | VH Amino | |
| | ID | | | | | | | ID | | | ID | Nucleotide | | Acid | |
| Clone ID | NO: | VH DNA | | | | | | NO: | VH Protein | | NO: | Substitution | | Substitution | |
| ADI-81829 | 1286 | GAGGTCCAGCTGGTGCAGTCTGGGGCTGAGGTGAGGAAGCC | | | | | | 6839 | EVQLVQSGAEVRKP | | 7192 | 33 | | 27 | |
| | | TGGGGCCTCAGTGAAGGTTTCCTGCAAGACTGTTGGATACA | | | | | | | GASVKVSCKTVGYT | | | | | | |
| | | CCTTCCCTGCCTATTCTATCCATTGGGTGCGCCAGGTCCCC | | | | | | | FPAYSIHWVRQVPG | | | | | | |
| | | GGACAACGCCTTGAGTGGCTGGGATGGATCAACCCCCGCTA | | | | | | | QRLEWLGWINPRYG | | | | | | |
| | | CGGAAACACAAAATCTTCACAGAATTTACAGGGCAGATTCA | | | | | | | NTKSSQNLQGRFTM | | | | | | |
| | | CCATGAGCAGTGACACAGGCGCGACCACTGTCTTCATGGAA | | | | | | | SSDTGATTVFMELR | | | | | | |
| | | CTGCGCGGCCTGACTTCTGACGACACGGCTGTCTATTACTG | | | | | | | GLTSDDTAVYYCAR | | | | | | |
| | | TGCGAGATCAGGCTTTTGTGATGGTACGAGTTGCTTCTCGG | | | | | | | SGFCDGTSCFSGDY | | | | | | |
| | | GAGACTACTGGGGCCAGGGAACCCTGGTCACCGTCTCCTCA | | | | | | | WGQGTLVTVSS | | | | | | |
| ADI-81786 | 1286 | GAGGTGCAGCTGTTGGAGTCGGGCCCAGGACTGGTAAAGCC | | | | | | 6840 | EVQLLESGPGLVKP | | 7193 | 11 | | 10 | |
| | | TTCGGAGACCCTGTCCCTCATTTGTTCTATCTCTGGTGGCT | | | | | | | SETLSLICSISGGS | | | | | | |
| | | CCATAAGTAGTCATTACTGGAGCTGGATCCGGCAGTCCCCC | | | | | | | ISSHYWSWIRQSPG | | | | | | |
| | | GGGAAGGGACTGGAATGGATTGGGAATATTTATCACAGTGG | | | | | | | KGLEWIGNIYHSGS | | | | | | |
| | | GAGCACCAATTACAACCCCTCCCTCAAGAGTCGAGTCAGCA | | | | | | | TNYNPSLKSRVSIT | | | | | | |
| | | TTACAGTTGACACGTCCAGGACCCAGTTCTCCCTGAAACTG | | | | | | | VDTSRTQFSLKLSS | | | | | | |
| | | AGTTCTGTGACCGCTGCGGACACGGCCGTCTATTACTGTGC | | | | | | | VTAADTAVYYCARG | | | | | | |
| | | GAGAGGCCCTCATGAGCGGTGGTTCAAGAATTGGTTCGACC | | | | | | | PHERWFKNWFDPWG | | | | | | |
| | | CCTGGGGCCAGGGAACCCTGGTCACCGTCTCCTCA | | | | | | | QGTLVTVSS | | | | | | |
| ADI-81651 | 1286 | GAGGTGCAGCTGGTACAGTCTGGGGCTGAGGTGAAGAAGCC | | | | | | 6841 | EVQLVQSGAEVKKP | | 7194 | 22 | | 15 | |
| | | TGGGGCCTCAGTGAAGGTCTCCTGTAAGGCTTCTGGATACC | | | | | | | GASVKVSCKASGYP | | | | | | |
| | | CCTTCACCGGCCGCTATATGCACTGGGTGCGACAGGCCCCT | | | | | | | FTGRYMHWVRQAPG | | | | | | |
| | | GGACAGGGGCTTGACTGGATGGGATGGATCAACCCTAGCAG | | | | | | | QGLDWMGWINPSSG | | | | | | |
| | | TGGTTACACAAACTCTGCACAGAAGTTTCAGGGCAGGATCA | | | | | | | YTNSAQKFQGRITL | | | | | | |
| | | CCCTGACCAGGGACACGTCCACTACTACAATCTTCATGGAG | | | | | | | TRDTSTTTIFMELN | | | | | | |
| | | CTGAATAGCCTAAGATCTGACGACACAGCCATTTATTACTG | | | | | | | SLRSDDTAIYYCTR | | | | | | |
| | | TACGAGAGATCCGACGGCCGGGGCAGGTGACTACTGGGGCC | | | | | | | DPTAGAGDYWGQGT | | | | | | |
| | | AGGGAACCCTGGTCACCGTCTCCTCA | | | | | | | LVTVSS | | | | | | |
| ADI-81725 | 1295 | TGGCAGGTCCCTGAGACTCTCCTGTGCAGCCTCTGGATTCA | | | | | | 6842 | EVQLVESGGGLVQP | | 7195 | 14 | | 12 | |
| | | CCTTTGAAGATTATGCCATGCACTGGGTCCGGCAAACTCCA | | | | | | | GRSLRLSCAASGFT | | | | | | |
| | | GGGAAGGGCCCGGAGTGGGTCTCAGGTATTAGTTGGAATGG | | | | | | | FEDYAMHWVRQTPG | | | | | | |
| | | GGGTATCATGGGCTATGCGGCCTCTGTAGAGGGCCGATTCA | | | | | | | KGPEWVSGISWNGG | | | | | | |
| | | TCATCTCCAGAGACAACGCCAAGAACTCCCTGTATCTGCAA | | | | | | | IMGYAASVEGRFII | | | | | | |
| | | ATGATGCGTCTGAGAGCAGAGGACACGGCCTTCTATTACTG | | | | | | | SRDNAKNSLYLQMM | | | | | | |
| | | TACAAAAGCCCAAGCCCCACTTGACTCCGGTGACTTCGGCG | | | | | | | RLRAEDTAFYYCTK | | | | | | |
| | | GTGGTTTTCATATCTGGGGCCCAGGGACCACGGTCACCGTC | | | | | | | AQAPLDSGDFGGGF | | | | | | |
| | | TCCTCA | | | | | | | HIWGPGTTVTVSS | | | | | | |
| ADI-81706 | 6803 | CAGGTCCCGCTGAAGGAGTCTGGTCCTGCGCTGGTGAAACC | | | | | | 6843 | QVPLKESGPALVKP | | 7196 | 8 | | 6 | |
| | | CACACAGACCCTCACACTGACCTGCACCTTCTCTGGGTTCT | | | | | | | TQTLTLTCTFSGFS | | | | | | |
| | | CACTCGCTACTAGTGGAATGCGTGTGAGTTGGATCCGTCAG | | | | | | | LATSGMRVSWIRQP | | | | | | |
| | | CCCCCAGGGAAGGCCCTGGAGTGGCTTGCACGCATTGATTG | | | | | | | PGKALEWLARIDWE | | | | | | |
| | | GGAGGATGATAAAGTCTACAGTACTTCTCTAAAGAACAGGC | | | | | | | DDKVYSTSLKNRLT | | | | | | |
| | | TCACCATCTCCAAGGCCACCTCCAAAAACCAGGTGGTCCTT | | | | | | | ISKATSKNQVVLTM | | | | | | |
| | | ACAATGACCGACATGGACCCTGTAGACACAGCCACTTATTA | | | | | | | TDMDPVDTATYYCA | | | | | | |
| | | CTGTGCACGGGTGGGAGACAGATTTGGCTACCAGTACATGG | | | | | | | RVGDRFGYQYMDVW | | | | | | |
| | | ACGTCTGGGGCAATGGGACCACGGTCACCGTCTCCTCA | | | | | | | GNGTTVTVSS | | | | | | |
| ADI-81881 | 1287 | GAGGTGCAGCTGGTGGAGACTGGAGGAGGCTTGATCCAGCC | | | | | | 6844 | EVQLVETGGGLIQP | | 7197 | 8 | | 7 | |
| | | TGGGGGGTCCCTGAGACTCTCCTGTGCAGCCTCTGGGATCA | | | | | | | GGSLRLSCAASGIT | | | | | | |
| | | CCGTCAGCAGCAACTACATGACCTGGGTCCGCCGGGCTCCA | | | | | | | VSSNYMTWVRRAPG | | | | | | |
| | | GGGAAGGGGCTGGAGTGGGTCTCAGTTCTTTATAGCGGTGG | | | | | | | KGLEWVSVLYSGGS | | | | | | |
| | | TAGCACATACTACGCAGACTCCGTGAAGGGCCGATTCACCA | | | | | | | TYYADSVKGRFTIS | | | | | | |
| | | TCTCCAGAGACAATTCCAAGAACACGCTGTTTCTTCAAATG | | | | | | | RDNSKNTLFLQMNS | | | | | | |
| | | AACAGCCTGAAAGCCGAGGACACGGCCGACTATTACTGTGC | | | | | | | LKAEDTADYYCARG | | | | | | |
| | | GAGAGGGGACGGGGGAGGAGACTACCCCTACGGTATGGACG | | | | | | | DGGGDYPYGMDVWG | | | | | | |
| | | TCTGGGGCCAAGGGACCACGGTCACCGTCTCCTCA | | | | | | | QGTTVTVSS | | | | | | |
| ADI-81607 | 6804 | CAGGTGCCGCTGGTGGAGTCTGGGGGAGGCTTGGTACAGCC | | | | | | 6845 | QVPLVESGGGLVQP | | 7198 | 4 | | 4 | |
| | | TGGCAGGTCCCTGAGACTCTCCTGTGCAGCCTCTGGATTCA | | | | | | | GRSLRLSCAASGFT | | | | | | |
| | | CCTTTGATGATTATGCCATGCACTGGGTCCGGCAAGCTCCA | | | | | | | FDDYAMHWVRQAPG | | | | | | |
| | | GGGAAGGGCCTGGAGTGGGTCTCAGGTATTAGTTGGAATGG | | | | | | | KGLEWVSGISWNGG | | | | | | |
| | | TGGTAGCATAGCCTATGCGGACTCTGTGAAGGGCCGATTCA | | | | | | | SIAYADSVKGRFTI | | | | | | |
| | | CCATCTCCAGAGACAACGCCAAGAACTCCCTGTATCTGCAA | | | | | | | SRDNAKNSLYLQMN | | | | | | |
| | | ATGAACAGTCTGAGACCTGAGGACACGGCCTTTTATTACTG | | | | | | | SLRPEDTAFYYCGK | | | | | | |
| | | TGGAAAAGGGTCCACCAGCAGCTATTACGGGTACTTCGACC | | | | | | | GSTSSYYGYFDPWG | | | | | | |
| | | CCTGGGGCCACGGAACCCTGGTCACCGTCTCCTCA | | | | | | | HGTLVTVSS | | | | | | |
| ADI-81766 | 1291 | GAGGTGCAGCTGTTGGAGTCTGGGGGAGGCTTGGTACAGCC | | | | | | 6846 | EVQLLESGGGLVQP | | 7199 | 7 | | 6 | |
| | | TGGCAGGTCCCTGAGACTCTCCTGTGCAGCCTCTGGATTCA | | | | | | | GRSLRLSCAASGFT | | | | | | |
| | | CCTTTGATGATTATGCCATGCACTGGGTCCGACAAGTTCCA | | | | | | | FDDYAMHWVRQVPG | | | | | | |
| | | GGGAAGGGCCTGGAGTGGGTCTCAGGTGTTACTTGGAATAG | | | | | | | KGLEWVSGVTWNSG | | | | | | |
| | | TGGTACCATTGACTATGCGGACTCTGTGAAGGGCCGATTCT | | | | | | | TIDYADSVKGRFFI | | | | | | |
| | | TCATCTCCAGAGACAACGCCAAGAACTCCCTGTATCTGCAA | | | | | | | SRDNAKNSLYLQMN | | | | | | |
| | | ATGAACAGTCTGAGAGCTGAGGACACGGCCTTGTATTACTG | | | | | | | SLRAEDTALYYCAK | | | | | | |
| | | TGCAAAAGATGGAGGTGGACGACTACTGTATTTTGAGATGG | | | | | | | DGGGRLLYFEMEHY | | | | | | |
| | | AGCACTACTACATGGACGTCTGGGGCAAAGGGACCACGGTC | | | | | | | YMDVWGKGTTVTVS | | | | | | |
| | | ACCGTCTCCTCA | | | | | | | S | | | | | | |
| | VH | VH | | SEQ | | SEQ | | SEQ | | SEQ | | SEQ | | SEQ | |
| | CDR3 | Germ- | VH | ID | VH | ID | VH | ID | VH | ID | VH | ID | VH | ID | VH |
| Clone ID | Lineage | line | FR1 | NO: | CDR1 | NO: | FR2 | NO: | CDR2 | NO: | FR3 | NO: | CDR3 | NO: | FR4 |
| ADI-81687 | 57 | IGHV3- | EVQLV | 5325 | FTFNYA | 5525 | WVRQAP | 5777 | RVKSHI | 5881 | RFVISR | 6187 | VTDLSRF | 6489 | WGQGTT |
| | | 15 | ESGGG | | WMT | | GGGLEW | | DGGTTD | | DDSKNT | | LSSRETD | | VTVSS |
| | | | FVKPG | | | | VG | | YAAPVK | | LYLEMN | | AFDI | | |
| | | | GSLRL | | | | | | G | | SLKTED | | | | |
| | | | SCAAS | | | | | | | | TAVYYC | | | | |
| | | | G | | | | | | | | | | | | |
| ADI-81908 | 82 | IGHV3- | EVQLV | 5326 | FTFRTY | 5526 | WVRQTP | 5778 | VVSSDA | 5882 | RFTISR | 6188 | AREKRVR | 6490 | WGQGTT |
| | | 30 | ESGGR | | DFY | | GKGLEW | | SSKFYA | | DNSKNT | | TILGHYG | | VTVSS |
| | | | AVQPG | | | | VA | | DSVKG | | LFLQMS | | FDV | | |
| | | | GSLRL | | | | | | | | SLIPED | | | | |
| | | | SCGAS | | | | | | | | SAVYYC | | | | |
| | | | G | | | | | | | | | | | | |
| ADI-81827 | 7 | IGHV3- | EVQLV | 5327 | FTFGNF | 5527 | WVRQTP | 5778 | ATSHDG | 5883 | RFTISR | 6189 | ARGGHIV | 6491 | WGQGTP |
| | | 30 | QSGGG | | AVH | | GKGLEW | | SEKNYA | | DNSKNT | | MVTAGYF | | VTVSS |
| | | | VVQPG | | | | VA | | DSVKG | | LYLQMD | | DF | | |
| | | | RSLRL | | | | | | | | SLRPED | | | | |
| | | | SCVAS | | | | | | | | TALYYC | | | | |
| | | | G | | | | | | | | | | | | |
| ADI-81875 | 52 | IGHV3- | EVQLV | 5328 | FTFRHF | 5528 | WVRQTP | 5778 | VISYDG | 5884 | RFTISR | 6190 | AKDHLTA | 6492 | WGQGTL |
| | | 30 | ESGGG | | ALH | | GKGLEW | | NEKYYA | | DNSKNT | | RYYDFRS | | VTVSS |
| | | | VVQPG | | | | VA | | DSVKG | | VYLQMN | | VSFNGDA | | |
| | | | RSLSL | | | | | | | | SLRVED | | Y | | |
| | | | SCAAS | | | | | | | | TAVYFC | | | | |
| | | | G | | | | | | | | | | | | |
| ADI-81885 | 61 | IGHV4- | EVQLV | 5329 | YSISSG | 338 | WVRLPP | 5779 | SVSHDG | 5885 | RVTISA | 6191 | AREGGSF | 6493 | WGQGTL |
| | | 38-2 | ESGPG | | YSWG | | GKGLQW | | STYHNP | | DTSKNQ | | FRDGDFE | | VTVSS |
| | | | VVRPS | | | | IG | | SLKS | | FSLMLS | | H | | |
| | | | ETLSL | | | | | | | | SVTAAD | | | | |
| | | | TCAVS | | | | | | | | TAIYYC | | | | |
| | | | G | | | | | | | | | | | | |
| ADI-81638 | 11 | IGHV3- | EVQLK | 5330 | FTLSSF | 5529 | WVRQAP | 437 | YISSGS | 5886 | RFTISR | 6192 | ARHLSPT | 6494 | WGQGTT |
| | | 48 | ESGGG | | SMN | | GKGLEW | | TIIHYA | | DNAKNS | | NNDFLTG | | VTVSS |
| | | | VVQPG | | | | VS | | DSMRG | | LFLQLN | | PDAFDL | | |
| | | | GSLRL | | | | | | | | SLRVED | | | | |
| | | | SCGAS | | | | | | | | TAVYYC | | | | |
| | | | G | | | | | | | | | | | | |
| ADI-81554 | 20 | IGHV3- | QVQLQ | 5331 | FSFNHA | 5530 | WVRQAP | 432 | RIKTIN | 5887 | RFTISR | 6193 | STASDYG | 6495 | WGQGTL |
| | | 15 | QSGGG | | WMS | | GKGLEW | | DGGTTD | | DDSKST | | DHSPHY | | VTVSS |
| | | | FVKPG | | | | VG | | YAAPVK | | LSLQMN | | | | |
| | | | GSLRL | | | | | | G | | SLKTED | | | | |
| | | | SCATS | | | | | | | | TAVYFC | | | | |
| | | | G | | | | | | | | | | | | |
| | SEQ | | | | | | | SEQ | | | SEQ | VH | | VH Amino | |
| | ID | | | | | | | ID | | | ID | Nucleotide | | Acid | |
| Clone ID | NO: | VH DNA | | | | | | NO: | VH Protein | | NO: | Substitution | | Substitution | |
| ADI-81687 | 1287 | GAGGTGCAGCTGGTGGAGTCTGGGGGAGGCTTTGTAAAGCC | | | | | | 6847 | EVQLVESGGGFVKP | | 7200 | 14 | | 10 | |
| | | TGGGGGGTCCCTTAGACTCTCCTGTGCAGCCTCTGGATTCA | | | | | | | GGSLRLSCAASGFT | | | | | | |
| | | CTTTCAATTACGCCTGGATGACCTGGGTCCGCCAGGCTCCA | | | | | | | FNYAWMTWVRQAPG | | | | | | |
| | | GGGGGGGGGCTGGAGTGGGTTGGCCGTGTTAAAAGCCACAT | | | | | | | GGLEWVGRVKSHID | | | | | | |
| | | TGATGGTGGGACAACAGACTACGCGGCACCCGTGAAAGGCA | | | | | | | GGTTDYAAPVKGRF | | | | | | |
| | | GATTCGTTATTTCCAGAGATGATTCAAAAAACACGCTGTAT | | | | | | | VISRDDSKNTLYLE | | | | | | |
| | | TTGGAAATGAACAGCCTGAAAACCGAGGACACCGCCGTATA | | | | | | | MNSLKTEDTAVYYC | | | | | | |
| | | TTACTGTGTCACAGATCTCTCAAGGTTTTTATCGTCCAGGG | | | | | | | VTDLSRFLSSRETD | | | | | | |
| | | AGACTGATGCTTTTGACATCTGGGGCCAAGGGACCACGGTC | | | | | | | AFDIWGQGTTVTVS | | | | | | |
| | | ACCGTCTCCTCA | | | | | | | S | | | | | | |
| ADI-81908 | 1287 | TGGGGGGTCCCTGAGACTCTCCTGTGGAGCCTCTGGATTCA | | | | | | 6848 | EVQLVESGGRAVQP | | 7201 | 22 | | 19 | |
| | | CCTTTAGGACCTATGATTTTTACTGGGTCCGCCAGACTCCA | | | | | | | GGSLRLSCGASGFT | | | | | | |
| | | GGCAAGGGGCTGGAGTGGGTGGCAGTTGTCTCATCTGATGC | | | | | | | FRTYDFYWVRQTPG | | | | | | |
| | | AAGCAGTAAATTCTACGCAGACTCCGTGAAGGGCCGATTCA | | | | | | | KGLEWVAVVSSDAS | | | | | | |
| | | CCATCTCCAGAGACAATTCCAAGAACACATTGTTTCTGCAA | | | | | | | SKFYADSVKGRFTI | | | | | | |
| | | ATGAGCAGCCTGATACCTGAGGACAGTGCTGTTTACTACTG | | | | | | | SRDNSKNTLFLQMS | | | | | | |
| | | TGCGAGAGAGAAGCGCGTGAGAACGATTCTTGGGCACTACG | | | | | | | SLIPEDSAVYYCAR | | | | | | |
| | | GTTTCGACGTCTGGGGCCAAGGGACCACGGTCACCGTCTCC | | | | | | | EKRVRTILGHYGFD | | | | | | |
| | | TCA | | | | | | | VWGQGTTVTVSS | | | | | | |
| ADI-81827 | 6805 | GAGGTGCAGCTGGTGCAGTCTGGGGGAGGCGTGGTCCAGCC | | | | | | 6849 | EVQLVQSGGGVVQP | | 7202 | 20 | | 14 | |
| | | TGGGAGGTCCCTGAGACTCTCCTGTGTGGCCTCTGGCTTCA | | | | | | | GRSLRLSCVASGFT | | | | | | |
| | | CCTTCGGAAATTTTGCTGTGCACTGGGTCCGCCAGACTCCG | | | | | | | FGNFAVHWVRQTPG | | | | | | |
| | | GGCAAGGGGCTAGAGTGGGTGGCAGCTACTTCACATGATGG | | | | | | | KGLEWVAATSHDGS | | | | | | |
| | | AAGTGAGAAAAACTACGCAGACTCCGTGAAGGGCCGCTTCA | | | | | | | EKNYADSVKGRFTI | | | | | | |
| | | CCATCTCCAGAGACAATTCCAAGAACACGCTGTATCTGCAA | | | | | | | SRDNSKNTLYLQMD | | | | | | |
| | | ATGGACAGCCTGAGACCTGAGGACACGGCTCTATACTATTG | | | | | | | SLRPEDTALYYCAR | | | | | | |
| | | TGCGAGAGGGGGACATATTGTAATGGTGACTGCTGGTTACT | | | | | | | GGHIVMVTAGYFDF | | | | | | |
| | | TTGACTTCTGGGGCCAGGGAACCCCGGTCACCGTCTCCTCA | | | | | | | WGQGTPVTVSS | | | | | | |
| ADI-81875 | 1286 | GAGGTGCAGCTGGTGGAGTCTGGGGGAGGCGTGGTCCAGCC | | | | | | 6850 | EVQLVESGGGVVQP | | 7203 | 17 | | 12 | |
| | | TGGGAGGTCCCTGAGCCTCTCCTGTGCGGCCTCTGGATTCA | | | | | | | GRSLSLSCAASGFT | | | | | | |
| | | CCTTCCGTCATTTTGCCCTACACTGGGTCCGCCAGACTCCA | | | | | | | FRHFALHWVRQTPG | | | | | | |
| | | GGCAAGGGCCTGGAATGGGTGGCAGTTATTTCGTATGATGG | | | | | | | KGLEWVAVISYDGN | | | | | | |
| | | AAATGAAAAATACTACGCAGACTCCGTGAAGGGCCGATTCA | | | | | | | EKYYADSVKGRFTI | | | | | | |
| | | CCATCTCCAGAGACAATTCCAAGAACACAGTATATCTGCAA | | | | | | | SRDNSKNTVYLQMN | | | | | | |
| | | ATGAACAGCCTGAGAGTTGAGGACACGGCTGTTTATTTCTG | | | | | | | SLRVEDTAVYFCAK | | | | | | |
| | | TGCGAAAGATCATTTAACCGCCAGGTACTACGATTTTCGGA | | | | | | | DHLTARYYDFRSVS | | | | | | |
| | | GTGTTTCTTTTAATGGTGACGCCTACTGGGGCCAGGGCACC | | | | | | | FNGDAYWGQGTLVT | | | | | | |
| | | CTGGTCACCGTCTCCTCA | | | | | | | VSS | | | | | | |
| ADI-81885 | 1286 | GAGGTGCAGCTGGTGGAGTCGGGCCCAGGAGTGGTGAGGCC | | | | | | 6851 | EVQLVESGPGVVRP | | 7204 | 17 | | 13 | |
| | | TTCGGAGACCCTGTCCCTCACCTGCGCTGTGTCTGGTTACT | | | | | | | SETLSLTCAVSGYS | | | | | | |
| | | CGATCAGTAGTGGTTACTCATGGGGCTGGGTGCGGCTGCCC | | | | | | | ISSGYSWGWVRLPP | | | | | | |
| | | CCAGGGAAGGGTCTGCAGTGGATTGGGAGTGTCTCTCATGA | | | | | | | GKGLQWIGSVSHDG | | | | | | |
| | | TGGGAGCACCTACCACAACCCGTCCCTCAAGAGTCGAGTGA | | | | | | | STYHNPSLKSRVTI | | | | | | |
| | | CCATATCAGCAGACACGTCCAAGAACCAGTTCTCCCTGATG | | | | | | | SADTSKNQFSLMLS | | | | | | |
| | | CTGAGCTCTGTGACCGCCGCAGACACGGCCATCTATTACTG | | | | | | | SVTAADTAIYYCAR | | | | | | |
| | | TGCGAGAGAGGGTGGGAGTTTTTTCCGGGATGGTGACTTCG | | | | | | | EGGSFFRDGDFEHW | | | | | | |
| | | AACACTGGGGCCAGGGCACCCTGGTCACCGTCTCCTCA | | | | | | | GQGTLVTVSS | | | | | | |
| ADI-81638 | 1287 | GAGGTGCAGCTGAAGGAGTCTGGGGGAGGCGTGGTACAGCC | | | | | | 6852 | EVQLKESGGGVVQP | | 7205 | 14 | | 13 | |
| | | GGGGGGGTCCCTGAGACTCTCCTGTGGAGCCTCTGGATTCA | | | | | | | GGSLRLSCGASGFT | | | | | | |
| | | CGTTAAGTAGTTTCAGCATGAATTGGGTCCGCCAGGCTCCA | | | | | | | LSSFSMNWVRQAPG | | | | | | |
| | | GGGAAGGGGCTGGAGTGGGTTTCATATATTAGTAGTGGTAG | | | | | | | KGLEWVSYISSGST | | | | | | |
| | | TACTATCATACACTATGCAGACTCTATGAGGGGCCGATTCA | | | | | | | IIHYADSMRGRFTI | | | | | | |
| | | CCATCTCCAGGGACAATGCCAAGAACTCACTGTTTCTACAA | | | | | | | SRDNAKNSLFLQLN | | | | | | |
| | | CTGAACAGCCTGAGAGTCGAAGACACGGCTGTGTATTACTG | | | | | | | SLRVEDTAVYYCAR | | | | | | |
| | | TGCGAGACATCTCTCTCCAACGAATAACGATTTTTTGACTG | | | | | | | HLSPTNNDFLTGPD | | | | | | |
| | | GCCCAGATGCTTTTGATCTCTGGGGTCAAGGGACCACGGTC | | | | | | | AFDLWGQGTTVTVS | | | | | | |
| | | ACCGTCTCCTCA | | | | | | | S | | | | | | |
| ADI-81554 | 1286 | CAGGTGCAGCTGCAGCAGTCTGGGGGAGGCTTCGTAAAGCC | | | | | | 6853 | QVQLQQSGGGFVKP | | 7206 | 13 | | 11 | |
| | | TGGTGGGTCCCTTAGACTCTCCTGTGCAACCTCTGGATTCT | | | | | | | GGSLRLSCATSGFS | | | | | | |
| | | CTTTTAATCACGCCTGGATGAGCTGGGTCCGCCAGGCTCCA | | | | | | | FNHAWMSWVRQAPG | | | | | | |
| | | GGGAAGGGGCTGGAGTGGGTTGGCCGTATTAAAACCATAAA | | | | | | | KGLEWVGRIKTIND | | | | | | |
| | | TGATGGTGGGACAACAGACTACGCTGCACCCGTGAAAGGCA | | | | | | | GGTTDYAAPVKGRF | | | | | | |
| | | GATTCACCATTTCAAGAGATGATTCGAAAAGCACACTGAGT | | | | | | | TISRDDSKSTLSLQ | | | | | | |
| | | CTCCAAATGAACAGCCTGAAAACCGAGGACACAGCCGTCTA | | | | | | | MNSLKTEDTAVYFC | | | | | | |
| | | TTTTTGTAGCACAGCTAGTGACTACGGTGACCACTCCCCTC | | | | | | | STASDYGDHSPHYW | | | | | | |
| | | ACTACTGGGGCCAGGGAACCCTGGTCACCGTCTCCTCA | | | | | | | GQGTLVTVSS | | | | | | |
| | VH | VH | | SEQ | | SEQ | | SEQ | | SEQ | | SEQ | | SEQ | |
| | CDR3 | Germ- | VH | ID | VH | ID | VH | ID | VH | ID | VH | ID | VH | ID | VH |
| Clone ID | Lineage | line | FR1 | NO: | CDR1 | NO: | FR2 | NO: | CDR2 | NO: | FR3 | NO: | CDR3 | NO: | FR4 |
| ADI-81756 | 32 | IGHV3- | EVQLV | 5332 | FRFSNY | 5531 | WVRQAI | 5780 | VIGTDG | 5888 | RFTVSR | 6194 | VRGAWSS | 6496 | WGQGAL |
| | | 13 | ESGGG | | DMH | | GKGLEW | | DTYYPD | | DNGKNS | | DSYLPRG | | VTVSS |
| | | | LVQPG | | | | LS | | SVKG | | LYLQMN | | FFDY | | |
| | | | GSLRL | | | | | | | | NLGAGD | | | | |
| | | | SCAAS | | | | | | | | TAVYYC | | | | |
| | | | G | | | | | | | | | | | | |
| ADI-81773 | 49 | IGHV3- | EVQLV | 5333 | FTFSSD | 5532 | WVRQPA | 5781 | AIGTSG | 5889 | RFTISR | 6195 | ARGTQQQ | 6497 | WGKGTT |
| | | 13 | ESGGG | | DMH | | GKGLEW | | DSYYTD | | ENAKNS | | LVLHGNV | | VTVSS |
| | | | LVQPG | | | | VS | | SVKG | | LFLQMN | | NYFYYMD | | |
| | | | GSLRL | | | | | | | | NLRAGD | | V | | |
| | | | SCVAS | | | | | | | | TAVYYC | | | | |
| | | | G | | | | | | | | | | | | |
| ADI-81575 | 37 | IGHV3- | QVQLK | 5334 | LIVSSN | 343 | WVRQAP | 5782 | VIYAGG | 5890 | RFTISR | 6196 | ARGDGGY | 6498 | WGQGTL |
| | | 53 | QSGGG | | YMS | | GKGLEL | | RTDYAD | | DDSKNT | | YSGIDY | | VTVSS |
| | | | LIQPG | | | | VS | | SVKG | | LHLQMN | | | | |
| | | | GSLRL | | | | | | | | SLRVED | | | | |
| | | | SCAAS | | | | | | | | TAVYYC | | | | |
| | | | G | | | | | | | | | | | | |
| ADI-81727 | 4 | IGHV4- | EVQLL | 5335 | ASISTY | 5533 | WIRQPP | 445 | YIYYSG | 5891 | RVTISV | 6197 | ARLPDSD | 6499 | WGQGTL |
| | | 59 | ESGPG | | YWG | | GKGLEW | | SANLNP | | DTSKNQ | | YHGYAYY | | VTVSS |
| | | | LVKPS | | | | IG | | SLKS | | LSLKLN | | FDY | | |
| | | | ETLSL | | | | | | | | SVTAAD | | | | |
| | | | TCTVS | | | | | | | | TAIYYC | | | | |
| | | | G | | | | | | | | | | | | |
| ADI-81704 | 74 | IGHV3- | EVQLV | 5336 | FTFSNY | 351 | WVRQGP | 493 | YISTSG | 686 | RVTISR | 6198 | LTHPQPQ | 6500 | WGQGTL |
| | | 48 | ESGGD | | EMN | | GKGLEW | | STYYYA | | DNARNS | | YVRPTPV | | VTVSQ |
| | | | LVQPG | | | | IS | | DSVKG | | LYLEMH | | VWFDP | | |
| | | | GSLRL | | | | | | | | SLRVED | | | | |
| | | | SCVAS | | | | | | | | TGLYYC | | | | |
| | | | G | | | | | | | | | | | | |
| ADI-81768 | 44 | IGHV1- | QVQLV | 5337 | GTFSNF | 5534 | WVRQAP | 477 | RVIPVL | 5892 | RVTIIA | 6199 | ARDVKFD | 6501 | WGQGTT |
| | | 69 | QSGAE | | AIN | | GQGPEW | | DRPIYA | | DTSTNT | | YSTSSIE | | VTVSS |
| | | | VKKPG | | | | MG | | QQFQG | | AYMEVS | | ESIAFDI | | |
| | | | SSVKV | | | | | | | | SLRSED | | | | |
| | | | SCRAS | | | | | | | | TAVYYC | | | | |
| | | | G | | | | | | | | | | | | |
| ADI-81775 | 51 | IGHV3- | EVQLV | 5332 | ITFNND | 5535 | WVRQGP | 5783 | AIGSSG | 5893 | RFTISR | 6200 | ARGDIEV | 6502 | WGKGTT |
| | | 13 | ESGGG | | DIH | | GKGLEW | | DTYYAD | | ENARKS | | RPASTTH | | VTVSS |
| | | | LVQPG | | | | VS | | SVKG | | LYLQMN | | KTSYFYY | | |
| | | | GSLRL | | | | | | | | NLRAGD | | MDV | | |
| | | | SCAAS | | | | | | | | TGIYYC | | | | |
| | | | G | | | | | | | | | | | | |
| | SEQ | | | | | | | SEQ | | | SEQ | VH | | VH Amino | |
| | ID | | | | | | | ID | | | ID | Nucleotide | | Acid | |
| Clone ID | NO: | VH DNA | | | | | | NO: | VH Protein | | NO: | Substitution | | Substitution | |
| ADI-81756 | 1285 | GGGGGGGTCCCTGAGACTCTCCTGTGCAGCCTCTGGATTCA | | | | | | 6854 | EVQLVESGGGLVQP | | 7207 | 13 | | 12 | |
| | | GGTTCAGTAACTACGACATGCACTGGGTCCGCCAGGCTATA | | | | | | | GGSLRLSCAASGFR | | | | | | |
| | | GGAAAAGGTCTAGAGTGGCTCTCAGTTATTGGTACTGATGG | | | | | | | FSNYDMHWVRQAIG | | | | | | |
| | | GGACACATACTATCCAGACTCCGTGAAGGGCCGATTCACCG | | | | | | | KGLEWLSVIGTDGD | | | | | | |
| | | TCTCCAGAGACAATGGCAAGAACTCCTTGTATCTTCAAATG | | | | | | | TYYPDSVKGRFTVS | | | | | | |
| | | AACAACTTGGGAGCCGGGGACACGGCTGTGTATTATTGTGT | | | | | | | RDNGKNSLYLQMNN | | | | | | |
| | | AAGAGGGGCTTGGAGCAGTGACTCATATCTCCCCCGTGGAT | | | | | | | LGAGDTAVYYCVRG | | | | | | |
| | | TTTTTGACTACTGGGGCCAGGGAGCCCTGGTCACCGTCTCC | | | | | | | AWSSDSYLPRGFFD | | | | | | |
| | | TCA | | | | | | | YWGQGALVTVSS | | | | | | |
| ADI-81773 | 1291 | GAGGTGCAGCTGGTGGAGTCTGGGGGAGGCTTGGTGCAGCC | | | | | | 6855 | EVQLVESGGGLVQP | | 7208 | 11 | | 10 | |
| | | TGGGGGGTCCCTGAGACTCTCCTGTGTAGCCTCTGGATTCA | | | | | | | GGSLRLSCVASGFT | | | | | | |
| | | CCTTCAGTAGTGACGACATGCACTGGGTCCGCCAACCTGCA | | | | | | | FSSDDMHWVRQPAG | | | | | | |
| | | GGTAAAGGTCTGGAGTGGGTCTCAGCTATTGGTACTTCTGG | | | | | | | KGLEWVSAIGTSGD | | | | | | |
| | | TGACTCCTACTATACAGACTCCGTGAAGGGCCGGTTCACCA | | | | | | | SYYTDSVKGRFTIS | | | | | | |
| | | TCTCCAGAGAAAATGCCAAGAACTCCTTGTTTCTTCAAATG | | | | | | | RENAKNSLFLQMNN | | | | | | |
| | | AACAACCTGAGAGCCGGGGACACGGCTGTGTATTATTGCGC | | | | | | | LRAGDTAVYYCARG | | | | | | |
| | | AAGAGGTACACAGCAGCAACTGGTACTTCATGGAAACGTTA | | | | | | | TQQQLVLHGNVNYF | | | | | | |
| | | ACTACTTTTATTACATGGACGTCTGGGGCAAAGGGACCACG | | | | | | | YYMDVWGKGTTVTV | | | | | | |
| | | GTCACCGTCTCCTCA | | | | | | | SS | | | | | | |
| ADI-81575 | 1286 | CAGGTGCAGCTGAAGCAGTCTGGAGGAGGCTTGATCCAACC | | | | | | 6856 | QVQLKQSGGGLIQP | | 7209 | 10 | | 9 | |
| | | TGGGGGGTCCCTGAGACTCTCCTGTGCAGCCTCTGGACTCA | | | | | | | GGSLRLSCAASGLI | | | | | | |
| | | TCGTCAGTAGCAACTACATGAGCTGGGTCCGCCAGGCTCCA | | | | | | | VSSNYMSWVRQAPG | | | | | | |
| | | GGGAAGGGGCTGGAGTTGGTCTCAGTTATCTATGCCGGTGG | | | | | | | KGLELVSVIYAGGR | | | | | | |
| | | TAGAACAGACTACGCAGACTCCGTGAAGGGCCGATTCACCA | | | | | | | TDYADSVKGRFTIS | | | | | | |
| | | TCTCCAGAGACGATTCCAAGAACACGCTACATCTTCAAATG | | | | | | | RDDSKNTLHLQMNS | | | | | | |
| | | AACAGCCTGAGAGTCGAAGACACGGCCGTGTATTATTGTGC | | | | | | | LRVEDTAVYYCARG | | | | | | |
| | | GAGAGGTGATGGGGGATATTATAGTGGCATCGACTACTGGG | | | | | | | DGGYYSGIDYWGQG | | | | | | |
| | | GCCAGGGAACCCTGGTCACCGTCTCCTCA | | | | | | | TLVTVSS | | | | | | |
| ADI-81727 | 1286 | GAGGTGCAGCTGTTGGAGTCGGGCCCAGGACTGGTGAAGCC | | | | | | 6857 | EVQLLESGPGLVKP | | 7210 | 10 | | 8 | |
| | | CTCGGAGACCCTGTCCCTCACGTGCACGGTCTCTGGTGCCT | | | | | | | SETLSLTCTVSGAS | | | | | | |
| | | CCATCAGTACTTACTACTGGGGCTGGATCCGGCAGCCCCCA | | | | | | | ISTYYWGWIRQPPG | | | | | | |
| | | GGGAAGGGACTGGAGTGGATTGGGTATATCTACTACAGTGG | | | | | | | KGLEWIGYIYYSGS | | | | | | |
| | | GAGCGCCAATCTCAACCCCTCCCTCAAGAGTCGAGTCACCA | | | | | | | ANLNPSLKSRVTIS | | | | | | |
| | | TATCGGTGGACACGTCCAAAAACCAGTTGTCCCTGAAGCTG | | | | | | | VDTSKNQLSLKLNS | | | | | | |
| | | AACTCTGTGACCGCTGCGGACACGGCCATTTATTACTGTGC | | | | | | | VTAADTAIYYCARL | | | | | | |
| | | GAGGCTCCCTGATAGTGACTATCACGGATACGCGTACTACT | | | | | | | PDSDYHGYAYYFDY | | | | | | |
| | | TTGACTACTGGGGCCAGGGAACCCTGGTCACCGTCTCCTCA | | | | | | | WGQGTLVTVSS | | | | | | |
| ADI-81704 | 6806 | TGGAGGGTCCCTGAGACTCTCCTGTGTCGCCTCTGGATTCA | | | | | | 6858 | EVQLVESGGDLVQP | | 7211 | 18 | | 14 | |
| | | CCTTCAGTAATTATGAGATGAACTGGGTCCGCCAGGGTCCA | | | | | | | GGSLRLSCVASGFT | | | | | | |
| | | GGGAAGGGGCTGGAGTGGATTTCATACATTAGTACGAGTGG | | | | | | | FSNYEMNWVRQGPG | | | | | | |
| | | AAGTACCTATTACTACGCAGACTCTGTGAAGGGCCGAGTCA | | | | | | | KGLEWISYISTSGS | | | | | | |
| | | CCATATCCAGAGACAACGCCAGGAATTCACTGTATCTGGAA | | | | | | | TYYYADSVKGRVTI | | | | | | |
| | | ATGCACAGCCTGAGAGTCGAAGACACTGGTCTTTATTACTG | | | | | | | SRDNARNSLYLEMH | | | | | | |
| | | TCTGACACACCCTCAGCCTCAATATGTACGACCCACGCCGG | | | | | | | SLRVEDTGLYYCLT | | | | | | |
| | | TGGTTTGGTTCGACCCCTGGGGCCAGGGAACCTTGGTCACC | | | | | | | HPQPQYVRPTPVVW | | | | | | |
| | | GTCTCTCAG | | | | | | | FDPWGQGTLVTVSQ | | | | | | |
| ADI-81768 | 1287 | CAGGTGCAGCTGGTGCAGTCTGGGGCTGAAGTGAAGAAGCC | | | | | | 6859 | QVQLVQSGAEVKKP | | 7212 | 17 | | 16 | |
| | | TGGGTCCTCGGTGAAGGTCTCCTGCAGGGCTTCTGGAGGCA | | | | | | | GSSVKVSCRASGGT | | | | | | |
| | | CCTTCAGCAACTTTGCTATCAACTGGGTGCGACAGGCCCCT | | | | | | | FSNFAINWVRQAPG | | | | | | |
| | | GGACAAGGGCCTGAGTGGATGGGAAGGGTCATCCCTGTCCT | | | | | | | QGPEWMGRVIPVLD | | | | | | |
| | | TGATAGACCAATCTACGCACAACAATTCCAGGGCAGAGTCA | | | | | | | RPIYAQQFQGRVTI | | | | | | |
| | | CGATTATCGCGGACACATCCACGAACACAGCCTACATGGAG | | | | | | | IADTSTNTAYMEVS | | | | | | |
| | | GTGAGCAGCCTGAGATCCGAAGACACGGCCGTTTATTATTG | | | | | | | SLRSEDTAVYYCAR | | | | | | |
| | | TGCGAGAGATGTGAAGTTCGACTATAGCACCTCGTCCATTG | | | | | | | DVKFDYSTSSIEES | | | | | | |
| | | AGGAGAGCATCGCTTTTGATATCTGGGGCCAGGGGACCACG | | | | | | | IAFDIWGQGTTVTV | | | | | | |
| | | GTCACCGTCTCCTCA | | | | | | | SS | | | | | | |
| ADI-81775 | 1291 | GAGGTGCAGCTGGTGGAGTCTGGGGGAGGCTTGGTACAGCC | | | | | | 6860 | EVQLVESGGGLVQP | | 7213 | 17 | | 16 | |
| | | GGGGGGGTCCCTGAGACTCTCTTGTGCAGCCTCTGGAATCA | | | | | | | GGSLRLSCAASGIT | | | | | | |
| | | CCTTCAATAACGACGACATACACTGGGTCCGCCAAGGTCCA | | | | | | | FNNDDIHWVRQGPG | | | | | | |
| | | GGGAAAGGTCTGGAGTGGGTCTCAGCTATTGGTTCTTCTGG | | | | | | | KGLEWVSAIGSSGD | | | | | | |
| | | TGACACATATTATGCAGACTCCGTGAAGGGCCGATTCACCA | | | | | | | TYYADSVKGRFTIS | | | | | | |
| | | TCTCCAGAGAAAACGCCAGGAAGTCCTTGTATCTCCAAATG | | | | | | | RENARKSLYLQMNN | | | | | | |
| | | AACAACCTGAGAGCCGGGGACACAGGTATATATTACTGTGC | | | | | | | LRAGDTGIYYCARG | | | | | | |
| | | GAGAGGGGATATTGAAGTAAGACCGGCCAGTACCACGCACA | | | | | | | DIEVRPASTTHKTS | | | | | | |
| | | AGACCTCTTACTTTTACTACATGGACGTCTGGGGCAAAGGG | | | | | | | YFYYMDVWGKGTTV | | | | | | |
| | | ACCACGGTCACCGTCTCCTCA | | | | | | | TVSS | | | | | | |
| | VH | VH | | SEQ | | SEQ | | SEQ | | SEQ | | SEQ | | SEQ | |
| | CDR3 | Germ- | VH | ID | VH | ID | VH | ID | VH | ID | VH | ID | VH | ID | VH |
| Clone ID | Lineage | line | FR1 | NO: | CDR1 | NO: | FR2 | NO: | CDR2 | NO: | FR3 | NO: | CDR3 | NO: | FR4 |
| ADI-81598 | 58 | IGHV3- | QVQLV | 12 | FTFSRF | 5536 | WFRQGT | 5784 | AIGTSG | 5894 | RFTISR | 6201 | ARATPHS | 6503 | WGQGTL |
| | | 13 | QSGGG | | DMH | | GKGLEW | | DTYYGD | | ENAKNS | | SGYWDWF | | VTVSS |
| | | | LVQPG | | | | VS | | SVKG | | LNLQMN | | DP | | |
| | | | GSLRL | | | | | | | | SLRAED | | | | |
| | | | SCAAS | | | | | | | | TAIYYC | | | | |
| | | | G | | | | | | | | | | | | |
| ADI-81914 | 88 | IGHV3- | EVQLV | 5338 | FTFGNY | 5537 | WVRQAP | 5785 | VVSYDG | 5895 | RFSISR | 6202 | VRPHLPD | 6504 | WGQGVL |
| | | 30 | ESGGG | | AMH | | DKGLEW | | SNEFYA | | DNSKNT | | YFGSGSF | | VTVSS |
| | | | VVQPG | | | | VA | | DSVKG | | LHLQMN | | HY | | |
| | | | RSLRL | | | | | | | | SLKAED | | | | |
| | | | SCAAS | | | | | | | | TAEYFC | | | | |
| | | | G | | | | | | | | | | | | |
| ADI-81637 | 10 | IGHV1- | EVQLV | 5339 | GAFSIH | 5538 | WVRQAP | 5786 | GIIPMF | 5896 | RVTITA | 6203 | ARDGRYC | 6505 | WGQGTL |
| | | 69 | QSGPA | | GIT | | GQGLEW | | GTANYP | | EESTST | | NSTACLN | | VTVSS |
| | | | VKKPG | | | | LG | | QNFQG | | VYMELN | | FFDL | | |
| | | | SSVKV | | | | | | | | SLRCED | | | | |
| | | | SCKAS | | | | | | | | TAMYYC | | | | |
| | | | G | | | | | | | | | | | | |
| ADI-81641 | 14 | IGHV4- | EVQLL | 5340 | DSISSG | 5539 | WVRQPP | 5787 | DIYHSG | 5897 | RVTISV | 6204 | ARSIGSR | 6506 | WGQGTL |
| | | 4 | ESAPG | | YWWS | | LKGLEW | | NTVYNP | | DKSKNH | | PRWFDP | | VTVSS |
| | | | LVKPS | | | | IG | | SLKS | | FSLSLK | | | | |
| | | | GTLSL | | | | | | | | SVTAAD | | | | |
| | | | TCAVS | | | | | | | | TAVYYC | | | | |
| | | | G | | | | | | | | | | | | |
| ADI-81729 | 6 | IGHV1- | EVQLL | 5341 | YTFTNN | 5540 | WVRQAP | 433 | IINPSG | 5898 | RVTLTS | 6205 | ARDSEYI | 6507 | WGQGTL |
| | | 46 | ESGTE | | YIH | | GQGLEW | | GATTYA | | DTSTST | | PAAGSFD | | VTVSS |
| | | | VKKPG | | | | MG | | QKFQG | | VYLELT | | Y | | |
| | | | ASVKV | | | | | | | | SLTSED | | | | |
| | | | SCKAL | | | | | | | | TAVYYC | | | | |
| | | | G | | | | | | | | | | | | |
| ADI-81643 | 16 | IGHV5- | EVQLV | 5342 | YSFISY | 5541 | WVRQMP | 476 | NIDPSD | 5899 | HVTIAA | 6206 | ARRIMIT | 6508 | WGQGTT |
| | | 10-1 | ESGPE | | WIT | | GKGLEW | | SYTNYS | | DKGIST | | SGGKEID | | VTVSS |
| | | | VKKPG | | | | MG | | PAFQG | | AYLQWR | | AFDI | | |
| | | | ESLTI | | | | | | | | SLKASD | | | | |
| | | | SCKAS | | | | | | | | TAMYYC | | | | |
| | | | G | | | | | | | | | | | | |
| ADI-81701 | 71 | IGHV1- | EVQLV | 5343 | YAFINY | 5542 | WVRQAP | 433 | WISPYD | 5900 | RVTMAT | 6207 | VRDYYGA | 6509 | WGQGTL |
| | | 18 | QSGAE | | GIS | | GQGLEW | | GHTNYA | | DTSAST | | LTSPNAN | | VTVSS |
| | | | VKKPG | | | | MG | | QKIQG | | AYMDLR | | SETLGTM | | |
| | | | ASVKV | | | | | | | | SLRSDD | | DY | | |
| | | | SCKTS | | | | | | | | TAVYYC | | | | |
| | | | G | | | | | | | | | | | | |
| ADI-81720 | 90 | IGHV3- | EVQLV | 5344 | FTFSRH | 5543 | WVRQAP | 431 | LIYYDG | 5901 | RFTISR | 6208 | ARDGANG | 6510 | WGQGTL |
| | | 33 | ESGGG | | GMH | | GKGLEW | | SSKYYA | | ENSKNT | | YDPLYLN | | VTVSS |
| | | | VVQPG | | | | VA | | DSVKG | | LYLQMN | | H | | |
| | | | KSLRL | | | | | | | | SLRVED | | | | |
| | | | SCVAS | | | | | | | | TALYYC | | | | |
| | | | G | | | | | | | | | | | | |
| | SEQ | | | | | | | SEQ | | | SEQ | VH | | VH Amino | |
| | ID | | | | | | | ID | | | ID | Nucleotide | | Acid | |
| Clone ID | NO: | VH DNA | | | | | | NO: | VH Protein | | NO: | Substitution | | Substitution | |
| ADI-81598 | 1286 | CAGGTGCAGCTGGTGCAGTCTGGGGGAGGCTTGGTACAGCC | | | | | | 6861 | QVQLVQSGGGLVQP | | 7214 | 16 | | 10 | |
| | | GGGGGGGTCCCTGAGACTCTCCTGTGCAGCCTCTGGATTCA | | | | | | | GGSLRLSCAASGFT | | | | | | |
| | | CCTTCAGTCGTTTTGACATGCACTGGTTCCGCCAAGGCACA | | | | | | | FSRFDMHWFRQGTG | | | | | | |
| | | GGGAAAGGTCTAGAGTGGGTCTCAGCTATTGGTACTTCTGG | | | | | | | KGLEWVSAIGTSGD | | | | | | |
| | | TGACACATATTATGGAGACTCCGTGAAGGGCCGATTCACGA | | | | | | | TYYGDSVKGRFTIS | | | | | | |
| | | TCAGCAGAGAAAATGCCAAGAACTCCTTGAATCTTCAAATG | | | | | | | RENAKNSLNLQMNS | | | | | | |
| | | AACAGCCTGAGAGCCGAAGACACGGCTATATATTACTGTGC | | | | | | | LRAEDTAIYYCARA | | | | | | |
| | | AAGAGCGACTCCGCATAGTAGTGGTTATTGGGACTGGTTCG | | | | | | | TPHSSGYWDWFDPW | | | | | | |
| | | ACCCCTGGGGCCAGGGAACCCTGGTCACCGTCTCCTCA | | | | | | | GQGTLVTVSS | | | | | | |
| ADI-81914 | 6807 | GAGGTGCAGCTGGTGGAGTCTGGGGGAGGCGTAGTCCAGCC | | | | | | 6862 | EVQLVESGGGVVQP | | 7215 | 16 | | 11 | |
| | | TGGGAGGTCCCTAAGACTCTCCTGTGCAGCCTCTGGATTCA | | | | | | | GRSLRLSCAASGFT | | | | | | |
| | | CCTTTGGAAACTATGCTATGCACTGGGTCCGCCAGGCTCCG | | | | | | | FGNYAMHWVRQAPD | | | | | | |
| | | GACAAGGGGCTTGAGTGGGTGGCAGTTGTCTCATATGATGG | | | | | | | KGLEWVAVVSYDGS | | | | | | |
| | | AAGTAATGAATTCTACGCAGACTCCGTGAAGGGCCGATTCA | | | | | | | NEFYADSVKGRFSI | | | | | | |
| | | GCATCTCCAGAGACAATTCCAAGAACACACTCCATCTGCAA | | | | | | | SRDNSKNTLHLQMN | | | | | | |
| | | ATGAACAGCCTGAAGGCTGAAGACACGGCTGAATATTTTTG | | | | | | | SLKAEDTAEYFCVR | | | | | | |
| | | TGTGAGACCCCACCTCCCTGATTACTTTGGTTCAGGGAGTT | | | | | | | PHLPDYFGSGSFHY | | | | | | |
| | | TTCACTACTGGGGCCAGGGAGTCCTGGTCACCGTCTCCTCA | | | | | | | WGQGVLVTVSS | | | | | | |
| ADI-81637 | 1286 | TGGGTCCTCGGTGAAGGTCTCCTGCAAGGCTTCTGGGGGCG | | | | | | 6863 | EVQLVQSGPAVKKP | | 7216 | 15 | | 15 | |
| | | CCTTCAGCATCCATGGTATCACCTGGGTGCGCCAGGCCCCT | | | | | | | GSSVKVSCKASGGA | | | | | | |
| | | GGACAAGGGCTTGAGTGGCTGGGAGGGATCATCCCTATGTT | | | | | | | FSIHGITWVRQAPG | | | | | | |
| | | TGGAACAGCAAACTACCCACAGAACTTCCAGGGCAGAGTCA | | | | | | | QGLEWLGGIIPMFG | | | | | | |
| | | CGATTACCGCGGAGGAATCCACGAGCACAGTCTACATGGAG | | | | | | | TANYPQNFQGRVTI | | | | | | |
| | | CTGAACAGCCTGCGATGTGAGGACACGGCCATGTACTACTG | | | | | | | TAEESTSTVYMELN | | | | | | |
| | | TGCGAGGGATGGCAGATATTGTAACAGTACCGCCTGCCTTA | | | | | | | SLRCEDTAMYYCAR | | | | | | |
| | | ACTTCTTTGACTTATGGGGCCAGGGAACCCTGGTCACTGTC | | | | | | | DGRYCNSTACLNFF | | | | | | |
| | | TCCTCA | | | | | | | DLWGQGTLVTVSS | | | | | | |
| ADI-81641 | 1286 | GAGGTGCAGCTGTTGGAGTCGGCCCCGGGACTGGTGAAGCC | | | | | | 6864 | EVQLLESAPGLVKP | | 7217 | 14 | | 10 | |
| | | TTCGGGGACCCTGTCCCTCACCTGCGCTGTCTCTGGTGACT | | | | | | | SGTLSLTCAVSGDS | | | | | | |
| | | CCATCAGCAGTGGTTACTGGTGGAGTTGGGTCCGCCAGCCC | | | | | | | ISSGYWWSWVRQPP | | | | | | |
| | | CCACTGAAGGGGCTGGAGTGGATTGGGGACATCTATCATAG | | | | | | | LKGLEWIGDIYHSG | | | | | | |
| | | TGGCAACACCGTCTACAACCCGTCCCTCAAGAGCCGAGTCA | | | | | | | NTVYNPSLKSRVTI | | | | | | |
| | | CCATTTCAGTAGACAAGTCCAAGAACCACTTCTCCCTGAGT | | | | | | | SVDKSKNHFSLSLK | | | | | | |
| | | CTGAAGTCTGTGACCGCCGCGGACACGGCCGTCTATTACTG | | | | | | | SVTAADTAVYYCAR | | | | | | |
| | | TGCGCGATCAATAGGATCTCGTCCGAGGTGGTTCGACCCCT | | | | | | | SIGSRPRWFDPWGQ | | | | | | |
| | | GGGGCCAGGGAACCCTGGTCACCGTCTCCTCA | | | | | | | GTLVTVSS | | | | | | |
| ADI-81729 | 1286 | GAGGTGCAGCTGTTGGAGTCTGGGACTGAGGTGAAGAAGCC | | | | | | 6865 | EVQLLESGTEVKKP | | 7218 | 14 | | 11 | |
| | | TGGGGCCTCAGTGAAGGTTTCCTGCAAGGCACTTGGATACA | | | | | | | GASVKVSCKALGYT | | | | | | |
| | | CTTTCACCAATAACTACATACACTGGGTGCGACAGGCCCCT | | | | | | | FTNNYIHWVRQAPG | | | | | | |
| | | GGACAAGGGCTTGAGTGGATGGGAATAATCAATCCTAGTGG | | | | | | | QGLEWMGIINPSGG | | | | | | |
| | | TGGCGCCACAACCTACGCACAGAAGTTCCAGGGTAGAGTCA | | | | | | | ATTYAQKFQGRVTL | | | | | | |
| | | CCTTGACCAGCGACACATCCACGAGCACAGTCTACCTGGAG | | | | | | | TSDTSTSTVYLELT | | | | | | |
| | | CTGACCAGCCTGACATCTGAGGACACGGCCGTCTATTACTG | | | | | | | SLTSEDTAVYYCAR | | | | | | |
| | | TGCGAGAGATAGCGAATATATACCAGCAGCTGGTTCTTTTG | | | | | | | DSEYIPAAGSFDYW | | | | | | |
| | | ACTACTGGGGCCAGGGAACCCTGGTCACCGTCTCCTCA | | | | | | | GQGTLVTVSS | | | | | | |
| ADI-81643 | 1287 | CGGGGAGTCTCTGACGATCTCCTGTAAGGCTTCTGGATACA | | | | | | 6866 | EVQLVESGPEVKKP | | 7219 | 11 | | 9 | |
| | | GCTTTATCAGCTATTGGATCACCTGGGTGCGCCAGATGCCC | | | | | | | GESLTISCKASGYS | | | | | | |
| | | GGGAAAGGCCTGGAGTGGATGGGGAACATTGATCCTAGTGA | | | | | | | FISYWITWVRQMPG | | | | | | |
| | | CTCTTACACCAACTATAGTCCGGCCTTCCAAGGCCACGTCA | | | | | | | KGLEWMGNIDPSDS | | | | | | |
| | | CCATCGCAGCTGACAAGGGCATCAGCACTGCCTACCTACAG | | | | | | | YTNYSPAFQGHVTI | | | | | | |
| | | TGGAGGAGCCTGAAGGCCTCGGACACCGCCATGTATTATTG | | | | | | | AADKGISTAYLQWR | | | | | | |
| | | TGCGAGACGAATTATGATTACATCTGGTGGAAAAGAGATCG | | | | | | | SLKASDTAMYYCAR | | | | | | |
| | | ATGCTTTTGATATCTGGGGCCAAGGGACAACGGTCACCGTC | | | | | | | RIMITSGGKEIDAF | | | | | | |
| | | TCCTCA | | | | | | | DIWGQGTTVTVSS | | | | | | |
| ADI-81701 | 1286 | GAGGTCCAGCTGGTGCAGTCTGGAGCTGAGGTGAAGAAGCC | | | | | | 6867 | EVQLVQSGAEVKKP | | 7220 | 11 | | 11 | |
| | | TGGGGCCTCAGTGAAGGTCTCCTGCAAGACTTCTGGTTACG | | | | | | | GASVKVSCKTSGYA | | | | | | |
| | | CCTTTATCAACTATGGTATCAGCTGGGTGCGACAGGCCCCT | | | | | | | FINYGISWVRQAPG | | | | | | |
| | | GGACAAGGGCTTGAGTGGATGGGATGGATCAGCCCTTACGA | | | | | | | QGLEWMGWISPYDG | | | | | | |
| | | TGGCCACACAAACTATGCACAGAAAATCCAGGGCAGAGTCA | | | | | | | HTNYAQKIQGRVTM | | | | | | |
| | | CCATGGCCACAGACACATCCGCGAGCACAGCCTACATGGAC | | | | | | | ATDTSASTAYMDLR | | | | | | |
| | | CTGAGGAGCCTGAGATCTGACGACACGGCCGTCTATTACTG | | | | | | | SLRSDDTAVYYCVR | | | | | | |
| | | TGTGAGAGATTACTACGGTGCTTTGACAAGCCCAAATGCCA | | | | | | | DYYGALTSPNANSE | | | | | | |
| | | ATAGTGAGACGTTGGGAACGATGGACTACTGGGGCCAGGGA | | | | | | | TLGTMDYWGQGTLV | | | | | | |
| | | ACCCTGGTCACCGTCTCCTCA | | | | | | | TVSS | | | | | | |
| ADI-81720 | 1286 | GAGGTGCAGCTGGTGGAGTCTGGGGGAGGCGTGGTCCAGCC | | | | | | 6868 | EVQLVESGGGVVQP | | 7221 | 11 | | 10 | |
| | | TGGGAAGTCCCTGAGACTCTCCTGTGTAGCGTCTGGATTCA | | | | | | | GKSLRLSCVASGFT | | | | | | |
| | | CCTTCAGTAGACATGGCATGCACTGGGTCCGCCAGGCTCCA | | | | | | | FSRHGMHWVRQAPG | | | | | | |
| | | GGCAAGGGGCTGGAGTGGGTGGCACTTATATATTATGATGG | | | | | | | KGLEWVALIYYDGS | | | | | | |
| | | AAGTAGTAAATATTATGCAGACTCCGTGAAGGGCCGATTCA | | | | | | | SKYYADSVKGRFTI | | | | | | |
| | | CCATCTCCAGAGAGAATTCCAAGAACACGCTGTATCTGCAA | | | | | | | SRENSKNTLYLQMN | | | | | | |
| | | ATGAACAGCCTGAGAGTCGAGGACACGGCTCTGTATTACTG | | | | | | | SLRVEDTALYYCAR | | | | | | |
| | | TGCGAGAGATGGGGCTAATGGCTATGATCCTTTGTACCTCA | | | | | | | DGANGYDPLYLNHW | | | | | | |
| | | ACCACTGGGGCCAGGGCACCCTGGTCACCGTCTCCTCA | | | | | | | GQGTLVTVSS | | | | | | |
| | VH | VH | | SEQ | | SEQ | | SEQ | | SEQ | | SEQ | | SEQ | |
| | CDR3 | Germ- | VH | ID | VH | ID | VH | ID | VH | ID | VH | ID | VH | ID | VH |
| Clone ID | Lineage | line | FR1 | NO: | CDR1 | NO: | FR2 | NO: | CDR2 | NO: | FR3 | NO: | CDR3 | NO: | FR4 |
| ADI-81632 | 5 | IGHV4- | QVQLV | 5345 | DSISSS | 5544 | WIRQPP | 445 | SIFYSG | 5902 | RVTISV | 6209 | ARELGFS | 6511 | WGQGTL |
| | | 39 | ESGPG | | NSYWA | | GKGLEW | | STYYNP | | DTSKNQ | | DS | | VTVSS |
| | | | LVKPS | | | | IG | | SLKS | | FSLQLT | | | | |
| | | | ETLSL | | | | | | | | SVTATD | | | | |
| | | | TCTVS | | | | | | | | TAVYYC | | | | |
| | | | D | | | | | | | | | | | | |
| ADI-81859 | 37 | IGHV4- | EVQLL | 5346 | DSISRG | 5545 | WIRQHP | 5788 | FIYYSG | 5903 | RVTISV | 6210 | ARDFGGN | 6512 | WGPGTL |
| | | 31 | ESGPG | | GYYWS | | GRGLEW | | STYYNP | | DTSKNQ | | AQYFAF | | VTVSS |
| | | | LVKPS | | | | IG | | SLKS | | FSLKLS | | | | |
| | | | QTLSL | | | | | | | | SLTAAD | | | | |
| | | | TCTVS | | | | | | | | TAVYYC | | | | |
| | | | G | | | | | | | | | | | | |
| ADI-81891 | 67 | IGHV3- | EVQLV | 5338 | FTFRRY | 204 | WVRQAP | 431 | VILYDG | 542 | RFTISR | 777 | AKSQGTY | 6513 | WGQGTL |
| | | 30 | ESGGG | | GMH | | GKGLEW | | SNKDYA | | DNSKNT | | CSGGNCY | | VTVSS |
| | | | VVQPG | | | | VA | | DSVKG | | LYLQMN | | SNYFDY | | |
| | | | RSLRL | | | | | | | | SLRAED | | | | |
| | | | SCAAS | | | | | | | | TAVYYC | | | | |
| | | | G | | | | | | | | | | | | |
| ADI-81814 | 88 | IGHV4- | EVQLV | 5347 | GSISGS | 5546 | WVRQSP | 438 | EIFHSG | 5904 | RVTMSL | 6211 | LLFLFLA | 6514 | RAEVQL |
| | | 4 | ESGPG | | NWWA | | GKGLEW | | STVYNP | | DKSKSQ | | SS | | FTVSS |
| | | | LVKPS | | | | IG | | SLKS | | FSLNLI | | | | |
| | | | GTLSL | | | | | | | | TRSKMK | | | | |
| | | | TCAVS | | | | | | | | WVTFIS | | | | |
| | | | G | | | | | | | | | | | | |
| ADI-81602 | 60 | IGHV3- | PGARC | 5348 | FTFSNY | 396 | WVRQAP | 431 | LISYDG | 5905 | RFTISR | 777 | ARGGDCS | 6515 | WGQGTT |
| | | 30 | CSLGD | | AMH | | GKGLEW | | SNNYYA | | DNSKNT | | GGGCPYP | | VTVSS |
| | | | VWSSW | | | | VA | | DSVKG | | LYLQMN | | YYYNGID | | |
| | | | EVPAT | | | | | | | | SLRAED | | DV | | |
| | | | LLCSS | | | | | | | | TAVYYC | | | | |
| | | | G | | | | | | | | | | | | |
| ADI-81572 | 27 | IGHV1- | QVQLQ | 5349 | GTFSSS | 5547 | WIRQAP | 492 | TIIPIL | 5906 | RLTLTA | 6212 | ARESGYS | 6516 | WGRGTL |
| | | 69 | QSGAE | | PIS | | GQGLEW | | GVPNYA | | DKSTST | | APGSVTY | | VTVSS |
| | | | VKEPG | | | | MG | | QQFQA | | AYMELS | | FDL | | |
| | | | SSVKV | | | | | | | | SLRSED | | | | |
| | | | SCMAS | | | | | | | | TASYYC | | | | |
| | | | G | | | | | | | | | | | | |
| ADI-81871 | 48 | IGHV3- | EVQLV | 5350 | FTFSNY | 5548 | WVRQTP | 5778 | LMSDDG | 5907 | RFTISR | 6213 | ARDLPSS | 6517 | WGQGAL |
| | | 30 | QSGGG | | AFY | | GKGLEW | | AYKDYA | | DNSKNT | | SWSSTAF | | VTVSS |
| | | | VVQPG | | | | VA | | DSVKG | | LYLQMN | | DY | | |
| | | | RSLRL | | | | | | | | GLKSED | | | | |
| | | | SCAAS | | | | | | | | TAVYFC | | | | |
| | | | G | | | | | | | | | | | | |
| ADI-81560 | 26 | IGHV1- | QVQLV | 5351 | FNFDLS | 5549 | WVRQAR | 5789 | WIAVGS | 5908 | RVTITR | 6214 | AAPHCNR | 6518 | WGQGTT |
| | | 58 | QSGPE | | AVQ | | GQRLEW | | GKTDYA | | DMSINT | | TNCHDGF | | VTVSS |
| | | | VKKPG | | | | IG | | QKFHE | | AYLELS | | DL | | |
| | | | TSVKV | | | | | | | | SLRSED | | | | |
| | | | PCKAS | | | | | | | | TAVYYC | | | | |
| | | | G | | | | | | | | | | | | |
| | SEQ | | | | | | | SEQ | | | SEQ | VH | | VH Amino | |
| | ID | | | | | | | ID | | | ID | Nucleotide | | Acid | |
| Clone ID | NO: | VH DNA | | | | | | NO: | VH Protein | | NO: | Substitution | | Substitution | |
| ADI-81632 | 1286 | CAGGTGCAGCTGGTGGAGTCGGGCCCAGGACTGGTGAAGCC | | | | | | 6869 | QVQLVESGPGLVKP | | 7222 | 10 | | 9 | |
| | | TTCGGAGACCCTGTCCCTCACCTGCACTGTCTCTGATGACT | | | | | | | SETLSLTCTVSDDS | | | | | | |
| | | CCATCAGCAGTAGTAATTCCTACTGGGCCTGGATCCGCCAG | | | | | | | ISSSNSYWAWIRQP | | | | | | |
| | | CCCCCAGGGAAGGGGCTGGAGTGGATTGGGAGTATCTTTTA | | | | | | | PGKGLEWIGSIFYS | | | | | | |
| | | TAGTGGGAGCACCTACTACAACCCGTCCCTCAAGAGTCGAG | | | | | | | GSTYYNPSLKSRVT | | | | | | |
| | | TCACCATATCCGTAGACACGTCCAAGAACCAGTTCTCCCTG | | | | | | | ISVDTSKNQFSLQL | | | | | | |
| | | CAGTTAACTTCTGTGACCGCCACAGACACGGCTGTTTATTA | | | | | | | TSVTATDTAVYYCA | | | | | | |
| | | CTGTGCGAGAGAACTTGGATTTAGTGACTCCTGGGGCCAGG | | | | | | | RELGFSDSWGQGTL | | | | | | |
| | | GAACCCTGGTCACCGTCTCCTCA | | | | | | | VTVSS | | | | | | |
| ADI-81859 | 1302 | GAGGTGCAGCTGTTGGAGTCGGGCCCAGGACTGGTGAAGCC | | | | | | 6870 | EVQLLESGPGLVKP | | 7223 | 6 | | 6 | |
| | | TTCACAGACCCTGTCCCTCACCTGCACTGTCTCTGGTGACT | | | | | | | SQTLSLTCTVSGDS | | | | | | |
| | | CCATCAGCCGTGGTGGTTACTACTGGAGCTGGATCCGCCAG | | | | | | | ISRGGYYWSWIRQH | | | | | | |
| | | CACCCAGGGAGGGGCCTGGAGTGGATTGGGTTCATCTATTA | | | | | | | PGRGLEWIGFIYYS | | | | | | |
| | | CAGTGGGAGCACCTACTATAACCCGTCCCTCAAGAGTCGAG | | | | | | | GSTYYNPSLKSRVT | | | | | | |
| | | TCACCATATCAGTGGACACGTCTAAGAACCAGTTCTCCCTG | | | | | | | ISVDTSKNQFSLKL | | | | | | |
| | | AAGCTGAGCTCTCTGACTGCCGCGGACACGGCCGTATATTA | | | | | | | SSLTAADTAVYYCA | | | | | | |
| | | CTGTGCGAGAGACTTCGGTGGTAACGCCCAATACTTTGCCT | | | | | | | RDFGGNAQYFAFWG | | | | | | |
| | | TCTGGGGCCCGGGAACCCTGGTCACCGTCTCCTCA | | | | | | | PGTLVTVSS | | | | | | |
| ADI-81891 | 1286 | GAGGTGCAGCTGGTGGAGTCTGGGGGAGGCGTGGTCCAGCC | | | | | | 6871 | EVQLVESGGGVVQP | | 7224 | 4 | | 4 | |
| | | TGGGAGGTCCCTTAGACTCTCCTGTGCAGCCTCCGGATTCA | | | | | | | GRSLRLSCAASGFT | | | | | | |
| | | CCTTCAGGAGATATGGCATGCATTGGGTCCGCCAGGCTCCA | | | | | | | FRRYGMHWVRQAPG | | | | | | |
| | | GGCAAGGGGCTGGAGTGGGTGGCAGTTATATTATATGATGG | | | | | | | KGLEWVAVILYDGS | | | | | | |
| | | AAGTAATAAAGACTACGCAGACTCCGTGAAGGGCCGATTCA | | | | | | | NKDYADSVKGRFTI | | | | | | |
| | | CCATCTCCAGAGACAATTCCAAGAACACGCTGTATCTGCAA | | | | | | | SRDNSKNTLYLQMN | | | | | | |
| | | ATGAACAGCCTGAGAGCTGAAGACACGGCTGTGTATTACTG | | | | | | | SLRAEDTAVYYCAK | | | | | | |
| | | TGCGAAATCCCAGGGAACTTATTGCAGTGGGGGTAACTGCT | | | | | | | SQGTYCSGGNCYSN | | | | | | |
| | | ACTCGAATTACTTTGACTACTGGGGCCAGGGAACCCTGGTC | | | | | | | YFDYWGQGTLVTVS | | | | | | |
| | | ACCGTCTCCTCA | | | | | | | S | | | | | | |
| ADI-81814 | 6808 | GAGGTGCAGCTGGTGGAGTCGGGCCCAGGACTGGTGAAGCC | | | | | | 6872 | EVQLVESGPGLVKP | | 7225 | 38 | | 22 | |
| | | TTCGGGGACCCTGTCCCTCACCTGCGCTGTCTCCGGTGGCT | | | | | | | SGTLSLTCAVSGGS | | | | | | |
| | | CCATCAGCGGTAGTAACTGGTGGGCTTGGGTCCGCCAGTCC | | | | | | | ISGSNWWAWVRQSP | | | | | | |
| | | CCAGGGAAGGGACTGGAGTGGATTGGGGAAATCTTTCATAG | | | | | | | GKGLEWIGEIFHSG | | | | | | |
| | | TGGGAGCACCGTCTACAACCCGTCCCTCAAGAGTCGAGTCA | | | | | | | STVYNPSLKSRVTM | | | | | | |
| | | CCATGTCACTAGACAAGTCCAAGAGCCAGTTCTCCCTGAAC | | | | | | | SLDKSKSQFSLNLI | | | | | | |
| | | TTGATAACGCGTTCAAAAATGAAATGGGTTACGTTTATATC | | | | | | | TRSKMKWVTFISLL | | | | | | |
| | | TCTATTGTTCTTATTTCTGGCGTCCTCGAGGGCCGAGGTGC | | | | | | | FLFLASSRAEVQLF | | | | | | |
| | | AGCTGTTCACCGTCTCCTCA | | | | | | | TVSS | | | | | | |
| ADI-81602 | 1287 | CCAGGTGCCCGCTGTTGCAGTCTGGGGGACGTGTGGTCCAG | | | | | | 6873 | PGARCCSLGDVWSS | | 7226 | 36 | | 17 | |
| | | CTGGGAGGTCCCTGCGACTCTCCTGTGCAGCTCTGGATTCA | | | | | | | WEVPATLLCSSGFT | | | | | | |
| | | CCTTCAGTAACTATGCTATGCACTGGGTCCGCCAGGCTCCA | | | | | | | FSNYAMHWVRQAPG | | | | | | |
| | | GGCAAGGGGCTGGAGTGGGTGGCACTTATATCATATGATGG | | | | | | | KGLEWVALISYDGS | | | | | | |
| | | AAGCAATAATTACTACGCAGACTCCGTGAAGGGCCGATTCA | | | | | | | NNYYADSVKGRFTI | | | | | | |
| | | CCATCTCCAGAGACAATTCCAAGAACACGCTGTATCTGCAA | | | | | | | SRDNSKNTLYLQMN | | | | | | |
| | | ATGAACAGCCTGAGAGCTGAGGACACGGCTGTGTATTACTG | | | | | | | SLRAEDTAVYYCAR | | | | | | |
| | | TGCGAGAGGAGGTGATTGTAGTGGTGGTGGGTGCCCGTACC | | | | | | | GGDCSGGGCPYPYY | | | | | | |
| | | CCTACTACTACAATGGTATAGACGACGTCTGGGGCCAAGGG | | | | | | | YNGIDDVWGQGTTV | | | | | | |
| | | ACCACGGTCACCGTCTCCTCA | | | | | | | TVSS | | | | | | |
| ADI-81572 | 1288 | TGGGTCCTCGGTGAAGGTCTCCTGCATGGCTTCTGGAGGCA | | | | | | 6874 | QVQLQQSGAEVKEP | | 7227 | 17 | | 13 | |
| | | CCTTCAGCAGCTCTCCTATCAGCTGGATACGCCAGGCCCCT | | | | | | | GSSVKVSCMASGGT | | | | | | |
| | | GGACAAGGGCTTGAGTGGATGGGCACGATCATCCCTATCCT | | | | | | | FSSSPISWIRQAPG | | | | | | |
| | | TGGTGTACCAAACTACGCACAACAGTTCCAGGCCAGACTTA | | | | | | | QGLEWMGTIIPILG | | | | | | |
| | | CCCTTACCGCGGACAAATCCACGAGCACAGCCTACATGGAA | | | | | | | VPNYAQQFQARLTL | | | | | | |
| | | CTGAGCAGCCTGAGATCTGAGGACACGGCCTCTTATTACTG | | | | | | | TADKSTSTAYMELS | | | | | | |
| | | TGCGAGAGAGTCGGGTTACTCTGCTCCGGGGAGTGTTACCT | | | | | | | SLRSEDTASYYCAR | | | | | | |
| | | ACTTCGATCTCTGGGGCCGTGGCACCCTGGTCACCGTCTCC | | | | | | | ESGYSAPGSVTYFD | | | | | | |
| | | TCA | | | | | | | LWGRGTLVTVSS | | | | | | |
| ADI-81871 | 1285 | GAGGTGCAGCTGGTGCAGTCTGGGGGAGGCGTGGTCCAGCC | | | | | | 6875 | EVQLVQSGGGVVQP | | 7228 | 17 | | 14 | |
| | | TGGGAGGTCCCTGAGACTCTCCTGTGCAGCCTCTGGATTCA | | | | | | | GRSLRLSCAASGFT | | | | | | |
| | | CCTTCAGTAACTATGCTTTCTACTGGGTCCGCCAGACTCCA | | | | | | | FSNYAFYWVRQTPG | | | | | | |
| | | GGCAAGGGGCTAGAGTGGGTGGCACTTATGTCAGATGATGG | | | | | | | KGLEWVALMSDDGA | | | | | | |
| | | AGCTTATAAAGACTACGCAGACTCCGTGAAGGGCCGATTCA | | | | | | | YKDYADSVKGRFTI | | | | | | |
| | | CCATCTCCAGAGACAATTCCAAGAACACGCTGTATCTGCAA | | | | | | | SRDNSKNTLYLQMN | | | | | | |
| | | ATGAACGGCCTGAAAAGTGAGGACACGGCTGTTTATTTCTG | | | | | | | GLKSEDTAVYFCAR | | | | | | |
| | | TGCGAGAGATCTGCCAAGCAGCAGCTGGTCATCAACCGCCT | | | | | | | DLPSSSWSSTAFDY | | | | | | |
| | | TTGACTACTGGGGCCAGGGAGCCCTGGTCACCGTCTCCTCA | | | | | | | WGQGALVTVSS | | | | | | |
| ADI-81560 | 1287 | CAGGTCCAGCTGGTGCAGTCTGGGCCTGAGGTGAAGAAGCC | | | | | | 6876 | QVQLVQSGPEVKKP | | 7229 | 14 | | 11 | |
| | | TGGGACCTCAGTTAAGGTCCCCTGCAAGGCTTCTGGTTTCA | | | | | | | GTSVKVPCKASGFN | | | | | | |
| | | ACTTTGATCTCTCTGCTGTGCAGTGGGTGCGACAGGCTCGT | | | | | | | FDLSAVQWVRQARG | | | | | | |
| | | GGACAACGCCTTGAGTGGATAGGGTGGATCGCCGTTGGCAG | | | | | | | QRLEWIGWIAVGSG | | | | | | |
| | | TGGCAAAACAGACTACGCACAGAAGTTCCATGAAAGAGTCA | | | | | | | KTDYAQKFHERVTI | | | | | | |
| | | CCATAACCAGGGACATGTCAATAAATACGGCCTACCTGGAG | | | | | | | TRDMSINTAYLELS | | | | | | |
| | | CTGAGCAGCCTGAGATCCGAGGACACGGCCGTCTATTACTG | | | | | | | SLRSEDTAVYYCAA | | | | | | |
| | | TGCGGCACCCCATTGCAATCGTACCAACTGCCACGATGGTT | | | | | | | PHCNRTNCHDGFDL | | | | | | |
| | | TTGATCTCTGGGGCCAAGGGACCACGGTCACTGTCTCCTCA | | | | | | | WGQGTTVTVSS | | | | | | |
| | VH | VH | | SEQ | | SEQ | | SEQ | | SEQ | | SEQ | | SEQ | |
| | CDR3 | Germ- | VH | ID | VH | ID | VH | ID | VH | ID | VH | ID | VH | ID | VH |
| Clone ID | Lineage | line | FR1 | NO: | CDR1 | NO: | FR2 | NO: | CDR2 | NO: | FR3 | NO: | CDR3 | NO: | FR4 |
| ADI-81802 | 78 | IGHV3- | EVQLV | 5338 | FPFSTY | 5550 | WVRQAP | 5790 | VISYDG | 5909 | RFTVSR | 6215 | ASRSPRV | 6519 | WGQGTT |
| | | 30 | ESGGG | | PMH | | GRGLEW | | AHKFYA | | DNSKNT | | PATATNA | | VTVSS |
| | | | VVQPG | | | | VA | | DSVKG | | LYLQLN | | FDI | | |
| | | | RSLRL | | | | | | | | SLRPED | | | | |
| | | | SCAAS | | | | | | | | TAVYSC | | | | |
| | | | G | | | | | | | | | | | | |
| ADI-81558 | 24 | IGHV3- | QVQLV | 5352 | FPFSNA | 5551 | WVRQAP | 5791 | RIKNGP | 5910 | RFTISR | 6216 | TTMSREY | 6520 | WGQGTT |
| | | 15 | ESGGS | | WMT | | GKGLEW | | DGGTTD | | DDSKNT | | YDTDFYA | | VTVSS |
| | | | LVKPG | | | | IG | | YAAPVR | | LYLQMN | | KDV | | |
| | | | GSLRL | | | | | | G | | SLKSED | | | | |
| | | | SCAAS | | | | | | | | TGVYFC | | | | |
| | | | G | | | | | | | | | | | | |
| ADI-81695 | 65 | IGHV3- | EVQLV | 5321 | FTFEDY | 5552 | WVRQAP | 437 | GTAWNS | 5911 | RFFISR | 6217 | VKVFSRD | 6521 | WGQGTT |
| | | 9 | ESGGG | | GMH | | GKGLEW | | ATIGYA | | DNAKSS | | WSGYAFD | | VTVSS |
| | | | LVQPG | | | | VS | | DSVKG | | LYLQMI | | M | | |
| | | | RSLRL | | | | | | | | SLRAED | | | | |
| | | | SCAAS | | | | | | | | TALYYC | | | | |
| | | | G | | | | | | | | | | | | |
| ADI-81719 | 89 | IGHV3- | EVQLL | 5353 | FPFITY | 5553 | WVRQAP | 437 | HISSGG | 5912 | RFTISR | 6218 | ARVLRYS | 6522 | WGQGTL |
| | | 48 | ESGGG | | EMN | | GKGLEW | | TTTYYA | | DNDENS | | SAWVDL | | VTVSS |
| | | | LVQPG | | | | VS | | DSVKG | | LVLQMN | | | | |
| | | | GSLRL | | | | | | | | SLRAED | | | | |
| | | | SCAAT | | | | | | | | TAVYYC | | | | |
| | | | G | | | | | | | | | | | | |
| ADI-81758 | 34 | IGHV3- | EVQLL | 5354 | IIVSRN | 291 | WVRQAP | 5792 | VIYPGG | 622 | RFTISR | 6219 | ARQENND | 6523 | WGQGTT |
| | | 53 | ETGGG | | YMT | | GKGLDW | | STFYAD | | DDSKNT | | AFDI | | VTVSS |
| | | | LIQPG | | | | VS | | SVRG | | LYLQMI | | | | |
| | | | GSLRL | | | | | | | | SLRAED | | | | |
| | | | SCAAS | | | | | | | | TAVYYC | | | | |
| | | | E | | | | | | | | | | | | |
| ADI-81780 | 56 | IGHV3- | EVQLL | 5355 | FIFTNY | 5554 | WVRQAP | 431 | TVKQDG | 5913 | RFTISR | 6220 | ARELGIL | 6524 | WGQGTL |
| | | 7 | ESGGG | | WIS | | GKGLEW | | TEKYYV | | DNAKNS | | DW | | VTVSS |
| | | | LVQPG | | | | VA | | DSVKG | | VFLQMN | | | | |
| | | | GSLRL | | | | | | | | SLRAED | | | | |
| | | | SCAAS | | | | | | | | TAVYYC | | | | |
| | | | G | | | | | | | | | | | | |
| ADI-81574 | 36 | IGHV3- | QVQLV | 12 | FTFSTS | 5555 | WVRQVT | 5793 | GVGTSG | 5914 | RFTISR | 6221 | ARGETTM | 6525 | WGQGTT |
| | | 13 | QSGGG | | DMH | | GKHLEW | | DTYYSD | | ENAKNS | | ALRWYAF | | VTVSS |
| | | | LVQPG | | | | VS | | SVKG | | LYLQMN | | DI | | |
| | | | GSLRL | | | | | | | | NLRAGD | | | | |
| | | | SCAAS | | | | | | | | TAVYYC | | | | |
| | | | G | | | | | | | | | | | | |
| ADI-81698 | 68 | IGHV1- | QVQLV | 5356 | YTFTSY | 5556 | WVRQAP | 433 | IINPGD | 5915 | RVTVTS | 6222 | ARDFLPA | 6526 | WGKGTT |
| | | 46 | QSGAE | | FIH | | GQGLEW | | DSTTYS | | DTSTST | | TASPYYY | | VTVSS |
| | | | VKKPG | | | | MG | | QKFQG | | VYMELS | | YYMDV | | |
| | | | ASVKL | | | | | | | | SLRSED | | | | |
| | | | SCKAS | | | | | | | | TAVYYC | | | | |
| | | | G | | | | | | | | | | | | |
| | SEQ | | | | | | | SEQ | | | SEQ | VH | | VH Amino | |
| | ID | | | | | | | ID | | | ID | Nucleotide | | Acid | |
| Clone ID | NO: | VH DNA | | | | | | NO: | VH Protein | | NO: | Substitution | | Substitution | |
| ADI-81802 | 1287 | TGGGAGGTCCCTGAGACTCTCCTGTGCAGCCTCTGGATTCC | | | | | | 6877 | EVQLVESGGGVVQP | | 7230 | 14 | | 11 | |
| | | CCTTCAGTACCTATCCTATGCACTGGGTCCGCCAGGCTCCA | | | | | | | GRSLRLSCAASGFP | | | | | | |
| | | GGCAGGGGGCTGGAATGGGTGGCAGTTATTTCATATGATGG | | | | | | | FSTYPMHWVRQAPG | | | | | | |
| | | AGCCCATAAATTCTACGCAGACTCCGTGAAGGGCCGATTCA | | | | | | | RGLEWVAVISYDGA | | | | | | |
| | | CCGTCTCCAGAGACAATTCCAAGAACACACTGTATCTACAA | | | | | | | HKFYADSVKGRFTV | | | | | | |
| | | CTGAACAGCCTGAGACCTGAGGACACGGCTGTTTATTCTTG | | | | | | | SRDNSKNTLYLQLN | | | | | | |
| | | TGCGAGTCGCTCACCGCGTGTACCAGCAACTGCTACTAATG | | | | | | | SLRPEDTAVYSCAS | | | | | | |
| | | CTTTTGATATCTGGGGCCAAGGGACCACGGTCACCGTCTCC | | | | | | | RSPRVPATATNAFD | | | | | | |
| | | TCA | | | | | | | IWGQGTTVTVSS | | | | | | |
| ADI-81558 | 1287 | TGGGGGGTCCCTTAGACTCTCCTGTGCAGCCTCTGGATTCC | | | | | | 6878 | QVQLVESGGSLVKP | | 7231 | 12 | | 11 | |
| | | CTTTCAGTAACGCCTGGATGACCTGGGTCCGCCAGGCTCCA | | | | | | | GGSLRLSCAASGFP | | | | | | |
| | | GGGAAGGGGCTGGAGTGGATTGGCCGTATTAAGAACGGACC | | | | | | | FSNAWMTWVRQAPG | | | | | | |
| | | TGATGGTGGGACAACAGACTACGCTGCACCCGTGAGAGGCA | | | | | | | KGLEWIGRIKNGPD | | | | | | |
| | | GATTCACCATCTCAAGAGATGATTCAAAAAACACGCTGTAT | | | | | | | GGTTDYAAPVRGRF | | | | | | |
| | | CTTCAAATGAACAGCCTGAAAAGCGAGGACACAGGCGTTTA | | | | | | | TISRDDSKNTLYLQ | | | | | | |
| | | TTTCTGTACCACAATGAGCCGAGAATACTATGATACCGACT | | | | | | | MNSLKSEDTGVYFC | | | | | | |
| | | TCTACGCTAAGGACGTCTGGGGCCAAGGGACCACGGTCACC | | | | | | | TTMSREYYDTDFYA | | | | | | |
| | | GTCTCCTCA | | | | | | | KDVWGQGTTVTVSS | | | | | | |
| ADI-81695 | 1287 | GAGGTGCAGCTGGTGGAGTCTGGGGGAGGTTTGGTACAGCC | | | | | | 6879 | EVQLVESGGGLVQP | | 7232 | 12 | | 9 | |
| | | TGGCAGGTCCCTGAGACTCTCTTGTGCAGCCTCTGGATTCA | | | | | | | GRSLRLSCAASGFT | | | | | | |
| | | CCTTTGAAGATTATGGCATGCACTGGGTCCGGCAAGCTCCT | | | | | | | FEDYGMHWVRQAPG | | | | | | |
| | | GGGAAGGGCCTGGAGTGGGTATCAGGCACTGCCTGGAATAG | | | | | | | KGLEWVSGTAWNSA | | | | | | |
| | | TGCTACCATAGGCTATGCGGACTCTGTGAAGGGCCGATTCT | | | | | | | TIGYADSVKGRFFI | | | | | | |
| | | TCATCTCCAGAGACAACGCCAAGAGCTCCCTGTATCTGCAA | | | | | | | SRDNAKSSLYLQMI | | | | | | |
| | | ATGATCAGTCTGAGAGCTGAGGACACGGCCTTGTATTACTG | | | | | | | SLRAEDTALYYCVK | | | | | | |
| | | TGTAAAAGTTTTTTCCCGGGATTGGAGTGGTTACGCTTTTG | | | | | | | VFSRDWSGYAFDMW | | | | | | |
| | | ATATGTGGGGCCAAGGGACCACGGTCACCGTCTCCTCA | | | | | | | GQGTTVTVSS | | | | | | |
| ADI-81719 | 1286 | GAGGTGCAGCTGTTGGAGTCGGGGGGAGGCTTGGTACAGCC | | | | | | 6880 | EVQLLESGGGLVQP | | 7233 | 12 | | 11 | |
| | | TGGAGGGTCCCTGAGACTCTCCTGTGCAGCCACTGGATTCC | | | | | | | GGSLRLSCAATGFP | | | | | | |
| | | CCTTCATTACTTATGAAATGAACTGGGTCCGCCAGGCTCCA | | | | | | | FITYEMNWVRQAPG | | | | | | |
| | | GGGAAGGGGCTGGAGTGGGTCTCACACATTAGTAGTGGTGG | | | | | | | KGLEWVSHISSGGT | | | | | | |
| | | TACTACCACATACTACGCAGACTCTGTGAAGGGCCGATTCA | | | | | | | TTYYADSVKGRFTI | | | | | | |
| | | CCATCTCCAGAGACAACGACGAGAACTCACTGGTTTTGCAA | | | | | | | SRDNDENSLVLQMN | | | | | | |
| | | ATGAACAGCCTGAGAGCCGAGGACACGGCTGTTTATTACTG | | | | | | | SLRAEDTAVYYCAR | | | | | | |
| | | TGCGAGAGTCTTGCGTTATAGCAGTGCCTGGGTTGACCTCT | | | | | | | VLRYSSAWVDLWGQ | | | | | | |
| | | GGGGCCAGGGAACCCTGGTCACCGTCTCCTCA | | | | | | | GTLVTVSS | | | | | | |
| ADI-81758 | 1287 | GAGGTGCAGCTGTTGGAGACTGGAGGAGGCTTGATCCAGCC | | | | | | 6881 | EVQLLETGGGLIQP | | 7234 | 12 | | 11 | |
| | | GGGGGGGTCCCTGAGACTCTCCTGTGCAGCCTCTGAGATCA | | | | | | | GGSLRLSCAASEII | | | | | | |
| | | TCGTCAGCAGGAACTACATGACCTGGGTCCGCCAGGCTCCA | | | | | | | VSRNYMTWVRQAPG | | | | | | |
| | | GGGAAAGGGCTGGACTGGGTCTCAGTCATTTATCCCGGTGG | | | | | | | KGLDWVSVIYPGGS | | | | | | |
| | | GAGCACTTTCTACGCAGACTCCGTGAGGGGCCGATTCACCA | | | | | | | TFYADSVRGRFTIS | | | | | | |
| | | TCTCCAGAGACGATTCCAAGAACACTCTGTATCTTCAAATG | | | | | | | RDDSKNTLYLQMIS | | | | | | |
| | | ATCAGCCTGAGAGCCGAGGACACGGCCGTATATTACTGTGC | | | | | | | LRAEDTAVYYCARQ | | | | | | |
| | | GAGACAAGAAAATAATGATGCTTTTGATATTTGGGGGCAAG | | | | | | | ENNDAFDIWGQGTT | | | | | | |
| | | GGACCACGGTCACCGTCTCCTCA | | | | | | | VTVSS | | | | | | |
| ADI-81780 | 1286 | GAGGTGCAGCTGTTGGAGTCTGGGGGAGGCTTGGTCCAGCC | | | | | | 6882 | EVQLLESGGGLVQP | | 7235 | 12 | | 9 | |
| | | GGGGGGGTCCCTGAGACTCTCCTGTGCAGCCTCTGGATTCA | | | | | | | GGSLRLSCAASGFI | | | | | | |
| | | TTTTCACTAACTATTGGATAAGTTGGGTCCGCCAGGCTCCA | | | | | | | FTNYWISWVRQAPG | | | | | | |
| | | GGGAAGGGGCTGGAGTGGGTGGCCACCGTGAAGCAAGATGG | | | | | | | KGLEWVATVKQDGT | | | | | | |
| | | AACTGAGAAATATTATGTGGACTCTGTGAAGGGCCGATTCA | | | | | | | EKYYVDSVKGRFTI | | | | | | |
| | | CCATCTCCAGAGACAACGCCAAAAACTCAGTCTTTCTGCAA | | | | | | | SRDNAKNSVFLQMN | | | | | | |
| | | ATGAACAGCCTGAGAGCCGAGGACACGGCCGTGTATTATTG | | | | | | | SLRAEDTAVYYCAR | | | | | | |
| | | TGCGAGAGAATTGGGGATCTTGGATTGGTGGGGCCAGGGAA | | | | | | | ELGILDWWGQGTLV | | | | | | |
| | | CCCTGGTCACCGTCTCCTCA | | | | | | | TVSS | | | | | | |
| ADI-81574 | 1287 | CAGGTGCAGCTGGTGCAGTCTGGGGGAGGCTTGGTACAGCC | | | | | | 6883 | QVQLVQSGGGLVQP | | 7236 | 11 | | 10 | |
| | | TGGGGGGTCCCTGAGACTCTCCTGTGCAGCCTCTGGATTCA | | | | | | | GGSLRLSCAASGFT | | | | | | |
| | | CCTTCAGTACCTCCGACATGCACTGGGTCCGCCAAGTTACA | | | | | | | FSTSDMHWVRQVTG | | | | | | |
| | | GGAAAACATCTGGAATGGGTCTCAGGTGTTGGAACTTCTGG | | | | | | | KHLEWVSGVGTSGD | | | | | | |
| | | TGACACATACTATTCAGACTCCGTGAAGGGCCGATTCACCA | | | | | | | TYYSDSVKGRFTIS | | | | | | |
| | | TCTCCAGAGAAAATGCCAAGAACTCTTTATATCTTCAAATG | | | | | | | RENAKNSLYLQMNN | | | | | | |
| | | AACAACCTGAGAGCCGGGGACACGGCTGTGTATTACTGTGC | | | | | | | LRAGDTAVYYCARG | | | | | | |
| | | AAGAGGGGAAACAACTATGGCGCTCCGGTGGTATGCTTTTG | | | | | | | ETTMALRWYAFDIW | | | | | | |
| | | ATATCTGGGGCCAAGGGACCACGGTCACCGTCTCCTCA | | | | | | | GQGTTVTVSS | | | | | | |
| ADI-81698 | 1291 | TGGGGCCTCAGTGAAACTTTCCTGCAAGGCATCTGGATACA | | | | | | 6884 | QVQLVQSGAEVKKP | | 7237 | 11 | | 10 | |
| | | CCTTCACCAGTTACTTTATTCATTGGGTGCGACAGGCCCCT | | | | | | | GASVKLSCKASGYT | | | | | | |
| | | GGACAAGGGCTTGAGTGGATGGGAATAATCAACCCTGGTGA | | | | | | | FTSYFIHWVRQAPG | | | | | | |
| | | TGATAGCACAACTTACTCACAGAAGTTCCAGGGCAGAGTCA | | | | | | | QGLEWMGIINPGDD | | | | | | |
| | | CCGTGACCAGTGACACGTCCACGAGCACAGTCTACATGGAG | | | | | | | STTYSQKFQGRVTV | | | | | | |
| | | CTGAGCAGCCTGAGATCTGAAGACACGGCCGTGTATTACTG | | | | | | | TSDTSTSTVYMELS | | | | | | |
| | | TGCGAGAGATTTCCTCCCAGCGACCGCGTCCCCCTACTACT | | | | | | | SLRSEDTAVYYCAR | | | | | | |
| | | ACTATTATATGGACGTCTGGGGCAAAGGGACCACGGTCACC | | | | | | | DFLPATASPYYYYY | | | | | | |
| | | GTCTCCTCA | | | | | | | MDVWGKGTTVTVSS | | | | | | |
| | VH | VH | | SEQ | | SEQ | | SEQ | | SEQ | | SEQ | | SEQ | |
| | CDR3 | Germ- | VH | ID | VH | ID | VH | ID | VH | ID | VH | ID | VH | ID | VH |
| Clone ID | Lineage | line | FR1 | NO: | CDR1 | NO: | FR2 | NO: | CDR2 | NO: | FR3 | NO: | CDR3 | NO: | FR4 |
| ADI-81831 | 10 | IGHV2- | QVTLK | 5357 | FSLNTG | 5557 | WLRQPP | 5794 | RIDWDY | 5916 | RLTIST | 6223 | ARFKYFY | 6527 | WGQGAL |
| | | 70 | ECGPA | | GICVS | | GKALEW | | EKHYSA | | DTSKNQ | | DRNNYYF | | VTVSS |
| | | | LVKPT | | | | LA | | SLTT | | VVLTMT | | GSGFDY | | |
| | | | QTLTL | | | | | | | | NMDPVD | | | | |
| | | | TCTFS | | | | | | | | TATYYC | | | | |
| | | | G | | | | | | | | | | | | |
| ADI-81712 | 82 | IGHV1- | EVQLV | 5358 | GTARTY | 5558 | WVRQAP | 433 | GIIPKY | 5917 | RVTITA | 6224 | AHSPGYS | 6528 | WGQGTL |
| | | 69 | QSGAE | | AIS | | GQGLEW | | DTTNYA | | DKSTST | | SGWYRAG | | VTVSS |
| | | | VKKPG | | | | MG | | QKFQG | | AYMELS | | ISWFDP | | |
| | | | SSVKV | | | | | | | | SLTSED | | | | |
| | | | SCKAS | | | | | | | | TAVYYC | | | | |
| | | | G | | | | | | | | | | | | |
| ADI-81746 | 22 | IGHV4- | QVQLL | 5359 | GSISSS | 5559 | WVRQPP | 444 | EIYHRG | 5918 | RVTISL | 6225 | ARAPAGD | 6529 | WGRGTL |
| | | 4 | ESGPG | | NWWT | | GKGLEW | | TTDYNP | | DKSKNY | | FRQLF | | VTVSS |
| | | | LVKPS | | | | IG | | SLKS | | FSLNLT | | | | |
| | | | GTLSL | | | | | | | | SVTAAD | | | | |
| | | | TCAVS | | | | | | | | TAVYYC | | | | |
| | | | G | | | | | | | | | | | | |
| ADI-81752 | 28 | IGHV5- | QVQLA | 5360 | YSFDTK | 5560 | WVRQMP | 5795 | TIYPGD | 665 | QVTISA | 914 | ARRADFS | 6530 | WGQGAL |
| | | 51 | QSGAE | | WIA | | GKGPEW | | SDTRYS | | DKSIST | | SSWTDYF | | VTVSS |
| | | | VKKPG | | | | LG | | PSFQG | | AYLQWS | | DY | | |
| | | | ESLKI | | | | | | | | SLKASD | | | | |
| | | | SCKGS | | | | | | | | TAIYYC | | | | |
| | | | G | | | | | | | | | | | | |
| ADI-81836 | 15 | IGHV2- | QVTLK | 5361 | FSLTTS | 5561 | WIRQPP | 441 | LVDWDD | 5919 | RLTISK | 6226 | ARIDRRR | 6531 | WGQGTT |
| | | 70 | ESGPA | | GMSVT | | GKALEW | | AKYYST | | DTSKNQ | | NCMDV | | VTVSS |
| | | | LVKPT | | | | LA | | SLTT | | VVLTMT | | | | |
| | | | QTLTL | | | | | | | | NMDPVD | | | | |
| | | | TCTFS | | | | | | | | TGTYYC | | | | |
| | | | G | | | | | | | | | | | | |
| ADI-81864 | 42 | IGHV3- | EVQLV | 5362 | VTVSRN | 5562 | WVRQAP | 437 | IIYSGG | 5920 | RFTISR | 6227 | VRRIVGG | 6532 | WGQGTT |
| | | 53 | ESGGG | | YMS | | GKGLEW | | SAYYAD | | DDSRNT | | NAGMDV | | VTVSS |
| | | | LIQPG | | | | VS | | SVKG | | LYLQMK | | | | |
| | | | GSLRL | | | | | | | | SLRAED | | | | |
| | | | SCAAS | | | | | | | | TAVYYC | | | | |
| | | | G | | | | | | | | | | | | |
| ADI-81722 | 92 | IGHV4- | EVQLL | 5346 | GSISGA | 5563 | WIRQHP | 5796 | HTEYSG | 5921 | LLNISI | 6228 | ARIHDYG | 6533 | WGQGTT |
| | | 31 | ESGPG | | PYYWT | | GRGLEW | | GTYYNP | | DRSKNQ | | GHISAFD | | VTVSS |
| | | | LVKPS | | | | MA | | SLKS | | FSLKVT | | M | | |
| | | | QTLSL | | | | | | | | SVTAAD | | | | |
| | | | TCTVS | | | | | | | | TAVYYC | | | | |
| | | | G | | | | | | | | | | | | |
| ADI-81595 | 55 | IGHV1- | QVQLQ | 86 | GTFSSY | 5564 | WVRQAP | 5797 | RILPLI | 5922 | RVTITA | 6229 | ARERGYS | 6534 | WGQGTL |
| | | 69 | QSGAE | | GLT | | GQGLEF | | GVPDYA | | DTSTGT | | GYGSAVY | | VTVSS |
| | | | VKKPG | | | | MG | | QSFQG | | AYVEVN | | FDI | | |
| | | | SSVKV | | | | | | | | SLRSED | | | | |
| | | | SCKAS | | | | | | | | TALYYC | | | | |
| | | | G | | | | | | | | | | | | |
| | SEQ | | | | | | | SEQ | | | SEQ | VH | | VH Amino | |
| | ID | | | | | | | ID | | | ID | Nucleotide | | Acid | |
| Clone ID | NO: | VH DNA | | | | | | NO: | VH Protein | | NO: | Substitution | | Substitution | |
| ADI-81831 | 1285 | CAGGTCACGCTGAAGGAGTGTGGTCCTGCGCTGGTGAAACC | | | | | | 6885 | QVTLKECGPALVKP | | 7238 | 11 | | 10 | |
| | | CACACAGACCCTCACACTGACCTGCACCTTCTCTGGGTTCT | | | | | | | TQTLTLTCTFSGFS | | | | | | |
| | | CACTCAACACTGGAGGAATATGTGTGAGCTGGCTCCGTCAG | | | | | | | LNTGGICVSWLRQP | | | | | | |
| | | CCCCCAGGGAAGGCCCTGGAGTGGCTTGCACGCATTGATTG | | | | | | | PGKALEWLARIDWD | | | | | | |
| | | GGATTATGAGAAACACTATAGCGCATCTCTGACGACCAGAC | | | | | | | YEKHYSASLTTRLT | | | | | | |
| | | TCACCATCTCCACGGACACCTCCAAAAACCAGGTGGTCCTC | | | | | | | ISTDTSKNQVVLTM | | | | | | |
| | | ACAATGACCAACATGGACCCTGTGGACACAGCCACCTACTA | | | | | | | TNMDPVDTATYYCA | | | | | | |
| | | CTGTGCACGATTCAAGTATTTTTATGATAGGAATAATTACT | | | | | | | RFKYFYDRNNYYFG | | | | | | |
| | | ACTTCGGTTCGGGATTTGACTACTGGGGCCAGGGAGCCCTG | | | | | | | SGFDYWGQGALVTV | | | | | | |
| | | GTCACCGTCTCTTCA | | | | | | | SS | | | | | | |
| ADI-81712 | 1286 | GAGGTGCAGCTGGTGCAGTCTGGGGCTGAGGTGAAGAAGCC | | | | | | 6886 | EVQLVQSGAEVKKP | | 7239 | 10 | | 8 | |
| | | CGGGTCCTCGGTGAAGGTCTCCTGCAAGGCCTCTGGAGGCA | | | | | | | GSSVKVSCKASGGT | | | | | | |
| | | CCGCCAGGACCTATGCTATCAGTTGGGTGCGACAGGCCCCT | | | | | | | ARTYAISWVRQAPG | | | | | | |
| | | GGACAAGGGCTTGAGTGGATGGGAGGGATCATTCCTAAGTA | | | | | | | QGLEWMGGIIPKYD | | | | | | |
| | | TGATACAACAAACTACGCACAGAAGTTCCAGGGCAGAGTCA | | | | | | | TTNYAQKFQGRVTI | | | | | | |
| | | CGATTACCGCGGACAAATCTACGAGCACAGCCTACATGGAA | | | | | | | TADKSTSTAYMELS | | | | | | |
| | | CTGAGCAGCCTGACATCTGAGGACACGGCCGTGTATTATTG | | | | | | | SLTSEDTAVYYCAH | | | | | | |
| | | TGCGCACTCTCCCGGATATAGCAGTGGCTGGTATCGGGCCG | | | | | | | SPGYSSGWYRAGIS | | | | | | |
| | | GAATCAGCTGGTTCGACCCCTGGGGCCAGGGAACCCTGGTC | | | | | | | WFDPWGQGTLVTVS | | | | | | |
| | | ACCGTCTCCTCA | | | | | | | S | | | | | | |
| ADI-81746 | 1288 | CAGGTGCAGCTGTTGGAGTCGGGCCCGGGACTGGTGAAGCC | | | | | | 6887 | QVQLLESGPGLVKP | | 7240 | 10 | | 8 | |
| | | TTCGGGGACCCTGTCCCTCACCTGCGCTGTCTCTGGTGGCT | | | | | | | SGTLSLTCAVSGGS | | | | | | |
| | | CCATCAGCAGTAGTAACTGGTGGACTTGGGTCCGCCAGCCC | | | | | | | ISSSNWWTWVRQPP | | | | | | |
| | | CCAGGGAAGGGACTGGAGTGGATTGGGGAAATCTATCATAG | | | | | | | GKGLEWIGEIYHRG | | | | | | |
| | | AGGGACCACCGACTACAATCCGTCGTTGAAGAGTCGAGTCA | | | | | | | TTDYNPSLKSRVTI | | | | | | |
| | | CCATATCACTCGACAAGTCCAAGAACTACTTCTCCCTGAAT | | | | | | | SLDKSKNYFSLNLT | | | | | | |
| | | TTGACCTCTGTGACCGCCGCGGACACGGCCGTCTATTACTG | | | | | | | SVTAADTAVYYCAR | | | | | | |
| | | TGCGAGAGCCCCGGCGGGGGACTTTCGGCAGCTCTTCTGGG | | | | | | | APAGDFRQLFWGRG | | | | | | |
| | | GCCGGGGAACCCTGGTCACCGTCTCCTCA | | | | | | | TLVTVSS | | | | | | |
| ADI-81752 | 1285 | CAGGTGCAGCTGGCGCAGTCTGGAGCAGAGGTGAAAAAGCC | | | | | | 6888 | QVQLAQSGAEVKKP | | 7241 | 10 | | 8 | |
| | | CGGGGAGTCCCTGAAGATCTCCTGTAAGGGTTCTGGATACA | | | | | | | GESLKISCKGSGYS | | | | | | |
| | | GCTTTGACACCAAGTGGATCGCCTGGGTGCGCCAGATGCCC | | | | | | | FDTKWIAWVRQMPG | | | | | | |
| | | GGGAAAGGCCCGGAGTGGCTGGGGACCATTTATCCTGGTGA | | | | | | | KGPEWLGTIYPGDS | | | | | | |
| | | CTCTGATACCAGATACAGCCCGTCCTTCCAAGGCCAGGTCA | | | | | | | DTRYSPSFQGQVTI | | | | | | |
| | | CCATCTCAGCCGACAAGTCCATCAGCACCGCCTACCTGCAG | | | | | | | SADKSISTAYLQWS | | | | | | |
| | | TGGAGCAGCCTGAAGGCCTCGGACACCGCCATTTACTACTG | | | | | | | SLKASDTAIYYCAR | | | | | | |
| | | TGCGAGACGAGCGGACTTTAGCAGCAGCTGGACTGACTACT | | | | | | | RADFSSSWTDYFDY | | | | | | |
| | | TTGACTACTGGGGCCAGGGAGCCCTGGTCACCGTCTCCTCA | | | | | | | WGQGALVTVSS | | | | | | |
| ADI-81836 | 1287 | CAGGTCACCTTGAAGGAGTCTGGTCCTGCGCTGGTGAAACC | | | | | | 6889 | QVTLKESGPALVKP | | 7242 | 7 | | 7 | |
| | | CACACAGACCCTCACACTGACCTGCACCTTCTCTGGGTTCT | | | | | | | TQTLTLTCTFSGFS | | | | | | |
| | | CACTCACCACTAGTGGAATGTCTGTGACCTGGATCCGTCAG | | | | | | | LTTSGMSVTWIRQP | | | | | | |
| | | CCCCCAGGGAAGGCCCTGGAGTGGCTTGCACTCGTTGATTG | | | | | | | PGKALEWLALVDWD | | | | | | |
| | | GGATGATGCTAAATACTACAGCACGTCTCTGACGACCAGGC | | | | | | | DAKYYSTSLTTRLT | | | | | | |
| | | TCACCATCTCCAAGGACACCTCCAAAAACCAGGTGGTCCTA | | | | | | | ISKDTSKNQVVLTM | | | | | | |
| | | ACAATGACCAACATGGACCCTGTGGACACAGGCACCTATTA | | | | | | | TNMDPVDTGTYYCA | | | | | | |
| | | CTGTGCACGGATAGACCGACGCCGGAATTGTATGGACGTCT | | | | | | | RIDRRRNCMDVWGQ | | | | | | |
| | | GGGGCCAAGGGACCACGGTCACCGTCTCCTCA | | | | | | | GTTVTVSS | | | | | | |
| ADI-81864 | 1287 | GAGGTGCAGCTGGTGGAGTCTGGGGGAGGCTTGATCCAGCC | | | | | | 6890 | EVQLVESGGGLIQP | | 7243 | 7 | | 7 | |
| | | TGGGGGGTCCCTGAGACTCTCCTGTGCAGCCTCTGGGGTCA | | | | | | | GGSLRLSCAASGVT | | | | | | |
| | | CCGTCAGTAGGAACTACATGAGCTGGGTCCGCCAGGCTCCA | | | | | | | VSRNYMSWVRQAPG | | | | | | |
| | | GGGAAGGGGCTGGAGTGGGTCTCAATTATTTATAGCGGTGG | | | | | | | KGLEWVSIIYSGGS | | | | | | |
| | | TAGTGCATACTACGCAGACTCCGTGAAGGGCCGATTCACCA | | | | | | | AYYADSVKGRFTIS | | | | | | |
| | | TCTCCAGAGACGATTCCAGGAACACGCTGTATCTTCAAATG | | | | | | | RDDSRNTLYLQMKS | | | | | | |
| | | AAGAGCTTGAGAGCGGAAGACACGGCCGTGTATTATTGTGT | | | | | | | LRAEDTAVYYCVRR | | | | | | |
| | | GAGACGTATAGTGGGAGGCAATGCCGGCATGGACGTCTGGG | | | | | | | IVGGNAGMDVWGQG | | | | | | |
| | | GCCAAGGGACCACGGTCACCGTCTCCTCA | | | | | | | TTVTVSS | | | | | | |
| ADI-81722 | 1287 | GAGGTGCAGCTGTTGGAGTCGGGGCCAGGACTGGTGAAGCC | | | | | | 6891 | EVQLLESGPGLVKP | | 7244 | 23 | | 17 | |
| | | TTCGCAGACCCTGTCCCTCACCTGCACTGTCTCTGGTGGCT | | | | | | | SQTLSLTCTVSGGS | | | | | | |
| | | CCATCAGCGGCGCTCCTTACTACTGGACTTGGATCCGCCAG | | | | | | | ISGAPYYWTWIRQH | | | | | | |
| | | CACCCCGGGAGGGGCCTGGAGTGGATGGCCCACACCGAGTA | | | | | | | PGRGLEWMAHTEYS | | | | | | |
| | | CAGTGGGGGCACCTACTACAACCCGTCCCTTAAGAGTCTAC | | | | | | | GGTYYNPSLKSLLN | | | | | | |
| | | TTAACATATCAATAGACAGGTCTAAGAACCAGTTCTCCCTG | | | | | | | ISIDRSKNQFSLKV | | | | | | |
| | | AAGGTAACCTCTGTGACTGCCGCGGACACGGCCGTGTATTA | | | | | | | TSVTAADTAVYYCA | | | | | | |
| | | CTGTGCGAGAATACACGACTACGGTGGCCACATTAGTGCTT | | | | | | | RIHDYGGHISAFDM | | | | | | |
| | | TTGATATGTGGGGCCAAGGGACCACGGTCACCGTCTCCTCA | | | | | | | WGQGTTVTVSS | | | | | | |
| ADI-81595 | 1286 | TGGGTCCTCGGTGAAGGTCTCCTGCAAGGCTTCTGGAGGCA | | | | | | 6892 | QVQLQQSGAEVKKP | | 7245 | 22 | | 17 | |
| | | CCTTCAGCTCCTATGGTCTCACCTGGGTGCGACAGGCCCCT | | | | | | | GSSVKVSCKASGGT | | | | | | |
| | | GGACAAGGACTTGAGTTCATGGGAAGGATCCTCCCCCTCAT | | | | | | | FSSYGLTWVRQAPG | | | | | | |
| | | TGGTGTTCCTGACTACGCACAGAGCTTCCAGGGCAGAGTCA | | | | | | | QGLEFMGRILPLIG | | | | | | |
| | | CGATCACCGCGGACACATCCACGGGCACAGCCTACGTGGAG | | | | | | | VPDYAQSFQGRVTI | | | | | | |
| | | GTGAACAGCCTGAGATCTGAGGACACGGCCCTATATTATTG | | | | | | | TADTSTGTAYVEVN | | | | | | |
| | | TGCGAGAGAACGGGGATACAGTGGCTACGGCTCAGCGGTTT | | | | | | | SLRSEDTALYYCAR | | | | | | |
| | | ACTTTGACATCTGGGGCCAGGGCACCCTGGTCACCGTCTCC | | | | | | | ERGYSGYGSAVYFD | | | | | | |
| | | TCA | | | | | | | IWGQGTLVTVSS | | | | | | |
| | VH | VH | | SEQ | | SEQ | | SEQ | | SEQ | | SEQ | | SEQ | |
| | CDR3 | Germ- | VH | ID | VH | ID | VH | ID | VH | ID | VH | ID | VH | ID | VH |
| Clone ID | Lineage | line | FR1 | NO: | CDR1 | NO: | FR2 | NO: | CDR2 | NO: | FR3 | NO: | CDR3 | NO: | FR4 |
| ADI-81587 | 48 | IGHV4- | QVQLQ | 5363 | GSIGSN | 5565 | WIRQSA | 5798 | RIYASG | 5923 | RVTMSL | 6230 | ARGGGYD | 6535 | WGQGTT |
| | | 61 | ESGPG | | SFYLT | | GKGLEW | | GTSYNP | | DTSKNQ | | ELLVFGA | | VTVSS |
| | | | LVEPS | | | | LG | | SLQS | | MFLRLT | | FDI | | |
| | | | QTLSL | | | | | | | | SVTAAD | | | | |
| | | | TCTVS | | | | | | | | TAVYYC | | | | |
| | | | G | | | | | | | | | | | | |
| ADI-81597 | 57 | IGHV1- | QVQLV | 5364 | YTFTDY | 5566 | WLRQAP | 5799 | WLNPQT | 5924 | RVSMTG | 6231 | ARGGYCS | 6536 | WGQGSL |
| | | 2 | QSGAE | | YIH | | GQGFEW | | GDTNYA | | DTSIST | | AYSCFHG | | VTVSS |
| | | | VKKPG | | | | MG | | QKFQG | | AYMELR | | AWFAP | | |
| | | | ASAKV | | | | | | | | RLTSDD | | | | |
| | | | SCRAS | | | | | | | | TAFYYC | | | | |
| | | | G | | | | | | | | | | | | |
| ADI-81693 | 63 | IGHV3- | EVQLL | 5354 | IIVSWN | 5567 | WIRQAP | 5800 | VMYPGG | 5925 | RFTISR | 6232 | ARQENND | 6523 | WGQGTT |
| | | 53 | ETGGG | | YMT | | GKGLEW | | STFYAD | | DHSKNI | | AFDI | | VTVSS |
| | | | LIQPG | | | | VS | | SVRG | | LYLQMI | | | | |
| | | | GSLRL | | | | | | | | NLRVED | | | | |
| | | | SCAAS | | | | | | | | TAVYYC | | | | |
| | | | E | | | | | | | | | | | | |
| ADI-81783 | 59 | IGHV4- | EVQLL | 5365 | ASMNSR | 5568 | WVRQTP | 5801 | EISHSG | 571 | RLTILL | 6233 | ARAQGIF | 6537 | WGQGIL |
| | | 4 | ESGPG | | NWWA | | GQGLEW | | STNYNP | | DKSKSQ | | DY | | VTVSS |
| | | | LVKPS | | | | IG | | SLKS | | FSLRLS | | | | |
| | | | GTLSL | | | | | | | | SVTAAD | | | | |
| | | | TCAVS | | | | | | | | TAVYYC | | | | |
| | | | G | | | | | | | | | | | | |
| ADI-81823 | 4 | IGHV1- | EVQLV | 5366 | YTFSNH | 5569 | WVRQAP | 477 | IVNPDA | 5926 | RLTLTS | 6234 | ARDFSFI | 6538 | WGQGTL |
| | | 46 | ESGAE | | YIH | | GQGPEW | | GSTTYA | | DTSTST | | VATTAFE | | VTVSS |
| | | | VRKPG | | | | MG | | QKFQG | | VFMELS | | Y | | |
| | | | ASVKV | | | | | | | | SLRSDD | | | | |
| | | | SCRAS | | | | | | | | TAVYYC | | | | |
| | | | G | | | | | | | | | | | | |
| ADI-81888 | 64 | IGHV4- | EVQLL | 5365 | DSITSH | 5570 | WVRQPP | 444 | EVFHSG | 5927 | RVTISA | 6235 | ARVAGLE | 6539 | WGPGTL |
| | | 4 | ESGPG | | SWWS | | GKGLEW | | STEYSP | | DKSRDQ | | DN | | VTVSS |
| | | | LVKPS | | | | IG | | SLKS | | FSLKLK | | | | |
| | | | GTLSL | | | | | | | | SVTAAD | | | | |
| | | | TCAVS | | | | | | | | TAVYYC | | | | |
| | | | G | | | | | | | | | | | | |
| ADI-81593 | 53 | IGHV1- | QVQLV | 5367 | GTFSSY | 5517 | WVRQAP | 433 | GIIPIL | 5928 | RVTITA | 6236 | VRDRGYS | 6540 | WGRGTL |
| | | 69 | QSGAE | | GIS | | GQGLEW | | GTTSSA | | DKSTSM | | GYGSNYY | | VTVSS |
| | | | MRKPG | | | | MG | | HKFEG | | AYMELS | | FDL | | |
| | | | SSVKV | | | | | | | | SLRSED | | | | |
| | | | SCQAS | | | | | | | | TALYYC | | | | |
| | | | G | | | | | | | | | | | | |
| ADI-81884 | 60 | IGHV4- | EVQLL | 5335 | DSINSF | 5571 | WIRQPP | 445 | DIYHSG | 5929 | RVTISV | 6237 | ARGPKER | 1156 | WGQGIL |
| | | 59 | ESGPG | | YWA | | GKGLEW | | RTNYNP | | DTSKNN | | WENNWFD | | VTVSS |
| | | | LVKPS | | | | IG | | SLKS | | FSLKLS | | P | | |
| | | | ETLSL | | | | | | | | SLTTAD | | | | |
| | | | TCTVS | | | | | | | | TAVYFC | | | | |
| | | | G | | | | | | | | | | | | |
| | SEQ | | | | | | | SEQ | | | SEQ | VH | | VH Amino | |
| | ID | | | | | | | ID | | | ID | Nucleotide | | Acid | |
| Clone ID | NO: | VH DNA | | | | | | NO: | VH Protein | | NO: | Substitution | | Substitution | |
| ADI-81587 | 1287 | TTCACAGACCCTGTCCCTCACCTGCACTGTCTCTGGTGGCT | | | | | | 6893 | QVQLQESGPGLVEP | | 7246 | 21 | | 18 | |
| | | CCATCGGCAGTAATAGTTTCTACTTGACCTGGATCCGGCAG | | | | | | | SQTLSLTCTVSGGS | | | | | | |
| | | TCCGCCGGGAAGGGACTGGAGTGGCTTGGGCGTATCTATGC | | | | | | | IGSNSFYLTWIRQS | | | | | | |
| | | CAGTGGGGGCACCAGCTACAACCCCTCCCTCCAGAGTCGAG | | | | | | | AGKGLEWLGRIYAS | | | | | | |
| | | TCACCATGTCACTAGACACGTCCAAGAACCAGATGTTCCTG | | | | | | | GGTSYNPSLQSRVT | | | | | | |
| | | AGGCTGACGTCTGTGACCGCCGCTGACACGGCCGTCTATTA | | | | | | | MSLDTSKNQMFLRL | | | | | | |
| | | TTGTGCGAGAGGGGGTGGCTACGATGAATTACTAGTTTTCG | | | | | | | TSVTAADTAVYYCA | | | | | | |
| | | GTGCTTTTGATATCTGGGGCCAAGGGACCACGGTCACCGTC | | | | | | | RGGGYDELLVFGAF | | | | | | |
| | | TCCTCA | | | | | | | DIWGQGTTVTVSS | | | | | | |
| ADI-81597 | 1289 | TGGGGCCTCAGCGAAGGTCTCCTGTAGGGCTTCTGGATACA | | | | | | 6894 | QVQLVQSGAEVKKP | | 7247 | 19 | | 15 | |
| | | CGTTCACCGACTACTATATTCACTGGCTACGACAGGCCCCT | | | | | | | GASAKVSCRASGYT | | | | | | |
| | | GGACAAGGGTTTGAGTGGATGGGATGGCTGAACCCTCAGAC | | | | | | | FTDYYIHWLRQAPG | | | | | | |
| | | TGGTGACACAAACTATGCGCAGAAGTTTCAGGGCAGGGTCT | | | | | | | QGFEWMGWLNPQTG | | | | | | |
| | | CCATGACCGGGGACACGTCCATCAGCACAGCCTACATGGAG | | | | | | | DTNYAQKFQGRVSM | | | | | | |
| | | CTGAGGAGGCTGACATCTGATGACACGGCCTTTTATTACTG | | | | | | | TGDTSISTAYMELR | | | | | | |
| | | TGCGAGAGGGGGATATTGTAGTGCTTACAGCTGCTTCCACG | | | | | | | RLTSDDTAFYYCAR | | | | | | |
| | | GGGCTTGGTTCGCCCCCTGGGGCCAGGGAAGCCTGGTCACC | | | | | | | GGYCSAYSCFHGAW | | | | | | |
| | | GTCTCCTCA | | | | | | | FAPWGQGSLVTVSS | | | | | | |
| ADI-81693 | 1287 | GAGGTGCAGCTGTTGGAGACTGGAGGAGGTTTGATCCAGCC | | | | | | 6895 | EVQLLETGGGLIQP | | 7248 | 18 | | 15 | |
| | | GGGGGGGTCCCTGAGACTCTCCTGTGCAGCCTCTGAGATCA | | | | | | | GGSLRLSCAASEII | | | | | | |
| | | TCGTCAGTTGGAACTACATGACCTGGATCCGCCAGGCTCCA | | | | | | | VSWNYMTWIRQAPG | | | | | | |
| | | GGGAAAGGTCTGGAGTGGGTCTCAGTTATGTATCCCGGTGG | | | | | | | KGLEWVSVMYPGGS | | | | | | |
| | | GAGCACTTTCTACGCAGACTCCGTGAGGGGCCGATTCACCA | | | | | | | TFYADSVRGRFTIS | | | | | | |
| | | TCTCTAGAGACCATTCCAAGAATATTCTGTATCTTCAAATG | | | | | | | RDHSKNILYLQMIN | | | | | | |
| | | ATCAACCTGAGAGTCGAGGACACGGCCGTGTACTACTGTGC | | | | | | | LRVEDTAVYYCARQ | | | | | | |
| | | GAGACAAGAGAATAATGATGCTTTTGATATTTGGGGACAGG | | | | | | | ENNDAFDIWGQGTT | | | | | | |
| | | GGACCACGGTCACCGTCTCCTCA | | | | | | | VTVSS | | | | | | |
| ADI-81783 | 6809 | GAGGTGCAGCTGTTGGAGTCGGGCCCAGGACTGGTGAAGCC | | | | | | 6896 | EVQLLESGPGLVKP | | 7249 | 18 | | 13 | |
| | | TTCGGGGACCCTGTCCCTCACCTGCGCTGTCTCTGGTGCCT | | | | | | | SGTLSLTCAVSGAS | | | | | | |
| | | CCATGAACAGTCGGAATTGGTGGGCTTGGGTCCGCCAGACC | | | | | | | MNSRNWWAWVRQTP | | | | | | |
| | | CCAGGGCAGGGGCTGGAATGGATTGGCGAAATCTCTCATAG | | | | | | | GQGLEWIGEISHSG | | | | | | |
| | | TGGGAGCACCAACTACAACCCGTCCCTCAAGAGTCGACTGA | | | | | | | STNYNPSLKSRLTI | | | | | | |
| | | CCATACTACTGGACAAGTCCAAGAGCCAGTTCTCCCTGAGG | | | | | | | LLDKSKSQFSLRLS | | | | | | |
| | | TTGAGCTCCGTGACCGCCGCGGACACGGCCGTCTATTACTG | | | | | | | SVTAADTAVYYCAR | | | | | | |
| | | TGCGAGAGCCCAAGGAATCTTTGACTACTGGGGCCAGGGAA | | | | | | | AQGIFDYWGQGILV | | | | | | |
| | | TTCTGGTCACCGTCTCCTCA | | | | | | | TVSS | | | | | | |
| ADI-81823 | 1286 | GAGGTGCAGCTGGTGGAGTCTGGGGCTGAGGTGAGGAAGCC | | | | | | 6897 | EVQLVESGAEVRKP | | 7250 | 17 | | 16 | |
| | | TGGGGCCTCAGTGAAGGTTTCCTGCAGGGCATCTGGATACA | | | | | | | GASVKVSCRASGYT | | | | | | |
| | | CCTTCAGCAACCACTATATACACTGGGTGCGGCAGGCCCCT | | | | | | | FSNHYIHWVRQAPG | | | | | | |
| | | GGACAAGGCCCTGAGTGGATGGGAATAGTCAACCCTGATGC | | | | | | | QGPEWMGIVNPDAG | | | | | | |
| | | TGGTAGCACAACCTACGCACAGAAATTCCAGGGCAGACTCA | | | | | | | STTYAQKFQGRLTL | | | | | | |
| | | CCCTGACCAGCGACACGTCCACGAGCACAGTGTTCATGGAG | | | | | | | TSDTSTSTVFMELS | | | | | | |
| | | TTGAGCAGCCTGAGATCTGACGACACGGCCGTATATTATTG | | | | | | | SLRSDDTAVYYCAR | | | | | | |
| | | TGCGAGAGATTTCTCATTTATAGTGGCAACGACAGCCTTTG | | | | | | | DFSFIVATTAFEYW | | | | | | |
| | | AGTATTGGGGCCAGGGAACCCTGGTCACCGTCTCCTCA | | | | | | | GQGTLVTVSS | | | | | | |
| ADI-81888 | 1302 | GAGGTGCAGCTGTTGGAGTCGGGCCCAGGACTGGTGAAGCC | | | | | | 6898 | EVQLLESGPGLVKP | | 7251 | 17 | | 12 | |
| | | TTCGGGGACCCTGTCCCTCACATGCGCTGTGTCTGGTGACT | | | | | | | SGTLSLTCAVSGDS | | | | | | |
| | | CCATCACCAGTCATAGTTGGTGGAGTTGGGTCCGCCAGCCC | | | | | | | ITSHSWWSWVRQPP | | | | | | |
| | | CCAGGGAAGGGGCTGGAGTGGATTGGGGAAGTCTTTCATAG | | | | | | | GKGLEWIGEVFHSG | | | | | | |
| | | TGGGAGTACCGAGTACAGTCCGTCCCTCAAGAGTCGAGTCA | | | | | | | STEYSPSLKSRVTI | | | | | | |
| | | CCATATCAGCAGACAAGTCCAGGGACCAGTTCTCACTGAAG | | | | | | | SADKSRDQFSLKLK | | | | | | |
| | | TTGAAGTCTGTGACCGCCGCAGACACGGCCGTATATTACTG | | | | | | | SVTAADTAVYYCAR | | | | | | |
| | | TGCGAGAGTGGCTGGTCTTTTTGACAACTGGGGCCCGGGAA | | | | | | | VAGLFDNWGPGTLV | | | | | | |
| | | CCCTGGTCACCGTCTCCTCA | | | | | | | TVSS | | | | | | |
| ADI-81593 | 1288 | TGGGTCCTCGGTGAAGGTCTCCTGCCAGGCTTCTGGAGGCA | | | | | | 6899 | QVQLVQSGAEMRKP | | 7252 | 15 | | 12 | |
| | | CCTTCAGCAGTTATGGAATCAGCTGGGTGCGACAGGCCCCT | | | | | | | GSSVKVSCQASGGT | | | | | | |
| | | GGACAAGGGCTTGAGTGGATGGGAGGGATCATCCCTATCCT | | | | | | | FSSYGISWVRQAPG | | | | | | |
| | | TGGTACGACAAGTTCCGCACACAAATTCGAGGGCAGAGTCA | | | | | | | QGLEWMGGIIPILG | | | | | | |
| | | CGATTACCGCGGACAAATCCACTAGTATGGCCTACATGGAG | | | | | | | TTSSAHKFEGRVTI | | | | | | |
| | | CTGAGCAGCCTGAGGTCTGAGGACACGGCCCTGTACTACTG | | | | | | | TADKSTSMAYMELS | | | | | | |
| | | TGTGAGAGATCGTGGATACAGTGGCTACGGATCAAACTACT | | | | | | | SLRSEDTALYYCVR | | | | | | |
| | | ACTTCGATCTCTGGGGCCGTGGCACCCTGGTCACCGTCTCC | | | | | | | DRGYSGYGSNYYFD | | | | | | |
| | | TCA | | | | | | | LWGRGTLVTVSS | | | | | | |
| ADI-81884 | 6809 | GAGGTGCAGCTGTTGGAGTCGGGCCCAGGGCTGGTGAAGCC | | | | | | 6900 | EVQLLESGPGLVKP | | 7253 | 15 | | 11 | |
| | | TTCGGAGACCCTGTCCCTCACCTGCACTGTCTCTGGTGACT | | | | | | | SETLSLTCTVSGDS | | | | | | |
| | | CCATCAATAGTTTCTATTGGGCCTGGATCCGGCAGCCCCCA | | | | | | | INSFYWAWIRQPPG | | | | | | |
| | | GGGAAGGGACTGGAGTGGATTGGGGACATCTATCACAGTGG | | | | | | | KGLEWIGDIYHSGR | | | | | | |
| | | GAGGACCAATTACAATCCCTCCCTCAAGAGTCGAGTCACCA | | | | | | | TNYNPSLKSRVTIS | | | | | | |
| | | TATCAGTGGACACGTCCAAAAATAACTTCTCCCTGAAGTTG | | | | | | | VDTSKNNFSLKLSS | | | | | | |
| | | AGTTCTCTGACCACTGCGGACACGGCCGTCTATTTTTGTGC | | | | | | | LTTADTAVYFCARG | | | | | | |
| | | GAGAGGCCCTAAAGAGCGGTGGTTCAACAACTGGTTCGACC | | | | | | | PKERWFNNWFDPWG | | | | | | |
| | | CCTGGGGCCAAGGAATTCTGGTCACCGTCTCCTCA | | | | | | | QGILVTVSS | | | | | | |
| | VH | VH | | SEQ | | SEQ | | SEQ | | SEQ | | SEQ | | SEQ | |
| | CDR3 | Germ- | VH | ID | VH | ID | VH | ID | VH | ID | VH | ID | VH | ID | VH |
| Clone ID | Lineage | line | FR1 | NO: | CDR1 | NO: | FR2 | NO: | CDR2 | NO: | FR3 | NO: | CDR3 | NO: | FR4 |
| ADI-81545 | 12 | IGHV3- | QVQLV | 12 | FTFSTS | 5555 | WVRQGR | 5802 | AIGTSG | 5930 | RFSVSR | 6238 | ARGEALG | 6541 | WGQGTT |
| | | 13 | QSGGG | | DMH | | GRGLEW | | DTYYAD | | EDGKNS | | VEPYYYY | | VTVSS |
| | | | LVQPG | | | | VS | | SVKG | | FYLQMN | | FMDI | | |
| | | | GSLRL | | | | | | | | SLRAGD | | | | |
| | | | SCAAS | | | | | | | | TAVYYC | | | | |
| | | | G | | | | | | | | | | | | |
| ADI-81555 | 21 | IGHV3- | QVQLQ | 20 | FTFENY | 5572 | WVRQSP | 5803 | TISSDA | 5931 | RFTISR | 6239 | AKDTLVD | 6542 | WGQGTL |
| | | 30 | QSGGG | | DMH | | GKGLEW | | SIKYYG | | DNSKNT | | IAVVTLI | | VTVSS |
| | | | VVQPG | | | | VA | | DSVKG | | LYLQMS | | DY | | |
| | | | RSLRL | | | | | | | | SLRAED | | | | |
| | | | SCAAS | | | | | | | | TAVYFC | | | | |
| | | | G | | | | | | | | | | | | |
| ADI-81838 | 17 | IGHV2- | QVQLM | 5368 | FSLNTA | 5573 | WIRQPP | 441 | LVYWDG | 5932 | RVTITK | 6240 | AHHSIPT | 6543 | WGQGIL |
| | | 5 | ESGPT | | GVGLA | | GKALEW | | DRRYSP | | DTSKNQ | | IFTS | | VTVSS |
| | | | LVKPT | | | | LA | | FLKT | | VVLTMT | | | | |
| | | | QTLTL | | | | | | | | NMDSVD | | | | |
| | | | TCSFS | | | | | | | | TATYFC | | | | |
| | | | G | | | | | | | | | | | | |
| ADI-81623 | 54 | IGHV3- | QVQLV | 5369 | FTFRIY | 5574 | WVRQAP | 431 | VISHDG | 5933 | RFTISR | 6241 | ARATTDY | 6544 | WGQGTL |
| | | 30 | QSGGG | | AFH | | GKGLEW | | SETYYA | | DNSKNT | | CGGDCYP | | VTVSS |
| | | | VVQPG | | | | VA | | DSVKG | | LSLQMH | | IDS | | |
| | | | RSLRL | | | | | | | | SLRADD | | | | |
| | | | SCPVS | | | | | | | | TAVYYC | | | | |
| | | | G | | | | | | | | | | | | |
| ADI-81551 | 18 | IGHV1- | QVQLV | 5370 | FTFITS | 5575 | WVRQTR | 5804 | WIAVGS | 5934 | RLTITT | 6242 | ASPHCRG | 6545 | WGQGTT |
| | | 58 | QSGPE | | AVQ | | GQRLEW | | GNTEYA | | DMSTST | | GSCLDGF | | VTVSS |
| | | | VKKPG | | | | MG | | QKFQE | | TYMELS | | DI | | |
| | | | TSVKV | | | | | | | | SLRSED | | | | |
| | | | SCKTS | | | | | | | | TAVYYC | | | | |
| | | | G | | | | | | | | | | | | |
| ADI-81594 | 54 | IGHV3- | QVQLV | 5371 | FTFSRF | 5576 | WVRQAP | 472 | LISFDG | 5935 | RFTISR | 789 | ARATTDY | 6546 | WGRGIP |
| | | 30 | QSGGG | | SMH | | GKGLEW | | SDKYYT | | DNSKNT | | CGGDCYP | | VTVSS |
| | | | VVQPG | | | | VT | | DSVKG | | LYLQMN | | IDN | | |
| | | | RSLRL | | | | | | | | SLRTED | | | | |
| | | | SCLAS | | | | | | | | TAVYYC | | | | |
| | | | G | | | | | | | | | | | | |
| ADI-81681 | 51 | IGHV3- | RSTLK | 5372 | FTFEDY | 208 | WVRQAP | 437 | GVSWNS | 672 | RFIVSR | 6243 | AKLGALS | 6547 | WGKGTT |
| | | 9 | ESGGG | | AMH | | GKGLEW | | GIIGYA | | DNAKNS | | RQYDFRT | | VTVSS |
| | | | LVQPG | | | | VS | | DSVKG | | LYLYMS | | GENHQYY | | |
| | | | RSLRL | | | | | | | | SLRVED | | MDV | | |
| | | | SCAAS | | | | | | | | TAFYYC | | | | |
| | | | G | | | | | | | | | | | | |
| ADI-81833 | 12 | IGHV3- | EVQLL | 5373 | FSFSDY | 5577 | WVRQAP | 431 | VIWYDG | 5936 | RFTISR | 6244 | ARLATIP | 6548 | WGKGTT |
| | | 33 | ESGGG | | GMH | | GKGLEW | | SNRYYL | | DNSKNT | | WSYYMDV | | VTVSS |
| | | | VVQPG | | | | VA | | DSVQG | | VYLQMN | | | | |
| | | | RSLRL | | | | | | | | NLRAED | | | | |
| | | | SCAAS | | | | | | | | TAVYYC | | | | |
| | | | G | | | | | | | | | | | | |
| | SEQ | | | | | | | SEQ | | | SEQ | VH | | VH Amino | |
| | ID | | | | | | | ID | | | ID | Nucleotide | | Acid | |
| Clone ID | NO: | VH DNA | | | | | | NO: | VH Protein | | NO: | Substitution | | Substitution | |
| ADI-81545 | 1287 | TGGGGGGTCCCTGAGACTCTCCTGTGCAGCCTCTGGATTCA | | | | | | 6901 | QVQLVQSGGGLVQP | | 7254 | 14 | | 13 | |
| | | CCTTCAGTACCTCCGACATGCACTGGGTCCGTCAAGGTAGA | | | | | | | GGSLRLSCAASGFT | | | | | | |
| | | GGAAGAGGTCTGGAATGGGTCTCAGCTATTGGTACTTCTGG | | | | | | | FSTSDMHWVRQGRG | | | | | | |
| | | TGACACATACTATGCAGACTCCGTGAAGGGCCGATTTTCGG | | | | | | | RGLEWVSAIGTSGD | | | | | | |
| | | TCTCCAGAGAAGATGGCAAAAACTCCTTCTATCTTCAAATG | | | | | | | TYYADSVKGRFSVS | | | | | | |
| | | AACAGCCTGAGAGCCGGAGACACGGCTGTCTATTACTGTGC | | | | | | | REDGKNSFYLQMNS | | | | | | |
| | | AAGAGGAGAGGCCCTTGGAGTGGAGCCCTATTATTACTATT | | | | | | | LRAGDTAVYYCARG | | | | | | |
| | | TTATGGACATTTGGGGCCAAGGGACCACGGTCACCGTCTCC | | | | | | | EALGVEPYYYYFMD | | | | | | |
| | | TCA | | | | | | | IWGQGTTVTVSS | | | | | | |
| ADI-81555 | 1286 | CAGGTGCAGCTGCAGCAGTCTGGGGGGGGCGTGGTCCAGCC | | | | | | 6902 | QVQLQQSGGGVVQP | | 7255 | 14 | | 11 | |
| | | TGGGAGGTCCCTGAGACTCTCCTGTGCAGCCTCTGGATTCA | | | | | | | GRSLRLSCAASGFT | | | | | | |
| | | CCTTCGAAAACTATGACATGCACTGGGTCCGCCAGTCTCCA | | | | | | | FENYDMHWVRQSPG | | | | | | |
| | | GGCAAGGGGCTGGAGTGGGTGGCAACTATATCATCTGATGC | | | | | | | KGLEWVATISSDAS | | | | | | |
| | | AAGTATTAAATATTATGGAGACTCCGTGAAGGGCCGATTCA | | | | | | | IKYYGDSVKGRFTI | | | | | | |
| | | CCATCTCCAGAGACAATTCCAAGAACACGCTGTATCTGCAA | | | | | | | SRDNSKNTLYLQMS | | | | | | |
| | | ATGAGCAGCCTGAGAGCTGAGGACACGGCTGTGTATTTCTG | | | | | | | SLRAEDTAVYFCAK | | | | | | |
| | | TGCGAAAGATACCCTCGTGGATATAGCTGTGGTAACCCTGA | | | | | | | DTLVDIAVVTLIDY | | | | | | |
| | | TTGACTACTGGGGCCAGGGAACCCTGGTCACCGTCTCCTCA | | | | | | | WGQGTLVTVSS | | | | | | |
| ADI-81838 | 6809 | CAGGTCCAGCTGATGGAGTCTGGTCCTACGCTGGTGAAACC | | | | | | 6903 | QVQLMESGPTLVKP | | 7256 | 14 | | 13 | |
| | | CACACAGACCCTCACGCTGACCTGCTCCTTCTCTGGGTTCT | | | | | | | TQTLTLTCSFSGFS | | | | | | |
| | | CACTCAACACTGCTGGAGTGGGTTTGGCCTGGATACGTCAG | | | | | | | LNTAGVGLAWIRQP | | | | | | |
| | | CCCCCAGGAAAGGCCCTGGAGTGGCTTGCCCTCGTTTATTG | | | | | | | PGKALEWLALVYWD | | | | | | |
| | | GGATGGTGATAGGCGCTATAGTCCATTTTTGAAGACCAGGG | | | | | | | GDRRYSPFLKTRVT | | | | | | |
| | | TCACCATCACCAAGGACACCTCCAAAAACCAGGTGGTCCTT | | | | | | | ITKDTSKNQVVLTM | | | | | | |
| | | ACAATGACCAACATGGACTCTGTGGACACAGCCACATATTT | | | | | | | TNMDSVDTATYFCA | | | | | | |
| | | CTGTGCACACCATTCAATTCCTACAATTTTTACCTCCTGGG | | | | | | | HHSIPTIFTSWGQG | | | | | | |
| | | GCCAGGGAATCCTGGTCACCGTCTCCTCA | | | | | | | ILVTVSS | | | | | | |
| ADI-81623 | 1286 | TGGGAGGTCCCTGAGACTCTCCTGTCCAGTCTCTGGATTCA | | | | | | 6904 | QVQLVQSGGGVVQP | | 7257 | 13 | | 11 | |
| | | CCTTCAGGATCTACGCTTTCCACTGGGTCCGCCAGGCTCCA | | | | | | | GRSLRLSCPVSGFT | | | | | | |
| | | GGCAAGGGGCTGGAGTGGGTGGCAGTTATATCGCATGATGG | | | | | | | FRIYAFHWVRQAPG | | | | | | |
| | | AAGCGAGACATACTACGCAGACTCCGTGAAGGGCCGATTCA | | | | | | | KGLEWVAVISHDGS | | | | | | |
| | | CCATCTCCAGAGACAATTCCAAGAACACGTTGTCTCTGCAA | | | | | | | ETYYADSVKGRFTI | | | | | | |
| | | ATGCACAGCCTGAGAGCTGACGACACGGCTGTCTATTACTG | | | | | | | SRDNSKNTLSLQMH | | | | | | |
| | | TGCAAGAGCGACTACCGATTATTGTGGCGGTGACTGCTATC | | | | | | | SLRADDTAVYYCAR | | | | | | |
| | | CCATTGATTCCTGGGGCCAGGGAACCCTGGTCACCGTCTCC | | | | | | | ATTDYCGGDCYPID | | | | | | |
| | | TCA | | | | | | | SWGQGTLVTVSS | | | | | | |
| ADI-81551 | 1287 | CAGGTCCAGCTGGTGCAGTCTGGGCCTGAGGTGAAGAAGCC | | | | | | 6905 | QVQLVQSGPEVKKP | | 7258 | 11 | | 10 | |
| | | TGGGACCTCAGTGAAGGTCTCCTGCAAGACTTCTGGATTCA | | | | | | | GTSVKVSCKTSGFT | | | | | | |
| | | CCTTTATTACCTCTGCTGTGCAGTGGGTGCGACAGACTCGT | | | | | | | FITSAVQWVRQTRG | | | | | | |
| | | GGACAACGCCTTGAGTGGATGGGGTGGATCGCCGTTGGCAG | | | | | | | QRLEWMGWIAVGSG | | | | | | |
| | | TGGGAACACAGAGTACGCACAGAAGTTCCAGGAAAGACTCA | | | | | | | NTEYAQKFQERLTI | | | | | | |
| | | CTATTACCACGGACATGTCCACAAGCACAACCTACATGGAG | | | | | | | TTDMSTSTTYMELS | | | | | | |
| | | CTGAGCAGCCTGAGATCCGAGGACACGGCCGTATATTACTG | | | | | | | SLRSEDTAVYYCAS | | | | | | |
| | | TGCGTCACCACACTGTCGTGGTGGTAGCTGCCTGGATGGTT | | | | | | | PHCRGGSCLDGFDI | | | | | | |
| | | TTGATATCTGGGGCCAAGGGACCACGGTCACCGTCTCCTCA | | | | | | | WGQGTTVTVSS | | | | | | |
| ADI-81594 | 6810 | TGGGAGGTCCCTGAGACTCTCCTGTCTAGCCTCTGGATTCA | | | | | | 6906 | QVQLVQSGGGVVQP | | 7259 | 11 | | 9 | |
| | | CCTTCAGTCGATTTTCTATGCACTGGGTCCGCCAGGCTCCA | | | | | | | GRSLRLSCLASGFT | | | | | | |
| | | GGCAAGGGGCTGGAGTGGGTGACACTTATATCATTTGATGG | | | | | | | FSRFSMHWVRQAPG | | | | | | |
| | | AAGCGATAAATACTACACAGACTCCGTGAAGGGCCGATTCA | | | | | | | KGLEWVTLISFDGS | | | | | | |
| | | CCATCTCCAGAGACAATTCCAAGAACACGCTGTATCTGCAG | | | | | | | DKYYTDSVKGRFTI | | | | | | |
| | | ATGAACAGTCTGAGAACTGAGGACACGGCTGTGTATTACTG | | | | | | | SRDNSKNTLYLQMN | | | | | | |
| | | TGCGAGAGCGACTACCGATTACTGTGGTGGCGACTGCTATC | | | | | | | SLRTEDTAVYYCAR | | | | | | |
| | | CCATTGACAACTGGGGCCGGGGAATCCCGGTCACCGTCTCC | | | | | | | ATTDYCGGDCYPID | | | | | | |
| | | TCA | | | | | | | NWGRGIPVTVSS | | | | | | |
| ADI-81681 | 1291 | AGGTCCACGCTGAAGGAGTCTGGGGGAGGCCTGGTACAGCC | | | | | | 6907 | RSTLKESGGGLVQP | | 7260 | 11 | | 9 | |
| | | TGGCAGGTCCCTGAGACTCTCCTGTGCAGCCTCTGGATTCA | | | | | | | GRSLRLSCAASGFT | | | | | | |
| | | CGTTTGAAGATTATGCCATGCACTGGGTCCGGCAAGCTCCA | | | | | | | FEDYAMHWVRQAPG | | | | | | |
| | | GGGAAGGGCCTGGAGTGGGTCTCAGGTGTTAGTTGGAATAG | | | | | | | KGLEWVSGVSWNSG | | | | | | |
| | | CGGTATCATAGGCTATGCGGACTCTGTGAAGGGCCGATTCA | | | | | | | IIGYADSVKGRFIV | | | | | | |
| | | TCGTCTCCAGAGACAACGCCAAGAACTCCCTATATCTCTAC | | | | | | | SRDNAKNSLYLYMS | | | | | | |
| | | ATGAGCAGCCTGAGAGTCGAGGACACGGCCTTCTATTACTG | | | | | | | SLRVEDTAFYYCAK | | | | | | |
| | | TGCAAAATTGGGGGCTTTGTCTCGCCAATACGATTTTCGGA | | | | | | | LGALSRQYDFRTGE | | | | | | |
| | | CGGGGGAAAATCACCAGTATTACATGGACGTCTGGGGCAAG | | | | | | | NHQYYMDVWGKGTT | | | | | | |
| | | GGGACCACGGTCACCGTCTCCTCA | | | | | | | VTVSS | | | | | | |
| ADI-81833 | 1291 | GAGGTGCAGCTGTTGGAGTCGGGGGGAGGCGTGGTCCAGCC | | | | | | 6908 | EVQLLESGGGVVQP | | 7261 | 11 | | 7 | |
| | | TGGGAGGTCCCTGAGACTCTCCTGTGCAGCGTCTGGATTCA | | | | | | | GRSLRLSCAASGFS | | | | | | |
| | | GTTTCAGTGACTATGGCATGCACTGGGTCCGCCAGGCTCCA | | | | | | | FSDYGMHWVRQAPG | | | | | | |
| | | GGCAAGGGGCTGGAGTGGGTGGCAGTTATATGGTATGATGG | | | | | | | KGLEWVAVIWYDGS | | | | | | |
| | | AAGTAACAGGTATTATTTAGACTCTGTGCAGGGCCGATTCA | | | | | | | NRYYLDSVQGRFTI | | | | | | |
| | | CCATCTCCAGAGACAATTCCAAGAATACGGTGTATCTCCAA | | | | | | | SRDNSKNTVYLQMN | | | | | | |
| | | ATGAACAACTTGAGAGCCGAGGACACGGCTGTCTATTACTG | | | | | | | NLRAEDTAVYYCAR | | | | | | |
| | | TGCGAGATTGGCTACGATTCCCTGGTCCTACTATATGGACG | | | | | | | LATIPWSYYMDVWG | | | | | | |
| | | TCTGGGGCAAAGGGACCACGGTCACCGTCTCCTCA | | | | | | | KGTTVTVSS | | | | | | |
| | VH | VH | | SEQ | | SEQ | | SEQ | | SEQ | | SEQ | | SEQ | |
| | CDR3 | Germ- | VH | ID | VH | ID | VH | ID | VH | ID | VH | ID | VH | ID | VH |
| Clone ID | Lineage | line | FR1 | NO: | CDR1 | NO: | FR2 | NO: | CDR2 | NO: | FR3 | NO: | CDR3 | NO: | FR4 |
| ADI-81672 | 43 | IGHV1- | QVQLV | 35 | YTFTSY | 367 | WVRQAP | 433 | WINTFN | 5937 | RVTMTT | 6245 | ARVGTDY | 6549 | WGQGTL |
| | | 18 | QSGAE | | GIS | | GQGLEW | | GDTNYP | | DTSTTT | | VWGSSIY | | VTVSS |
| | | | VKKPG | | | | MG | | QKFQG | | VHMELR | | FFDY | | |
| | | | ASVKV | | | | | | | | SLRSDD | | | | |
| | | | SCKAS | | | | | | | | TALYYC | | | | |
| | | | G | | | | | | | | | | | | |
| ADI-81872 | 49 | IGHV4- | EVQLV | 5347 | GSISSR | 5578 | WVRQSP | 438 | EIFHTG | 5938 | RVTMSV | 6246 | ARSAGLL | 6550 | WGQGIL |
| | | 4 | ESGPG | | NWWS | | GKGLEW | | STAYNP | | DKSKNQ | | DY | | VTVSS |
| | | | LVKPS | | | | IG | | SLKS | | FSLRLS | | | | |
| | | | GTLSL | | | | | | | | SVNAAD | | | | |
| | | | TCAVS | | | | | | | | TAVYYC | | | | |
| | | | G | | | | | | | | | | | | |
| ADI-81679 | 49 | IGHV3- | EVQLL | 5355 | FTFSNS | 5579 | WVRQTT | 5805 | TIGTAG | 618 | RFTISR | 6247 | ARGEQRM | 6551 | WGKGTT |
| | | 13 | ESGGG | | DMH | | GNSLEW | | DTYYPD | | ENAKNS | | MISGVVP | | VTVSS |
| | | | LVQPG | | | | VS | | SVKG | | LSLQMN | | RYYYYMD | | |
| | | | GSLRL | | | | | | | | SLRAGD | | V | | |
| | | | SCAAS | | | | | | | | SAVYYC | | | | |
| | | | G | | | | | | | | | | | | |
| ADI-81553 | 19 | IGHV1- | QVQLV | 35 | YRFTSY | 5580 | WVRQAP | 433 | WISVYN | 5939 | RVTMTT | 6248 | ARDTIYM | 6552 | WGQGTT |
| | | 18 | QSGAE | | GIS | | GQGLEW | | GDTNYA | | DTSTNT | | VRGVLDA | | VTVSS |
| | | | VKKPG | | | | MG | | QKVQG | | AYMQLR | | FDI | | |
| | | | ASVKV | | | | | | | | NLRSDD | | | | |
| | | | SCKAS | | | | | | | | TAVYYC | | | | |
| | | | G | | | | | | | | | | | | |
| ADI-81636 | 9 | IGHV1- | EVQLV | 5358 | GTFSSY | 385 | WVRQAP | 433 | RIFPIL | 5940 | RVTISA | 6249 | ARDRAAA | 6553 | WGQGTL |
| | | 69 | QSGAE | | TFS | | GQGLEW | | GIPNYA | | DRSTST | | DTNTLPT | | VTVSS |
| | | | VKKPG | | | | MG | | QKFQD | | AYMELS | | YYFDY | | |
| | | | SSVKV | | | | | | | | SLRSED | | | | |
| | | | SCKAS | | | | | | | | TAVYFC | | | | |
| | | | G | | | | | | | | | | | | |
| ADI-81536 | 5 | IGHV2- | QVTLK | 5374 | FSFSTS | 5581 | WIRQPP | 441 | LIYWDG | 5941 | RLTITR | 6250 | AHHDIPT | 6554 | WGTGTT |
| | | 5 | ESGPA | | GVGVA | | GKALEW | | DKRYSP | | DTSKNQ | | IFSV | | VTVSS |
| | | | LVKPK | | | | LA | | SLKS | | VVLTMT | | | | |
| | | | QTLTL | | | | | | | | NMDPVD | | | | |
| | | | TCTFS | | | | | | | | TATYYC | | | | |
| | | | G | | | | | | | | | | | | |
| ADI-81684 | 54 | IGHV3- | EVQLV | 5332 | FTFSTY | 244 | WVRQVT | 468 | AIGTGG | 5942 | RFTISR | 6251 | ARGLHSV | 6555 | WGKGTT |
| | | 13 | ESGGG | | DMH | | GKGLEW | | HTYYPD | | ENAKSS | | AAGGTIR | | VTVSS |
| | | | LVQPG | | | | VS | | SVKG | | LYLQMN | | YYYYMDV | | |
| | | | GSLRL | | | | | | | | SLRAGD | | | | |
| | | | SCAAS | | | | | | | | TAVYYC | | | | |
| | | | G | | | | | | | | | | | | |
| ADI-81794 | 70 | IGHV5- | EVQLL | 5375 | YSFISN | 5582 | WVRQMP | 476 | IIYPGD | 635 | QVTMSV | 6252 | ARLEVGG | 6556 | WGQGTL |
| | | 51 | ESGAQ | | WIG | | GKGLEW | | SDTRYS | | DKSIST | | RDY | | VTVSS |
| | | | VKKPG | | | | MG | | PSFQG | | AYLQWT | | | | |
| | | | ESLKI | | | | | | | | SLKASD | | | | |
| | | | SCKGS | | | | | | | | TAMYYC | | | | |
| | | | G | | | | | | | | | | | | |
| | SEQ | | | | | | | SEQ | | | SEQ | VH | | VH Amino | |
| | ID | | | | | | | ID | | | ID | Nucleotide | | Acid | |
| Clone ID | NO: | VH DNA | | | | | | NO: | VH Protein | | NO: | Substitution | | Substitution | |
| ADI-81672 | 1286 | TGGGGCCTCAGTGAAGGTCTCCTGCAAGGCCTCTGGTTACA | | | | | | 6909 | QVQLVQSGAEVKKP | | 7262 | 10 | | 10 | |
| | | CCTTTACCAGCTACGGAATCAGCTGGGTGCGACAGGCCCCT | | | | | | | GASVKVSCKASGYT | | | | | | |
| | | GGACAAGGGCTTGAGTGGATGGGATGGATCAACACTTTCAA | | | | | | | FTSYGISWVRQAPG | | | | | | |
| | | TGGTGACACAAACTATCCACAGAAGTTCCAGGGCAGAGTCA | | | | | | | QGLEWMGWINTFNG | | | | | | |
| | | CCATGACCACAGACACATCCACGACCACAGTCCACATGGAG | | | | | | | DTNYPQKFQGRVTM | | | | | | |
| | | CTGAGGAGCCTGAGATCTGACGACACGGCCCTGTATTACTG | | | | | | | TTDTSTTTVHMELR | | | | | | |
| | | TGCGAGAGTAGGAACTGATTACGTTTGGGGGAGTTCCATCT | | | | | | | SLRSDDTALYYCAR | | | | | | |
| | | ACTTCTTTGACTACTGGGGCCAGGGAACCCTGGTCACCGTC | | | | | | | VGTDYVWGSSIYFF | | | | | | |
| | | TCCTCA | | | | | | | DYWGQGTLVTVSS | | | | | | |
| ADI-81872 | 6809 | GAGGTGCAGCTGGTGGAGTCGGGCCCAGGACTGGTGAAGCC | | | | | | 6910 | EVQLVESGPGLVKP | | 7263 | 10 | | 8 | |
| | | TTCGGGGACCCTGTCCCTCACTTGCGCTGTCTCTGGCGGCT | | | | | | | SGTLSLTCAVSGGS | | | | | | |
| | | CCATCAGCAGTAGAAATTGGTGGAGTTGGGTCCGCCAGTCC | | | | | | | ISSRNWWSWVRQSP | | | | | | |
| | | CCAGGGAAGGGGCTGGAGTGGATTGGAGAAATCTTTCATAC | | | | | | | GKGLEWIGEIFHTG | | | | | | |
| | | TGGGAGTACCGCCTACAACCCGTCCCTCAAGAGTCGAGTCA | | | | | | | STAYNPSLKSRVTM | | | | | | |
| | | CCATGTCGGTGGACAAGTCCAAGAACCAGTTCTCCCTGAGA | | | | | | | SVDKSKNQFSLRLS | | | | | | |
| | | CTGAGCTCTGTGAACGCCGCGGACACGGCCGTGTATTACTG | | | | | | | SVNAADTAVYYCAR | | | | | | |
| | | TGCGAGGTCGGCTGGCCTCCTTGACTACTGGGGCCAGGGAA | | | | | | | SAGLLDYWGQGILV | | | | | | |
| | | TCCTGGTCACCGTCTCCTCA | | | | | | | TVSS | | | | | | |
| ADI-81679 | 1291 | GAGGTGCAGCTGTTGGAGTCTGGGGGAGGCTTGGTACAGCC | | | | | | 6911 | EVQLLESGGGLVQP | | 7264 | 9 | | 9 | |
| | | TGGGGGGTCCCTGAGACTCTCCTGTGCGGCCTCTGGATTCA | | | | | | | GGSLRLSCAASGFT | | | | | | |
| | | CCTTCAGTAACTCCGACATGCACTGGGTCCGCCAAACTACA | | | | | | | FSNSDMHWVRQTTG | | | | | | |
| | | GGAAATAGTCTGGAGTGGGTCTCAACTATTGGTACTGCTGG | | | | | | | NSLEWVSTIGTAGD | | | | | | |
| | | GGATACATACTATCCAGACTCCGTGAAGGGCCGATTCACCA | | | | | | | TYYPDSVKGRFTIS | | | | | | |
| | | TCTCCAGAGAAAATGCCAAGAACTCCTTGTCTCTTCAAATG | | | | | | | RENAKNSLSLQMNS | | | | | | |
| | | AATAGCCTGAGAGCCGGGGACTCGGCTGTGTATTACTGTGC | | | | | | | LRAGDSAVYYCARG | | | | | | |
| | | AAGAGGGGAACAACGTATGATGATTTCTGGCGTGGTTCCGC | | | | | | | EQRMMISGVVPRYY | | | | | | |
| | | GTTACTATTATTACATGGACGTCTGGGGCAAAGGGACCACG | | | | | | | YYMDVWGKGTTVTV | | | | | | |
| | | GTCACCGTCTCCTCA | | | | | | | SS | | | | | | |
| ADI-81553 | 1287 | TGGGGCCTCAGTGAAGGTCTCCTGCAAGGCTTCTGGTTACA | | | | | | 6912 | QVQLVQSGAEVKKP | | 7265 | 8 | | 7 | |
| | | GGTTTACCAGCTACGGTATCAGCTGGGTGCGACAGGCCCCT | | | | | | | GASVKVSCKASGYR | | | | | | |
| | | GGACAAGGGCTTGAGTGGATGGGATGGATCAGCGTTTACAA | | | | | | | FTSYGISWVRQAPG | | | | | | |
| | | CGGTGACACAAATTATGCACAGAAGGTCCAGGGCAGAGTCA | | | | | | | QGLEWMGWISVYNG | | | | | | |
| | | CCATGACCACAGACACATCCACGAACACAGCCTACATGCAG | | | | | | | DTNYAQKVQGRVTM | | | | | | |
| | | TTGAGGAACCTAAGATCTGACGACACGGCCGTGTATTACTG | | | | | | | TTDTSTNTAYMQLR | | | | | | |
| | | TGCGCGAGACACTATATATATGGTTCGGGGAGTCCTTGATG | | | | | | | NLRSDDTAVYYCAR | | | | | | |
| | | CTTTTGATATCTGGGGCCAAGGGACCACGGTCACCGTCTCC | | | | | | | DTIYMVRGVLDAFD | | | | | | |
| | | TCA | | | | | | | IWGQGTTVTVSS | | | | | | |
| ADI-81636 | 1286 | TGGGTCCTCGGTGAAGGTCTCCTGCAAGGCTTCTGGAGGCA | | | | | | 6913 | EVQLVQSGAEVKKP | | 7266 | 8 | | 7 | |
| | | CCTTCAGCAGCTATACTTTCAGCTGGGTGCGACAGGCCCCT | | | | | | | GSSVKVSCKASGGT | | | | | | |
| | | GGACAAGGGCTTGAGTGGATGGGAAGGATCTTCCCCATCCT | | | | | | | FSSYTFSWVRQAPG | | | | | | |
| | | TGGTATACCAAACTACGCACAGAAGTTCCAGGACAGAGTCA | | | | | | | QGLEWMGRIFPILG | | | | | | |
| | | CCATTAGTGCGGACAGATCCACGAGCACAGCCTACATGGAA | | | | | | | IPNYAQKFQDRVTI | | | | | | |
| | | CTGAGCAGCCTGAGATCTGAAGACACGGCCGTGTATTTCTG | | | | | | | SADRSTSTAYMELS | | | | | | |
| | | TGCGAGAGACCGAGCAGCAGCTGACACGAACACCCTTCCCA | | | | | | | SLRSEDTAVYFCAR | | | | | | |
| | | CGTACTACTTTGACTACTGGGGCCAGGGAACCCTGGTCACC | | | | | | | DRAAADTNTLPTYY | | | | | | |
| | | GTCTCCTCA | | | | | | | FDYWGQGTLVTVSS | | | | | | |
| ADI-81536 | 6811 | CAGGTCACGTTGAAGGAGTCTGGTCCTGCGCTGGTGAAACC | | | | | | 6914 | QVTLKESGPALVKP | | 7267 | 6 | | 6 | |
| | | CAAACAGACCCTCACACTGACCTGCACCTTCTCTGGGTTCT | | | | | | | KQTLTLTCTFSGFS | | | | | | |
| | | CATTCAGCACTAGTGGAGTCGGTGTGGCCTGGATCCGTCAG | | | | | | | FSTSGVGVAWIRQP | | | | | | |
| | | CCCCCAGGAAAGGCCCTGGAGTGGCTTGCACTCATTTATTG | | | | | | | PGKALEWLALIYWD | | | | | | |
| | | GGATGGTGATAAGCGCTACAGCCCTTCTCTGAAGAGCAGGC | | | | | | | GDKRYSPSLKSRLT | | | | | | |
| | | TCACCATCACCAGGGACACCTCCAAAAACCAGGTGGTCCTT | | | | | | | ITRDTSKNQVVLTM | | | | | | |
| | | ACAATGACCAACATGGACCCTGTGGACACAGCCACATATTA | | | | | | | TNMDPVDTATYYCA | | | | | | |
| | | CTGTGCGCACCACGACATCCCGACGATTTTTAGTGTCTGGG | | | | | | | HHDIPTIFSVWGTG | | | | | | |
| | | GCACAGGGACCACGGTCACCGTCTCCTCA | | | | | | | TTVTVSS | | | | | | |
| ADI-81684 | 1291 | GAGGTGCAGCTGGTGGAGTCTGGGGGAGGCTTGGTACAGCC | | | | | | 6915 | EVQLVESGGGLVQP | | 7268 | 6 | | 6 | |
| | | TGGGGGGTCCCTGAGACTCTCCTGTGCAGCCTCTGGATTCA | | | | | | | GGSLRLSCAASGFT | | | | | | |
| | | CCTTCAGTACCTACGACATGCACTGGGTCCGCCAAGTTACA | | | | | | | FSTYDMHWVRQVTG | | | | | | |
| | | GGAAAAGGTCTGGAGTGGGTCTCAGCTATTGGTACTGGTGG | | | | | | | KGLEWVSAIGTGGH | | | | | | |
| | | TCACACATACTATCCAGACTCCGTGAAGGGCCGATTCACCA | | | | | | | TYYPDSVKGRFTIS | | | | | | |
| | | TCTCCAGAGAAAATGCCAAGAGCTCCTTGTATCTTCAAATG | | | | | | | RENAKSSLYLQMNS | | | | | | |
| | | AACAGCCTGAGAGCCGGGGACACGGCTGTGTATTACTGTGC | | | | | | | LRAGDTAVYYCARG | | | | | | |
| | | AAGAGGGCTTCACTCCGTAGCAGCAGGTGGCACGATTCGAT | | | | | | | LHSVAAGGTIRYYY | | | | | | |
| | | ACTACTACTACATGGACGTCTGGGGCAAAGGGACCACGGTC | | | | | | | YMDVWGKGTTVTVS | | | | | | |
| | | ACCGTCTCCTCA | | | | | | | S | | | | | | |
| ADI-81794 | 1286 | GAGGTGCAGCTGTTGGAGTCTGGAGCACAGGTGAAAAAGCC | | | | | | 6916 | EVQLLESGAQVKKP | | 7269 | 6 | | 6 | |
| | | CGGGGAGTCTCTGAAGATCTCCTGTAAGGGTTCTGGATACA | | | | | | | GESLKISCKGSGYS | | | | | | |
| | | GCTTTATCAGCAACTGGATCGGCTGGGTGCGCCAGATGCCC | | | | | | | FISNWIGWVRQMPG | | | | | | |
| | | GGGAAAGGCCTGGAGTGGATGGGGATCATCTATCCTGGTGA | | | | | | | KGLEWMGIIYPGDS | | | | | | |
| | | CTCTGATACTAGATACAGCCCGTCCTTCCAAGGCCAGGTCA | | | | | | | DTRYSPSFQGQVTM | | | | | | |
| | | CCATGTCAGTCGACAAGTCCATCAGCACCGCCTACCTGCAG | | | | | | | SVDKSISTAYLQWT | | | | | | |
| | | TGGACCAGCCTGAAGGCCTCGGACACCGCCATGTATTACTG | | | | | | | SLKASDTAMYYCAR | | | | | | |
| | | TGCGAGACTCGAGGTGGGAGGTAGGGATTATTGGGGCCAGG | | | | | | | LEVGGRDYWGQGTL | | | | | | |
| | | GAACCCTGGTCACCGTCTCCTCA | | | | | | | VTVSS | | | | | | |
| | VH | VH | | SEQ | | SEQ | | SEQ | | SEQ | | SEQ | | SEQ | |
| | CDR3 | Germ- | VH | ID | VH | ID | VH | ID | VH | ID | VH | ID | VH | ID | VH |
| Clone ID | Lineage | line | FR1 | NO: | CDR1 | NO: | FR2 | NO: | CDR2 | NO: | FR3 | NO: | CDR3 | NO: | FR4 |
| ADI-81869 | 47 | IGHV3- | EVQLL | 5376 | FSFSSY | 241 | WVRQAP | 431 | VILDDG | 5943 | RFTISR | 777 | ARDRGFT | 6557 | WGQGTL |
| | | 30 | ESGGG | | AMH | | GKGLEW | | SNKFYA | | DNSKNT | | VTWFDF | | VTVSS |
| | | | VVQPG | | | | VA | | DSVKG | | LYLQMN | | | | |
| | | | RSLRL | | | | | | | | SLRAED | | | | |
| | | | SCVGS | | | | | | | | TAVYYC | | | | |
| | | | G | | | | | | | | | | | | |
| ADI-81659 | 32 | IGHV1- | EVQLM | 5377 | YTFTGY | 5583 | WVRQAP | 433 | WINPNS | 5944 | RVTMTR | 6253 | ARVYTRF | 6558 | WGQGTL |
| | | 2 | ESGAE | | YMH | | GQGLEW | | GGTNYA | | DTSIST | | SAWWFDP | | VTVSS |
| | | | VKKPG | | | | MG | | QKFQG | | AYMELS | | | | |
| | | | ASVKV | | | | | | | | RLRSDD | | | | |
| | | | SCKAS | | | | | | | | TAVYYC | | | | |
| | | | G | | | | | | | | | | | | |
| ADI-81861 | 39 | IGHV1- | EVQLL | 5378 | YTFINY | 5584 | WVRQAP | 5806 | LITPDG | 5945 | RVTMTS | 6254 | ARGGIVP | 6559 | WGQGTL |
| | | 46 | ESGAE | | YIH | | GQGFEW | | GSRTYA | | DTSTNT | | AAKENFD | | VTVSS |
| | | | VKKPG | | | | MG | | QKFQG | | VYMDLS | | F | | |
| | | | ASAKI | | | | | | | | SLRSAD | | | | |
| | | | SCTAS | | | | | | | | TAFYYC | | | | |
| | | | G | | | | | | | | | | | | |
| ADI-81707 | 77 | IGHV3- | EVQLV | 5379 | FVFSND | 5585 | WVRQPL | 5807 | GIGTSG | 5946 | RFTISR | 6255 | TRGISTS | 6560 | WGKGTT |
| | | 13 | ESGGG | | DMH | | EKGLEW | | DTYYAD | | EDAKNS | | SAGYHYY | | VTVSS |
| | | | LVQPG | | | | VA | | SVKG | | LYLQMN | | YMDV | | |
| | | | GSLRL | | | | | | | | SLRAGE | | | | |
| | | | SCTAS | | | | | | | | TAVYFC | | | | |
| | | | G | | | | | | | | | | | | |
| ADI-81584 | 45 | IGHV4- | QVQLQ | 56 | GSLISG | 5586 | WIRQRP | 512 | CMYYSV | 5947 | RVAISV | 6256 | ARGADHR | 6561 | WGQGTL |
| | | 31 | QSGPG | | GYYWN | | GKGLEW | | GTHYNP | | DKFKNQ | | YDSRWYA | | VTVSS |
| | | | LVKPS | | | | IG | | SLKS | | FSLRLT | | HETSKFD | | |
| | | | QTLSL | | | | | | | | SVTAAD | | S | | |
| | | | TCTVS | | | | | | | | TAVYYC | | | | |
| | | | G | | | | | | | | | | | | |
| ADI-81717 | 87 | IGHV4- | EVQLL | 5380 | GSVSSG | 5587 | WIRQPP | 5808 | HVFHSG | 5948 | RLTILV | 6257 | ARDQGSG | 6562 | WGQGTT |
| | | 61 | ESGPG | | SYYWN | | GKQLEW | | GTNFNP | | DTSKNQ | | WLDAFEV | | VTVSS |
| | | | LVKPS | | | | IG | | SLRS | | FSLKLR | | | | |
| | | | ETLSL | | | | | | | | SVTAAD | | | | |
| | | | TCSVS | | | | | | | | TAIYYC | | | | |
| | | | G | | | | | | | | | | | | |
| ADI-81726 | 3 | IGHV4- | EVQLV | 5381 | GSISSS | 5559 | WVRQSP | 5809 | EIYHVG | 5949 | RVTISV | 6258 | ARTPFGD | 6563 | WGKGTT |
| | | 4 | ESGPG | | NWWT | | EKGLEW | | ATNDNP | | DKSKNQ | | FYYMDV | | VTVSS |
| | | | LVKPS | | | | PR | | SLKS | | FSLKLT | | | | |
| | | | GTLSL | | | | | | | | SVTAAD | | | | |
| | | | TCSVS | | | | | | | | TAVYYC | | | | |
| | | | G | | | | | | | | | | | | |
| ADI-81897 | 72 | IGHV3- | EVQLV | 5362 | IIVSYN | 283 | WVRQAP | 475 | DIYPGG | 5950 | RFTISR | 6259 | ARDGYGE | 6564 | WGQGTL |
| | | 53 | ESGGG | | YMS | | GKGLDW | | STFYAD | | DSSKNT | | NVFDF | | VTVSS |
| | | | LIQPG | | | | AS | | SLKG | | LYLQMN | | | | |
| | | | GSLRL | | | | | | | | SLRVDD | | | | |
| | | | SCAAS | | | | | | | | TAVYYC | | | | |
| | | | G | | | | | | | | | | | | |
| | SEQ | | | | | | | SEQ | | | SEQ | VH | | VH Amino | |
| | ID | | | | | | | ID | | | ID | Nucleotide | | Acid | |
| Clone ID | NO: | VH DNA | | | | | | NO: | VH Protein | | NO: | Substitution | | Substitution | |
| ADI-81869 | 1286 | GAGGTGCAGCTGTTGGAGTCTGGGGGAGGCGTGGTCCAGCC | | | | | | 6917 | EVQLLESGGGVVQP | | 7270 | 6 | | 6 | |
| | | TGGGAGGTCCCTGAGACTCTCCTGTGTAGGCTCTGGATTCA | | | | | | | GRSLRLSCVGSGFS | | | | | | |
| | | GCTTCAGTAGCTATGCTATGCACTGGGTCCGCCAGGCTCCA | | | | | | | FSSYAMHWVRQAPG | | | | | | |
| | | GGCAAGGGGCTAGAGTGGGTGGCAGTTATATTAGATGATGG | | | | | | | KGLEWVAVILDDGS | | | | | | |
| | | AAGTAATAAATTCTACGCAGACTCCGTGAAGGGCCGATTCA | | | | | | | NKFYADSVKGRFTI | | | | | | |
| | | CCATCTCCAGAGACAATTCCAAGAACACGCTGTATCTGCAA | | | | | | | SRDNSKNTLYLQMN | | | | | | |
| | | ATGAACAGCCTGAGAGCTGAGGACACGGCTGTGTATTACTG | | | | | | | SLRAEDTAVYYCAR | | | | | | |
| | | TGCGAGAGACCGGGGATTTACGGTGACTTGGTTTGACTTCT | | | | | | | DRGFTVTWFDFWGQ | | | | | | |
| | | GGGGCCAGGGAACCCTGGTCACCGTCTCCTCA | | | | | | | GTLVTVSS | | | | | | |
| ADI-81659 | 1286 | GAGGTGCAGCTGATGGAGTCTGGGGCTGAGGTGAAGAAGCC | | | | | | 6918 | EVQLMESGAEVKKP | | 7271 | 0 | | 0 | |
| | | TGGGGCCTCAGTGAAGGTCTCCTGCAAGGCTTCTGGATACA | | | | | | | GASVKVSCKASGYT | | | | | | |
| | | CCTTCACCGGCTACTATATGCACTGGGTGCGACAGGCCCCT | | | | | | | FTGYYMHWVRQAPG | | | | | | |
| | | GGACAAGGGCTTGAGTGGATGGGATGGATCAACCCTAACAG | | | | | | | QGLEWMGWINPNSG | | | | | | |
| | | TGGTGGCACAAACTATGCACAGAAGTTTCAGGGCAGGGTCA | | | | | | | GTNYAQKFQGRVTM | | | | | | |
| | | CCATGACCAGGGACACGTCCATCAGCACAGCCTACATGGAG | | | | | | | TRDTSISTAYMELS | | | | | | |
| | | CTGAGCAGGCTGAGATCTGACGACACGGCCGTGTATTACTG | | | | | | | RLRSDDTAVYYCAR | | | | | | |
| | | TGCGAGAGTTTACACACGATTTTCAGCGTGGTGGTTCGACC | | | | | | | VYTRFSAWWFDPWG | | | | | | |
| | | CCTGGGGCCAGGGAACCCTGGTCACCGTCTCCTCA | | | | | | | QGTLVTVSS | | | | | | |
| ADI-81861 | 1286 | GAGGTGCAGCTGTTGGAGTCCGGGGCTGAGGTGAAGAAGCC | | | | | | 6919 | EVQLLESGAEVKKP | | 7272 | 20 | | 17 | |
| | | TGGGGCCTCGGCGAAGATTTCCTGCACGGCATCTGGATACA | | | | | | | GASAKISCTASGYT | | | | | | |
| | | CCTTCATCAATTACTATATACACTGGGTGCGACAGGCCCCT | | | | | | | FINYYIHWVRQAPG | | | | | | |
| | | GGACAAGGCTTTGAGTGGATGGGACTAATCACCCCTGATGG | | | | | | | QGFEWMGLITPDGG | | | | | | |
| | | TGGTAGTAGAACCTACGCACAGAAGTTCCAGGGCAGAGTCA | | | | | | | SRTYAQKFQGRVTM | | | | | | |
| | | CCATGACCAGCGACACGTCCACGAACACAGTCTACATGGAC | | | | | | | TSDTSTNTVYMDLS | | | | | | |
| | | CTGAGCAGCCTGAGATCTGCGGACACGGCCTTTTATTATTG | | | | | | | SLRSADTAFYYCAR | | | | | | |
| | | TGCGAGAGGGGGCATTGTACCAGCTGCCAAGGAGAACTTTG | | | | | | | GGIVPAAKENFDFW | | | | | | |
| | | ACTTCTGGGGCCAGGGAACCCTGGTCACCGTCTCCTCA | | | | | | | GQGTLVTVSS | | | | | | |
| ADI-81707 | 1291 | TGGGGGGTCCCTGAGACTCTCCTGTACAGCCTCGGGATTCG | | | | | | 6920 | EVQLVESGGGLVQP | | 7273 | 18 | | 15 | |
| | | TCTTCAGTAACGACGACATGCACTGGGTCCGCCAACCTCTA | | | | | | | GGSLRLSCTASGFV | | | | | | |
| | | GAAAAAGGTCTGGAATGGGTCGCAGGTATTGGTACTTCCGG | | | | | | | FSNDDMHWVRQPLE | | | | | | |
| | | TGACACATATTATGCAGACTCAGTGAAGGGCCGATTCACCA | | | | | | | KGLEWVAGIGTSGD | | | | | | |
| | | TCTCCAGAGAAGATGCCAAGAACTCCTTGTATCTTCAAATG | | | | | | | TYYADSVKGRFTIS | | | | | | |
| | | AACAGCCTGAGAGCCGGGGAAACGGCTGTATATTTCTGTAC | | | | | | | REDAKNSLYLQMNS | | | | | | |
| | | ACGGGGAATCAGTACGTCCAGCGCGGGCTATCACTATTACT | | | | | | | LRAGETAVYFCTRG | | | | | | |
| | | ATATGGACGTCTGGGGCAAAGGGACCACGGTCACCGTCTCC | | | | | | | ISTSSAGYHYYYMD | | | | | | |
| | | TCA | | | | | | | VWGKGTTVTVSS | | | | | | |
| ADI-81584 | 1286 | CAGGTGCAGCTGCAGCAGTCGGGCCCAGGACTGGTGAAGCC | | | | | | 6921 | QVQLQQSGPGLVKP | | 7274 | 16 | | 15 | |
| | | TTCACAGACCCTGTCCCTCACCTGCACTGTCTCTGGTGGCT | | | | | | | SQTLSLTCTVSGGS | | | | | | |
| | | CCCTCATCAGTGGTGGTTACTACTGGAACTGGATCCGCCAG | | | | | | | LISGGYYWNWIRQR | | | | | | |
| | | CGCCCAGGGAAGGGCCTGGAGTGGATTGGGTGCATGTATTA | | | | | | | PGKGLEWIGCMYYS | | | | | | |
| | | CAGTGTGGGGACCCACTACAACCCGTCCCTCAAGAGTCGAG | | | | | | | VGTHYNPSLKSRVA | | | | | | |
| | | TTGCCATTTCCGTAGACAAGTTTAAGAACCAGTTCTCCCTG | | | | | | | ISVDKFKNQFSLRL | | | | | | |
| | | AGGCTGACCTCTGTGACTGCCGCGGACACGGCCGTGTATTA | | | | | | | TSVTAADTAVYYCA | | | | | | |
| | | CTGTGCGAGAGGGGCAGACCACCGGTATGACAGCAGATGGT | | | | | | | RGADHRYDSRWYAH | | | | | | |
| | | ACGCCCACGAGACGTCCAAGTTTGACTCCTGGGGCCAGGGA | | | | | | | ETSKFDSWGQGTLV | | | | | | |
| | | ACCCTGGTCACCGTCTCCTCA | | | | | | | TVSS | | | | | | |
| ADI-81717 | 1287 | GAGGTGCAGCTGTTGGAGTCGGGCCCAGGACTGGTGAAGCC | | | | | | 6922 | EVQLLESGPGLVKP | | 7275 | 16 | | 14 | |
| | | TTCGGAGACCCTGTCCCTCACCTGCAGTGTCTCTGGTGGCT | | | | | | | SETLSLTCSVSGGS | | | | | | |
| | | CCGTCAGCAGTGGTAGTTACTACTGGAACTGGATCCGGCAG | | | | | | | VSSGSYYWNWIRQP | | | | | | |
| | | CCCCCAGGGAAACAATTGGAGTGGATCGGCCATGTCTTTCA | | | | | | | PGKQLEWIGHVFHS | | | | | | |
| | | CAGTGGGGGCACCAACTTCAACCCCTCCCTCAGGAGTCGAC | | | | | | | GGTNFNPSLRSRLT | | | | | | |
| | | TCACCATATTAGTAGACACGTCCAAGAACCAGTTCTCCCTG | | | | | | | ILVDTSKNQFSLKL | | | | | | |
| | | AAGTTGAGGTCTGTGACCGCTGCGGACACGGCCATTTATTA | | | | | | | RSVTAADTAIYYCA | | | | | | |
| | | CTGTGCGAGAGATCAGGGTAGTGGCTGGCTAGATGCTTTTG | | | | | | | RDQGSGWLDAFEVW | | | | | | |
| | | AAGTCTGGGGCCAAGGGACCACGGTCACCGTCTCCTCA | | | | | | | GQGTTVTVSS | | | | | | |
| ADI-81726 | 1291 | GAGGTGCAGCTGGTGGAGTCGGGTCCAGGACTGGTGAAGCC | | | | | | 6923 | EVQLVESGPGLVKP | | 7276 | 16 | | 10 | |
| | | TTCGGGGACCCTGTCCCTCACTTGTTCTGTCTCTGGTGGCT | | | | | | | SGTLSLTCSVSGGS | | | | | | |
| | | CCATCAGTAGTAGTAACTGGTGGACTTGGGTCCGCCAGTCC | | | | | | | ISSSNWWTWVRQSP | | | | | | |
| | | CCAGAGAAGGGGCTGGAGTGGCCCCGTGAGATCTATCATGT | | | | | | | EKGLEWPREIYHVG | | | | | | |
| | | TGGGGCCACCAACGACAACCCGTCCCTCAAGAGTCGGGTCA | | | | | | | ATNDNPSLKSRVTI | | | | | | |
| | | CCATATCAGTCGACAAGTCCAAGAACCAATTCTCCCTGAAG | | | | | | | SVDKSKNQFSLKLT | | | | | | |
| | | TTGACTTCTGTGACCGCCGCGGACACGGCCGTGTATTACTG | | | | | | | SVTAADTAVYYCAR | | | | | | |
| | | TGCGAGGACCCCTTTTGGGGACTTCTACTACATGGACGTCT | | | | | | | TPFGDFYYMDVWGK | | | | | | |
| | | GGGGCAAGGGGACCACGGTCACCGTCTCCTCA | | | | | | | GTTVTVSS | | | | | | |
| ADI-81897 | 1286 | GAGGTGCAGCTGGTGGAGTCTGGGGGAGGCTTGATCCAGCC | | | | | | 6924 | EVQLVESGGGLIQP | | 7277 | 15 | | 12 | |
| | | TGGGGGGTCCCTGAGACTCTCCTGTGCAGCCTCTGGGATCA | | | | | | | GGSLRLSCAASGII | | | | | | |
| | | TCGTCAGTTATAACTATATGAGTTGGGTTCGCCAGGCTCCA | | | | | | | VSYNYMSWVRQAPG | | | | | | |
| | | GGGAAGGGACTGGACTGGGCCTCAGATATTTATCCCGGTGG | | | | | | | KGLDWASDIYPGGS | | | | | | |
| | | TAGCACATTCTACGCAGACTCCCTGAAGGGCCGATTCACCA | | | | | | | TFYADSLKGRFTIS | | | | | | |
| | | TCTCCAGAGACAGTTCCAAGAACACGTTGTATCTTCAAATG | | | | | | | RDSSKNTLYLQMNS | | | | | | |
| | | AACAGCCTGAGAGTCGACGACACGGCCGTGTATTACTGTGC | | | | | | | LRVDDTAVYYCARD | | | | | | |
| | | GAGAGATGGGTACGGTGAAAATGTCTTTGATTTTTGGGGCC | | | | | | | GYGENVFDFWGQGT | | | | | | |
| | | AGGGAACCCTGGTCACCGTCTCCTCA | | | | | | | LVTVSS | | | | | | |
| | VH | VH | | SEQ | | SEQ | | SEQ | | SEQ | | SEQ | | SEQ | |
| | CDR3 | Germ- | VH | ID | VH | ID | VH | ID | VH | ID | VH | ID | VH | ID | VH |
| Clone ID | Lineage | line | FR1 | NO: | CDR1 | NO: | FR2 | NO: | CDR2 | NO: | FR3 | NO: | CDR3 | NO: | FR4 |
| ADI-81718 | 88 | IGHV5- | EVQLV | 5382 | YSFTTY | 5515 | WVRQMP | 476 | NIYPID | 5951 | QVTISA | 6260 | SRQGSGT | 6565 | WGQGAL |
| | | 51 | QSGAE | | WIG | | GKGLEW | | SDTRYN | | DKSITT | | YYDFDY | | VTVSS |
| | | | VKKPG | | | | MG | | PSFQG | | AYLHWN | | | | |
| | | | ESLTI | | | | | | | | SLKASD | | | | |
| | | | SCKAS | | | | | | | | TAIYFC | | | | |
| | | | G | | | | | | | | | | | | |
| ADI-81770 | 46 | IGHV3- | EVQLL | 5383 | FTVSDY | 5588 | WVRQAP | 470 | VIYSGN | 5952 | RFTLSR | 6261 | AKGADTW | 6566 | WGQGTL |
| | | 53 | ETGGG | | YMS | | GKGLEW | | NTYYID | | DTSKNT | | YGGTFDS | | VTVSS |
| | | | LMQPG | | | | IS | | SVKG | | LFLQMN | | | | |
| | | | GSLRL | | | | | | | | SLRAED | | | | |
| | | | SCAAS | | | | | | | | TAVYYC | | | | |
| | | | G | | | | | | | | | | | | |
| ADI-81772 | 48 | IGHV3- | EAQLV | 5384 | FTFEDY | 5589 | WVRQAP | 437 | GISWNG | 752 | RFYISR | 6262 | AKDLYLK | 6567 | WGQGTT |
| | | 9 | ESGGS | | TMH | | GKGLEW | | GIIGYA | | DNAQNS | | EGYNSGG | | VTVSS |
| | | | LVQPG | | | | VS | | DSVKG | | LYLQML | | AFDM | | |
| | | | RSLRL | | | | | | | | RLRPED | | | | |
| | | | SCAAS | | | | | | | | | | | | |
| | | | G | | | | | | | | TALYYC | | | | |
| ADI-81834 | 13 | IGHV1- | QVQLV | 50 | GTFNNH | 342 | WVRRAP | 488 | KIIPII | 677 | RVTITA | 926 | ARRTSSS | 1177 | WGQGTL |
| | | 69 | QSGAE | | FIN | | GQGLEW | | DIANSA | | DKSTST | | SEYFDS | | VTVSS |
| | | | VKKPG | | | | MG | | QKFQG | | VYMELS | | | | |
| | | | SSVKV | | | | | | | | SLRSDD | | | | |
| | | | SCKAS | | | | | | | | TAMYYC | | | | |
| | | | G | | | | | | | | | | | | |
| ADI-81757 | 33 | IGHV1- | EVQLV | 5385 | HTFTLH | 5590 | WVRQAP | 433 | IINPDA | 5953 | RVSMTR | 6263 | ARGALVP | 6568 | WGQGTT |
| | | 46 | ESGAE | | YMH | | GQGLEW | | GSTTYA | | DTSTST | | DAHDALD | | VTVSS |
| | | | VKKPG | | | | MG | | QKFQG | | VYLHLS | | I | | |
| | | | ASVKV | | | | | | | | SLRSED | | | | |
| | | | SCKAS | | | | | | | | TAVYYC | | | | |
| | | | G | | | | | | | | | | | | |
| ADI-81835 | 14 | IGHV3- | EVQLL | 5354 | IIVSRN | 291 | WVRQAP | 437 | VVYPGG | 5954 | RFTISR | 6264 | ARQDNND | 6569 | WGQGTT |
| | | 53 | ETGGG | | YMT | | GKGLEW | | STFYAD | | DHSKNT | | AFDI | | VTVSS |
| | | | LIQPG | | | | VS | | SVRG | | LYLQVT | | | | |
| | | | GSLRL | | | | | | | | SLRAED | | | | |
| | | | SCAAS | | | | | | | | TAVYYC | | | | |
| | | | E | | | | | | | | | | | | |
| ADI-81845 | 23 | IGHV3- | EVQLV | 5386 | FSFGTY | 5591 | WVRQST | 5810 | AIGTSG | 5930 | RFTISR | 6265 | VRGTTVT | 6570 | WGQGTL |
| | | 13 | ESGGK | | DMH | | GKGLEW | | DTYYAD | | EDAKKS | | GGLEYYF | | VTVSS |
| | | | LVQPG | | | | VS | | SVKG | | LYLQMN | | | | |
| | | | GSLRL | | | | | | | | SLRAGD | | | | |
| | | | SCAAS | | | | | | | | TAVYYC | | | | |
| | | | G | | | | | | | | | | | | |
| ADI-81860 | 38 | IGHV3- | EVQLV | 5387 | FTFSSY | 199 | WVRQAP | 5811 | LISNDG | 5955 | RFTASR | 6266 | ARDGPMT | 6571 | WGQGTL |
| | | 30 | ESGGG | | AMH | | GSGLEW | | RMKFYT | | DNSKNT | | TVTCFDY | | VTVSS |
| | | | VVQPG | | | | VA | | DSVKG | | LYLEMN | | | | |
| | | | RSLRL | | | | | | | | SLRSED | | | | |
| | | | SCATS | | | | | | | | TAVYYC | | | | |
| | | | G | | | | | | | | | | | | |
| | SEQ | | | | | | | SEQ | | | SEQ | VH | | VH Amino | |
| | ID | | | | | | | ID | | | ID | Nucleotide | | Acid | |
| Clone ID | NO: | VH DNA | | | | | | NO: | VH Protein | | NO: | Substitution | | Substitution | |
| ADI-81718 | 1285 | GAGGTGCAGCTGGTGCAGTCTGGAGCAGAGGTGAAAAAGCC | | | | | | 6925 | EVQLVQSGAEVKKP | | 7278 | 14 | | 11 | |
| | | CGGGGAGTCTCTGACGATCTCCTGTAAGGCTTCTGGATACA | | | | | | | GESLTISCKASGYS | | | | | | |
| | | GCTTTACCACCTACTGGATCGGCTGGGTGCGCCAGATGCCC | | | | | | | FTTYWIGWVRQMPG | | | | | | |
| | | GGAAAAGGCCTGGAGTGGATGGGGAACATCTATCCTATTGA | | | | | | | KGLEWMGNIYPIDS | | | | | | |
| | | CTCTGATACCAGATATAATCCGTCCTTCCAAGGCCAGGTCA | | | | | | | DTRYNPSFQGQVTI | | | | | | |
| | | CCATCTCGGCCGACAAGTCCATCACCACCGCCTATCTGCAC | | | | | | | SADKSITTAYLHWN | | | | | | |
| | | TGGAACAGCCTGAAGGCCTCGGACACCGCCATTTATTTTTG | | | | | | | SLKASDTAIYFCSR | | | | | | |
| | | TTCGAGACAAGGTAGTGGGACCTACTACGACTTTGACTACT | | | | | | | QGSGTYYDFDYWGQ | | | | | | |
| | | GGGGCCAGGGAGCCCTGGTCACCGTCTCCTCA | | | | | | | GALVTVSS | | | | | | |
| ADI-81770 | 1286 | GAGGTGCAGCTGTTGGAGACTGGAGGAGGCTTGATGCAGCC | | | | | | 6926 | EVQLLETGGGLMQP | | 7279 | 14 | | 10 | |
| | | TGGGGGGTCCCTGAGACTCTCCTGTGCAGCCTCTGGGTTCA | | | | | | | GGSLRLSCAASGFT | | | | | | |
| | | CCGTCAGTGACTACTACATGAGCTGGGTCCGCCAGGCTCCA | | | | | | | VSDYYMSWVRQAPG | | | | | | |
| | | GGGAAGGGGCTGGAGTGGATTTCAGTTATTTATAGTGGAAA | | | | | | | KGLEWISVIYSGNN | | | | | | |
| | | TAACACCTACTACATAGACTCCGTGAAGGGCCGATTCACCC | | | | | | | TYYIDSVKGRFTLS | | | | | | |
| | | TCTCCAGAGACACTTCCAAGAACACGCTGTTTCTCCAAATG | | | | | | | RDTSKNTLFLQMNS | | | | | | |
| | | AACAGCCTGAGAGCCGAAGACACGGCCGTGTATTACTGTGC | | | | | | | LRAEDTAVYYCAKG | | | | | | |
| | | AAAAGGGGCCGACACTTGGTACGGGGGGACCTTTGACTCCT | | | | | | | ADTWYGGTFDSWGQ | | | | | | |
| | | GGGGCCAGGGAACCCTGGTCACCGTCTCCTCA | | | | | | | GTLVTVSS | | | | | | |
| ADI-81772 | 1287 | TGGCAGGTCCCTGAGACTCTCCTGTGCAGCCTCTGGATTCA | | | | | | 6927 | EAQLVESGGSLVQP | | 7280 | 14 | | 10 | |
| | | CCTTTGAAGATTATACCATGCACTGGGTCCGGCAAGCTCCA | | | | | | | GRSLRLSCAASGFT | | | | | | |
| | | GGGAAGGGCCTGGAGTGGGTCTCAGGTATAAGTTGGAATGG | | | | | | | FEDYTMHWVRQAPG | | | | | | |
| | | TGGTATAATCGGCTATGCGGACTCTGTGAAGGGCCGATTCT | | | | | | | KGLEWVSGISWNGG | | | | | | |
| | | ACATCTCCAGAGACAACGCCCAGAACTCACTTTATCTGCAA | | | | | | | IIGYADSVKGRFYI | | | | | | |
| | | ATGCTCCGTCTAAGACCTGAGGACACGGCCTTGTATTACTG | | | | | | | SRDNAQNSLYLQML | | | | | | |
| | | TGCAAAAGACTTATATCTTAAAGAAGGCTACAATTCGGGAG | | | | | | | RLRPEDTALYYCAK | | | | | | |
| | | GCGCTTTTGATATGTGGGGCCAAGGGACAACGGTCACCGTC | | | | | | | DLYLKEGYNSGGAF | | | | | | |
| | | TCCTCA | | | | | | | DMWGQGTTVTVSS | | | | | | |
| ADI-81834 | 1286 | CAGGTCCAGCTGGTACAGTCTGGGGCTGAGGTGAAGAAGCC | | | | | | 6928 | QVQLVQSGAEVKKP | | 1757 | 14 | | 13 | |
| | | TGGGTCCTCGGTGAAGGTCTCCTGCAAGGCTTCTGGAGGCA | | | | | | | GSSVKVSCKASGGT | | | | | | |
| | | CCTTCAACAACCATTTTATCAACTGGGTGCGACGGGCCCCT | | | | | | | FNNHFINWVRRAPG | | | | | | |
| | | GGACAAGGGCTTGAGTGGATGGGAAAGATCATCCCTATCAT | | | | | | | QGLEWMGKIIPIID | | | | | | |
| | | TGATATAGCAAACTCCGCACAGAAGTTCCAGGGCAGAGTCA | | | | | | | IANSAQKFQGRVTI | | | | | | |
| | | CGATTACCGCGGACAAATCCACGAGCACAGTCTACATGGAG | | | | | | | TADKSTSTVYMELS | | | | | | |
| | | CTGAGCAGCCTGAGATCTGATGACACGGCCATGTATTACTG | | | | | | | SLRSDDTAMYYCAR | | | | | | |
| | | TGCGCGTCGAACTAGCAGTTCGTCTGAGTATTTTGACTCCT | | | | | | | RTSSSSEYFDSWGQ | | | | | | |
| | | GGGGCCAGGGAACCCTGGTCACCGTCTCCTCA | | | | | | | GTLVTVSS | | | | | | |
| ADI-81757 | 1287 | GAGGTGCAGCTGGTGGAGTCTGGGGCTGAGGTGAAGAAGCC | | | | | | 6929 | EVQLVESGAEVKKP | | 7281 | 13 | | 9 | |
| | | TGGGGCCTCAGTGAAGGTTTCCTGCAAGGCATCTGGACACA | | | | | | | GASVKVSCKASGHT | | | | | | |
| | | CCTTCACCCTCCACTATATGCACTGGGTGCGACAGGCCCCT | | | | | | | FTLHYMHWVRQAPG | | | | | | |
| | | GGACAAGGACTTGAGTGGATGGGAATAATCAACCCTGATGC | | | | | | | QGLEWMGIINPDAG | | | | | | |
| | | TGGTAGCACAACATACGCACAGAAGTTCCAGGGCAGAGTCT | | | | | | | STTYAQKFQGRVSM | | | | | | |
| | | CCATGACCAGGGACACGTCCACGAGCACAGTCTACTTGCAC | | | | | | | TRDTSTSTVYLHLS | | | | | | |
| | | CTGAGCAGCCTGAGATCTGAGGACACGGCCGTGTATTACTG | | | | | | | SLRSEDTAVYYCAR | | | | | | |
| | | TGCGAGAGGGGCACTAGTACCAGATGCCCATGATGCTCTTG | | | | | | | GALVPDAHDALDIW | | | | | | |
| | | ATATTTGGGGCCAGGGGACCACGGTCACCGTCTCCTCA | | | | | | | GQGTTVTVSS | | | | | | |
| ADI-81835 | 1287 | GAGGTGCAGCTGTTGGAGACTGGAGGAGGCTTGATCCAGCC | | | | | | 6930 | EVQLLETGGGLIQP | | 7282 | 13 | | 12 | |
| | | GGGGGGGTCCCTGAGACTCTCCTGTGCAGCCTCTGAGATCA | | | | | | | GGSLRLSCAASEII | | | | | | |
| | | TCGTCAGTAGGAACTACATGACCTGGGTCCGCCAGGCTCCA | | | | | | | VSRNYMTWVRQAPG | | | | | | |
| | | GGCAAAGGGCTGGAGTGGGTCTCAGTTGTTTATCCCGGTGG | | | | | | | KGLEWVSVVYPGGS | | | | | | |
| | | GAGCACTTTCTACGCAGACTCCGTGAGGGGCCGATTCACCA | | | | | | | TFYADSVRGRFTIS | | | | | | |
| | | TCTCCAGAGACCATTCCAAGAACACTCTTTATCTTCAAGTG | | | | | | | RDHSKNTLYLQVTS | | | | | | |
| | | ACCAGCCTGAGAGCCGAGGACACGGCCGTGTATTACTGTGC | | | | | | | LRAEDTAVYYCARQ | | | | | | |
| | | GAGACAAGACAATAATGATGCTTTTGATATTTGGGGGCAAG | | | | | | | DNNDAFDIWGQGTT | | | | | | |
| | | GGACCACGGTCACCGTCTCCTCA | | | | | | | VTVSS | | | | | | |
| ADI-81845 | 1286 | GAGGTGCAGCTGGTGGAGTCTGGGGGAAAGTTGGTACAGCC | | | | | | 6931 | EVQLVESGGKLVQP | | 7283 | 13 | | 10 | |
| | | TGGGGGGTCCCTGAGACTCTCCTGTGCAGCCTCTGGATTCA | | | | | | | GGSLRLSCAASGFS | | | | | | |
| | | GTTTCGGTACCTACGACATGCACTGGGTCCGCCAATCTACA | | | | | | | FGTYDMHWVRQSTG | | | | | | |
| | | GGAAAAGGTCTGGAGTGGGTCTCAGCTATTGGTACTTCTGG | | | | | | | KGLEWVSAIGTSGD | | | | | | |
| | | TGACACATACTATGCAGACTCCGTGAAGGGCCGATTCACCA | | | | | | | TYYADSVKGRFTIS | | | | | | |
| | | TCTCTAGAGAAGATGCCAAGAAGTCTTTGTATCTTCAAATG | | | | | | | REDAKKSLYLQMNS | | | | | | |
| | | AACAGTCTGAGAGCCGGGGACACGGCTGTGTATTATTGTGT | | | | | | | LRAGDTAVYYCVRG | | | | | | |
| | | AAGAGGTACTACGGTGACTGGGGGACTGGAATACTACTTTG | | | | | | | TTVTGGLEYYFDYW | | | | | | |
| | | ACTACTGGGGCCAGGGAACCCTGGTCACCGTCTCCTCA | | | | | | | GQGTLVTVSS | | | | | | |
| ADI-81860 | 1286 | GAGGTGCAGCTGGTGGAGTCTGGGGGAGGCGTGGTCCAGCC | | | | | | 6932 | EVQLVESGGGVVQP | | 7284 | 13 | | 10 | |
| | | TGGGAGGTCCCTGAGACTCTCCTGCGCAACCTCTGGATTCA | | | | | | | GRSLRLSCATSGFT | | | | | | |
| | | CCTTCAGTAGTTATGCTATGCACTGGGTCCGCCAGGCTCCA | | | | | | | FSSYAMHWVRQAPG | | | | | | |
| | | GGCTCGGGACTGGAGTGGGTGGCACTTATATCAAATGATGG | | | | | | | SGLEWVALISNDGR | | | | | | |
| | | AAGAATGAAATTCTACACAGACTCCGTGAAGGGCCGCTTCA | | | | | | | MKFYTDSVKGRFTA | | | | | | |
| | | CCGCCTCCAGAGACAATTCCAAGAACACTCTGTATCTGGAA | | | | | | | SRDNSKNTLYLEMN | | | | | | |
| | | ATGAACAGCCTGAGATCTGAAGACACGGCTGTGTATTACTG | | | | | | | SLRSEDTAVYYCAR | | | | | | |
| | | TGCGAGAGATGGCCCTATGACTACGGTGACTTGCTTTGACT | | | | | | | DGPMTTVTCFDYWG | | | | | | |
| | | ACTGGGGCCAGGGAACCCTGGTCACCGTCTCCTCA | | | | | | | QGTLVTVSS | | | | | | |
| | VH | VH | | SEQ | | SEQ | | SEQ | | SEQ | | SEQ | | SEQ | |
| | CDR3 | Germ- | VH | ID | VH | ID | VH | ID | VH | ID | VH | ID | VH | ID | VH |
| Clone ID | Lineage | line | FR1 | NO: | CDR1 | NO: | FR2 | NO: | CDR2 | NO: | FR3 | NO: | CDR3 | NO: | FR4 |
| ADI-81590 | 35 | IGHV5- | QVQLV | 5388 | YSFISN | 5582 | WVRQMP | 476 | IIWPGD | 5956 | QVTISV | 6267 | VRRGSAW | 6572 | WGQGTL |
| | | 51 | QSGAE | | WIG | | GKGLEW | | SDTTYS | | DKSITT | | EIDY | | VTVSS |
| | | | VKKPG | | | | MG | | PSFQG | | AYLEWG | | | | |
| | | | ESLKI | | | | | | | | SLKASD | | | | |
| | | | SCKTS | | | | | | | | TAIYYC | | | | |
| | | | G | | | | | | | | | | | | |
| ADI-81708 | 78 | IGHV3- | EVQLL | 5355 | FPFSSY | 5592 | WVRQAT | 467 | ATGTSG | 5957 | RFTISR | 6268 | VRGDVVE | 6573 | WGKGTT |
| | | 13 | ESGGG | | DMH | | GKGLEW | | DTSYLD | | DDARSS | | VPSVPSY | | VTVSS |
| | | | LVQPG | | | | VS | | SVKG | | LYLQMN | | YYYYYMD | | |
| | | | GSLRL | | | | | | | | NLRAGD | | V | | |
| | | | SCAAS | | | | | | | | TAVYYC | | | | |
| | | | G | | | | | | | | | | | | |
| ADI-81737 | 14 | IGHV5- | EVQLL | 5389 | DYFSTY | 5593 | WVRQMP | 5812 | IFFPGD | 5958 | QVTMSA | 6269 | ARATYCG | 6574 | WGQGTM |
| | | 51 | ESGAE | | WIG | | GKGLEW | | SDARYS | | DKSIST | | GDCSSGG | | VTVSS |
| | | | VKKPG | | | | VG | | PSFQG | | AYLQWS | | AFDV | | |
| | | | ESLKI | | | | | | | | SLKASD | | | | |
| | | | SCQDS | | | | | | | | TAMYYC | | | | |
| | | | G | | | | | | | | | | | | |
| ADI-81905 | 79 | IGHV4- | EVQLL | 5346 | ASISRS | 5594 | WIRQHP | 450 | NIYNSG | 5959 | RLTISV | 6270 | ARDYGGN | 6575 | WGQGTL |
| | | 31 | ESGPG | | GFYWN | | GKGLEW | | STYYNP | | DTSKNQ | | AQYFHY | | VTVSS |
| | | | LVKPS | | | | IG | | SLKS | | FSLKLN | | | | |
| | | | QTLSL | | | | | | | | SVTAAD | | | | |
| | | | TCTVS | | | | | | | | TAVYYC | | | | |
| | | | G | | | | | | | | | | | | |
| ADI-81618 | 75 | IGHV4- | PGAAG | 5390 | GSLSSG | 5595 | WIRQHP | 450 | YISYTG | 5960 | PVTMSV | 6271 | ARASMTP | 6576 | WGKGTT |
| | | 31 | GVGPG | | GYYWN | | GKGLEW | | STDYNP | | DTSKSQ | | VTQAGPL | | VTVSS |
| | | | LVKTS | | | | IG | | SLKS | | FSLRLS | | GYYYMDV | | |
| | | | QTLSL | | | | | | | | SVTAAD | | | | |
| | | | TCTVS | | | | | | | | SAVYYC | | | | |
| | | | G | | | | | | | | | | | | |
| ADI-81901 | 59 | IGHV3- | EVQLV | 51 | FSFSTY | 5596 | WVRQAP | 443 | DISGDG | 5961 | RFTITR | 6272 | VRDVSVD | 6577 | WGQGTL |
| | | 64D | ESGGG | | SMH | | GKGLEY | | LITYYA | | DNSKNT | | TSMVTVF | | VTVSS |
| | | | LVQPG | | | | VS | | DSVKG | | LYLHMS | | EY | | |
| | | | GSLRL | | | | | | | | SLRAED | | | | |
| | | | SCSAS | | | | | | | | TAVYYC | | | | |
| | | | G | | | | | | | | | | | | |
| ADI-81532 | 1 | IGHV3- | QVQLV | 5391 | FIFSSY | 5597 | WVRQVT | 5813 | AIGTAG | 5962 | RFTISR | 6273 | ARGDQPI | 6578 | WGKGTT |
| | | 13 | QSGGG | | DMH | | GKGLEW | | DTYYED | | ENAKNS | | TISGVVE | | VTVSS |
| | | | LAQPG | | | | VA | | SVKG | | VYLQMN | | TYYMDV | | |
| | | | GSLRL | | | | | | | | SLRAGD | | | | |
| | | | SCAAS | | | | | | | | TAMYYC | | | | |
| | | | G | | | | | | | | | | | | |
| ADI-81537 | 1 | IGHV3- | QVQLV | 5391 | FIFSSY | 5597 | WVRQVT | 5813 | AIGTAG | 5962 | RFTISR | 6273 | ARGDQPI | 6578 | WGKGTT |
| | | 13 | QSGGG | | DMH | | GKGLEW | | DTYYED | | ENAKNS | | TISGVVE | | VTVSS |
| | | | LAQPG | | | | VA | | SVKG | | VYLQMN | | TYYMDV | | |
| | | | GSLRL | | | | | | | | SLRAGD | | | | |
| | | | SCAAS | | | | | | | | TAMYYC | | | | |
| | | | G | | | | | | | | | | | | |
| | SEQ | | | | | | | SEQ | | | SEQ | VH | | VH Amino | |
| | ID | | | | | | | ID | | | ID | Nucleotide | | Acid | |
| Clone ID | NO: | VH DNA | | | | | | NO: | VH Protein | | NO: | Substitution | | Substitution | |
| ADI-81590 | 1286 | CAGGTGCAGCTGGTGCAGTCTGGAGCAGAGGTGAAAAAGCC | | | | | | 6933 | QVQLVQSGAEVKKP | | 7285 | 12 | | 10 | |
| | | GGGGGAGTCTCTGAAGATCTCCTGTAAGACTTCTGGATACA | | | | | | | GESLKISCKTSGYS | | | | | | |
| | | GCTTTATCAGCAACTGGATCGGCTGGGTGCGCCAGATGCCC | | | | | | | FISNWIGWVRQMPG | | | | | | |
| | | GGGAAAGGCCTGGAGTGGATGGGGATCATCTGGCCTGGTGA | | | | | | | KGLEWMGIIWPGDS | | | | | | |
| | | CTCTGATACCACATACAGCCCGTCCTTCCAAGGCCAGGTCA | | | | | | | DTTYSPSFQGQVTI | | | | | | |
| | | CCATCTCAGTCGACAAGTCCATCACCACCGCCTACCTGGAG | | | | | | | SVDKSITTAYLEWG | | | | | | |
| | | TGGGGCAGCCTGAAGGCCTCGGACACCGCCATATACTACTG | | | | | | | SLKASDTAIYYCVR | | | | | | |
| | | TGTGAGACGAGGCAGTGCCTGGGAAATTGACTACTGGGGCC | | | | | | | RGSAWEIDYWGQGT | | | | | | |
| | | AGGGAACCCTGGTCACCGTCTCCTCA | | | | | | | LVTVSS | | | | | | |
| ADI-81708 | 1291 | GAGGTGCAGCTGTTGGAGTCTGGGGGAGGCTTGGTGCAGCC | | | | | | 6934 | EVQLLESGGGLVQP | | 7286 | 12 | | 11 | |
| | | GGGGGGGTCCCTGAGACTCTCCTGTGCAGCCTCTGGGTTCC | | | | | | | GGSLRLSCAASGFP | | | | | | |
| | | CCTTCAGTAGCTACGACATGCACTGGGTCCGCCAAGCTACA | | | | | | | FSSYDMHWVRQATG | | | | | | |
| | | GGAAAAGGTCTGGAGTGGGTCTCAGCCACTGGTACTTCTGG | | | | | | | KGLEWVSATGTSGD | | | | | | |
| | | TGACACATCCTATTTAGACTCCGTGAAGGGCCGATTCACCA | | | | | | | TSYLDSVKGRFTIS | | | | | | |
| | | TCTCCAGAGACGATGCCAGGAGCTCCTTGTATCTTCAAATG | | | | | | | RDDARSSLYLQMNN | | | | | | |
| | | AACAACCTGAGAGCCGGGGACACGGCTGTGTATTACTGTGT | | | | | | | LRAGDTAVYYCVRG | | | | | | |
| | | AAGAGGTGATGTTGTAGAAGTACCATCTGTCCCGTCCTACT | | | | | | | DVVEVPSVPSYYYY | | | | | | |
| | | ACTACTACTACTACATGGACGTCTGGGGCAAAGGGACCACG | | | | | | | YYMDVWGKGTTVTV | | | | | | |
| | | GTCACCGTCTCCTCA | | | | | | | SS | | | | | | |
| ADI-81737 | 1299 | CGGGGAGTCTCTGAAGATCTCCTGTCAGGATTCTGGAGACT | | | | | | 6935 | EVQLLESGAEVKKP | | 7287 | 12 | | 11 | |
| | | ACTTTTCCACCTACTGGATCGGCTGGGTGCGCCAGATGCCC | | | | | | | GESLKISCQDSGDY | | | | | | |
| | | GGGAAAGGCCTGGAGTGGGTGGGGATCTTCTTTCCTGGTGA | | | | | | | FSTYWIGWVRQMPG | | | | | | |
| | | CTCTGATGCCAGATACAGCCCGTCCTTCCAAGGCCAGGTCA | | | | | | | KGLEWVGIFFPGDS | | | | | | |
| | | CCATGTCAGCCGACAAGTCCATCAGCACCGCCTACCTGCAG | | | | | | | DARYSPSFQGQVTM | | | | | | |
| | | TGGAGCAGCCTGAAGGCCTCGGACACCGCCATGTATTACTG | | | | | | | SADKSISTAYLQWS | | | | | | |
| | | TGCGAGAGCAACATATTGTGGTGGTGATTGCTCTTCGGGCG | | | | | | | SLKASDTAMYYCAR | | | | | | |
| | | GTGCTTTTGATGTCTGGGGCCAAGGGACAATGGTCACCGTC | | | | | | | ATYCGGDCSSGGAF | | | | | | |
| | | TCCTCA | | | | | | | DVWGQGTMVTVSS | | | | | | |
| ADI-81905 | 1286 | GAGGTGCAGCTGTTGGAGTCGGGCCCAGGACTGGTGAAGCC | | | | | | 6936 | EVQLLESGPGLVKP | | 7288 | 12 | | 10 | |
| | | TTCACAGACCCTGTCCCTCACCTGCACTGTCTCTGGTGCTT | | | | | | | SQTLSLTCTVSGAS | | | | | | |
| | | CCATCAGCAGAAGTGGTTTCTACTGGAACTGGATCCGCCAG | | | | | | | ISRSGFYWNWIRQH | | | | | | |
| | | CACCCAGGGAAGGGCCTGGAGTGGATTGGGAACATCTATAA | | | | | | | PGKGLEWIGNIYNS | | | | | | |
| | | TAGTGGGAGCACCTACTACAACCCGTCCCTCAAGAGTCGAC | | | | | | | GSTYYNPSLKSRLT | | | | | | |
| | | TTACCATTTCAGTCGACACGTCTAAGAACCAGTTCTCCCTG | | | | | | | ISVDTSKNQFSLKL | | | | | | |
| | | AAGCTGAACTCTGTGACTGCCGCGGACACGGCCGTGTATTA | | | | | | | NSVTAADTAVYYCA | | | | | | |
| | | CTGTGCGAGAGACTACGGTGGTAACGCCCAATACTTTCACT | | | | | | | RDYGGNAQYFHYWG | | | | | | |
| | | ACTGGGGCCAGGGAACCCTGGTCACCGTCTCCTCA | | | | | | | QGTLVTVSS | | | | | | |
| ADI-81618 | 1291 | CCAGGTGCAGCTGGCGGAGTCGGCCCAGGACTGGTGAAGAC | | | | | | 6937 | PGAAGGVGPGLVKT | | 7289 | 11 | | 11 | |
| | | TTCACAGACCCTGTCCCTCACCTGCACTGTCTCTGGTGGCT | | | | | | | SQTLSLTCTVSGGS | | | | | | |
| | | CCCTCAGCAGTGGTGGTTACTACTGGAACTGGATCCGCCAG | | | | | | | LSSGGYYWNWIRQH | | | | | | |
| | | CACCCAGGGAAGGGCCTGGAGTGGATTGGGTACATCTCTTA | | | | | | | PGKGLEWIGYISYT | | | | | | |
| | | CACTGGGAGCACCGACTACAACCCGTCCCTCAAGAGTCCAG | | | | | | | GSTDYNPSLKSPVT | | | | | | |
| | | TTACCATGTCCGTAGACACGTCTAAGAGCCAGTTCTCCCTT | | | | | | | MSVDTSKSQFSLRL | | | | | | |
| | | AGGCTGAGCTCTGTGACTGCCGCGGACTCGGCCGTGTATTA | | | | | | | SSVTAADSAVYYCA | | | | | | |
| | | CTGTGCGAGAGCCTCAATGACTCCGGTGACTCAGGCAGGTC | | | | | | | RASMTPVTQAGPLG | | | | | | |
| | | CCTTAGGCTACTACTACATGGACGTCTGGGGCAAAGGGACC | | | | | | | YYYMDVWGKGTTVT | | | | | | |
| | | ACGGTCACCGTCTCCTCA | | | | | | | VSS | | | | | | |
| ADI-81901 | 1286 | GAGGTGCAGCTGGTGGAGTCTGGGGGAGGCTTGGTCCAGCC | | | | | | 6938 | EVQLVESGGGLVQP | | 7290 | 11 | | 10 | |
| | | TGGGGGGTCCCTGAGACTCTCCTGTTCAGCCTCTGGATTCA | | | | | | | GGSLRLSCSASGFS | | | | | | |
| | | GCTTCAGTACCTATTCTATGCACTGGGTCCGCCAGGCTCCA | | | | | | | FSTYSMHWVRQAPG | | | | | | |
| | | GGGAAGGGACTGGAATATGTTTCAGATATAAGTGGTGATGG | | | | | | | KGLEYVSDISGDGL | | | | | | |
| | | CCTTATCACATACTACGCAGACTCCGTGAAGGGCAGATTCA | | | | | | | ITYYADSVKGRFTI | | | | | | |
| | | CCATCACCAGAGACAATTCCAAGAATACGCTCTATCTTCAC | | | | | | | TRDNSKNTLYLHMS | | | | | | |
| | | ATGAGCAGTCTGAGAGCTGAGGACACGGCTGTCTATTACTG | | | | | | | SLRAEDTAVYYCVR | | | | | | |
| | | TGTGAGAGATGTGAGTGTGGATACATCTATGGTTACAGTAT | | | | | | | DVSVDTSMVTVFEY | | | | | | |
| | | TTGAATACTGGGGCCAGGGAACCCTGGTCACCGTCTCCTCA | | | | | | | WGQGTLVTVSS | | | | | | |
| ADI-81532 | 1291 | TGGGGGGTCCCTGAGACTCTCCTGTGCAGCCTCTGGATTCA | | | | | | 6939 | QVQLVQSGGGLAQP | | 7291 | 10 | | 8 | |
| | | TCTTCAGTAGTTACGACATGCACTGGGTCCGCCAAGTCACA | | | | | | | GGSLRLSCAASGFI | | | | | | |
| | | GGAAAAGGTCTGGAATGGGTCGCAGCTATTGGTACTGCTGG | | | | | | | FSSYDMHWVRQVTG | | | | | | |
| | | TGACACATACTATGAAGACTCCGTGAAGGGCCGGTTCACCA | | | | | | | KGLEWVAAIGTAGD | | | | | | |
| | | TCTCCAGAGAGAATGCCAAGAACTCCGTGTATCTTCAAATG | | | | | | | TYYEDSVKGRFTIS | | | | | | |
| | | AACAGCCTGAGAGCCGGGGACACGGCTATGTATTACTGTGC | | | | | | | RENAKNSVYLQMNS | | | | | | |
| | | AAGAGGTGATCAACCTATTACGATTTCTGGAGTGGTTGAAA | | | | | | | LRAGDTAMYYCARG | | | | | | |
| | | CCTACTACATGGACGTGTGGGGCAAAGGGACCACGGTCACC | | | | | | | DQPITISGVVETYY | | | | | | |
| | | GTCTCCTCA | | | | | | | MDVWGKGTTVTVSS | | | | | | |
| ADI-81537 | 1291 | TGGGGGGTCCCTGAGACTCTCCTGTGCAGCCTCTGGATTCA | | | | | | 6940 | QVQLVQSGGGLAQP | | 7291 | 10 | | 8 | |
| | | TCTTCAGTAGTTACGACATGCACTGGGTCCGCCAAGTCACA | | | | | | | GGSLRLSCAASGFI | | | | | | |
| | | GGAAAAGGTCTGGAATGGGTCGCAGCTATTGGTACTGCTGG | | | | | | | FSSYDMHWVRQVTG | | | | | | |
| | | TGACACATACTATGAAGACTCCGTGAAGGGCCGGTTCACCA | | | | | | | KGLEWVAAIGTAGD | | | | | | |
| | | TCTCCAGAGAGAATGCCAAGAACTCCGTGTATCTTCAAATG | | | | | | | TYYEDSVKGRFTIS | | | | | | |
| | | AACAGCCTGAGAGCCGGGGACACGGCTATGTATTACTGTGC | | | | | | | RENAKNSVYLQMNS | | | | | | |
| | | AAGAGGTGATCAACCTATTACGATTTCTGGAGTGGTTGAAA | | | | | | | LRAGDTAMYYCARG | | | | | | |
| | | CCTACTACATGGACGTGTGGGGCAAAGGGACCACGGTCACC | | | | | | | DQPITISGVVETYY | | | | | | |
| | | GTCTCCTCA | | | | | | | MDVWGKGTTVTVSS | | | | | | |
| | VH | VH | | SEQ | | SEQ | | SEQ | | SEQ | | SEQ | | SEQ | |
| | CDR3 | Germ- | VH | ID | VH | ID | VH | ID | VH | ID | VH | ID | VH | ID | VH |
| Clone ID | Lineage | line | FR1 | NO: | CDR1 | NO: | FR2 | NO: | CDR2 | NO: | FR3 | NO: | CDR3 | NO: | FR4 |
| ADI-81565 | 27 | IGHV1- | QVQLV | 50 | GTFSSQ | 5598 | WVRQAP | 433 | KIFPIL | 5963 | RVTITA | 6274 | ARESGYS | 6579 | WGRGTL |
| | | 69 | QSGAE | | TIS | | GQGLEW | | GVTNYA | | DKSTST | | ASGSVIY | | VTVSS |
| | | | VKKPG | | | | MG | | ERFQG | | AYMELS | | FDL | | |
| | | | SSVKV | | | | | | | | GLRSED | | | | |
| | | | SCKAS | | | | | | | | TAEYYC | | | | |
| | | | G | | | | | | | | | | | | |
| ADI-81811 | 85 | IGHV3- | EVQLL | 5392 | FNFRSY | 5599 | WVRQAP | 431 | AISHDG | 5964 | RFTISR | 6275 | AKDAVGG | 6580 | WGQGTL |
| | | 30 | ESGGG | | GMH | | GKGLEW | | TNPYYA | | DNSKDT | | YCRGGSC | | VTVSS |
| | | | VVQPG | | | | VA | | DSVKG | | LYLQMN | | YDFDYFD | | |
| | | | RSLRL | | | | | | | | SLRAED | | Y | | |
| | | | SCAVS | | | | | | | | TAVYHC | | | | |
| | | | G | | | | | | | | | | | | |
| ADI-81883 | 59 | IGHV3- | EVQLL | 5393 | FTFSTY | 228 | WVRQAP | 443 | DISGDG | 5961 | RFTITR | 6276 | VRDVSVD | 6577 | WGQGTL |
| | | 64D | ESGGG | | SMH | | GKGLEY | | LITYYA | | DNSKNT | | TSMVTVF | | VTVSS |
| | | | LVQPG | | | | VS | | DSVKG | | LYLQMS | | EY | | |
| | | | GSLRL | | | | | | | | SLRAED | | | | |
| | | | SCSAS | | | | | | | | TAVYYC | | | | |
| | | | G | | | | | | | | | | | | |
| ADI-81686 | 56 | IGHV4- | QVQLQ | 5394 | GSFSGK | 5600 | WIRQPA | 5814 | EINDSG | 5965 | RVTISV | 6277 | ARERVIL | 6581 | WGKGTT |
| | | 34 | QWGTG | | YWS | | GKGLEW | | TTNYNP | | DTSKNQ | | LSGTSLH | | VTVSS |
| | | | LLKPS | | | | IG | | SLKS | | FSLKLR | | YNYYMDV | | |
| | | | ETLSL | | | | | | | | SVTAAD | | | | |
| | | | TCAVY | | | | | | | | TADYYC | | | | |
| | | | G | | | | | | | | | | | | |
| ADI-81825 | 5 | IGHV3- | EVQLL | 5395 | FTFSNA | 5601 | WVRQAP | 432 | RIKSNF | 5966 | RFSISR | 6278 | TTDVVDD | 6582 | WGQGTR |
| | | 15 | ESGGG | | WMN | | GKGLEW | | DGGTTD | | DDSKNT | | DFRSGYI | | VTVSS |
| | | | LVKPG | | | | VG | | YAAPVK | | LYLQMN | | EHDAFDF | | |
| | | | GSLRL | | | | | | G | | SLNTED | | | | |
| | | | SCAAT | | | | | | | | TAVYYC | | | | |
| | | | G | | | | | | | | | | | | |
| ADI-81748 | 24 | IGHV4- | QVQLL | 5396 | VSISDY | 5602 | WIRQPP | 445 | YISYSG | 5967 | RVTISV | 6279 | ARELPTG | 6583 | WGQGTL |
| | | 59 | ESGPG | | YWS | | GKGLEW | | STDYNP | | DTSKNQ | | NSYEYYF | | VTVSS |
| | | | LVKPS | | | | IG | | SLKS | | VSLKLT | | DY | | |
| | | | ETLSL | | | | | | | | SVTAAD | | | | |
| | | | TCTVS | | | | | | | | TAVYYC | | | | |
| | | | G | | | | | | | | | | | | |
| ADI-81840 | 18 | IGHV3- | QVQLL | 74 | FTFSSY | 5603 | WVRQAP | 437 | SVSGSG | 5968 | RFTISR | 6280 | GKAIIGS | 6584 | WGQGTL |
| | | 23 | ESGGG | | AMS | | GKGLEW | | ANTYYA | | DNSKNT | | NGVGEY | | VTVSS |
| | | | LVQPG | | | | VS | | DSVKG | | VSLQMN | | | | |
| | | | GSLRL | | | | | | | | SLRAED | | | | |
| | | | SCAAS | | | | | | | | AAVYYC | | | | |
| | | | G | | | | | | | | | | | | |
| | SEQ | | | | | | | SEQ | | | SEQ | VH | | VH Amino | |
| | ID | | | | | | | ID | | | ID | Nucleotide | | Acid | |
| Clone ID | NO: | VH DNA | | | | | | NO: | VH Protein | | NO: | Substitution | | Substitution | |
| ADI-81565 | 1288 | TGGGTCCTCGGTGAAGGTCTCCTGCAAGGCTTCTGGAGGCA | | | | | | 6941 | QVQLVQSGAEVKKP | | 7292 | 10 | | 9 | |
| | | CCTTCAGCAGTCAAACAATCAGTTGGGTGCGACAGGCCCCT | | | | | | | GSSVKVSCKASGGT | | | | | | |
| | | GGACAAGGGCTTGAGTGGATGGGAAAGATCTTCCCTATCCT | | | | | | | FSSQTISWVRQAPG | | | | | | |
| | | TGGTGTAACAAACTACGCAGAGAGGTTTCAGGGCAGAGTCA | | | | | | | QGLEWMGKIFPILG | | | | | | |
| | | CGATTACCGCGGACAAGTCGACCAGCACAGCCTACATGGAG | | | | | | | VTNYAERFQGRVTI | | | | | | |
| | | CTGAGCGGCCTGAGATCTGAGGACACGGCCGAGTATTACTG | | | | | | | TADKSTSTAYMELS | | | | | | |
| | | TGCGAGAGAGTCGGGTTACTCTGCTTCGGGGAGTGTTATCT | | | | | | | GLRSEDTAEYYCAR | | | | | | |
| | | ACTTCGATCTCTGGGGCCGTGGCACCCTGGTCACCGTCTCC | | | | | | | ESGYSASGSVIYFD | | | | | | |
| | | TCA | | | | | | | LWGRGTLVTVSS | | | | | | |
| ADI-81811 | 1286 | GAGGTGCAGCTGTTGGAGTCTGGGGGAGGCGTGGTCCAGCC | | | | | | 6942 | EVQLLESGGGVVQP | | 7293 | 10 | | 9 | |
| | | TGGGAGGTCCCTGAGACTCTCCTGTGCAGTCTCTGGATTCA | | | | | | | GRSLRLSCAVSGFN | | | | | | |
| | | ACTTCAGAAGTTATGGCATGCACTGGGTCCGCCAGGCTCCA | | | | | | | FRSYGMHWVRQAPG | | | | | | |
| | | GGCAAGGGGCTGGAGTGGGTGGCAGCTATATCACATGATGG | | | | | | | KGLEWVAAISHDGT | | | | | | |
| | | AACTAATCCATATTATGCAGACTCCGTGAAGGGGCGATTCA | | | | | | | NPYYADSVKGRFTI | | | | | | |
| | | CCATCTCCAGAGACAATTCCAAGGACACGCTGTATCTGCAA | | | | | | | SRDNSKDTLYLQMN | | | | | | |
| | | ATGAACAGCCTGAGAGCGGAGGACACGGCTGTGTATCACTG | | | | | | | SLRAEDTAVYHCAK | | | | | | |
| | | TGCGAAAGATGCCGTTGGGGGATATTGTAGGGGTGGTAGTT | | | | | | | DAVGGYCRGGSCYD | | | | | | |
| | | GTTATGACTTTGACTACTTTGACTACTGGGGCCAGGGAACC | | | | | | | FDYFDYWGQGTLVT | | | | | | |
| | | CTGGTCACCGTCTCCTCA | | | | | | | VSS | | | | | | |
| ADI-81883 | 1286 | GAGGTGCAGCTGTTGGAGTCTGGGGGAGGCTTGGTCCAGCC | | | | | | 6943 | EVQLLESGGGLVQP | | 7294 | 9 | | 8 | |
| | | TGGGGGATCCCTGAGACTCTCCTGTTCAGCCTCTGGATTCA | | | | | | | GGSLRLSCSASGFT | | | | | | |
| | | CCTTCAGTACCTATTCTATGCACTGGGTCCGCCAGGCTCCA | | | | | | | FSTYSMHWVRQAPG | | | | | | |
| | | GGGAAGGGACTGGAATATGTTTCAGATATAAGTGGTGATGG | | | | | | | KGLEYVSDISGDGL | | | | | | |
| | | GCTTATCACATACTACGCAGACTCCGTGAAGGGCAGATTCA | | | | | | | ITYYADSVKGRFTI | | | | | | |
| | | CCATCACCAGAGACAATTCCAAGAATACGCTCTATCTTCAA | | | | | | | TRDNSKNTLYLQMS | | | | | | |
| | | ATGAGCAGTCTGAGAGCTGAGGACACGGCTGTCTATTACTG | | | | | | | SLRAEDTAVYYCVR | | | | | | |
| | | TGTGAGAGATGTGAGTGTGGATACATCTATGGTTACAGTAT | | | | | | | DVSVDTSMVTVFEY | | | | | | |
| | | TTGAATACTGGGGCCAGGGAACCCTGGTCACCGTCTCCTCA | | | | | | | WGQGTLVTVSS | | | | | | |
| ADI-81686 | 1291 | CAGGTGCAGCTACAGCAGTGGGGCACAGGACTGTTGAAGCC | | | | | | 6944 | QVQLQQWGTGLLKP | | 7295 | 8 | | 6 | |
| | | TTCGGAGACCCTGTCCCTCACCTGCGCTGTCTATGGTGGGT | | | | | | | SETLSLTCAVYGGS | | | | | | |
| | | CCTTCAGTGGTAAGTACTGGAGCTGGATCCGCCAGCCCGCA | | | | | | | FSGKYWSWIRQPAG | | | | | | |
| | | GGGAAGGGGCTGGAATGGATTGGAGAAATCAATGATAGTGG | | | | | | | KGLEWIGEINDSGT | | | | | | |
| | | AACCACCAACTACAACCCGTCCCTCAAGAGTCGAGTCACCA | | | | | | | TNYNPSLKSRVTIS | | | | | | |
| | | TATCAGTAGACACGTCCAAGAACCAGTTCTCCCTGAAACTG | | | | | | | VDTSKNQFSLKLRS | | | | | | |
| | | AGGTCTGTGACCGCCGCGGACACGGCTGACTATTATTGTGC | | | | | | | VTAADTADYYCARE | | | | | | |
| | | GAGAGAACGGGTTATCCTACTAAGTGGAACGTCTCTCCACT | | | | | | | RVILLSGTSLHYNY | | | | | | |
| | | ACAACTACTACATGGACGTCTGGGGCAAAGGGACCACGGTC | | | | | | | YMDVWGKGTTVTVS | | | | | | |
| | | ACCGTCTCCTCA | | | | | | | S | | | | | | |
| ADI-81825 | 6812 | GAGGTGCAGCTGTTGGAGTCTGGGGGAGGCCTGGTAAAGCC | | | | | | 6945 | EVQLLESGGGLVKP | | 7296 | 8 | | 6 | |
| | | TGGGGGGTCCCTCAGACTCTCCTGTGCAGCCACTGGATTCA | | | | | | | GGSLRLSCAATGFT | | | | | | |
| | | CTTTCAGTAATGCCTGGATGAATTGGGTCCGCCAGGCTCCA | | | | | | | FSNAWMNWVRQAPG | | | | | | |
| | | GGGAAGGGGCTGGAGTGGGTTGGCCGTATTAAAAGCAATTT | | | | | | | KGLEWVGRIKSNFD | | | | | | |
| | | TGACGGTGGGACAACAGACTACGCTGCACCCGTGAAAGGCA | | | | | | | GGTTDYAAPVKGRF | | | | | | |
| | | GATTCAGCATCTCAAGAGATGATTCAAAAAACACGCTGTAT | | | | | | | SISRDDSKNTLYLQ | | | | | | |
| | | CTGCAAATGAACAGTCTGAACACCGAGGACACAGCCGTCTA | | | | | | | MNSLNTEDTAVYYC | | | | | | |
| | | TTATTGTACCACAGATGTAGTGGATGACGATTTTCGGAGTG | | | | | | | TTDVVDDDFRSGYI | | | | | | |
| | | GCTACATAGAGCATGATGCTTTTGATTTCTGGGGCCAAGGG | | | | | | | EHDAFDFWGQGTRV | | | | | | |
| | | ACAAGGGTCACCGTCTCCTCA | | | | | | | TVSS | | | | | | |
| ADI-81748 | 1286 | CAGGTGCAGCTGTTGGAGTCGGGCCCAGGACTGGTGAAGCC | | | | | | 6946 | QVQLLESGPGLVKP | | 7297 | 7 | | 6 | |
| | | TTCGGAGACACTGTCCCTCACCTGCACTGTCTCAGGTGTCT | | | | | | | SETLSLTCTVSGVS | | | | | | |
| | | CCATCAGTGATTACTACTGGAGCTGGATCCGACAGCCCCCA | | | | | | | ISDYYWSWIRQPPG | | | | | | |
| | | GGGAAGGGACTGGAGTGGATTGGGTATATCTCTTACAGTGG | | | | | | | KGLEWIGYISYSGS | | | | | | |
| | | GAGCACCGACTACAACCCCTCCCTCAAGAGTCGAGTCACCA | | | | | | | TDYNPSLKSRVTIS | | | | | | |
| | | TATCAGTGGACACGTCCAAGAACCAGGTCTCCCTGAAACTG | | | | | | | VDTSKNQVSLKLTS | | | | | | |
| | | ACCTCTGTGACCGCTGCGGACACGGCCGTGTATTACTGTGC | | | | | | | VTAADTAVYYCARE | | | | | | |
| | | GAGAGAATTGCCTACTGGAAATAGTTATGAGTACTACTTTG | | | | | | | LPTGNSYEYYFDYW | | | | | | |
| | | ACTACTGGGGCCAGGGAACCCTGGTCACCGTCTCCTCA | | | | | | | GQGTLVTVSS | | | | | | |
| ADI-81840 | 1286 | CAGGTGCAGCTGTTGGAGTCTGGGGGAGGCTTGGTACAGCC | | | | | | 6947 | QVQLLESGGGLVQP | | 7298 | 7 | | 7 | |
| | | GGGGGGGTCCCTGAGACTCTCCTGTGCAGCCTCTGGATTCA | | | | | | | GGSLRLSCAASGFT | | | | | | |
| | | CCTTTAGCAGTTATGCCATGAGCTGGGTCCGCCAGGCTCCA | | | | | | | FSSYAMSWVRQAPG | | | | | | |
| | | GGGAAGGGGCTGGAGTGGGTCTCTTCTGTTAGTGGTAGTGG | | | | | | | KGLEWVSSVSGSGA | | | | | | |
| | | TGCTAACACATATTACGCAGACTCCGTGAAGGGCCGGTTCA | | | | | | | NTYYADSVKGRFTI | | | | | | |
| | | CCATCTCCAGAGACAATTCCAAGAACACGGTGTCTCTGCAA | | | | | | | SRDNSKNTVSLQMN | | | | | | |
| | | ATGAACAGCCTGAGAGCCGAGGACGCGGCCGTATATTACTG | | | | | | | SLRAEDAAVYYCGK | | | | | | |
| | | TGGGAAAGCCATAATCGGAAGTAACGGGGTGGGAGAGTACT | | | | | | | AIIGSNGVGEYWGQ | | | | | | |
| | | GGGGCCAGGGAACCCTGGTCACCGTCTCCTCA | | | | | | | GTLVTVSS | | | | | | |
| | VH | VH | | SEQ | | SEQ | | SEQ | | SEQ | | SEQ | | SEQ | |
| | CDR3 | Germ- | VH | ID | VH | ID | VH | ID | VH | ID | VH | ID | VH | ID | VH |
| Clone ID | Lineage | line | FR1 | NO: | CDR1 | NO: | FR2 | NO: | CDR2 | NO: | FR3 | NO: | CDR3 | NO: | FR4 |
| ADI-81692 | 62 | IGHV5- | EVQLV | 5397 | YSFTNY | 5604 | WVRQMP | 476 | VIYPGD | 5969 | QVTFSA | 6281 | ARQTGIV | 6585 | WGKGTT |
| | | 51 | QSGAE | | WIG | | GKGLEW | | SDTRYS | | DKSIST | | GASRYQY | | VTVSS |
| | | | VKKPG | | | | MG | | PSFQG | | AYLQWS | | YYYMDV | | |
| | | | ESLKI | | | | | | | | SLKASD | | | | |
| | | | SCKGS | | | | | | | | TAIYYC | | | | |
| | | | G | | | | | | | | | | | | |
| ADI-81730 | 7 | IGHV3- | EVQLL | 5355 | FTFSSY | 307 | WVRQAP | 437 | YISSSG | 5970 | RFTISR | 854 | ARAPRTN | 6586 | WGQGTL |
| | | 48 | ESGGG | | EMN | | GKGLEW | | STIYYA | | DNAKNS | | WNDVWGT | | VTVSS |
| | | | LVQPG | | | | VS | | DSVKG | | LYLQMN | | FDY | | |
| | | | GSLRL | | | | | | | | SLRAED | | | | |
| | | | SCAAS | | | | | | | | TAVYYC | | | | |
| | | | G | | | | | | | | | | | | |
| ADI-81889 | 65 | IGHV1- | QVQLV | 5398 | NTFTNN | 5605 | WVRQVP | 5815 | IINPVG | 5971 | RVTLTS | 6282 | ARGRIPP | 6587 | WGQGTL |
| | | 46 | QSGAE | | YIQ | | GQGVEW | | GSRTYA | | DTSTRT | | DSDGYFD | | VTVSS |
| | | | VKKHG | | | | MG | | QEFQG | | LYMEMS | | F | | |
| | | | ASVKV | | | | | | | | SLTSED | | | | |
| | | | SCKAS | | | | | | | | TAIYFC | | | | |
| | | | G | | | | | | | | | | | | |
| ADI-81608 | 32 | IGHV4- | QVQLV | 5399 | GSIRSV | 5606 | WIRQHP | 450 | YIYHNG | 5972 | RVTMSL | 6283 | ARLGPSF | 6588 | WDQGTP |
| | | 31 | QSGPG | | YYYWT | | GKGLEW | | TTYSNP | | DTSKNQ | | YDRSGSS | | VTVSS |
| | | | LVKPS | | | | IG | | SLRS | | FSLKVR | | RLNYFDS | | |
| | | | QTLSL | | | | | | | | SVTAAD | | | | |
| | | | TCTVS | | | | | | | | TAVYFC | | | | |
| | | | G | | | | | | | | | | | | |
| ADI-81616 | 73 | IGHV3- | RCTLV | 5400 | FTFSSY | 5607 | WVRQAP | 437 | SISGSG | 5973 | RFTISR | 6284 | ARFGGSD | 6589 | WGQGTL |
| | | 23 | QSGGD | | VMT | | GKGLEW | | GARYSA | | DNSNNT | | YRGGWSS | | VTVSS |
| | | | LVQPG | | | | VS | | DSLEG | | LYLEMT | | Y | | |
| | | | GSLRL | | | | | | | | SLRDED | | | | |
| | | | SCEAS | | | | | | | | TAVYYC | | | | |
| | | | G | | | | | | | | | | | | |
| ADI-81734 | 11 | IGHV3- | EVQLV | 5401 | FTFTSD | 5608 | WVRQVI | 5816 | GIGTSG | 5974 | RFIISR | 6285 | ARGVAAG | 6590 | WGKGTT |
| | | 13 | ESGGG | | DMH | | GKGLEW | | DRYYAD | | EDARNS | | NYNLYYY | | VTVSS |
| | | | LVQSG | | | | VS | | SVKG | | LYLQMN | | MDV | | |
| | | | GSLRL | | | | | | | | SLRAGD | | | | |
| | | | SCAAS | | | | | | | | TAIYYC | | | | |
| | | | G | | | | | | | | | | | | |
| ADI-81767 | 43 | IGHV1- | EVQLV | 5402 | GPFSKY | 5609 | WVRQAP | 5817 | RIILVL | 5975 | RVTMTA | 6286 | ATKDAPT | 6591 | WGQGTL |
| | | 69 | ESGAE | | AMN | | GQRPEW | | GITNYA | | DKSTNT | | VNSNGGL | | VTVSS |
| | | | VKKPG | | | | LG | | QKFQG | | AYMELG | | DF | | |
| | | | SSVKV | | | | | | | | SLTSDD | | | | |
| | | | SCKAS | | | | | | | | TAVYYC | | | | |
| | | | G | | | | | | | | | | | | |
| ADI-81688 | 58 | IGHV1- | EVQLL | 5403 | YSFTTY | 5610 | WVRQAP | 5818 | LITPSD | 5976 | RVTMTR | 6287 | ARGDWNK | 6592 | WGKGTT |
| | | 46 | ESGDE | | YIH | | GPGLEW | | GGASYA | | DTSTST | | ISYYYMD | | VTVSS |
| | | | VKKPW | | | | MG | | QKFQG | | VYMEMS | | V | | |
| | | | ASVTV | | | | | | | | SLTIED | | | | |
| | | | SCKAS | | | | | | | | TAVYYC | | | | |
| | | | G | | | | | | | | | | | | |
| | SEQ | | | | | | | SEQ | | | SEQ | VH | | VH Amino | |
| | ID | | | | | | | ID | | | ID | Nucleotide | | Acid | |
| Clone ID | NO: | VH DNA | | | | | | NO: | VH Protein | | NO: | Substitution | | Substitution | |
| ADI-81692 | 1291 | GAGGTGCAGCTGGTGCAGTCTGGAGCAGAGGTGAAGAAGCC | | | | | | 6948 | EVQLVQSGAEVKKP | | 7299 | 4 | | 4 | |
| | | CGGGGAGTCTCTGAAGATCTCCTGTAAGGGTTCTGGATACA | | | | | | | GESLKISCKGSGYS | | | | | | |
| | | GCTTTACCAACTACTGGATCGGCTGGGTGCGCCAGATGCCC | | | | | | | FTNYWIGWVRQMPG | | | | | | |
| | | GGGAAAGGCCTGGAGTGGATGGGTGTCATCTATCCTGGTGA | | | | | | | KGLEWMGVIYPGDS | | | | | | |
| | | CTCTGATACCAGATATAGCCCGTCCTTCCAAGGTCAGGTCA | | | | | | | DTRYSPSFQGQVTF | | | | | | |
| | | CCTTCTCAGCCGACAAGTCCATCAGCACCGCCTACCTGCAG | | | | | | | SADKSISTAYLQWS | | | | | | |
| | | TGGAGCAGCCTGAAGGCCTCGGACACCGCCATATATTATTG | | | | | | | SLKASDTAIYYCAR | | | | | | |
| | | TGCGAGACAGACAGGTATAGTGGGAGCCTCGCGATACCAGT | | | | | | | QTGIVGASRYQYYY | | | | | | |
| | | ACTACTACTACATGGACGTCTGGGGCAAAGGGACCACGGTC | | | | | | | YMDVWGKGTTVTVS | | | | | | |
| | | ACCGTCTCCTCA | | | | | | | S | | | | | | |
| ADI-81730 | 1286 | TGGAGGGTCCCTGAGACTCTCCTGTGCAGCCTCTGGATTCA | | | | | | 6949 | EVQLLESGGGLVQP | | 7300 | 0 | | 0 | |
| | | CCTTCAGTAGTTATGAAATGAACTGGGTCCGCCAGGCTCCA | | | | | | | GGSLRLSCAASGFT | | | | | | |
| | | GGGAAGGGGCTGGAGTGGGTTTCATACATTAGTAGTAGTGG | | | | | | | FSSYEMNWVRQAPG | | | | | | |
| | | TAGTACCATATACTACGCAGACTCTGTGAAGGGCCGATTCA | | | | | | | KGLEWVSYISSSGS | | | | | | |
| | | CCATCTCCAGAGACAACGCCAAGAACTCACTGTATCTGCAA | | | | | | | TIYYADSVKGRFTI | | | | | | |
| | | ATGAACAGCCTGAGAGCCGAGGACACGGCTGTTTATTACTG | | | | | | | SRDNAKNSLYLQMN | | | | | | |
| | | TGCGAGAGCCCCACGTACCAACTGGAACGACGTTTGGGGGA | | | | | | | SLRAEDTAVYYCAR | | | | | | |
| | | CATTTGACTACTGGGGCCAGGGAACCCTGGTCACCGTCTCC | | | | | | | APRTNWNDVWGTFD | | | | | | |
| | | TCA | | | | | | | YWGQGTLVTVSS | | | | | | |
| ADI-81889 | 1286 | CAGGTGCAGCTGGTGCAGTCTGGGGCTGAGGTGAAGAAGCA | | | | | | 6950 | QVQLVQSGAEVKKH | | 7301 | 25 | | 20 | |
| | | TGGGGCCTCAGTCAAGGTTTCCTGCAAGGCATCTGGAAACA | | | | | | | GASVKVSCKASGNT | | | | | | |
| | | CCTTCACCAACAACTATATACAGTGGGTGCGACAGGTCCCT | | | | | | | FTNNYIQWVRQVPG | | | | | | |
| | | GGACAAGGGGTTGAGTGGATGGGAATAATCAACCCTGTTGG | | | | | | | QGVEWMGIINPVGG | | | | | | |
| | | TGGTAGTAGAACTTACGCACAGGAGTTCCAGGGCAGAGTCA | | | | | | | SRTYAQEFQGRVTL | | | | | | |
| | | CCTTGACCAGTGACACGTCCACGAGAACATTGTACATGGAG | | | | | | | TSDTSTRTLYMEMS | | | | | | |
| | | ATGAGCAGCCTGACATCTGAGGACACGGCCATATATTTTTG | | | | | | | SLTSEDTAIYFCAR | | | | | | |
| | | TGCGAGAGGTCGAATCCCCCCCGATAGTGATGGTTATTTTG | | | | | | | GRIPPDSDGYFDFW | | | | | | |
| | | ACTTCTGGGGCCAGGGAACCCTGGTCACGGTCTCCTCA | | | | | | | GQGTLVTVSS | | | | | | |
| ADI-81608 | 6813 | CAGGTGCAGCTGGTGCAGTCTGGCCCAGGACTGGTGAAGCC | | | | | | 6951 | QVQLVQSGPGLVKP | | 7302 | 18 | | 15 | |
| | | TTCACAGACCCTGTCCCTCACCTGCACTGTCTCTGGTGGCT | | | | | | | SQTLSLTCTVSGGS | | | | | | |
| | | CCATCAGAAGTGTTTACTACTACTGGACCTGGATCCGCCAG | | | | | | | IRSVYYYWTWIRQH | | | | | | |
| | | CACCCAGGGAAGGGCCTAGAGTGGATTGGGTACATCTATCA | | | | | | | PGKGLEWIGYIYHN | | | | | | |
| | | CAATGGGACCACCTACTCCAATCCGTCCCTCAGGAGCCGAG | | | | | | | GTTYSNPSLRSRVT | | | | | | |
| | | TTACCATGTCACTGGACACGTCTAAGAACCAGTTTTCCCTG | | | | | | | MSLDTSKNQFSLKV | | | | | | |
| | | AAGGTGAGGTCTGTGACTGCCGCGGACACGGCCGTGTATTT | | | | | | | RSVTAADTAVYFCA | | | | | | |
| | | CTGTGCGAGACTTGGACCGTCTTTCTATGATAGGAGTGGTT | | | | | | | RLGPSFYDRSGSSR | | | | | | |
| | | CCTCACGTCTCAACTACTTTGACTCGTGGGACCAGGGGACC | | | | | | | LNYFDSWDQGTPVT | | | | | | |
| | | CCGGTCACCGTCTCCTCA | | | | | | | VSS | | | | | | |
| ADI-81616 | 1286 | AGGTGCACGCTGGTGCAATCTGGGGGAGACTTGGTGCAGCC | | | | | | 6952 | RCTLVQSGGDLVQP | | 7303 | 18 | | 14 | |
| | | GGGGGGGTCCCTGAGACTCTCCTGTGAAGCCTCTGGATTCA | | | | | | | GGSLRLSCEASGFT | | | | | | |
| | | CATTTAGCAGCTATGTCATGACGTGGGTCCGCCAGGCTCCA | | | | | | | FSSYVMTWVRQAPG | | | | | | |
| | | GGGAAGGGGCTGGAGTGGGTCTCAAGTATCAGTGGTAGTGG | | | | | | | KGLEWVSSISGSGG | | | | | | |
| | | TGGTGCCAGATACTCCGCAGACTCCTTGGAGGGCCGGTTCA | | | | | | | ARYSADSLEGRFTI | | | | | | |
| | | CCATCTCCAGAGACAACTCGAACAACACTCTGTATTTGGAA | | | | | | | SRDNSNNTLYLEMT | | | | | | |
| | | ATGACTAGCCTGAGAGACGAGGACACGGCCGTATACTACTG | | | | | | | SLRDEDTAVYYCAR | | | | | | |
| | | TGCCAGATTTGGAGGGTCCGATTACCGCGGTGGCTGGTCTA | | | | | | | FGGSDYRGGWSSYW | | | | | | |
| | | GTTATTGGGGCCAGGGAACCCTGGTCACTGTCTCCTCA | | | | | | | GQGTLVTVSS | | | | | | |
| ADI-81734 | 1291 | GAGGTGCAGCTGGTGGAGTCTGGGGGAGGCTTGGTTCAGTC | | | | | | 6953 | EVQLVESGGGLVQS | | 7304 | 18 | | 14 | |
| | | GGGGGGGTCCCTGAGACTCTCCTGTGCAGCCTCTGGATTCA | | | | | | | GGSLRLSCAASGFT | | | | | | |
| | | CCTTCACTAGCGACGACATGCACTGGGTCCGCCAAGTAATA | | | | | | | FTSDDMHWVRQVIG | | | | | | |
| | | GGAAAAGGTCTGGAGTGGGTCTCGGGGATTGGCACTTCTGG | | | | | | | KGLEWVSGIGTSGD | | | | | | |
| | | TGATAGATACTATGCAGACTCCGTGAAGGGCCGCTTCATCA | | | | | | | RYYADSVKGRFIIS | | | | | | |
| | | TCTCTAGAGAAGATGCCAGGAACTCCTTGTATCTTCAAATG | | | | | | | REDARNSLYLQMNS | | | | | | |
| | | AACAGCCTGAGAGCCGGGGACACGGCTATATATTATTGTGC | | | | | | | LRAGDTAIYYCARG | | | | | | |
| | | AAGAGGGGTAGCTGCCGGCAATTATAACCTCTACTACTACA | | | | | | | VAAGNYNLYYYMDV | | | | | | |
| | | TGGACGTCTGGGGCAAAGGGACCACGGTCACCGTCTCCTCA | | | | | | | WGKGTTVTVSS | | | | | | |
| ADI-81767 | 1286 | GAGGTGCAGCTGGTGGAGTCTGGGGCTGAGGTGAAGAAGCC | | | | | | 6954 | EVQLVESGAEVKKP | | 7305 | 18 | | 15 | |
| | | TGGGTCTTCGGTGAAGGTCTCCTGCAAGGCTTCTGGAGGCC | | | | | | | GSSVKVSCKASGGP | | | | | | |
| | | CCTTCAGTAAATATGCTATGAACTGGGTGCGACAGGCCCCT | | | | | | | FSKYAMNWVRQAPG | | | | | | |
| | | GGACAACGACCTGAGTGGCTGGGAAGGATCATTCTTGTCCT | | | | | | | QRPEWLGRIILVLG | | | | | | |
| | | TGGTATCACAAACTACGCACAGAAGTTCCAGGGCAGAGTCA | | | | | | | ITNYAQKFQGRVTM | | | | | | |
| | | CAATGACCGCGGACAAATCCACGAATACAGCCTACATGGAG | | | | | | | TADKSTNTAYMELG | | | | | | |
| | | CTGGGCAGCCTGACATCTGACGACACGGCCGTGTATTACTG | | | | | | | SLTSDDTAVYYCAT | | | | | | |
| | | TGCGACCAAGGATGCCCCCACTGTAAATAGTAACGGTGGTC | | | | | | | KDAPTVNSNGGLDF | | | | | | |
| | | TGGACTTCTGGGGCCAGGGAACCCTGGTCACCGTCTCCTCA | | | | | | | WGQGTLVTVSS | | | | | | |
| ADI-81688 | 1291 | GAGGTGCAGCTGCTGGAGTCTGGGGATGAGGTGAAGAAGCC | | | | | | 6955 | EVQLLESGDEVKKP | | 7306 | 16 | | 14 | |
| | | GTGGGCCTCAGTGACGGTTTCCTGCAAGGCATCTGGATACA | | | | | | | WASVTVSCKASGYS | | | | | | |
| | | GCTTCACCACTTACTATATACACTGGGTGCGACAGGCCCCT | | | | | | | FTTYYIHWVRQAPG | | | | | | |
| | | GGACCAGGGCTTGAATGGATGGGACTAATCACCCCTAGTGA | | | | | | | PGLEWMGLITPSDG | | | | | | |
| | | TGGCGGCGCAAGCTACGCACAGAAGTTCCAGGGCAGAGTCA | | | | | | | GASYAQKFQGRVTM | | | | | | |
| | | CCATGACCAGAGACACGTCCACGAGTACAGTCTACATGGAG | | | | | | | TRDTSTSTVYMEMS | | | | | | |
| | | ATGAGCAGCCTGACAATTGAGGACACGGCCGTATATTATTG | | | | | | | SLTIEDTAVYYCAR | | | | | | |
| | | TGCGAGAGGGGACTGGAACAAAATAAGCTACTACTACATGG | | | | | | | GDWNKISYYYMDVW | | | | | | |
| | | ACGTCTGGGGCAAAGGGACCACGGTCACCGTCTCCTCA | | | | | | | GKGTTVTVSS | | | | | | |
| | VH | VH | | SEQ | | SEQ | | SEQ | | SEQ | | SEQ | | SEQ | |
| | CDR3 | Germ- | VH | ID | VH | ID | VH | ID | VH | ID | VH | ID | VH | ID | VH |
| Clone ID | Lineage | line | FR1 | NO: | CDR1 | NO: | FR2 | NO: | CDR2 | NO: | FR3 | NO: | CDR3 | NO: | FR4 |
| ADI-81697 | 67 | IGHV4- | RGAAA | 5404 | ASISSS | 5611 | WVRQPP | 444 | EIYHVG | 5977 | RVTISI | 6288 | ARVVLSD | 6593 | WGQGTL |
| | | 4 | GVGPR | | NWWS | | GKGLEW | | STNYNP | | DKSNNQ | | FKEAAS | | VTVSS |
| | | | TGEAS | | | | IG | | SLKS | | FSLKLN | | | | |
| | | | GTLSL | | | | | | | | SVTAAD | | | | |
| | | | TCAVS | | | | | | | | TAVYYC | | | | |
| | | | G | | | | | | | | | | | | |
| ADI-81549 | 16 | IGHV3- | QVQLV | 5405 | FSFSLF | 5612 | WVRQAP | 437 | SITGSA | 5978 | RFTISR | 6289 | AKGMDGA | 6594 | WGQGTL |
| | | 23 | QSGGG | | AMN | | GKGLEW | | DTTYYA | | DNSKNT | | PGFYFDY | | VTVSS |
| | | | LVQPG | | | | VS | | DSVKG | | LYLQMN | | | | |
| | | | GSLRL | | | | | | | | SLSAED | | | | |
| | | | SCTAS | | | | | | | | TAVYYC | | | | |
| | | | G | | | | | | | | | | | | |
| ADI-81562 | 28 | IGHV3- | QVQLV | 24 | LTVSSN | 5613 | WLRQAP | 5819 | VMFSGG | 5979 | RFTISR | 6290 | ARDLPPY | 6595 | WGQGTT |
| | | 53 | ESGGG | | YMT | | GKGLEW | | STFYAD | | HNSNNT | | GMDV | | VTVSS |
| | | | LVQPG | | | | VS | | SVKG | | LYLQMS | | | | |
| | | | GSLRL | | | | | | | | SLGPED | | | | |
| | | | SCAAS | | | | | | | | TATYYC | | | | |
| | | | G | | | | | | | | | | | | |
| ADI-81813 | 87 | IGHV3- | EVQLL | 5406 | FTFSSY | 362 | WVRQAP | 437 | SI- | 5980 | RFTISR | 6291 | ARDSRGL | 6596 | WGQGTL |
| | | 21 | ESGGG | | SMN | | GKGLEW | | LVTSHV | | DNVKNS | | YGSGIPD | | VTVSS |
| | | | LVKPG | | | | VS | | FYADSV | | LYLQMN | | F | | |
| | | | GSLRL | | | | | | KG | | SLRAED | | | | |
| | | | SCAAS | | | | | | | | TAVYYC | | | | |
| | | | G | | | | | | | | | | | | |
| ADI-81890 | 66 | IGHV3- | RCSCW | 5407 | FTVSAN | 5614 | WVRQAP | 437 | VIYSDG | 5981 | RFTVSR | 6292 | ARVVSDA | 6597 | WGQGTT |
| | | 53 | SPGGG | | YMT | | GKGLEW | | NTYYAN | | DNSKNT | | FDL | | VTVSS |
| | | | LIQRG | | | | VS | | SVKG | | LFLQMS | | | | |
| | | | GSLRL | | | | | | | | SLRAED | | | | |
| | | | SCVAS | | | | | | | | TAVYFC | | | | |
| | | | G | | | | | | | | | | | | |
| ADI-81612 | 69 | IGHV1- | QVQLQ | 5408 | GTFSTY | 5615 | WLRQAP | 478 | GIIPIV | 5982 | RVTITA | 6293 | ARGSGYS | 6598 | WGQGTL |
| | | 69 | QSGAE | | TVT | | GQGLEW | | GIPNYA | | DKSTST | | ASGSNTY | | VTVSS |
| | | | VKKPG | | | | MG | | ENFQG | | AYMELS | | FDP | | |
| | | | SSVKV | | | | | | | | SLKSED | | | | |
| | | | SCRAS | | | | | | | | TALYYC | | | | |
| | | | G | | | | | | | | | | | | |
| ADI-81723 | 93 | IGHV4- | QVQLQ | 5409 | YSIRSD | 5616 | WIRQTP | 5820 | SVYYSG | 5983 | RVTISV | 6294 | ARNSSRT | 6599 | WGQGTL |
| | | 38-2 | QSGPG | | DYWG | | GKGLEW | | STHYNP | | DTSKNQ | | PLFDY | | VTVSS |
| | | | LVKPS | | | | IG | | SLKS | | FSLSLT | | | | |
| | | | DTLSL | | | | | | | | SVTAAD | | | | |
| | | | TCAVS | | | | | | | | TAVYYC | | | | |
| | | | G | | | | | | | | | | | | |
| ADI-81543 | 11 | IGHV1- | QVQLV | 5410 | GTFGSD | 5617 | WVRQAP | 433 | RIIPIL | 5984 | RVTITA | 6295 | AREGGTT | 6600 | WGQGTL |
| | | 69 | QSGGE | | SIS | | GQGLEW | | GVPNSA | | DKSTST | | TEYFRQ | | VTVSS |
| | | | VKKPG | | | | MG | | QKFQD | | AYMELS | | | | |
| | | | SSVKV | | | | | | | | SLRYDD | | | | |
| | | | SCKAS | | | | | | | | TAVYFC | | | | |
| | | | G | | | | | | | | | | | | |
| | SEQ | | | | | | | SEQ | | | SEQ | VH | | VH Amino | |
| | ID | | | | | | | ID | | | ID | Nucleotide | | Acid | |
| Clone ID | NO: | VH DNA | | | | | | NO: | VH Protein | | NO: | Substitution | | Substitution | |
| ADI-81697 | 1286 | CGAGGTGCAGCTGCAGGAGTCGGGCCCAGGACTGGTGAGGC | | | | | | 6956 | RGAAAGVGPRTGEA | | 7307 | 15 | | 10 | |
| | | TTCGGGGACCCTGTCCCTCACCTGCGCTGTCTCAGGTGCCT | | | | | | | SGTLSLTCAVSGAS | | | | | | |
| | | CCATCAGCAGTAGTAACTGGTGGAGTTGGGTCCGCCAGCCC | | | | | | | ISSSNWWSWVRQPP | | | | | | |
| | | CCAGGGAAGGGGCTGGAGTGGATCGGGGAAATCTATCATGT | | | | | | | GKGLEWIGEIYHVG | | | | | | |
| | | TGGGAGTACCAACTACAACCCGTCCCTCAAGAGTCGAGTCA | | | | | | | STNYNPSLKSRVTI | | | | | | |
| | | CCATATCAATAGACAAGTCCAACAACCAGTTCTCCCTGAAG | | | | | | | SIDKSNNQFSLKLN | | | | | | |
| | | CTGAACTCTGTGACCGCCGCGGACACGGCCGTGTACTACTG | | | | | | | SVTAADTAVYYCAR | | | | | | |
| | | TGCGAGAGTCGTACTCTCTGACTTCAAGGAGGCGGCGTCGT | | | | | | | VVLSDFKEAASWGQ | | | | | | |
| | | GGGGCCAGGGAACCCTGGTCACCGTCTCCTCA | | | | | | | GTLVTVSS | | | | | | |
| ADI-81549 | 1286 | CAGGTCCAGCTGGTGCAGTCTGGGGGAGGCTTGGTACAGCC | | | | | | 6957 | QVQLVQSGGGLVQP | | 7308 | 14 | | 11 | |
| | | GGGGGGGTCCCTGAGACTCTCCTGTACAGCCTCTGGATTCA | | | | | | | GGSLRLSCTASGFS | | | | | | |
| | | GCTTTAGTCTGTTTGCCATGAACTGGGTCCGCCAGGCTCCA | | | | | | | FSLFAMNWVRQAPG | | | | | | |
| | | GGAAAGGGGCTGGAGTGGGTCTCAAGTATTACTGGAAGTGC | | | | | | | KGLEWVSSITGSAD | | | | | | |
| | | TGATACCACATACTACGCAGACTCCGTGAAGGGCCGGTTCA | | | | | | | TTYYADSVKGRFTI | | | | | | |
| | | CCATATCCAGAGACAATTCCAAGAACACACTGTATCTGCAA | | | | | | | SRDNSKNTLYLQMN | | | | | | |
| | | ATGAACAGCCTGAGCGCCGAGGACACGGCCGTATATTATTG | | | | | | | SLSAEDTAVYYCAK | | | | | | |
| | | TGCGAAAGGGATGGACGGTGCCCCGGGGTTCTACTTTGACT | | | | | | | GMDGAPGFYFDYWG | | | | | | |
| | | ACTGGGGCCAGGGAACCCTGGTCACCGTCTCCTCA | | | | | | | QGTLVTVSS | | | | | | |
| ADI-81562 | 1287 | CAGGTGCAGCTGGTGGAGTCTGGAGGAGGCTTGGTCCAGCC | | | | | | 6958 | QVQLVESGGGLVQP | | 7309 | 14 | | 11 | |
| | | TGGGGGGTCCCTGAGACTCTCCTGTGCAGCCTCTGGGCTCA | | | | | | | GGSLRLSCAASGLT | | | | | | |
| | | CCGTCAGTAGCAACTATATGACCTGGCTTCGCCAGGCTCCA | | | | | | | VSSNYMTWLRQAPG | | | | | | |
| | | GGGAAGGGGCTAGAGTGGGTCTCAGTTATGTTTAGCGGTGG | | | | | | | KGLEWVSVMFSGGS | | | | | | |
| | | TAGCACATTCTACGCAGACTCCGTGAAGGGCCGATTCACCA | | | | | | | TFYADSVKGRFTIS | | | | | | |
| | | TCTCCAGACACAATTCCAACAACACGCTGTATCTTCAAATG | | | | | | | RHNSNNTLYLQMSS | | | | | | |
| | | AGCAGCCTGGGACCTGAGGACACGGCCACATATTACTGTGC | | | | | | | LGPEDTATYYCARD | | | | | | |
| | | AAGAGATCTGCCTCCATACGGTATGGACGTCTGGGGCCAAG | | | | | | | LPPYGMDVWGQGTT | | | | | | |
| | | GGACCACGGTCACCGTCTCCTCA | | | | | | | VTVSS | | | | | | |
| ADI-81813 | 1286 | GAGGTGCAGCTGTTGGAGTCTGGGGGAGGCCTGGTCAAGCC | | | | | | 6959 | EVQLLESGGGLVKP | | 7310 | 13 | | 8 | |
| | | TGGGGGGTCCCTGAGACTCTCCTGTGCAGCCTCTGGATTCA | | | | | | | GGSLRLSCAASGFT | | | | | | |
| | | CCTTCAGTAGTTATAGCATGAACTGGGTCCGCCAGGCTCCA | | | | | | | FSSYSMNWVRQAPG | | | | | | |
| | | GGGAAGGGGCTGGAGTGGGTCTCTTCCATTCTTGTCACTAG | | | | | | | KGLEWVSSILVTSH | | | | | | |
| | | CCACGTATTCTACGCAGACTCAGTGAAGGGCCGATTCACCA | | | | | | | VFYADSVKGRFTIS | | | | | | |
| | | TTTCCAGAGACAACGTCAAGAACTCACTGTATCTGCAAATG | | | | | | | RDNVKNSLYLQMNS | | | | | | |
| | | AACAGCCTGAGAGCCGAGGATACGGCTGTCTATTACTGTGC | | | | | | | LRAEDTAVYYCARD | | | | | | |
| | | GAGAGATTCCCGTGGGCTCTATGGGTCAGGGATCCCCGACT | | | | | | | SRGLYGSGIPDFWG | | | | | | |
| | | TCTGGGGCCAGGGAACCCTGGTCACCGTCTCCTCA | | | | | | | QGTLVTVSS | | | | | | |
| ADI-81890 | 1287 | AGGTGCAGCTGTTGGAGTCCTGGAGGAGGCTTGATCCAGCG | | | | | | 6960 | RCSCWSPGGGLIQR | | 7311 | 13 | | 11 | |
| | | GGGGGGGTCCCTGAGACTCTCCTGTGTAGCCTCTGGGTTCA | | | | | | | GGSLRLSCVASGFT | | | | | | |
| | | CCGTCAGTGCCAACTACATGACCTGGGTCCGCCAGGCTCCA | | | | | | | VSANYMTWVRQAPG | | | | | | |
| | | GGGAAGGGACTCGAGTGGGTCTCAGTGATTTATAGTGATGG | | | | | | | KGLEWVSVIYSDGN | | | | | | |
| | | TAACACATACTATGCAAACTCCGTGAAGGGCCGGTTCACCG | | | | | | | TYYANSVKGRFTVS | | | | | | |
| | | TCTCCAGAGACAATTCCAAGAACACGCTGTTTCTTCAAATG | | | | | | | RDNSKNTLFLQMSS | | | | | | |
| | | AGCAGCCTGAGAGCCGAGGACACGGCCGTGTATTTCTGTGC | | | | | | | LRAEDTAVYFCARV | | | | | | |
| | | GAGAGTCGTGTCGGATGCTTTTGATCTCTGGGGCCAAGGGA | | | | | | | VSDAFDLWGQGTTV | | | | | | |
| | | CCACGGTCACCGTCTCCTCA | | | | | | | TVSS | | | | | | |
| ADI-81612 | 1286 | TGGGTCCTCGGTGAAGGTCTCCTGCAGGGCTTCTGGAGGCA | | | | | | 6961 | QVQLQQSGAEVKKP | | 7312 | 12 | | 12 | |
| | | CCTTCAGCACCTATACTGTCACCTGGCTGCGACAGGCCCCT | | | | | | | GSSVKVSCRASGGT | | | | | | |
| | | GGACAAGGGCTTGAGTGGATGGGAGGGATCATCCCTATCGT | | | | | | | FSTYTVTWLRQAPG | | | | | | |
| | | TGGAATACCAAACTACGCAGAGAACTTCCAGGGCAGAGTCA | | | | | | | QGLEWMGGIIPIVG | | | | | | |
| | | CGATTACCGCGGACAAATCCACGAGCACAGCCTACATGGAG | | | | | | | IPNYAENFQGRVTI | | | | | | |
| | | CTGAGCAGCCTGAAATCTGAGGACACGGCCCTGTATTACTG | | | | | | | TADKSTSTAYMELS | | | | | | |
| | | TGCGAGAGGTTCGGGATACTCTGCTTCAGGGAGTAATACCT | | | | | | | SLKSEDTALYYCAR | | | | | | |
| | | ACTTCGACCCCTGGGGCCAGGGAACCCTGGTCACCGTCTCC | | | | | | | GSGYSASGSNTYFD | | | | | | |
| | | TCA | | | | | | | PWGQGTLVTVSS | | | | | | |
| ADI-81723 | 1286 | CAGGTGCAGCTGCAGCAGTCGGGCCCGGGACTGGTGAAGCC | | | | | | 6962 | QVQLQQSGPGLVKP | | 7313 | 12 | | 10 | |
| | | TTCGGACACCCTGTCCCTCACCTGCGCTGTCTCTGGTTACT | | | | | | | SDTLSLTCAVSGYS | | | | | | |
| | | CCATCAGGAGTGACGACTACTGGGGCTGGATCCGGCAGACC | | | | | | | IRSDDYWGWIRQTP | | | | | | |
| | | CCAGGGAAGGGGCTGGAGTGGATTGGGAGTGTCTATTATAG | | | | | | | GKGLEWIGSVYYSG | | | | | | |
| | | TGGCAGCACCCACTACAACCCGTCCCTCAAGAGTCGAGTCA | | | | | | | STHYNPSLKSRVTI | | | | | | |
| | | CCATATCAGTAGACACGTCCAAGAACCAGTTCTCCCTGAGT | | | | | | | SVDTSKNQFSLSLT | | | | | | |
| | | CTGACCTCTGTGACCGCCGCAGACACGGCCGTGTATTACTG | | | | | | | SVTAADTAVYYCAR | | | | | | |
| | | TGCGCGAAACTCTTCAAGAACTCCCTTATTTGACTACTGGG | | | | | | | NSSRTPLFDYWGQG | | | | | | |
| | | GCCAGGGAACCCTGGTCACCGTCTCCTCA | | | | | | | TLVTVSS | | | | | | |
| ADI-81543 | 1286 | CAGGTGCAGCTGGTGCAGTCTGGGGGTGAGGTGAAGAAGCC | | | | | | 6963 | QVQLVQSGGEVKKP | | 7314 | 11 | | 10 | |
| | | TGGGTCCTCGGTGAAGGTCTCCTGCAAGGCTTCGGGAGGCA | | | | | | | GSSVKVSCKASGGT | | | | | | |
| | | CCTTCGGCAGTGACTCTATCAGCTGGGTGCGACAGGCCCCT | | | | | | | FGSDSISWVRQAPG | | | | | | |
| | | GGACAAGGGCTTGAGTGGATGGGAAGGATCATCCCTATCCT | | | | | | | QGLEWMGRIIPILG | | | | | | |
| | | CGGTGTACCAAACTCCGCACAGAAGTTCCAGGACAGAGTCA | | | | | | | VPNSAQKFQDRVTI | | | | | | |
| | | CAATTACCGCGGACAAATCCACGAGCACAGCCTACATGGAG | | | | | | | TADKSTSTAYMELS | | | | | | |
| | | CTGAGCAGCCTGAGATATGACGACACGGCCGTGTATTTCTG | | | | | | | SLRYDDTAVYFCAR | | | | | | |
| | | TGCGAGAGAAGGTGGAACCACCACTGAATACTTCCGGCAGT | | | | | | | EGGTTTEYFRQWGQ | | | | | | |
| | | GGGGCCAGGGCACCCTGGTCACCGTCTCCTCA | | | | | | | GTLVTVSS | | | | | | |
| | VH | VH | | SEQ | | SEQ | | SEQ | | SEQ | | SEQ | | SEQ | |
| | CDR3 | Germ- | VH | ID | VH | ID | VH | ID | VH | ID | VH | ID | VH | ID | VH |
| Clone ID | Lineage | line | FR1 | NO: | CDR1 | NO: | FR2 | NO: | CDR2 | NO: | FR3 | NO: | CDR3 | NO: | FR4 |
| ADI-81583 | 44 | IGHV3- | QVQLV | 57 | FTFSNY | 290 | WVRQAP | 431 | VISSDG | 5985 | RFTISR | 6296 | ARDPPTS | 6601 | WGQGTL |
| | | 30 | QSGGG | | DMH | | GKGLEW | | SLRFYA | | DNSKNT | | VTSQMLL | | VTVSS |
| | | | VVQPG | | | | VA | | DSVKG | | LYLQMN | | DF | | |
| | | | GSLRL | | | | | | | | SLRTED | | | | |
| | | | SCAAS | | | | | | | | TAVFYC | | | | |
| | | | G | | | | | | | | | | | | |
| ADI-81620 | 77 | IGHV3- | QVQLV | 12 | IIVSSN | 5618 | WVRQAP | 437 | LMYAGG | 5986 | RFTISR | 6297 | ARDLAEP | 6602 | WGQGTT |
| | | 66 | QSGGG | | YMS | | GKGLEW | | STFYAD | | DNSKNT | | YGMDV | | VTVSS |
| | | | LVQPG | | | | VS | | SVKG | | LFLQMN | | | | |
| | | | GSLRL | | | | | | | | SLRVED | | | | |
| | | | SCAAS | | | | | | | | TAVYYC | | | | |
| | | | G | | | | | | | | | | | | |
| ADI-81743 | 15 | IGHV5- | EVQLV | 5411 | YTFSTY | 5619 | WVRQMP | 476 | IIFPGD | 5987 | QVTISA | 6298 | ATLKLEG | 6603 | WGQGTL |
| | | 51 | QSGAE | | WIG | | GKGLEW | | SDTRYS | | DKSIST | | FTPVDYN | | VTVSS |
| | | | VRKPG | | | | MG | | PSFQG | | AYVQWS | | TLPALY | | |
| | | | ESLKI | | | | | | | | SLKASD | | | | |
| | | | SCKAS | | | | | | | | TAMYYC | | | | |
| | | | G | | | | | | | | | | | | |
| ADI-81795 | 71 | IGHV3- | EVQLL | 5412 | FIFNDY | 5620 | WVRQVP | 436 | GISWNG | 5988 | RFTISR | 6299 | AKDKRLD | 6604 | WGQGTL |
| | | 9 | ESGGG | | AMH | | GKGLEW | | VSIGYG | | DNAKNS | | YSNYGTA | | VTVSS |
| | | | LVQPG | | | | VS | | DSVKG | | LYLHMN | | PEY | | |
| | | | RSLRL | | | | | | | | SLRGED | | | | |
| | | | SCAAA | | | | | | | | TAVYYC | | | | |
| | | | G | | | | | | | | | | | | |
| ADI-81812 | 86 | IGHV3- | QVQLV | 30 | LIVSSN | 343 | WVRQAP | 5821 | TLYSGG | 5989 | RFTISR | 6300 | ARDALYY | 6605 | WGQGTL |
| | | 53 | ESGGG | | YMS | | GKGLAW | | STFYAD | | DNSKNT | | GDSN | | VTVSS |
| | | | LIQPG | | | | VS | | SVRG | | LYLQMN | | | | |
| | | | GSLRL | | | | | | | | SLTGED | | | | |
| | | | SCAAS | | | | | | | | TAVYYC | | | | |
| | | | G | | | | | | | | | | | | |
| ADI-81877 | 54 | IGHV3- | EVQLL | 5324 | FTFDDY | 336 | WVRQAP | 437 | GSTWNS | 5990 | RFIISR | 6301 | ARDSTIL | 6606 | WGQGTL |
| | | 9 | ESGGG | | AIH | | GKGLEW | | GTIGYA | | DNARNS | | GAKPEEY | | VTVSS |
| | | | LVQPG | | | | VS | | DSVKG | | LYLQMN | | YFDY | | |
| | | | RSLRL | | | | | | | | RLRPED | | | | |
| | | | SCAAS | | | | | | | | TAFYYC | | | | |
| | | | G | | | | | | | | | | | | |
| ADI-81577 | 2 | IGHV3- | RCTLV | 5413 | FTFSSD | 5621 | WVRQAP | 431 | LISSDG | 5991 | RFTISR | 6302 | ARHQESV | 6607 | WGRGTT |
| | | 30 | ESGGG | | DIY | | GKGLEW | | SNKYYA | | DNSKNT | | LPTADRP | | VTVSS |
| | | | VVQPG | | | | VA | | DSVKG | | LYLQMN | | YRYYYYM | | |
| | | | RSLRL | | | | | | | | SLRGDD | | DV | | |
| | | | SCAAS | | | | | | | | TAVYHC | | | | |
| | | | G | | | | | | | | | | | | |
| ADI-81742 | 19 | IGHV2- | QVTLK | 5414 | FSLSTN | 5622 | WIRQPP | 441 | LIYWDD | 5992 | RLTITK | 6303 | ARFKEHL | 6608 | WGQGTL |
| | | 5 | ESGPT | | GVGVA | | GKALEW | | DKRFSP | | DTSKNQ | | GYNWFDP | | VTVSS |
| | | | LVKPT | | | | LA | | SLRN | | VVLTLT | | | | |
| | | | QTLTL | | | | | | | | NIDPVD | | | | |
| | | | TCSFS | | | | | | | | TATYYC | | | | |
| | | | G | | | | | | | | | | | | |
| | SEQ | | | | | | | SEQ | | | SEQ | VH | | VH Amino | |
| | ID | | | | | | | ID | | | ID | Nucleotide | | Acid | |
| Clone ID | NO: | VH DNA | | | | | | NO: | VH Protein | | NO: | Substitution | | Substitution | |
| ADI-81583 | 1286 | CAGGTCCAGCTGGTGCAGTCTGGGGGAGGTGTGGTCCAGCC | | | | | | 6964 | QVQLVQSGGGVVQP | | 7315 | 10 | | 9 | |
| | | TGGGGGGTCCCTGAGACTCTCCTGTGCAGCCTCTGGATTCA | | | | | | | GGSLRLSCAASGFT | | | | | | |
| | | CCTTCAGTAACTATGATATGCACTGGGTCCGCCAGGCTCCA | | | | | | | FSNYDMHWVRQAPG | | | | | | |
| | | GGCAAGGGGCTAGAGTGGGTGGCAGTCATATCATCTGATGG | | | | | | | KGLEWVAVISSDGS | | | | | | |
| | | AAGTCTTAGATTCTACGCAGACTCCGTGAAGGGCCGATTCA | | | | | | | LRFYADSVKGRFTI | | | | | | |
| | | CCATCTCCAGGGACAATTCCAAGAACACTCTATATCTGCAA | | | | | | | SRDNSKNTLYLQMN | | | | | | |
| | | ATGAACAGCCTGAGAACTGAGGACACGGCTGTTTTTTACTG | | | | | | | SLRTEDTAVFYCAR | | | | | | |
| | | TGCGAGAGATCCCCCCACTTCGGTGACTTCCCAGATGCTTC | | | | | | | DPPTSVTSQMLLDF | | | | | | |
| | | TTGACTTCTGGGGCCAGGGAACCCTGGTCACCGTCTCCTCA | | | | | | | WGQGTLVTVSS | | | | | | |
| ADI-81620 | 1287 | CAGGTGCAGCTGGTGCAGTCTGGGGGAGGCTTGGTCCAGCC | | | | | | 6965 | QVQLVQSGGGLVQP | | 7316 | 10 | | 8 | |
| | | TGGGGGGTCCCTGAGACTCTCCTGTGCAGCCTCTGGAATCA | | | | | | | GGSLRLSCAASGII | | | | | | |
| | | TCGTCAGTAGCAACTACATGAGTTGGGTCCGCCAGGCTCCA | | | | | | | VSSNYMSWVRQAPG | | | | | | |
| | | GGGAAGGGGCTGGAGTGGGTCTCACTGATGTATGCCGGTGG | | | | | | | KGLEWVSLMYAGGS | | | | | | |
| | | TAGTACATTCTACGCAGACTCCGTGAAGGGCAGATTCACCA | | | | | | | TFYADSVKGRFTIS | | | | | | |
| | | TCTCCAGAGACAATTCCAAAAACACGCTGTTTCTTCAAATG | | | | | | | RDNSKNTLFLQMNS | | | | | | |
| | | AACAGCCTGAGAGTCGAGGACACGGCTGTGTATTACTGTGC | | | | | | | LRVEDTAVYYCARD | | | | | | |
| | | GAGGGATTTGGCAGAGCCCTACGGTATGGACGTCTGGGGCC | | | | | | | LAEPYGMDVWGQGT | | | | | | |
| | | AAGGGACCACGGTCACCGTCTCCTCA | | | | | | | TVTVSS | | | | | | |
| ADI-81743 | 1286 | GAGGTGCAGCTGGTGCAGTCTGGAGCAGAGGTGAGAAAGCC | | | | | | 6966 | EVQLVQSGAEVRKP | | 7317 | 10 | | 7 | |
| | | CGGGGAGTCTCTGAAGATCTCCTGTAAGGCCTCTGGATACA | | | | | | | GESLKISCKASGYT | | | | | | |
| | | CCTTTAGTACCTACTGGATCGGCTGGGTGCGCCAGATGCCC | | | | | | | FSTYWIGWVRQMPG | | | | | | |
| | | GGGAAAGGCCTGGAGTGGATGGGGATCATCTTTCCTGGTGA | | | | | | | KGLEWMGIIFPGDS | | | | | | |
| | | CTCTGATACCAGGTACAGCCCGTCCTTCCAAGGCCAGGTCA | | | | | | | DTRYSPSFQGQVTI | | | | | | |
| | | CCATCTCAGCCGACAAGTCCATCAGCACCGCCTACGTACAG | | | | | | | SADKSISTAYVQWS | | | | | | |
| | | TGGAGCAGCCTGAAGGCCTCGGACACCGCCATGTATTACTG | | | | | | | SLKASDTAMYYCAT | | | | | | |
| | | TGCGACTCTGAAACTCGAGGGATTTACCCCCGTTGATTACA | | | | | | | LKLEGFTPVDYNTL | | | | | | |
| | | ACACACTTCCCGCACTTTACTGGGGCCAGGGAACCCTGGTC | | | | | | | PALYWGQGTLVTVS | | | | | | |
| | | ACCGTCTCCTCA | | | | | | | S | | | | | | |
| ADI-81795 | 1286 | TGGCAGGTCCCTGAGACTCTCATGTGCAGCCGCTGGATTCA | | | | | | 6967 | EVQLLESGGGLVQP | | 7318 | 10 | | 10 | |
| | | TCTTTAATGATTATGCCATGCACTGGGTCCGGCAAGTTCCA | | | | | | | GRSLRLSCAAAGFI | | | | | | |
| | | GGGAAGGGCCTGGAGTGGGTCTCAGGTATTAGTTGGAATGG | | | | | | | FNDYAMHWVRQVPG | | | | | | |
| | | TGTTAGCATAGGCTATGGGGACTCTGTGAAGGGCCGATTCA | | | | | | | KGLEWVSGISWNGV | | | | | | |
| | | CCATCTCCAGAGACAACGCCAAGAACTCCCTGTATCTGCAC | | | | | | | SIGYGDSVKGRFTI | | | | | | |
| | | ATGAACAGTCTGAGAGGTGAGGATACGGCCGTGTATTACTG | | | | | | | SRDNAKNSLYLHMN | | | | | | |
| | | TGCAAAAGATAAGAGACTTGACTACAGTAACTACGGGACTG | | | | | | | SLRGEDTAVYYCAK | | | | | | |
| | | CCCCTGAGTACTGGGGCCAGGGAACCCTGGTCACCGTCTCC | | | | | | | DKRLDYSNYGTAPE | | | | | | |
| | | TCA | | | | | | | YWGQGTLVTVSS | | | | | | |
| ADI-81812 | 1286 | CAGGTGCAGCTGGTGGAGTCTGGAGGAGGCTTGATCCAGCC | | | | | | 6968 | QVQLVESGGGLIQP | | 7319 | 10 | | 9 | |
| | | TGGGGGGTCCCTGAGACTCTCCTGTGCAGCCTCTGGGCTCA | | | | | | | GGSLRLSCAASGLI | | | | | | |
| | | TCGTCAGTAGCAACTACATGAGCTGGGTCCGCCAGGCTCCA | | | | | | | VSSNYMSWVRQAPG | | | | | | |
| | | GGGAAGGGGCTGGCGTGGGTCTCAACTCTTTATAGCGGTGG | | | | | | | KGLAWVSTLYSGGS | | | | | | |
| | | TAGCACATTCTACGCAGACTCCGTGAGGGGCCGGTTCACCA | | | | | | | TFYADSVRGRFTIS | | | | | | |
| | | TCTCCAGAGACAACTCCAAGAACACGCTGTATCTTCAAATG | | | | | | | RDNSKNTLYLQMNS | | | | | | |
| | | AACAGCCTGACAGGCGAGGACACGGCCGTTTATTACTGTGC | | | | | | | LTGEDTAVYYCARD | | | | | | |
| | | GAGAGATGCCCTATATTACGGTGACTCAAACTGGGGCCAGG | | | | | | | ALYYGDSNWGQGTL | | | | | | |
| | | GAACCCTGGTCACCGTCTCCTCA | | | | | | | VTVSS | | | | | | |
| ADI-81877 | 1286 | TGGCAGGTCCCTGAGACTCTCCTGTGCAGCCTCTGGATTCA | | | | | | 6969 | EVQLLESGGGLVQP | | 7320 | 10 | | 9 | |
| | | CCTTTGATGATTATGCCATACACTGGGTCCGGCAAGCTCCA | | | | | | | GRSLRLSCAASGFT | | | | | | |
| | | GGGAAGGGCCTGGAGTGGGTCTCAGGTAGTACTTGGAATAG | | | | | | | FDDYAIHWVRQAPG | | | | | | |
| | | TGGTACTATAGGCTATGCGGACTCTGTGAAGGGCCGATTCA | | | | | | | KGLEWVSGSTWNSG | | | | | | |
| | | TCATCTCCAGAGACAACGCCAGGAACTCCCTATATCTGCAA | | | | | | | TIGYADSVKGRFII | | | | | | |
| | | ATGAATCGTCTGAGACCTGAGGACACGGCCTTCTATTACTG | | | | | | | SRDNARNSLYLQMN | | | | | | |
| | | TGCAAGAGATTCTACAATACTGGGAGCTAAGCCCGAAGAGT | | | | | | | RLRPEDTAFYYCAR | | | | | | |
| | | ATTACTTTGACTATTGGGGCCAGGGAACCCTGGTCACCGTC | | | | | | | DSTILGAKPEEYYF | | | | | | |
| | | TCCTCA | | | | | | | DYWGQGTLVTVSS | | | | | | |
| ADI-81577 | 1294 | AGGTGCACGCTGGTGGAGTCTGGGGGAGGCGTGGTCCAGCC | | | | | | 6970 | RCTLVESGGGVVQP | | 7321 | 9 | | 9 | |
| | | TGGGAGGTCCCTGAGACTCTCCTGTGCAGCCTCTGGATTCA | | | | | | | GRSLRLSCAASGFT | | | | | | |
| | | CCTTCAGTAGTGATGATATATACTGGGTCCGCCAGGCTCCA | | | | | | | FSSDDIYWVRQAPG | | | | | | |
| | | GGCAAGGGGCTAGAATGGGTGGCACTTATATCTTCTGATGG | | | | | | | KGLEWVALISSDGS | | | | | | |
| | | AAGTAATAAGTACTACGCAGACTCCGTGAAGGGCCGATTCA | | | | | | | NKYYADSVKGRFTI | | | | | | |
| | | CCATCTCCAGAGACAATTCCAAGAACACGCTGTATCTGCAA | | | | | | | SRDNSKNTLYLQMN | | | | | | |
| | | ATGAACAGCCTGAGAGGTGACGACACGGCTGTGTATCACTG | | | | | | | SLRGDDTAVYHCAR | | | | | | |
| | | TGCGAGACATCAGGAGTCCGTACTCCCAACTGCTGATAGGC | | | | | | | HQESVLPTADRPYR | | | | | | |
| | | CCTACCGTTACTACTACTACATGGACGTCTGGGGCAGAGGG | | | | | | | YYYYMDVWGRGTTV | | | | | | |
| | | ACCACGGTCACCGTCTCCTCA | | | | | | | TVSS | | | | | | |
| ADI-81742 | 1286 | CAGGTCACGTTGAAGGAGTCTGGTCCTACGCTGGTGAAACC | | | | | | 6971 | QVTLKESGPTLVKP | | 7322 | 9 | | 8 | |
| | | CACACAGACCCTCACGCTGACCTGCAGCTTCTCTGGGTTCT | | | | | | | TQTLTLTCSFSGFS | | | | | | |
| | | CACTCAGCACTAATGGAGTGGGTGTTGCCTGGATCCGTCAG | | | | | | | LSTNGVGVAWIRQP | | | | | | |
| | | CCCCCAGGAAAGGCCCTGGAGTGGCTTGCACTCATTTATTG | | | | | | | PGKALEWLALIYWD | | | | | | |
| | | GGATGATGATAAGCGTTTCAGCCCATCTCTGAGAAACAGAC | | | | | | | DDKRFSPSLRNRLT | | | | | | |
| | | TCACAATCACCAAGGACACCTCCAAAAACCAGGTGGTCCTT | | | | | | | ITKDTSKNQVVLTL | | | | | | |
| | | ACACTGACCAACATTGACCCTGTGGACACAGCCACATATTA | | | | | | | TNIDPVDTATYYCA | | | | | | |
| | | CTGTGCACGCTTCAAGGAGCACCTCGGGTACAACTGGTTCG | | | | | | | RFKEHLGYNWFDPW | | | | | | |
| | | ACCCCTGGGGCCAGGGAACCCTGGTCACCGTCTCCTCA | | | | | | | GQGTLVTVSS | | | | | | |
| | VH | VH | | SEQ | | SEQ | | SEQ | | SEQ | | SEQ | | SEQ | |
| | CDR3 | Germ- | VH | ID | VH | ID | VH | ID | VH | ID | VH | ID | VH | ID | VH |
| Clone ID | Lineage | line | FR1 | NO: | CDR1 | NO: | FR2 | NO: | CDR2 | NO: | FR3 | NO: | CDR3 | NO: | FR4 |
| ADI-81781 | 57 | IGHV1- | EVQLV | 5320 | YTFTGH | 5623 | WVRQAP | 433 | RINPNS | 5993 | RVTMTR | 6304 | AVEPYYN | 6609 | WGQGTL |
| | | 2 | QSGAE | | YMY | | GQGLEW | | GDTHYA | | DASIST | | ILTASYR | | VTVSS |
| | | | VKKPG | | | | MG | | QKFQG | | AFMELS | | DC | | |
| | | | ASVKV | | | | | | | | RLRSDD | | | | |
| | | | SCKAS | | | | | | | | TAVYYC | | | | |
| | | | G | | | | | | | | | | | | |
| ADI-81611 | 68 | IGHV3- | EVQLV | 5415 | FTFGDH | 5624 | WVRQAP | 432 | FIRTKT | 5994 | RFTISR | 6305 | TGVLGWR | 6610 | WGQGTL |
| | | 49 | ESGGG | | AMN | | GKGLEW | | YGGTTE | | DDSKSI | | GSYREDY | | VTVSS |
| | | | LVQPG | | | | VG | | YAASVK | | AYLQMN | | | | |
| | | | RSLRL | | | | | | G | | SLRTED | | | | |
| | | | SCITS | | | | | | | | TAVYYC | | | | |
| | | | G | | | | | | | | | | | | |
| ADI-81622 | 79 | IGHV4- | QVQLQ | 195 | GSISSR | 5625 | WIRQSP | 5822 | SIYYSG | 5995 | RVTISV | 6306 | ARRPTTD | 6611 | WGKGTT |
| | | 39 | QSGPG | | SYYWD | | GRGLEW | | SADYNP | | DTSKNH | | FYYMDV | | VTVSS |
| | | | LVKPS | | | | IG | | SLKS | | FSLKLS | | | | |
| | | | ETLSL | | | | | | | | SVTAAD | | | | |
| | | | TCTVS | | | | | | | | TAVYYC | | | | |
| | | | G | | | | | | | | | | | | |
| ADI-81644 | 17 | IGHV3- | QVQLL | 5416 | FTFDDY | 214 | WVRQAP | 437 | GITWNS | 5996 | RFIIIR | 6307 | VKDSREI | 6612 | WGKGTT |
| | | 9 | ESGGG | | AMH | | GKGLEW | | GTIGYA | | DNAKNS | | KTLMVEE | | VTVSS |
| | | | LVQPG | | | | VS | | DSVKG | | LYLQMN | | DYYMDV | | |
| | | | RSLRL | | | | | | | | SLRVED | | | | |
| | | | TCAAS | | | | | | | | TALYYC | | | | |
| | | | G | | | | | | | | | | | | |
| ADI-81858 | 36 | IGHV3- | EVQLV | 5338 | FTFINY | 5626 | WVRQAP | 431 | AISYDG | 5997 | RFTISR | 6308 | AKVTASH | 6613 | WGQGTT |
| | | 30 | ESGGG | | GMH | | GKGLEW | | SDEYYA | | DDSKNT | | YYYYYGM | | VTVSS |
| | | | VVQPG | | | | VA | | DSVKG | | VYLQMN | | DV | | |
| | | | RSLRL | | | | | | | | SLRAED | | | | |
| | | | SCAAS | | | | | | | | TAVYYC | | | | |
| | | | G | | | | | | | | | | | | |
| ADI-81603 | 61 | IGHV1- | QVQLV | 50 | GTFSSY | 379 | WVRQAP | 433 | RIIPPL | 5998 | RVTITA | 6224 | ARDRGYS | 6614 | WGKGTT |
| | | 69 | QSGAE | | PIS | | GQGLEW | | GISDYA | | DKSTST | | SVSGSNY | | VTVSS |
| | | | VKKPG | | | | MG | | QKFQG | | AYMELS | | YMDV | | |
| | | | SSVKV | | | | | | | | SLTSED | | | | |
| | | | SCKAS | | | | | | | | TAVYYC | | | | |
| | | | G | | | | | | | | | | | | |
| ADI-81535 | 4 | IGHV1- | QVQLV | 50 | GTFSSN | 5627 | WVRQAP | 433 | RIIPIL | 5999 | RVTFTA | 6309 | ARDAGYS | 6615 | WGQGTL |
| | | 69 | QSGAE | | PFS | | GQGLEW | | GIPNYA | | DKSTST | | GSGSAYY | | VTVSS |
| | | | VKKPG | | | | MG | | QKFQG | | AYMELS | | FDY | | |
| | | | SSVKV | | | | | | | | SLRSED | | | | |
| | | | SCKAS | | | | | | | | TAVYYC | | | | |
| | | | G | | | | | | | | | | | | |
| ADI-81713 | 83 | IGHV1- | QVQLV | 137 | FTFITS | 5575 | WVRQAR | 5789 | WIAVGR | 6000 | RVTITR | 6310 | AALNCNV | 6616 | WGQGTT |
| | | 58 | QSGPE | | AVQ | | GQRLEW | | GNTDYA | | DMSTST | | TTCSDGF | | VTVSS |
| | | | VKKPG | | | | IG | | QKFQE | | AYMELS | | DM | | |
| | | | TSVKV | | | | | | | | SLRSED | | | | |
| | | | SCKAS | | | | | | | | TAVYYC | | | | |
| | | | G | | | | | | | | | | | | |
| | SEQ | | | | | | | SEQ | | | SEQ | VH | | VH Amino | |
| | ID | | | | | | | ID | | | ID | Nucleotide | | Acid | |
| Clone ID | NO: | VH DNA | | | | | | NO: | VH Protein | | NO: | Substitution | | Substitution | |
| ADI-81781 | 1286 | GAGGTGCAGCTGGTGCAGTCTGGGGCTGAGGTGAAGAAGCC | | | | | | 6972 | EVQLVQSGAEVKKP | | 7323 | 8 | | 6 | |
| | | TGGGGCCTCAGTGAAGGTCTCCTGCAAGGCTTCTGGATACA | | | | | | | GASVKVSCKASGYT | | | | | | |
| | | CCTTCACCGGCCATTATATGTACTGGGTGCGACAGGCCCCT | | | | | | | FTGHYMYWVRQAPG | | | | | | |
| | | GGACAAGGGCTTGAGTGGATGGGACGGATCAACCCCAACAG | | | | | | | QGLEWMGRINPNSG | | | | | | |
| | | TGGTGACACACACTATGCACAGAAGTTTCAGGGCAGGGTCA | | | | | | | DTHYAQKFQGRVTM | | | | | | |
| | | CCATGACCAGGGACGCCTCCATCAGCACAGCCTTCATGGAG | | | | | | | TRDASISTAFMELS | | | | | | |
| | | CTGAGCAGGCTGAGATCTGACGACACGGCCGTGTATTACTG | | | | | | | RLRSDDTAVYYCAV | | | | | | |
| | | TGCGGTCGAGCCTTATTACAATATTTTGACTGCTTCTTATC | | | | | | | EPYYNILTASYRDC | | | | | | |
| | | GAGACTGCTGGGGCCAGGGAACCCTGGTCACCGTCTCCTCA | | | | | | | WGQGTLVTVSS | | | | | | |
| ADI-81611 | 1286 | GAGGTGCAGCTGGTGGAGTCTGGGGGAGGCTTGGTACAGCC | | | | | | 6973 | EVQLVESGGGLVQP | | 7324 | 7 | | 7 | |
| | | AGGGCGGTCCCTAAGACTCTCCTGTATAACTTCTGGATTCA | | | | | | | GRSLRLSCITSGFT | | | | | | |
| | | CCTTTGGTGATCATGCTATGAACTGGGTCCGCCAGGCTCCA | | | | | | | FGDHAMNWVRQAPG | | | | | | |
| | | GGGAAGGGGCTGGAGTGGGTAGGTTTCATTAGAACCAAAAC | | | | | | | KGLEWVGFIRTKTY | | | | | | |
| | | TTATGGTGGGACAACAGAATACGCCGCGTCTGTGAAAGGCA | | | | | | | GGTTEYAASVKGRF | | | | | | |
| | | GATTCACCATCTCAAGAGATGATTCCAAAAGCATCGCCTAT | | | | | | | TISRDDSKSIAYLQ | | | | | | |
| | | CTGCAAATGAACAGCCTGAGAACCGAGGACACAGCCGTGTA | | | | | | | MNSLRTEDTAVYYC | | | | | | |
| | | TTACTGTACTGGAGTCTTAGGTTGGCGGGGGAGTTATCGTG | | | | | | | TGVLGWRGSYREDY | | | | | | |
| | | AAGACTACTGGGGCCAGGGAACCCTGGTCACCGTCTCCTCA | | | | | | | WGQGTLVTVSS | | | | | | |
| ADI-81622 | 1291 | CAGGTGCAGCTGCAGCAGTCGGGCCCAGGACTGGTGAAGCC | | | | | | 6974 | QVQLQQSGPGLVKP | | 7325 | 7 | | 7 | |
| | | TTCGGAGACCCTGTCCCTCACCTGCACTGTCTCTGGTGGCT | | | | | | | SETLSLTCTVSGGS | | | | | | |
| | | CCATCAGCAGCAGGAGTTACTACTGGGACTGGATCCGCCAG | | | | | | | ISSRSYYWDWIRQS | | | | | | |
| | | TCCCCAGGGAGGGGGCTGGAGTGGATTGGGAGTATCTATTA | | | | | | | PGRGLEWIGSIYYS | | | | | | |
| | | TAGTGGGAGCGCCGACTACAACCCGTCCCTCAAGAGTCGAG | | | | | | | GSADYNPSLKSRVT | | | | | | |
| | | TCACCATATCCGTCGACACGTCCAAGAACCATTTCTCCCTG | | | | | | | ISVDTSKNHFSLKL | | | | | | |
| | | AAGCTGAGCTCTGTGACCGCCGCAGACACGGCTGTGTATTA | | | | | | | SSVTAADTAVYYCA | | | | | | |
| | | CTGTGCGAGGCGACCGACTACGGACTTCTACTACATGGACG | | | | | | | RRPTTDFYYMDVWG | | | | | | |
| | | TCTGGGGCAAAGGGACCACGGTCACCGTCTCCTCA | | | | | | | KGTTVTVSS | | | | | | |
| ADI-81644 | 1291 | CAGGTGCAGCTGTTGGAGTCGGGGGGAGGCTTGGTACAGCC | | | | | | 6975 | QVQLLESGGGLVQP | | 7326 | 7 | | 6 | |
| | | TGGCAGGTCCCTGCGACTCACCTGTGCAGCCTCTGGATTCA | | | | | | | GRSLRLTCAASGFT | | | | | | |
| | | CCTTTGATGATTATGCCATGCACTGGGTCCGGCAAGCTCCA | | | | | | | FDDYAMHWVRQAPG | | | | | | |
| | | GGGAAGGGCCTGGAGTGGGTCTCAGGTATTACTTGGAATAG | | | | | | | KGLEWVSGITWNSG | | | | | | |
| | | TGGTACCATAGGCTATGCGGACTCTGTGAAGGGCCGATTCA | | | | | | | TIGYADSVKGRFII | | | | | | |
| | | TCATTATCAGAGACAACGCCAAGAACTCCCTGTATCTCCAA | | | | | | | IRDNAKNSLYLQMN | | | | | | |
| | | ATGAACAGTCTGAGAGTTGAGGACACGGCCTTGTATTACTG | | | | | | | SLRVEDTALYYCVK | | | | | | |
| | | CGTAAAAGATAGCCGCGAAATCAAAACACTTATGGTTGAAG | | | | | | | DSREIKTLMVEEDY | | | | | | |
| | | AAGACTACTACATGGACGTCTGGGGCAAAGGGACCACGGTC | | | | | | | YMDVWGKGTTVTVS | | | | | | |
| | | ACCGTCTCCTCA | | | | | | | S | | | | | | |
| ADI-81858 | 1287 | GAGGTGCAGCTGGTGGAGTCTGGGGGAGGCGTGGTCCAGCC | | | | | | 6976 | EVQLVESGGGVVQP | | 7327 | 7 | | 7 | |
| | | TGGGAGGTCCCTGAGACTCTCCTGTGCAGCCTCTGGATTCA | | | | | | | GRSLRLSCAASGFT | | | | | | |
| | | CCTTCATTAACTATGGCATGCACTGGGTCCGCCAGGCTCCA | | | | | | | FINYGMHWVRQAPG | | | | | | |
| | | GGCAAGGGGCTGGAGTGGGTGGCAGCTATATCATATGATGG | | | | | | | KGLEWVAAISYDGS | | | | | | |
| | | AAGTGATGAATACTATGCAGACTCCGTGAAGGGCCGATTCA | | | | | | | DEYYADSVKGRFTI | | | | | | |
| | | CCATCTCCAGAGACGATTCCAAGAACACGGTGTATCTGCAA | | | | | | | SRDDSKNTVYLQMN | | | | | | |
| | | ATGAACAGCCTGAGAGCTGAGGACACGGCTGTGTATTACTG | | | | | | | SLRAEDTAVYYCAK | | | | | | |
| | | TGCGAAAGTGACCGCCTCCCATTATTACTACTACTACGGGA | | | | | | | VTASHYYYYYGMDV | | | | | | |
| | | TGGACGTCTGGGGCCAAGGGACCACGGTCACCGTCTCCTCA | | | | | | | WGQGTTVTVSS | | | | | | |
| ADI-81603 | 1291 | TGGGTCCTCGGTGAAGGTCTCCTGCAAGGCTTCTGGAGGCA | | | | | | 6977 | QVQLVQSGAEVKKP | | 7328 | 6 | | 5 | |
| | | CCTTCAGCAGCTATCCTATCAGCTGGGTGCGACAGGCCCCT | | | | | | | GSSVKVSCKASGGT | | | | | | |
| | | GGACAAGGGCTTGAGTGGATGGGAAGGATCATCCCTCCCCT | | | | | | | FSSYPISWVRQAPG | | | | | | |
| | | TGGTATATCAGACTACGCACAGAAGTTCCAGGGCAGAGTCA | | | | | | | QGLEWMGRIIPPLG | | | | | | |
| | | CAATAACCGCGGACAAATCCACGAGCACAGCCTACATGGAG | | | | | | | ISDYAQKFQGRVTI | | | | | | |
| | | CTGAGCAGCCTGACATCTGAGGACACGGCCGTGTATTACTG | | | | | | | TADKSTSTAYMELS | | | | | | |
| | | TGCGAGAGATCGAGGTTACTCCTCTGTTTCAGGGAGTAACT | | | | | | | SLTSEDTAVYYCAR | | | | | | |
| | | ACTACATGGACGTCTGGGGCAAAGGGACCACGGTCACCGTC | | | | | | | DRGYSSVSGSNYYM | | | | | | |
| | | TCCTCA | | | | | | | DVWGKGTTVTVSS | | | | | | |
| ADI-81535 | 1286 | TGGGTCCTCGGTGAAGGTCTCCTGCAAGGCTTCTGGAGGCA | | | | | | 6978 | QVQLVQSGAEVKKP | | 7329 | 5 | | 5 | |
| | | CCTTCAGCAGCAATCCTTTCAGCTGGGTGCGACAGGCCCCT | | | | | | | GSSVKVSCKASGGT | | | | | | |
| | | GGACAAGGGCTTGAGTGGATGGGAAGGATCATCCCTATCCT | | | | | | | FSSNPFSWVRQAPG | | | | | | |
| | | TGGTATACCAAACTACGCACAGAAGTTCCAGGGCAGAGTCA | | | | | | | QGLEWMGRIIPILG | | | | | | |
| | | CGTTTACCGCGGACAAATCCACGAGCACAGCCTACATGGAG | | | | | | | IPNYAQKFQGRVTF | | | | | | |
| | | TTGAGCAGCCTGAGATCTGAGGACACGGCCGTCTATTACTG | | | | | | | TADKSTSTAYMELS | | | | | | |
| | | TGCGAGAGATGCGGGTTACTCTGGTTCGGGGAGTGCTTACT | | | | | | | SLRSEDTAVYYCAR | | | | | | |
| | | ACTTTGACTACTGGGGCCAGGGAACCCTGGTCACCGTCTCC | | | | | | | DAGYSGSGSAYYFD | | | | | | |
| | | TCA | | | | | | | YWGQGTLVTVSS | | | | | | |
| ADI-81713 | 1287 | CAGGTCCAGCTTGTACAGTCTGGGCCTGAGGTGAAGAAGCC | | | | | | 6979 | QVQLVQSGPEVKKP | | 7330 | 5 | | 5 | |
| | | TGGGACCTCAGTGAAAGTCTCCTGCAAGGCTTCTGGATTCA | | | | | | | GTSVKVSCKASGFT | | | | | | |
| | | CCTTCATTACCTCTGCTGTGCAGTGGGTGCGACAGGCTCGT | | | | | | | FITSAVQWVRQARG | | | | | | |
| | | GGACAACGCCTTGAGTGGATAGGATGGATCGCCGTTGGCAG | | | | | | | QRLEWIGWIAVGRG | | | | | | |
| | | AGGTAACACAGACTACGCACAGAAGTTCCAGGAAAGAGTCA | | | | | | | NTDYAQKFQERVTI | | | | | | |
| | | CCATTACCAGGGACATGTCCACAAGCACAGCCTACATGGAG | | | | | | | TRDMSTSTAYMELS | | | | | | |
| | | CTGAGCAGCCTGAGATCCGAGGACACGGCCGTGTATTACTG | | | | | | | SLRSEDTAVYYCAA | | | | | | |
| | | TGCGGCCCTTAATTGTAATGTCACGACCTGCTCTGATGGTT | | | | | | | LNCNVTTCSDGFDM | | | | | | |
| | | TTGATATGTGGGGCCAAGGGACCACGGTCACCGTCTCCTCA | | | | | | | WGQGTTVTVSS | | | | | | |
| | VH | VH | | SEQ | | SEQ | | SEQ | | SEQ | | SEQ | | SEQ | |
| | CDR3 | Germ- | VH | ID | VH | ID | VH | ID | VH | ID | VH | ID | VH | ID | VH |
| Clone ID | Lineage | line | FR1 | NO: | CDR1 | NO: | FR2 | NO: | CDR2 | NO: | FR3 | NO: | CDR3 | NO: | FR4 |
| ADI-81816 | 90 | IGHV3- | EVQLL | 5417 | FTVSTN | 5628 | WVRQAP | 437 | VIYSGG | 6001 | RFTISR | 6311 | ARVVSDA | 6617 | WGQGTT |
| | | 53 | ESGGG | | YMS | | GKGLEW | | TTYYAD | | DNSKNT | | FDI | | VTVSS |
| | | | LIQRG | | | | VS | | SVKG | | LYLQMS | | | | |
| | | | GSLRL | | | | | | | | SLRAED | | | | |
| | | | SCAAS | | | | | | | | TAVYYC | | | | |
| | | | G | | | | | | | | | | | | |
| ADI-81895 | 70 | IGHV4- | EVQLL | 5346 | GSISSG | 5629 | WIRQHP | 5823 | YIYYSG | 675 | RVTISV | 1009 | ARTYYYD | 6618 | WGQGTL |
| | | 31 | ESGPG | | AYYWT | | GQGLEW | | ITYYNP | | DTSKNQ | | DNGNYYQ | | VTVSS |
| | | | LVKPS | | | | IG | | SLKS | | FSLKLS | | YYFDY | | |
| | | | QTLSL | | | | | | | | SVTAAD | | | | |
| | | | TCTVS | | | | | | | | TAVYYC | | | | |
| | | | G | | | | | | | | | | | | |
| ADI-81793 | 69 | IGHV3- | EVQLV | 5418 | VNLKEY | 5630 | WYRQAP | 5824 | TIS- | 6002 | RFTISR | 6312 | SIVSRDI | 6619 | WGRGTQ |
| | | 23 | ESGGG | | SMG | | GSARGA | | SGGAAF | | DNAKNE | | | | VTVSS |
| | | | FVQAG | | | | VA | | YSNAVT | | VYLQMN | | | | |
| | | | QSLRL | | | | | | G | | GLKDED | | | | |
| | | | SCTAS | | | | | | | | TGVYYC | | | | |
| | | | G | | | | | | | | | | | | |
| ADI-81724 | 1 | IGHV4- | EVQLL | 5346 | DSIASG | 5631 | WIRQHP | 5823 | NIYFTG | 6003 | RLSISV | 6313 | ARDGGSG | 6620 | WGQGIK |
| | | 31 | ESGPG | | GYYWT | | GQGLEW | | DTDYHP | | DTFRNR | | YHNLDY | | VTVSS |
| | | | LVKPS | | | | IG | | SLKS | | FSLKLT | | | | |
| | | | QTLSL | | | | | | | | SVTAAD | | | | |
| | | | TCTVS | | | | | | | | TAVYFC | | | | |
| | | | G | | | | | | | | | | | | |
| ADI-81599 | 59 | IGHV1- | QVQLV | 50 | GTFIRN | 306 | WVRQAP | 433 | RVIPLL | 637 | RVTIIA | 6314 | AREGTGY | 6621 | WGQGTT |
| | | 69 | QSGAE | | TIS | | GQGLEW | | NVVDYA | | DKSSST | | CDGGICP | | VTVSS |
| | | | VKKPG | | | | MG | | QKFQG | | VYMELT | | DAFDI | | |
| | | | SSVKV | | | | | | | | TLRSED | | | | |
| | | | SCKAS | | | | | | | | TAVYYC | | | | |
| | | | G | | | | | | | | | | | | |
| ADI-81705 | 75 | IGHV1- | RSSWC | 5419 | YTFTTY | 5632 | WVRQAP | 5825 | IINPDG | 6004 | RVTMTT | 6315 | ARGSLIP | 6622 | WGRGTT |
| | | 46 | SLGAE | | YIH | | GEGLEW | | GAITYA | | DTSTST | | AKDGFDI | | VTVSS |
| | | | VKKPG | | | | MG | | QKFRG | | VYMNVI | | | | |
| | | | ASVKV | | | | | | | | SLRSED | | | | |
| | | | SCKAS | | | | | | | | TAVYYC | | | | |
| | | | G | | | | | | | | | | | | |
| ADI-81760 | 36 | IGHV1- | EVQLV | 5320 | YTFTTY | 5632 | WVRQAP | 433 | IINPDG | 6005 | RLTMTT | 6316 | ARDLVAI | 6623 | WGQGTL |
| | | 46 | QSGAE | | YIH | | GQGLEW | | GARTYA | | DTSTTT | | PAAMCGA | | VTVSS |
| | | | VKKPG | | | | MG | | QHFQG | | VYMELS | | Y | | |
| | | | ASVKV | | | | | | | | NLGSED | | | | |
| | | | SCKAS | | | | | | | | TAMYYC | | | | |
| | | | G | | | | | | | | | | | | |
| ADI-81843 | 21 | IGHV3- | EVQLV | 5420 | FTFSRY | 5633 | WVRQAP | 431 | GISFDG | 6006 | RFTISR | 6317 | AKGLGTY | 6624 | WGQGTL |
| | | 30 | ESGGG | | GMH | | GKGLEW | | DDKDYA | | DNSKDT | | CSGGNCY | | VTVSS |
| | | | VVQPG | | | | VA | | DSLKG | | LYLQMN | | SHYFDY | | |
| | | | RSLRL | | | | | | | | GLSTED | | | | |
| | | | SCTAS | | | | | | | | TAVYFC | | | | |
| | | | G | | | | | | | | | | | | |
| | SEQ | | | | | | | SEQ | | | SEQ | VH | | VH Amino | |
| | ID | | | | | | | ID | | | ID | Nucleotide | | Acid | |
| Clone ID | NO: | VH DNA | | | | | | NO: | VH Protein | | NO: | Substitution | | Substitution | |
| ADI-81816 | 1287 | GAGGTGCAGCTGTTGGAGTCTGGAGGAGGCTTGATCCAGCG | | | | | | 6980 | EVQLLESGGGLIQR | | 7331 | 5 | | 4 | |
| | | GGGGGGGTCCCTGAGACTCTCCTGTGCAGCCTCTGGATTCA | | | | | | | GGSLRLSCAASGFT | | | | | | |
| | | CCGTCAGTACCAACTACATGAGCTGGGTCCGCCAGGCTCCA | | | | | | | VSTNYMSWVRQAPG | | | | | | |
| | | GGGAAGGGGCTGGAGTGGGTCTCAGTTATTTATAGCGGTGG | | | | | | | KGLEWVSVIYSGGT | | | | | | |
| | | TACCACATACTACGCAGACTCCGTGAAGGGCCGATTCACCA | | | | | | | TYYADSVKGRFTIS | | | | | | |
| | | TCTCCAGAGACAATTCCAAGAACACGCTGTATCTTCAAATG | | | | | | | RDNSKNTLYLQMSS | | | | | | |
| | | AGCAGCCTGAGAGCCGAGGACACGGCCGTGTATTACTGTGC | | | | | | | LRAEDTAVYYCARV | | | | | | |
| | | GAGAGTCGTGTCGGATGCTTTTGATATCTGGGGCCAAGGGA | | | | | | | VSDAFDIWGQGTTV | | | | | | |
| | | CCACGGTCACCGTCTCCTCA | | | | | | | TVSS | | | | | | |
| ADI-81895 | 1286 | GAGGTGCAGCTGTTGGAGTCGGGCCCAGGACTGGTGAAGCC | | | | | | 6981 | EVQLLESGPGLVKP | | 7332 | 5 | | 5 | |
| | | TTCACAGACCCTGTCCCTCACCTGCACTGTCTCTGGTGGCT | | | | | | | SQTLSLTCTVSGGS | | | | | | |
| | | CCATCAGCAGTGGTGCTTACTACTGGACCTGGATCCGCCAG | | | | | | | ISSGAYYWTWIRQH | | | | | | |
| | | CACCCAGGGCAGGGCCTGGAGTGGATTGGGTACATCTATTA | | | | | | | PGQGLEWIGYIYYS | | | | | | |
| | | CAGTGGGATCACCTACTACAATCCGTCCCTCAAGAGTCGAG | | | | | | | GITYYNPSLKSRVT | | | | | | |
| | | TCACCATATCAGTAGACACGTCTAAGAACCAGTTCTCCCTG | | | | | | | ISVDTSKNQFSLKL | | | | | | |
| | | AAGCTGAGCTCTGTGACTGCCGCGGACACGGCCGTTTATTA | | | | | | | SSVTAADTAVYYCA | | | | | | |
| | | CTGTGCGAGGACGTATTACTATGATGATAATGGTAATTACT | | | | | | | RTYYYDDNGNYYQY | | | | | | |
| | | ACCAGTACTACTTTGACTACTGGGGCCAGGGAACCCTGGTC | | | | | | | YFDYWGQGTLVTVS | | | | | | |
| | | ACCGTCTCCTCA | | | | | | | S | | | | | | |
| ADI-81793 | 6814 | GAGGTGCAGCTCGTGGAGTCTGGGGGAGGCTTTGTACAGGC | | | | | | 6982 | EVQLVESGGGFVQA | | 7333 | 54 | | 34 | |
| | | TGGGCAGTCTCTGAGACTCTCCTGTACAGCCTCTGGAGTCA | | | | | | | GQSLRLSCTASGVN | | | | | | |
| | | ACCTCAAAGAGTATAGTATGGGCTGGTACCGCCAGGCTCCA | | | | | | | LKEYSMGWYRQAPG | | | | | | |
| | | GGGAGCGCGCGCGGAGCGGTCGCAACTATCAGTAGTGGTGG | | | | | | | SARGAVATISSGGA | | | | | | |
| | | TGCTGCATTCTATTCAAATGCCGTGACGGGCCGATTCACCA | | | | | | | AFYSNAVTGRFTIS | | | | | | |
| | | TCTCCAGAGACAACGCCAAGAACGAAGTGTATCTGCAGATG | | | | | | | RDNAKNEVYLQMNG | | | | | | |
| | | AACGGCCTGAAAGATGAGGACACGGGCGTCTATTACTGTAG | | | | | | | LKDEDTGVYYCSIV | | | | | | |
| | | CATCGTGTCGCGTGACATATGGGGCCGGGGAACCCAGGTCA | | | | | | | SRDIWGRGTQVTVS | | | | | | |
| | | CCGTCTCTTCA | | | | | | | S | | | | | | |
| ADI-81724 | 6815 | GAGGTGCAGCTGTTGGAGTCGGGCCCAGGACTGGTGAAGCC | | | | | | 6983 | EVQLLESGPGLVKP | | 7334 | 21 | | 18 | |
| | | TTCACAGACCCTGTCCCTCACCTGCACTGTCTCTGGTGACT | | | | | | | SQTLSLTCTVSGDS | | | | | | |
| | | CCATCGCCAGTGGTGGTTATTACTGGACCTGGATCCGCCAG | | | | | | | IASGGYYWTWIRQH | | | | | | |
| | | CACCCCGGGCAGGGCCTGGAGTGGATTGGGAACATCTATTT | | | | | | | PGQGLEWIGNIYFT | | | | | | |
| | | CACTGGGGACACCGACTACCACCCGTCCCTCAAGAGTCGAC | | | | | | | GDTDYHPSLKSRLS | | | | | | |
| | | TTAGCATATCAGTAGACACGTTTAGGAACCGGTTCTCCCTG | | | | | | | ISVDTFRNRFSLKL | | | | | | |
| | | AAGTTGACCTCTGTGACTGCCGCGGACACGGCCGTATATTT | | | | | | | TSVTAADTAVYFCA | | | | | | |
| | | TTGTGCGAGAGACGGCGGTAGTGGCTACCACAACCTTGACT | | | | | | | RDGGSGYHNLDYWG | | | | | | |
| | | ATTGGGGCCAGGGAATCAAGGTCACCGTCTCCTCA | | | | | | | QGIKVTVSS | | | | | | |
| ADI-81599 | 1287 | TGGGTCCTCGGTGAAGGTCTCCTGCAAGGCTTCTGGAGGCA | | | | | | 6984 | QVQLVQSGAEVKKP | | 7335 | 19 | | 14 | |
| | | CCTTCATCAGGAACACTATAAGTTGGGTGCGACAGGCCCCT | | | | | | | GSSVKVSCKASGGT | | | | | | |
| | | GGACAGGGGCTTGAGTGGATGGGAAGGGTCATCCCTCTACT | | | | | | | FIRNTISWVRQAPG | | | | | | |
| | | TAATGTAGTTGACTACGCACAGAAGTTCCAGGGCAGAGTCA | | | | | | | QGLEWMGRVIPLLN | | | | | | |
| | | CGATAATCGCGGACAAATCTTCGAGCACAGTCTACATGGAG | | | | | | | VVDYAQKFQGRVTI | | | | | | |
| | | TTGACTACCCTGAGATCTGAGGACACGGCCGTCTATTACTG | | | | | | | IADKSSSTVYMELT | | | | | | |
| | | TGCGAGAGAGGGGACCGGCTATTGTGATGGTGGTATATGCC | | | | | | | TLRSEDTAVYYCAR | | | | | | |
| | | CTGATGCTTTTGATATCTGGGGCCAAGGGACCACGGTCACC | | | | | | | EGTGYCDGGICPDA | | | | | | |
| | | GTCTCCTCA | | | | | | | FDIWGQGTTVTVSS | | | | | | |
| ADI-81705 | 1294 | AGGTCCAGCTGGTGCAGTCTGGGCGCTGAGGTGAAGAAGCC | | | | | | 6985 | RSSWCSLGAEVKKP | | 7336 | 17 | | 12 | |
| | | TGGGGCCTCAGTGAAGGTTTCCTGCAAGGCATCTGGATACA | | | | | | | GASVKVSCKASGYT | | | | | | |
| | | CCTTCACCACCTACTATATTCACTGGGTGCGACAGGCCCCT | | | | | | | FTTYYIHWVRQAPG | | | | | | |
| | | GGAGAAGGGCTTGAGTGGATGGGAATAATCAACCCTGATGG | | | | | | | EGLEWMGIINPDGG | | | | | | |
| | | TGGTGCCATAACTTACGCACAGAAGTTCCGGGGCAGAGTCA | | | | | | | AITYAQKFRGRVTM | | | | | | |
| | | CCATGACCACGGACACGTCCACGAGTACAGTCTACATGAAT | | | | | | | TTDTSTSTVYMNVI | | | | | | |
| | | GTAATCAGCCTGAGATCTGAAGACACGGCCGTATATTACTG | | | | | | | SLRSEDTAVYYCAR | | | | | | |
| | | TGCGAGAGGGTCATTAATCCCAGCAAAGGATGGTTTTGATA | | | | | | | GSLIPAKDGFDIWG | | | | | | |
| | | TCTGGGGCCGAGGGACCACGGTCACCGTCTCCTCA | | | | | | | RGTTVTVSS | | | | | | |
| ADI-81760 | 1286 | GAGGTGCAGCTGGTGCAGTCTGGGGCTGAGGTGAAGAAGCC | | | | | | 6986 | EVQLVQSGAEVKKP | | 7337 | 17 | | 13 | |
| | | TGGGGCCTCAGTGAAGGTTTCCTGCAAGGCATCTGGATACA | | | | | | | GASVKVSCKASGYT | | | | | | |
| | | CCTTTACCACCTACTATATTCACTGGGTGCGACAGGCCCCT | | | | | | | FTTYYIHWVRQAPG | | | | | | |
| | | GGACAAGGGCTTGAGTGGATGGGAATAATCAACCCTGATGG | | | | | | | QGLEWMGIINPDGG | | | | | | |
| | | TGGTGCCAGAACCTACGCACAGCACTTCCAGGGCAGACTCA | | | | | | | ARTYAQHFQGRLTM | | | | | | |
| | | CCATGACCACGGACACGTCCACGACCACAGTCTACATGGAA | | | | | | | TTDTSTTTVYMELS | | | | | | |
| | | CTGAGCAACCTGGGCTCTGAGGACACGGCCATGTATTACTG | | | | | | | NLGSEDTAMYYCAR | | | | | | |
| | | TGCGAGAGATCTTGTCGCGATACCAGCTGCTATGTGTGGCG | | | | | | | DLVAIPAAMCGAYW | | | | | | |
| | | CCTACTGGGGCCAGGGAACCCTGGTCACCGTCTCCTCA | | | | | | | GQGTLVTVSS | | | | | | |
| ADI-81843 | 1286 | GAGGTGCAGCTGGTGGAGTCTGGGGGAGGCGTGGTCCAGCC | | | | | | 6987 | EVQLVESGGGVVQP | | 7338 | 16 | | 13 | |
| | | TGGGAGGTCCCTGAGACTCTCCTGTACAGCCTCTGGATTCA | | | | | | | GRSLRLSCTASGFT | | | | | | |
| | | CCTTCAGTCGTTATGGCATGCACTGGGTCCGCCAGGCTCCA | | | | | | | FSRYGMHWVRQAPG | | | | | | |
| | | GGCAAGGGGCTGGAGTGGGTGGCAGGTATATCGTTTGATGG | | | | | | | KGLEWVAGISFDGD | | | | | | |
| | | AGATGACAAAGACTATGCAGACTCCCTGAAGGGCCGATTCA | | | | | | | DKDYADSLKGRFTI | | | | | | |
| | | CCATCTCCAGAGACAATTCCAAGGACACGCTGTATCTCCAA | | | | | | | SRDNSKDTLYLQMN | | | | | | |
| | | ATGAACGGCCTGAGCACTGAGGACACGGCTGTGTATTTCTG | | | | | | | GLSTEDTAVYFCAK | | | | | | |
| | | TGCGAAGGGTCTGGGGACGTATTGTAGTGGTGGCAACTGCT | | | | | | | GLGTYCSGGNCYSH | | | | | | |
| | | ACTCTCACTACTTTGACTACTGGGGCCAGGGAACCCTGGTC | | | | | | | YFDYWGQGTLVTVS | | | | | | |
| | | ACCGTCTCCTCA | | | | | | | S | | | | | | |
| | VH | VH | | SEQ | | SEQ | | SEQ | | SEQ | | SEQ | | SEQ | |
| | CDR3 | Germ- | VH | ID | VH | ID | VH | ID | VH | ID | VH | ID | VH | ID | VH |
| Clone ID | Lineage | line | FR1 | NO: | CDR1 | NO: | FR2 | NO: | CDR2 | NO: | FR3 | NO: | CDR3 | NO: | FR4 |
| ADI-81887 | 63 | IGHV3- | EVQLV | 5421 | VSFSSS | 5634 | WVRQAP | 431 | VISNDG | 6007 | RFTISR | 6318 | ANDYGDL | 6625 | WGQGAL |
| | | 30 | ESGGG | | GMH | | GKGLEW | | NYKSYS | | DPSKNT | | VTWFDY | | VTVSS |
| | | | VVQPG | | | | VA | | DSVKG | | LYLQMN | | | | |
| | | | RSLRL | | | | | | | | SLRGED | | | | |
| | | | ACTAS | | | | | | | | TAVYYC | | | | |
| | | | G | | | | | | | | | | | | |
| ADI-81580 | 41 | IGHV1- | RYQLV | 5422 | GTF- | 364 | WVRQAP | 433 | RIIPIL | 6008 | RVTITA | 6319 | AREGGST | 6626 | WGKGTL |
| | | 69 | QSGAE | | SYNIN | | GQGLEW | | GIPHYA | | DKSTST | | TAYFPH | | VTVSS |
| | | | VKKPG | | | | MG | | QTFQD | | LYMELS | | | | |
| | | | SSVKI | | | | | | | | SLRSED | | | | |
| | | | SCQAS | | | | | | | | TAIYYC | | | | |
| | | | G | | | | | | | | | | | | |
| ADI-81591 | 51 | IGHV1- | QVQLV | 5423 | YTFISQ | 5635 | WVRQAP | 433 | IINPDA | 6009 | RLTMTT | 6320 | TRADDFI | 6627 | WGRGTM |
| | | 46 | QSGAE | | YIH | | GQGLEW | | GSTTYA | | DTSTST | | PSPFGAF | | VTVSS |
| | | | VKKPG | | | | MG | | QQFQG | | VYMELR | | EI | | |
| | | | ASVQV | | | | | | | | SLRSED | | | | |
| | | | SCKAS | | | | | | | | TAVYYC | | | | |
| | | | G | | | | | | | | | | | | |
| ADI-81731 | 8 | IGHV1- | EVQLV | 5424 | GSFSNF | 5636 | WVRQAP | 433 | GIIPLF | 6010 | RVTVTA | 6321 | ARGSLYH | 6628 | RGNGTT |
| | | 69 | ESGSE | | AFN | | GQGLEW | | GAPNYA | | DKSTGT | | DSSRGSL | | VTVSS |
| | | | VKKPG | | | | MG | | QKFQG | | AHMELS | | DNHYYME | | |
| | | | SSVKV | | | | | | | | SLRSED | | V | | |
| | | | SCKAS | | | | | | | | TAIYYC | | | | |
| | | | G | | | | | | | | | | | | |
| ADI-81750 | 26 | IGHV3- | EVQLV | 5425 | VTFDGS | 5637 | WVRQVP | 5826 | LISGHG | 6011 | RFTISR | 6322 | VKDAVLV | 6629 | WGRGTL |
| | | 43 | ESGGG | | AMH | | GRGLEW | | GSTYYA | | DNSANS | | VYGMGNW | | VTVSS |
| | | | VVQPG | | | | VS | | ESVKG | | LYLQMN | | YFDL | | |
| | | | GSLRL | | | | | | | | SLSTED | | | | |
| | | | SCLGY | | | | | | | | TAFYYC | | | | |
| | | | G | | | | | | | | | | | | |
| ADI-81830 | 9 | IGHV4- | QVQLQ | 5426 | GSFNTF | 5638 | WIRQPA | 5827 | DINHSG | 6012 | RLTISV | 6323 | ARGRPGW | 6630 | WGQGTL |
| | | 34 | QWGAG | | FWT | | GRGLEW | | NTNYNP | | DTSKNQ | | ELIPFFD | | VTVSS |
| | | | LLKPS | | | | IG | | SLKS | | FSLKLS | | S | | |
| | | | ENLSL | | | | | | | | SVTAAD | | | | |
| | | | TCGVS | | | | | | | | TAVYYC | | | | |
| | | | G | | | | | | | | | | | | |
| ADI-81774 | 50 | IGHV1- | EVQLV | 5402 | GSFSTF | 5639 | WVRQAP | 5828 | RISPSQ | 6013 | RVSITA | 6324 | ARDLGAG | 6631 | WGQGTL |
| | | 69 | ESGAE | | AIS | | GQGLEW | | GISNYA | | DKSTST | | SYYRHFD | | VTVSS |
| | | | VKKPG | | | | VG | | QRFQG | | ASMELS | | S | | |
| | | | SSVKV | | | | | | | | SLRSED | | | | |
| | | | SCKAS | | | | | | | | TAVYFC | | | | |
| | | | G | | | | | | | | | | | | |
| ADI-81804 | 80 | IGHV1- | QVQLV | 5427 | YTFSNY | 5640 | WVRQAP | 433 | LINPRG | 6014 | RVTMSR | 6325 | ARDPGVV | 6632 | WGQGTL |
| | | 46 | QSGVE | | YIL | | GQGLEW | | GGTSYA | | DTSTST | | DPLSPHP | | VTVSS |
| | | | VKKPG | | | | MG | | HKFQG | | AYMELT | | LPRF | | |
| | | | ASVML | | | | | | | | SLRSED | | | | |
| | | | SCKAS | | | | | | | | TAVYYC | | | | |
| | | | G | | | | | | | | | | | | |
| | SEQ | | | | | | | SEQ | | | SEQ | VH | | VH Amino | |
| | ID | | | | | | | ID | | | ID | Nucleotide | | Acid | |
| Clone ID | NO: | VH DNA | | | | | | NO: | VH Protein | | NO: | Substitution | | Substitution | |
| ADI-81887 | 1285 | GAGGTGCAGCTGGTGGAGTCTGGGGGAGGCGTGGTCCAGCC | | | | | | 6988 | EVQLVESGGGVVQP | | 7339 | 16 | | 12 | |
| | | TGGGAGGTCCCTGAGACTCGCCTGCACAGCCTCTGGAGTCT | | | | | | | GRSLRLACTASGVS | | | | | | |
| | | CCTTCAGTAGTTCTGGCATGCACTGGGTCCGCCAGGCTCCA | | | | | | | FSSSGMHWVRQAPG | | | | | | |
| | | GGCAAGGGGCTGGAGTGGGTGGCAGTTATATCAAATGATGG | | | | | | | KGLEWVAVISNDGN | | | | | | |
| | | AAATTACAAATCTTATTCAGACTCCGTGAAGGGCCGATTCA | | | | | | | YKSYSDSVKGRFTI | | | | | | |
| | | CCATCTCCAGAGACCCTTCCAAGAACACACTGTATCTGCAA | | | | | | | SRDPSKNTLYLQMN | | | | | | |
| | | ATGAACAGCCTGAGAGGAGAGGACACGGCTGTGTATTATTG | | | | | | | SLRGEDTAVYYCAN | | | | | | |
| | | TGCAAACGACTACGGTGACTTAGTAACCTGGTTTGACTACT | | | | | | | DYGDLVTWFDYWGQ | | | | | | |
| | | GGGGCCAGGGAGCCCTGGTCACCGTCTCCTCA | | | | | | | GALVTVSS | | | | | | |
| ADI-81580 | 6816 | AGGTACCAGCTGGTGCAGTCTGGGGCTGAGGTGAAGAAGCC | | | | | | 6989 | RYQLVQSGAEVKKP | | 7340 | 15 | | 11 | |
| | | TGGGTCCTCGGTGAAAATCTCCTGCCAGGCTTCTGGAGGCA | | | | | | | GSSVKISCQASGGT | | | | | | |
| | | CTTTCAGTTATAATATAAACTGGGTGCGACAGGCCCCTGGA | | | | | | | FSYNINWVRQAPGQ | | | | | | |
| | | CAAGGACTTGAGTGGATGGGAAGGATCATCCCTATCCTTGG | | | | | | | GLEWMGRIIPILGI | | | | | | |
| | | AATACCACACTACGCACAGACGTTTCAGGACAGAGTCACGA | | | | | | | PHYAQTFQDRVTIT | | | | | | |
| | | TAACCGCGGACAAATCCACGAGCACCCTCTACATGGAGCTG | | | | | | | ADKSTSTLYMELSS | | | | | | |
| | | AGCAGCCTGAGATCTGAGGACACGGCCATATATTACTGTGC | | | | | | | LRSEDTAIYYCARE | | | | | | |
| | | GAGAGAAGGTGGTTCCACCACTGCATACTTCCCGCACTGGG | | | | | | | GGSTTAYFPHWGKG | | | | | | |
| | | GCAAGGGCACCCTGGTCACCGTCTCCTCA | | | | | | | TLVTVSS | | | | | | |
| ADI-81591 | 6817 | CAGGTGCAGCTGGTGCAGTCTGGGGCTGAGGTGAAGAAGCC | | | | | | 6990 | QVQLVQSGAEVKKP | | 7341 | 15 | | 11 | |
| | | TGGGGCCTCAGTGCAGGTTTCCTGCAAGGCATCTGGATACA | | | | | | | GASVQVSCKASGYT | | | | | | |
| | | CCTTCATTAGCCAGTATATACACTGGGTGCGACAGGCCCCT | | | | | | | FISQYIHWVRQAPG | | | | | | |
| | | GGACAAGGCCTAGAGTGGATGGGAATAATCAACCCTGACGC | | | | | | | QGLEWMGIINPDAG | | | | | | |
| | | TGGTAGCACAACCTACGCACAGCAGTTCCAGGGCAGACTCA | | | | | | | STTYAQQFQGRLTM | | | | | | |
| | | CCATGACCACGGACACGTCCACGAGCACAGTGTACATGGAA | | | | | | | TTDTSTSTVYMELR | | | | | | |
| | | CTGAGGAGCCTGAGATCTGAGGACACGGCCGTTTATTACTG | | | | | | | SLRSEDTAVYYCTR | | | | | | |
| | | TACTAGAGCCGACGATTTTATTCCCTCGCCTTTCGGTGCTT | | | | | | | ADDFIPSPFGAFEI | | | | | | |
| | | TTGAGATCTGGGGCCGAGGAACAATGGTCACCGTCTCCTCA | | | | | | | WGRGTMVTVSS | | | | | | |
| ADI-81731 | 6818 | GAGGTGCAGCTGGTGGAGTCTGGGTCTGAGGTGAAGAAGCC | | | | | | 6991 | EVQLVESGSEVKKP | | 7342 | 15 | | 12 | |
| | | TGGGTCCTCGGTGAAGGTCTCCTGCAAGGCTTCTGGAGGCA | | | | | | | GSSVKVSCKASGGS | | | | | | |
| | | GTTTCAGCAACTTTGCTTTCAACTGGGTGCGACAGGCCCCT | | | | | | | FSNFAFNWVRQAPG | | | | | | |
| | | GGACAAGGCCTTGAGTGGATGGGAGGGATCATCCCTCTCTT | | | | | | | QGLEWMGGIIPLFG | | | | | | |
| | | TGGTGCACCAAACTACGCACAGAAGTTCCAGGGCAGAGTCA | | | | | | | APNYAQKFQGRVTV | | | | | | |
| | | CTGTAACCGCGGACAAATCCACGGGCACTGCCCACATGGAG | | | | | | | TADKSTGTAHMELS | | | | | | |
| | | TTGAGCAGCCTGAGATCTGAAGACACGGCCATATATTACTG | | | | | | | SLRSEDTAIYYCAR | | | | | | |
| | | TGCGAGGGGCTCTCTTTATCATGATTCCAGCCGGGGAAGTT | | | | | | | GSLYHDSSRGSLDN | | | | | | |
| | | TGGACAACCATTATTACATGGAGGTCCGGGGCAATGGGACC | | | | | | | HYYMEVRGNGTTVT | | | | | | |
| | | ACGGTCACCGTCTCCTCA | | | | | | | VSS | | | | | | |
| ADI-81750 | 1288 | TGGGGGGTCCCTGAGACTCTCCTGTCTAGGCTATGGAGTCA | | | | | | 6992 | EVQLVESGGGVVQP | | 7343 | 15 | | 13 | |
| | | CCTTTGATGGTTCTGCCATGCACTGGGTCCGTCAAGTTCCA | | | | | | | GGSLRLSCLGYGVT | | | | | | |
| | | GGGAGGGGTCTGGAGTGGGTCTCCCTTATTAGTGGGCATGG | | | | | | | FDGSAMHWVRQVPG | | | | | | |
| | | TGGTAGCACATACTATGCAGAGTCTGTGAAGGGCCGATTCA | | | | | | | RGLEWVSLISGHGG | | | | | | |
| | | CCATCTCCAGAGACAACAGCGCAAACTCTCTATATCTCCAA | | | | | | | STYYAESVKGRFTI | | | | | | |
| | | ATGAACAGTCTGAGCACTGAGGACACCGCCTTCTACTACTG | | | | | | | SRDNSANSLYLQMN | | | | | | |
| | | TGTAAAAGACGCCGTGTTAGTGGTGTATGGCATGGGGAACT | | | | | | | SLSTEDTAFYYCVK | | | | | | |
| | | GGTACTTCGATCTCTGGGGCCGTGGCACCCTGGTCACCGTC | | | | | | | DAVLVVYGMGNWYF | | | | | | |
| | | TCCTCA | | | | | | | DLWGRGTLVTVSS | | | | | | |
| ADI-81830 | 1286 | CAGGTGCAGCTACAGCAGTGGGGCGCAGGGCTGTTGAAGCC | | | | | | 6993 | QVQLQQWGAGLLKP | | 7344 | 15 | | 13 | |
| | | TTCGGAGAACCTGTCCCTCACCTGCGGTGTCTCTGGTGGTT | | | | | | | SENLSLTCGVSGGS | | | | | | |
| | | CCTTCAACACTTTCTTCTGGACCTGGATCCGCCAGCCCGCA | | | | | | | FNTFFWTWIRQPAG | | | | | | |
| | | GGGAGGGGGCTGGAGTGGATTGGGGACATCAATCATAGTGG | | | | | | | RGLEWIGDINHSGN | | | | | | |
| | | AAACACCAACTACAACCCGTCCCTCAAGAGTCGACTCACCA | | | | | | | TNYNPSLKSRLTIS | | | | | | |
| | | TTTCAGTAGACACGTCCAAGAACCAGTTCTCCCTGAAACTG | | | | | | | VDTSKNQFSLKLSS | | | | | | |
| | | AGTTCTGTGACCGCCGCGGACACGGCTGTGTATTACTGTGC | | | | | | | VTAADTAVYYCARG | | | | | | |
| | | GAGAGGCAGGCCGGGGTGGGAGCTCATCCCCTTCTTTGACT | | | | | | | RPGWELIPFFDSWG | | | | | | |
| | | CCTGGGGCCAGGGAACCCTGGTCACCGTCTCCTCA | | | | | | | QGTLVTVSS | | | | | | |
| ADI-81774 | 1286 | GAGGTGCAGCTGGTGGAGTCTGGGGCTGAAGTGAAGAAGCC | | | | | | 6994 | EVQLVESGAEVKKP | | 7345 | 14 | | 12 | |
| | | TGGGTCCTCGGTGAAAGTCTCCTGCAAGGCTTCTGGAGGCA | | | | | | | GSSVKVSCKASGGS | | | | | | |
| | | GCTTCAGCACATTTGCCATCAGCTGGGTGCGACAGGCCCCT | | | | | | | FSTFAISWVRQAPG | | | | | | |
| | | GGACAAGGGCTTGAGTGGGTGGGAAGGATAAGCCCCAGCCA | | | | | | | QGLEWVGRISPSQG | | | | | | |
| | | GGGTATATCAAACTACGCACAGAGGTTCCAGGGCAGAGTCT | | | | | | | ISNYAQRFQGRVSI | | | | | | |
| | | CGATTACCGCGGACAAATCCACGAGCACAGCCTCCATGGAA | | | | | | | TADKSTSTASMELS | | | | | | |
| | | CTCAGCAGCCTGAGATCTGAGGACACGGCCGTCTATTTCTG | | | | | | | SLRSEDTAVYFCAR | | | | | | |
| | | TGCGCGAGATCTAGGTGCGGGGAGTTATTATCGACACTTTG | | | | | | | DLGAGSYYRHFDSW | | | | | | |
| | | ACTCCTGGGGCCAGGGAACCCTGGTCACCGTCTCCTCA | | | | | | | GQGTLVTVSS | | | | | | |
| ADI-81804 | 1286 | TGGGGCCTCAGTGATGCTTTCCTGCAAGGCATCTGGATACA | | | | | | 6995 | QVQLVQSGVEVKKP | | 7346 | 14 | | 13 | |
| | | CCTTCAGCAACTACTATATACTCTGGGTGCGACAGGCCCCT | | | | | | | GASVMLSCKASGYT | | | | | | |
| | | GGACAAGGGCTTGAGTGGATGGGACTAATCAACCCGCGTGG | | | | | | | FSNYYILWVRQAPG | | | | | | |
| | | TGGTGGCACAAGCTACGCACACAAGTTCCAGGGTAGAGTCA | | | | | | | QGLEWMGLINPRGG | | | | | | |
| | | CCATGAGTAGGGACACGTCCACGAGCACTGCCTACATGGAG | | | | | | | GTSYAHKFQGRVTM | | | | | | |
| | | TTGACCAGCCTGAGATCTGAGGACACGGCCGTGTATTACTG | | | | | | | SRDTSTSTAYMELT | | | | | | |
| | | TGCGAGAGATCCGGGTGTCGTGGACCCGCTGAGCCCCCACC | | | | | | | SLRSEDTAVYYCAR | | | | | | |
| | | CCCTGCCGCGGTTCTGGGGCCAGGGAACCCTGGTCACCGTC | | | | | | | DPGVVDPLSPHPLP | | | | | | |
| | | TCCTCA | | | | | | | RFWGQGTLVTVSS | | | | | | |
| | VH | VH | | SEQ | | SEQ | | SEQ | | SEQ | | SEQ | | SEQ | |
| | CDR3 | Germ- | VH | ID | VH | ID | VH | ID | VH | ID | VH | ID | VH | ID | VH |
| Clone ID | Lineage | line | FR1 | NO: | CDR1 | NO: | FR2 | NO: | CDR2 | NO: | FR3 | NO: | CDR3 | NO: | FR4 |
| ADI-81544 | 9 | IGHV1- | QVQLV | 50 | GPFGSS | 5641 | WVRQAP | 433 | RIIPIL | 739 | RVTITA | 6326 | ARDVGYS | 6633 | WGQGTL |
| | | 69 | QSGAE | | PIS | | GQGLEW | | GVADYA | | DRSTST | | GSGSSYY | | VTVSS |
| | | | VKKPG | | | | MG | | QKFQG | | TYMELS | | FDP | | |
| | | | SSVKV | | | | | | | | SLRSED | | | | |
| | | | SCKAS | | | | | | | | TARYYC | | | | |
| | | | G | | | | | | | | | | | | |
| ADI-81691 | 61 | IGHV3- | EVQLV | 5333 | FTLSND | 5642 | WVRQAP | 437 | AIGSAG | 6015 | RFTISR | 6327 | VRGTMTT | 6634 | WGRGTT |
| | | 13 | ESGGG | | DIH | | GKGLEW | | DTYYAD | | EKANNS | | LGVFQYY | | VTVSS |
| | | | LVQPG | | | | VS | | SEKG | | LYLQMH | | YKEI | | |
| | | | GSLRL | | | | | | | | SLRAGD | | | | |
| | | | SCVAS | | | | | | | | TAVYYC | | | | |
| | | | G | | | | | | | | | | | | |
| ADI-81571 | 34 | IGHV1- | QVQLQ | 86 | GSFNSH | 5643 | WVRQAP | 433 | RIIPIL | 739 | RVNIIA | 6328 | ARDVGYS | 6635 | WGQGTL |
| | | 69 | QSGAE | | SIS | | GQGLEW | | GVADYA | | DKSTGT | | GSGSAYY | | VTVSS |
| | | | VKKPG | | | | MG | | QKFQG | | AYMELR | | FDL | | |
| | | | SSVKV | | | | | | | | SLRSED | | | | |
| | | | SCKAS | | | | | | | | TAVYYC | | | | |
| | | | G | | | | | | | | | | | | |
| ADI-81850 | 28 | IGHV3- | EVQLV | 5428 | FTFSTY | 5644 | WVRQAP | 431 | VISDDG | 6016 | RFTISR | 6329 | TREGPMT | 6636 | WGQGTL |
| | | 30 | ESGGG | | AMH | | GKGLEW | | RYKDSA | | DNSQNT | | TVTYFDY | | VTVSS |
| | | | VVQPG | | | | VA | | DSVKG | | LYLQMS | | | | |
| | | | RSLRL | | | | | | | | SLRPED | | | | |
| | | | SCAAF | | | | | | | | TAIYYC | | | | |
| | | | G | | | | | | | | | | | | |
| ADI-81628 | 1 | IGHV4- | EVQLQ | 5429 | GSFSGN | 5645 | WIRQSP | 434 | EINHSG | 6017 | RVTISI | 6330 | AREVVVI | 6637 | WGAGTT |
| | | 34 | QSGAG | | YWS | | GKGLEW | | TTTYNP | | DTSKNQ | | PAATIRY | | VTVSS |
| | | | LLKPS | | | | IG | | SLKS | | FSLRLS | | SYNYYMD | | |
| | | | ETLSL | | | | | | | | SVTAAD | | | | |
| | | | TCGVF | | | | | | | | TAVYYC | | | | |
| | | | G | | | | | | | | | | | | |
| ADI-81678 | 48 | IGHV5- | EVQLL | 5430 | YSFTTY | 5646 | WVRQMP | 476 | RIDPSD | 6018 | RVSISA | 6331 | ARGRGSA | 6638 | WGQGTL |
| | | 10-1 | ESGAE | | WIT | | GKGLEW | | SYTKYS | | DKSTSN | | YDIMEIE | | VTAPQ |
| | | | VKKPG | | | | MG | | PSFQG | | AYMQWS | | Y | | |
| | | | ESLRI | | | | | | | | SLQASD | | | | |
| | | | SCKGS | | | | | | | | TAIYYC | | | | |
| | | | G | | | | | | | | | | | | |
| ADI-81738 | 15 | IGHV5- | QVQLV | 5431 | YTFSTY | 5619 | WVRQMP | 476 | IIFPGD | 5987 | QVTISA | 6332 | ATLKLEG | 6603 | WGQGTL |
| | | 51 | QSGAE | | WIG | | GKGLEW | | SDTRYS | | DKSIST | | FTPVDYN | | VTVSS |
| | | | VRKPG | | | | MG | | PSFQG | | AYVQWS | | TLPALY | | |
| | | | ESLKI | | | | | | | | SLKASD | | | | |
| | | | SCKAS | | | | | | | | TAMYFC | | | | |
| | | | G | | | | | | | | | | | | |
| ADI-81667 | 38 | IGHV3- | QVQLV | 5432 | FTVSNN | 5647 | WVRQPP | 5829 | FIYSGG | 6019 | RFTITR | 6333 | ATSPAVG | 6639 | WGQGTM |
| | | 66 | ESGGD | | YMS | | GKGLEW | | NTFYAD | | DNSKNT | | V | | VTVSS |
| | | | LVQPG | | | | VS | | SVKG | | LWLQMN | | | | |
| | | | GSLRL | | | | | | | | SLRAED | | | | |
| | | | SCAVS | | | | | | | | TAVYYC | | | | |
| | | | G | | | | | | | | | | | | |
| | SEQ | | | | | | | SEQ | | | SEQ | VH | | VH Amino | |
| | ID | | | | | | | ID | | | ID | Nucleotide | | Acid | |
| Clone ID | NO: | VH DNA | | | | | | NO: | VH Protein | | NO: | Substitution | | Substitution | |
| ADI-81544 | 1286 | TGGGTCCTCGGTGAAGGTCTCCTGCAAGGCTTCTGGAGGCC | | | | | | 6996 | QVQLVQSGAEVKKP | | 7347 | 13 | | 9 | |
| | | CCTTCGGCAGTTCTCCAATCAGTTGGGTGCGGCAGGCCCCT | | | | | | | GSSVKVSCKASGGP | | | | | | |
| | | GGACAAGGGCTTGAGTGGATGGGAAGGATCATCCCTATTCT | | | | | | | FGSSPISWVRQAPG | | | | | | |
| | | TGGTGTGGCGGACTACGCACAGAAGTTTCAGGGCAGAGTCA | | | | | | | QGLEWMGRIIPILG | | | | | | |
| | | CCATTACCGCGGACAGATCCACGAGCACAACCTACATGGAG | | | | | | | VADYAQKFQGRVTI | | | | | | |
| | | CTGAGCAGCCTGAGATCTGAAGACACGGCCCGATATTATTG | | | | | | | TADRSTSTTYMELS | | | | | | |
| | | TGCGAGAGATGTGGGTTACTCTGGTTCGGGGAGCTCTTACT | | | | | | | SLRSEDTARYYCAR | | | | | | |
| | | ACTTTGACCCCTGGGGCCAGGGAACCCTGGTCACCGTCTCC | | | | | | | DVGYSGSGSSYYFD | | | | | | |
| | | TCA | | | | | | | PWGQGTLVTVSS | | | | | | |
| ADI-81691 | 1294 | TGGGGGGTCCCTGAGACTCTCCTGTGTAGCCTCTGGATTCA | | | | | | 6997 | EVQLVESGGGLVQP | | 7348 | 13 | | 13 | |
| | | CCCTCAGTAACGACGACATACACTGGGTCCGCCAAGCTCCA | | | | | | | GGSLRLSCVASGFT | | | | | | |
| | | GGAAAAGGTCTGGAGTGGGTCTCAGCTATCGGTTCTGCCGG | | | | | | | LSNDDIHWVRQAPG | | | | | | |
| | | TGACACATATTATGCAGACTCCGAGAAGGGCCGATTCACCA | | | | | | | KGLEWVSAIGSAGD | | | | | | |
| | | TCTCCAGAGAAAAGGCCAACAACTCCTTGTATCTTCAAATG | | | | | | | TYYADSEKGRFTIS | | | | | | |
| | | CACAGCCTGAGAGCCGGGGACACGGCTGTGTATTACTGTGT | | | | | | | REKANNSLYLQMHS | | | | | | |
| | | GAGAGGGACGATGACTACGCTTGGGGTCTTCCAATACTATT | | | | | | | LRAGDTAVYYCVRG | | | | | | |
| | | ACAAGGAAATTTGGGGCAGAGGGACCACGGTCACCGTCTCC | | | | | | | TMTTLGVFQYYYKE | | | | | | |
| | | TCA | | | | | | | IWGRGTTVTVSS | | | | | | |
| ADI-81571 | 1286 | TGGGTCTTCGGTGAAGGTCTCCTGCAAGGCCTCTGGAGGCT | | | | | | 6998 | QVQLQQSGAEVKKP | | 7349 | 12 | | 10 | |
| | | CCTTCAACAGCCATAGCATCAGTTGGGTGCGACAGGCCCCT | | | | | | | GSSVKVSCKASGGS | | | | | | |
| | | GGACAAGGGCTTGAGTGGATGGGAAGGATCATCCCTATCCT | | | | | | | FNSHSISWVRQAPG | | | | | | |
| | | TGGTGTAGCAGACTACGCACAGAAGTTCCAGGGCAGAGTCA | | | | | | | QGLEWMGRIIPILG | | | | | | |
| | | ACATTATCGCGGACAAGTCCACGGGCACAGCCTACATGGAG | | | | | | | VADYAQKFQGRVNI | | | | | | |
| | | CTGAGGAGCCTGAGATCTGAGGACACGGCCGTGTATTACTG | | | | | | | IADKSTGTAYMELR | | | | | | |
| | | CGCGAGAGATGTGGGTTATTCTGGTTCGGGGAGTGCTTACT | | | | | | | SLRSEDTAVYYCAR | | | | | | |
| | | ACTTTGACCTCTGGGGCCAGGGAACCCTGGTCACCGTCTCC | | | | | | | DVGYSGSGSAYYFD | | | | | | |
| | | TCA | | | | | | | LWGQGTLVTVSS | | | | | | |
| ADI-81850 | 1286 | GAGGTGCAGCTGGTGGAGTCTGGGGGAGGCGTGGTCCAGCC | | | | | | 6999 | EVQLVESGGGVVQP | | 7350 | 12 | | 10 | |
| | | TGGGAGGTCCCTGAGACTCTCCTGTGCAGCCTTTGGATTCA | | | | | | | GRSLRLSCAAFGFT | | | | | | |
| | | CCTTCAGTACTTATGCCATGCACTGGGTCCGCCAGGCTCCA | | | | | | | FSTYAMHWVRQAPG | | | | | | |
| | | GGCAAGGGGCTGGAGTGGGTGGCAGTTATATCAGATGATGG | | | | | | | KGLEWVAVISDDGR | | | | | | |
| | | CAGATATAAAGACTCCGCAGACTCCGTGAAGGGCCGATTCA | | | | | | | YKDSADSVKGRFTI | | | | | | |
| | | CCATCTCCAGAGACAATTCCCAGAACACGCTTTATCTGCAG | | | | | | | SRDNSQNTLYLQMS | | | | | | |
| | | ATGAGCAGCCTGAGACCTGAGGACACAGCTATCTATTACTG | | | | | | | SLRPEDTAIYYCTR | | | | | | |
| | | TACGAGAGAGGGCCCTATGACTACGGTGACCTACTTTGACT | | | | | | | EGPMTTVTYFDYWG | | | | | | |
| | | ACTGGGGCCAGGGAACCCTGGTCACCGTCTCCTCA | | | | | | | QGTLVTVSS | | | | | | |
| ADI-81628 | 6819 | GAGGTGCAGCTGCAGCAGTCGGGCGCGGGACTGTTGAAGCC | | | | | | 7000 | EVQLQQSGAGLLKP | | 7351 | 11 | | 8 | |
| | | TTCGGAGACCCTGTCCCTCACCTGCGGTGTCTTTGGTGGGT | | | | | | | SETLSLTCGVFGGS | | | | | | |
| | | CCTTCAGTGGGAACTACTGGAGCTGGATCCGCCAGTCCCCA | | | | | | | FSGNYWSWIRQSPG | | | | | | |
| | | GGGAAGGGGCTGGAGTGGATTGGCGAGATCAATCATAGCGG | | | | | | | KGLEWIGEINHSGT | | | | | | |
| | | AACCACCACTTACAACCCGTCCCTCAAGAGTCGAGTCACCA | | | | | | | TTYNPSLKSRVTIS | | | | | | |
| | | TATCAATTGACACGTCCAAGAACCAGTTCTCCCTGCGGCTG | | | | | | | IDTSKNQFSLRLSS | | | | | | |
| | | AGCTCTGTGACCGCCGCGGACACGGCTGTGTATTACTGTGC | | | | | | | VTAADTAVYYCARE | | | | | | |
| | | GAGAGAGGTTGTAGTAATACCAGCTGCTACAATAAGGTACT | | | | | | | VVVIPAATIRYSYN | | | | | | |
| | | CCTACAACTACTACATGGACGTCTGGGGCGCAGGGACCACG | | | | | | | YYMDVWGAGTTVTV | | | | | | |
| | | GTCACCGTCTCCTCA | | | | | | | SS | | | | | | |
| ADI-81678 | 6820 | GAGGTGCAGCTGTTGGAGTCCGGAGCAGAGGTGAAAAAGCC | | | | | | 7001 | EVQLLESGAEVKKP | | 7352 | 11 | | 10 | |
| | | CGGGGAGTCTCTGAGGATCTCCTGTAAGGGTTCTGGATACA | | | | | | | GESLRISCKGSGYS | | | | | | |
| | | GTTTCACCACCTACTGGATCACCTGGGTGCGCCAGATGCCC | | | | | | | FTTYWITWVRQMPG | | | | | | |
| | | GGGAAAGGCCTGGAATGGATGGGGAGGATTGATCCTAGTGA | | | | | | | KGLEWMGRIDPSDS | | | | | | |
| | | CTCTTACACCAAATACAGTCCGTCCTTCCAAGGCCGAGTAT | | | | | | | YTKYSPSFQGRVSI | | | | | | |
| | | CCATCTCGGCTGACAAGTCCACCAGCAATGCCTACATGCAG | | | | | | | SADKSTSNAYMQWS | | | | | | |
| | | TGGAGCAGCCTCCAGGCCTCGGACACCGCCATTTATTACTG | | | | | | | SLQASDTAIYYCAR | | | | | | |
| | | TGCGAGGGGGCGAGGGAGTGCCTACGACATAATGGAAATTG | | | | | | | GRGSAYDIMEIEYW | | | | | | |
| | | AGTATTGGGGCCAGGGAACCCTGGTCACGGCTCCTCAG | | | | | | | GQGTLVTAPQ | | | | | | |
| ADI-81738 | 1286 | CAGGTCCAGCTGGTGCAGTCTGGAGCAGAGGTGAGAAAGCC | | | | | | 7002 | QVQLVQSGAEVRKP | | 7353 | 11 | | 8 | |
| | | CGGGGAGTCTCTGAAGATCTCCTGTAAGGCTTCTGGATACA | | | | | | | GESLKISCKASGYT | | | | | | |
| | | CGTTTAGTACCTACTGGATCGGCTGGGTGCGCCAGATGCCC | | | | | | | FSTYWIGWVRQMPG | | | | | | |
| | | GGGAAAGGCCTGGAGTGGATGGGGATCATCTTTCCTGGTGA | | | | | | | KGLEWMGIIFPGDS | | | | | | |
| | | CTCTGATACCAGGTACAGCCCGTCCTTCCAAGGCCAGGTCA | | | | | | | DTRYSPSFQGQVTI | | | | | | |
| | | CCATCTCAGCCGACAAGTCCATCAGCACCGCCTACGTACAG | | | | | | | SADKSISTAYVQWS | | | | | | |
| | | TGGAGCAGCCTGAAGGCCTCGGACACCGCCATGTATTTCTG | | | | | | | SLKASDTAMYFCAT | | | | | | |
| | | TGCGACTCTGAAACTCGAGGGATTTACCCCCGTTGACTACA | | | | | | | LKLEGFTPVDYNTL | | | | | | |
| | | ATACACTTCCTGCTCTTTACTGGGGCCAGGGAACCCTGGTC | | | | | | | PALYWGQGTLVTVS | | | | | | |
| | | ACCGTCTCCTCA | | | | | | | S | | | | | | |
| ADI-81667 | 1299 | CAGGTGCAGCTGGTGGAGTCTGGGGGAGACTTGGTCCAGCC | | | | | | 7003 | QVQLVESGGDLVQP | | 7354 | 10 | | 9 | |
| | | TGGGGGGTCCCTGAGACTCTCCTGTGCAGTCTCTGGATTCA | | | | | | | GGSLRLSCAVSGFT | | | | | | |
| | | CCGTCAGTAACAACTACATGAGCTGGGTCCGCCAGCCTCCC | | | | | | | VSNNYMSWVRQPPG | | | | | | |
| | | GGGAAGGGGCTGGAGTGGGTCTCATTTATTTATAGCGGTGG | | | | | | | KGLEWVSFIYSGGN | | | | | | |
| | | TAACACATTCTACGCAGACTCCGTGAAGGGCCGATTCACCA | | | | | | | TFYADSVKGRFTIT | | | | | | |
| | | TCACCAGAGACAATTCCAAGAACACACTGTGGCTTCAAATG | | | | | | | RDNSKNTLWLQMNS | | | | | | |
| | | AACAGCCTGAGAGCCGAAGACACGGCTGTTTACTACTGTGC | | | | | | | LRAEDTAVYYCATS | | | | | | |
| | | GACCTCACCTGCGGTGGGGGTCTGGGGCCAAGGGACAATGG | | | | | | | PAVGVWGQGTMVTV | | | | | | |
| | | TCACCGTCTCCTCA | | | | | | | SS | | | | | | |
| | VH | VH | | SEQ | | SEQ | | SEQ | | SEQ | | SEQ | | SEQ | |
| | CDR3 | Germ- | VH | ID | VH | ID | VH | ID | VH | ID | VH | ID | VH | ID | VH |
| Clone ID | Lineage | line | FR1 | NO: | CDR1 | NO: | FR2 | NO: | CDR2 | NO: | FR3 | NO: | CDR3 | NO: | FR4 |
| ADI-81832 | 11 | IGHV3- | QVTLK | 106 | FTFNKY | 5648 | WVRQAP | 5830 | VISYDG | 6020 | RFTISR | 6334 | VKVQGEY | 6640 | WGQGTT |
| | | 30 | ESGGG | | GMH | | GRGLEW | | TNEFYA | | DNSKNK | | CSGTSCY | | VTVSS |
| | | | VVQPG | | | | LA | | DFVKG | | LYLQMN | | GFTLDV | | |
| | | | RSLRL | | | | | | | | SLRAED | | | | |
| | | | SCAAS | | | | | | | | TAVYYC | | | | |
| | | | G | | | | | | | | | | | | |
| ADI-81711 | 81 | IGHV3- | QVQLV | 11 | FTFRIY | 5649 | WVRQAP | 5831 | VISFDG | 6021 | RFTISR | 6335 | AKGSAVP | 6641 | WGQGTL |
| | | 30 | ESGGG | | GMH | | GKGLES | | SDRYYA | | DNSKNT | | GSRPYYR | | VTVSS |
| | | | VVQPG | | | | VA | | DSVKG | | LYLQMN | | DF | | |
| | | | RSLRL | | | | | | | | SLRAQD | | | | |
| | | | SCAAS | | | | | | | | TAVYYC | | | | |
| | | | G | | | | | | | | | | | | |
| ADI-81762 | 38 | IGHV4- | EVQLV | 5433 | GSISSS | 5650 | WVRQSP | 5832 | EIYQSG | 6022 | RVTISI | 6336 | ARTPLTD | 6642 | WGKGTT |
| | | 4 | ESGPG | | NWWS | | GKGLEW | | STNDNP | | DKSKNQ | | FYYMDV | | VTVSS |
| | | | LVKPS | | | | IA | | SLKS | | FSLKLS | | | | |
| | | | GTLSL | | | | | | | | YVTAAD | | | | |
| | | | TCTVS | | | | | | | | TAVYFC | | | | |
| | | | G | | | | | | | | | | | | |
| ADI-81626 | 82 | IGHV4- | QVQLQ | 21 | ASISST | 5651 | WVRQPP | 444 | EIYHSG | 6023 | RVTMSV | 6337 | ARGVGFD | 6643 | WGRGTL |
| | | 4 | ESGPG | | NWWS | | GKGLEW | | STNYNT | | DKSQNH | | DFWSGPN | | VTVSS |
| | | | LVKPS | | | | IG | | SLES | | FSLKLR | | RYFSL | | |
| | | | GTLSL | | | | | | | | SVTAAD | | | | |
| | | | TCAVS | | | | | | | | TAVYYC | | | | |
| | | | G | | | | | | | | | | | | |
| ADI-81803 | 79 | IGHV1- | EVQLL | 5434 | GAFSIY | 5652 | WVRQAP | 433 | EIIPIT | 6024 | RVTITA | 1006 | ARVGRSY | 6644 | WGQGTL |
| | | 69 | ESGAE | | AIS | | GQGLEW | | GTANYA | | DESTST | | YDSSGYY | | VTVSS |
| | | | VRKPG | | | | MG | | QKFQG | | AYMELS | | YTYFDS | | |
| | | | SSVRV | | | | | | | | SLRSED | | | | |
| | | | SCKAS | | | | | | | | TAVYYC | | | | |
| | | | G | | | | | | | | | | | | |
| ADI-81882 | 36 | IGHV3- | EVQLL | 5373 | FTFINY | 5626 | WVRQAP | 431 | AISYDG | 5997 | RFTISR | 6338 | AKVTASH | 6613 | WGQGTT |
| | | 30 | ESGGG | | GMH | | GKGLEW | | SDEYYA | | DDSKNT | | YYYYYGM | | VTVSS |
| | | | VVQPG | | | | VA | | DSVKG | | VYLQMN | | DV | | |
| | | | RSLRL | | | | | | | | SLRTED | | | | |
| | | | SCAAS | | | | | | | | TAVYYC | | | | |
| | | | G | | | | | | | | | | | | |
| ADI-81911 | 85 | IGHV3- | EVQLL | 5392 | FTFSNY | 233 | WVRQAP | 431 | FISHDG | 6025 | RFTISR | 6339 | AKHFGAP | 6645 | WGQGTT |
| | | 30 | ESGGG | | GMH | | GKGLEW | | STKYYA | | DTSKNT | | TSYYYYG | | VTVSS |
| | | | VVQPG | | | | VA | | DSVKD | | LYLQMN | | MDV | | |
| | | | RSLRL | | | | | | | | NLRAED | | | | |
| | | | SCAVS | | | | | | | | TAVYYC | | | | |
| | | | G | | | | | | | | | | | | |
| | SEQ | | | | | | | SEQ | | | SEQ | VH | | VH Amino | |
| | ID | | | | | | | ID | | | ID | Nucleotide | | Acid | |
| Clone ID | NO: | VH DNA | | | | | | NO: | VH Protein | | NO: | Substitution | | Substitution | |
| ADI-81832 | 1287 | CAGGTGACGTTGAAGGAGTCTGGGGGAGGCGTGGTCCAGCC | | | | | | 7004 | QVTLKESGGGVVQP | | 7355 | 10 | | 9 | |
| | | TGGGAGGTCCCTGAGACTCTCCTGTGCAGCCTCTGGATTCA | | | | | | | GRSLRLSCAASGFT | | | | | | |
| | | CCTTCAATAAATATGGCATGCACTGGGTCCGCCAGGCTCCA | | | | | | | FNKYGMHWVRQAPG | | | | | | |
| | | GGCAGGGGGCTGGAGTGGCTGGCAGTTATATCATATGATGG | | | | | | | RGLEWLAVISYDGT | | | | | | |
| | | AACTAATGAATTCTATGCAGACTTCGTGAAGGGCCGATTCA | | | | | | | NEFYADFVKGRFTI | | | | | | |
| | | CCATCTCCAGAGACAATTCCAAGAACAAGTTGTATCTGCAA | | | | | | | SRDNSKNKLYLQMN | | | | | | |
| | | ATGAACAGCCTGAGAGCTGAGGACACGGCTGTCTATTACTG | | | | | | | SLRAEDTAVYYCVK | | | | | | |
| | | TGTGAAAGTCCAAGGGGAATATTGTAGTGGTACCAGCTGCT | | | | | | | VQGEYCSGTSCYGF | | | | | | |
| | | ACGGGTTCACTTTGGACGTCTGGGGCCAAGGGACCACGGTC | | | | | | | TLDVWGQGTTVTVS | | | | | | |
| | | ACCGTCTCCTCA | | | | | | | S | | | | | | |
| ADI-81711 | 1286 | CAGGTGCAGCTGGTGGAGTCTGGGGGAGGCGTGGTCCAGCC | | | | | | 7005 | QVQLVESGGGVVQP | | 7356 | 9 | | 7 | |
| | | TGGGAGGTCCCTGAGACTCTCCTGTGCAGCCTCTGGATTCA | | | | | | | GRSLRLSCAASGFT | | | | | | |
| | | CCTTCAGAATTTATGGCATGCACTGGGTCCGCCAGGCTCCA | | | | | | | FRIYGMHWVRQAPG | | | | | | |
| | | GGCAAGGGGCTGGAGTCCGTGGCAGTTATCTCATTTGATGG | | | | | | | KGLESVAVISFDGS | | | | | | |
| | | AAGTGATAGATATTACGCAGACTCCGTGAAGGGCCGATTCA | | | | | | | DRYYADSVKGRFTI | | | | | | |
| | | CCATCTCCAGAGACAATTCCAAGAACACGCTGTATCTGCAA | | | | | | | SRDNSKNTLYLQMN | | | | | | |
| | | ATGAACAGCCTGAGGGCTCAGGACACGGCTGTCTATTACTG | | | | | | | SLRAQDTAVYYCAK | | | | | | |
| | | TGCGAAAGGATCTGCAGTGCCTGGTTCACGGCCCTACTACT | | | | | | | GSAVPGSRPYYFDF | | | | | | |
| | | TTGACTTCTGGGGCCAGGGAACCCTGGTCACCGTCTCCTCA | | | | | | | WGQGTLVTVSS | | | | | | |
| ADI-81762 | 1291 | GAGGTGCAGCTGGTGGAGTCGGGCCCAGGACTGGTGAAGCC | | | | | | 7006 | EVQLVESGPGLVKP | | 7357 | 9 | | 8 | |
| | | TTCGGGGACCCTGTCCCTCACCTGCACTGTCTCTGGTGGCT | | | | | | | SGTLSLTCTVSGGS | | | | | | |
| | | CCATCAGCAGTAGCAATTGGTGGAGCTGGGTCCGCCAGTCT | | | | | | | ISSSNWWSWVRQSP | | | | | | |
| | | CCTGGGAAGGGGCTGGAGTGGATTGCGGAAATCTATCAGAG | | | | | | | GKGLEWIAEIYQSG | | | | | | |
| | | TGGGAGCACCAACGACAACCCGTCCCTCAAGAGTCGAGTCA | | | | | | | STNDNPSLKSRVTI | | | | | | |
| | | CCATATCAATAGACAAGTCCAAGAACCAGTTCTCCCTGAAG | | | | | | | SIDKSKNQFSLKLS | | | | | | |
| | | TTGAGTTATGTGACCGCCGCGGACACGGCCGTGTATTTCTG | | | | | | | YVTAADTAVYFCAR | | | | | | |
| | | TGCGAGGACCCCCCTTACGGACTTCTACTACATGGACGTCT | | | | | | | TPLTDFYYMDVWGK | | | | | | |
| | | GGGGCAAAGGGACCACGGTCACCGTCTCCTCA | | | | | | | GTTVTVSS | | | | | | |
| ADI-81626 | 1288 | TTCGGGGACCCTGTCCCTCACCTGCGCTGTCTCTGGTGCCT | | | | | | 7007 | QVQLQESGPGLVKP | | 7358 | 8 | | 8 | |
| | | CCATCAGCAGTACTAACTGGTGGAGTTGGGTCCGCCAGCCC | | | | | | | SGTLSLTCAVSGAS | | | | | | |
| | | CCAGGGAAGGGGCTGGAGTGGATTGGAGAAATCTATCATAG | | | | | | | ISSTNWWSWVRQPP | | | | | | |
| | | TGGGAGCACCAACTACAACACGTCCCTCGAGAGTCGAGTCA | | | | | | | GKGLEWIGEIYHSG | | | | | | |
| | | CCATGTCAGTGGACAAATCCCAGAACCACTTCTCCCTGAAA | | | | | | | STNYNTSLESRVTM | | | | | | |
| | | CTGAGGTCTGTGACCGCCGCGGACACGGCCGTGTATTACTG | | | | | | | SVDKSQNHFSLKLR | | | | | | |
| | | TGCGAGAGGTGTGGGATTTGACGATTTTTGGAGTGGTCCCA | | | | | | | SVTAADTAVYYCAR | | | | | | |
| | | ACAGGTACTTCAGTCTCTGGGGCCGTGGCACCCTGGTCACC | | | | | | | GVGFDDFWSGPNRY | | | | | | |
| | | GTCTCCTCA | | | | | | | FSLWGRGTLVTVSS | | | | | | |
| ADI-81803 | 1286 | GAGGTGCAGCTGTTGGAGTCTGGGGCTGAGGTGAGGAAGCC | | | | | | 7008 | EVQLLESGAEVRKP | | 7359 | 8 | | 6 | |
| | | TGGGTCCTCGGTGAGGGTCTCCTGCAAGGCTTCTGGAGGCG | | | | | | | GSSVRVSCKASGGA | | | | | | |
| | | CCTTCAGCATTTATGCCATCAGCTGGGTGCGACAGGCCCCT | | | | | | | FSIYAISWVRQAPG | | | | | | |
| | | GGTCAAGGGCTTGAGTGGATGGGAGAGATCATCCCTATCAC | | | | | | | QGLEWMGEIIPITG | | | | | | |
| | | TGGTACAGCAAACTACGCACAGAAGTTCCAGGGCAGAGTCA | | | | | | | TANYAQKFQGRVTI | | | | | | |
| | | CGATTACCGCGGACGAATCCACGAGCACAGCCTACATGGAA | | | | | | | TADESTSTAYMELS | | | | | | |
| | | CTGAGCAGCCTGAGATCTGAGGACACGGCCGTGTATTACTG | | | | | | | SLRSEDTAVYYCAR | | | | | | |
| | | TGCGAGAGTCGGTCGCTCTTACTATGATAGTAGTGGTTATT | | | | | | | VGRSYYDSSGYYYT | | | | | | |
| | | ACTACACATACTTTGACTCCTGGGGCCAGGGAACCCTGGTC | | | | | | | YFDSWGQGTLVTVS | | | | | | |
| | | ACCGTCTCCTCA | | | | | | | S | | | | | | |
| ADI-81882 | 1287 | GAGGTGCAGCTGTTGGAGTCTGGGGGAGGCGTGGTCCAGCC | | | | | | 7009 | EVQLLESGGGVVQP | | 7360 | 8 | | 8 | |
| | | TGGGAGGTCCCTGAGACTCTCCTGTGCAGCCTCTGGATTCA | | | | | | | GRSLRLSCAASGFT | | | | | | |
| | | CCTTCATTAACTATGGCATGCACTGGGTCCGCCAGGCTCCA | | | | | | | FINYGMHWVRQAPG | | | | | | |
| | | GGCAAGGGGCTGGAGTGGGTGGCAGCTATATCATATGATGG | | | | | | | KGLEWVAAISYDGS | | | | | | |
| | | AAGTGATGAATACTATGCAGACTCCGTGAAGGGCCGATTCA | | | | | | | DEYYADSVKGRFTI | | | | | | |
| | | CCATCTCCAGAGACGATTCCAAGAACACGGTGTATCTGCAA | | | | | | | SRDDSKNTVYLQMN | | | | | | |
| | | ATGAACAGCCTGAGAACTGAGGACACGGCTGTGTATTACTG | | | | | | | SLRTEDTAVYYCAK | | | | | | |
| | | TGCGAAAGTGACCGCCTCCCATTATTACTACTACTACGGGA | | | | | | | VTASHYYYYYGMDV | | | | | | |
| | | TGGACGTCTGGGGCCAAGGGACCACGGTCACCGTCTCCTCA | | | | | | | WGQGTTVTVSS | | | | | | |
| ADI-81911 | 1287 | TGGGAGGTCCCTGAGACTCTCCTGTGCAGTCTCTGGATTCA | | | | | | 7010 | EVQLLESGGGVVQP | | 7361 | 8 | | 8 | |
| | | CCTTCAGTAACTATGGCATGCACTGGGTCCGCCAGGCTCCA | | | | | | | GRSLRLSCAVSGFT | | | | | | |
| | | GGCAAGGGGCTGGAGTGGGTGGCATTTATATCACATGATGG | | | | | | | FSNYGMHWVRQAPG | | | | | | |
| | | AAGTACTAAATACTATGCAGACTCCGTGAAGGACCGATTCA | | | | | | | KGLEWVAFISHDGS | | | | | | |
| | | CCATCTCCAGAGACACTTCCAAGAACACACTGTATCTGCAA | | | | | | | TKYYADSVKDRFTI | | | | | | |
| | | ATGAACAACCTGAGAGCTGAGGACACGGCTGTGTATTACTG | | | | | | | SRDTSKNTLYLQMN | | | | | | |
| | | CGCGAAGCATTTCGGGGCCCCTACTTCCTACTACTACTACG | | | | | | | NLRAEDTAVYYCAK | | | | | | |
| | | GTATGGACGTCTGGGGCCAAGGGACCACGGTCACCGTCTCC | | | | | | | HFGAPTSYYYYGMD | | | | | | |
| | | TCA | | | | | | | VWGQGTTVTVSS | | | | | | |
| | VH | VH | | SEQ | | SEQ | | SEQ | | SEQ | | SEQ | | SEQ | |
| | CDR3 | Germ- | VH | ID | VH | ID | VH | ID | VH | ID | VH | ID | VH | ID | VH |
| Clone ID | Lineage | line | FR1 | NO: | CDR1 | NO: | FR2 | NO: | CDR2 | NO: | FR3 | NO: | CDR3 | NO: | FR4 |
| ADI-81557 | 23 | IGHV3- | QVQLV | 10 | FTFSTY | 215 | WVRQAP | 5833 | LISYDG | 6026 | RFTISR | 6340 | AKALGPY | 6646 | WGQGTL |
| | | 30 | QSGGG | | GMH | | GKGLEW | | SNTYSA | | DNPKNT | | CGAGDCY | | VTVSS |
| | | | VVQPG | | | | LA | | DSVKG | | LFLQMN | | WAPLDF | | |
| | | | RSLRL | | | | | | | | SLRAED | | | | |
| | | | SCAAS | | | | | | | | TAVYYC | | | | |
| | | | G | | | | | | | | | | | | |
| ADI-81886 | 62 | IGHV3- | QVQLV | 5435 | FTFDDY | 214 | WVRLVP | 5834 | GISWNS | 6027 | RFIISR | 6341 | GKDKGPY | 6647 | WGQGTT |
| | | 9 | QSGGG | | AMH | | GKGLEW | | GTIGYA | | DNAENS | | YYDSGSL | | VTVSS |
| | | | LVQPG | | | | VS | | DSVKG | | LYLQMN | | WDYYSNG | | |
| | | | RSLRL | | | | | | | | SLRAED | | MDV | | |
| | | | SCAGS | | | | | | | | SALYYC | | | | |
| | | | G | | | | | | | | | | | | |
| ADI-81819 | 93 | IGHV4- | EVQLV | 5436 | VSISSG | 5653 | WIRQHP | 450 | YIYYSG | 611 | RVTMSV | 6342 | ARDYGGN | 6648 | WGQGTL |
| | | 31 | ESGPG | | GYYWN | | GKGLEW | | STYYNP | | DTSKNQ | | AQYFNY | | VTVSS |
| | | | LVKPS | | | | IG | | SLKS | | YSLKLS | | | | |
| | | | QTLSL | | | | | | | | SLTAAD | | | | |
| | | | TCTVS | | | | | | | | TAVYYC | | | | |
| | | | G | | | | | | | | | | | | |
| ADI-81621 | 78 | IGHV3- | QVQLE | 109 | FTFSSY | 5654 | WVRQAP | 437 | TISGSG | 6028 | RFTISR | 6343 | AKANDLG | 6649 | WGQGTT |
| | | 23 | QSGGG | | AMN | | GKGLEW | | GSTYYA | | DNSKNT | | YCSGGRC | | VTVSS |
| | | | LVQPG | | | | VS | | DSVKG | | LDLHMS | | YPPYYYY | | |
| | | | GSLRL | | | | | | | | SLRAED | | GMDV | | |
| | | | SCAAS | | | | | | | | TAVYYC | | | | |
| | | | G | | | | | | | | | | | | |
| ADI-81821 | 2 | IGHV1- | QVQLV | 50 | GTFSSY | 379 | WVRQAP | 433 | RIIPIL | 5999 | RVTIIA | 936 | ARDQGYS | 6650 | WGQGTL |
| | | 69 | QSGAE | | PIS | | GQGLEW | | GIPNYA | | DKSTST | | GSGSHYW | | VTVSS |
| | | | VKKPG | | | | MG | | QKFQG | | AYMELS | | FDP | | |
| | | | SSVKV | | | | | | | | SLRSED | | | | |
| | | | SCKAS | | | | | | | | TAVYYC | | | | |
| | | | G | | | | | | | | | | | | |
| ADI-81857 | 35 | IGHV4- | EVQLL | 5380 | ASISSY | 5655 | WIRQPP | 445 | YVYYSG | 6029 | RVTISV | 6344 | ATDYFDS | 6651 | WGQGTT |
| | | 59 | ESGPG | | YWS | | GKGLEW | | STNYNP | | DTSKNQ | | TGFHYGM | | VTVSS |
| | | | LVKPS | | | | IG | | SLKS | | FSLKLR | | DV | | |
| | | | ETLSL | | | | | | | | SVTAAD | | | | |
| | | | TCSVS | | | | | | | | TAVYYC | | | | |
| | | | G | | | | | | | | | | | | |
| ADI-81909 | 83 | IGHV5- | EVQLL | 5437 | YSFSSY | 5656 | WVRQMP | 476 | RIDPSD | 766 | HVTISA | 6345 | ARSGGNR | 6652 | WGQGTT |
| | | 10-1 | ESGAE | | WIS | | GKGLEW | | SYTNYS | | DKSIST | | LLYGMDV | | VTVSS |
| | | | VKKPG | | | | MG | | PSFQG | | AYLQWS | | | | |
| | | | ESLRI | | | | | | | | SLKASD | | | | |
| | | | SCKGS | | | | | | | | TAMYYC | | | | |
| | | | E | | | | | | | | | | | | |
| | SEQ | | | | | | | SEQ | | | SEQ | VH | | VH Amino | |
| | ID | | | | | | | ID | | | ID | Nucleotide | | Acid | |
| Clone ID | NO: | VH DNA | | | | | | NO: | VH Protein | | NO: | Substitution | | Substitution | |
| ADI-81557 | 1286 | CAGGTGCAGCTGGTGCAGTCTGGGGGAGGCGTGGTCCAGCC | | | | | | 7011 | QVQLVQSGGGVVQP | | 7362 | 7 | | 7 | |
| | | TGGGAGGTCCCTAAGACTCTCCTGTGCAGCCTCTGGATTCA | | | | | | | GRSLRLSCAASGFT | | | | | | |
| | | CCTTCAGTACCTACGGCATGCACTGGGTCCGCCAGGCTCCA | | | | | | | FSTYGMHWVRQAPG | | | | | | |
| | | GGCAAGGGGCTGGAGTGGCTGGCACTTATTTCATATGATGG | | | | | | | KGLEWLALISYDGS | | | | | | |
| | | AAGTAATACATACTCTGCAGACTCCGTGAAGGGCCGATTCA | | | | | | | NTYSADSVKGRFTI | | | | | | |
| | | CCATCTCCAGAGACAATCCCAAGAACACTCTGTTTCTGCAA | | | | | | | SRDNPKNTLFLQMN | | | | | | |
| | | ATGAACAGCCTGAGAGCTGAGGACACGGCTGTGTATTACTG | | | | | | | SLRAEDTAVYYCAK | | | | | | |
| | | TGCGAAAGCCCTGGGCCCCTATTGTGGTGCTGGTGACTGCT | | | | | | | ALGPYCGAGDCYWA | | | | | | |
| | | ACTGGGCTCCCCTTGACTTCTGGGGCCAGGGAACCCTGGTC | | | | | | | PLDFWGQGTLVTVS | | | | | | |
| | | ACCGTCTCCTCA | | | | | | | S | | | | | | |
| ADI-81886 | 1287 | CAGGTGCAGCTGGTGCAGTCTGGGGGAGGCTTGGTACAGCC | | | | | | 7012 | QVQLVQSGGGLVQP | | 7363 | 7 | | 7 | |
| | | TGGCAGGTCCCTGAGACTCTCCTGTGCAGGCTCTGGATTCA | | | | | | | GRSLRLSCAGSGFT | | | | | | |
| | | CCTTTGATGATTATGCCATGCACTGGGTCCGGCTAGTTCCA | | | | | | | FDDYAMHWVRLVPG | | | | | | |
| | | GGGAAGGGCCTGGAGTGGGTCTCAGGTATTAGTTGGAATAG | | | | | | | KGLEWVSGISWNSG | | | | | | |
| | | TGGAACCATAGGCTATGCGGACTCTGTGAAGGGCCGATTCA | | | | | | | TIGYADSVKGRFII | | | | | | |
| | | TCATCTCCAGAGACAACGCCGAGAACTCCCTGTATTTGCAA | | | | | | | SRDNAENSLYLQMN | | | | | | |
| | | ATGAACAGTCTGAGAGCTGAGGACTCGGCCCTGTATTACTG | | | | | | | SLRAEDSALYYCGK | | | | | | |
| | | TGGAAAAGATAAGGGACCGTATTACTATGATTCCGGGAGTC | | | | | | | DKGPYYYDSGSLWD | | | | | | |
| | | TTTGGGACTACTACTCCAACGGTATGGATGTCTGGGGCCAA | | | | | | | YYSNGMDVWGQGTT | | | | | | |
| | | GGGACCACGGTCACCGTCTCCTCA | | | | | | | VTVSS | | | | | | |
| ADI-81819 | 1286 | GAGGTGCAGCTGGTGGAGTCGGGCCCAGGACTGGTGAAGCC | | | | | | 7013 | EVQLVESGPGLVKP | | 7364 | 6 | | 6 | |
| | | TTCACAGACCCTGTCCCTCACCTGCACTGTGTCTGGTGTCT | | | | | | | SQTLSLTCTVSGVS | | | | | | |
| | | CCATCAGCAGTGGTGGTTACTACTGGAACTGGATCCGCCAG | | | | | | | ISSGGYYWNWIRQH | | | | | | |
| | | CACCCAGGGAAGGGCCTGGAGTGGATTGGGTACATCTATTA | | | | | | | PGKGLEWIGYIYYS | | | | | | |
| | | CAGTGGGAGCACCTACTACAACCCGTCCCTCAAGAGTCGAG | | | | | | | GSTYYNPSLKSRVT | | | | | | |
| | | TTACCATGTCAGTAGACACGTCTAAGAACCAGTACTCCCTG | | | | | | | MSVDTSKNQYSLKL | | | | | | |
| | | AAGCTGAGCTCTCTGACTGCCGCGGACACGGCCGTGTATTA | | | | | | | SSLTAADTAVYYCA | | | | | | |
| | | CTGTGCGAGAGACTACGGTGGTAACGCCCAATACTTTAACT | | | | | | | RDYGGNAQYFNYWG | | | | | | |
| | | ACTGGGGCCAGGGAACCCTGGTCACCGTCTCCTCA | | | | | | | QGTLVTVSS | | | | | | |
| ADI-81621 | 1287 | CAGGTGCAGCTGGAGCAGTCTGGGGGAGGCTTGGTACAGCC | | | | | | 7014 | QVQLEQSGGGLVQP | | 7365 | 5 | | 5 | |
| | | GGGGGGGTCCCTGAGACTCTCCTGTGCAGCCTCTGGATTCA | | | | | | | GGSLRLSCAASGFT | | | | | | |
| | | CCTTCAGTAGCTATGCCATGAACTGGGTCCGCCAGGCTCCA | | | | | | | FSSYAMNWVRQAPG | | | | | | |
| | | GGGAAGGGACTGGAGTGGGTCTCAACTATTAGTGGTAGTGG | | | | | | | KGLEWVSTISGSGG | | | | | | |
| | | TGGTAGCACATACTACGCAGACTCCGTGAAGGGCCGGTTCA | | | | | | | STYYADSVKGRFTI | | | | | | |
| | | CCATCTCCAGAGACAATTCCAAGAACACGCTGGATCTACAC | | | | | | | SRDNSKNTLDLHMS | | | | | | |
| | | ATGAGCAGCCTGAGAGCCGAGGACACGGCCGTATATTACTG | | | | | | | SLRAEDTAVYYCAK | | | | | | |
| | | TGCGAAAGCTAATGACCTAGGATATTGTAGTGGTGGTAGGT | | | | | | | ANDLGYCSGGRCYP | | | | | | |
| | | GCTACCCCCCCTACTACTACTACGGTATGGACGTCTGGGGC | | | | | | | PYYYYGMDVWGQGT | | | | | | |
| | | CAAGGGACCACGGTCACCGTCTCCTCA | | | | | | | TVTVSS | | | | | | |
| ADI-81821 | 1286 | TGGGTCCTCGGTGAAGGTCTCCTGCAAGGCTTCTGGAGGCA | | | | | | 7015 | QVQLVQSGAEVKKP | | 7366 | 4 | | 3 | |
| | | CCTTCAGTAGCTATCCTATCAGCTGGGTGCGCCAGGCCCCT | | | | | | | GSSVKVSCKASGGT | | | | | | |
| | | GGACAAGGACTTGAGTGGATGGGAAGGATCATCCCTATCCT | | | | | | | FSSYPISWVRQAPG | | | | | | |
| | | TGGTATACCAAACTACGCACAGAAGTTCCAGGGCAGAGTCA | | | | | | | QGLEWMGRIIPILG | | | | | | |
| | | CGATTATTGCGGACAAATCCACGAGCACAGCCTACATGGAG | | | | | | | IPNYAQKFQGRVTI | | | | | | |
| | | TTGAGCAGCCTGAGATCTGAGGACACGGCCGTGTATTATTG | | | | | | | IADKSTSTAYMELS | | | | | | |
| | | TGCGAGAGATCAGGGTTACTCTGGTTCGGGGAGTCATTACT | | | | | | | SLRSEDTAVYYCAR | | | | | | |
| | | GGTTCGACCCCTGGGGCCAGGGAACCCTGGTCACCGTCTCC | | | | | | | DQGYSGSGSHYWFD | | | | | | |
| | | TCA | | | | | | | PWGQGTLVTVSS | | | | | | |
| ADI-81857 | 1287 | GAGGTGCAGCTGTTGGAGTCGGGCCCAGGACTGGTGAAGCC | | | | | | 7016 | EVQLLESGPGLVKP | | 7367 | 4 | | 4 | |
| | | TTCGGAGACCCTGTCCCTCACCTGCTCTGTCTCTGGTGCCT | | | | | | | SETLSLTCSVSGAS | | | | | | |
| | | CCATCAGTAGTTACTACTGGAGCTGGATCCGGCAGCCCCCA | | | | | | | ISSYYWSWIRQPPG | | | | | | |
| | | GGGAAGGGACTGGAGTGGATTGGGTATGTCTATTACAGTGG | | | | | | | KGLEWIGYVYYSGS | | | | | | |
| | | GAGCACCAACTACAACCCCTCCCTCAAGAGTCGAGTCACCA | | | | | | | TNYNPSLKSRVTIS | | | | | | |
| | | TATCAGTTGACACGTCCAAGAACCAGTTCTCCCTGAAGCTG | | | | | | | VDTSKNQFSLKLRS | | | | | | |
| | | AGGTCTGTGACCGCTGCGGACACGGCCGTTTATTACTGTGC | | | | | | | VTAADTAVYYCATD | | | | | | |
| | | GACTGATTACTTTGATAGTACTGGTTTCCACTACGGTATGG | | | | | | | YFDSTGFHYGMDVW | | | | | | |
| | | ACGTCTGGGGCCAAGGGACCACGGTCACCGTCTCCTCA | | | | | | | GQGTTVTVSS | | | | | | |
| ADI-81909 | 1287 | GAGGTGCAGCTGTTGGAGTCCGGAGCAGAGGTGAAAAAGCC | | | | | | 7017 | EVQLLESGAEVKKP | | 7368 | 2 | | 2 | |
| | | CGGGGAGTCTCTGAGGATCTCCTGTAAGGGTTCTGAATACA | | | | | | | GESLRISCKGSEYS | | | | | | |
| | | GCTTTTCCAGCTACTGGATCAGCTGGGTGCGCCAGATGCCC | | | | | | | FSSYWISWVRQMPG | | | | | | |
| | | GGGAAAGGCCTGGAGTGGATGGGGAGGATTGATCCTAGTGA | | | | | | | KGLEWMGRIDPSDS | | | | | | |
| | | CTCTTATACCAACTACAGCCCGTCCTTCCAAGGCCACGTCA | | | | | | | YTNYSPSFQGHVTI | | | | | | |
| | | CCATCTCAGCTGACAAGTCCATCAGCACTGCCTACCTGCAG | | | | | | | SADKSISTAYLQWS | | | | | | |
| | | TGGAGCAGCCTGAAGGCCTCGGACACCGCCATGTATTACTG | | | | | | | SLKASDTAMYYCAR | | | | | | |
| | | TGCGAGATCAGGTGGTAACCGGCTCCTTTATGGTATGGACG | | | | | | | SGGNRLLYGMDVWG | | | | | | |
| | | TCTGGGGCCAAGGGACCACGGTCACCGTCTCCTCA | | | | | | | QGTTVTVSS | | | | | | |
| | VH | VH | | SEQ | | SEQ | | SEQ | | SEQ | | SEQ | | SEQ | |
| | CDR3 | Germ- | VH | ID | VH | ID | VH | ID | VH | ID | VH | ID | VH | ID | VH |
| Clone ID | Lineage | line | FR1 | NO: | CDR1 | NO: | FR2 | NO: | CDR2 | NO: | FR3 | NO: | CDR3 | NO: | FR4 |
| ADI-81564 | 29 | IGHV1- | QVQLV | 5438 | SSFTHH | 5657 | WLRQAP | 5835 | RIIPIL | 6030 | RLTITA | 6346 | ARVGDMS | 6653 | WGQGTT |
| | | 69 | QSGAE | | PIA | | GQGLEW | | GVASDA | | DKSTTT | | TTGTDAF | | VTVSS |
| | | | VKKPG | | | | VG | | EKFQG | | TYMELN | | DI | | |
| | | | SSVKV | | | | | | | | SLRSED | | | | |
| | | | SCKPS | | | | | | | | TAVYFC | | | | |
| | | | G | | | | | | | | | | | | |
| ADI-81606 | 64 | IGHV3- | QVQLQ | 5439 | FTFSNY | 5658 | WVRQST | 5836 | GIGTSG | 6031 | RFTISR | 6347 | LFYYMDV | 6654 | WGKGTT |
| | | 13 | QSGGG | | DIH | | GEGLEW | | DTYYAE | | EDAMTS | | ARGDASG | | VTVSS |
| | | | LVRPG | | | | VS | | SVKG | | VYLQMN | | | | |
| | | | GSRRL | | | | | | | | RLTAGD | | | | |
| | | | SCAAS | | | | | | | | TAVYYC | | | | |
| | | | G | | | | | | | | | | | | |
| ADI-81782 | 58 | IGHV4- | EVQLL | 5365 | ASLSGI | 5659 | WVRQSP | 438 | EIFHTG | 6032 | RVTISI | 6348 | ARVAGLF | 6655 | WGQGSL |
| | | 4 | ESGPG | | NWWS | | GKGLEW | | SVQYNP | | DKSNSR | | DY | | VTVSS |
| | | | LVKPS | | | | IG | | SLKG | | FSLKLS | | | | |
| | | | GTLSL | | | | | | | | SVTAAD | | | | |
| | | | TCAVS | | | | | | | | TAVYYC | | | | |
| | | | G | | | | | | | | | | | | |
| ADI-81627 | 83 | IGHV3- | QVQLV | 57 | FSINTY | 5660 | WVRQAP | 431 | ILWFDG | 6033 | RFIISR | 6349 | ARDGEGG | 6656 | WGQGAL |
| | | 33 | QSGGG | | GIH | | GKGLEW | | VKKYYA | | DNFKNT | | AAEN | | VTVSS |
| | | | VVQPG | | | | VA | | ESVEG | | LYLQMN | | | | |
| | | | GSLRL | | | | | | | | SLRAED | | | | |
| | | | SCAAS | | | | | | | | TAVYFC | | | | |
| | | | G | | | | | | | | | | | | |
| ADI-81609 | 66 | IGHV1- | QVQLV | 5440 | GILNTY | 5661 | WVRQAP | 433 | RFIPII | 6034 | RVTITA | 6350 | ARAADPG | 6657 | WGQGTL |
| | | 69 | QSGAE | | SIS | | GQGLEW | | RTATYA | | DESTST | | VGPTIGY | | VTVSS |
| | | | MKKPG | | | | MG | | HKFQG | | AYMELN | | FDP | | |
| | | | SSVKV | | | | | | | | SLTYDD | | | | |
| | | | SCKAS | | | | | | | | TAVYYC | | | | |
| | | | G | | | | | | | | | | | | |
| ADI-81777 | 53 | IGHV1- | QVQLV | 50 | GTFSNY | 5662 | WVRQVP | 511 | RITPMF | 6035 | RVTFTA | 6351 | ARSEVMN | 6658 | WGQGTL |
| | | 69 | QSGAE | | GIN | | GQGLEW | | GMANYV | | DKSTGT | | VGHYYLD | | VTVSS |
| | | | VKKPG | | | | MG | | QKFQD | | AYLEVS | | S | | |
| | | | SSVKV | | | | | | | | SLTSED | | | | |
| | | | SCKAS | | | | | | | | TAVYYC | | | | |
| | | | G | | | | | | | | | | | | |
| ADI-81728 | 5 | IGHV4- | EVQLV | 5441 | GSIKSG | 5663 | WIRQHP | 450 | YIYFTG | 6036 | RVTISV | 6352 | ARVGGGG | 6659 | WGQGTL |
| | | 31 | ETGPG | | GYYWS | | GKGLEW | | STDYNP | | DTFENQ | | TNDFDF | | VTVSS |
| | | | LVKPS | | | | IG | | SLRG | | FSLRLT | | | | |
| | | | QTLSL | | | | | | | | SVTAAD | | | | |
| | | | TCSVS | | | | | | | | TATYYC | | | | |
| | | | G | | | | | | | | | | | | |
| ADI-81732 | 9 | IGHV3- | EVQLV | 5442 | FTFRTY | 5664 | WVRQTA | 5837 | TIGTSG | 6037 | RFTISR | 6353 | ARGNDIA | 6660 | WGKGTT |
| | | 13 | ESGGD | | DMH | | VKGLEW | | DRYYSD | | EDAKDS | | LVPPAMS | | VTVSS |
| | | | LVQPG | | | | VS | | SVKG | | LYLEMN | | ERPRNYF | | |
| | | | GSLRL | | | | | | | | SLRGGD | | YYLDV | | |
| | | | SCAAS | | | | | | | | TAVYYC | | | | |
| | | | G | | | | | | | | | | | | |
| | SEQ | | | | | | | SEQ | | | SEQ | VH | | VH Amino | |
| | ID | | | | | | | ID | | | ID | Nucleotide | | Acid | |
| Clone ID | NO: | VH DNA | | | | | | NO: | VH Protein | | NO: | Substitution | | Substitution | |
| ADI-81564 | 1287 | CAGGTGCAGCTGGTGCAGTCTGGGGCTGAGGTGAAGAAGCC | | | | | | 7018 | QVQLVQSGAEVKKP | | 7369 | 21 | | 19 | |
| | | TGGGTCCTCGGTGAAGGTCTCCTGCAAGCCTTCTGGAAGCT | | | | | | | GSSVKVSCKPSGSS | | | | | | |
| | | CCTTCACCCACCATCCTATCGCCTGGCTGCGACAGGCCCCT | | | | | | | FTHHPIAWLRQAPG | | | | | | |
| | | GGACAAGGGCTTGAGTGGGTGGGAAGGATCATCCCTATCCT | | | | | | | QGLEWVGRIIPILG | | | | | | |
| | | TGGTGTAGCCAGCGACGCAGAGAAGTTCCAGGGCCGACTCA | | | | | | | VASDAEKFQGRLTI | | | | | | |
| | | CGATTACCGCGGACAAATCCACGACCACTACCTACATGGAG | | | | | | | TADKSTTTTYMELN | | | | | | |
| | | CTGAACAGCCTGAGATCTGAGGACACGGCCGTGTATTTCTG | | | | | | | SLRSEDTAVYFCAR | | | | | | |
| | | TGCGAGAGTGGGGGACATGTCTACAACCGGGACTGATGCTT | | | | | | | VGDMSTTGTDAFDI | | | | | | |
| | | TTGATATCTGGGGCCAAGGGACCACGGTCACCGTCTCCTCA | | | | | | | WGQGTTVTVSS | | | | | | |
| ADI-81606 | 1291 | CAGGTGCAGCTGCAGCAGTCTGGGGGAGGCTTGGTACGACC | | | | | | 7019 | QVQLQQSGGGLVRP | | 7370 | 20 | | 16 | |
| | | GGGGGGGTCCCGGAGACTCTCCTGTGCAGCCTCTGGATTCA | | | | | | | GGSRRLSCAASGFT | | | | | | |
| | | CCTTCAGTAACTATGACATACACTGGGTCCGCCAAAGTACA | | | | | | | FSNYDIHWVRQSTG | | | | | | |
| | | GGAGAAGGTCTGGAATGGGTCTCAGGTATTGGTACTTCTGG | | | | | | | EGLEWVSGIGTSGD | | | | | | |
| | | TGACACATACTATGCAGAGTCCGTGAAGGGCCGCTTCACCA | | | | | | | TYYAESVKGRFTIS | | | | | | |
| | | TCTCCAGAGAAGACGCCATGACCTCCGTGTATCTTCAAATG | | | | | | | REDAMTSVYLQMNR | | | | | | |
| | | AACAGGCTGACAGCCGGGGACACGGCTGTGTATTACTGTGC | | | | | | | LTAGDTAVYYCARG | | | | | | |
| | | AAGGGGAGACGCATCAGGCCTCTTCTACTACATGGACGTCT | | | | | | | DASGLFYYMDVWGK | | | | | | |
| | | GGGGCAAAGGGACCACGGTCACCGTCTCCTCA | | | | | | | GTTVTVSS | | | | | | |
| ADI-81782 | 1289 | GAGGTGCAGCTGTTGGAGTCGGGCCCAGGACTGGTGAAGCC | | | | | | 7020 | EVQLLESGPGLVKP | | 7371 | 20 | | 14 | |
| | | TTCGGGGACCCTGTCCCTCACCTGCGCTGTCTCTGGTGCTT | | | | | | | SGTLSLTCAVSGAS | | | | | | |
| | | CCCTCAGCGGTATTAATTGGTGGAGTTGGGTCCGCCAGTCC | | | | | | | LSGINWWSWVRQSP | | | | | | |
| | | CCAGGGAAGGGCCTGGAGTGGATTGGAGAAATCTTTCATAC | | | | | | | GKGLEWIGEIFHTG | | | | | | |
| | | TGGGAGTGTCCAGTACAACCCGTCCCTCAAGGGTCGAGTCA | | | | | | | SVQYNPSLKGRVTI | | | | | | |
| | | CCATTTCAATCGACAAGTCGAACAGTCGTTTCTCCCTGAAG | | | | | | | SIDKSNSRFSLKLS | | | | | | |
| | | CTGAGCTCTGTGACCGCCGCGGACACGGCCGTTTATTACTG | | | | | | | SVTAADTAVYYCAR | | | | | | |
| | | TGCGAGAGTGGCTGGACTTTTTGACTACTGGGGCCAGGGAT | | | | | | | VAGLFDYWGQGSLV | | | | | | |
| | | CCCTGGTCACCGTCTCCTCA | | | | | | | TVSS | | | | | | |
| ADI-81627 | 1285 | CAGGTGCAGCTGGTGCAGTCTGGGGGAGGCGTGGTCCAGCC | | | | | | 7021 | QVQLVQSGGGVVQP | | 7372 | 19 | | 16 | |
| | | TGGGGGGTCCCTGAGACTCTCCTGTGCAGCGTCTGGTTTCA | | | | | | | GGSLRLSCAASGFS | | | | | | |
| | | GCATCAATACCTATGGCATACACTGGGTCCGCCAGGCTCCA | | | | | | | INTYGIHWVRQAPG | | | | | | |
| | | GGCAAGGGACTGGAGTGGGTGGCAATTTTGTGGTTTGATGG | | | | | | | KGLEWVAILWFDGV | | | | | | |
| | | AGTTAAGAAATACTATGCAGAGTCCGTGGAGGGCCGCTTCA | | | | | | | KKYYAESVEGRFII | | | | | | |
| | | TCATTTCCAGAGACAATTTCAAGAACACGCTGTATCTACAA | | | | | | | SRDNFKNTLYLQMN | | | | | | |
| | | ATGAACAGCCTGAGAGCCGAGGACACGGCTGTGTATTTTTG | | | | | | | SLRAEDTAVYFCAR | | | | | | |
| | | TGCGAGAGATGGAGAGGGTGGGGCCGCTGAAAACTGGGGCC | | | | | | | DGEGGAAENWGQGA | | | | | | |
| | | AGGGAGCCCTGGTCACCGTCTCCTCA | | | | | | | LVTVSS | | | | | | |
| ADI-81609 | 1286 | TGGGTCCTCGGTGAAGGTCTCCTGCAAGGCTTCTGGAGGCA | | | | | | 7022 | QVQLVQSGAEMKKP | | 7373 | 18 | | 16 | |
| | | TCCTCAACACCTATAGTATTTCCTGGGTGCGACAGGCCCCT | | | | | | | GSSVKVSCKASGGI | | | | | | |
| | | GGACAAGGGCTTGAGTGGATGGGAAGGTTCATCCCTATCAT | | | | | | | LNTYSISWVRQAPG | | | | | | |
| | | TCGAACAGCAACCTACGCACATAAGTTCCAGGGCAGAGTCA | | | | | | | QGLEWMGRFIPIIR | | | | | | |
| | | CGATTACCGCGGACGAGTCCACGAGCACAGCCTACATGGAG | | | | | | | TATYAHKFQGRVTI | | | | | | |
| | | CTGAACAGCCTGACATATGACGACACGGCCGTCTACTACTG | | | | | | | TADESTSTAYMELN | | | | | | |
| | | TGCGAGGGCGGCCGACCCAGGGGTGGGACCTACAATTGGCT | | | | | | | SLTYDDTAVYYCAR | | | | | | |
| | | ACTTCGACCCCTGGGGCCAGGGAACCCTGGTCACCGTCTCC | | | | | | | AADPGVGPTIGYFD | | | | | | |
| | | TCA | | | | | | | PWGQGTLVTVSS | | | | | | |
| ADI-81777 | 1286 | CAGGTGCAGCTGGTGCAGTCTGGGGCTGAAGTGAAGAAGCC | | | | | | 7023 | QVQLVQSGAEVKKP | | 7374 | 18 | | 15 | |
| | | TGGGTCCTCGGTGAAGGTCTCCTGCAAGGCTTCTGGAGGCA | | | | | | | GSSVKVSCKASGGT | | | | | | |
| | | CCTTCAGTAATTATGGTATCAATTGGGTGCGACAGGTCCCT | | | | | | | FSNYGINWVRQVPG | | | | | | |
| | | GGACAGGGGCTTGAGTGGATGGGGAGGATCACCCCTATGTT | | | | | | | QGLEWMGRITPMFG | | | | | | |
| | | CGGGATGGCAAATTATGTGCAGAAATTTCAGGACAGAGTCA | | | | | | | MANYVQKFQDRVTF | | | | | | |
| | | CATTTACCGCGGACAAATCCACGGGCACAGCCTACTTGGAA | | | | | | | TADKSTGTAYLEVS | | | | | | |
| | | GTGAGCAGCCTGACATCTGAGGACACGGCCGTTTATTACTG | | | | | | | SLTSEDTAVYYCAR | | | | | | |
| | | TGCGAGATCGGAGGTGATGAATGTTGGTCATTACTACCTTG | | | | | | | SEVMNVGHYYLDSW | | | | | | |
| | | ACTCCTGGGGCCAGGGAACCCTGGTCACCGTCTCCTCA | | | | | | | GQGTLVTVSS | | | | | | |
| ADI-81728 | 1286 | GAGGTGCAGCTGGTGGAGACGGGCCCAGGACTGGTGAAGCC | | | | | | 7024 | EVQLVETGPGLVKP | | 7375 | 16 | | 13 | |
| | | TTCGCAGACCCTGTCACTCACCTGCAGTGTCTCTGGTGGCT | | | | | | | SQTLSLTCSVSGGS | | | | | | |
| | | CCATCAAGAGCGGTGGTTACTATTGGAGCTGGATCCGCCAG | | | | | | | IKSGGYYWSWIRQH | | | | | | |
| | | CACCCAGGGAAGGGCCTGGAGTGGATTGGCTACATCTATTT | | | | | | | PGKGLEWIGYIYFT | | | | | | |
| | | CACTGGGAGCACCGACTACAACCCGTCCCTCAGAGGTCGAG | | | | | | | GSTDYNPSLRGRVT | | | | | | |
| | | TTACCATTTCAGTGGACACATTTGAGAACCAGTTTTCCTTG | | | | | | | ISVDTFENQFSLRL | | | | | | |
| | | AGGCTGACCTCTGTGACTGCCGCGGACACGGCCACGTATTA | | | | | | | TSVTAADTATYYCA | | | | | | |
| | | CTGTGCGAGAGTTGGTGGTGGTGGGACCAACGACTTTGACT | | | | | | | RVGGGGTNDFDFWG | | | | | | |
| | | TCTGGGGCCAGGGAACCCTGGTCACCGTCTCCTCA | | | | | | | QGTLVTVSS | | | | | | |
| ADI-81732 | 1291 | GAGGTGCAGCTGGTGGAGTCTGGGGGAGACTTGGTACAGCC | | | | | | 7025 | EVQLVESGGDLVQP | | 7376 | 16 | | 15 | |
| | | TGGGGGGTCCCTGAGACTCTCCTGTGCAGCCTCCGGATTCA | | | | | | | GGSLRLSCAASGFT | | | | | | |
| | | CCTTCAGGACCTACGACATGCACTGGGTCCGCCAAACTGCA | | | | | | | FRTYDMHWVRQTAV | | | | | | |
| | | GTAAAAGGTCTGGAGTGGGTCTCCACTATTGGTACTTCAGG | | | | | | | KGLEWVSTIGTSGD | | | | | | |
| | | TGATAGATACTATTCAGACTCCGTGAAGGGCCGATTTACCA | | | | | | | RYYSDSVKGRFTIS | | | | | | |
| | | TCTCCAGAGAGGATGCCAAGGACTCCTTGTATCTTGAAATG | | | | | | | REDAKDSLYLEMNS | | | | | | |
| | | AACAGCCTAAGAGGCGGGGACACGGCTGTGTATTACTGTGC | | | | | | | LRGGDTAVYYCARG | | | | | | |
| | | AAGAGGCAACGATATTGCACTAGTACCACCTGCCATGAGTG | | | | | | | NDIALVPPAMSERP | | | | | | |
| | | AGCGCCCCCGAAACTACTTCTACTACTTGGACGTCTGGGGC | | | | | | | RNYFYYLDVWGKGT | | | | | | |
| | | AAGGGGACCACGGTCACCGTCTCCTCA | | | | | | | TVTVSS | | | | | | |
| | VH | VH | | SEQ | | SEQ | | SEQ | | SEQ | | SEQ | | SEQ | |
| | CDR3 | Germ- | VH | ID | VH | ID | VH | ID | VH | ID | VH | ID | VH | ID | VH |
| Clone ID | Lineage | line | FR1 | NO: | CDR1 | NO: | FR2 | NO: | CDR2 | NO: | FR3 | NO: | CDR3 | NO: | FR4 |
| ADI-81588 | 49 | IGHV3- | QVQLV | 36 | FIFSDY | 227 | WVRQAP | 447 | GISSTG | 550 | RFTISR | 807 | VKDIGSW | 1051 | WGQGTT |
| | | 64D | QSGGG | | SMH | | GKGLDY | | DITDYA | | DNSKNT | | KYFDVFD | | VTVSS |
| | | | LVQPG | | | | VS | | DSVKD | | LYLQMS | | V | | |
| | | | GSLSL | | | | | | | | SLRVED | | | | |
| | | | SCLVS | | | | | | | | TAVYYC | | | | |
| | | | G | | | | | | | | | | | | |
| ADI-81685 | 55 | IGHV3- | EVQLL | 5392 | FTFSNY | 396 | WVRQAP | 5838 | VIWSDG | 6038 | RFTISR | 6354 | ARDYGSR | 6661 | WGQGTL |
| | | 33 | ESGGG | | AMH | | GRGLEW | | TGKHYE | | DNFKNM | | TTWFDP | | VTVSS |
| | | | VVQPG | | | | VP | | DSVRG | | LYLQMN | | | | |
| | | | RSLRL | | | | | | | | SLRVED | | | | |
| | | | SCAVS | | | | | | | | TAVYYC | | | | |
| | | | G | | | | | | | | | | | | |
| ADI-81589 | 50 | IGHV3- | RCTLV | 5443 | VIVSRN | 5665 | WIRQAP | 5839 | VIYSGG | 6039 | RFTISR | 6355 | ARDDARY | 6662 | WGQGTT |
| | | 53 | QSGGG | | YMA | | GRGLEW | | STFYAD | | HNSKNT | | EAFDI | | VTVSS |
| | | | LVQPG | | | | LS | | SVRG | | LYLQMN | | | | |
| | | | GSLRL | | | | | | | | SLRPED | | | | |
| | | | SCTAS | | | | | | | | TAVYYC | | | | |
| | | | E | | | | | | | | | | | | |
| ADI-81592 | 52 | IGHV1- | QVQLV | 5444 | GTISRS | 5666 | WVRQVP | 511 | RIIPML | 6040 | RVTITA | 6356 | ATTNPEL | 6663 | WGQGAL |
| | | 69 | QSGAE | | AIT | | GQGLEW | | GAANYA | | DKSTNT | | SVGGDVF | | VTVSS |
| | | | VKKPG | | | | MG | | QKVQG | | AYMELS | | HV | | |
| | | | TSVKV | | | | | | | | SLRSED | | | | |
| | | | SCKSA | | | | | | | | TAVYYC | | | | |
| | | | G | | | | | | | | | | | | |
| ADI-81751 | 27 | IGHV5- | EVQLV | 5445 | FSFTDY | 5667 | WVRQMP | 5812 | IIFPHD | 6041 | QVTLSA | 6357 | AKGPQLT | 6664 | WGQGTT |
| | | 51 | ESGAE | | WIG | | GKGLEW | | SDTRYS | | DKSINT | | AHPLRVG | | VTVSS |
| | | | VKKPG | | | | VG | | PSFQG | | AYLHWS | | AFDI | | |
| | | | ESLKI | | | | | | | | SLRASD | | | | |
| | | | SCTGS | | | | | | | | TAMYYC | | | | |
| | | | G | | | | | | | | | | | | |
| ADI-81533 | 2 | IGHV3- | RCTLK | 5446 | FTFSND | 5668 | WVRQTP | 5778 | LISYDG | 6042 | RFTISR | 6358 | ARHQESV | 6665 | WGRGTT |
| | | 30 | QSGGG | | DIY | | GKGLEW | | SNSYYA | | DNSNNT | | LPAADRP | | VTVSS |
| | | | VVQPG | | | | VA | | DSVKG | | VYLQMS | | YRYYYYM | | |
| | | | RSLRL | | | | | | | | SLRGED | | DV | | |
| | | | SCAAS | | | | | | | | TAVYYC | | | | |
| | | | G | | | | | | | | | | | | |
| ADI-81548 | 15 | IGHV1- | QVQLQ | 86 | GTFSSY | 407 | WVRQAP | 433 | KIIPIL | 6043 | RVTITA | 6359 | ARESGYS | 6666 | WGRGTL |
| | | 69 | QSGAE | | SIT | | GQGLEW | | NVMDYA | | DKSTGT | | GSGSVVY | | VTVSS |
| | | | VKKPG | | | | MG | | QKFQG | | AYMDLS | | FHL | | |
| | | | SSVKV | | | | | | | | SLTSED | | | | |
| | | | SCKAS | | | | | | | | TAVYYC | | | | |
| | | | G | | | | | | | | | | | | |
| ADI-81582 | 43 | IGHV1- | QVQLV | 50 | DSFSSY | 5669 | WVRQAP | 433 | KIIAFL | 6044 | RVTITA | 6360 | AKEGGTT | 6667 | WGQGTL |
| | | 69 | QSGAE | | TVN | | GQGLEW | | GVSNYA | | DKSTNT | | TEYLQH | | VTVSS |
| | | | VKKPG | | | | MG | | QKFQG | | AYLVLS | | | | |
| | | | SSVKV | | | | | | | | SLRSED | | | | |
| | | | SCKAS | | | | | | | | TAVYYC | | | | |
| | | | G | | | | | | | | | | | | |
| | SEQ | | | | | | | SEQ | | | SEQ | VH | | VH Amino | |
| | ID | | | | | | | ID | | | ID | Nucleotide | | Acid | |
| Clone ID | NO: | VH DNA | | | | | | NO: | VH Protein | | NO: | Substitution | | Substitution | |
| ADI-81588 | 1287 | CAGGTGCAGCTGGTGCAGTCTGGGGGAGGCTTGGTCCAGCC | | | | | | 1337 | QVQLVQSGGGLVQP | | 1620 | 15 | | 14 | |
| | | TGGGGGGTCCCTGAGCCTCTCCTGTTTAGTCTCTGGATTCA | | | | | | | GGSLSLSCLVSGFI | | | | | | |
| | | TCTTCAGTGACTATTCTATGCACTGGGTCCGCCAGGCTCCA | | | | | | | FSDYSMHWVRQAPG | | | | | | |
| | | GGGAAGGGACTGGATTATGTTTCAGGTATTAGTAGTACTGG | | | | | | | KGLDYVSGISSTGD | | | | | | |
| | | GGATATCACAGACTACGCAGACTCAGTGAAGGACAGATTCA | | | | | | | ITDYADSVKDRFTI | | | | | | |
| | | CCATCTCCAGAGACAATTCCAAGAACACGCTGTATCTTCAA | | | | | | | SRDNSKNTLYLQMS | | | | | | |
| | | ATGAGCAGTCTGAGAGTTGAGGACACGGCTGTGTATTATTG | | | | | | | SLRVEDTAVYYCVK | | | | | | |
| | | TGTGAAAGATATTGGGAGCTGGAAGTATTTTGATGTTTTTG | | | | | | | DIGSWKYFDVFDVW | | | | | | |
| | | ATGTCTGGGGCCAAGGGACCACGGTCACCGTCTCCTCA | | | | | | | GQGTTVTVSS | | | | | | |
| ADI-81685 | 1286 | GAGGTGCAGCTGTTGGAGTCTGGGGGAGGCGTGGTCCAGCC | | | | | | 7026 | EVQLLESGGGVVQP | | 7377 | 15 | | 14 | |
| | | TGGGAGGTCCCTGAGACTCTCCTGTGCAGTGTCTGGATTCA | | | | | | | GRSLRLSCAVSGFT | | | | | | |
| | | CCTTCAGTAACTATGCCATGCACTGGGTCCGCCAGGCTCCA | | | | | | | FSNYAMHWVRQAPG | | | | | | |
| | | GGCAGGGGGTTGGAGTGGGTGCCAGTTATCTGGTCTGATGG | | | | | | | RGLEWVPVIWSDGT | | | | | | |
| | | AACTGGTAAACACTATGAAGACTCAGTGAGGGGCCGGTTCA | | | | | | | GKHYEDSVRGRFTI | | | | | | |
| | | CCATCTCCAGAGACAATTTCAAGAACATGTTGTATCTCCAA | | | | | | | SRDNFKNMLYLQMN | | | | | | |
| | | ATGAACAGCCTGAGAGTCGAGGACACGGCTGTCTATTACTG | | | | | | | SLRVEDTAVYYCAR | | | | | | |
| | | TGCGAGAGATTACGGCAGCAGGACTACCTGGTTCGACCCCT | | | | | | | DYGSRTTWFDPWGQ | | | | | | |
| | | GGGGCCAGGGAACCCTGGTCACCGTCTCCTCA | | | | | | | GTLVTVSS | | | | | | |
| ADI-81589 | 1287 | AGGTGCACGCTGGTGCAGTCTGGAGGAGGCTTGGTCCAGCC | | | | | | 7027 | RCTLVQSGGGLVQP | | 7378 | 14 | | 12 | |
| | | TGGGGGGTCCCTGAGACTCTCCTGCACAGCCTCTGAAGTCA | | | | | | | GGSLRLSCTASEVI | | | | | | |
| | | TCGTCAGTCGCAATTACATGGCCTGGATCCGCCAGGCTCCA | | | | | | | VSRNYMAWIRQAPG | | | | | | |
| | | GGGAGGGGACTGGAGTGGCTCTCAGTTATTTATAGCGGTGG | | | | | | | RGLEWLSVIYSGGS | | | | | | |
| | | TAGCACATTCTACGCAGACTCCGTGAGGGGCCGATTCACCA | | | | | | | TFYADSVRGRFTIS | | | | | | |
| | | TCTCCAGACACAATTCCAAGAACACACTATATCTTCAAATG | | | | | | | RHNSKNTLYLQMNS | | | | | | |
| | | AACAGCCTGAGACCTGAGGACACGGCCGTGTATTACTGTGC | | | | | | | LRPEDTAVYYCARD | | | | | | |
| | | GAGAGATGATGCCCGATATGAAGCTTTTGATATCTGGGGCC | | | | | | | DARYEAFDIWGQGT | | | | | | |
| | | AAGGGACAACGGTCACCGTCTCCTCA | | | | | | | TVTVSS | | | | | | |
| ADI-81592 | 1285 | CAGGTCCAGCTTGTGCAGTCTGGGGCTGAAGTGAAGAAGCC | | | | | | 7028 | QVQLVQSGAEVKKP | | 7379 | 14 | | 12 | |
| | | TGGGACCTCGGTGAAAGTCTCCTGCAAGTCTGCTGGAGGCA | | | | | | | GTSVKVSCKSAGGT | | | | | | |
| | | CCATCAGTAGAAGTGCTATCACCTGGGTGCGACAGGTCCCT | | | | | | | ISRSAITWVRQVPG | | | | | | |
| | | GGACAAGGGCTTGAGTGGATGGGAAGGATCATCCCTATGCT | | | | | | | QGLEWMGRIIPMLG | | | | | | |
| | | TGGCGCAGCAAACTACGCACAGAAGGTCCAGGGCAGAGTCA | | | | | | | AANYAQKVQGRVTI | | | | | | |
| | | CGATTACCGCGGACAAATCCACCAACACAGCCTACATGGAG | | | | | | | TADKSTNTAYMELS | | | | | | |
| | | CTGAGCAGCCTGAGATCTGAGGACACGGCCGTGTATTACTG | | | | | | | SLRSEDTAVYYCAT | | | | | | |
| | | TGCGACAACCAACCCCGAACTCTCAGTGGGTGGAGATGTAT | | | | | | | TNPELSVGGDVFHV | | | | | | |
| | | TTCATGTCTGGGGCCAAGGGGCATTGGTCACCGTCTCTTCA | | | | | | | WGQGALVTVSS | | | | | | |
| ADI-81751 | 1287 | CGGGGAGTCACTGAAGATCTCCTGTACGGGTTCTGGATTCA | | | | | | 7029 | EVQLVESGAEVKKP | | 7380 | 14 | | 10 | |
| | | GCTTTACCGACTACTGGATCGGCTGGGTGCGCCAGATGCCC | | | | | | | GESLKISCTGSGFS | | | | | | |
| | | GGCAAAGGCCTGGAGTGGGTGGGGATCATCTTTCCTCACGA | | | | | | | FTDYWIGWVRQMPG | | | | | | |
| | | CTCTGACACCAGATACAGCCCGTCCTTCCAAGGCCAGGTCA | | | | | | | KGLEWVGIIFPHDS | | | | | | |
| | | CCCTCTCAGCCGACAAGTCCATCAACACCGCCTACCTGCAC | | | | | | | DTRYSPSFQGQVTL | | | | | | |
| | | TGGAGCAGCCTGCGGGCCTCGGACACCGCCATGTATTACTG | | | | | | | SADKSINTAYLHWS | | | | | | |
| | | TGCGAAAGGGCCCCAGCTTACCGCTCATCCCCTGCGGGTCG | | | | | | | SLRASDTAMYYCAK | | | | | | |
| | | GTGCTTTTGATATCTGGGGCCAAGGGACAACGGTCACCGTC | | | | | | | GPQLTAHPLRVGAF | | | | | | |
| | | TCCTCA | | | | | | | DIWGQGTTVTVSS | | | | | | |
| ADI-81533 | 1294 | AGGTGCACGCTGAAGCAGTCTGGGGGAGGCGTGGTCCAGCC | | | | | | 7030 | RCTLKQSGGGVVQP | | 7381 | 13 | | 11 | |
| | | TGGGAGGTCCCTGAGACTCTCCTGTGCAGCCTCTGGATTCA | | | | | | | GRSLRLSCAASGFT | | | | | | |
| | | CCTTCAGTAATGATGATATATACTGGGTCCGCCAGACTCCA | | | | | | | FSNDDIYWVRQTPG | | | | | | |
| | | GGCAAGGGGCTAGAGTGGGTGGCACTTATTTCATACGATGG | | | | | | | KGLEWVALISYDGS | | | | | | |
| | | AAGTAATTCATACTACGCAGACTCCGTGAAGGGCCGGTTCA | | | | | | | NSYYADSVKGRFTI | | | | | | |
| | | CCATCTCCAGAGACAATTCCAACAACACGGTGTATCTGCAA | | | | | | | SRDNSNNTVYLQMS | | | | | | |
| | | ATGAGCAGCCTGAGAGGTGAGGACACGGCTGTATATTACTG | | | | | | | SLRGEDTAVYYCAR | | | | | | |
| | | TGCGAGACATCAAGAGTCCGTACTCCCAGCTGCTGATAGGC | | | | | | | HQESVLPAADRPYR | | | | | | |
| | | CCTATCGTTACTACTACTACATGGACGTCTGGGGCAGAGGG | | | | | | | YYYYMDVWGRGTTV | | | | | | |
| | | ACCACGGTCACCGTCTCCTCA | | | | | | | TVSS | | | | | | |
| ADI-81548 | 1288 | TGGGTCCTCAGTGAAGGTCTCCTGCAAGGCTTCTGGAGGCA | | | | | | 7031 | QVQLQQSGAEVKKP | | 7382 | 13 | | 10 | |
| | | CCTTCAGCAGCTATTCTATCACCTGGGTGCGACAGGCCCCT | | | | | | | GSSVKVSCKASGGT | | | | | | |
| | | GGACAAGGGCTTGAGTGGATGGGGAAGATCATCCCTATCCT | | | | | | | FSSYSITWVRQAPG | | | | | | |
| | | TAATGTAATGGACTACGCACAGAAGTTCCAGGGCAGAGTCA | | | | | | | QGLEWMGKIIPILN | | | | | | |
| | | CGATTACCGCGGACAAATCGACGGGCACAGCCTACATGGAC | | | | | | | VMDYAQKFQGRVTI | | | | | | |
| | | CTGAGCAGCCTGACATCTGAGGACACGGCCGTTTATTACTG | | | | | | | TADKSTGTAYMDLS | | | | | | |
| | | TGCGAGAGAGTCGGGTTATTCTGGTTCGGGCAGTGTTGTAT | | | | | | | SLTSEDTAVYYCAR | | | | | | |
| | | ACTTCCATCTCTGGGGCCGCGGCACCCTGGTCACCGTCTCC | | | | | | | ESGYSGSGSVVYFH | | | | | | |
| | | TCA | | | | | | | LWGRGTLVTVSS | | | | | | |
| ADI-81582 | 1286 | CAGGTGCAGCTGGTGCAGTCTGGGGCTGAGGTGAAGAAGCC | | | | | | 7032 | QVQLVQSGAEVKKP | | 7383 | 13 | | 12 | |
| | | TGGGTCCTCGGTGAAGGTCTCCTGCAAGGCTTCTGGCGACT | | | | | | | GSSVKVSCKASGDS | | | | | | |
| | | CCTTCAGTAGTTATACTGTCAACTGGGTGCGACAGGCCCCT | | | | | | | FSSYTVNWVRQAPG | | | | | | |
| | | GGACAAGGGCTTGAGTGGATGGGGAAGATCATCGCTTTCCT | | | | | | | QGLEWMGKIIAFLG | | | | | | |
| | | TGGAGTGTCAAACTACGCACAGAAGTTCCAGGGCAGAGTCA | | | | | | | VSNYAQKFQGRVTI | | | | | | |
| | | CGATTACCGCGGACAAATCCACGAACACAGCCTACTTGGTG | | | | | | | TADKSTNTAYLVLS | | | | | | |
| | | CTGAGCAGCCTGAGATCTGAGGACACGGCCGTTTACTACTG | | | | | | | SLRSEDTAVYYCAK | | | | | | |
| | | TGCGAAAGAAGGTGGTACCACCACTGAATACCTCCAACACT | | | | | | | EGGTTTEYLQHWGQ | | | | | | |
| | | GGGGCCAGGGCACCCTGGTCACCGTCTCCTCA | | | | | | | GTLVTVSS | | | | | | |
| | VH | VH | | SEQ | | SEQ | | SEQ | | SEQ | | SEQ | | SEQ | |
| | CDR3 | Germ- | VH | ID | VH | ID | VH | ID | VH | ID | VH | ID | VH | ID | VH |
| Clone ID | Lineage | line | FR1 | NO: | CDR1 | NO: | FR2 | NO: | CDR2 | NO: | FR3 | NO: | CDR3 | NO: | FR4 |
| ADI-81541 | 9 | IGHV1- | QVQLE | 5447 | GPFSSS | 5670 | WLRQAP | 478 | RIIPIL | 6045 | RVTITA | 6361 | ARDVGYS | 6668 | WGQGTL |
| | | 69 | QSGAE | | PIS | | GQGLEW | | GVAEYA | | DRSSST | | GSGSCYY | | VTVSS |
| | | | VKKPG | | | | MG | | QKFQG | | AYMELS | | FDP | | |
| | | | SSVKV | | | | | | | | SLRSED | | | | |
| | | | SCKAS | | | | | | | | TALYYC | | | | |
| | | | G | | | | | | | | | | | | |
| ADI-81629 | 2 | IGHV1- | QVQLL | 5448 | GTFDSY | 5671 | WVRQAP | 433 | SIIPSL | 6046 | RVTITA | 6362 | ARGSGYS | 6669 | WGQGTL |
| | | 69 | ESGAE | | TIS | | GQGLEW | | GITDSE | | DKSTST | | GSGSNNY | | VTVSS |
| | | | VKKPG | | | | MG | | QKFQG | | VHMELS | | FDP | | |
| | | | SSVKV | | | | | | | | SLRSED | | | | |
| | | | SCKAS | | | | | | | | TAVYYC | | | | |
| | | | G | | | | | | | | | | | | |
| ADI-81646 | 19 | IGHV4- | QVQLL | 5449 | GSISSN | 5672 | WIRQPP | 445 | FVFDSG | 6047 | RITISI | 6363 | ARHGPDS | 6670 | WGQGTT |
| | | 4 | ESGPG | | YWS | | GKGLEW | | STNYNP | | DTSRNQ | | SSRYHDA | | VTVSS |
| | | | LVKPS | | | | IG | | SLRS | | FSLKLR | | FDI | | |
| | | | ETLSL | | | | | | | | SVTAAD | | | | |
| | | | TCSVS | | | | | | | | TAVYYC | | | | |
| | | | G | | | | | | | | | | | | |
| ADI-81745 | 21 | IGHV1- | QVQLV | 5450 | YTFSNY | 5673 | WVRQAP | 5840 | MINPSG | 6048 | RVIMTG | 6364 | ARSQVVP | 1238 | WGQGTL |
| | | 46 | ESGAE | | YVH | | GHGLEW | | GSTTYA | | DTSTKT | | ATSHLDY | | VTVSS |
| | | | VKKPG | | | | MG | | QKFQG | | VYMELS | | | | |
| | | | ASVKI | | | | | | | | SLRSED | | | | |
| | | | SCKAS | | | | | | | | TAVYSC | | | | |
| | | | G | | | | | | | | | | | | |
| ADI-81630 | 3 | IGHV1- | QVQLV | 5451 | GTFSSY | 407 | WVRQAP | 433 | TIIPIL | 6049 | RVTITA | 987 | AREYCSG | 1248 | WGQGTL |
| | | 69 | QSGAE | | SIT | | GQGLEW | | GVPNYA | | DKSTST | | DSCRTVN | | VTVSS |
| | | | VKEPG | | | | MG | | QKFQG | | AYMEVT | | WFDP | | |
| | | | SSVKV | | | | | | | | SLTSED | | | | |
| | | | SCKAS | | | | | | | | TAIYYC | | | | |
| | | | G | | | | | | | | | | | | |
| ADI-81660 | 2 | IGHV1- | QVQLV | 5452 | GAFSSY | 5674 | WVRQAP | 433 | RVIAFL | 6050 | RVTITA | 6365 | ARDSGYS | 6671 | WGQGNA |
| | | 69 | ESGAE | | SIS | | GQGLEW | | NIPNYA | | DKSTST | | GSGSNNY | | VTISS |
| | | | VKKHG | | | | MG | | QKFQG | | AYMELT | | FDP | | |
| | | | SSVKV | | | | | | | | SLRSED | | | | |
| | | | SCKAS | | | | | | | | TAVYYC | | | | |
| | | | A | | | | | | | | | | | | |
| ADI-81733 | 10 | IGHV4- | EVQLL | 5453 | GSTRNY | 5675 | WIRQPP | 445 | YIDYSG | 6051 | RVTISI | 6366 | ARVGRAD | 6672 | WGKGTT |
| | | 59 | ESGPG | | YWT | | GKGLEW | | STNYNL | | DTAKNQ | | AVVPAGI | | VTVSS |
| | | | LVKPS | | | | IG | | SLES | | FSLRLS | | DYYYYMD | | |
| | | | ETLSL | | | | | | | | SVTAAD | | V | | |
| | | | SCTVS | | | | | | | | TAVYYC | | | | |
| | | | G | | | | | | | | | | | | |
| ADI-81736 | 13 | IGHV3- | EVQLL | 5373 | FTFGSY | 5676 | WVRQAP | 5841 | FIPYDG | 6052 | RFTVSR | 894 | ATEAGFD | 6673 | WGKGTT |
| | | 33 | ESGGG | | GMH | | GKGLDW | | RNPHYA | | DNSKNT | | PNYNYYL | | VTVSS |
| | | | VVQPG | | | | VA | | DSVKG | | LYLQMN | | DV | | |
| | | | RSLRL | | | | | | | | SLRAED | | | | |
| | | | SCAAS | | | | | | | | TAVYYC | | | | |
| | | | G | | | | | | | | | | | | |
| | SEQ | | | | | | | SEQ | | | SEQ | VH | | VH Amino | |
| | ID | | | | | | | ID | | | ID | Nucleotide | | Acid | |
| Clone ID | NO: | VH DNA | | | | | | NO: | VH Protein | | NO: | Substitution | | Substitution | |
| ADI-81541 | 1286 | TGGGTCCTCGGTGAAGGTCTCCTGCAAGGCTTCTGGAGGCC | | | | | | 7033 | QVQLEQSGAEVKKP | | 7384 | 12 | | 9 | |
| | | CCTTCAGCAGTTCTCCAATCAGCTGGCTGCGGCAGGCCCCT | | | | | | | GSSVKVSCKASGGP | | | | | | |
| | | GGACAGGGGCTTGAGTGGATGGGAAGGATCATCCCTATCCT | | | | | | | FSSSPISWLRQAPG | | | | | | |
| | | TGGTGTGGCAGAATACGCACAGAAGTTTCAGGGCAGAGTCA | | | | | | | QGLEWMGRIIPILG | | | | | | |
| | | CCATTACCGCGGACAGATCCTCGAGCACAGCCTACATGGAG | | | | | | | VAEYAQKFQGRVTI | | | | | | |
| | | CTGAGCAGCCTGAGATCTGAGGACACGGCCCTGTATTATTG | | | | | | | TADRSSSTAYMELS | | | | | | |
| | | TGCGAGAGATGTGGGTTACTCTGGTTCGGGGAGTTGTTACT | | | | | | | SLRSEDTALYYCAR | | | | | | |
| | | ACTTTGACCCCTGGGGCCAGGGAACCCTGGTCACCGTCTCC | | | | | | | DVGYSGSGSCYYFD | | | | | | |
| | | TCA | | | | | | | PWGQGTLVTVSS | | | | | | |
| ADI-81629 | 1286 | TGGGTCCTCGGTGAAGGTCTCCTGCAAGGCCTCTGGAGGCA | | | | | | 7034 | QVQLLESGAEVKKP | | 7385 | 12 | | 9 | |
| | | CCTTCGACAGCTATACTATCAGCTGGGTGCGACAGGCCCCT | | | | | | | GSSVKVSCKASGGT | | | | | | |
| | | GGACAAGGGCTTGAGTGGATGGGAAGCATCATTCCTTCCCT | | | | | | | FDSYTISWVRQAPG | | | | | | |
| | | TGGTATAACAGACTCCGAACAGAAGTTCCAGGGCAGAGTCA | | | | | | | QGLEWMGSIIPSLG | | | | | | |
| | | CGATTACCGCGGACAAATCCACGAGCACAGTTCACATGGAG | | | | | | | ITDSEQKFQGRVTI | | | | | | |
| | | CTGAGCAGCCTGAGATCTGAGGACACGGCCGTGTATTACTG | | | | | | | TADKSTSTVHMELS | | | | | | |
| | | TGCGAGAGGTTCGGGGTATTCTGGTTCAGGGAGTAACAACT | | | | | | | SLRSEDTAVYYCAR | | | | | | |
| | | ACTTCGACCCCTGGGGCCAGGGAACCCTGGTCACCGTCTCC | | | | | | | GSGYSGSGSNNYFD | | | | | | |
| | | TCA | | | | | | | PWGQGTLVTVSS | | | | | | |
| ADI-81646 | 1287 | CAGGTGCAGCTGTTGGAGTCGGGCCCAGGACTGGTGAAGCC | | | | | | 7035 | QVQLLESGPGLVKP | | 7386 | 12 | | 11 | |
| | | TTCGGAGACCCTGTCCCTCACCTGCAGTGTCTCTGGTGGCT | | | | | | | SETLSLTCSVSGGS | | | | | | |
| | | CCATCAGTAGTAACTACTGGAGCTGGATCCGGCAGCCCCCA | | | | | | | ISSNYWSWIRQPPG | | | | | | |
| | | GGGAAGGGACTGGAGTGGATTGGGTTTGTCTTTGACAGTGG | | | | | | | KGLEWIGFVFDSGS | | | | | | |
| | | GAGCACCAACTACAACCCCTCCCTCAGGAGTCGAATCACCA | | | | | | | TNYNPSLRSRITIS | | | | | | |
| | | TATCAATAGATACGTCCAGGAACCAGTTCTCCCTGAAGCTG | | | | | | | IDTSRNQFSLKLRS | | | | | | |
| | | AGGTCTGTGACCGCCGCAGACACGGCCGTGTACTACTGTGC | | | | | | | VTAADTAVYYCARH | | | | | | |
| | | GAGACATGGGCCCGATAGCAGCAGCAGGTACCATGATGCTT | | | | | | | GPDSSSRYHDAFDI | | | | | | |
| | | TTGATATCTGGGGCCAAGGGACCACGGTCACCGTCTCCTCA | | | | | | | WGQGTTVTVSS | | | | | | |
| ADI-81745 | 1286 | CAGGTGCAGCTGGTGGAGTCTGGGGCTGAGGTGAAGAAGCC | | | | | | 7036 | QVQLVESGAEVKKP | | 7387 | 12 | | 11 | |
| | | TGGGGCCTCAGTGAAGATTTCCTGCAAGGCATCTGGATACA | | | | | | | GASVKISCKASGYT | | | | | | |
| | | CTTTCAGCAACTACTATGTGCACTGGGTGCGACAGGCCCCT | | | | | | | FSNYYVHWVRQAPG | | | | | | |
| | | GGACACGGGCTTGAGTGGATGGGAATGATCAACCCTAGTGG | | | | | | | HGLEWMGMINPSGG | | | | | | |
| | | TGGTAGCACAACCTACGCACAGAAATTCCAGGGCAGAGTCA | | | | | | | STTYAQKFQGRVIM | | | | | | |
| | | TCATGACCGGGGACACGTCGACGAAAACAGTGTACATGGAA | | | | | | | TGDTSTKTVYMELS | | | | | | |
| | | CTGAGCAGCCTGAGGTCTGAGGACACGGCCGTTTATTCCTG | | | | | | | SLRSEDTAVYSCAR | | | | | | |
| | | TGCGAGGAGCCAAGTAGTACCAGCTACTAGTCACCTTGACT | | | | | | | SQVVPATSHLDYWG | | | | | | |
| | | ACTGGGGCCAGGGAACCCTGGTCACCGTCTCCTCA | | | | | | | QGTLVTVSS | | | | | | |
| ADI-81630 | 1286 | TGGGTCCTCGGTGAAGGTCTCCTGCAAGGCTTCTGGAGGCA | | | | | | 7037 | QVQLVQSGAEVKEP | | 7388 | 11 | | 10 | |
| | | CCTTCAGCAGCTATAGTATCACCTGGGTGCGACAGGCCCCT | | | | | | | GSSVKVSCKASGGT | | | | | | |
| | | GGACAAGGGCTTGAGTGGATGGGAACGATCATCCCTATCCT | | | | | | | FSSYSITWVRQAPG | | | | | | |
| | | TGGTGTACCAAACTACGCACAGAAGTTCCAGGGCAGAGTCA | | | | | | | QGLEWMGTIIPILG | | | | | | |
| | | CCATTACCGCGGACAAATCCACGAGCACAGCCTACATGGAG | | | | | | | VPNYAQKFQGRVTI | | | | | | |
| | | GTGACCAGCCTGACATCTGAGGACACGGCCATATATTACTG | | | | | | | TADKSTSTAYMEVT | | | | | | |
| | | TGCGAGAGAATATTGTAGTGGTGACAGCTGCCGAACCGTTA | | | | | | | SLTSEDTAIYYCAR | | | | | | |
| | | ACTGGTTCGACCCCTGGGGCCAGGGAACCCTGGTCACCGTC | | | | | | | EYCSGDSCRTVNWF | | | | | | |
| | | TCCTCA | | | | | | | DPWGQGTLVTVSS | | | | | | |
| ADI-81660 | 6821 | TGGGTCCTCGGTGAAGGTCTCCTGCAAGGCTTCTGCAGGCG | | | | | | 7038 | QVQLVESGAEVKKH | | 7389 | 11 | | 10 | |
| | | CCTTCAGCAGCTACTCTATCAGCTGGGTGCGACAGGCCCCT | | | | | | | GSSVKVSCKASAGA | | | | | | |
| | | GGACAAGGGCTTGAGTGGATGGGAAGAGTCATCGCTTTCCT | | | | | | | FSSYSISWVRQAPG | | | | | | |
| | | TAATATACCAAACTACGCACAGAAATTCCAGGGCAGAGTCA | | | | | | | QGLEWMGRVIAFLN | | | | | | |
| | | CCATTACCGCGGACAAATCCACGAGTACAGCCTACATGGAG | | | | | | | IPNYAQKFQGRVTI | | | | | | |
| | | CTGACCAGCCTCAGATCTGAGGACACGGCCGTGTATTATTG | | | | | | | TADKSTSTAYMELT | | | | | | |
| | | TGCGAGAGATTCGGGGTACTCTGGTTCAGGGAGTAACAACT | | | | | | | SLRSEDTAVYYCAR | | | | | | |
| | | ACTTCGACCCCTGGGGCCAGGGTAACGCGGTCACAATTTCA | | | | | | | DSGYSGSGSNNYFD | | | | | | |
| | | TCG | | | | | | | PWGQGNAVTISS | | | | | | |
| ADI-81733 | 1291 | GAGGTGCAGCTGTTGGAGTCGGGCCCAGGCCTGGTGAAGCC | | | | | | 7039 | EVQLLESGPGLVKP | | 7390 | 11 | | 11 | |
| | | GTCGGAGACCCTGTCCCTCTCCTGCACTGTCTCTGGTGGCT | | | | | | | SETLSLSCTVSGGS | | | | | | |
| | | CCACCAGAAATTACTACTGGACCTGGATCCGGCAGCCCCCA | | | | | | | TRNYYWTWIRQPPG | | | | | | |
| | | GGGAAGGGACTGGAGTGGATTGGGTATATCGATTACAGTGG | | | | | | | KGLEWIGYIDYSGS | | | | | | |
| | | TAGCACCAACTACAACCTCTCCCTGGAGAGTCGAGTCACCA | | | | | | | TNYNLSLESRVTIS | | | | | | |
| | | TATCAATAGACACGGCCAAGAACCAGTTCTCCCTGAGGCTG | | | | | | | IDTAKNQFSLRLSS | | | | | | |
| | | AGCTCTGTGACCGCTGCGGACACGGCCGTATATTACTGTGC | | | | | | | VTAADTAVYYCARV | | | | | | |
| | | GAGAGTCGGGAGGGCTGATGCAGTAGTACCAGCTGGTATAG | | | | | | | GRADAVVPAGIDYY | | | | | | |
| | | ATTATTACTACTACATGGATGTCTGGGGCAAAGGGACCACG | | | | | | | YYMDVWGKGTTVTV | | | | | | |
| | | GTCACCGTCTCCTCA | | | | | | | SS | | | | | | |
| ADI-81736 | 1291 | GAGGTGCAGCTGTTGGAGTCTGGGGGAGGCGTGGTCCAGCC | | | | | | 7040 | EVQLLESGGGVVQP | | 7391 | 11 | | 8 | |
| | | AGGGAGGTCCCTGAGACTCTCCTGTGCAGCGTCTGGATTCA | | | | | | | GRSLRLSCAASGFT | | | | | | |
| | | CCTTCGGGAGCTATGGCATGCACTGGGTCCGCCAGGCTCCA | | | | | | | FGSYGMHWVRQAPG | | | | | | |
| | | GGCAAGGGGCTGGATTGGGTGGCATTTATACCGTATGATGG | | | | | | | KGLDWVAFIPYDGR | | | | | | |
| | | AAGGAATCCACACTATGCCGACTCCGTGAAGGGCCGATTCA | | | | | | | NPHYADSVKGRFTV | | | | | | |
| | | CCGTCTCCAGAGACAACTCCAAAAACACGCTGTATCTGCAG | | | | | | | SRDNSKNTLYLQMN | | | | | | |
| | | ATGAACAGCTTGAGAGCCGAGGACACGGCTGTCTACTACTG | | | | | | | SLRAEDTAVYYCAT | | | | | | |
| | | TGCGACAGAGGCGGGATTTGACCCCAACTACAACTACTACT | | | | | | | EAGFDPNYNYYLDV | | | | | | |
| | | TGGACGTCTGGGGCAAAGGGACCACGGTCACCGTCTCCTCA | | | | | | | WGKGTTVTVSS | | | | | | |
| | VH | VH | | SEQ | | SEQ | | SEQ | | SEQ | | SEQ | | SEQ | |
| | CDR3 | Germ- | VH | ID | VH | ID | VH | ID | VH | ID | VH | ID | VH | ID | VH |
| Clone ID | Lineage | line | FR1 | NO: | CDR1 | NO: | FR2 | NO: | CDR2 | NO: | FR3 | NO: | CDR3 | NO: | FR4 |
| ADI-81759 | 35 | IGHV4- | EVQLV | 5347 | GSISGP | 5677 | WVRQPP | 444 | EIFHTG | 6053 | RATISI | 6367 | ARIMGAL | 6674 | WGQGTL |
| | | 4 | ESGPG | | NWWS | | GKGLEW | | NTKYNP | | DKSKNQ | | DY | | VTVSS |
| | | | LVKPS | | | | IG | | SLKS | | FSLKLS | | | | |
| | | | GTLSL | | | | | | | | SVTAAD | | | | |
| | | | TCAVS | | | | | | | | TAIYYC | | | | |
| | | | G | | | | | | | | | | | | |
| ADI-81542 | 10 | IGHV3- | QVQLV | 12 | FTFSSY | 207 | WVRQDT | 5842 | VIGTYG | 6054 | RFTISR | 6368 | ARGTSVT | 6675 | WGKGTT |
| | | 13 | QSGGG | | DMH | | GKRLEW | | DTYYPD | | ENGKNS | | RGSYHYY | | VTVSS |
| | | | LVQPG | | | | VS | | SVRG | | LFLQMN | | YMDV | | |
| | | | GSLRL | | | | | | | | SLRAGD | | | | |
| | | | SCAAS | | | | | | | | TAVYFC | | | | |
| | | | G | | | | | | | | | | | | |
| ADI-81639 | 12 | IGHV3- | QVQLL | 5454 | FTFDDF | 5678 | WVRQAP | 437 | GINWNG | 6055 | RFTIFR | 6369 | VRSYDTG | 6676 | WGSGTT |
| | | 20 | ESGGR | | AMS | | GKGLEW | | AGAGYA | | DNAKNF | | DV | | VTVSS |
| | | | VVRPG | | | | VS | | DSVKG | | LYLEMN | | | | |
| | | | GSLRL | | | | | | | | SLRVED | | | | |
| | | | SCAAS | | | | | | | | TALYHC | | | | |
| | | | G | | | | | | | | | | | | |
| ADI-81815 | 89 | IGHV4- | EVQLL | 5335 | GSISRT | 5679 | WIRQSP | 434 | NIFYSG | 6056 | RLTISL | 6370 | TRQIGMA | 6677 | WGQGTL |
| | | 39 | ESGPG | | TYYWG | | GKGLEW | | TTYYNP | | DTSKNQ | | DY | | VTVSS |
| | | | LVKPS | | | | IG | | SLKS | | FSLKLT | | | | |
| | | | ETLSL | | | | | | | | SVTAAD | | | | |
| | | | TCTVS | | | | | | | | TAVYYC | | | | |
| | | | G | | | | | | | | | | | | |
| ADI-81852 | 30 | IGHV1- | EVQLV | 5320 | YSFTNY | 5680 | WVRQAP | 433 | IINAGS | 6057 | RVTMTR | 6371 | ARDPGVV | 6678 | WGQGTL |
| | | 46 | QSGAE | | YIH | | GQGLEW | | GGTSYP | | DTSTST | | DPLNPHP | | VTVSS |
| | | | VKKPG | | | | MG | | QKFQG | | VDMELS | | LPRF | | |
| | | | ASVKV | | | | | | | | SLRSED | | | | |
| | | | SCKAS | | | | | | | | TAVYYC | | | | |
| | | | G | | | | | | | | | | | | |
| ADI-81853 | 31 | IGHV1- | EVQLV | 5455 | HTFSTY | 5681 | WVRQAP | 433 | IIHPSG | 6058 | RVTMTS | 6372 | ARGGLVP | 6679 | WGQGTT |
| | | 46 | ESGAE | | YIH | | GQGLEW | | GSTTYA | | DSSTST | | DAQEPFD | | VTVSS |
| | | | VKKPG | | | | MG | | QKFQG | | VYMDLS | | I | | |
| | | | ASVRV | | | | | | | | SLRSED | | | | |
| | | | SCKAS | | | | | | | | TAVYYC | | | | |
| | | | G | | | | | | | | | | | | |
| ADI-81647 | 20 | IGHV1- | QVQLV | 5456 | GSFSSY | 5682 | WVRQAP | 433 | RIIPFL | 6059 | RVTITA | 6373 | ARGSGYS | 6680 | WGQGTL |
| | | 69 | QSGAE | | TIS | | GQGLEW | | GVADLA | | DKSTNT | | SGGSNNY | | VTVSS |
| | | | LKKPG | | | | MG | | QKFQG | | ASMELS | | FDS | | |
| | | | SSVKV | | | | | | | | SLRSED | | | | |
| | | | SCKAS | | | | | | | | TAVYYC | | | | |
| | | | G | | | | | | | | | | | | |
| ADI-81689 | 59 | IGHV1- | EVQLV | 5320 | YTFTSF | 5683 | WVRQAP | 433 | WISTFN | 6060 | RVTLTT | 6374 | AREGPFY | 6681 | WGQGTL |
| | | 18 | QSGAE | | GVN | | GQGLEW | | GNTNFA | | DTSTST | | CSGGSCY | | VTVSS |
| | | | VKKPG | | | | MG | | QKFQG | | VYMELR | | FFDY | | |
| | | | ASVKV | | | | | | | | SLRSDD | | | | |
| | | | SCKAS | | | | | | | | TAVYYC | | | | |
| | | | G | | | | | | | | | | | | |
| | SEQ | | | | | | | SEQ | | | SEQ | VH | | VH Amino | |
| | ID | | | | | | | ID | | | ID | Nucleotide | | Acid | |
| Clone ID | NO: | VH DNA | | | | | | NO: | VH Protein | | NO: | Substitution | | Substitution | |
| ADI-81759 | 1286 | GAGGTGCAGCTGGTGGAGTCGGGCCCAGGACTGGTGAAGCC | | | | | | 7041 | EVQLVESGPGLVKP | | 7392 | 11 | | 9 | |
| | | TTCGGGGACCCTGTCCCTCACCTGCGCTGTCTCTGGTGGCT | | | | | | | SGTLSLTCAVSGGS | | | | | | |
| | | CCATCAGCGGTCCTAATTGGTGGAGTTGGGTCCGCCAGCCC | | | | | | | ISGPNWWSWVRQPP | | | | | | |
| | | CCAGGGAAGGGGCTGGAGTGGATTGGGGAAATCTTTCATAC | | | | | | | GKGLEWIGEIFHTG | | | | | | |
| | | TGGGAACACCAAGTACAACCCGTCCCTCAAGAGTCGAGCCA | | | | | | | NTKYNPSLKSRATI | | | | | | |
| | | CCATATCAATAGACAAGTCCAAGAACCAGTTCTCCCTGAAG | | | | | | | SIDKSKNQFSLKLS | | | | | | |
| | | CTGAGTTCTGTGACCGCCGCGGACACGGCCATTTATTACTG | | | | | | | SVTAADTAIYYCAR | | | | | | |
| | | TGCGAGAATAATGGGAGCCCTTGACTACTGGGGGCAGGGAA | | | | | | | IMGALDYWGQGTLV | | | | | | |
| | | CCCTGGTCACCGTCTCCTCA | | | | | | | TVSS | | | | | | |
| ADI-81542 | 1291 | TGGGGGGTCCCTGAGACTCTCCTGTGCAGCCTCTGGATTCA | | | | | | 7042 | QVQLVQSGGGLVQP | | 7393 | 10 | | 9 | |
| | | CCTTCAGTAGCTACGACATGCACTGGGTCCGCCAAGATACA | | | | | | | GGSLRLSCAASGFT | | | | | | |
| | | GGAAAACGTCTAGAATGGGTCTCAGTTATTGGTACTTATGG | | | | | | | FSSYDMHWVRQDTG | | | | | | |
| | | TGACACATACTATCCAGACTCCGTGAGGGGCCGATTCACCA | | | | | | | KRLEWVSVIGTYGD | | | | | | |
| | | TCTCCAGAGAAAATGGCAAGAACTCCTTGTTTCTTCAAATG | | | | | | | TYYPDSVRGRFTIS | | | | | | |
| | | AACAGCCTGAGAGCCGGGGACACGGCTGTCTATTTCTGTGC | | | | | | | RENGKNSLFLQMNS | | | | | | |
| | | AAGAGGGACGTCGGTCACCCGTGGGTCCTACCACTACTACT | | | | | | | LRAGDTAVYFCARG | | | | | | |
| | | ACATGGACGTCTGGGGCAAAGGGACCACGGTCACCGTCTCC | | | | | | | TSVTRGSYHYYYMD | | | | | | |
| | | TCA | | | | | | | VWGKGTTVTVSS | | | | | | |
| ADI-81639 | 6822 | CAGGTGCAGCTGTTGGAGTCTGGGGGACGTGTGGTACGGCC | | | | | | 7043 | QVQLLESGGRVVRP | | 7394 | 10 | | 10 | |
| | | GGGGGGGTCCCTGAGACTCTCCTGTGCAGCCTCTGGATTCA | | | | | | | GGSLRLSCAASGFT | | | | | | |
| | | CCTTTGATGATTTTGCCATGAGTTGGGTCCGCCAAGCTCCA | | | | | | | FDDFAMSWVRQAPG | | | | | | |
| | | GGGAAGGGACTGGAGTGGGTCTCTGGGATTAACTGGAATGG | | | | | | | KGLEWVSGINWNGA | | | | | | |
| | | TGCTGGCGCAGGGTATGCAGACTCTGTGAAGGGCCGATTCA | | | | | | | GAGYADSVKGRFTI | | | | | | |
| | | CCATCTTCAGAGACAACGCCAAGAACTTCCTGTATCTGGAA | | | | | | | FRDNAKNFLYLEMN | | | | | | |
| | | ATGAACAGTCTGAGAGTCGAAGACACGGCCCTCTATCACTG | | | | | | | SLRVEDTALYHCVR | | | | | | |
| | | TGTGAGAAGCTACGATACCGGGGACGTCTGGGGCAGCGGGA | | | | | | | SYDTGDVWGSGTTV | | | | | | |
| | | CCACGGTCACCGTCTCCTCA | | | | | | | TVSS | | | | | | |
| ADI-81815 | 1286 | GAGGTGCAGCTGTTGGAGTCGGGCCCAGGACTGGTGAAGCC | | | | | | 7044 | EVQLLESGPGLVKP | | 7395 | 10 | | 10 | |
| | | TTCGGAGACCCTGTCCCTCACCTGCACTGTCTCTGGTGGCT | | | | | | | SETLSLTCTVSGGS | | | | | | |
| | | CCATCAGCAGGACTACTTACTACTGGGGCTGGATCCGCCAG | | | | | | | ISRTTYYWGWIRQS | | | | | | |
| | | TCCCCCGGGAAGGGACTAGAATGGATTGGGAATATCTTTTA | | | | | | | PGKGLEWIGNIFYS | | | | | | |
| | | TAGTGGGACCACCTACTACAACCCGTCCCTCAAGAGTCGAC | | | | | | | GTTYYNPSLKSRLT | | | | | | |
| | | TCACCATATCCCTAGACACGTCCAAGAACCAGTTCTCCCTG | | | | | | | ISLDTSKNQFSLKL | | | | | | |
| | | AAACTGACCTCTGTGACCGCCGCAGACACGGCTGTCTATTA | | | | | | | TSVTAADTAVYYCT | | | | | | |
| | | CTGTACAAGACAGATTGGTATGGCAGACTACTGGGGCCAGG | | | | | | | RQIGMADYWGQGTL | | | | | | |
| | | GAACCCTGGTCACCGTCTCCTCA | | | | | | | VTVSS | | | | | | |
| ADI-81852 | 1286 | TGGGGCCTCAGTGAAGGTTTCCTGCAAGGCGTCTGGATACA | | | | | | 7045 | EVQLVQSGAEVKKP | | 7396 | 10 | | 9 | |
| | | GCTTCACCAACTACTATATACACTGGGTGCGACAGGCCCCT | | | | | | | GASVKVSCKASGYS | | | | | | |
| | | GGACAAGGGCTTGAGTGGATGGGAATAATCAATGCTGGTAG | | | | | | | FTNYYIHWVRQAPG | | | | | | |
| | | TGGTGGCACAAGCTACCCTCAGAAGTTCCAGGGCCGAGTCA | | | | | | | QGLEWMGIINAGSG | | | | | | |
| | | CCATGACCAGGGACACGTCCACGAGCACAGTCGACATGGAG | | | | | | | GTSYPQKFQGRVTM | | | | | | |
| | | CTGAGTAGCCTGAGATCTGAGGACACGGCCGTGTATTACTG | | | | | | | TRDTSTSTVDMELS | | | | | | |
| | | TGCGAGAGATCCGGGTGTGGTGGACCCGCTGAATCCCCACC | | | | | | | SLRSEDTAVYYCAR | | | | | | |
| | | CCCTGCCTCGTTTCTGGGGCCAGGGAACCCTGGTCACCGTC | | | | | | | DPGVVDPLNPHPLP | | | | | | |
| | | TCCTCA | | | | | | | RFWGQGTLVTVSS | | | | | | |
| ADI-81853 | 1287 | GAGGTGCAGCTGGTGGAGTCTGGGGCTGAGGTGAAGAAGCC | | | | | | 7046 | EVQLVESGAEVKKP | | 7397 | 10 | | 10 | |
| | | TGGGGCCTCGGTGAGGGTTTCCTGCAAGGCATCTGGACACA | | | | | | | GASVRVSCKASGHT | | | | | | |
| | | CCTTCAGCACCTACTATATTCACTGGGTGCGACAGGCCCCT | | | | | | | FSTYYIHWVRQAPG | | | | | | |
| | | GGACAAGGGCTTGAGTGGATGGGAATAATCCACCCTAGTGG | | | | | | | QGLEWMGIIHPSGG | | | | | | |
| | | TGGTAGCACAACCTACGCACAGAAGTTCCAGGGCAGAGTCA | | | | | | | STTYAQKFQGRVTM | | | | | | |
| | | CCATGACCAGCGACTCGTCCACGAGCACAGTCTACATGGAC | | | | | | | TSDSSTSTVYMDLS | | | | | | |
| | | TTGAGCAGCCTGAGATCTGAGGACACGGCCGTGTATTACTG | | | | | | | SLRSEDTAVYYCAR | | | | | | |
| | | TGCGAGAGGGGGATTAGTTCCAGATGCGCAAGAGCCTTTTG | | | | | | | GGLVPDAQEPFDIW | | | | | | |
| | | ATATCTGGGGCCAGGGGACCACGGTCACCGTCTCCTCA | | | | | | | GQGTTVTVSS | | | | | | |
| ADI-81647 | 1286 | TGGGTCCTCGGTGAAGGTCTCCTGCAAGGCTTCTGGAGGCT | | | | | | 7047 | QVQLVQSGAELKKP | | 7398 | 9 | | 8 | |
| | | CCTTCAGCAGTTATACTATCAGCTGGGTGCGACAGGCCCCT | | | | | | | GSSVKVSCKASGGS | | | | | | |
| | | GGACAAGGCCTTGAGTGGATGGGAAGGATCATCCCTTTCCT | | | | | | | FSSYTISWVRQAPG | | | | | | |
| | | TGGTGTAGCAGACCTCGCACAGAAGTTCCAGGGCCGAGTCA | | | | | | | QGLEWMGRIIPFLG | | | | | | |
| | | CGATTACCGCGGACAAGTCCACGAACACAGCCTCCATGGAG | | | | | | | VADLAQKFQGRVTI | | | | | | |
| | | TTGAGCAGCCTGAGATCTGAAGACACGGCCGTGTATTACTG | | | | | | | TADKSTNTASMELS | | | | | | |
| | | TGCGAGAGGCTCCGGCTATAGCAGCGGAGGTAGTAATAACT | | | | | | | SLRSEDTAVYYCAR | | | | | | |
| | | ACTTCGACTCCTGGGGCCAGGGAACCCTGGTCACCGTCTCC | | | | | | | GSGYSSGGSNNYFD | | | | | | |
| | | TCA | | | | | | | SWGQGTLVTVSS | | | | | | |
| ADI-81689 | 1286 | TGGGGCCTCAGTGAAGGTCTCCTGCAAGGCTTCTGGTTACA | | | | | | 7048 | EVQLVQSGAEVKKP | | 7399 | 9 | | 9 | |
| | | CCTTTACCAGTTTTGGTGTCAACTGGGTGCGACAGGCCCCT | | | | | | | GASVKVSCKASGYT | | | | | | |
| | | GGACAAGGCCTTGAGTGGATGGGATGGATCAGCACTTTCAA | | | | | | | FTSFGVNWVRQAPG | | | | | | |
| | | TGGTAATACAAACTTTGCACAGAAGTTCCAGGGCAGAGTCA | | | | | | | QGLEWMGWISTFNG | | | | | | |
| | | CCCTGACCACAGACACATCCACGAGCACAGTCTACATGGAG | | | | | | | NTNFAQKFQGRVTL | | | | | | |
| | | CTGCGGAGCCTGAGATCTGACGACACGGCCGTGTATTATTG | | | | | | | TTDTSTSTVYMELR | | | | | | |
| | | TGCGCGAGAGGGGCCTTTTTATTGTAGTGGTGGTAGTTGCT | | | | | | | SLRSDDTAVYYCAR | | | | | | |
| | | ACTTTTTTGACTACTGGGGCCAGGGAACCCTGGTCACCGTC | | | | | | | EGPFYCSGGSCYFF | | | | | | |
| | | TCCTCA | | | | | | | DYWGQGTLVTVSS | | | | | | |
| | VH | VH | | SEQ | | SEQ | | SEQ | | SEQ | | SEQ | | SEQ | |
| | CDR3 | Germ- | VH | ID | VH | ID | VH | ID | VH | ID | VH | ID | VH | ID | VH |
| Clone ID | Lineage | line | FR1 | NO: | CDR1 | NO: | FR2 | NO: | CDR2 | NO: | FR3 | NO: | CDR3 | NO: | FR4 |
| ADI-81550 | 17 | IGHV1- | QVQLV | 5457 | GTFSSY | 5684 | WVRQAP | 433 | RIIPIL | 6061 | RVTITA | 6375 | AREAGYS | 6682 | WSQGTL |
| | | 69 | QSGAE | | TVS | | GQGLEW | | GIANYA | | DKSTAT | | GSGSSYY | | VTVSS |
| | | | VKKPG | | | | MG | | QNFQG | | VYLEVS | | FDY | | |
| | | | SSVKV | | | | | | | | SLRSED | | | | |
| | | | SCMAS | | | | | | | | TAVYYC | | | | |
| | | | G | | | | | | | | | | | | |
| ADI-81552 | 17 | IGHV1- | QVQLV | 50 | GTFSSN | 5685 | WVRQAP | 433 | RIIPIL | 6062 | RVTITA | 6376 | AREAGYS | 6682 | WSQGTL |
| | | 69 | QSGAE | | TVS | | GQGLEW | | GIADYA | | DKSTAT | | GSGSSYY | | VTVSS |
| | | | VKKPG | | | | MG | | QKFQG | | VYMEVS | | FDY | | |
| | | | SSVKV | | | | | | | | SLRSED | | | | |
| | | | SCKAS | | | | | | | | TAMYYC | | | | |
| | | | G | | | | | | | | | | | | |
| ADI-81601 | 15 | IGHV1- | QVQLV | 50 | GTFSSY | 356 | WVRQAP | 495 | KIIPIL | 6063 | RVTIIA | 936 | ARESGYS | 1191 | WGRGTL |
| | | 69 | QSGAE | | SIS | | GQGPEW | | GATDYA | | DKSTST | | GSGSVTY | | VTVSS |
| | | | VKKPG | | | | LG | | QKFQG | | AYMELS | | FHL | | |
| | | | SSVKV | | | | | | | | SLRSED | | | | |
| | | | SCKAS | | | | | | | | TAVYYC | | | | |
| | | | G | | | | | | | | | | | | |
| ADI-81653 | 26 | IGHV3- | EVQLL | 5458 | FIFSDY | 5686 | WVRQAP | 431 | VIWYDG | 6064 | RFTISR | 779 | ARLATVP | 6683 | WGKGTT |
| | | 33 | ESGGG | | GIH | | GKGLEW | | SNTYYA | | DNSKNT | | YFYYMDV | | VTVSS |
| | | | VIQPG | | | | VA | | DSVKG | | VYLQMN | | | | |
| | | | RSLRL | | | | | | | | SLRAED | | | | |
| | | | SCAAS | | | | | | | | TAVYYC | | | | |
| | | | G | | | | | | | | | | | | |
| ADI-81661 | 33 | IGHV1- | EVQLV | 5459 | GTFSSY | 252 | WVRQAP | 433 | RIIPIL | 6065 | RVTITA | 6377 | ATEVGYS | 6684 | WGQGTL |
| | | 69 | ESGAE | | TIT | | GQGLEW | | GIPNYA | | DKSTSM | | GYGPSPY | | VTVSS |
| | | | VKKPG | | | | MG | | QTFEG | | AYMELN | | FDS | | |
| | | | SSLKV | | | | | | | | SLRSED | | | | |
| | | | SCKAS | | | | | | | | TAVYYC | | | | |
| | | | G | | | | | | | | | | | | |
| ADI-81763 | 39 | IGHV5- | EVQLV | 5397 | YSFISH | 5687 | WVRQMP | 5843 | IIYPGD | 775 | QVTFSA | 6378 | ARQSSSW | 6685 | WGQGTL |
| | | 51 | QSGAE | | WIA | | GKGLEW | | SDIRYS | | DKSIST | | HDVDY | | VTVSS |
| | | | VKKPG | | | | TG | | PSFQG | | AYLQWS | | | | |
| | | | ESLKI | | | | | | | | SLKASD | | | | |
| | | | SCKGS | | | | | | | | TAMYFC | | | | |
| | | | G | | | | | | | | | | | | |
| ADI-81807 | 82 | IGHV3-53 | EVQLV | 5460 | FNVSRN | 5688 | WVRQAP | 437 | VIYSGG | 6066 | RFTISR | 777 | ARFHDIF | 6686 | WGQGTP |
| | | | ETGGD | | YMN | | GKGLEW | | STFYAD | | DNSKNT | | TGYSDAF | | VTVSS |
| | | | LIQPG | | | | VS | | SIQG | | LYLQMN | | DI | | |
| | | | GSLRL | | | | | | | | SLRAED | | | | |
| | | | SCAAS | | | | | | | | TAVYYC | | | | |
| | | | G | | | | | | | | | | | | |
| ADI-81849 | 27 | IGHV3- | EVQLL | 5373 | FTFSNY | 396 | WVRQAP | 472 | LISYDG | 6067 | RFSISR | 872 | ARPSGRV | 6687 | WGQGTT |
| | | 30 | ESGGG | | AMH | | GKGLEW | | TNKYYA | | DNSKNT | | LHDPWAY | | VTVSS |
| | | | VVQPG | | | | VT | | DSVKG | | LYLQMN | | GMDV | | |
| | | | RSLRL | | | | | | | | SLRADD | | | | |
| | | | SCAAS | | | | | | | | TAVYYC | | | | |
| | | | G | | | | | | | | | | | | |
| | SEQ | | | | | | | SEQ | | | SEQ | VH | | VH Amino | |
| | ID | | | | | | | ID | | | ID | Nucleotide | | Acid | |
| Clone ID | NO: | VH DNA | | | | | | NO: | VH Protein | | NO: | Substitution | | Substitution | |
| ADI-81550 | 6823 | TGGGTCCTCGGTGAAGGTCTCCTGCATGGCTTCTGGAGGCA | | | | | | 7049 | QVQLVQSGAEVKKP | | 7400 | 8 | | 7 | |
| | | CCTTCAGCAGCTATACTGTCAGCTGGGTGCGACAGGCCCCT | | | | | | | GSSVKVSCMASGGT | | | | | | |
| | | GGACAAGGGCTTGAGTGGATGGGAAGGATCATCCCTATCCT | | | | | | | FSSYTVSWVRQAPG | | | | | | |
| | | TGGTATAGCAAACTACGCACAGAACTTCCAGGGCAGAGTCA | | | | | | | QGLEWMGRIIPILG | | | | | | |
| | | CGATTACCGCGGACAAATCCACGGCCACAGTCTACTTGGAG | | | | | | | IANYAQNFQGRVTI | | | | | | |
| | | GTGAGCAGCCTGAGATCTGAGGACACGGCCGTGTATTACTG | | | | | | | TADKSTATVYLEVS | | | | | | |
| | | TGCGAGAGAGGCGGGTTATTCTGGCTCGGGGAGTTCTTACT | | | | | | | SLRSEDTAVYYCAR | | | | | | |
| | | ACTTTGACTACTGGAGCCAGGGAACCCTGGTCACCGTCTCC | | | | | | | EAGYSGSGSSYYFD | | | | | | |
| | | TCA | | | | | | | YWSQGTLVTVSS | | | | | | |
| ADI-81552 | 6823 | CGGGTCCTCGGTGAAGGTCTCCTGCAAGGCCTCTGGAGGCA | | | | | | 7050 | QVQLVQSGAEVKKP | | 7401 | 8 | | 7 | |
| | | CCTTCAGCAGTAATACTGTCAGCTGGGTGCGACAGGCCCCT | | | | | | | GSSVKVSCKASGGT | | | | | | |
| | | GGACAAGGGCTTGAGTGGATGGGAAGGATCATCCCTATCCT | | | | | | | FSSNTVSWVRQAPG | | | | | | |
| | | TGGTATAGCAGACTACGCACAGAAGTTCCAGGGCAGAGTCA | | | | | | | QGLEWMGRIIPILG | | | | | | |
| | | CGATTACCGCGGACAAATCCACGGCCACAGTCTACATGGAG | | | | | | | IADYAQKFQGRVTI | | | | | | |
| | | GTGAGCAGCCTGAGATCTGAGGACACGGCCATGTACTACTG | | | | | | | TADKSTATVYMEVS | | | | | | |
| | | TGCGAGAGAGGCGGGTTATTCTGGCTCGGGGAGTTCTTACT | | | | | | | SLRSEDTAMYYCAR | | | | | | |
| | | ACTTTGACTACTGGAGCCAGGGAACCCTGGTCACTGTCTCC | | | | | | | EAGYSGSGSSYYFD | | | | | | |
| | | TCA | | | | | | | YWSQGTLVTVSS | | | | | | |
| ADI-81601 | 1288 | TGGGTCCTCGGTGAAGGTCTCCTGCAAGGCTTCTGGAGGCA | | | | | | 7051 | QVQLVQSGAEVKKP | | 7402 | 8 | | 8 | |
| | | CCTTCAGCAGCTATAGTATCTCCTGGGTGCGACAGGCCCCT | | | | | | | GSSVKVSCKASGGT | | | | | | |
| | | GGACAGGGGCCTGAGTGGTTGGGAAAGATCATCCCTATCCT | | | | | | | FSSYSISWVRQAPG | | | | | | |
| | | TGGTGCAACAGACTACGCACAGAAGTTCCAGGGCAGAGTCA | | | | | | | QGPEWLGKIIPILG | | | | | | |
| | | CCATTATCGCGGACAAATCCACGAGCACGGCCTATATGGAG | | | | | | | ATDYAQKFQGRVTI | | | | | | |
| | | CTGAGCAGCCTGAGATCTGAGGACACGGCCGTGTATTATTG | | | | | | | IADKSTSTAYMELS | | | | | | |
| | | TGCGAGAGAGTCGGGGTACTCTGGTTCGGGGAGTGTTACGT | | | | | | | SLRSEDTAVYYCAR | | | | | | |
| | | ACTTCCATCTCTGGGGCCGTGGCACCCTGGTCACCGTCTCC | | | | | | | ESGYSGSGSVTYFH | | | | | | |
| | | TCA | | | | | | | LWGRGTLVTVSS | | | | | | |
| ADI-81653 | 1291 | GAGGTGCAGCTGTTGGAGTCGGGGGGAGGCGTGATCCAGCC | | | | | | 7052 | EVQLLESGGGVIQP | | 7403 | 8 | | 6 | |
| | | TGGGAGGTCCCTGAGACTCTCCTGTGCAGCGTCTGGATTCA | | | | | | | GRSLRLSCAASGFI | | | | | | |
| | | TTTTCAGTGACTATGGCATTCATTGGGTCCGCCAGGCTCCA | | | | | | | FSDYGIHWVRQAPG | | | | | | |
| | | GGCAAGGGGCTGGAGTGGGTGGCAGTTATATGGTATGATGG | | | | | | | KGLEWVAVIWYDGS | | | | | | |
| | | AAGTAATACATACTATGCAGACTCCGTGAAGGGCCGATTCA | | | | | | | NTYYADSVKGRFTI | | | | | | |
| | | CCATCTCCAGAGACAATTCCAAGAACACGGTGTATCTGCAA | | | | | | | SRDNSKNTVYLQMN | | | | | | |
| | | ATGAACAGCCTGAGAGCCGAAGACACGGCTGTGTATTACTG | | | | | | | SLRAEDTAVYYCAR | | | | | | |
| | | TGCGAGACTGGCTACGGTTCCGTACTTCTACTACATGGACG | | | | | | | LATVPYFYYMDVWG | | | | | | |
| | | TCTGGGGCAAAGGGACCACGGTCACCGTCTCCTCA | | | | | | | KGTTVTVSS | | | | | | |
| ADI-81661 | 1286 | TGGGTCCTCGCTGAAGGTCTCCTGCAAGGCTTCTGGAGGCA | | | | | | 7053 | EVQLVESGAEVKKP | | 7404 | 8 | | 7 | |
| | | CCTTCAGCAGCTATACTATCACCTGGGTGCGACAGGCCCCT | | | | | | | GSSLKVSCKASGGT | | | | | | |
| | | GGACAAGGGCTTGAGTGGATGGGCAGGATCATCCCTATTCT | | | | | | | FSSYTITWVRQAPG | | | | | | |
| | | TGGTATACCAAACTACGCACAGACGTTCGAGGGCAGAGTCA | | | | | | | QGLEWMGRIIPILG | | | | | | |
| | | CCATTACCGCGGACAAATCCACGAGCATGGCGTACATGGAA | | | | | | | IPNYAQTFEGRVTI | | | | | | |
| | | CTAAACAGCTTGAGATCTGAGGACACGGCCGTGTATTACTG | | | | | | | TADKSTSMAYMELN | | | | | | |
| | | TGCGACAGAAGTTGGATATAGTGGCTACGGCCCAAGTCCCT | | | | | | | SLRSEDTAVYYCAT | | | | | | |
| | | ACTTTGACTCTTGGGGCCAGGGAACCCTGGTCACCGTCTCC | | | | | | | EVGYSGYGPSPYFD | | | | | | |
| | | TCA | | | | | | | SWGQGTLVTVSS | | | | | | |
| ADI-81763 | 1286 | GAGGTGCAGCTGGTGCAGTCTGGAGCAGAGGTGAAAAAGCC | | | | | | 7054 | EVQLVQSGAEVKKP | | 7405 | 8 | | 7 | |
| | | CGGGGAGTCTCTGAAGATCTCCTGTAAGGGTTCTGGATACA | | | | | | | GESLKISCKGSGYS | | | | | | |
| | | GTTTTATCAGCCATTGGATCGCCTGGGTGCGCCAGATGCCC | | | | | | | FISHWIAWVRQMPG | | | | | | |
| | | GGGAAAGGCCTGGAGTGGACGGGGATCATCTATCCTGGTGA | | | | | | | KGLEWTGIIYPGDS | | | | | | |
| | | CTCTGATATCAGATATAGCCCGTCCTTCCAAGGCCAGGTCA | | | | | | | DIRYSPSFQGQVTF | | | | | | |
| | | CCTTCTCGGCCGACAAGTCCATCAGCACCGCCTACCTGCAG | | | | | | | SADKSISTAYLQWS | | | | | | |
| | | TGGAGCAGCCTGAAGGCCTCGGACACCGCCATGTATTTCTG | | | | | | | SLKASDTAMYFCAR | | | | | | |
| | | TGCGAGGCAAAGCAGCAGCTGGCACGACGTTGACTACTGGG | | | | | | | QSSSWHDVDYWGQG | | | | | | |
| | | GCCAGGGAACCCTGGTCACCGTCTCCTCA | | | | | | | TLVTVSS | | | | | | |
| ADI-81807 | 6805 | GAGGTGCAGCTGGTGGAGACTGGAGGAGACTTGATCCAGCC | | | | | | 7055 | EVQLVETGGDLIQP | | 7406 | 8 | | 7 | |
| | | TGGGGGGTCCCTGAGACTCTCCTGTGCAGCCTCTGGGTTCA | | | | | | | GGSLRLSCAASGFN | | | | | | |
| | | ACGTCAGTAGAAACTACATGAACTGGGTCCGCCAGGCTCCA | | | | | | | VSRNYMNWVRQAPG | | | | | | |
| | | GGGAAGGGGCTGGAGTGGGTCTCAGTTATCTATAGCGGTGG | | | | | | | KGLEWVSVIYSGGS | | | | | | |
| | | TAGTACATTCTACGCAGACTCCATACAGGGCCGATTCACCA | | | | | | | TFYADSIQGRFTIS | | | | | | |
| | | TCTCCAGAGACAATTCCAAGAACACGCTGTATCTTCAAATG | | | | | | | RDNSKNTLYLQMNS | | | | | | |
| | | AACAGCCTGAGAGCCGAGGACACGGCCGTGTATTACTGTGC | | | | | | | LRAEDTAVYYCARF | | | | | | |
| | | GAGATTTCACGATATTTTCACTGGTTACTCCGATGCTTTTG | | | | | | | HDIFTGYSDAFDIW | | | | | | |
| | | ATATCTGGGGCCAAGGGACCCCGGTCACCGTCTCCTCA | | | | | | | GQGTPVTVSS | | | | | | |
| ADI-81849 | 1287 | TGGGAGGTCCCTGAGACTCTCCTGTGCAGCCTCGGGATTCA | | | | | | 7056 | EVQLLESGGGVVQP | | 7407 | 8 | | 6 | |
| | | CCTTCAGTAACTATGCTATGCACTGGGTCCGCCAGGCTCCA | | | | | | | GRSLRLSCAASGFT | | | | | | |
| | | GGCAAGGGGCTGGAGTGGGTGACACTTATATCATATGATGG | | | | | | | FSNYAMHWVRQAPG | | | | | | |
| | | GACCAATAAATATTACGCAGACTCCGTGAAGGGCCGATTCA | | | | | | | KGLEWVTLISYDGT | | | | | | |
| | | GTATCTCCAGAGACAATTCCAAGAACACGCTGTATCTGCAA | | | | | | | NKYYADSVKGRFSI | | | | | | |
| | | ATGAACAGCCTGAGAGCTGACGACACGGCTGTCTATTACTG | | | | | | | SRDNSKNTLYLQMN | | | | | | |
| | | TGCGAGGCCGTCGGGGAGGGTGCTACACGACCCCTGGGCCT | | | | | | | SLRADDTAVYYCAR | | | | | | |
| | | ACGGTATGGACGTCTGGGGCCAAGGGACCACGGTCACCGTC | | | | | | | PSGRVLHDPWAYGM | | | | | | |
| | | TCCTCA | | | | | | | DVWGQGTTVTVSS | | | | | | |
| | VH | VH | | SEQ | | SEQ | | SEQ | | SEQ | | SEQ | | SEQ | |
| | CDR3 | Germ- | VH | ID | VH | ID | VH | ID | VH | ID | VH | ID | VH | ID | VH |
| Clone ID | Lineage | line | FR1 | NO: | CDR1 | NO: | FR2 | NO: | CDR2 | NO: | FR3 | NO: | CDR3 | NO: | FR4 |
| ADI-81851 | 29 | IGHV4- | EVQLL | 5346 | GSISSG | 5689 | WIRQHP | 450 | YISYSG | 6068 | RVIISV | 6379 | ARTYYFD | 6688 | WGQGTL |
| | | 31 | ESGPG | | AYYWS | | GKGLEW | | NIDYNP | | DTSKNQ | | SSGNYYQ | | VTVSS |
| | | | LVKPS | | | | IG | | SLKS | | FSLKLS | | YYFDY | | |
| | | | QTLSL | | | | | | | | SVTAAD | | | | |
| | | | TCTVS | | | | | | | | TAVYYC | | | | |
| | | | G | | | | | | | | | | | | |
| ADI-81747 | 23 | IGHV1- | EVQLL | 5461 | GTFSNS | 5690 | WVRQAP | 433 | GIIPLF | 6069 | RVTITA | 6380 | ARGSLYH | 6689 | WGKGTT |
| | | 69 | ESGSE | | AIN | | GQGLEW | | GTANYA | | DKSTRT | | DTRWGSF | | VTVSS |
| | | | VKKPG | | | | MG | | QKFQD | | AYMELS | | DNHYYMD | | |
| | | | SSVKV | | | | | | | | SLRSED | | V | | |
| | | | SCQAS | | | | | | | | TAVYYC | | | | |
| | | | G | | | | | | | | | | | | |
| ADI-81753 | 29 | IGHV3- | EVQLL | 5355 | FSVRTN | 5691 | WVRQAP | 437 | VIYSDD | 6070 | RFTISR | 6381 | ARVVTEA | 6690 | WGQGTT |
| | | 53 | ESGGG | | YMS | | GKGLEW | | NTNYAD | | HNSKNT | | FDI | | VTVSS |
| | | | LVQPG | | | | VS | | SVKG | | LYLQMN | | | | |
| | | | GSLRL | | | | | | | | SLRAED | | | | |
| | | | SCAAS | | | | | | | | TAVYYC | | | | |
| | | | G | | | | | | | | | | | | |
| ADI-81874 | 51 | IGHV3- | EVQLV | 5462 | FTFSSY | 332 | WVRQAP | 5844 | TIKQDG | 6071 | RFTISR | 6382 | ARVGPYY | 6691 | WGQGTT |
| | | 7 | QSGGG | | WMS | | GKGLEW | | SEKLYV | | DNAKNS | | YYGMDV | | VTVSS |
| | | | LVQPG | | | | AA | | ESVKG | | LYLQMN | | | | |
| | | | GSLRL | | | | | | | | SLGAED | | | | |
| | | | SCAAS | | | | | | | | TAVYYC | | | | |
| | | | R | | | | | | | | | | | | |
| ADI-81879 | 56 | IGHV3- | EVQLL | 5324 | FTFDDH | 5692 | WVRQAP | 437 | GISWNS | 6072 | RFTISR | 6383 | AKSHDIL | 6692 | WGQGTL |
| | | 9 | ESGGG | | AMH | | GKGLEW | | NNIGYG | | DNAKNS | | DGYLDQI | | VTVSS |
| | | | LVQPG | | | | VS | | DSVKG | | LFLQMN | | NYFDY | | |
| | | | RSLRL | | | | | | | | SLRADD | | | | |
| | | | SCAAS | | | | | | | | TALYYC | | | | |
| | | | G | | | | | | | | | | | | |
| ADI-81547 | 14 | IGHV3- | QVQLV | 10 | FTFSSY | 5693 | WVRQAP | 431 | VIWSDG | 6073 | RFTISR | 777 | ARDDGSP | 6693 | WGQGTL |
| | | 33 | QSGGG | | AIH | | GKGLEW | | SHQHYA | | DNSKNT | | TTYFGD | | VTVSS |
| | | | VVQPG | | | | VA | | DSVKG | | LYLQMN | | | | |
| | | | RSLRL | | | | | | | | SLRAED | | | | |
| | | | SCAAS | | | | | | | | TAVYYC | | | | |
| | | | G | | | | | | | | | | | | |
| ADI-81556 | 22 | IGHV1- | QVQLE | 5447 | GTFSSY | 363 | WVRQAP | 433 | RIIPAL | 6074 | RVTITA | 6384 | ARDVGYS | 6694 | WGQGTL |
| | | 69 | QSGAE | | TIS | | GQGLEW | | GIADYA | | DKSTST | | GSGSSYY | | VTVSS |
| | | | VKKPG | | | | MG | | QNFQD | | AYMELS | | FDY | | |
| | | | SSVKV | | | | | | | | SLRSED | | | | |
| | | | SCKAS | | | | | | | | TAVYFC | | | | |
| | | | G | | | | | | | | | | | | |
| ADI-81610 | 67 | IGHV1- | QVQLE | 5447 | GTFSSH | 5694 | WVRQAP | 433 | RIIPIL | 6075 | RVTITA | 6385 | AREIGYS | 6695 | WGQGTL |
| | | 69 | QSGAE | | SIT | | GQGLEW | | DIANYA | | DKSTST | | DYGATEW | | VTVSS |
| | | | VKKPG | | | | MG | | QKFQG | | AYMELS | | FDP | | |
| | | | SSVKV | | | | | | | | SLRYED | | | | |
| | | | SCKAS | | | | | | | | TAVFYC | | | | |
| | | | G | | | | | | | | | | | | |
| | SEQ | | | | | | | SEQ | | | SEQ | VH | | VH Amino | |
| | ID | | | | | | | ID | | | ID | Nucleotide | | Acid | |
| Clone ID | NO: | VH DNA | | | | | | NO: | VH Protein | | NO: | Substitution | | Substitution | |
| ADI-81851 | 1286 | GAGGTGCAGCTGTTGGAGTCGGGCCCAGGACTGGTGAAGCC | | | | | | 7057 | EVQLLESGPGLVKP | | 7408 | 8 | | 7 | |
| | | TTCACAGACCCTGTCCCTCACCTGCACTGTCTCTGGTGGCT | | | | | | | SQTLSLTCTVSGGS | | | | | | |
| | | CCATCAGCAGTGGTGCTTACTACTGGAGCTGGATCCGCCAG | | | | | | | ISSGAYYWSWIRQH | | | | | | |
| | | CACCCAGGGAAGGGCCTGGAGTGGATTGGGTACATCTCTTA | | | | | | | PGKGLEWIGYISYS | | | | | | |
| | | CAGTGGGAATATCGACTACAACCCGTCCCTCAAGAGTCGAG | | | | | | | GNIDYNPSLKSRVI | | | | | | |
| | | TTATCATATCAGTAGACACGTCTAAGAACCAGTTCTCCCTG | | | | | | | ISVDTSKNQFSLKL | | | | | | |
| | | AAGCTGAGCTCTGTGACTGCCGCGGACACGGCCGTGTATTA | | | | | | | SSVTAADTAVYYCA | | | | | | |
| | | CTGTGCGAGAACGTATTACTTTGATAGTAGTGGTAATTATT | | | | | | | RTYYFDSSGNYYQY | | | | | | |
| | | ACCAGTACTACTTTGACTACTGGGGCCAGGGAACCCTGGTC | | | | | | | YFDYWGQGTLVTVS | | | | | | |
| | | ACCGTCTCCTCA | | | | | | | S | | | | | | |
| ADI-81747 | 1291 | GAGGTGCAGCTGTTGGAGTCTGGGTCTGAGGTGAAGAAGCC | | | | | | 7058 | EVQLLESGSEVKKP | | 7409 | 7 | | 7 | |
| | | TGGGTCCTCGGTGAAGGTCTCATGCCAGGCCTCTGGAGGCA | | | | | | | GSSVKVSCQASGGT | | | | | | |
| | | CCTTCAGTAACTCTGCTATCAACTGGGTGCGCCAGGCCCCT | | | | | | | FSNSAINWVRQAPG | | | | | | |
| | | GGACAAGGCCTTGAGTGGATGGGAGGGATCATCCCTCTCTT | | | | | | | QGLEWMGGIIPLFG | | | | | | |
| | | TGGGACAGCAAACTACGCACAGAAGTTCCAGGACAGAGTCA | | | | | | | TANYAQKFQDRVTI | | | | | | |
| | | CGATTACCGCGGACAAATCCACGAGGACAGCCTACATGGAG | | | | | | | TADKSTRTAYMELS | | | | | | |
| | | TTGAGCAGCCTGAGATCTGAGGACACGGCCGTCTATTACTG | | | | | | | SLRSEDTAVYYCAR | | | | | | |
| | | TGCGAGAGGCTCCCTTTATCACGATACCAGATGGGGGAGTT | | | | | | | GSLYHDTRWGSFDN | | | | | | |
| | | TTGACAACCACTACTACATGGACGTCTGGGGCAAAGGGACC | | | | | | | HYYMDVWGKGTTVT | | | | | | |
| | | ACGGTCACCGTCTCCTCA | | | | | | | VSS | | | | | | |
| ADI-81753 | 1287 | GAGGTGCAGCTGTTGGAGTCTGGAGGAGGCTTGGTCCAGCC | | | | | | 7059 | EVQLLESGGGLVQP | | 7410 | 7 | | 7 | |
| | | TGGGGGGTCCCTGAGACTCTCCTGTGCAGCCTCTGGGTTCA | | | | | | | GGSLRLSCAASGFS | | | | | | |
| | | GCGTCAGAACCAACTACATGAGCTGGGTCCGCCAGGCTCCA | | | | | | | VRTNYMSWVRQAPG | | | | | | |
| | | GGGAAGGGGCTGGAGTGGGTCTCAGTTATCTATAGCGATGA | | | | | | | KGLEWVSVIYSDDN | | | | | | |
| | | TAACACAAACTACGCAGACTCCGTGAAGGGCCGATTCACCA | | | | | | | TNYADSVKGRFTIS | | | | | | |
| | | TCTCCAGACACAATTCCAAGAACACGCTGTATCTTCAAATG | | | | | | | RHNSKNTLYLQMNS | | | | | | |
| | | AACAGCCTGAGAGCTGAGGACACGGCCGTGTATTACTGTGC | | | | | | | LRAEDTAVYYCARV | | | | | | |
| | | GAGAGTGGTTACCGAGGCTTTTGATATCTGGGGCCAAGGGA | | | | | | | VTEAFDIWGQGTTV | | | | | | |
| | | CAACGGTCACCGTCTCCTCA | | | | | | | TVSS | | | | | | |
| ADI-81874 | 1287 | GAGGTGCAGCTGGTGCAGTCTGGGGGAGGCTTGGTCCAGCC | | | | | | 7060 | EVQLVQSGGGLVQP | | 7411 | 7 | | 6 | |
| | | TGGGGGGTCCCTGAGACTCTCCTGTGCAGCCTCTAGATTCA | | | | | | | GGSLRLSCAASRFT | | | | | | |
| | | CCTTTAGTAGCTATTGGATGAGCTGGGTCCGCCAGGCTCCA | | | | | | | FSSYWMSWVRQAPG | | | | | | |
| | | GGGAAGGGGCTGGAGTGGGCGGCCACCATAAAGCAAGATGG | | | | | | | KGLEWAATIKQDGS | | | | | | |
| | | AAGTGAGAAATTGTATGTGGAGTCTGTGAAGGGCCGATTCA | | | | | | | EKLYVESVKGRFTI | | | | | | |
| | | CCATCTCCAGAGACAACGCCAAGAACTCACTGTATCTGCAA | | | | | | | SRDNAKNSLYLQMN | | | | | | |
| | | ATGAACAGCCTGGGAGCCGAGGACACGGCTGTTTATTACTG | | | | | | | SLGAEDTAVYYCAR | | | | | | |
| | | TGCGAGAGTGGGCCCTTACTACTACTACGGTATGGACGTCT | | | | | | | VGPYYYYGMDVWGQ | | | | | | |
| | | GGGGCCAAGGGACCACGGTCACCGTCTCCTCA | | | | | | | GTTVTVSS | | | | | | |
| ADI-81879 | 1286 | TGGCAGGTCCCTGAGACTCTCCTGTGCAGCCTCTGGATTCA | | | | | | 7061 | EVQLLESGGGLVQP | | 7412 | 7 | | 6 | |
| | | CGTTTGACGATCATGCCATGCACTGGGTCCGGCAAGCTCCA | | | | | | | GRSLRLSCAASGFT | | | | | | |
| | | GGGAAGGGCCTGGAGTGGGTCTCAGGTATTAGTTGGAATAG | | | | | | | FDDHAMHWVRQAPG | | | | | | |
| | | TAATAACATAGGCTATGGGGACTCTGTGAAGGGCCGATTCA | | | | | | | KGLEWVSGISWNSN | | | | | | |
| | | CCATCTCCAGAGACAACGCCAAGAACTCCCTGTTTCTGCAA | | | | | | | NIGYGDSVKGRFTI | | | | | | |
| | | ATGAACAGTCTGAGAGCTGACGACACGGCCTTGTATTACTG | | | | | | | SRDNAKNSLFLQMN | | | | | | |
| | | TGCAAAGTCCCACGATATTTTGGATGGTTATCTCGACCAAA | | | | | | | SLRADDTALYYCAK | | | | | | |
| | | TAAACTACTTTGACTACTGGGGCCAGGGAACCCTGGTCACC | | | | | | | SHDILDGYLDQINY | | | | | | |
| | | GTCTCCTCA | | | | | | | FDYWGQGTLVTVSS | | | | | | |
| ADI-81547 | 1286 | CAGGTGCAGCTGGTGCAGTCTGGGGGAGGCGTGGTCCAGCC | | | | | | 7062 | QVQLVQSGGGVVQP | | 7413 | 6 | | 6 | |
| | | TGGGAGGTCCCTGAGACTCTCCTGTGCAGCGTCTGGATTCA | | | | | | | GRSLRLSCAASGFT | | | | | | |
| | | CCTTCAGTAGCTACGCCATACACTGGGTCCGCCAGGCTCCA | | | | | | | FSSYAIHWVRQAPG | | | | | | |
| | | GGCAAGGGGCTGGAGTGGGTGGCAGTTATCTGGTCTGATGG | | | | | | | KGLEWVAVIWSDGS | | | | | | |
| | | AAGTCATCAACACTATGCAGACTCCGTGAAGGGGAGATTCA | | | | | | | HQHYADSVKGRFTI | | | | | | |
| | | CCATCTCCAGAGACAATTCCAAGAACACACTGTATCTGCAA | | | | | | | SRDNSKNTLYLQMN | | | | | | |
| | | ATGAACAGCCTGAGAGCCGAGGACACGGCTGTGTATTACTG | | | | | | | SLRAEDTAVYYCAR | | | | | | |
| | | TGCGAGAGATGACGGATCACCTACCACTTACTTTGGCGACT | | | | | | | DDGSPTTYFGDWGQ | | | | | | |
| | | GGGGCCAGGGAACCCTGGTCACCGTCTCCTCA | | | | | | | GTLVTVSS | | | | | | |
| ADI-81556 | 1286 | TGGGTCTTCGGTGAAGGTCTCCTGCAAGGCTTCTGGAGGCA | | | | | | 7063 | QVQLEQSGAEVKKP | | 7414 | 6 | | 5 | |
| | | CCTTCAGCAGCTATACTATCAGCTGGGTGCGACAGGCCCCT | | | | | | | GSSVKVSCKASGGT | | | | | | |
| | | GGACAAGGGCTTGAGTGGATGGGAAGGATCATCCCTGCCCT | | | | | | | FSSYTISWVRQAPG | | | | | | |
| | | TGGTATAGCAGACTACGCACAGAACTTCCAGGACAGAGTCA | | | | | | | QGLEWMGRIIPALG | | | | | | |
| | | CGATTACCGCGGACAAATCCACGAGCACAGCCTACATGGAG | | | | | | | IADYAQNFQDRVTI | | | | | | |
| | | CTGAGCAGCCTGAGATCTGAGGACACGGCCGTATATTTCTG | | | | | | | TADKSTSTAYMELS | | | | | | |
| | | TGCGAGAGATGTGGGTTACTCTGGGTCGGGGAGTTCTTACT | | | | | | | SLRSEDTAVYFCAR | | | | | | |
| | | ACTTTGACTACTGGGGCCAGGGAACCCTGGTCACCGTCTCC | | | | | | | DVGYSGSGSSYYFD | | | | | | |
| | | TCA | | | | | | | YWGQGTLVTVSS | | | | | | |
| ADI-81610 | 1286 | TGGGTCCTCGGTGAAGGTCTCCTGCAAGGCTTCTGGGGGCA | | | | | | 7064 | QVQLEQSGAEVKKP | | 7415 | 6 | | 6 | |
| | | CCTTCAGCAGCCATAGTATTACCTGGGTGCGACAGGCCCCT | | | | | | | GSSVKVSCKASGGT | | | | | | |
| | | GGACAAGGGCTTGAGTGGATGGGAAGGATCATCCCTATCCT | | | | | | | FSSHSITWVRQAPG | | | | | | |
| | | TGATATAGCAAACTACGCACAGAAATTCCAGGGCAGAGTAA | | | | | | | QGLEWMGRIIPILD | | | | | | |
| | | CGATTACCGCGGACAAATCCACGAGCACAGCCTACATGGAA | | | | | | | IANYAQKFQGRVTI | | | | | | |
| | | CTGAGCAGCCTGAGATATGAGGATACGGCCGTGTTTTATTG | | | | | | | TADKSTSTAYMELS | | | | | | |
| | | TGCGAGAGAAATCGGATATAGTGACTACGGGGCAACGGAGT | | | | | | | SLRYEDTAVFYCAR | | | | | | |
| | | GGTTCGACCCCTGGGGCCAGGGAACCCTGGTCACCGTCTCC | | | | | | | EIGYSDYGATEWFD | | | | | | |
| | | TCA | | | | | | | PWGQGTLVTVSS | | | | | | |
| | VH | VH | | SEQ | | SEQ | | SEQ | | SEQ | | SEQ | | SEQ | |
| | CDR3 | Germ- | VH | ID | VH | ID | VH | ID | VH | ID | VH | ID | VH | ID | VH |
| Clone ID | Lineage | line | FR1 | NO: | CDR1 | NO: | FR2 | NO: | CDR2 | NO: | FR3 | NO: | CDR3 | NO: | FR4 |
| ADI-81764 | 40 | IGHV5- | QVQLV | 174 | YSFTSY | 399 | WVRQMP | 476 | LIYPGD | 6076 | QVTMSA | 6386 | ASSASAY | 6696 | WGKGTT |
| | | 51 | QSGAE | | WIA | | GKGLEW | | SDTRYS | | DKSIST | | YLFFYMD | | VTVSS |
| | | | VKKPG | | | | MG | | PSFQG | | AYLQWN | | V | | |
| | | | ESLKI | | | | | | | | SLKASD | | | | |
| | | | SCKGS | | | | | | | | TAVYYC | | | | |
| | | | G | | | | | | | | | | | | |
| ADI-81868 | 46 | IGHV4- | EVQLL | 5346 | GSISSG | 5695 | WIRQHP | 450 | HIYYSG | 6077 | RVTISE | 6387 | ARDRDGD | 6697 | WGQGTL |
| | | 31 | ESGPG | | GYYWG | | GKGLEW | | GTNYNP | | DTSKNQ | | FSFDF | | VTVSS |
| | | | LVKPS | | | | IG | | SLKS | | FSLKLS | | | | |
| | | | QTLSL | | | | | | | | SVTAAD | | | | |
| | | | TCTVS | | | | | | | | TAVYYC | | | | |
| | | | G | | | | | | | | | | | | |
| ADI-81876 | 53 | IGHV3- | EVQLL | 5355 | FTFSSY | 332 | WVRQAP | 5844 | SIKLDG | 6078 | RYTISR | 6388 | ARKRWLQ | 6698 | WGQGTL |
| | | 7 | ESGGG | | WMS | | GKGLEW | | SEKYYV | | DNAKNS | | SDFDY | | VTVSS |
| | | | LVQPG | | | | AA | | VSAKG | | LYLQMN | | | | |
| | | | GSLRL | | | | | | | | SLRAED | | | | |
| | | | SCAAS | | | | | | | | TAVYYC | | | | |
| | | | G | | | | | | | | | | | | |
| ADI-81800 | 76 | IGHV3- | EVQLL | 5324 | FTFDDH | 5692 | WVRQAP | 437 | GISWNS | 6079 | RFTISR | 6383 | AKSHDIL | 6699 | WGQGTL |
| | | 9 | ESGGG | | AMH | | GKGLEW | | GNIGYG | | DNAKNS | | NGYLDQI | | VTVSS |
| | | | LVQPG | | | | VS | | DSVKG | | LFLQMN | | NYFDY | | |
| | | | RSLRL | | | | | | | | SLRADD | | | | |
| | | | SCAAS | | | | | | | | TALYYC | | | | |
| | | | G | | | | | | | | | | | | |
| ADI-81892 | 68 | IGHV3- | EVQLV | 5321 | FIFDDY | 395 | WVRQAP | 437 | GISWNS | 6080 | RFTISR | 6389 | AKDKSSN | 6700 | WGQGTT |
| | | 9 | ESGGG | | AMH | | GKGLEW | | ASLGYA | | DNVKNS | | YGDYAGG | | VTVSS |
| | | | LVQPG | | | | VS | | DSVKG | | LSLQMN | | LGV | | |
| | | | RSLRL | | | | | | | | SLRAED | | | | |
| | | | SCAAS | | | | | | | | TALYYC | | | | |
| | | | G | | | | | | | | | | | | |
| ADI-81657 | 30 | IGHV3- | EVQLV | 5332 | FTFSSY | 5696 | WVRQAP | 486 | RIKSDG | 6081 | RFTFSR | 6390 | ASAPSYY | 6701 | WGKGTT |
| | | 74 | ESGGG | | WMH | | GKGLVW | | SSTTYA | | DNAKNT | | YMDV | | VTVSS |
| | | | LVQPG | | | | VS | | DSVKG | | LYLQMD | | | | |
| | | | GSLRL | | | | | | | | SLRAED | | | | |
| | | | SCAAS | | | | | | | | TAVYYC | | | | |
| | | | G | | | | | | | | | | | | |
| ADI-81776 | 52 | IGHV3- | EVQLL | 5373 | FTFSDY | 5697 | WVRQAP | 431 | VIWYHG | 6082 | RFTISR | 777 | ARDGGFK | 6702 | WGKGTT |
| | | 33 | ESGGG | | GMH | | GKGLEW | | SDKYYA | | DNSKNT | | PIYPRYY | | VTVSS |
| | | | VVQPG | | | | VA | | DSVKG | | LYLQMN | | YYYMDV | | |
| | | | RSLRL | | | | | | | | SLRAED | | | | |
| | | | SCAAS | | | | | | | | TAVYYC | | | | |
| | | | G | | | | | | | | | | | | |
| ADI-81810 | 84 | IGHV3- | EVQLV | 5463 | FTFDDY | 214 | WVRQAP | 437 | GISGNS | 732 | RFTISR | 6391 | AKTMAPD | 6703 | WGQGTT |
| | | 9 | QSGGG | | AMH | | GKGLEW | | GTIGYA | | DNAKNS | | RAHYDTA | | VTVSS |
| | | | LVQPG | | | | VS | | DSVKG | | LYLQMN | | NDAFDI | | |
| | | | RSLRL | | | | | | | | RLRAED | | | | |
| | | | SCAAS | | | | | | | | TALYFC | | | | |
| | | | G | | | | | | | | | | | | |
| | SEQ | | | | | | | SEQ | | | SEQ | VH | | VH Amino | |
| | ID | | | | | | | ID | | | ID | Nucleotide | | Acid | |
| Clone ID | NO: | VH DNA | | | | | | NO: | VH Protein | | NO: | Substitution | | Substitution | |
| ADI-81764 | 1291 | CAGGTCCAGCTGGTGCAGTCTGGAGCAGAGGTGAAAAAGCC | | | | | | 7065 | QVQLVQSGAEVKKP | | 7416 | 6 | | 5 | |
| | | CGGGGAGTCTCTGAAGATCTCCTGTAAGGGTTCTGGATACA | | | | | | | GESLKISCKGSGYS | | | | | | |
| | | GCTTTACCAGCTACTGGATCGCCTGGGTGCGCCAGATGCCC | | | | | | | FTSYWIAWVRQMPG | | | | | | |
| | | GGGAAAGGCCTGGAGTGGATGGGGCTCATCTATCCTGGTGA | | | | | | | KGLEWMGLIYPGDS | | | | | | |
| | | CTCTGATACCAGATACAGCCCGTCCTTCCAAGGCCAGGTCA | | | | | | | DTRYSPSFQGQVTM | | | | | | |
| | | CCATGTCAGCCGACAAGTCCATCAGCACCGCCTACCTGCAG | | | | | | | SADKSISTAYLQWN | | | | | | |
| | | TGGAACAGCCTGAAGGCCTCGGACACCGCCGTATATTACTG | | | | | | | SLKASDTAVYYCAS | | | | | | |
| | | TGCGAGTTCAGCATCAGCTTATTACCTCTTCTTCTACATGG | | | | | | | SASAYYLFFYMDVW | | | | | | |
| | | ACGTCTGGGGCAAAGGGACCACGGTCACCGTCTCCTCA | | | | | | | GKGTTVTVSS | | | | | | |
| ADI-81868 | 1286 | GAGGTGCAGCTGTTGGAGTCGGGCCCAGGACTGGTGAAGCC | | | | | | 7066 | EVQLLESGPGLVKP | | 7417 | 6 | | 6 | |
| | | TTCACAGACCCTGTCCCTCACCTGCACTGTCTCTGGTGGCT | | | | | | | SQTLSLTCTVSGGS | | | | | | |
| | | CCATCAGCAGTGGTGGTTACTACTGGGGCTGGATCCGCCAG | | | | | | | ISSGGYYWGWIRQH | | | | | | |
| | | CACCCAGGGAAGGGCCTGGAGTGGATTGGGCACATCTATTA | | | | | | | PGKGLEWIGHIYYS | | | | | | |
| | | CAGTGGGGGCACCAACTACAACCCGTCCCTCAAGAGTCGAG | | | | | | | GGTNYNPSLKSRVT | | | | | | |
| | | TTACCATATCAGAAGACACGTCTAAGAACCAGTTCTCCCTG | | | | | | | ISEDTSKNQFSLKL | | | | | | |
| | | AAGCTGAGCTCTGTGACTGCCGCGGACACGGCCGTATATTA | | | | | | | SSVTAADTAVYYCA | | | | | | |
| | | CTGTGCGAGAGATCGGGACGGTGACTTCTCCTTTGACTTCT | | | | | | | RDRDGDFSFDFWGQ | | | | | | |
| | | GGGGCCAGGGAACCCTGGTCACCGTCTCCTCA | | | | | | | GTLVTVSS | | | | | | |
| ADI-81876 | 1286 | GAGGTGCAGCTGTTGGAGTCTGGGGGAGGCTTGGTCCAGCC | | | | | | 7067 | EVQLLESGGGLVQP | | 7418 | 6 | | 6 | |
| | | TGGGGGGTCCCTGAGACTCTCTTGTGCAGCCTCTGGATTCA | | | | | | | GGSLRLSCAASGFT | | | | | | |
| | | CCTTTAGTAGTTATTGGATGAGCTGGGTCCGCCAGGCTCCA | | | | | | | FSSYWMSWVRQAPG | | | | | | |
| | | GGGAAGGGGCTGGAGTGGGCGGCCAGCATAAAGCTAGATGG | | | | | | | KGLEWAASIKLDGS | | | | | | |
| | | AAGTGAGAAATACTATGTGGTCTCTGCGAAGGGCCGATACA | | | | | | | EKYYVVSAKGRYTI | | | | | | |
| | | CCATCTCCAGAGACAACGCCAAGAACTCACTGTATCTGCAA | | | | | | | SRDNAKNSLYLQMN | | | | | | |
| | | ATGAACAGCCTGAGAGCCGAGGACACGGCCGTGTATTACTG | | | | | | | SLRAEDTAVYYCAR | | | | | | |
| | | TGCGAGAAAGAGATGGCTACAATCAGACTTTGACTACTGGG | | | | | | | KRWLQSDFDYWGQG | | | | | | |
| | | GCCAGGGAACCCTGGTCACCGTCTCCTCA | | | | | | | TLVTVSS | | | | | | |
| ADI-81800 | 1286 | TGGCAGGTCCCTGAGACTCTCCTGTGCAGCCTCTGGATTCA | | | | | | 7068 | EVQLLESGGGLVQP | | 7419 | 5 | | 5 | |
| | | CGTTTGACGATCATGCCATGCACTGGGTCCGGCAAGCTCCA | | | | | | | GRSLRLSCAASGFT | | | | | | |
| | | GGGAAGGGCCTGGAGTGGGTCTCAGGTATTAGTTGGAATAG | | | | | | | FDDHAMHWVRQAPG | | | | | | |
| | | TGGTAACATAGGCTATGGGGACTCTGTGAAGGGCCGATTCA | | | | | | | KGLEWVSGISWNSG | | | | | | |
| | | CCATCTCCAGAGACAACGCCAAGAACTCCCTGTTTCTGCAA | | | | | | | NIGYGDSVKGRFTI | | | | | | |
| | | ATGAACAGTCTGAGAGCTGACGACACGGCCTTGTATTACTG | | | | | | | SRDNAKNSLFLQMN | | | | | | |
| | | TGCAAAGTCCCACGATATTTTGAATGGTTATCTCGACCAAA | | | | | | | SLRADDTALYYCAK | | | | | | |
| | | TAAACTACTTTGACTACTGGGGCCAGGGAACCCTGGTCACC | | | | | | | SHDILNGYLDQINY | | | | | | |
| | | GTCTCCTCA | | | | | | | FDYWGQGTLVTVSS | | | | | | |
| ADI-81892 | 1287 | TGGCAGGTCCCTGAGACTCTCATGTGCAGCCTCTGGATTCA | | | | | | 7069 | EVQLVESGGGLVQP | | 7420 | 5 | | 5 | |
| | | TCTTTGATGATTATGCCATGCACTGGGTCCGGCAAGCTCCA | | | | | | | GRSLRLSCAASGFI | | | | | | |
| | | GGGAAGGGCCTGGAGTGGGTCTCAGGTATTAGTTGGAATAG | | | | | | | FDDYAMHWVRQAPG | | | | | | |
| | | TGCTAGTTTAGGCTATGCGGACTCTGTCAAGGGCCGATTCA | | | | | | | KGLEWVSGISWNSA | | | | | | |
| | | CCATCTCCAGAGACAACGTCAAGAACTCCTTATCTCTGCAA | | | | | | | SLGYADSVKGRFTI | | | | | | |
| | | ATGAACAGTCTGAGAGCTGAGGACACGGCCTTGTATTACTG | | | | | | | SRDNVKNSLSLQMN | | | | | | |
| | | TGCAAAAGATAAATCGTCAAACTACGGTGACTACGCTGGGG | | | | | | | SLRAEDTALYYCAK | | | | | | |
| | | GTCTGGGCGTCTGGGGCCAAGGGACCACGGTCACCGTCTCC | | | | | | | DKSSNYGDYAGGLG | | | | | | |
| | | TCA | | | | | | | VWGQGTTVTVSS | | | | | | |
| ADI-81657 | 1291 | GAGGTGCAGCTGGTGGAGTCCGGGGGAGGCTTAGTTCAGCC | | | | | | 7070 | EVQLVESGGGLVQP | | 7421 | 4 | | 4 | |
| | | TGGGGGGTCCCTGAGACTCTCCTGTGCAGCCTCTGGATTCA | | | | | | | GGSLRLSCAASGFT | | | | | | |
| | | CCTTCAGTAGCTACTGGATGCACTGGGTCCGCCAAGCTCCA | | | | | | | FSSYWMHWVRQAPG | | | | | | |
| | | GGGAAGGGGCTGGTGTGGGTCTCACGTATTAAGAGTGATGG | | | | | | | KGLVWVSRIKSDGS | | | | | | |
| | | GAGTAGCACAACCTACGCGGACTCCGTGAAGGGCCGATTCA | | | | | | | STTYADSVKGRFTF | | | | | | |
| | | CCTTCTCCAGAGACAACGCCAAGAACACGCTTTATCTGCAA | | | | | | | SRDNAKNTLYLQMD | | | | | | |
| | | ATGGACAGTCTGAGAGCCGAGGACACGGCTGTATATTACTG | | | | | | | SLRAEDTAVYYCAS | | | | | | |
| | | TGCAAGTGCCCCCTCCTACTACTACATGGACGTCTGGGGCA | | | | | | | APSYYYMDVWGKGT | | | | | | |
| | | AGGGGACCACGGTCACCGTCTCCTCA | | | | | | | TVTVSS | | | | | | |
| ADI-81776 | 1291 | GAGGTGCAGCTGTTGGAGTCTGGGGGAGGCGTGGTCCAGCC | | | | | | 7071 | EVQLLESGGGVVQP | | 7422 | 4 | | 3 | |
| | | TGGGAGGTCCCTGAGACTCTCCTGTGCAGCGTCTGGATTCA | | | | | | | GRSLRLSCAASGFT | | | | | | |
| | | CCTTCAGTGACTATGGCATGCACTGGGTCCGCCAGGCTCCA | | | | | | | FSDYGMHWVRQAPG | | | | | | |
| | | GGCAAGGGGCTGGAGTGGGTGGCAGTTATATGGTATCATGG | | | | | | | KGLEWVAVIWYHGS | | | | | | |
| | | AAGTGATAAATACTATGCAGACTCCGTGAAGGGCCGATTCA | | | | | | | DKYYADSVKGRFTI | | | | | | |
| | | CCATCTCCAGAGACAATTCGAAGAACACGCTGTATCTCCAA | | | | | | | SRDNSKNTLYLQMN | | | | | | |
| | | ATGAACAGCCTGAGAGCCGAGGACACGGCTGTGTATTACTG | | | | | | | SLRAEDTAVYYCAR | | | | | | |
| | | TGCGAGAGATGGGGGCTTTAAACCGATATATCCTCGCTACT | | | | | | | DGGFKPIYPRYYYY | | | | | | |
| | | ACTACTACTACATGGACGTCTGGGGCAAAGGGACCACGGTC | | | | | | | YMDVWGKGTTVTVS | | | | | | |
| | | ACCGTCTCCTCA | | | | | | | S | | | | | | |
| ADI-81810 | 1287 | GAGGTGCAGCTGGTGCAGTCTGGGGGAGGCTTGGTACAGCC | | | | | | 7072 | EVQLVQSGGGLVQP | | 7423 | 4 | | 4 | |
| | | TGGCAGGTCCCTGAGACTCTCCTGTGCAGCCTCTGGATTCA | | | | | | | GRSLRLSCAASGFT | | | | | | |
| | | CCTTTGATGATTATGCCATGCACTGGGTCCGGCAAGCTCCA | | | | | | | FDDYAMHWVRQAPG | | | | | | |
| | | GGGAAGGGCCTGGAGTGGGTCTCAGGTATTAGTGGGAATAG | | | | | | | KGLEWVSGISGNSG | | | | | | |
| | | TGGTACCATAGGCTATGCGGACTCTGTGAAGGGCCGATTCA | | | | | | | TIGYADSVKGRFTI | | | | | | |
| | | CCATCTCCAGAGACAACGCCAAGAACTCCCTCTATCTGCAA | | | | | | | SRDNAKNSLYLQMN | | | | | | |
| | | ATGAACAGACTGAGAGCTGAGGACACGGCCTTGTATTTCTG | | | | | | | RLRAEDTALYFCAK | | | | | | |
| | | TGCAAAAACTATGGCCCCAGACAGGGCCCATTACGATACCG | | | | | | | TMAPDRAHYDTAND | | | | | | |
| | | CGAACGATGCATTTGATATCTGGGGCCAGGGGACCACGGTC | | | | | | | AFDIWGQGTTVTVS | | | | | | |
| | | ACCGTCTCCTCA | | | | | | | S | | | | | | |
| | VH | VH | | SEQ | | SEQ | | SEQ | | SEQ | | SEQ | | SEQ | |
| | CDR3 | Germ- | VH | ID | VH | ID | VH | ID | VH | ID | VH | ID | VH | ID | VH |
| Clone ID | Lineage | line | FR1 | NO: | CDR1 | NO: | FR2 | NO: | CDR2 | NO: | FR3 | NO: | CDR3 | NO: | FR4 |
| ADI-81634 | 7 | IGHV2- | QITPK | 5464 | FSLSTS | 219 | WIRQPP | 441 | LIYWND | 6083 | RLTITK | 6392 | AHRRGDI | 6704 | WGQGTL |
| | | 5 | ESGLT | | GVGVG | | GKALEW | | DKRYSP | | DTSKNQ | | VWPAAI | | VTVSS |
| | | | LVKPT | | | | LA | | SLKN | | VVFTMT | | IDNWFDP | | |
| | | | QTLTL | | | | | | | | NMDPVD | | | | |
| | | | TCTFS | | | | | | | | TATYYC | | | | |
| | | | G | | | | | | | | | | | | |
| ADI-81817 | 91 | IGHV3- | EVQLV | 5321 | FTFNDY | 5698 | WVRQAP | 437 | GISWNS | 6084 | RFTISR | 6393 | VKDKSSN | 6705 | WAQGTT |
| | | 9 | ESGGG | | AMH | | GKGLEW | | GSIGYA | | DNAKNS | | YGDYAGG | | VTVSS |
| | | | LVQPG | | | | VS | | DSVKG | | LYLQMN | | MDV | | |
| | | | RSLRL | | | | | | | | SLRAED | | | | |
| | | | SCAAS | | | | | | | | TAFYYC | | | | |
| | | | G | | | | | | | | | | | | |
| ADI-81805 | 81 | IGHV5- | EVQLL | 5430 | YSFFHY | 422 | WVRQMP | 516 | TINPVN | 764 | QVTISV | 1008 | ATADRG | 1269 | WGQGTL |
| | | 10-1 | ESGAE | | WIS | | GKGLEW | | SYTNYN | | DRSINT | | | | VTVSS |
| | | | VKKPG | | | | MA | | PSFQG | | VYLQWS | | | | |
| | | | ESLRI | | | | | | | | SLRASD | | | | |
| | | | SCKGS | | | | | | | | SAMYYC | | | | |
| | | | G | | | | | | | | | | | | |
| ADI-81576 | 38 | IGHV1- | QVQLV | 5465 | FTFAVS | 5699 | WVRQAR | 5789 | WMVVGS | 6085 | RVTISG | 6394 | AAPSCSR | 6706 | WGQGTT |
| | | 58 | QSGPE | | SVQ | | GQRLEW | | GDTNYA | | DMSTGT | | TTCYDGF | | VTVSS |
| | | | VKMPG | | | | IG | | EKFQE | | VYMEVS | | NL | | |
| | | | TSVTV | | | | | | | | GLKSDD | | | | |
| | | | SCKAS | | | | | | | | TAVYYC | | | | |
| | | | G | | | | | | | | | | | | |
| ADI-81665 | 37 | IGHV3- | EVQLL | 5466 | FTFSRY | 5700 | WVRQAP | 437 | GISYYR | 6086 | RFTISR | 6395 | AKVAGTY | 6707 | WGQGTA |
| | | 30 | ESGGG | | SMH | | GKGLEW | | SDIDYA | | DSSKNT | | CSGTTCS | | VTVSS |
| | | | LVQPG | | | | VS | | DSVNG | | LYLQMN | | SGYFDY | | |
| | | | GSMRI | | | | | | | | SLKDED | | | | |
| | | | SCAAS | | | | | | | | TAVYYC | | | | |
| | | | G | | | | | | | | | | | | |
| ADI-81714 | 84 | IGHV3- | EVQLL | 5467 | FAFHDY | 5701 | WVRQAP | 437 | LIGPDG | 6087 | RFTVSR | 6396 | AKDTSGA | 6708 | WGQGTL |
| | | 43 | ESGGA | | SMH | | GKGLEW | | GGAFYS | | DNSKNS | | KCRVPIF | | VTVSS |
| | | | VVQPG | | | | VS | | DYVKG | | LFLQLN | | EN | | |
| | | | GSLRL | | | | | | | | SMRSED | | | | |
| | | | SCAAS | | | | | | | | TAFYYC | | | | |
| | | | G | | | | | | | | | | | | |
| ADI-81683 | 53 | IGHV1- | QVQLV | 5468 | YTFSDH | 5702 | WVRQAP | 433 | VTNPSA | 6088 | RVTMTT | 6397 | ARDIFFL | 6709 | WGQGTT |
| | | 46 | QSGTE | | YMH | | GQGLEW | | GSTTYA | | DTSTST | | PAGDAFD | | VTVSS |
| | | | VKKPG | | | | MG | | QKFQG | | VYLGLS | | IL | | |
| | | | ASVKV | | | | | | | | NLRPED | | | | |
| | | | SCKAS | | | | | | | | TAVYFC | | | | |
| | | | G | | | | | | | | | | | | |
| ADI-81820 | 1 | IGHV1- | EVQLV | 5469 | YNFVNY | 5703 | WVRQAP | 433 | WINAEY | 6089 | RVTMTT | 6398 | VRVSSSA | 6710 | GGRGTL |
| | | 18 | QSETE | | GIS | | GQGLEW | | GNRKYA | | DTSTST | | TGYFDL | | VTVSS |
| | | | VKKPG | | | | MG | | QMVQG | | AYMELR | | | | |
| | | | ASVKV | | | | | | | | SIRFDD | | | | |
| | | | SCKAS | | | | | | | | TAVYYC | | | | |
| | | | G | | | | | | | | | | | | |
| | SEQ | | | | | | | SEQ | | | SEQ | VH | | VH Amino | |
| | ID | | | | | | | ID | | | ID | Nucleotide | | Acid | |
| Clone ID | NO: | VH DNA | | | | | | NO: | VH Protein | | NO: | Substitution | | Substitution | |
| ADI-81634 | 1286 | CAGATCACCCCGAAGGAGTCTGGTCTTACGCTGGTGAAACC | | | | | | 7073 | QITPKESGLTLVKP | | 7424 | 2 | | 2 | |
| | | CACACAGACCCTCACGCTGACCTGCACCTTCTCTGGGTTCT | | | | | | | TQTLTLTCTFSGFS | | | | | | |
| | | CACTCAGCACTAGTGGAGTGGGTGTGGGCTGGATCCGTCAG | | | | | | | LSTSGVGVGWIRQP | | | | | | |
| | | CCCCCAGGAAAGGCCCTGGAGTGGCTTGCACTCATTTATTG | | | | | | | PGKALEWLALIYWN | | | | | | |
| | | GAATGATGATAAGCGTTACAGCCCATCTCTGAAGAACAGGC | | | | | | | DDKRYSPSLKNRLT | | | | | | |
| | | TCACCATCACCAAGGACACCTCCAAAAACCAGGTGGTCTTT | | | | | | | ITKDTSKNQVVFTM | | | | | | |
| | | ACAATGACCAACATGGACCCTGTGGACACAGCCACATATTA | | | | | | | TNMDPVDTATYYCA | | | | | | |
| | | CTGTGCACACAGACGGGGGGATATTGTAGTAGTACCAGCTG | | | | | | | HRRGDIVVVPAAII | | | | | | |
| | | CTATTATAGACAACTGGTTCGACCCCTGGGGCCAGGGAACC | | | | | | | DNWFDPWGQGTLVT | | | | | | |
| | | CTGGTCACCGTCTCCTCA | | | | | | | VSS | | | | | | |
| ADI-81817 | 6824 | TGGCAGGTCCCTGAGACTCTCCTGTGCAGCCTCTGGATTCA | | | | | | 7074 | EVQLVESGGGLVQP | | 7425 | 2 | | 2 | |
| | | CCTTTAATGATTATGCCATGCACTGGGTCCGGCAAGCTCCA | | | | | | | GRSLRLSCAASGFT | | | | | | |
| | | GGGAAGGGCCTGGAGTGGGTCTCAGGTATTAGTTGGAATAG | | | | | | | FNDYAMHWVRQAPG | | | | | | |
| | | TGGTAGCATAGGCTATGCGGACTCTGTGAAGGGCCGATTCA | | | | | | | KGLEWVSGISWNSG | | | | | | |
| | | CCATCTCCAGAGACAACGCCAAGAACTCCCTCTATCTGCAA | | | | | | | SIGYADSVKGRFTI | | | | | | |
| | | ATGAACAGTCTGAGAGCTGAGGACACGGCCTTCTATTACTG | | | | | | | SRDNAKNSLYLQMN | | | | | | |
| | | TGTAAAAGATAAATCGTCAAACTACGGTGACTACGCTGGGG | | | | | | | SLRAEDTAFYYCVK | | | | | | |
| | | GTATGGACGTCTGGGCCCAAGGGACCACGGTCACCGTCTCC | | | | | | | DKSSNYGDYAGGMD | | | | | | |
| | | TCA | | | | | | | VWAQGTTVTVSS | | | | | | |
| ADI-81805 | 1286 | GAGGTGCAGCTGTTGGAGTCCGGAGCAGAGGTGAAGAAACC | | | | | | 7075 | EVQLLESGAEVKKP | | 7426 | 20 | | 15 | |
| | | CGGGGAGTCTCTGAGGATCTCCTGTAAGGGTTCTGGATACA | | | | | | | GESLRISCKGSGYS | | | | | | |
| | | GCTTTTTCCATTACTGGATCAGCTGGGTGCGCCAGATGCCC | | | | | | | FFHYWISWVRQMPG | | | | | | |
| | | GGGAAAGGCCTGGAATGGATGGCGACCATTAATCCTGTTAA | | | | | | | KGLEWMATINPVNS | | | | | | |
| | | CTCTTATACCAACTACAACCCGTCCTTCCAAGGCCAAGTCA | | | | | | | YTNYNPSFQGQVTI | | | | | | |
| | | CCATCTCAGTTGACAGGTCCATCAACACTGTCTACCTGCAA | | | | | | | SVDRSINTVYLQWS | | | | | | |
| | | TGGAGCAGTCTGAGGGCCTCGGACAGCGCCATGTATTACTG | | | | | | | SLRASDSAMYYCAT | | | | | | |
| | | TGCGACCGCGGATAGGGGTTGGGGCCAGGGAACCCTGGTCA | | | | | | | ADRGWGQGTLVTVS | | | | | | |
| | | CCGTCTCCTCA | | | | | | | S | | | | | | |
| ADI-81576 | 1287 | CAGGTCCAGCTTGTGCAGTCTGGGCCTGAGGTGAAGATGCC | | | | | | 7076 | QVQLVQSGPEVKMP | | 7427 | 18 | | 16 | |
| | | TGGGACCTCAGTGACGGTCTCCTGTAAGGCTTCTGGATTCA | | | | | | | GTSVTVSCKASGFT | | | | | | |
| | | CCTTTGCTGTCTCTTCTGTGCAGTGGGTGCGACAGGCTCGT | | | | | | | FAVSSVQWVRQARG | | | | | | |
| | | GGACAACGCCTGGAGTGGATAGGCTGGATGGTCGTTGGCAG | | | | | | | QRLEWIGWMVVGSG | | | | | | |
| | | TGGCGACACCAACTACGCAGAGAAGTTCCAGGAAAGAGTCA | | | | | | | DTNYAEKFQERVTI | | | | | | |
| | | CCATTTCCGGGGACATGTCCACAGGCACAGTCTACATGGAA | | | | | | | SGDMSTGTVYMEVS | | | | | | |
| | | GTGAGCGGCCTGAAGTCCGACGACACGGCCGTGTATTACTG | | | | | | | GLKSDDTAVYYCAA | | | | | | |
| | | TGCGGCACCCTCCTGCAGTAGAACCACCTGTTACGATGGTT | | | | | | | PSCSRTTCYDGFNL | | | | | | |
| | | TTAATCTCTGGGGCCAAGGGACCACGGTCACCGTCTCCTCA | | | | | | | WGQGTTVTVSS | | | | | | |
| ADI-81665 | 6825 | GAGGTGCAGCTGTTGGAGTCTGGGGGAGGCTTGGTCCAGCC | | | | | | 7077 | EVQLLESGGGLVQP | | 7428 | 18 | | 17 | |
| | | TGGGGGGTCCATGAGAATATCCTGTGCAGCCTCAGGATTCA | | | | | | | GGSMRISCAASGFT | | | | | | |
| | | CCTTCAGTAGATATAGCATGCACTGGGTCCGCCAGGCTCCA | | | | | | | FSRYSMHWVRQAPG | | | | | | |
| | | GGCAAGGGGCTGGAGTGGGTGTCAGGTATATCATATTATAG | | | | | | | KGLEWVSGISYYRS | | | | | | |
| | | AAGTGATATAGACTATGCAGACTCTGTGAACGGCCGATTCA | | | | | | | DIDYADSVNGRFTI | | | | | | |
| | | CCATCTCCAGAGACAGTTCCAAGAACACGCTGTATCTGCAA | | | | | | | SRDSSKNTLYLQMN | | | | | | |
| | | ATGAACAGCCTGAAAGATGAGGACACGGCTGTGTATTACTG | | | | | | | SLKDEDTAVYYCAK | | | | | | |
| | | TGCGAAAGTTGCCGGGACGTATTGTAGTGGTACTACCTGCT | | | | | | | VAGTYCSGTTCSSG | | | | | | |
| | | CCTCGGGGTACTTTGACTACTGGGGCCAGGGAACCGCGGTC | | | | | | | YFDYWGQGTAVTVS | | | | | | |
| | | ACCGTATCATCA | | | | | | | S | | | | | | |
| ADI-81714 | 1286 | GAGGTGCAGCTGTTGGAGTCTGGGGGAGCCGTGGTACAGCC | | | | | | 7078 | EVQLLESGGAVVQP | | 7429 | 18 | | 17 | |
| | | TGGGGGGTCACTGAGACTCTCCTGTGCAGCCTCTGGATTCG | | | | | | | GGSLRLSCAASGFA | | | | | | |
| | | CCTTTCATGATTATTCCATGCACTGGGTCCGTCAGGCTCCA | | | | | | | FHDYSMHWVRQAPG | | | | | | |
| | | GGGAAGGGTCTGGAGTGGGTCTCTCTTATTGGTCCGGATGG | | | | | | | KGLEWVSLIGPDGG | | | | | | |
| | | TGGTGGCGCATTCTATTCAGACTATGTGAAGGGCCGATTCA | | | | | | | GAFYSDYVKGRFTV | | | | | | |
| | | CCGTCTCCAGAGACAACAGCAAAAACTCCCTCTTTCTACAA | | | | | | | SRDNSKNSLFLQLN | | | | | | |
| | | CTGAACAGTATGAGAAGTGAGGACACCGCCTTCTATTACTG | | | | | | | SMRSEDTAFYYCAK | | | | | | |
| | | TGCAAAAGATACTTCCGGGGCCAAATGTAGGGTACCAATCT | | | | | | | DTSGAKCRVPIFEN | | | | | | |
| | | TTGAGAACTGGGGCCAGGGAACCCTGGTCACCGTCTCCTCA | | | | | | | WGQGTLVTVSS | | | | | | |
| ADI-81683 | 1287 | CAGGTGCAGCTGGTGCAGTCTGGGACTGAGGTGAAGAAGCC | | | | | | 7079 | QVQLVQSGTEVKKP | | 7430 | 16 | | 13 | |
| | | TGGGGCCTCAGTGAAGGTTTCCTGCAAGGCATCGGGATACA | | | | | | | GASVKVSCKASGYT | | | | | | |
| | | CCTTCAGCGACCACTATATGCACTGGGTGCGACAGGCCCCT | | | | | | | FSDHYMHWVRQAPG | | | | | | |
| | | GGACAAGGGCTTGAGTGGATGGGAGTAACCAACCCTAGTGC | | | | | | | QGLEWMGVTNPSAG | | | | | | |
| | | TGGGAGCACAACCTACGCACAGAAGTTCCAGGGCAGAGTCA | | | | | | | STTYAQKFQGRVTM | | | | | | |
| | | CCATGACCACTGACACGTCCACGAGCACGGTCTACCTGGGA | | | | | | | TTDTSTSTVYLGLS | | | | | | |
| | | CTGAGCAACCTGAGACCTGAAGACACGGCCGTTTATTTCTG | | | | | | | NLRPEDTAVYFCAR | | | | | | |
| | | TGCAAGAGATATTTTTTTCTTACCAGCCGGTGATGCTTTTG | | | | | | | DIFFLPAGDAFDLW | | | | | | |
| | | ATCTCTGGGGCCAAGGGACCACGGTCACCGTCTCCTCA | | | | | | | GQGTTVTVSS | | | | | | |
| ADI-81820 | 6826 | GAGGTCCAGCTGGTGCAGTCTGAAACTGAGGTGAAGAAGCC | | | | | | 7080 | EVQLVQSETEVKKP | | 7431 | 16 | | 12 | |
| | | TGGGGCCTCAGTGAAGGTCTCCTGCAAGGCTTCTGGGTATA | | | | | | | GASVKVSCKASGYN | | | | | | |
| | | ACTTTGTCAATTATGGTATAAGTTGGGTGCGACAGGCCCCT | | | | | | | FVNYGISWVRQAPG | | | | | | |
| | | GGACAAGGGCTTGAGTGGATGGGATGGATCAACGCTGAGTA | | | | | | | QGLEWMGWINAEYG | | | | | | |
| | | TGGCAACAGAAAGTATGCACAGATGGTCCAGGGCAGAGTCA | | | | | | | NRKYAQMVQGRVTM | | | | | | |
| | | CCATGACCACAGACACATCCACGAGCACAGCCTACATGGAA | | | | | | | TTDTSTSTAYMELR | | | | | | |
| | | CTGAGGAGTATCAGATTTGACGACACGGCCGTGTATTATTG | | | | | | | SIRFDDTAVYYCVR | | | | | | |
| | | TGTGAGAGTGAGCAGCAGCGCAACCGGGTACTTCGATCTAG | | | | | | | VSSSATGYFDLGGR | | | | | | |
| | | GGGGCCGTGGCACCCTGGTCACCGTCTCCTCA | | | | | | | GTLVTVSS | | | | | | |
| | VH | VH | | SEQ | | SEQ | | SEQ | | SEQ | | SEQ | | SEQ | |
| | CDR3 | Germ- | VH | ID | VH | ID | VH | ID | VH | ID | VH | ID | VH | ID | VH |
| Clone ID | Lineage | line | FR1 | NO: | CDR1 | NO: | FR2 | NO: | CDR2 | NO: | FR3 | NO: | CDR3 | NO: | FR4 |
| ADI-81569 | 32 | IGHV4- | QVQLQ | 56 | GSISSV | 5704 | WIRQHP | 5845 | HIYHNG | 6090 | RVTMSL | 6399 | ARLGPSF | 6588 | WDQGTT |
| | | 31 | QSGPG | | YYYWT | | GKGLEW | | TTYSNP | | DTSKNQ | | YDRSGSS | | VTVSS |
| | | | LVKPS | | | | MG | | SLKS | | FSLKVS | | RLNYFDS | | |
| | | | QTLSL | | | | | | | | SVTAAD | | | | |
| | | | TCTVS | | | | | | | | TAVYYC | | | | |
| | | | G | | | | | | | | | | | | |
| ADI-81873 | 50 | IGHV3- | EVQLL | 5470 | FTFSSY | 207 | WVRQTP | 5846 | GIGTTG | 6091 | RFTISR | 6251 | ARGDQWE | 6711 | WGQGTT |
| | | 13 | ESGGG | | DMH | | SNGLEW | | DTYYLD | | ENAKSS | | LLNRYYY | | VTVSS |
| | | | LIQPG | | | | VS | | SVKG | | LYLQMN | | AMDV | | |
| | | | GSLRL | | | | | | | | SLRAGD | | | | |
| | | | SCVAS | | | | | | | | TAVYYC | | | | |
| | | | G | | | | | | | | | | | | |
| ADI-81534 | 3 | IGHV3- | QVQLQ | 154 | FTLSSV | 5705 | WVRQVS | 5847 | GIGSAG | 6092 | RFTISR | 6400 | ARGDHIL | 6712 | WGKGTT |
| | | 13 | ESGGG | | DMH | | GKGLEW | | DTYYAD | | ENARNS | | TGLNYYY | | VTVSS |
| | | | LVQPG | | | | VS | | SVKG | | LYLQMS | | YMDV | | |
| | | | GSLRL | | | | | | | | SLRAGD | | | | |
| | | | SCAAS | | | | | | | | TAVYFC | | | | |
| | | | G | | | | | | | | | | | | |
| ADI-81671 | 42 | IGHV4- | QAQLL | 5471 | GSISSD | 315 | WIRQPP | 445 | TTYYTG | 6093 | RVTISV | 6401 | ARVEVSG | 1148 | WGQGAL |
| | | 39 | ESGPG | | HFYWG | | GKGLEW | | STNYNP | | DTSKNQ | | GFSGYDF | | VTVSS |
| | | | LVKPS | | | | IG | | SLKS | | FSLRLT | | LTPYYFD | | |
| | | | ETLSL | | | | | | | | SVTATD | | Y | | |
| | | | TCTVS | | | | | | | | TAVYYC | | | | |
| | | | G | | | | | | | | | | | | |
| ADI-81749 | 25 | IGHV1- | QVQLV | 5472 | YTFTSQ | 5706 | WVRQAP | 433 | IINP- | 6094 | RVTMTS | 6402 | ARDLVFI | 6713 | WGQGTT |
| | | 46 | ESGAE | | YVH | | GQGLEW | | TGSTGY | | DTSTST | | PAIDALE | | VTVSS |
| | | | VKKPG | | | | MG | | AQKFQG | | IYMELS | | I | | |
| | | | ASVRV | | | | | | | | GLRSED | | | | |
| | | | SCKAS | | | | | | | | TAVYYC | | | | |
| | | | G | | | | | | | | | | | | |
| ADI-81668 | 39 | IGHV4- | EVQLL | 5380 | DSISGY | 5707 | WIRQPP | 445 | YIYNSE | 6095 | RVTMSG | 6403 | ARGMSGG | 6714 | WGQGTT |
| | | 59 | ESGPG | | YWS | | GKGLEW | | TTDYNP | | DTSKNQ | | DAFDI | | VTVSS |
| | | | LVKPS | | | | IG | | SLKS | | VSLRLT | | | | |
| | | | ETLSL | | | | | | | | SVTAAD | | | | |
| | | | TCSVS | | | | | | | | TAVYYC | | | | |
| | | | G | | | | | | | | | | | | |
| ADI-81771 | 47 | IGHV1- | EVQLV | 5402 | DTFTRH | 5708 | WVRQAP | 433 | RIIPLP | 6096 | RVTITA | 6404 | ARHNSPV | 6715 | WGQGTL |
| | | 69 | ESGAE | | SIS | | GQGLEW | | DIPNYA | | DKSTNT | | WGHYDNS | | VTVSS |
| | | | VKKPG | | | | MG | | QKFQG | | AYMELS | | GPFDY | | |
| | | | SSVKV | | | | | | | | TLRSDD | | | | |
| | | | SCKAS | | | | | | | | TAVYYC | | | | |
| | | | G | | | | | | | | | | | | |
| ADI-81865 | 43 | IGHV1- | EVQLV | 5385 | HTFANY | 5709 | WVRQAP | 433 | IPNPSG | 6097 | RVTMTG | 6405 | ARGGIVP | 1130 | WGQGTL |
| | | 46 | ESGAE | | YIH | | GQGLEW | | GSTAYA | | DTSTST | | DAKQYFD | | VTVSS |
| | | | VKKPG | | | | MG | | HNFQD | | VYMELS | | Y | | |
| | | | ASVKV | | | | | | | | SLRSED | | | | |
| | | | SCKAS | | | | | | | | TAVYYC | | | | |
| | | | G | | | | | | | | | | | | |
| | SEQ | | | | | | | SEQ | | | SEQ | VH | | VH Amino | |
| | ID | | | | | | | ID | | | ID | Nucleotide | | Acid | |
| Clone ID | NO: | VH DNA | | | | | | NO: | VH Protein | | NO: | Substitution | | Substitution | |
| ADI-81569 | 6827 | CAGGTACAGCTGCAGCAGTCGGGCCCAGGACTGGTGAAGCC | | | | | | 7081 | QVQLQQSGPGLVKP | | 7432 | 15 | | 13 | |
| | | TTCACAGACCCTGTCCCTCACCTGCACTGTCTCTGGTGGCT | | | | | | | SQTLSLTCTVSGGS | | | | | | |
| | | CCATCAGCAGTGTTTATTACTACTGGACCTGGATCCGCCAG | | | | | | | ISSVYYYWTWIRQH | | | | | | |
| | | CACCCAGGGAAGGGCCTAGAGTGGATGGGGCACATCTATCA | | | | | | | PGKGLEWMGHIYHN | | | | | | |
| | | CAATGGGACCACCTACTCCAATCCGTCCCTCAAGAGCCGAG | | | | | | | GTTYSNPSLKSRVT | | | | | | |
| | | TTACCATGTCACTGGACACGTCTAAGAACCAGTTTTCCCTG | | | | | | | MSLDTSKNQFSLKV | | | | | | |
| | | AAGGTGAGCTCTGTGACTGCCGCGGACACGGCCGTGTATTA | | | | | | | SSVTAADTAVYYCA | | | | | | |
| | | CTGTGCGAGACTTGGACCGTCTTTCTACGATAGAAGTGGTT | | | | | | | RLGPSFYDRSGSSR | | | | | | |
| | | CCTCACGTCTTAACTACTTTGACTCCTGGGACCAGGGGACC | | | | | | | LNYFDSWDQGTTVT | | | | | | |
| | | ACGGTCACCGTCTCCTCA | | | | | | | VSS | | | | | | |
| ADI-81873 | 1287 | TGGGGGGTCCCTGAGACTCTCCTGTGTAGCCTCTGGATTTA | | | | | | 7082 | EVQLLESGGGLIQP | | 7433 | 15 | | 11 | |
| | | CCTTCAGTAGCTACGACATGCACTGGGTCCGCCAAACTCCG | | | | | | | GGSLRLSCVASGFT | | | | | | |
| | | AGTAACGGTCTGGAGTGGGTCTCAGGTATTGGTACTACTGG | | | | | | | FSSYDMHWVRQTPS | | | | | | |
| | | TGACACATACTATTTGGACTCCGTGAAGGGCCGATTCACCA | | | | | | | NGLEWVSGIGTTGD | | | | | | |
| | | TCTCCAGAGAAAATGCCAAGAGCTCCTTGTATCTTCAAATG | | | | | | | TYYLDSVKGRFTIS | | | | | | |
| | | AACAGCCTGAGAGCCGGGGACACGGCTGTTTATTACTGTGC | | | | | | | RENAKSSLYLQMNS | | | | | | |
| | | AAGAGGAGATCAGTGGGAGCTACTCAATCGCTACTACTACG | | | | | | | LRAGDTAVYYCARG | | | | | | |
| | | CTATGGACGTCTGGGGCCAAGGGACCACGGTCACCGTCTCC | | | | | | | DQWELLNRYYYAMD | | | | | | |
| | | TCA | | | | | | | VWGQGTTVTVSS | | | | | | |
| ADI-81534 | 1291 | TGGGGGGTCCCTGAGACTCTCCTGTGCAGCCTCTGGATTCA | | | | | | 7083 | QVQLQESGGGLVQP | | 7434 | 14 | | 11 | |
| | | CGTTGAGTAGTGTCGACATGCACTGGGTCCGGCAAGTCTCT | | | | | | | GGSLRLSCAASGFT | | | | | | |
| | | GGAAAGGGTCTGGAATGGGTCTCAGGTATTGGTTCTGCTGG | | | | | | | LSSVDMHWVRQVSG | | | | | | |
| | | TGACACATACTATGCAGACTCCGTGAAGGGCCGATTCACCA | | | | | | | KGLEWVSGIGSAGD | | | | | | |
| | | TCTCCAGAGAAAATGCCAGGAACTCCTTGTATCTTCAAATG | | | | | | | TYYADSVKGRFTIS | | | | | | |
| | | AGCAGCCTGAGAGCCGGGGACACGGCTGTCTACTTCTGTGC | | | | | | | RENARNSLYLQMSS | | | | | | |
| | | AAGAGGTGACCATATTTTGACTGGTCTCAATTACTACTACT | | | | | | | LRAGDTAVYFCARG | | | | | | |
| | | ACATGGACGTCTGGGGCAAAGGGACCACGGTCACCGTCTCC | | | | | | | DHILTGLNYYYYMD | | | | | | |
| | | TCA | | | | | | | VWGKGTTVTVSS | | | | | | |
| ADI-81671 | 1285 | CAGGCGCAGCTGTTGGAGTCGGGCCCAGGACTGGTGAAGCC | | | | | | 7084 | QAQLLESGPGLVKP | | 7435 | 13 | | 10 | |
| | | TTCGGAGACCCTGTCCCTCACATGCACTGTCTCTGGCGGCT | | | | | | | SETLSLTCTVSGGS | | | | | | |
| | | CCATCAGCAGTGATCATTTCTACTGGGGCTGGATCCGCCAG | | | | | | | ISSDHFYWGWIRQP | | | | | | |
| | | CCCCCAGGGAAGGGGCTGGAGTGGATTGGGACCACCTATTA | | | | | | | PGKGLEWIGTTYYT | | | | | | |
| | | TACTGGGAGCACCAACTACAACCCGTCCCTCAAGAGTCGGG | | | | | | | GSTNYNPSLKSRVT | | | | | | |
| | | TCACCATATCCGTTGACACGTCCAAGAACCAGTTCTCCCTG | | | | | | | ISVDTSKNQFSLRL | | | | | | |
| | | AGGCTGACCTCTGTGACCGCCACAGACACGGCTGTGTATTA | | | | | | | TSVTATDTAVYYCA | | | | | | |
| | | CTGTGCGCGAGTCGAGGTTTCGGGTGGATTTAGTGGCTACG | | | | | | | RVEVSGGFSGYDFL | | | | | | |
| | | ATTTCCTCACACCGTATTACTTTGACTACTGGGGCCAGGGA | | | | | | | TPYYFDYWGQGALV | | | | | | |
| | | GCCCTGGTCACCGTCTCCTCA | | | | | | | TVSS | | | | | | |
| ADI-81749 | 1287 | CAGGTGCAGCTGGTGGAGTCTGGGGCTGAGGTGAAGAAGCC | | | | | | 7085 | QVQLVESGAEVKKP | | 7436 | 13 | | 9 | |
| | | TGGGGCCTCAGTGAGGGTTTCCTGCAAGGCATCTGGATACA | | | | | | | GASVRVSCKASGYT | | | | | | |
| | | CCTTCACCAGTCAATATGTGCACTGGGTGCGACAGGCCCCT | | | | | | | FTSQYVHWVRQAPG | | | | | | |
| | | GGACAAGGGCTTGAGTGGATGGGAATAATCAACCCTACTGG | | | | | | | QGLEWMGIINPTGS | | | | | | |
| | | AAGTACAGGCTACGCACAGAAGTTCCAGGGCAGAGTCACCA | | | | | | | TGYAQKFQGRVTMT | | | | | | |
| | | TGACCAGTGACACGTCCACGAGCACAATCTACATGGAGCTG | | | | | | | SDTSTSTIYMELSG | | | | | | |
| | | AGTGGCCTGAGATCTGAGGACACGGCCGTCTATTATTGTGC | | | | | | | LRSEDTAVYYCARD | | | | | | |
| | | GAGAGATCTTGTTTTTATACCAGCTATTGATGCTTTAGAAA | | | | | | | LVFIPAIDALEIWG | | | | | | |
| | | TCTGGGGCCAAGGGACCACGGTCACCGTCTCCTCA | | | | | | | QGTTVTVSS | | | | | | |
| ADI-81668 | 1287 | GAGGTGCAGCTGTTGGAGTCGGGCCCAGGACTGGTGAAGCC | | | | | | 7086 | EVQLLESGPGLVKP | | 7437 | 12 | | 12 | |
| | | TTCGGAGACCCTGTCCCTCACCTGCAGTGTCTCTGGTGACT | | | | | | | SETLSLTCSVSGDS | | | | | | |
| | | CCATTAGTGGTTACTACTGGAGCTGGATCCGGCAGCCCCCA | | | | | | | ISGYYWSWIRQPPG | | | | | | |
| | | GGGAAGGGACTGGAGTGGATTGGGTATATCTATAACAGTGA | | | | | | | KGLEWIGYIYNSET | | | | | | |
| | | GACCACCGACTACAACCCCTCCCTCAAGAGTCGAGTCACCA | | | | | | | TDYNPSLKSRVTMS | | | | | | |
| | | TGTCTGGAGACACGTCCAAGAACCAGGTCTCCCTGAGGCTG | | | | | | | GDTSKNQVSLRLTS | | | | | | |
| | | ACCTCTGTGACCGCTGCGGACACGGCCGTATATTACTGTGC | | | | | | | VTAADTAVYYCARG | | | | | | |
| | | GAGAGGAATGTCGGGGGGCGATGCTTTCGATATCTGGGGCC | | | | | | | MSGGDAFDIWGQGT | | | | | | |
| | | AAGGGACCACGGTCACCGTCTCCTCA | | | | | | | TVTVSS | | | | | | |
| ADI-81771 | 1286 | AGGGTCCTCGGTGAAAGTCTCCTGCAAGGCTTCTGGAGACA | | | | | | 7087 | EVQLVESGAEVKKP | | 7438 | 12 | | 12 | |
| | | CCTTCACCAGACATAGTATCAGCTGGGTGCGACAGGCCCCT | | | | | | | GSSVKVSCKASGDT | | | | | | |
| | | GGACAAGGCCTTGAGTGGATGGGAAGGATCATCCCTCTCCC | | | | | | | FTRHSISWVRQAPG | | | | | | |
| | | TGATATACCAAACTACGCTCAGAAGTTCCAGGGCAGAGTCA | | | | | | | QGLEWMGRIIPLPD | | | | | | |
| | | CGATTACCGCGGACAAATCCACGAACACAGCCTACATGGAG | | | | | | | IPNYAQKFQGRVTI | | | | | | |
| | | CTGAGCACCCTGAGATCTGACGACACGGCCGTCTATTACTG | | | | | | | TADKSTNTAYMELS | | | | | | |
| | | TGCGAGACACAATTCTCCGGTCTGGGGTCACTATGATAATA | | | | | | | TLRSDDTAVYYCAR | | | | | | |
| | | GTGGCCCCTTTGACTACTGGGGCCAGGGAACCCTGGTCACC | | | | | | | HNSPVWGHYDNSGP | | | | | | |
| | | GTCTCCTCA | | | | | | | FDYWGQGTLVTVSS | | | | | | |
| ADI-81865 | 1286 | GAGGTGCAGCTGGTGGAGTCTGGGGCTGAGGTGAAGAAACC | | | | | | 7088 | EVQLVESGAEVKKP | | 7439 | 12 | | 10 | |
| | | TGGGGCCTCAGTGAAGGTTTCCTGCAAGGCATCTGGACACA | | | | | | | GASVKVSCKASGHT | | | | | | |
| | | CCTTCGCCAACTACTATATACACTGGGTGCGACAGGCCCCT | | | | | | | FANYYIHWVRQAPG | | | | | | |
| | | GGACAAGGGCTTGAGTGGATGGGAATACCCAACCCTAGTGG | | | | | | | QGLEWMGIPNPSGG | | | | | | |
| | | TGGTAGCACAGCCTACGCACACAACTTCCAGGACAGAGTCA | | | | | | | STAYAHNFQDRVTM | | | | | | |
| | | CCATGACCGGGGACACGTCCACGAGCACAGTCTACATGGAG | | | | | | | TGDTSTSTVYMELS | | | | | | |
| | | CTCAGCAGCCTGAGATCTGAGGACACGGCCGTGTATTACTG | | | | | | | SLRSEDTAVYYCAR | | | | | | |
| | | TGCGAGAGGGGGTATAGTCCCAGATGCTAAGCAATACTTTG | | | | | | | GGIVPDAKQYFDYW | | | | | | |
| | | ACTACTGGGGCCAGGGAACCCTGGTCACCGTCTCCTCA | | | | | | | GQGTLVTVSS | | | | | | |
| | VH | VH | | SEQ | | SEQ | | SEQ | | SEQ | | SEQ | | SEQ | |
| | CDR3 | Germ- | VH | ID | VH | ID | VH | ID | VH | ID | VH | ID | VH | ID | VH |
| Clone ID | Lineage | line | FR1 | NO: | CDR1 | NO: | FR2 | NO: | CDR2 | NO: | FR3 | NO: | CDR3 | NO: | FR4 |
| ADI-81670 | 41 | IGHV3- | EVQLL | 5473 | FTLSSF | 5710 | WVRQTP | 448 | YITSSG | 6098 | RFTISR | 6406 | ARHLSPT | 6716 | WGQGTT |
| | | 48 | ESGGG | | SLN | | GKGLEW | | TTIYYA | | DNAKNL | | SYDFLSG | | VTVSS |
| | | | LAQPG | | | | VS | | DSVKG | | LFLQMN | | PDAFDI | | |
| | | | GSLRL | | | | | | | | SLRAED | | | | |
| | | | SCAAS | | | | | | | | TAVYYC | | | | |
| | | | G | | | | | | | | | | | | |
| ADI-81702 | 72 | IGHV1- | EVQLL | 5474 | YTFSHY | 5711 | WVRQAP | 433 | IINPSG | 6099 | RVTMTS | 6407 | ARDSVGV | 6717 | WGQGTT |
| | | 46 | ESGAE | | YIH | | GQGLEW | | VGTTYA | | DPSTST | | PAADALD | | VTVSS |
| | | | VKKPG | | | | MG | | QKFQG | | VYMELR | | I | | |
| | | | ASVKV | | | | | | | | SLTSED | | | | |
| | | | SCKAS | | | | | | | | TAVYYC | | | | |
| | | | G | | | | | | | | | | | | |
| ADI-81754 | 30 | IGHV3- | EVQLL | 5355 | FTVSVN | 5712 | WVRQAP | 5848 | VIYSGG | 689 | RFTVSR | 6408 | ARGDLGT | 6718 | WGQGTL |
| | | 66 | ESGGG | | YMT | | GRGPES | | STFYAD | | DHPKNT | | PRIDF | | VTVSS |
| | | | LVQPG | | | | VS | | SVKG | | LYLQMN | | | | |
| | | | GSLRL | | | | | | | | SLRVED | | | | |
| | | | SCAAS | | | | | | | | TAVYYC | | | | |
| | | | G | | | | | | | | | | | | |
| ADI-81855 | 33 | IGHV4- | EVQLL | 5365 | GSISGP | 5677 | WVRQPP | 444 | EIFHTG | 6053 | RATISI | 6367 | ARIMGAL | 6674 | WGQGTL |
| | | 4 | ESGPG | | NWWS | | GKGLEW | | NTKYNP | | DKSKNQ | | DY | | VTVSS |
| | | | LVKPS | | | | IG | | SLKS | | FSLKLS | | | | |
| | | | GTLSL | | | | | | | | SVTAAD | | | | |
| | | | TCAVS | | | | | | | | TAIYYC | | | | |
| | | | G | | | | | | | | | | | | |
| ADI-81573 | 35 | IGHV5- | QVQLV | 5475 | YSFISN | 5582 | WVRQKP | 5849 | IIWPGD | 5956 | QVTISV | 971 | ARRGSAW | 6719 | WGHGTL |
| | | 51 | QSGAE | | WIG | | GKGLEW | | SDTTYS | | DKSIST | | EIDY | | VTVSS |
| | | | VKRPG | | | | MG | | PSFQG | | AYLQWS | | | | |
| | | | ESLKI | | | | | | | | SLKASD | | | | |
| | | | SCQGS | | | | | | | | TAMYYC | | | | |
| | | | G | | | | | | | | | | | | |
| ADI-81614 | 71 | IGHV3- | QVQLV | 32 | FTFSRY | 5713 | WVRQAP | 443 | GISSDG | 6100 | RFTISR | 6409 | VKDIGPM | 6720 | WGQGTL |
| | | 64D | QSGGG | | SMD | | GKGLEY | | VTTYYA | | DNSKST | | TPVTTPE | | VTVSS |
| | | | LVQPG | | | | VS | | DSMKG | | LYLQMS | | S | | |
| | | | GSLRL | | | | | | | | SLRPED | | | | |
| | | | SCSAS | | | | | | | | TAVYYC | | | | |
| | | | G | | | | | | | | | | | | |
| ADI-81635 | 8 | IGHV1- | RCPLM | 5476 | YTFTSH | 5714 | WVRQAT | 491 | WTNPNS | 6101 | RVTMTR | 6410 | ARMSTTL | 6721 | WGQGTL |
| | | 8 | ESGAA | | DIN | | GQGLEW | | GATGYA | | NTSINT | | TNWFDP | | VTVSS |
| | | | VRKPG | | | | MG | | QKFQG | | AFMELS | | | | |
| | | | ASVKV | | | | | | | | SLRSDD | | | | |
| | | | SCKAS | | | | | | | | TAVYYC | | | | |
| | | | G | | | | | | | | | | | | |
| ADI-81652 | 25 | IGHV3- | QVQLV | 11 | FTFSDY | 5697 | WVRQAP | 431 | LIWYDG | 6102 | RFTISR | 6411 | ARAGLPT | 6722 | WGQGAL |
| | | 33 | ESGGG | | GMH | | GKGLEW | | YNKRYA | | DNSKNT | | DARALDG | | VTVSS |
| | | | VVQPG | | | | VA | | DSVKG | | LDLQMN | | SGNYYTF | | |
| | | | RSLRL | | | | | | | | SLRGED | | YFDS | | |
| | | | SCAAS | | | | | | | | TAVYYC | | | | |
| | | | G | | | | | | | | | | | | |
| | SEQ | | | | | | | SEQ | | | SEQ | VH | | VH Amino | |
| | ID | | | | | | | ID | | | ID | Nucleotide | | Acid | |
| Clone ID | NO: | VH DNA | | | | | | NO: | VH Protein | | NO: | Substitution | | Substitution | |
| ADI-81670 | 1287 | GAGGTGCAGCTGTTGGAGTCTGGGGGAGGCTTGGCACAGCC | | | | | | 7089 | EVQLLESGGGLAQP | | 7440 | 11 | | 10 | |
| | | TGGGGGGTCCCTGCGACTCTCCTGTGCAGCCTCTGGATTCA | | | | | | | GGSLRLSCAASGFT | | | | | | |
| | | CCCTCAGCAGTTTTAGTCTGAACTGGGTCCGCCAGACTCCA | | | | | | | LSSFSLNWVRQTPG | | | | | | |
| | | GGGAAGGGGCTGGAGTGGGTTTCATACATTACCAGTAGTGG | | | | | | | KGLEWVSYITSSGT | | | | | | |
| | | TACTACCATATACTACGCAGACTCTGTGAAGGGCCGATTCA | | | | | | | TIYYADSVKGRFTI | | | | | | |
| | | CCATCTCCAGAGACAATGCCAAGAACTTACTGTTTCTGCAA | | | | | | | SRDNAKNLLFLQMN | | | | | | |
| | | ATGAACAGCCTGAGAGCCGAGGACACGGCTGTCTATTACTG | | | | | | | SLRAEDTAVYYCAR | | | | | | |
| | | TGCGAGACATCTCTCACCAACGTCTTACGATTTTTTGAGTG | | | | | | | HLSPTSYDFLSGPD | | | | | | |
| | | GCCCAGATGCTTTTGATATATGGGGCCAAGGGACCACGGTC | | | | | | | AFDIWGQGTTVTVS | | | | | | |
| | | ACCGTCTCCTCA | | | | | | | S | | | | | | |
| ADI-81702 | 1287 | GAGGTGCAGCTGTTGGAGTCTGGGGCTGAGGTGAAGAAGCC | | | | | | 7090 | EVQLLESGAEVKKP | | 7441 | 11 | | 10 | |
| | | TGGGGCCTCAGTGAAGGTTTCCTGCAAGGCGTCTGGATACA | | | | | | | GASVKVSCKASGYT | | | | | | |
| | | CCTTCTCCCACTACTATATACACTGGGTGCGACAGGCCCCT | | | | | | | FSHYYIHWVRQAPG | | | | | | |
| | | GGACAGGGCCTTGAGTGGATGGGAATAATCAACCCTAGTGG | | | | | | | QGLEWMGIINPSGV | | | | | | |
| | | TGTTGGCACAACCTATGCACAGAAGTTCCAGGGCAGAGTCA | | | | | | | GTTYAQKFQGRVTM | | | | | | |
| | | CCATGACCAGTGACCCGTCCACGAGCACAGTCTACATGGAG | | | | | | | TSDPSTSTVYMELR | | | | | | |
| | | TTGAGAAGCCTGACATCTGAGGACACGGCCGTCTATTACTG | | | | | | | SLTSEDTAVYYCAR | | | | | | |
| | | TGCGAGAGATTCGGTAGGGGTTCCGGCTGCTGATGCCCTTG | | | | | | | DSVGVPAADALDIW | | | | | | |
| | | ATATCTGGGGCCAAGGGACCACGGTCACCGTCTCCTCA | | | | | | | GQGTTVTVSS | | | | | | |
| ADI-81754 | 1286 | GAGGTGCAGCTGTTGGAGTCTGGGGGAGGCTTGGTCCAGCC | | | | | | 7091 | EVQLLESGGGLVQP | | 7442 | 11 | | 10 | |
| | | TGGGGGGTCCCTGAGACTCTCCTGTGCAGCCTCTGGATTCA | | | | | | | GGSLRLSCAASGFT | | | | | | |
| | | CCGTCAGTGTCAACTACATGACCTGGGTCCGCCAGGCTCCA | | | | | | | VSVNYMTWVRQAPG | | | | | | |
| | | GGGAGGGGGCCGGAGTCGGTCTCAGTCATTTATAGCGGAGG | | | | | | | RGPESVSVIYSGGS | | | | | | |
| | | TAGCACATTCTACGCAGACTCCGTGAAGGGCAGATTCACCG | | | | | | | TFYADSVKGRFTVS | | | | | | |
| | | TCTCCAGAGACCATCCCAAGAACACCCTGTATCTTCAAATG | | | | | | | RDHPKNTLYLQMNS | | | | | | |
| | | AACAGCCTGAGAGTCGAGGACACGGCTGTGTATTATTGTGC | | | | | | | LRVEDTAVYYCARG | | | | | | |
| | | GAGAGGAGATCTCGGCACTCCAAGGATTGACTTCTGGGGCC | | | | | | | DLGTPRIDFWGQGT | | | | | | |
| | | AGGGAACCCTGGTCACCGTCTCCTCA | | | | | | | LVTVSS | | | | | | |
| ADI-81855 | 1286 | GAGGTGCAGCTGTTGGAGTCGGGCCCAGGACTGGTGAAGCC | | | | | | 7092 | EVQLLESGPGLVKP | | 7443 | 11 | | 9 | |
| | | TTCGGGGACCCTGTCCCTCACCTGCGCTGTCTCTGGTGGCT | | | | | | | SGTLSLTCAVSGGS | | | | | | |
| | | CCATCAGCGGTCCTAATTGGTGGAGTTGGGTCCGCCAGCCC | | | | | | | ISGPNWWSWVRQPP | | | | | | |
| | | CCAGGGAAGGGGCTGGAGTGGATTGGGGAAATCTTTCATAC | | | | | | | GKGLEWIGEIFHTG | | | | | | |
| | | TGGGAACACCAAGTACAACCCGTCCCTCAAGAGTCGAGCCA | | | | | | | NTKYNPSLKSRATI | | | | | | |
| | | CCATATCAATAGACAAGTCCAAGAACCAGTTCTCCCTGAAG | | | | | | | SIDKSKNQFSLKLS | | | | | | |
| | | CTGAGTTCTGTGACCGCCGCGGACACGGCCATTTATTACTG | | | | | | | SVTAADTAIYYCAR | | | | | | |
| | | TGCGAGAATAATGGGAGCCCTTGACTACTGGGGGCAGGGAA | | | | | | | IMGALDYWGQGTLV | | | | | | |
| | | CCCTGGTCACCGTCTCCTCA | | | | | | | TVSS | | | | | | |
| ADI-81573 | 6804 | CAGGTCCAGCTGGTGCAGTCTGGAGCAGAGGTGAAAAGGCC | | | | | | 7093 | QVQLVQSGAEVKRP | | 7444 | 10 | | 8 | |
| | | GGGGGAGTCTCTGAAGATCTCCTGTCAGGGTTCTGGATACA | | | | | | | GESLKISCQGSGYS | | | | | | |
| | | GCTTTATCAGCAACTGGATCGGCTGGGTGCGCCAGAAGCCC | | | | | | | FISNWIGWVRQKPG | | | | | | |
| | | GGCAAAGGCCTGGAGTGGATGGGAATCATCTGGCCTGGTGA | | | | | | | KGLEWMGIIWPGDS | | | | | | |
| | | CTCTGATACTACATACAGCCCGTCCTTCCAAGGCCAGGTCA | | | | | | | DTTYSPSFQGQVTI | | | | | | |
| | | CCATCTCAGTGGACAAGTCCATCAGCACCGCCTACCTGCAG | | | | | | | SVDKSISTAYLQWS | | | | | | |
| | | TGGAGCAGCCTGAAGGCCTCGGACACCGCCATGTATTACTG | | | | | | | SLKASDTAMYYCAR | | | | | | |
| | | TGCGAGACGAGGCAGTGCCTGGGAAATTGACTACTGGGGCC | | | | | | | RGSAWEIDYWGHGT | | | | | | |
| | | ACGGAACCCTGGTCACCGTCTCCTCA | | | | | | | LVTVSS | | | | | | |
| ADI-81614 | 1286 | CAGGTGCAGCTGGTGCAGTCTGGGGGAGGCTTGGTCCAGCC | | | | | | 7094 | QVQLVQSGGGLVQP | | 7445 | 10 | | 10 | |
| | | TGGGGGGTCCCTGAGACTCTCCTGTTCAGCCTCTGGATTCA | | | | | | | GGSLRLSCSASGFT | | | | | | |
| | | CCTTCAGTCGCTATTCTATGGACTGGGTCCGCCAGGCTCCA | | | | | | | FSRYSMDWVRQAPG | | | | | | |
| | | GGAAAGGGACTGGAATATGTTTCAGGTATAAGTAGTGATGG | | | | | | | KGLEYVSGISSDGV | | | | | | |
| | | TGTTACCACATACTACGCAGACTCAATGAAGGGCAGATTCA | | | | | | | TTYYADSMKGRFTI | | | | | | |
| | | CCATCTCCAGAGACAACTCCAAGAGCACTCTGTATCTTCAA | | | | | | | SRDNSKSTLYLQMS | | | | | | |
| | | ATGAGCAGTCTGAGACCTGAGGACACGGCTGTGTATTACTG | | | | | | | SLRPEDTAVYYCVK | | | | | | |
| | | TGTGAAAGATATCGGCCCGATGACTCCGGTGACTACGCCAG | | | | | | | DIGPMTPVTTPESW | | | | | | |
| | | AGTCCTGGGGCCAGGGAACCCTGGTCACCGTCTCCTCA | | | | | | | GQGTLVTVSS | | | | | | |
| ADI-81635 | 1286 | AGGTGCCCGCTGATGGAGTCTGGGGCTGCGGTGAGGAAGCC | | | | | | 7095 | RCPLMESGAAVRKP | | 7446 | 10 | | 8 | |
| | | TGGGGCCTCAGTGAAGGTCTCCTGCAAGGCCTCCGGATACA | | | | | | | GASVKVSCKASGYT | | | | | | |
| | | CCTTCACCAGTCATGATATCAACTGGGTGCGACAGGCCACT | | | | | | | FTSHDINWVRQATG | | | | | | |
| | | GGACAAGGGCTGGAGTGGATGGGATGGACAAACCCTAATAG | | | | | | | QGLEWMGWTNPNSG | | | | | | |
| | | TGGTGCCACAGGGTATGCACAGAAGTTCCAGGGCAGAGTCA | | | | | | | ATGYAQKFQGRVTM | | | | | | |
| | | CCATGACCAGGAATACCTCCATAAACACAGCCTTCATGGAG | | | | | | | TRNTSINTAFMELS | | | | | | |
| | | CTGAGCAGCCTGAGATCTGACGACACGGCCGTTTATTACTG | | | | | | | SLRSDDTAVYYCAR | | | | | | |
| | | TGCGAGAATGTCTACGACTTTAACGAACTGGTTCGACCCAT | | | | | | | MSTTLTNWFDPWGQ | | | | | | |
| | | GGGGCCAGGGAACCCTGGTCACCGTCTCCTCA | | | | | | | GTLVTVSS | | | | | | |
| ADI-81652 | 1285 | CAGGTGCAGCTGGTGGAGTCTGGGGGAGGCGTGGTCCAGCC | | | | | | 7096 | QVQLVESGGGVVQP | | 7447 | 10 | | 6 | |
| | | TGGGAGGTCCCTGAGACTCTCCTGTGCAGCGTCTGGATTCA | | | | | | | GRSLRLSCAASGFT | | | | | | |
| | | CCTTCAGTGACTATGGCATGCACTGGGTCCGCCAGGCTCCA | | | | | | | FSDYGMHWVRQAPG | | | | | | |
| | | GGCAAGGGGCTGGAGTGGGTAGCACTTATCTGGTATGATGG | | | | | | | KGLEWVALIWYDGY | | | | | | |
| | | ATATAATAAAAGATATGCAGACTCCGTGAAGGGCCGATTCA | | | | | | | NKRYADSVKGRFTI | | | | | | |
| | | CCATCTCCAGAGACAATTCCAAGAACACGCTGGATCTGCAA | | | | | | | SRDNSKNTLDLQMN | | | | | | |
| | | ATGAACAGCCTGAGAGGCGAGGACACGGCTGTCTATTACTG | | | | | | | SLRGEDTAVYYCAR | | | | | | |
| | | TGCGAGAGCGGGCCTCCCTACTGACGCCAGGGCTCTAGATG | | | | | | | AGLPTDARALDGSG | | | | | | |
| | | GTTCGGGGAATTATTACACTTTCTACTTTGACTCCTGGGGC | | | | | | | NYYTFYFDSWGQGA | | | | | | |
| | | CAGGGAGCCCTGGTCACCGTCTCCTCA | | | | | | | LVTVSS | | | | | | |
| | VH | VH | | SEQ | | SEQ | | SEQ | | SEQ | | SEQ | | SEQ | |
| | CDR3 | Germ- | VH | ID | VH | ID | VH | ID | VH | ID | VH | ID | VH | ID | VH |
| Clone ID | Lineage | line | FR1 | NO: | CDR1 | NO: | FR2 | NO: | CDR2 | NO: | FR3 | NO: | CDR3 | NO: | FR4 |
| ADI-81906 | 80 | IGHV3- | EVQLL | 5477 | FSVSVN | 5715 | WVRQAP | 437 | VIHRGG | 6103 | RFTISR | 6412 | ATSRVYY | 6723 | WGQGTT |
| | | 53 | ETGGG | | YMS | | GKGLEW | | STYYPD | | DNPQNT | | DSGGYPQ | | VTVSS |
| | | | LIQPG | | | | VS | | SVRG | | VYLQMN | | YHYYAMD | | |
| | | | GSLRL | | | | | | | | SLRAED | | V | | |
| | | | SCAAS | | | | | | | | TAVYYC | | | | |
| | | | G | | | | | | | | | | | | |
| ADI-81578 | 39 | IGHV1- | QVQLV | 50 | GTFSSY | 407 | WVRQAP | 5840 | KIIPML | 6104 | RATITA | 6413 | ARERGYS | 6724 | WGRGTL |
| | | 69 | QSGAE | | SIT | | GHGLEW | | GIADYA | | DKSTST | | DSGSVTY | | VTVSS |
| | | | VKKPG | | | | MG | | QKFQG | | AYMELS | | FDL | | |
| | | | SSVKV | | | | | | | | SLRSED | | | | |
| | | | SCKAS | | | | | | | | TAVYFC | | | | |
| | | | G | | | | | | | | | | | | |
| ADI-81856 | 34 | IGHV3- | EVQLL | 5478 | FTFSSY | 5716 | WVRQTP | 448 | SISGTS | 6105 | RFTISR | 6414 | ARDSHLL | 6725 | WGQGTT |
| | | 21 | ESGGG | | NMN | | GKGLEW | | SFISYA | | DNAKNS | | RFLTQPM | | VTVSS |
| | | | LVKPG | | | | VS | | DSVKG | | LYLQMN | | DV | | |
| | | | GSLRL | | | | | | | | SLRVED | | | | |
| | | | SCVAS | | | | | | | | TAVYYC | | | | |
| | | | G | | | | | | | | | | | | |
| ADI-81896 | 71 | IGHV3- | EVQLV | 5321 | FTFHDY | 5717 | WVRQAP | 437 | GISWNS | 6106 | RFAISR | 6415 | VRDGRGL | 6726 | WGQGTL |
| | | 9 | ESGGG | | AMH | | GKGLEW | | GNIEYA | | DNAKNF | | EPLGWFD | | VTVSS |
| | | | LVQPG | | | | VS | | DSVRG | | LYLQMN | | P | | |
| | | | RSLRL | | | | | | | | SMRVED | | | | |
| | | | SCAAS | | | | | | | | TALYYC | | | | |
| | | | G | | | | | | | | | | | | |
| ADI-81567 | 22 | IGHV1- | QVQLV | 50 | GTFSSS | 5718 | WVRQPP | 5850 | RIIPIL | 6107 | RVTITA | 6416 | ARDVGYS | 6727 | WGQGTL |
| | | 69 | QSGAE | | TIS | | GQGLEW | | DLADYA | | DKSTST | | GSGSSYY | | VPVSS |
| | | | VKKPG | | | | MG | | QKFQG | | AYMELS | | FDH | | |
| | | | SSVKV | | | | | | | | SLRSED | | | | |
| | | | SCKAS | | | | | | | | TALYYC | | | | |
| | | | G | | | | | | | | | | | | |
| ADI-81721 | 91 | IGHV5- | EVQLV | 5479 | YSFISN | 5582 | WVRQMP | 476 | IIWPGD | 6108 | QVTISA | 6417 | ARSSGTG | 6728 | WGQGTL |
| | | 51 | QSGAE | | WIG | | GKGLEW | | SDTRYS | | DKSIST | | YNDFDY | | VTVSS |
| | | | VKKPG | | | | MG | | PSFQG | | AYLQWN | | | | |
| | | | ESLKI | | | | | | | | SLKASD | | | | |
| | | | SCKTS | | | | | | | | TAMYYC | | | | |
| | | | G | | | | | | | | | | | | |
| ADI-81789 | 65 | IGHV3- | EVQLV | 5480 | FTFSRY | 331 | WVRQTT | 451 | AIGTAG | 6109 | RFTISR | 6418 | ARGDLAA | 6729 | WGRGTL |
| | | 13 | ESGGG | | DMH | | GKSLEW | | DAYYLD | | ENAKNS | | LDWHFDL | | VTVSS |
| | | | LAQPG | | | | VS | | SVKG | | LYLQMN | | | | |
| | | | GSLRL | | | | | | | | SLRAGD | | | | |
| | | | SCAAS | | | | | | | | TAVYFC | | | | |
| | | | G | | | | | | | | | | | | |
| ADI-81559 | 25 | IGHV3- | QVQLV | 5481 | FTFSSY | 5693 | WVRQAP | 431 | VIWSDG | 6110 | RFTISR | 6419 | ARDDGLP | 6730 | WGQGTL |
| | | 33 | ESGGG | | AIH | | GKGLEW | | SHKHYA | | DNSKNT | | TTYFDS | | VTVSS |
| | | | MVQPG | | | | VA | | DSVKG | | LYLQMD | | | | |
| | | | RSLRL | | | | | | | | SLRAED | | | | |
| | | | SCAAS | | | | | | | | TAVYYC | | | | |
| | | | G | | | | | | | | | | | | |
| | SEQ | | | | | | | SEQ | | | SEQ | VH | | VH Amino | |
| | ID | | | | | | | ID | | | ID | Nucleotide | | Acid | |
| Clone ID | NO: | VH DNA | | | | | | NO: | VH Protein | | NO: | Substitution | | Substitution | |
| ADI-81906 | 1287 | GAGGTGCAGCTGTTGGAGACTGGAGGAGGCTTGATCCAGCC | | | | | | 7097 | EVQLLETGGGLIQP | | 7448 | 10 | | 9 | |
| | | TGGGGGGTCCCTAAGACTCTCCTGTGCAGCCTCTGGATTCA | | | | | | | GGSLRLSCAASGFS | | | | | | |
| | | GCGTCAGTGTCAACTACATGAGCTGGGTCCGCCAGGCTCCA | | | | | | | VSVNYMSWVRQAPG | | | | | | |
| | | GGGAAGGGGCTGGAGTGGGTCTCAGTTATTCATAGGGGTGG | | | | | | | KGLEWVSVIHRGGS | | | | | | |
| | | TAGCACATACTACCCAGACTCCGTGAGGGGCCGATTCACCA | | | | | | | TYYPDSVRGRFTIS | | | | | | |
| | | TCTCCAGAGACAATCCCCAGAACACGGTGTATCTTCAAATG | | | | | | | RDNPQNTVYLQMNS | | | | | | |
| | | AACAGCCTGAGAGCCGAGGACACGGCCGTCTATTACTGTGC | | | | | | | LRAEDTAVYYCATS | | | | | | |
| | | GACGTCACGCGTTTACTATGACAGTGGTGGTTACCCGCAAT | | | | | | | RVYYDSGGYPQYHY | | | | | | |
| | | ACCATTACTACGCTATGGACGTCTGGGGCCAAGGGACCACG | | | | | | | YAMDVWGQGTTVTV | | | | | | |
| | | GTCACCGTCTCCTCA | | | | | | | SS | | | | | | |
| ADI-81578 | 1288 | TGGGTCCTCGGTGAAGGTCTCCTGCAAGGCTTCTGGAGGCA | | | | | | 7098 | QVQLVQSGAEVKKP | | 7449 | 9 | | 8 | |
| | | CCTTCAGCAGTTACAGTATCACCTGGGTGCGACAGGCCCCT | | | | | | | GSSVKVSCKASGGT | | | | | | |
| | | GGACATGGGCTTGAGTGGATGGGAAAGATCATCCCTATGCT | | | | | | | FSSYSITWVRQAPG | | | | | | |
| | | TGGTATAGCAGACTACGCACAGAAGTTCCAGGGCAGAGCTA | | | | | | | HGLEWMGKIIPMLG | | | | | | |
| | | CGATTACCGCGGACAAATCCACGAGCACAGCCTACATGGAG | | | | | | | IADYAQKFQGRATI | | | | | | |
| | | CTGAGCAGCCTGAGATCTGAGGACACGGCCGTGTATTTCTG | | | | | | | TADKSTSTAYMELS | | | | | | |
| | | TGCGAGAGAGCGGGGTTACTCTGATTCGGGGAGTGTTACGT | | | | | | | SLRSEDTAVYFCAR | | | | | | |
| | | ACTTCGATCTCTGGGGCCGTGGCACCCTGGTCACCGTCTCC | | | | | | | ERGYSDSGSVTYFD | | | | | | |
| | | TCA | | | | | | | LWGRGTLVTVSS | | | | | | |
| ADI-81856 | 1287 | GAGGTGCAGCTGTTGGAGTCTGGGGGAGGCCTGGTCAAGCC | | | | | | 7099 | EVQLLESGGGLVKP | | 7450 | 9 | | 8 | |
| | | TGGGGGGTCCCTGAGACTCTCCTGTGTAGCCTCTGGATTCA | | | | | | | GGSLRLSCVASGFT | | | | | | |
| | | CCTTCAGTAGTTATAACATGAACTGGGTCCGCCAGACTCCA | | | | | | | FSSYNMNWVRQTPG | | | | | | |
| | | GGGAAGGGGCTGGAGTGGGTCTCATCTATTAGTGGTACTAG | | | | | | | KGLEWVSSISGTSS | | | | | | |
| | | TAGTTTCATAAGCTACGCAGACTCAGTGAAGGGTCGATTCA | | | | | | | FISYADSVKGRFTI | | | | | | |
| | | CCATCTCCAGAGACAACGCCAAGAACTCACTCTATCTGCAA | | | | | | | SRDNAKNSLYLQMN | | | | | | |
| | | ATGAACAGCCTGAGAGTCGAGGACACGGCTGTGTATTACTG | | | | | | | SLRVEDTAVYYCAR | | | | | | |
| | | TGCGAGAGATTCCCACTTATTACGATTTTTGACCCAGCCTA | | | | | | | DSHLLRFLTQPMDV | | | | | | |
| | | TGGACGTCTGGGGCCAAGGGACCACGGTCACCGTCTCCTCA | | | | | | | WGQGTTVTVSS | | | | | | |
| ADI-81896 | 1286 | GAGGTGCAGCTGGTGGAGTCTGGGGGAGGCTTGGTACAGCC | | | | | | 7100 | EVQLVESGGGLVQP | | 7451 | 9 | | 8 | |
| | | TGGCAGGTCCCTGCGACTCTCCTGTGCAGCCTCTGGATTCA | | | | | | | GRSLRLSCAASGFT | | | | | | |
| | | CCTTTCATGATTATGCCATGCACTGGGTCCGCCAAGCTCCA | | | | | | | FHDYAMHWVRQAPG | | | | | | |
| | | GGGAAGGGCCTGGAGTGGGTTTCAGGTATTAGTTGGAATAG | | | | | | | KGLEWVSGISWNSG | | | | | | |
| | | TGGCAACATAGAATATGCGGACTCTGTGAGGGGCCGATTCG | | | | | | | NIEYADSVRGRFAI | | | | | | |
| | | CCATCTCCAGAGACAACGCCAAGAACTTCCTCTATCTGCAA | | | | | | | SRDNAKNFLYLQMN | | | | | | |
| | | ATGAACAGTATGAGAGTTGAGGACACGGCCTTGTATTATTG | | | | | | | SMRVEDTALYYCVR | | | | | | |
| | | TGTAAGAGATGGAAGAGGACTGGAACCATTAGGCTGGTTCG | | | | | | | DGRGLEPLGWFDPW | | | | | | |
| | | ACCCCTGGGGCCAGGGAACCCTGGTCACCGTCTCTTCA | | | | | | | GQGTLVTVSS | | | | | | |
| ADI-81567 | 6828 | TGGGTCCTCGGTGAAGGTCTCCTGCAAGGCTTCTGGAGGCA | | | | | | 7101 | QVQLVQSGAEVKKP | | 7452 | 8 | | 6 | |
| | | CCTTCAGCAGTTCTACAATCAGCTGGGTGCGACAGCCCCCT | | | | | | | GSSVKVSCKASGGT | | | | | | |
| | | GGACAAGGGCTTGAGTGGATGGGAAGGATCATCCCTATCCT | | | | | | | FSSSTISWVRQPPG | | | | | | |
| | | TGATTTGGCAGACTACGCACAGAAGTTTCAGGGCAGAGTCA | | | | | | | QGLEWMGRIIPILD | | | | | | |
| | | CCATTACCGCGGACAAATCCACGAGCACAGCCTACATGGAG | | | | | | | LADYAQKFQGRVTI | | | | | | |
| | | CTGAGCAGCCTGAGATCTGAGGACACGGCCCTCTATTACTG | | | | | | | TADKSTSTAYMELS | | | | | | |
| | | TGCGAGAGATGTGGGCTACTCTGGTTCGGGGAGTTCTTACT | | | | | | | SLRSEDTALYYCAR | | | | | | |
| | | ACTTTGACCACTGGGGCCAGGGAACCCTGGTCCCCGTCTCC | | | | | | | DVGYSGSGSSYYFD | | | | | | |
| | | TCA | | | | | | | HWGQGTLVPVSS | | | | | | |
| ADI-81721 | 1286 | GAGGTCCAGCTGGTGCAGTCTGGAGCAGAGGTGAAAAAGCC | | | | | | 7102 | EVQLVQSGAEVKKP | | 7453 | 8 | | 5 | |
| | | CGGGGAGTCTCTGAAGATCTCCTGTAAGACCTCTGGATACA | | | | | | | GESLKISCKTSGYS | | | | | | |
| | | GCTTTATCAGCAACTGGATCGGCTGGGTGCGCCAGATGCCC | | | | | | | FISNWIGWVRQMPG | | | | | | |
| | | GGGAAAGGCCTGGAGTGGATGGGGATCATCTGGCCTGGTGA | | | | | | | KGLEWMGIIWPGDS | | | | | | |
| | | CTCTGATACCAGATACAGCCCGTCCTTCCAAGGCCAGGTCA | | | | | | | DTRYSPSFQGQVTI | | | | | | |
| | | CCATCTCAGCCGACAAGTCCATTAGCACCGCCTACCTGCAA | | | | | | | SADKSISTAYLQWN | | | | | | |
| | | TGGAACAGCCTGAAGGCCTCGGACACCGCCATGTATTACTG | | | | | | | SLKASDTAMYYCAR | | | | | | |
| | | TGCGAGGAGTAGTGGAACTGGTTACAACGACTTTGACTACT | | | | | | | SSGTGYNDFDYWGQ | | | | | | |
| | | GGGGCCAGGGAACCCTGGTCACCGTCTCCTCA | | | | | | | GTLVTVSS | | | | | | |
| ADI-81789 | 1288 | GAGGTGCAGCTGGTGGAGTCTGGGGGAGGCCTGGCACAGCC | | | | | | 7103 | EVQLVESGGGLAQP | | 7454 | 8 | | 8 | |
| | | TGGGGGGTCCCTGAGACTCTCCTGTGCAGCCTCTGGATTCA | | | | | | | GGSLRLSCAASGFT | | | | | | |
| | | CCTTCAGTAGATACGACATGCACTGGGTCCGCCAGACTACA | | | | | | | FSRYDMHWVRQTTG | | | | | | |
| | | GGAAAAAGTCTGGAGTGGGTCTCAGCTATTGGTACTGCTGG | | | | | | | KSLEWVSAIGTAGD | | | | | | |
| | | TGACGCATACTATCTAGACTCCGTGAAGGGCCGATTCACCA | | | | | | | AYYLDSVKGRFTIS | | | | | | |
| | | TCTCCAGAGAAAATGCCAAGAACTCCTTGTATCTTCAAATG | | | | | | | RENAKNSLYLQMNS | | | | | | |
| | | AACAGCCTGAGAGCCGGGGACACGGCTGTGTATTTCTGTGC | | | | | | | LRAGDTAVYFCARG | | | | | | |
| | | AAGAGGGGATTTAGCAGCTCTCGACTGGCACTTCGATCTCT | | | | | | | DLAALDWHFDLWGR | | | | | | |
| | | GGGGCCGTGGCACCCTGGTCACCGTCTCCTCA | | | | | | | GTLVTVSS | | | | | | |
| ADI-81559 | 1286 | CAGGTGCAGCTGGTGGAGTCTGGGGGAGGCATGGTCCAGCC | | | | | | 7104 | QVQLVESGGGMVQP | | 7455 | 7 | | 7 | |
| | | TGGGAGGTCCCTGAGACTCTCCTGTGCAGCGTCTGGATTCA | | | | | | | GRSLRLSCAASGFT | | | | | | |
| | | CCTTCAGTAGCTACGCCATACACTGGGTCCGCCAGGCTCCA | | | | | | | FSSYAIHWVRQAPG | | | | | | |
| | | GGCAAGGGGCTGGAGTGGGTGGCAGTTATATGGTCTGATGG | | | | | | | KGLEWVAVIWSDGS | | | | | | |
| | | AAGTCATAAACACTATGCAGACTCCGTGAAGGGCCGATTCA | | | | | | | HKHYADSVKGRFTI | | | | | | |
| | | CCATCTCCAGAGACAATTCCAAGAACACCCTGTATCTGCAA | | | | | | | SRDNSKNTLYLQMD | | | | | | |
| | | ATGGACAGCCTGAGAGCCGAGGACACGGCTGTGTATTACTG | | | | | | | SLRAEDTAVYYCAR | | | | | | |
| | | TGCGAGAGATGACGGATTACCTACTACTTACTTTGACTCCT | | | | | | | DDGLPTTYFDSWGQ | | | | | | |
| | | GGGGCCAGGGAACCCTGGTCACCGTCTCCTCA | | | | | | | GTLVTVSS | | | | | | |
| | VH | VH | | SEQ | | SEQ | | SEQ | | SEQ | | SEQ | | SEQ | |
| | CDR3 | Germ- | VH | ID | VH | ID | VH | ID | VH | ID | VH | ID | VH | ID | VH |
| Clone ID | Lineage | line | FR1 | NO: | CDR1 | NO: | FR2 | NO: | CDR2 | NO: | FR3 | NO: | CDR3 | NO: | FR4 |
| ADI-81642 | 15 | IGHV4- | EVQLV | 5482 | YSISSG | 338 | WIRQPL | 487 | SIYHSG | 673 | RVTISL | 923 | ARDGQGY | 1173 | WGQGAL |
| | | 38-2 | ESGPG | | YSWG | | GKGLEW | | STYYKA | | DTSKNQ | | VPPRDNF | | VTVSS |
| | | | LVKAS | | | | IG | | SLKS | | FSLKLS | | DH | | |
| | | | ETLSL | | | | | | | | SVTAAD | | | | |
| | | | ACTVS | | | | | | | | TAVYYC | | | | |
| | | | G | | | | | | | | | | | | |
| ADI-81799 | 75 | IGHV4- | EVQLL | 5365 | GSISTS | 5719 | WVRQPP | 444 | EIYHTG | 6111 | RVTISV | 6420 | ARASEKG | 6731 | WGRGTL |
| | | 4 | ESGPG | | DWWS | | GKGLEW | | STNYNP | | DTSKNQ | | LLFGAYT | | VTVSS |
| | | | LVKPS | | | | IG | | SLKS | | FSLTLS | | YTYVDWY | | |
| | | | GTLSL | | | | | | | | SVTAAD | | FDI | | |
| | | | TCAVS | | | | | | | | TAMYYC | | | | |
| | | | G | | | | | | | | | | | | |
| ADI-81913 | 87 | IGHV3- | EVQLL | 5373 | FNFSNY | 5720 | WVRQAP | 431 | VLTYDG | 6112 | RFTISR | 821 | AKHPCSG | 6732 | WGQGTL |
| | | 30 | ESGGG | | GMH | | GKGLEW | | SNKYYA | | DNAKNT | | GSCYHEF | | VTVSS |
| | | | VVQPG | | | | VA | | GSVKG | | LYLQMN | | YFDY | | |
| | | | RSLRL | | | | | | | | SLRAED | | | | |
| | | | SCAAS | | | | | | | | TAVYYC | | | | |
| | | | G | | | | | | | | | | | | |
| ADI-81546 | 13 | IGHV3- | QVQLV | 10 | FTFSRY | 5721 | WVRQAP | 431 | NILYDG | 6113 | RFTISR | 777 | AKASGEY | 6733 | WGQGTL |
| | | 30 | QSGGG | | GMY | | GKGLEW | | SNKYYE | | DNSKNT | | CSGGSCY | | VTVSS |
| | | | VVQPG | | | | VA | | DSVKG | | LYLQMN | | NHYFDY | | |
| | | | RSLRL | | | | | | | | SLRAED | | | | |
| | | | SCAAS | | | | | | | | TAVYYC | | | | |
| | | | G | | | | | | | | | | | | |
| ADI-81563 | 11 | IGHV1- | QVQLV | 50 | GTFSSD | 5722 | WVRQAP | 433 | RVFPIL | 6114 | TVTITA | 6421 | AREGGTT | 6734 | WGHGTL |
| | | 69 | QSGAE | | SIS | | GQGLEW | | GIANYA | | DKSTST | | TEYFRH | | VTVSS |
| | | | VKKPG | | | | MG | | QKFQG | | AYMEMS | | | | |
| | | | SSVKV | | | | | | | | SLRSED | | | | |
| | | | SCKAS | | | | | | | | TAVYYC | | | | |
| | | | G | | | | | | | | | | | | |
| ADI-81596 | 56 | IGHV3- | EVQLV | 5483 | FIVSSN | 260 | WVRQAP | 437 | VIYPGG | 649 | RFTISR | 899 | ARDYGDY | 1149 | WGQGTL |
| | | 53 | ESGGG | | YMS | | GKGLEW | | STFYAD | | DTSKNT | | YFDY | | VTVSS |
| | | | LIQPG | | | | VS | | SVKG | | LYLQMN | | | | |
| | | | GSLRL | | | | | | | | SLRAED | | | | |
| | | | SCAAS | | | | | | | | TAVYYC | | | | |
| | | | E | | | | | | | | | | | | |
| ADI-81900 | 75 | IGHV3- | EVQLV | 5338 | FTFSSY | 5723 | WVRQTP | 5778 | LISSDG | 5991 | RFTISR | 789 | VKGKELR | 6735 | WGQGTL |
| | | 30 | ESGGG | | DIH | | GKGLEW | | SNKYYA | | DNSKNT | | AAAGRTY | | VTVSS |
| | | | VVQPG | | | | VA | | DSVKG | | LYLQMN | | RPLDY | | |
| | | | RSLRL | | | | | | | | SLRTED | | | | |
| | | | SCAAS | | | | | | | | TAVYYC | | | | |
| | | | G | | | | | | | | | | | | |
| | SEQ | | | | | | | SEQ | | | SEQ | VH | | VH Amino | |
| | ID | | | | | | | ID | | | ID | Nucleotide | | Acid | |
| Clone ID | NO: | VH DNA | | | | | | NO: | VH Protein | | NO: | Substitution | | Substitution | |
| ADI-81642 | 1285 | GAGGTGCAGCTGGTGGAGTCGGGCCCAGGACTGGTGAAGGC | | | | | | 7105 | EVQLVESGPGLVKA | | 7456 | 7 | | 7 | |
| | | TTCGGAGACCCTGTCCCTCGCCTGCACTGTCTCTGGTTACT | | | | | | | SETLSLACTVSGYS | | | | | | |
| | | CCATCAGCAGTGGTTATTCCTGGGGCTGGATCCGGCAGCCC | | | | | | | ISSGYSWGWIRQPL | | | | | | |
| | | CTAGGGAAGGGGCTGGAGTGGATTGGGAGTATCTATCATAG | | | | | | | GKGLEWIGSIYHSG | | | | | | |
| | | TGGGAGCACCTATTACAAAGCGTCCCTCAAGAGTCGAGTCA | | | | | | | STYYKASLKSRVTI | | | | | | |
| | | CCATATCACTAGACACGTCCAAGAACCAGTTCTCCCTGAAG | | | | | | | SLDTSKNQFSLKLS | | | | | | |
| | | CTGAGCTCTGTGACGGCCGCAGACACGGCCGTATATTACTG | | | | | | | SVTAADTAVYYCAR | | | | | | |
| | | TGCGAGAGATGGTCAAGGGTACGTACCACCGAGAGACAACT | | | | | | | DGQGYVPPRDNFDH | | | | | | |
| | | TTGACCACTGGGGCCAGGGAGCCCTGGTCACCGTCTCCTCA | | | | | | | WGQGALVTVSS | | | | | | |
| ADI-81799 | 1288 | GAGGTGCAGCTGTTGGAGTCGGGCCCAGGACTGGTGAAGCC | | | | | | 7106 | EVQLLESGPGLVKP | | 7457 | 7 | | 6 | |
| | | TTCGGGGACCCTGTCCCTCACCTGCGCTGTCTCTGGTGGCT | | | | | | | SGTLSLTCAVSGGS | | | | | | |
| | | CCATCAGCACTAGTGACTGGTGGAGTTGGGTCCGCCAGCCC | | | | | | | ISTSDWWSWVRQPP | | | | | | |
| | | CCAGGGAAGGGGCTGGAGTGGATTGGGGAAATCTATCATAC | | | | | | | GKGLEWIGEIYHTG | | | | | | |
| | | TGGGAGCACCAACTACAACCCGTCCCTCAAGAGTCGAGTCA | | | | | | | STNYNPSLKSRVTI | | | | | | |
| | | CCATCTCTGTAGACACGTCCAAGAACCAGTTCTCCCTGACA | | | | | | | SVDTSKNQFSLTLS | | | | | | |
| | | CTGAGCTCTGTGACCGCCGCGGACACGGCCATGTATTACTG | | | | | | | SVTAADTAMYYCAR | | | | | | |
| | | TGCGAGAGCTAGTGAGAAAGGTCTTCTCTTCGGGGCATACA | | | | | | | ASEKGLLFGAYTYT | | | | | | |
| | | CCTATACTTACGTGGACTGGTACTTCGATATCTGGGGCCGT | | | | | | | YVDWYFDIWGRGTL | | | | | | |
| | | GGCACCCTGGTCACCGTCTCCTCA | | | | | | | VTVSS | | | | | | |
| ADI-81913 | 1286 | TGGGAGGTCCCTGAGACTCTCCTGTGCAGCCTCTGGATTCA | | | | | | 7107 | EVQLLESGGGVVQP | | 7458 | 7 | | 6 | |
| | | ACTTCAGTAACTATGGCATGCACTGGGTCCGCCAGGCTCCA | | | | | | | GRSLRLSCAASGFN | | | | | | |
| | | GGCAAGGGGCTGGAGTGGGTGGCAGTTCTCACATATGATGG | | | | | | | FSNYGMHWVRQAPG | | | | | | |
| | | AAGTAATAAATACTATGCAGGCTCCGTGAAGGGCCGATTCA | | | | | | | KGLEWVAVLTYDGS | | | | | | |
| | | CCATCTCCAGAGACAATGCCAAGAACACGCTGTATCTGCAA | | | | | | | NKYYAGSVKGRFTI | | | | | | |
| | | ATGAACAGCCTGAGAGCTGAGGACACGGCTGTGTATTACTG | | | | | | | SRDNAKNTLYLQMN | | | | | | |
| | | TGCGAAACATCCATGTAGTGGTGGTAGCTGCTACCACGAAT | | | | | | | SLRAEDTAVYYCAK | | | | | | |
| | | TTTACTTTGACTACTGGGGCCAGGGAACCCTGGTCACCGTC | | | | | | | HPCSGGSCYHEFYF | | | | | | |
| | | TCCTCA | | | | | | | DYWGQGTLVTVSS | | | | | | |
| ADI-81546 | 1286 | CAGGTGCAGCTGGTGCAGTCTGGGGGAGGCGTGGTCCAGCC | | | | | | 7108 | QVQLVQSGGGVVQP | | 7459 | 6 | | 5 | |
| | | TGGGAGGTCCCTGAGACTCTCCTGTGCAGCCTCTGGATTCA | | | | | | | GRSLRLSCAASGFT | | | | | | |
| | | CCTTCAGTAGGTATGGCATGTACTGGGTCCGCCAGGCTCCA | | | | | | | FSRYGMYWVRQAPG | | | | | | |
| | | GGCAAGGGGCTGGAGTGGGTGGCAAATATATTATATGATGG | | | | | | | KGLEWVANILYDGS | | | | | | |
| | | AAGTAATAAATACTATGAAGACTCCGTGAAGGGCCGATTCA | | | | | | | NKYYEDSVKGRFTI | | | | | | |
| | | CCATCTCCAGAGACAATTCCAAGAACACGCTGTATCTGCAA | | | | | | | SRDNSKNTLYLQMN | | | | | | |
| | | ATGAACAGCCTGAGAGCTGAGGACACGGCTGTGTATTACTG | | | | | | | SLRAEDTAVYYCAK | | | | | | |
| | | TGCGAAAGCCTCAGGGGAATATTGTAGTGGTGGTAGCTGCT | | | | | | | ASGEYCSGGSCYNH | | | | | | |
| | | ACAACCACTACTTTGACTACTGGGGCCAGGGAACCCTGGTC | | | | | | | YFDYWGQGTLVTVS | | | | | | |
| | | ACCGTCTCCTCA | | | | | | | S | | | | | | |
| ADI-81563 | 6804 | CAGGTCCAGCTGGTGCAGTCTGGGGCTGAGGTGAAGAAGCC | | | | | | 7109 | QVQLVQSGAEVKKP | | 7460 | 6 | | 6 | |
| | | TGGGTCCTCGGTGAAGGTCTCCTGCAAGGCTTCTGGAGGCA | | | | | | | GSSVKVSCKASGGT | | | | | | |
| | | CCTTCAGCAGCGATAGTATCAGCTGGGTGCGACAGGCCCCT | | | | | | | FSSDSISWVRQAPG | | | | | | |
| | | GGACAAGGGCTTGAGTGGATGGGAAGGGTCTTCCCTATCCT | | | | | | | QGLEWMGRVFPILG | | | | | | |
| | | TGGTATAGCAAACTACGCACAGAAGTTCCAGGGCACAGTCA | | | | | | | IANYAQKFQGTVTI | | | | | | |
| | | CGATTACCGCGGACAAATCCACGAGCACAGCCTACATGGAA | | | | | | | TADKSTSTAYMEMS | | | | | | |
| | | ATGAGCAGCCTGAGATCTGAGGACACGGCCGTGTATTACTG | | | | | | | SLRSEDTAVYYCAR | | | | | | |
| | | TGCGAGAGAAGGTGGTACCACCACTGAATACTTCCGTCACT | | | | | | | EGGTTTEYFRHWGH | | | | | | |
| | | GGGGCCACGGCACCCTGGTCACCGTCTCCTCA | | | | | | | GTLVTVSS | | | | | | |
| ADI-81596 | 1286 | GAGGTGCAGCTGGTGGAGTCTGGAGGAGGCTTGATCCAGCC | | | | | | 7110 | EVQLVESGGGLIQP | | 7461 | 6 | | 5 | |
| | | TGGGGGGTCCCTGAGACTCTCCTGTGCAGCCTCTGAGTTCA | | | | | | | GGSLRLSCAASEFI | | | | | | |
| | | TCGTCAGTAGCAACTACATGAGCTGGGTCCGCCAGGCTCCA | | | | | | | VSSNYMSWVRQAPG | | | | | | |
| | | GGGAAGGGGCTGGAGTGGGTCTCAGTTATTTATCCCGGCGG | | | | | | | KGLEWVSVIYPGGS | | | | | | |
| | | TAGCACATTCTACGCAGACTCCGTGAAGGGCCGATTCACCA | | | | | | | TFYADSVKGRFTIS | | | | | | |
| | | TCTCCAGAGACACTTCCAAGAACACGCTGTATCTTCAAATG | | | | | | | RDTSKNTLYLQMNS | | | | | | |
| | | AACAGCCTGAGAGCCGAGGACACGGCCGTGTATTACTGTGC | | | | | | | LRAEDTAVYYCARD | | | | | | |
| | | GAGAGACTACGGTGACTACTACTTTGACTACTGGGGCCAGG | | | | | | | YGDYYFDYWGQGTL | | | | | | |
| | | GAACCCTGGTCACCGTCTCCTCA | | | | | | | VTVSS | | | | | | |
| ADI-81900 | 1286 | TGGGAGGTCCCTGAGACTCTCCTGTGCAGCCTCTGGATTCA | | | | | | 7111 | EVQLVESGGGVVQP | | 7462 | 6 | | 6 | |
| | | CCTTTAGTAGTTATGACATACACTGGGTCCGCCAGACTCCA | | | | | | | GRSLRLSCAASGFT | | | | | | |
| | | GGCAAGGGGCTGGAGTGGGTGGCACTTATCTCATCTGATGG | | | | | | | FSSYDIHWVRQTPG | | | | | | |
| | | AAGTAATAAATATTATGCAGACTCCGTGAAGGGCCGATTCA | | | | | | | KGLEWVALISSDGS | | | | | | |
| | | CCATCTCCAGAGACAATTCCAAGAACACGTTGTATCTGCAA | | | | | | | NKYYADSVKGRFTI | | | | | | |
| | | ATGAACAGCCTGAGAACTGAGGACACGGCTGTGTATTACTG | | | | | | | SRDNSKNTLYLQMN | | | | | | |
| | | TGTGAAAGGAAAGGAGTTGAGAGCAGCAGCTGGTAGGACCT | | | | | | | SLRTEDTAVYYCVK | | | | | | |
| | | ACCGTCCCCTTGACTACTGGGGCCAGGGAACCCTGGTCACC | | | | | | | GKELRAAAGRTYRP | | | | | | |
| | | GTCTCCTCA | | | | | | | LDYWGQGTLVTVSS | | | | | | |
| | VH | VH | | SEQ | | SEQ | | SEQ | | SEQ | | SEQ | | SEQ | |
| | CDR3 | Germ- | VH | ID | VH | ID | VH | ID | VH | ID | VH | ID | VH | ID | VH |
| Clone ID | Lineage | line | FR1 | NO: | CDR1 | NO: | FR2 | NO: | CDR2 | NO: | FR3 | NO: | CDR3 | NO: | FR4 |
| ADI-81581 | 42 | IGHV3- | QVQLV | 5484 | FTFGDY | 5724 | WVRQVP | 436 | GINWNG | 6115 | RFTISR | 6422 | ARGGAIF | 6736 | WGQGTT |
| | | 20 | QSGGG | | GMN | | GKGLEW | | GRTGYA | | DNAKNS | | RYFDLLS | | VTVSS |
| | | | VVRPG | | | | VS | | DPVKG | | LYLQMN | | SEGMDV | | |
| | | | GSLRL | | | | | | | | SLRAED | | | | |
| | | | SCAAS | | | | | | | | TALYYC | | | | |
| | | | G | | | | | | | | | | | | |
| ADI-81615 | 72 | IGHV1- | QVQLQ | 86 | GTFSSY | 356 | WVRQAP | 433 | RIIPLL | 765 | RVTITA | 832 | ARENCFG | 1270 | WGQGTT |
| | | 69 | QSGAE | | SIS | | GQGLEW | | GIPNYA | | DKSTST | | TSCSTPW | | VTVSS |
| | | | VKKPG | | | | MG | | QKMQG | | AYMELS | | GAFDI | | |
| | | | SSVKV | | | | | | | | SLRSED | | | | |
| | | | SCKAS | | | | | | | | TAVYYC | | | | |
| | | | G | | | | | | | | | | | | |
| ADI-81904 | 78 | IGHV4- | QVQLL | 5485 | YSISSG | 5725 | WVRQPP | 444 | SIYHSG | 6116 | RVTISV | 6423 | ARVGAYC | 6737 | WGQGTL |
| | | 38-2 | ESGPG | | YYWG | | GKGLEW | | RTYYNP | | DTSKNQ | | GGGHCYP | | VTVSS |
| | | | LVKPS | | | | IG | | SLQS | | FSLKLT | | EDKQSPD | | |
| | | | ETLSL | | | | | | | | SVTAAD | | Y | | |
| | | | TCGVS | | | | | | | | TAVYYC | | | | |
| | | | G | | | | | | | | | | | | |
| ADI-81818 | 92 | IGHV4- | EVQLL | 5335 | GSISSY | 5726 | WIRQPP | 445 | YTSYSG | 6117 | RVTISV | 6423 | AADYYDS | 6738 | WGQGTT |
| | | 59 | ESGPG | | YWT | | GKGLEW | | STNYNP | | DTSKNQ | | TGYHYGM | | VTVSS |
| | | | LVKPS | | | | IG | | SLKS | | FSLKLT | | DV | | |
| | | | ETLSL | | | | | | | | SVTAAD | | | | |
| | | | TCTVS | | | | | | | | TAVYYC | | | | |
| | | | G | | | | | | | | | | | | |
| ADI-81540 | 8 | IGHV5- | QVQLV | 174 | YSFTHY | 5727 | WVRQMP | 476 | IIYPGD | 635 | QVTISA | 6424 | ARQGTTV | 1134 | WGQGTL |
| | | 51 | QSGAE | | WIG | | GKGLEW | | SDTRYS | | DKSIST | | GHFDY | | VTVSS |
| | | | VKKPG | | | | MG | | PSFQG | | AYLQWS | | | | |
| | | | ESLKI | | | | | | | | GLKASD | | | | |
| | | | SCKGS | | | | | | | | TAMYYC | | | | |
| | | | G | | | | | | | | | | | | |
| ADI-81880 | 57 | IGHV3- | EVQLV | 5321 | FTFDDY | 214 | WVRQAP | 437 | GISWNS | 6118 | RFTISR | 6393 | AKDLSIN | 6739 | WGQGTT |
| | | 9 | ESGGG | | AMH | | GKGLEW | | ASIGYA | | DNAKNS | | WGSPLSG | | VTVSS |
| | | | LVQPG | | | | VS | | DSVKG | | LYLQMN | | MDV | | |
| | | | RSLRL | | | | | | | | SLRAED | | | | |
| | | | SCAAS | | | | | | | | TAFYYC | | | | |
| | | | G | | | | | | | | | | | | |
| ADI-81568 | 31 | IGHV3- | QVQLV | 10 | FTFSSY | 262 | WVRQAP | 431 | VIWYDG | 679 | RFTISR | 777 | ARARGWG | 6740 | WGQGTL |
| | | 33 | QSGGG | | GMH | | GKGLEW | | SNKYYA | | DNSKNT | | VGATIDY | | VTVSS |
| | | | VVQPG | | | | VA | | DSVKG | | LYLQMN | | | | |
| | | | RSLRL | | | | | | | | SLRAED | | | | |
| | | | SCAAS | | | | | | | | TAVYYC | | | | |
| | | | G | | | | | | | | | | | | |
| ADI-81658 | 31 | IGHV3- | RGAAG | 5486 | FTFSSF | 5728 | GVRQAP | 5851 | IITTSG | 6119 | RFTISK | 6425 | DKSEAYG | 6741 | WAQGTL |
| | | 23 | GVWGR | | PMS | | GKGLEC | | G- | | DTCKNT | | TGWYGKN | | VTVSS |
| | | | LGTAR | | | | VS | | TTYPDS | | LYGQMN | | DY | | |
| | | | GSLRL | | | | | | VKG | | SLRAED | | | | |
| | | | SCAAS | | | | | | | | TAVYYC | | | | |
| | | | G | | | | | | | | | | | | |
| | SEQ | | | | | | | SEQ | | | SEQ | VH | | VH Amino | |
| | ID | | | | | | | ID | | | ID | Nucleotide | | Acid | |
| Clone ID | NO: | VH DNA | | | | | | NO: | VH Protein | | NO: | Substitution | | Substitution | |
| ADI-81581 | 1287 | CAGGTGCAGCTGGTGCAGTCTGGGGGAGGTGTGGTACGGCC | | | | | | 7112 | QVQLVQSGGGVVRP | | 7463 | 5 | | 5 | |
| | | TGGGGGGTCCCTGAGACTCTCCTGTGCAGCCTCTGGATTCA | | | | | | | GGSLRLSCAASGFT | | | | | | |
| | | CCTTTGGTGATTATGGCATGAACTGGGTCCGCCAAGTTCCA | | | | | | | FGDYGMNWVRQVPG | | | | | | |
| | | GGGAAGGGGCTGGAGTGGGTCTCTGGTATTAATTGGAATGG | | | | | | | KGLEWVSGINWNGG | | | | | | |
| | | TGGTAGGACAGGGTATGCAGACCCTGTGAAGGGCCGATTCA | | | | | | | RTGYADPVKGRFTI | | | | | | |
| | | CCATCTCCAGAGACAACGCCAAGAACTCCCTATATCTGCAA | | | | | | | SRDNAKNSLYLQMN | | | | | | |
| | | ATGAACAGTCTGAGAGCCGAGGACACGGCCTTGTACTACTG | | | | | | | SLRAEDTALYYCAR | | | | | | |
| | | TGCGAGAGGGGGGGCCATATTCCGATATTTTGACTTGTTAT | | | | | | | GGAIFRYFDLLSSE | | | | | | |
| | | CCTCCGAGGGGATGGACGTCTGGGGCCAAGGGACCACGGTC | | | | | | | GMDVWGQGTTVTVS | | | | | | |
| | | ACCGTCTCCTCA | | | | | | | S | | | | | | |
| ADI-81615 | 1287 | TGGGTCCTCGGTGAAGGTCTCCTGCAAGGCTTCTGGAGGCA | | | | | | 7113 | QVQLQQSGAEVKKP | | 7464 | 5 | | 4 | |
| | | CCTTCAGCAGCTATTCTATCAGCTGGGTGCGACAGGCCCCT | | | | | | | GSSVKVSCKASGGT | | | | | | |
| | | GGACAAGGACTTGAGTGGATGGGAAGGATCATCCCTCTCCT | | | | | | | FSSYSISWVRQAPG | | | | | | |
| | | TGGTATACCAAACTACGCACAGAAGATGCAGGGCAGAGTCA | | | | | | | QGLEWMGRIIPLLG | | | | | | |
| | | CGATTACCGCGGACAAATCAACGAGCACAGCCTACATGGAG | | | | | | | IPNYAQKMQGRVTI | | | | | | |
| | | CTGAGCAGCCTGAGATCTGAGGACACGGCCGTGTATTACTG | | | | | | | TADKSTSTAYMELS | | | | | | |
| | | TGCGAGAGAAAATTGTTTTGGTACCTCCTGCTCTACCCCGT | | | | | | | SLRSEDTAVYYCAR | | | | | | |
| | | GGGGTGCTTTTGATATCTGGGGCCAAGGGACCACGGTCACC | | | | | | | ENCFGTSCSTPWGA | | | | | | |
| | | GTCTCCTCA | | | | | | | FDIWGQGTTVTVSS | | | | | | |
| ADI-81904 | 1286 | CAGGTGCAGCTGCTGGAGTCCGGCCCAGGACTGGTGAAGCC | | | | | | 7114 | QVQLLESGPGLVKP | | 7465 | 5 | | 5 | |
| | | TTCGGAGACCCTGTCCCTCACCTGCGGTGTCTCTGGTTACT | | | | | | | SETLSLTCGVSGYS | | | | | | |
| | | CCATCAGCAGTGGTTACTACTGGGGCTGGGTCCGGCAGCCC | | | | | | | ISSGYYWGWVRQPP | | | | | | |
| | | CCAGGGAAGGGGCTGGAGTGGATTGGGAGTATCTATCATAG | | | | | | | GKGLEWIGSIYHSG | | | | | | |
| | | TGGGAGGACCTACTACAACCCGTCCCTCCAGAGTCGAGTCA | | | | | | | RTYYNPSLQSRVTI | | | | | | |
| | | CCATATCAGTTGACACGTCCAAGAACCAGTTCTCCCTGAAA | | | | | | | SVDTSKNQFSLKLT | | | | | | |
| | | CTGACCTCTGTGACCGCCGCAGACACGGCCGTGTATTACTG | | | | | | | SVTAADTAVYYCAR | | | | | | |
| | | TGCGAGAGTGGGGGCGTATTGTGGTGGTGGTCACTGCTACC | | | | | | | VGAYCGGGHCYPED | | | | | | |
| | | CCGAAGACAAACAATCACCGGACTACTGGGGCCAGGGAACC | | | | | | | KQSPDYWGQGTLVT | | | | | | |
| | | CTGGTCACCGTCTCCTCA | | | | | | | VSS | | | | | | |
| ADI-81818 | 1287 | GAGGTGCAGCTGTTGGAGTCGGGCCCAGGACTGGTGAAGCC | | | | | | 7115 | EVQLLESGPGLVKP | | 7466 | 4 | | 4 | |
| | | TTCGGAGACCCTGTCCCTCACCTGCACTGTCTCTGGTGGCT | | | | | | | SETLSLTCTVSGGS | | | | | | |
| | | CCATCAGTAGTTACTACTGGACCTGGATCCGGCAGCCCCCA | | | | | | | ISSYYWTWIRQPPG | | | | | | |
| | | GGGAAGGGACTGGAGTGGATTGGATATACCTCTTACAGTGG | | | | | | | KGLEWIGYTSYSGS | | | | | | |
| | | GAGCACCAACTACAACCCCTCCCTCAAGAGTCGAGTCACCA | | | | | | | TNYNPSLKSRVTIS | | | | | | |
| | | TATCAGTAGACACGTCCAAGAACCAGTTCTCCCTGAAGCTG | | | | | | | VDTSKNQFSLKLTS | | | | | | |
| | | ACCTCTGTGACCGCTGCGGACACGGCCGTCTATTACTGTGC | | | | | | | VTAADTAVYYCAAD | | | | | | |
| | | GGCTGATTACTATGATAGTACTGGTTACCACTACGGTATGG | | | | | | | YYDSTGYHYGMDVW | | | | | | |
| | | ACGTCTGGGGCCAAGGGACCACGGTCACCGTCTCCTCA | | | | | | | GQGTTVTVSS | | | | | | |
| ADI-81540 | 1286 | CAGGTCCAGCTGGTGCAGTCTGGAGCAGAGGTGAAAAAGCC | | | | | | 7116 | QVQLVQSGAEVKKP | | 7467 | 3 | | 2 | |
| | | CGGGGAGTCTCTGAAGATCTCCTGTAAGGGTTCTGGATACA | | | | | | | GESLKISCKGSGYS | | | | | | |
| | | GCTTTACCCACTACTGGATCGGCTGGGTGCGCCAGATGCCC | | | | | | | FTHYWIGWVRQMPG | | | | | | |
| | | GGGAAAGGCCTGGAGTGGATGGGGATCATCTATCCTGGTGA | | | | | | | KGLEWMGIIYPGDS | | | | | | |
| | | CTCTGATACCAGATACAGCCCGTCCTTCCAAGGCCAGGTCA | | | | | | | DTRYSPSFQGQVTI | | | | | | |
| | | CCATCTCAGCCGACAAGTCCATCAGCACCGCCTACCTGCAG | | | | | | | SADKSISTAYLQWS | | | | | | |
| | | TGGAGCGGCCTGAAGGCCTCGGACACCGCCATGTATTACTG | | | | | | | GLKASDTAMYYCAR | | | | | | |
| | | TGCGAGACAGGGCACGACAGTAGGACACTTTGACTACTGGG | | | | | | | QGTTVGHFDYWGQG | | | | | | |
| | | GCCAGGGAACCCTGGTCACCGTCTCCTCA | | | | | | | TLVTVSS | | | | | | |
| ADI-81880 | 1287 | TGGCAGGTCCCTGAGACTCTCCTGTGCAGCCTCTGGATTCA | | | | | | 7117 | EVQLVESGGGLVQP | | 7468 | 2 | | 2 | |
| | | CCTTTGATGATTATGCCATGCACTGGGTCCGGCAAGCTCCA | | | | | | | GRSLRLSCAASGFT | | | | | | |
| | | GGGAAGGGCCTGGAGTGGGTCTCAGGTATTAGTTGGAACAG | | | | | | | FDDYAMHWVRQAPG | | | | | | |
| | | TGCTAGCATAGGCTATGCGGACTCTGTGAAGGGCCGATTCA | | | | | | | KGLEWVSGISWNSA | | | | | | |
| | | CCATCTCCAGAGACAACGCCAAGAACTCCCTGTATCTGCAA | | | | | | | SIGYADSVKGRFTI | | | | | | |
| | | ATGAACAGTCTGAGAGCTGAGGACACGGCCTTTTATTACTG | | | | | | | SRDNAKNSLYLQMN | | | | | | |
| | | TGCAAAAGATTTATCTATAAACTGGGGATCCCCACTCTCCG | | | | | | | SLRAEDTAFYYCAK | | | | | | |
| | | GTATGGACGTCTGGGGCCAAGGGACCACGGTCACCGTCTCC | | | | | | | DLSINWGSPLSGMD | | | | | | |
| | | TCA | | | | | | | VWGQGTTVTVSS | | | | | | |
| ADI-81568 | 1286 | CAGGTGCAGCTGGTGCAGTCTGGGGGAGGCGTGGTCCAGCC | | | | | | 7118 | QVQLVQSGGGVVQP | | 7469 | 0 | | 0 | |
| | | TGGGAGGTCCCTGAGACTCTCCTGTGCAGCGTCTGGATTCA | | | | | | | GRSLRLSCAASGFT | | | | | | |
| | | CCTTCAGTAGCTATGGCATGCACTGGGTCCGCCAGGCTCCA | | | | | | | FSSYGMHWVRQAPG | | | | | | |
| | | GGCAAGGGGCTGGAGTGGGTGGCAGTTATATGGTATGATGG | | | | | | | KGLEWVAVIWYDGS | | | | | | |
| | | AAGTAATAAATACTATGCAGACTCCGTGAAGGGCCGATTCA | | | | | | | NKYYADSVKGRFTI | | | | | | |
| | | CCATCTCCAGAGACAATTCCAAGAACACGCTGTATCTGCAA | | | | | | | SRDNSKNTLYLQMN | | | | | | |
| | | ATGAACAGCCTGAGAGCCGAGGACACGGCTGTGTATTACTG | | | | | | | SLRAEDTAVYYCAR | | | | | | |
| | | TGCGAGAGCTCGAGGCTGGGGAGTGGGAGCTACTATTGACT | | | | | | | ARGWGVGATIDYWG | | | | | | |
| | | ACTGGGGCCAGGGAACCCTGGTCACCGTCTCCTCA | | | | | | | QGTLVTVSS | | | | | | |
| ADI-81658 | 6829 | CGAGGTGCAGCTGGTGGAGTCTGGGGGAGACTTGGTACAGC | | | | | | 7119 | RGAAGGVWGRLGTA | | 7470 | 33 | | 19 | |
| | | CAGGGGGTCCCTGAGACTCTCCTGCGCAGCCTCTGGATTTA | | | | | | | RGSLRLSCAASGFT | | | | | | |
| | | CCTTTAGCAGTTTTCCCATGAGCGGGGTCCGCCAGGCTCCA | | | | | | | FSSFPMSGVRQAPG | | | | | | |
| | | GGGAAGGGGCTAGAGTGTGTTTCAATTATCACTACTAGTGG | | | | | | | KGLECVSIITTSGG | | | | | | |
| | | TGGTACCACATATCCCGACTCCGTTAAGGGCCGGTTCACCA | | | | | | | TTYPDSVKGRFTIS | | | | | | |
| | | TCTCCAAAGACACTTGTAAGAACACCCTGTATGGGCAAATG | | | | | | | KDTCKNTLYGQMNS | | | | | | |
| | | AACAGCCTGAGAGCCGAGGACACGGCCGTATATTACTGTGA | | | | | | | LRAEDTAVYYCDKS | | | | | | |
| | | CAAGTCCGAGGCGTATGGCACTGGCTGGTACGGAAAAAATG | | | | | | | EAYGTGWYGKNDYW | | | | | | |
| | | ACTACTGGGCCCAGGGAACCCTGGTCACAGTTTCATCA | | | | | | | AQGTLVTVSS | | | | | | |
| | VH | VH | | SEQ | | SEQ | | SEQ | | SEQ | | SEQ | | SEQ | |
| | CDR3 | Germ- | VH | ID | VH | ID | VH | ID | VH | ID | VH | ID | VH | ID | VH |
| Clone ID | Lineage | line | FR1 | NO: | CDR1 | NO: | FR2 | NO: | CDR2 | NO: | FR3 | NO: | CDR3 | NO: | FR4 |
| ADI-81785 | 61 | IGHV3- | EVQLV | 5487 | FTFANY | 5729 | WVRQAP | 431 | AVDSDG | 6120 | RFTISR | 6426 | ARTRHYD | 6742 | WGTGTL |
| | | NL1 | ESGGG | | YMT | | GKGLEW | | SRTYYA | | DNAKST | | GLDH | | VTVSS |
| | | | LVQTG | | | | VA | | DSVRG | | LYLQMN | | | | |
| | | | GSLRL | | | | | | | | NLNSED | | | | |
| | | | SCASS | | | | | | | | TAVYYC | | | | |
| | | | G | | | | | | | | | | | | |
| ADI-81631 | 4 | IGHV3- | LGAAG | 5488 | FTVSSN | 281 | WVRQAP | 5852 | FIYSGG | 6121 | RFPISR | 6427 | VREIYGC | 6743 | WGQGTL |
| | | 53 | AVWGR | | YMS | | GKGVEW | | STFYRD | | DKSKNT | | TSCQHGI | | VTVSS |
| | | | LGPAG | | | | VS | | SVKG | | LYLQMN | | PRDH | | |
| | | | GSLRI | | | | | | | | SLRPED | | | | |
| | | | SCAAS | | | | | | | | TAVYYC | | | | |
| | | | G | | | | | | | | | | | | |
| ADI-81841 | 19 | IGHV4- | EVQLL | 5489 | GSVGSG | 5730 | WIRHHP | 5853 | YIHYSG | 6122 | RVTISL | 6428 | ARAPCSG | 6744 | WGQGTL |
| | | 31 | ESGPG | | DFYWN | | GKGLEW | | STFYNP | | DTAKNQ | | GGCYYGS | | VTVSS |
| | | | LVKPS | | | | IG | | SLKN | | LSLKLG | | LRGAFDY | | |
| | | | QTLSL | | | | | | | | SVTAAD | | | | |
| | | | TCSVS | | | | | | | | TAIYYC | | | | |
| | | | G | | | | | | | | | | | | |
| ADI-81669 | 40 | IGHV3- | EVQLL | 5490 | FPFNTH | 5731 | WVRLAP | 5854 | VISYDG | 6123 | RFTIAR | 6429 | GRARSTF | 6745 | GGQGTT |
| | | 30 | ESGGG | | GLN | | GKGLQW | | NYKYYA | | DNSKNT | | CTSSSCY | | VTVSS |
| | | | VVQPG | | | | VA | | DSVKG | | MYLQMN | | SAAFDF | | |
| | | | RSLRL | | | | | | | | SLRPDD | | | | |
| | | | SCATS | | | | | | | | TAVYYC | | | | |
| | | | G | | | | | | | | | | | | |
| ADI-81787 | 63 | IGHV3- | EVQLV | 5350 | FTFSSY | 199 | WVRQTP | 5855 | VILDDG | 6124 | RFTISR | 6430 | ARDSSTA | 6746 | WGQGTL |
| | | 30 | QSGGG | | AMH | | DKGLEW | | RGKFYA | | DNLKNT | | DSLVSWF | | VTVSS |
| | | | VVQPG | | | | VA | | DSVKG | | LYLQMN | | DP | | |
| | | | RSLRL | | | | | | | | TVGVED | | | | |
| | | | SCAAS | | | | | | | | TAVYYC | | | | |
| | | | G | | | | | | | | | | | | |
| ADI-81788 | 64 | IGHV4- | LGAVG | 5491 | HSIISG | 5732 | WIRQLP | 5856 | YMYYSG | 6125 | RLTISI | 6431 | VRESIVV | 6747 | WGQGTT |
| | | 31 | ESGPG | | SYYSS | | GKGLEW | | STYYNP | | DTFKNQ | | APAAGTY | | VTVSS |
| | | | LVKPS | | | | IG | | SLKS | | YSLKLS | | PSYYGID | | |
| | | | QTLSL | | | | | | | | SVTAAD | | V | | |
| | | | TCTVS | | | | | | | | TAVYYC | | | | |
| | | | G | | | | | | | | | | | | |
| ADI-81566 | 30 | IGHV1- | QVQLV | 50 | DTFSNY | 5733 | WVRQAP | 433 | RIIPIF | 6126 | RVTISA | 6432 | ARGRTDD | 6748 | WGQGTL |
| | | 69 | QSGAE | | AIT | | GQGLEW | | GITNIA | | DKSTGT | | YLDS | | VTVSS |
| | | | VKKPG | | | | MG | | QKFQG | | TYMELS | | | | |
| | | | SSVKV | | | | | | | | SLRSED | | | | |
| | | | SCKAS | | | | | | | | TAVYFC | | | | |
| | | | G | | | | | | | | | | | | |
| | SEQ | | | | | | | SEQ | | | SEQ | VH | | VH Amino | |
| | ID | | | | | | | ID | | | ID | Nucleotide | | Acid | |
| Clone ID | NO: | VH DNA | | | | | | NO: | VH Protein | | NO: | Substitution | | Substitution | |
| ADI-81785 | 6830 | GAGGTGCAGCTGGTGGAATCTGGAGGAGGATTGGTGCAAAC | | | | | | 7120 | EVQLVESGGGLVQT | | 7471 | 30 | | 19 | |
| | | TGGGGGCTCTCTGAGACTCTCCTGTGCATCCTCGGGATTCA | | | | | | | GGSLRLSCASSGFT | | | | | | |
| | | CCTTCGCGAATTACTATATGACCTGGGTCCGACAGGCTCCA | | | | | | | FANYYMTWVRQAPG | | | | | | |
| | | GGCAAGGGACTGGAGTGGGTGGCCGCTGTTGATAGCGACGG | | | | | | | KGLEWVAAVDSDGS | | | | | | |
| | | CAGTAGGACATACTATGCAGACTCCGTAAGGGGCCGATTCA | | | | | | | RTYYADSVRGRFTI | | | | | | |
| | | CCATCTCCAGAGACAACGCCAAGAGCACCTTATATCTGCAA | | | | | | | SRDNAKSTLYLQMN | | | | | | |
| | | ATGAATAATCTGAATTCTGAAGACACGGCCGTGTATTACTG | | | | | | | NLNSEDTAVYYCAR | | | | | | |
| | | TGCCCGAACTAGGCACTACGACGGCCTGGATCACTGGGGCA | | | | | | | TRHYDGLDHWGTGT | | | | | | |
| | | CAGGGACCCTGGTCACCGTCTCCTCA | | | | | | | LVTVSS | | | | | | |
| ADI-81631 | 1286 | TGGGGGGTCCCTGAGAATTTCTTGTGCAGCTTCTGGGTTCA | | | | | | 7121 | LGAAGAVWGRLGPA | | 7472 | 18 | | 13 | |
| | | CCGTCAGTAGCAACTACATGAGCTGGGTCCGCCAGGCTCCA | | | | | | | GGSLRISCAASGFT | | | | | | |
| | | GGAAAGGGGGTGGAGTGGGTTTCATTTATTTATAGCGGTGG | | | | | | | VSSNYMSWVRQAPG | | | | | | |
| | | TAGCACATTCTACCGAGATTCCGTAAAGGGCCGATTCCCCA | | | | | | | KGVEWVSFIYSGGS | | | | | | |
| | | TCTCCAGAGACAAATCCAAGAACACACTGTATCTTCAAATG | | | | | | | TFYRDSVKGRFPIS | | | | | | |
| | | AACAGCCTGAGACCTGAGGACACGGCTGTGTATTACTGTGT | | | | | | | RDKSKNTLYLQMNS | | | | | | |
| | | GAGAGAAATATATGGTTGTACCAGCTGCCAACACGGGATCC | | | | | | | LRPEDTAVYYCVRE | | | | | | |
| | | CACGGGACCACTGGGGCCAGGGAACCCTGGTCACCGTTTCC | | | | | | | IYGCTSCQHGIPRD | | | | | | |
| | | TCA | | | | | | | HWGQGTLVTVSS | | | | | | |
| ADI-81841 | 1286 | GAGGTGCAGCTGTTGGAGTCGGGCCCAGGACTGGTGAAGCC | | | | | | 7122 | EVQLLESGPGLVKP | | 7473 | 17 | | 15 | |
| | | TTCACAGACCCTGTCCCTCACCTGCTCTGTCTCTGGTGGCT | | | | | | | SQTLSLTCSVSGGS | | | | | | |
| | | CCGTCGGCAGTGGTGATTTCTACTGGAACTGGATCCGCCAC | | | | | | | VGSGDFYWNWIRHH | | | | | | |
| | | CACCCGGGGAAGGGCCTGGAGTGGATTGGGTACATCCATTA | | | | | | | PGKGLEWIGYIHYS | | | | | | |
| | | CAGTGGGAGCACCTTCTACAACCCGTCCCTCAAGAATCGAG | | | | | | | GSTFYNPSLKNRVT | | | | | | |
| | | TTACCATATCACTGGACACGGCTAAGAACCAGCTCTCCCTG | | | | | | | ISLDTAKNQLSLKL | | | | | | |
| | | AAGCTGGGCTCTGTGACTGCCGCGGACACGGCCATATATTA | | | | | | | GSVTAADTAIYYCA | | | | | | |
| | | CTGTGCGCGAGCCCCCTGTAGTGGTGGTGGCTGCTATTACG | | | | | | | RAPCSGGGCYYGSL | | | | | | |
| | | GCTCTTTGCGCGGGGCTTTTGACTACTGGGGCCAGGGAACC | | | | | | | RGAFDYWGQGTLVT | | | | | | |
| | | CTGGTCACCGTCTCCTCA | | | | | | | VSS | | | | | | |
| ADI-81669 | 6831 | GAGGTGCAGCTGTTGGAGTCTGGGGGAGGCGTGGTCCAGCC | | | | | | 7123 | EVQLLESGGGVVQP | | 7474 | 15 | | 15 | |
| | | TGGGAGGTCCCTGAGACTCTCCTGTGCAACCTCTGGATTCC | | | | | | | GRSLRLSCATSGFP | | | | | | |
| | | CCTTCAATACCCATGGCTTGAACTGGGTCCGCCTGGCTCCA | | | | | | | FNTHGLNWVRLAPG | | | | | | |
| | | GGCAAGGGGCTGCAGTGGGTGGCAGTTATATCCTATGATGG | | | | | | | KGLQWVAVISYDGN | | | | | | |
| | | AAATTATAAATACTATGCGGACTCCGTGAAGGGCCGATTCA | | | | | | | YKYYADSVKGRFTI | | | | | | |
| | | CCATCGCCAGAGACAATTCCAAGAACACGATGTATCTACAA | | | | | | | ARDNSKNTMYLQMN | | | | | | |
| | | ATGAACAGCCTGAGACCTGACGACACGGCTGTGTATTACTG | | | | | | | SLRPDDTAVYYCGR | | | | | | |
| | | TGGGAGAGCACGATCGACTTTTTGTACTAGTTCCAGCTGCT | | | | | | | ARSTFCTSSSCYSA | | | | | | |
| | | ACTCTGCTGCTTTTGATTTCGGGGGCCAAGGGACCACGGTC | | | | | | | AFDFGGQGTTVTVS | | | | | | |
| | | ACCGTCTCCTCA | | | | | | | S | | | | | | |
| ADI-81787 | 1286 | GAGGTGCAGCTGGTGCAGTCTGGGGGAGGCGTGGTCCAGCC | | | | | | 7124 | EVQLVQSGGGVVQP | | 7475 | 15 | | 12 | |
| | | TGGGAGGTCCCTGAGACTCTCCTGTGCAGCCTCTGGATTTA | | | | | | | GRSLRLSCAASGFT | | | | | | |
| | | CGTTCAGTAGTTATGCTATGCACTGGGTCCGCCAGACTCCA | | | | | | | FSSYAMHWVRQTPD | | | | | | |
| | | GACAAGGGGCTGGAGTGGGTGGCGGTTATACTAGATGATGG | | | | | | | KGLEWVAVILDDGR | | | | | | |
| | | AAGAGGTAAATTCTACGCAGACTCCGTGAAGGGCCGATTCA | | | | | | | GKFYADSVKGRFTI | | | | | | |
| | | CCATCTCCAGAGACAATCTCAAGAACACACTATATCTGCAA | | | | | | | SRDNLKNTLYLQMN | | | | | | |
| | | ATGAACACCGTGGGAGTTGAGGACACGGCTGTGTATTACTG | | | | | | | TVGVEDTAVYYCAR | | | | | | |
| | | TGCGAGAGACTCCAGCACCGCGGACTCTCTAGTTAGCTGGT | | | | | | | DSSTADSLVSWFDP | | | | | | |
| | | TCGACCCCTGGGGCCAGGGAACCCTGGTCACCGTCTCCTCA | | | | | | | WGQGTLVTVSS | | | | | | |
| ADI-81788 | 1287 | TTAGGTGCAGTTGGGGAGTCGGGCCCAGGGCTGGTGAAGCC | | | | | | 7125 | LGAVGESGPGLVKP | | 7476 | 15 | | 11 | |
| | | TTCACAGACCCTGTCCCTCACTTGCACTGTGTCTGGTCATT | | | | | | | SQTLSLTCTVSGHS | | | | | | |
| | | CCATTATCAGTGGTTCTTACTACAGTAGTTGGATCCGCCAG | | | | | | | IISGSYYSSWIRQL | | | | | | |
| | | CTCCCAGGAAAGGGCCTGGAGTGGATCGGGTACATGTATTA | | | | | | | PGKGLEWIGYMYYS | | | | | | |
| | | CAGTGGTAGCACGTATTACAACCCGTCCCTCAAGAGTCGAC | | | | | | | GSTYYNPSLKSRLT | | | | | | |
| | | TTACCATATCAATAGACACGTTTAAGAACCAGTACTCCCTG | | | | | | | ISIDTFKNQYSLKL | | | | | | |
| | | AAGCTGAGCTCTGTTACTGCCGCGGACACGGCGGTTTATTA | | | | | | | SSVTAADTAVYYCV | | | | | | |
| | | CTGTGTGAGAGAGTCTATTGTAGTAGCACCAGCAGCCGGGA | | | | | | | RESIVVAPAAGTYP | | | | | | |
| | | CGTACCCCTCCTACTACGGTATTGACGTCTGGGGCCAAGGG | | | | | | | SYYGIDVWGQGTTV | | | | | | |
| | | ACCACGGTCACCGTCTCCTCA | | | | | | | TVSS | | | | | | |
| ADI-81566 | 1286 | CAGGTCCAGCTGGTGCAGTCTGGGGCTGAGGTGAAGAAGCC | | | | | | 7126 | QVQLVQSGAEVKKP | | 7477 | 14 | | 10 | |
| | | TGGGTCCTCGGTGAAGGTCTCCTGCAAGGCTTCTGGAGACA | | | | | | | GSSVKVSCKASGDT | | | | | | |
| | | CCTTCAGTAATTATGCTATTACCTGGGTGCGACAGGCCCCT | | | | | | | FSNYAITWVRQAPG | | | | | | |
| | | GGACAAGGACTTGAGTGGATGGGAAGGATCATCCCTATTTT | | | | | | | QGLEWMGRIIPIFG | | | | | | |
| | | TGGTATAACAAATATCGCACAGAAGTTCCAGGGCAGAGTCA | | | | | | | ITNIAQKFQGRVTI | | | | | | |
| | | CCATTAGCGCGGACAAATCCACGGGAACAACCTACATGGAA | | | | | | | SADKSTGTTYMELS | | | | | | |
| | | CTGAGCAGCCTCAGATCTGAGGACACGGCCGTGTATTTTTG | | | | | | | SLRSEDTAVYFCAR | | | | | | |
| | | TGCGAGAGGTAGAACCGACGACTACCTTGACTCCTGGGGCC | | | | | | | GRTDDYLDSWGQGT | | | | | | |
| | | AGGGAACCCTGGTCACCGTCTCCTCA | | | | | | | LVTVSS | | | | | | |
| | VH | VH | | SEQ | | SEQ | | SEQ | | SEQ | | SEQ | | SEQ | |
| | CDR3 | Germ- | VH | ID | VH | ID | VH | ID | VH | ID | VH | ID | VH | ID | VH |
| Clone ID | Lineage | line | FR1 | NO: | CDR1 | NO: | FR2 | NO: | CDR2 | NO: | FR3 | NO: | CDR3 | NO: | FR4 |
| ADI-81662 | 34 | IGHV3- | EVQLV | 5332 | IIVSRN | 5734 | WVRQTP | 448 | VLYSGG | 607 | RFTISR | 6433 | ARDFHEG | 6749 | WGQGTT |
| | | 66 | ESGGG | | YMN | | GKGLEW | | TTFYAD | | DTSKNT | | AFDI | | VTVSS |
| | | | LVQPG | | | | VS | | SVKG | | LYLQMN | | | | |
| | | | GSLRL | | | | | | | | SLRLED | | | | |
| | | | SCAAS | | | | | | | | TAVYYC | | | | |
| | | | G | | | | | | | | | | | | |
| ADI-81694 | 64 | IGHV4- | PVQLL | 5492 | GSIGTS | 5735 | WIRQPP | 5857 | NIFKTG | 6127 | RVTISV | 6434 | ARAYTHS | 6750 | WGKGTT |
| | | 59 | ESGPG | | YWS | | GNGLEW | | RTNYNP | | DTSKKQ | | DFWSGYS | | VTVSS |
| | | | LVKPS | | | | IG | | ISLKS | | FSLRLS | | DYYDYYM | | |
| | | | ETLSL | | | | | | | | SVTAAD | | DV | | |
| | | | TCTVS | | | | | | | | TAVYFC | | | | |
| | | | G | | | | | | | | | | | | |
| ADI-81674 | 45 | IGHV4- | EVQLL | 5335 | DSISGY | 5707 | WLRQPP | 5858 | YIYDNG | 6128 | RVTISL | 6435 | ARGLTTG | 6751 | WGQGTT |
| | | 59 | ESGPG | | YWS | | GKGLEW | | NTNYNP | | DTSKNQ | | DAFDL | | VTVSS |
| | | | LVKPS | | | | VG | | SLKS | | FSLILS | | | | |
| | | | ETLSL | | | | | | | | AVTAAD | | | | |
| | | | TCTVS | | | | | | | | TAVFYC | | | | |
| | | | G | | | | | | | | | | | | |
| ADI-81675 | 45 | IGHV4- | EVQLL | 5335 | DSISGY | 5707 | WLRQPP | 5858 | YIYDNG | 6128 | RVTISL | 6435 | ARGLTTG | 6751 | WGQGTM |
| | | 59 | ESGPG | | YWS | | GKGLEW | | NTNYNP | | DTSKNQ | | DAFDL | | VTVSS |
| | | | LVKPS | | | | VG | | SLKS | | FSLILS | | | | |
| | | | ETLSL | | | | | | | | AVTAAD | | | | |
| | | | TCTVS | | | | | | | | TAVFYC | | | | |
| | | | G | | | | | | | | | | | | |
| ADI-81878 | 55 | IGHV3- | EVQLL | 5355 | FTFTNC | 5736 | WVRQAP | 437 | TIGDSG | 6129 | RFTISR | 6436 | AKNLDTP | 6752 | WGQGTT |
| | | 23 | ESGGG | | AMG | | GKGLEW | | RSTYYA | | DNSKNT | | NYDADDY | | VTVSS |
| | | | LVQPG | | | | VS | | DSVKG | | LHLRMN | | YYYYGMD | | |
| | | | GSLRL | | | | | | | | SLRADD | | V | | |
| | | | SCAAS | | | | | | | | TAAYYC | | | | |
| | | | G | | | | | | | | | | | | |
| ADI-81619 | 76 | IGHV5- | QVQLV | 5493 | YSFTSH | 5737 | WVRQMP | 476 | AVFPGD | 6130 | QVTISA | 6437 | ARLGYSY | 6753 | WGQGTL |
| | | 51 | QSGAE | | WIG | | GKGLEW | | SDTRYS | | DKSIST | | DTGDY | | VTVSS |
| | | | VKEPG | | | | MG | | PSFQG | | AYLHWS | | | | |
| | | | ESLRI | | | | | | | | GLKTSD | | | | |
| | | | SCKGS | | | | | | | | TAMYYC | | | | |
| | | | G | | | | | | | | | | | | |
| ADI-81744 | 20 | IGHV1- | EVQLL | 5494 | YTFTNH | 5738 | WVRQAP | 433 | IINPDG | 6131 | RVTMTS | 6438 | ARDFAFI | 6754 | WGQGTL |
| | | 46 | ESGAE | | YMH | | GQGLEW | | GSRTYA | | DTSTST | | PAAGPFE | | VTVSS |
| | | | VKKPG | | | | MG | | QKFQG | | VYMELS | | Y | | |
| | | | ASVKV | | | | | | | | SVRYED | | | | |
| | | | SCKTS | | | | | | | | TAVYYC | | | | |
| | | | G | | | | | | | | | | | | |
| ADI-81633 | 6 | IGHV3- | EVQLV | 5332 | FTFSAY | 5739 | WVRQAP | 5859 | NIKQDG | 606 | RFTISR | 6439 | ARVFWLR | 6755 | WGQGTL |
| | | 7 | ESGGG | | WMT | | GKGLEW | | SEKYYV | | DNAKNA | | GGVDF | | VTVSS |
| | | | LVQPG | | | | VP | | DSVKG | | LYLQIN | | | | |
| | | | GSLRL | | | | | | | | SLRAED | | | | |
| | | | SCAAS | | | | | | | | TAVYTC | | | | |
| | | | G | | | | | | | | | | | | |
| | SEQ | | | | | | | SEQ | | | SEQ | VH | | VH Amino | |
| | ID | | | | | | | ID | | | ID | Nucleotide | | Acid | |
| Clone ID | NO: | VH DNA | | | | | | NO: | VH Protein | | NO: | Substitution | | Substitution | |
| ADI-81662 | 1287 | GAGGTGCAGCTGGTGGAGTCTGGGGGAGGCTTGGTCCAGCC | | | | | | 7127 | EVQLVESGGGLVQP | | 7478 | 13 | | 10 | |
| | | GGGGGGGTCCCTGAGACTCTCCTGTGCAGCCTCTGGAATCA | | | | | | | GGSLRLSCAASGII | | | | | | |
| | | TCGTCAGTAGGAACTACATGAACTGGGTCCGCCAGACTCCG | | | | | | | VSRNYMNWVRQTPG | | | | | | |
| | | GGGAAGGGGCTGGAGTGGGTCTCAGTCCTTTATAGCGGTGG | | | | | | | KGLEWVSVLYSGGT | | | | | | |
| | | GACAACATTCTACGCAGACTCCGTGAAGGGCCGATTCACCA | | | | | | | TFYADSVKGRFTIS | | | | | | |
| | | TCTCCAGAGACACTTCCAAGAACACTCTGTATCTTCAAATG | | | | | | | RDTSKNTLYLQMNS | | | | | | |
| | | AACAGCCTGAGACTTGAGGACACGGCTGTCTATTACTGTGC | | | | | | | LRLEDTAVYYCARD | | | | | | |
| | | GAGAGATTTCCACGAAGGTGCTTTTGATATCTGGGGCCAAG | | | | | | | FHEGAFDIWGQGTT | | | | | | |
| | | GGACCACGGTCACCGTCTCCTCA | | | | | | | VTVSS | | | | | | |
| ADI-81694 | 1291 | CCCGTGCAGCTGTTGGAGTCGGGCCCAGGACTGGTGAAGCC | | | | | | 7128 | PVQLLESGPGLVKP | | 7479 | 13 | | 12 | |
| | | TTCGGAGACCCTGTCCCTCACCTGCACTGTCTCTGGTGGCT | | | | | | | SETLSLTCTVSGGS | | | | | | |
| | | CCATCGGTACTTCCTACTGGAGCTGGATCCGGCAGCCCCCA | | | | | | | IGTSYWSWIRQPPG | | | | | | |
| | | GGGAACGGACTGGAGTGGATTGGGAATATCTTTAAAACTGG | | | | | | | NGLEWIGNIFKTGR | | | | | | |
| | | AAGAACCAACTACAACCCCTCCCTCAAGAGTCGCGTCACCA | | | | | | | TNYNPSLKSRVTIS | | | | | | |
| | | TATCAGTAGACACGTCCAAGAAACAATTCTCCCTGAGGCTG | | | | | | | VDTSKKQFSLRLSS | | | | | | |
| | | AGCTCTGTGACCGCTGCGGACACGGCCGTGTATTTCTGTGC | | | | | | | VTAADTAVYFCARA | | | | | | |
| | | GAGGGCTTATACGCATTCCGATTTTTGGAGTGGATATTCTG | | | | | | | YTHSDFWSGYSDYY | | | | | | |
| | | ACTACTACGACTACTACATGGACGTCTGGGGCAAAGGGACC | | | | | | | DYYMDVWGKGTTVT | | | | | | |
| | | ACGGTCACCGTCTCCTCA | | | | | | | VSS | | | | | | |
| ADI-81674 | 1287 | GAGGTGCAGCTGTTGGAGTCGGGCCCAGGACTGGTGAAGCC | | | | | | 7129 | EVQLLESGPGLVKP | | 7480 | 12 | | 11 | |
| | | TTCGGAGACCCTGTCCCTCACCTGCACTGTCTCTGGTGACT | | | | | | | SETLSLTCTVSGDS | | | | | | |
| | | CCATCAGTGGTTACTACTGGAGCTGGCTCCGGCAGCCCCCA | | | | | | | ISGYYWSWLRQPPG | | | | | | |
| | | GGGAAGGGACTGGAGTGGGTTGGCTATATCTATGACAATGG | | | | | | | KGLEWVGYIYDNGN | | | | | | |
| | | GAACACCAACTACAACCCCTCCCTCAAGAGTCGAGTCACCA | | | | | | | TNYNPSLKSRVTIS | | | | | | |
| | | TATCACTAGACACGTCCAAGAACCAGTTCTCCCTGATACTG | | | | | | | LDTSKNQFSLILSA | | | | | | |
| | | AGCGCTGTGACCGCTGCGGACACGGCCGTCTTTTACTGTGC | | | | | | | VTAADTAVFYCARG | | | | | | |
| | | GCGAGGACTAACTACGGGTGATGCTTTTGATCTCTGGGGCC | | | | | | | LTTGDAFDLWGQGT | | | | | | |
| | | AAGGGACCACGGTCACCGTCTCCTCA | | | | | | | TVTVSS | | | | | | |
| ADI-81675 | 1299 | GAGGTGCAGCTGTTGGAGTCGGGCCCAGGACTGGTGAAGCC | | | | | | 7130 | EVQLLESGPGLVKP | | 7481 | 12 | | 11 | |
| | | TTCGGAGACCCTGTCCCTCACCTGCACTGTCTCTGGTGACT | | | | | | | SETLSLTCTVSGDS | | | | | | |
| | | CCATCAGTGGTTACTACTGGAGCTGGCTCCGGCAGCCCCCA | | | | | | | ISGYYWSWLRQPPG | | | | | | |
| | | GGGAAGGGACTGGAGTGGGTTGGCTATATCTATGACAATGG | | | | | | | KGLEWVGYIYDNGN | | | | | | |
| | | GAACACCAACTACAACCCCTCCCTCAAGAGTCGAGTCACCA | | | | | | | TNYNPSLKSRVTIS | | | | | | |
| | | TATCACTAGACACGTCCAAGAACCAGTTCTCCCTGATACTG | | | | | | | LDTSKNQFSLILSA | | | | | | |
| | | AGCGCTGTGACCGCTGCGGACACGGCCGTCTTTTACTGTGC | | | | | | | VTAADTAVFYCARG | | | | | | |
| | | GCGAGGACTAACTACGGGTGATGCTTTTGATCTCTGGGGCC | | | | | | | LTTGDAFDLWGQGT | | | | | | |
| | | AAGGGACAATGGTCACCGTCTCTTCA | | | | | | | MVTVSS | | | | | | |
| ADI-81878 | 1287 | GAGGTGCAGCTGTTGGAGTCTGGGGGAGGCTTGGTACAGCC | | | | | | 7131 | EVQLLESGGGLVQP | | 7482 | 12 | | 12 | |
| | | TGGGGGGTCCCTGAGACTCTCCTGTGCAGCCTCTGGATTCA | | | | | | | GGSLRLSCAASGFT | | | | | | |
| | | CCTTTACCAACTGTGCCATGGGCTGGGTCCGCCAGGCTCCA | | | | | | | FTNCAMGWVRQAPG | | | | | | |
| | | GGGAAGGGGCTGGAGTGGGTCTCAACTATTGGTGATAGTGG | | | | | | | KGLEWVSTIGDSGR | | | | | | |
| | | TCGTAGCACATACTACGCAGACTCCGTGAAGGGCCGGTTCA | | | | | | | STYYADSVKGRFTI | | | | | | |
| | | CCATCTCCAGAGACAATTCCAAGAACACGCTGCATCTGCGA | | | | | | | SRDNSKNTLHLRMN | | | | | | |
| | | ATGAACAGCCTGAGAGCCGACGACACGGCCGCATATTACTG | | | | | | | SLRADDTAAYYCAK | | | | | | |
| | | TGCGAAAAACCTCGACACCCCGAACTACGACGCCGACGATT | | | | | | | NLDTPNYDADDYYY | | | | | | |
| | | ACTACTACTACTACGGTATGGACGTCTGGGGCCAAGGGACC | | | | | | | YYGMDVWGQGTTVT | | | | | | |
| | | ACGGTCACCGTCTCCTCA | | | | | | | VSS | | | | | | |
| ADI-81619 | 1286 | CAGGTCCAGCTGGTGCAGTCTGGAGCAGAGGTGAAAGAGCC | | | | | | 7132 | QVQLVQSGAEVKEP | | 7483 | 10 | | 9 | |
| | | GGGGGAGTCTCTGAGGATCTCCTGTAAGGGTTCTGGATACA | | | | | | | GESLRISCKGSGYS | | | | | | |
| | | GCTTTACCAGCCACTGGATCGGCTGGGTGCGCCAGATGCCC | | | | | | | FTSHWIGWVRQMPG | | | | | | |
| | | GGGAAAGGCCTGGAGTGGATGGGGGCCGTCTTTCCTGGTGA | | | | | | | KGLEWMGAVFPGDS | | | | | | |
| | | CTCTGATACCAGATACAGCCCGTCCTTCCAAGGCCAGGTCA | | | | | | | DTRYSPSFQGQVTI | | | | | | |
| | | CCATCTCAGCCGACAAGTCCATCAGCACCGCCTACCTACAC | | | | | | | SADKSISTAYLHWS | | | | | | |
| | | TGGAGCGGCCTGAAGACCTCGGACACCGCCATGTATTACTG | | | | | | | GLKTSDTAMYYCAR | | | | | | |
| | | TGCGAGACTGGGGTACAGCTATGACACGGGTGACTACTGGG | | | | | | | LGYSYDTGDYWGQG | | | | | | |
| | | GCCAGGGAACCCTGGTCACCGTCTCCTCA | | | | | | | TLVTVSS | | | | | | |
| ADI-81744 | 1286 | GAGGTGCAGCTGTTGGAGTCTGGGGCTGAGGTGAAGAAGCC | | | | | | 7133 | EVQLLESGAEVKKP | | 7484 | 10 | | 9 | |
| | | TGGGGCCTCAGTGAAGGTTTCCTGCAAGACATCTGGATACA | | | | | | | GASVKVSCKTSGYT | | | | | | |
| | | CCTTCACCAACCACTATATGCACTGGGTGCGCCAGGCCCCT | | | | | | | FTNHYMHWVRQAPG | | | | | | |
| | | GGACAAGGGCTTGAGTGGATGGGAATAATCAACCCTGATGG | | | | | | | QGLEWMGIINPDGG | | | | | | |
| | | TGGTAGCAGAACCTACGCACAGAAGTTCCAGGGCAGAGTCA | | | | | | | SRTYAQKFQGRVTM | | | | | | |
| | | CCATGACCAGCGACACGTCCACGAGCACAGTGTACATGGAG | | | | | | | TSDTSTSTVYMELS | | | | | | |
| | | TTGAGCAGCGTGAGATATGAGGACACGGCCGTGTATTACTG | | | | | | | SVRYEDTAVYYCAR | | | | | | |
| | | TGCGAGAGATTTTGCCTTTATACCAGCAGCTGGTCCGTTTG | | | | | | | DFAFIPAAGPFEYW | | | | | | |
| | | AATATTGGGGCCAGGGAACCCTGGTCACCGTCTCCTCA | | | | | | | GQGTLVTVSS | | | | | | |
| ADI-81633 | 1286 | GAGGTGCAGCTGGTGGAGTCTGGGGGAGGCTTGGTCCAGCC | | | | | | 7134 | EVQLVESGGGLVQP | | 7485 | 9 | | 6 | |
| | | TGGAGGGTCCCTGAGACTCTCTTGTGCAGCCTCTGGATTCA | | | | | | | GGSLRLSCAASGFT | | | | | | |
| | | CCTTTAGTGCCTATTGGATGACCTGGGTCCGCCAGGCTCCA | | | | | | | FSAYWMTWVRQAPG | | | | | | |
| | | GGGAAGGGGCTGGAGTGGGTGCCCAACATAAAGCAAGATGG | | | | | | | KGLEWVPNIKQDGS | | | | | | |
| | | AAGTGAGAAATACTATGTGGACTCTGTGAAGGGCCGATTCA | | | | | | | EKYYVDSVKGRFTI | | | | | | |
| | | CCATCTCCAGAGACAACGCCAAGAACGCACTGTATCTGCAA | | | | | | | SRDNAKNALYLQIN | | | | | | |
| | | ATCAACAGCCTGAGAGCCGAGGACACGGCCGTGTATACTTG | | | | | | | SLRAEDTAVYTCAR | | | | | | |
| | | TGCGCGAGTTTTCTGGCTGCGCGGCGGGGTTGACTTCTGGG | | | | | | | VFWLRGGVDFWGQG | | | | | | |
| | | GCCAGGGAACCCTGGTCACCGTCTCCTCA | | | | | | | TLVTVSS | | | | | | |
| | VH | VH | | SEQ | | SEQ | | SEQ | | SEQ | | SEQ | | SEQ | |
| | CDR3 | Germ- | VH | ID | VH | ID | VH | ID | VH | ID | VH | ID | VH | ID | VH |
| Clone ID | Lineage | line | FR1 | NO: | CDR1 | NO: | FR2 | NO: | CDR2 | NO: | FR3 | NO: | CDR3 | NO: | FR4 |
| ADI-81700 | 70 | IGHV3- | EVQLV | 5495 | IIVSRN | 5740 | WVRQAP | 437 | VIFPGG | 6132 | RFTISR | 876 | AREDNNN | 1123 | WGQGTT |
| | | 53 | ETGGG | | YMS | | GKGLEW | | STYYAD | | DDSKNT | | AFDI | | VTVSS |
| | | | LIQPG | | | | VS | | SVKG | | LYLQMN | | | | |
| | | | ESLRL | | | | | | | | SLRAED | | | | |
| | | | SCAAS | | | | | | | | TAVYYC | | | | |
| | | | E | | | | | | | | | | | | |
| ADI-81797 | 73 | IGHV3- | QVQLL | 74 | FTFSNY | 5741 | WVRQSP | 5860 | AISGSG | 6133 | RFTISR | 6440 | AKQSVNR | 6756 | WGQGTL |
| | | 23 | ESGGG | | AMS | | GKGLEW | | DDTYYA | | DNSKNT | | NPGWDFL | | VTVSS |
| | | | LVQPG | | | | VS | | DSVKG | | LYLQMS | | VSTTEDY | | |
| | | | GSLRL | | | | | | | | LLRAED | | FDS | | |
| | | | SCAAS | | | | | | | | TAVYFC | | | | |
| | | | G | | | | | | | | | | | | |
| ADI-81854 | 32 | IGHV1- | EVQLV | 5385 | YTFSSF | 5742 | WVRQAP | 433 | WISTYE | 6134 | RVTMTT | 993 | ARVFSYY | 6757 | WGQGTL |
| | | 18 | ESGAE | | GVS | | GQGLEW | | GNTNYA | | DTSTST | | DSSGWGT | | VTVSS |
| | | | VKKPG | | | | MG | | QNFQG | | AYMELR | | AYYFDS | | |
| | | | ASVKV | | | | | | | | SLRSDD | | | | |
| | | | SCKAS | | | | | | | | TAVYYC | | | | |
| | | | G | | | | | | | | | | | | |
| ADI-81866 | 44 | IGHV1- | EVQLL | 5496 | GSFSNY | 5743 | WVRQAP | 433 | GIIPMF | 6135 | RVRIIA | 6441 | ARDEATI | 6758 | WGQGTT |
| | | 69 | QSGAE | | GIS | | GQGLEW | | GAAKYA | | DESTST | | TVVQGVA | | VTVSS |
| | | | VKKPG | | | | MG | | QKFQG | | AYMELS | | TRHGYDI | | |
| | | | SSVKV | | | | | | | | SLRSED | | | | |
| | | | SCKAS | | | | | | | | TAVYYC | | | | |
| | | | G | | | | | | | | | | | | |
| ADI-81903 | 77 | IGHV3- | EVQLL | 5324 | FTFDDY | 214 | WVRQAP | 437 | GITWNS | 6136 | RFTISR | 6442 | AKDTGSK | 6759 | WGQGTT |
| | | 9 | ESGGG | | AMH | | GKGLEW | | GTIGYA | | DNSKNS | | DYYYYGM | | VTVSS |
| | | | LVQPG | | | | VS | | DSAKG | | LYLHIS | | DV | | |
| | | | RSLRL | | | | | | | | SLRTED | | | | |
| | | | SCAAS | | | | | | | | TALYYC | | | | |
| | | | G | | | | | | | | | | | | |
| ADI-81703 | 73 | IGHV1- | QVQLV | 5497 | YRFNIY | 5744 | WVRQAP | 433 | WSSAYN | 6137 | RVTMTT | 6443 | ARALGEG | 6760 | WGQGTL |
| | | 18 | ESGAE | | GIT | | GQGLEW | | GNTNYA | | DTSTST | | SGSVFGY | | VTVSS |
| | | | VKKPG | | | | MG | | QKLQG | | AYMELR | | | | |
| | | | ASVKV | | | | | | | | SLTSDD | | | | |
| | | | SCKAS | | | | | | | | TAVYYC | | | | |
| | | | G | | | | | | | | | | | | |
| ADI-81739 | 16 | IGHV3- | EVQLL | 5324 | FTFDDY | 214 | WVRQAP | 437 | GISWNG | 6138 | RFIISR | 6444 | AKSSSVG | 6761 | WGQGAL |
| | | 9 | ESGGG | | AMH | | GKGLEW | | GIINYA | | DNAKNS | | DEGEFSS | | VTVSS |
| | | | LVQPG | | | | VS | | DSVKG | | LYLQMI | | FDY | | |
| | | | RSLRL | | | | | | | | RLRAED | | | | |
| | | | SCAAS | | | | | | | | TALYYC | | | | |
| | | | G | | | | | | | | | | | | |
| | SEQ | | | | | | | SEQ | | | SEQ | VH | | VH Amino | |
| | ID | | | | | | | ID | | | ID | Nucleotide | | Acid | |
| Clone ID | NO: | VH DNA | | | | | | NO: | VH Protein | | NO: | Substitution | | Substitution | |
| ADI-81700 | 1287 | GAGGTGCAGCTGGTGGAGACTGGAGGAGGCTTGATCCAGCC | | | | | | 7135 | EVQLVETGGGLIQP | | 7486 | 9 | | 8 | |
| | | GGGGGAGTCCCTGAGACTCTCCTGTGCAGCCTCTGAGATCA | | | | | | | GESLRLSCAASEII | | | | | | |
| | | TCGTCAGTAGGAACTACATGAGCTGGGTCCGCCAGGCTCCA | | | | | | | VSRNYMSWVRQAPG | | | | | | |
| | | GGGAAGGGGCTGGAGTGGGTCTCAGTTATTTTTCCCGGTGG | | | | | | | KGLEWVSVIFPGGS | | | | | | |
| | | GAGCACTTACTACGCAGACTCCGTGAAGGGCCGATTCACCA | | | | | | | TYYADSVKGRFTIS | | | | | | |
| | | TCTCCCGAGACGATTCCAAGAACACGCTGTATCTTCAAATG | | | | | | | RDDSKNTLYLQMNS | | | | | | |
| | | AACAGCCTGAGAGCCGAGGACACGGCCGTCTATTACTGTGC | | | | | | | LRAEDTAVYYCARE | | | | | | |
| | | GAGAGAAGACAATAATAATGCTTTTGATATTTGGGGGCAAG | | | | | | | DNNNAFDIWGQGTT | | | | | | |
| | | GGACCACGGTCACCGTCTCCTCA | | | | | | | VTVSS | | | | | | |
| ADI-81797 | 1286 | CAGGTGCAGCTGTTGGAGTCTGGGGGAGGCTTGGTACAGCC | | | | | | 7136 | QVQLLESGGGLVQP | | 7487 | 9 | | 7 | |
| | | TGGGGGGTCCCTGAGACTCTCCTGTGCAGCCTCTGGATTCA | | | | | | | GGSLRLSCAASGFT | | | | | | |
| | | CCTTTAGCAACTATGCCATGAGTTGGGTCCGCCAGTCTCCA | | | | | | | FSNYAMSWVRQSPG | | | | | | |
| | | GGGAAGGGGCTGGAGTGGGTCTCAGCTATTAGTGGTAGTGG | | | | | | | KGLEWVSAISGSGD | | | | | | |
| | | TGATGACACATACTACGCAGACTCCGTGAAGGGCCGGTTCA | | | | | | | DTYYADSVKGRFTI | | | | | | |
| | | CCATCTCCAGAGACAATTCCAAGAACACGCTGTATCTGCAA | | | | | | | SRDNSKNTLYLQMS | | | | | | |
| | | ATGAGCCTCCTGAGAGCCGAGGACACGGCCGTATATTTCTG | | | | | | | LLRAEDTAVYFCAK | | | | | | |
| | | TGCGAAACAGTCGGTTAACCGAAACCCAGGATGGGACTTCC | | | | | | | QSVNRNPGWDFLVS | | | | | | |
| | | TAGTGTCTACCACTGAGGACTACTTTGACTCTTGGGGCCAG | | | | | | | TTEDYFDSWGQGTL | | | | | | |
| | | GGAACCCTGGTCACCGTCTCCTCA | | | | | | | VTVSS | | | | | | |
| ADI-81854 | 1286 | GAGGTGCAGCTGGTGGAGTCTGGAGCTGAGGTGAAGAAGCC | | | | | | 7137 | EVQLVESGAEVKKP | | 7488 | 8 | | 7 | |
| | | TGGGGCCTCAGTGAAGGTCTCCTGCAAGGCTTCTGGTTACA | | | | | | | GASVKVSCKASGYT | | | | | | |
| | | CCTTTTCCAGTTTTGGTGTCAGCTGGGTGCGACAGGCCCCT | | | | | | | FSSFGVSWVRQAPG | | | | | | |
| | | GGACAAGGGCTTGAGTGGATGGGGTGGATCAGTACTTACGA | | | | | | | QGLEWMGWISTYEG | | | | | | |
| | | AGGTAACACAAACTATGCACAGAACTTCCAGGGCAGAGTCA | | | | | | | NTNYAQNFQGRVTM | | | | | | |
| | | CCATGACCACGGACACATCCACGAGCACAGCCTACATGGAG | | | | | | | TTDTSTSTAYMELR | | | | | | |
| | | CTGAGGAGCCTGAGATCTGACGACACGGCCGTCTATTACTG | | | | | | | SLRSDDTAVYYCAR | | | | | | |
| | | TGCGAGAGTCTTCAGTTACTATGATAGTAGTGGTTGGGGGA | | | | | | | VFSYYDSSGWGTAY | | | | | | |
| | | CTGCTTACTACTTTGACTCCTGGGGCCAGGGAACCCTGGTC | | | | | | | YFDSWGQGTLVTVS | | | | | | |
| | | ACCGTCTCCTCA | | | | | | | S | | | | | | |
| ADI-81866 | 1287 | GAGGTGCAGCTGTTGCAGTCTGGGGCTGAGGTGAAGAAGCC | | | | | | 7138 | EVQLLQSGAEVKKP | | 7489 | 8 | | 8 | |
| | | TGGGTCCTCGGTGAAGGTCTCCTGCAAGGCTTCTGGAGGCA | | | | | | | GSSVKVSCKASGGS | | | | | | |
| | | GCTTCAGTAACTATGGTATCAGCTGGGTGCGACAGGCCCCT | | | | | | | FSNYGISWVRQAPG | | | | | | |
| | | GGACAAGGGCTTGAGTGGATGGGAGGGATCATCCCTATGTT | | | | | | | QGLEWMGGIIPMFG | | | | | | |
| | | TGGTGCAGCAAAATACGCACAGAAGTTCCAGGGCAGAGTCA | | | | | | | AAKYAQKFQGRVRI | | | | | | |
| | | GGATTATCGCGGACGAATCCACGAGCACAGCCTATATGGAG | | | | | | | IADESTSTAYMELS | | | | | | |
| | | CTGAGCAGCCTGAGATCTGAGGACACGGCCGTATATTACTG | | | | | | | SLRSEDTAVYYCAR | | | | | | |
| | | TGCGAGAGACGAAGCTACGATAACAGTGGTTCAGGGGGTCG | | | | | | | DEATITVVQGVATR | | | | | | |
| | | CCACCCGTCATGGTTATGATATCTGGGGCCAAGGGACCACG | | | | | | | HGYDIWGQGTTVTV | | | | | | |
| | | GTCACCGTCTCCTCA | | | | | | | SS | | | | | | |
| ADI-81903 | 1287 | GAGGTGCAGCTGTTGGAGTCTGGGGGAGGCTTGGTACAGCC | | | | | | 7139 | EVQLLESGGGLVQP | | 7490 | 8 | | 8 | |
| | | TGGCAGGTCCCTGAGACTCTCCTGTGCAGCCTCTGGATTCA | | | | | | | GRSLRLSCAASGFT | | | | | | |
| | | CCTTCGATGATTATGCCATGCACTGGGTCCGGCAAGCTCCA | | | | | | | FDDYAMHWVRQAPG | | | | | | |
| | | GGGAAGGGCCTGGAGTGGGTCTCAGGTATTACTTGGAATAG | | | | | | | KGLEWVSGITWNSG | | | | | | |
| | | TGGTACCATAGGCTATGCGGACTCTGCGAAGGGCCGATTCA | | | | | | | TIGYADSAKGRFTI | | | | | | |
| | | CCATCTCCAGAGACAACTCCAAGAACTCCCTGTATCTGCAC | | | | | | | SRDNSKNSLYLHIS | | | | | | |
| | | ATCAGCAGTCTGAGAACTGAGGACACGGCCTTGTATTACTG | | | | | | | SLRTEDTALYYCAK | | | | | | |
| | | TGCAAAAGATACAGGATCCAAGGACTACTATTACTACGGTA | | | | | | | DTGSKDYYYYGMDV | | | | | | |
| | | TGGACGTCTGGGGCCAAGGGACCACGGTCACCGTCTCCTCA | | | | | | | WGQGTTVTVSS | | | | | | |
| ADI-81703 | 1286 | CAGGTGCAGCTGGTGGAGTCTGGAGCTGAGGTGAAGAAGCC | | | | | | 7140 | QVQLVESGAEVKKP | | 7491 | 7 | | 6 | |
| | | GGGGGCCTCAGTGAAGGTCTCTTGCAAGGCTTCTGGTTACA | | | | | | | GASVKVSCKASGYR | | | | | | |
| | | GGTTCAACATCTATGGTATCACCTGGGTGCGACAGGCCCCT | | | | | | | FNIYGITWVRQAPG | | | | | | |
| | | GGACAAGGGCTTGAGTGGATGGGATGGAGCAGCGCTTACAA | | | | | | | QGLEWMGWSSAYNG | | | | | | |
| | | TGGTAACACAAACTATGCACAGAAGCTCCAGGGCAGAGTCA | | | | | | | NTNYAQKLQGRVTM | | | | | | |
| | | CCATGACCACAGACACATCCACGAGTACAGCCTACATGGAG | | | | | | | TTDTSTSTAYMELR | | | | | | |
| | | TTGAGGAGCCTGACATCTGACGACACGGCCGTGTATTACTG | | | | | | | SLTSDDTAVYYCAR | | | | | | |
| | | TGCGAGAGCATTGGGGGAAGGTTCGGGGTCAGTCTTTGGGT | | | | | | | ALGEGSGSVFGYWG | | | | | | |
| | | ACTGGGGCCAGGGAACCCTGGTCACCGTCTCCTCA | | | | | | | QGTLVTVSS | | | | | | |
| ADI-81739 | 1285 | TGGCAGGTCCCTGAGACTCTCCTGTGCAGCCTCTGGATTCA | | | | | | 7141 | EVQLLESGGGLVQP | | 7492 | 7 | | 6 | |
| | | CCTTTGATGATTATGCCATGCACTGGGTCCGGCAAGCTCCA | | | | | | | GRSLRLSCAASGFT | | | | | | |
| | | GGGAAGGGCCTGGAGTGGGTCTCAGGTATTAGTTGGAATGG | | | | | | | FDDYAMHWVRQAPG | | | | | | |
| | | TGGTATCATTAACTATGCGGACTCTGTGAAGGGCCGATTCA | | | | | | | KGLEWVSGISWNGG | | | | | | |
| | | TCATCTCCAGAGACAACGCCAAGAACTCCCTGTATCTGCAA | | | | | | | IINYADSVKGRFII | | | | | | |
| | | ATGATCCGTCTGAGAGCTGAGGACACGGCCTTGTATTACTG | | | | | | | SRDNAKNSLYLQMI | | | | | | |
| | | TGCAAAATCCAGTTCCGTCGGGGACGAGGGGGAGTTCTCGT | | | | | | | RLRAEDTALYYCAK | | | | | | |
| | | CTTTTGACTACTGGGGCCAGGGAGCCCTGGTCACCGTCTCC | | | | | | | SSSVGDEGEFSSFD | | | | | | |
| | | TCA | | | | | | | YWGQGALVTVSS | | | | | | |
| | VH | VH | | SEQ | | SEQ | | SEQ | | SEQ | | SEQ | | SEQ | |
| | CDR3 | Germ- | VH | ID | VH | ID | VH | ID | VH | ID | VH | ID | VH | ID | VH |
| Clone ID | Lineage | line | FR1 | NO: | CDR1 | NO: | FR2 | NO: | CDR2 | NO: | FR3 | NO: | CDR3 | NO: | FR4 |
| ADI-81837 | 16 | IGHV3- | QVQLV | 24 | FTFSSY | 5603 | WVRQAP | 431 | GVSGSG | 6139 | RFTISR | 777 | GKDSNLI | 6762 | WGQGTL |
| | | 23 | ESGGG | | AMS | | GKGLEW | | DGRFYA | | DNSKNT | | TQIVVDE | | VTVSS |
| | | | LVQPG | | | | VA | | DSVKG | | LYLQMN | | Y | | |
| | | | GSLRL | | | | | | | | SLRAED | | | | |
| | | | SCAAS | | | | | | | | TAVYYC | | | | |
| | | | G | | | | | | | | | | | | |
| ADI-81907 | 81 | IGHV3- | EVQLV | 5498 | FTFSDY | 5745 | WVRQAP | 5861 | VIWYDG | 6140 | RFTISR | 777 | AANGYTP | 6763 | WGHGTL |
| | | 33 | ESGGG | | NMH | | GKGPEW | | SDKYYA | | DNSKNT | | GGDFFDP | | VTVSS |
| | | | VVQLG | | | | VA | | DSVKG | | LYLQMN | | | | |
| | | | RSLRL | | | | | | | | SLRAED | | | | |
| | | | SCAAS | | | | | | | | TAVYYC | | | | |
| | | | G | | | | | | | | | | | | |
| ADI-81654 | 27 | IGHV2- | QVQLK | 5499 | FSLSTY | 5746 | WIRQPP | 441 | LIYYDD | 6141 | RLTITK | 6445 | ARHTIAT | 6764 | WGQGTL |
| | | 5 | QSGPT | | GVGVG | | GKALEW | | DKRYSP | | DTSQNQ | | IFDFDS | | VTVSS |
| | | | LVKPT | | | | LA | | SLKS | | VVLTMT | | | | |
| | | | QTLTL | | | | | | | | NMDPVD | | | | |
| | | | TCTFS | | | | | | | | TATYYC | | | | |
| | | | G | | | | | | | | | | | | |
| ADI-81677 | 47 | IGHV3- | EVQLV | 5500 | FTFSTY | 5747 | WVRQAP | 437 | SISSSN | 6142 | RFTISR | 6446 | AKDLTYY | 6765 | WGQGTT |
| | | 21 | ESGGG | | TMN | | GKGLEW | | NFIYYA | | DNAKNS | | YDSSDYY | | VTVSS |
| | | | LVKPG | | | | VS | | DSVKG | | VYLQMN | | GPNAFDI | | |
| | | | GSLRL | | | | | | | | SLRAED | | | | |
| | | | SCAAS | | | | | | | | TAVYYC | | | | |
| | | | G | | | | | | | | | | | | |
| ADI-81790 | 66 | IGHV3- | EVQLL | 5501 | FTFRSY | 5748 | WVRQAP | 431 | AISYDG | 6143 | RFTISR | 6447 | ARDPSGT | 6766 | WGQGTT |
| | | 30 | ESGGG | | AMH | | GKGLEW | | SNKYFA | | DHSKNT | | MVRGGIV | | VTVSS |
| | | | VVQPG | | | | VA | | DSVKG | | LYLQMN | | YYHYGMD | | |
| | | | TSLRL | | | | | | | | SLRAAD | | V | | |
| | | | SCAAS | | | | | | | | TAVYYC | | | | |
| | | | G | | | | | | | | | | | | |
| ADI-81755 | 31 | IGHV4- | EVQLQ | 5502 | GSFSGY | 206 | WIRQSP | 434 | EINHSG | 527 | RVTISV | 6448 | ARGKAIY | 6767 | WGQGTL |
| | | 34 | QWGAG | | YWS | | GKGLEW | | STNYNP | | DTSKSQ | | DFWRGYN | | VTVSS |
| | | | LLKPS | | | | IG | | SLKS | | FSLKLN | | GRALNFD | | |
| | | | ETLSR | | | | | | | | SVTDAD | | N | | |
| | | | TCAVY | | | | | | | | TAVYYC | | | | |
| | | | G | | | | | | | | | | | | |
| ADI-81893 | 69 | IGHV1- | QVQLL | 5448 | GSFSSD | 5749 | WVRQAP | 433 | GINPIF | 6144 | RVTITA | 1006 | AKDQVTS | 6768 | WGQGTT |
| | | 69 | ESGAE | | AIN | | GQGLEW | | GTANYA | | DESTST | | PLYGMDV | | VTVSS |
| | | | VKKPG | | | | MG | | QKFRG | | AYMELS | | | | |
| | | | SSVKV | | | | | | | | SLRSED | | | | |
| | | | SCKAS | | | | | | | | TAVYYC | | | | |
| | | | G | | | | | | | | | | | | |
| | SEQ | | | | | | | SEQ | | | SEQ | VH | | VH Amino | |
| | ID | | | | | | | ID | | | ID | Nucleotide | | Acid | |
| Clone ID | NO: | VH DNA | | | | | | NO: | VH Protein | | NO: | Substitution | | Substitution | |
| ADI-81837 | 1286 | CAGGTGCAGCTGGTGGAGTCTGGGGGAGGCTTGGTACAGCC | | | | | | 7142 | QVQLVESGGGLVQP | | 7493 | 7 | | 7 | |
| | | GGGGGGGTCCCTGAGACTCTCCTGTGCAGCCTCGGGATTCA | | | | | | | GGSLRLSCAASGFT | | | | | | |
| | | CCTTTAGCAGCTATGCCATGAGCTGGGTCCGCCAGGCTCCA | | | | | | | FSSYAMSWVRQAPG | | | | | | |
| | | GGGAAGGGGCTGGAGTGGGTCGCAGGTGTTAGTGGTAGTGG | | | | | | | KGLEWVAGVSGSGD | | | | | | |
| | | TGATGGCAGATTCTACGCAGACTCCGTGAAGGGCCGGTTCA | | | | | | | GRFYADSVKGRFTI | | | | | | |
| | | CCATCTCCAGAGACAATTCCAAGAACACGCTCTATCTGCAA | | | | | | | SRDNSKNTLYLQMN | | | | | | |
| | | ATGAACAGCCTGAGAGCCGAGGACACGGCCGTATATTACTG | | | | | | | SLRAEDTAVYYCGK | | | | | | |
| | | TGGGAAAGATAGTAACCTTATTACTCAAATAGTAGTTGATG | | | | | | | DSNLITQIVVDEYW | | | | | | |
| | | AGTACTGGGGCCAGGGAACCCTGGTCACCGTCTCCTCA | | | | | | | GQGTLVTVSS | | | | | | |
| ADI-81907 | 6804 | GAGGTCCAGCTGGTGGAGTCTGGGGGCGGCGTGGTCCAGCT | | | | | | 7143 | EVQLVESGGGVVQL | | 7494 | 7 | | 5 | |
| | | TGGGAGGTCCCTGAGACTCTCCTGCGCAGCGTCAGGATTCA | | | | | | | GRSLRLSCAASGFT | | | | | | |
| | | CCTTCAGTGACTATAACATGCACTGGGTCCGCCAGGCTCCA | | | | | | | FSDYNMHWVRQAPG | | | | | | |
| | | GGCAAGGGGCCGGAGTGGGTGGCAGTTATATGGTATGATGG | | | | | | | KGPEWVAVIWYDGS | | | | | | |
| | | AAGCGATAAATATTATGCAGACTCCGTGAAGGGCCGATTCA | | | | | | | DKYYADSVKGRFTI | | | | | | |
| | | CCATCTCCAGAGACAATTCCAAGAACACTCTGTATCTGCAA | | | | | | | SRDNSKNTLYLQMN | | | | | | |
| | | ATGAATAGCCTGAGAGCCGAGGACACGGCTGTGTATTACTG | | | | | | | SLRAEDTAVYYCAA | | | | | | |
| | | TGCGGCAAATGGCTACACTCCAGGTGGGGACTTCTTCGATC | | | | | | | NGYTPGGDFFDPWG | | | | | | |
| | | CTTGGGGCCACGGAACCCTGGTCACCGTCTCCTCA | | | | | | | HGTLVTVSS | | | | | | |
| ADI-81654 | 1286 | CAGGTCCAGCTGAAGCAGTCTGGTCCTACGCTGGTGAAACC | | | | | | 7144 | QVQLKQSGPTLVKP | | 7495 | 6 | | 3 | |
| | | CACACAGACCCTCACACTGACCTGCACCTTCTCTGGGTTCT | | | | | | | TQTLTLTCTFSGFS | | | | | | |
| | | CACTCAGCACTTATGGAGTGGGTGTGGGCTGGATCCGTCAG | | | | | | | LSTYGVGVGWIRQP | | | | | | |
| | | CCCCCAGGAAAGGCCCTGGAGTGGCTTGCACTCATTTATTA | | | | | | | PGKALEWLALIYYD | | | | | | |
| | | CGATGATGATAAGCGCTACAGCCCATCTCTGAAGAGCAGGC | | | | | | | DDKRYSPSLKSRLT | | | | | | |
| | | TCACCATCACCAAGGACACCTCCCAGAACCAGGTGGTCCTT | | | | | | | ITKDTSQNQVVLTM | | | | | | |
| | | ACAATGACCAACATGGACCCTGTGGACACAGCCACATATTA | | | | | | | TNMDPVDTATYYCA | | | | | | |
| | | CTGTGCCCGACACACTATAGCGACGATTTTTGACTTCGACT | | | | | | | RHTIATIFDFDSWG | | | | | | |
| | | CCTGGGGCCAGGGAACCCTGGTCACCGTCTCCTCA | | | | | | | QGTLVTVSS | | | | | | |
| ADI-81677 | 1287 | GAGGTGCAGCTGGTGGAGTCTGGGGGAGGCCTGGTCAAGCC | | | | | | 7145 | EVQLVESGGGLVKP | | 7496 | 6 | | 6 | |
| | | TGGGGGGTCCCTGAGACTCTCCTGTGCAGCCTCTGGATTCA | | | | | | | GGSLRLSCAASGFT | | | | | | |
| | | CCTTCAGTACCTATACCATGAACTGGGTCCGCCAGGCTCCA | | | | | | | FSTYTMNWVRQAPG | | | | | | |
| | | GGGAAGGGGCTGGAGTGGGTCTCATCCATTAGTAGTAGTAA | | | | | | | KGLEWVSSISSSNN | | | | | | |
| | | TAATTTCATATACTACGCAGACTCAGTCAAGGGCCGATTCA | | | | | | | FIYYADSVKGRFTI | | | | | | |
| | | CCATCTCCAGAGACAACGCCAAGAACTCAGTGTATCTGCAA | | | | | | | SRDNAKNSVYLQMN | | | | | | |
| | | ATGAACAGCCTGAGAGCCGAGGACACGGCTGTGTATTACTG | | | | | | | SLRAEDTAVYYCAK | | | | | | |
| | | TGCGAAAGATCTAACCTACTACTATGATAGTAGTGATTATT | | | | | | | DLTYYYDSSDYYGP | | | | | | |
| | | ACGGGCCTAATGCTTTTGATATCTGGGGCCAAGGGACCACG | | | | | | | NAFDIWGQGTTVTV | | | | | | |
| | | GTCACCGTCTCCTCA | | | | | | | SS | | | | | | |
| ADI-81790 | 1287 | GAGGTGCAGCTGTTGGAGTCTGGGGGAGGCGTGGTCCAGCC | | | | | | 7146 | EVQLLESGGGVVQP | | 7497 | 6 | | 6 | |
| | | TGGGACGTCCCTGAGACTCTCCTGTGCAGCCTCTGGATTCA | | | | | | | GTSLRLSCAASGFT | | | | | | |
| | | CCTTCAGGAGCTATGCTATGCACTGGGTCCGCCAGGCTCCA | | | | | | | FRSYAMHWVRQAPG | | | | | | |
| | | GGCAAGGGGCTAGAGTGGGTGGCAGCTATATCATATGATGG | | | | | | | KGLEWVAAISYDGS | | | | | | |
| | | AAGTAATAAATACTTCGCAGACTCCGTGAAGGGCCGATTCA | | | | | | | NKYFADSVKGRFTI | | | | | | |
| | | CCATCTCCAGAGACCATTCCAAGAACACGCTGTATCTGCAA | | | | | | | SRDHSKNTLYLQMN | | | | | | |
| | | ATGAACAGCCTGAGAGCTGCGGACACGGCTGTGTATTACTG | | | | | | | SLRAADTAVYYCAR | | | | | | |
| | | TGCGAGAGATCCTAGTGGTACTATGGTTCGGGGAGGTATTG | | | | | | | DPSGTMVRGGIVYY | | | | | | |
| | | TATACTATCACTACGGTATGGACGTCTGGGGCCAAGGGACC | | | | | | | HYGMDVWGQGTTVT | | | | | | |
| | | ACGGTCACCGTCTCCTCA | | | | | | | VSS | | | | | | |
| ADI-81755 | 1286 | GAGGTGCAGCTACAGCAGTGGGGCGCAGGACTGTTGAAGCC | | | | | | 7147 | EVQLQQWGAGLLKP | | 7498 | 5 | | 5 | |
| | | TTCGGAGACCCTGTCCCGCACCTGCGCTGTCTATGGTGGGT | | | | | | | SETLSRTCAVYGGS | | | | | | |
| | | CCTTCAGTGGTTACTACTGGAGCTGGATCCGCCAGTCCCCA | | | | | | | FSGYYWSWIRQSPG | | | | | | |
| | | GGGAAGGGGCTGGAGTGGATTGGGGAAATCAATCATAGTGG | | | | | | | KGLEWIGEINHSGS | | | | | | |
| | | AAGCACCAACTACAACCCGTCCCTCAAGAGTCGAGTCACCA | | | | | | | TNYNPSLKSRVTIS | | | | | | |
| | | TATCAGTAGACACGTCCAAGAGCCAGTTCTCCCTGAAGCTG | | | | | | | VDTSKSQFSLKLNS | | | | | | |
| | | AACTCTGTGACCGACGCGGACACGGCTGTATATTACTGTGC | | | | | | | VTDADTAVYYCARG | | | | | | |
| | | GAGAGGCAAAGCCATCTACGATTTTTGGCGTGGTTATAATG | | | | | | | KAIYDFWRGYNGRA | | | | | | |
| | | GCCGCGCCCTTAACTTTGACAACTGGGGCCAGGGAACCCTG | | | | | | | LNFDNWGQGTLVTV | | | | | | |
| | | GTCACCGTCTCCTCA | | | | | | | SS | | | | | | |
| ADI-81893 | 1287 | CAGGTGCAGCTGTTGGAGTCTGGGGCTGAGGTGAAGAAGCC | | | | | | 7148 | QVQLLESGAEVKKP | | 7499 | 5 | | 5 | |
| | | TGGGTCCTCGGTGAAGGTCTCCTGCAAGGCTTCTGGAGGCA | | | | | | | GSSVKVSCKASGGS | | | | | | |
| | | GCTTCAGCAGTGATGCTATCAACTGGGTGCGACAGGCCCCT | | | | | | | FSSDAINWVRQAPG | | | | | | |
| | | GGACAAGGGCTTGAGTGGATGGGAGGGATCAACCCTATTTT | | | | | | | QGLEWMGGINPIFG | | | | | | |
| | | TGGTACAGCAAACTACGCACAGAAGTTCCGGGGCAGAGTCA | | | | | | | TANYAQKFRGRVTI | | | | | | |
| | | CGATTACCGCGGACGAATCCACGAGCACAGCCTACATGGAG | | | | | | | TADESTSTAYMELS | | | | | | |
| | | CTGAGCAGCCTGAGATCTGAGGACACGGCCGTGTACTATTG | | | | | | | SLRSEDTAVYYCAK | | | | | | |
| | | TGCAAAAGATCAGGTTACTTCGCCCCTCTACGGGATGGACG | | | | | | | DQVTSPLYGMDVWG | | | | | | |
| | | TCTGGGGCCAAGGGACCACGGTCACCGTCTCCTCA | | | | | | | QGTTVTVSS | | | | | | |
| | VH | VH | | SEQ | | SEQ | | SEQ | | SEQ | | SEQ | | SEQ | |
| | CDR3 | Germ- | VH | ID | VH | ID | VH | ID | VH | ID | VH | ID | VH | ID | VH |
| Clone ID | Lineage | line | FR1 | NO: | CDR1 | NO: | FR2 | NO: | CDR2 | NO: | FR3 | NO: | CDR3 | NO: | FR4 |
| ADI-81649 | 22 | IGHV4- | EVQLL | 5335 | DSISSY | 320 | WIRQPP | 5862 | YIYYSG | 6145 | RVTISV | 6449 | ARGGGYG | 6769 | WGQGTL |
| | | 59 | ESGPG | | YWS | | GKGLEW | | STDYNP | | DTSKNQ | | DYFDY | | VTVSS |
| | | | LVKPS | | | | VG | | SLKS | | FYLKLS | | | | |
| | | | ETLSL | | | | | | | | SVTAAD | | | | |
| | | | TCTVS | | | | | | | | TAVYYC | | | | |
| | | | G | | | | | | | | | | | | |
| ADI-81716 | 86 | IGHV1- | QVQLV | 50 | GTFSSY | 5750 | WVRQAP | 5863 | RIIPLL | 6146 | RVTITA | 6450 | ARSAPLA | 6770 | WGQGTL |
| | | 69 | QSGAE | | AIN | | RQGLEW | | GIANYA | | DKSTST | | GTPPANW | | VTVSS |
| | | | VKKPG | | | | MG | | QKFQG | | AYMEVS | | FDP | | |
| | | | SSVKV | | | | | | | | SLRSED | | | | |
| | | | SCKAS | | | | | | | | TAVYYC | | | | |
| | | | G | | | | | | | | | | | | |
| ADI-81910 | 84 | IGHV3- | EVQLV | 81 | LTVSSN | 380 | WVRQTP | 448 | VIYSGG | 689 | RFTISR | 900 | ARMPYGM | 6771 | WGQGTT |
| | | 53 | ETGGG | | YMS | | GKGLEW | | STFYAD | | DKSKNT | | DV | | VTVSS |
| | | | LIQPG | | | | VS | | SVKG | | LYLQMN | | | | |
| | | | GSLRL | | | | | | | | SLRAED | | | | |
| | | | SCAAS | | | | | | | | TAVYYC | | | | |
| | | | G | | | | | | | | | | | | |
| ADI-81862 | 40 | IGHV3- | EVQLL | 5324 | FTFDDY | 5751 | WVRQAP | 437 | GISWNS | 6147 | RFTISR | 6422 | AKEGCSS | 6772 | WGQGTL |
| | | 9 | ESGGG | | ALH | | GKGLEW | | VSIDYA | | DNAKNS | | TSCYDY | | VTVSS |
| | | | LVQPG | | | | VS | | DSVKG | | LYLQMN | | | | |
| | | | RSLRL | | | | | | | | SLRAED | | | | |
| | | | SCAAS | | | | | | | | TALYYC | | | | |
| | | | G | | | | | | | | | | | | |
| ADI-81898 | 73 | IGHV5- | QVQLV | 174 | YDFSNL | 5752 | WVRLMP | 5864 | IISPPD | 6148 | QVTISV | 6451 | ARHLGVE | 6773 | WGQGTL |
| | | 51 | QSGAE | | WIG | | GKGPEW | | SDTRYN | | DNSINT | | LGTIRGY | | VTVSS |
| | | | VKKPG | | | | MG | | PSFEG | | AYLQWN | | FDS | | |
| | | | ESLKI | | | | | | | | SLKASD | | | | |
| | | | SCKGS | | | | | | | | TAIYYC | | | | |
| | | | G | | | | | | | | | | | | |
| ADI-81585 | 46 | IGHV4- | QVQLQ | 5503 | ESFRDY | 5753 | WIRQPP | 5865 | EVTHTG | 6149 | RVTISV | 6452 | ARGDFYS | 6774 | WGQGTT |
| | | 34 | QWGAG | | FWN | | GQGLEW | | NINYNP | | DTSKNQ | | TRLAFDI | | VTVSS |
| | | | LLKPS | | | | MG | | SLKS | | ISLNLR | | | | |
| | | | ETLSL | | | | | | | | SVSAAD | | | | |
| | | | TCAVY | | | | | | | | TAVYYC | | | | |
| | | | D | | | | | | | | | | | | |
| ADI-81613 | 70 | IGHV4- | QVQLQ | 5504 | DSISGY | 5707 | WIRQPP | 445 | YIYNSE | 6150 | RVTISV | 6453 | ARGAQYG | 6775 | WGQGTL |
| | | 4 | QSGPG | | YWS | | GKGLEW | | TTEYNP | | DTSKNQ | | DFFDY | | VTVSS |
| | | | LGLVK | | | | IG | | SLKS | | ISLKLS | | | | |
| | | | PSETL | | | | | | | | SVTAAD | | | | |
| | | | PLTCT | | | | | | | | TAVYYC | | | | |
| | | | VSG | | | | | | | | | | | | |
| ADI-81690 | 60 | IGHV3- | EVQLV | 5505 | FTFSSY | 5754 | WVRQAP | 472 | LISYDG | 6151 | RFTISR | 6454 | ARAKQWV | 6776 | WGQGTT |
| | | 30 | GVWGR | | EIH | | GKGLEW | | SNKYYA | | DNSKNT | | QRGYYYP | | VTVSS |
| | | | RGPAG | | | | VT | | DSVEG | | LYLQMN | | MDV | | |
| | | | RSLRL | | | | | | | | SLRPED | | | | |
| | | | SCAAS | | | | | | | | TAVYYC | | | | |
| | | | G | | | | | | | | | | | | |
| | SEQ | | | | | | | SEQ | | | SEQ | VH | | VH Amino | |
| | ID | | | | | | | ID | | | ID | Nucleotide | | Acid | |
| Clone ID | NO: | VH DNA | | | | | | NO: | VH Protein | | NO: | Substitution | | Substitution | |
| ADI-81649 | 1286 | GAGGTGCAGCTGTTGGAGTCGGGCCCAGGACTGGTGAAGCC | | | | | | 7149 | EVQLLESGPGLVKP | | 7500 | 4 | | 4 | |
| | | TTCGGAGACCCTGTCCCTCACCTGCACTGTCTCTGGTGACT | | | | | | | SETLSLTCTVSGDS | | | | | | |
| | | CCATCAGTAGTTACTACTGGAGCTGGATCCGGCAGCCCCCA | | | | | | | ISSYYWSWIRQPPG | | | | | | |
| | | GGGAAGGGACTGGAATGGGTTGGGTATATCTATTACAGTGG | | | | | | | KGLEWVGYIYYSGS | | | | | | |
| | | GAGCACCGACTACAACCCCTCCCTCAAGAGTCGAGTCACCA | | | | | | | TDYNPSLKSRVTIS | | | | | | |
| | | TATCAGTAGACACGTCCAAGAACCAATTCTACCTGAAGCTG | | | | | | | VDTSKNQFYLKLSS | | | | | | |
| | | AGCTCTGTGACCGCTGCGGACACGGCCGTGTATTATTGTGC | | | | | | | VTAADTAVYYCARG | | | | | | |
| | | GAGAGGGGGTGGCTACGGTGACTACTTTGACTACTGGGGCC | | | | | | | GGYGDYFDYWGQGT | | | | | | |
| | | AGGGAACCCTGGTCACCGTCTCTTCA | | | | | | | LVTVSS | | | | | | |
| ADI-81716 | 1286 | TGGGTCCTCGGTGAAGGTCTCCTGCAAGGCTTCTGGAGGCA | | | | | | 7150 | QVQLVQSGAEVKKP | | 7501 | 4 | | 4 | |
| | | CCTTCAGCAGTTATGCTATCAACTGGGTGCGACAGGCCCCT | | | | | | | GSSVKVSCKASGGT | | | | | | |
| | | AGACAAGGGCTTGAGTGGATGGGTAGGATCATCCCTCTCCT | | | | | | | FSSYAINWVRQAPR | | | | | | |
| | | TGGTATAGCAAACTACGCACAGAAGTTCCAGGGCAGAGTCA | | | | | | | QGLEWMGRIIPLLG | | | | | | |
| | | CGATTACCGCGGACAAATCCACGAGCACAGCCTACATGGAG | | | | | | | IANYAQKFQGRVTI | | | | | | |
| | | GTGAGCAGCCTAAGATCTGAGGACACGGCCGTGTATTACTG | | | | | | | TADKSTSTAYMEVS | | | | | | |
| | | TGCGCGTTCTGCCCCCCTTGCTGGAACTCCGCCGGCCAACT | | | | | | | SLRSEDTAVYYCAR | | | | | | |
| | | GGTTCGACCCCTGGGGCCAGGGAACCCTGGTCACCGTCTCC | | | | | | | SAPLAGTPPANWFD | | | | | | |
| | | TCA | | | | | | | PWGQGTLVTVSS | | | | | | |
| ADI-81910 | 1287 | GAGGTGCAGCTGGTGGAGACTGGAGGAGGCTTGATCCAGCC | | | | | | 7151 | EVQLVETGGGLIQP | | 7502 | 4 | | 4 | |
| | | TGGGGGGTCCCTGAGACTCTCCTGTGCAGCCTCTGGGCTCA | | | | | | | GGSLRLSCAASGLT | | | | | | |
| | | CCGTCAGTAGCAACTACATGAGCTGGGTCCGCCAGACTCCA | | | | | | | VSSNYMSWVRQTPG | | | | | | |
| | | GGGAAGGGGCTGGAGTGGGTCTCAGTTATTTATAGCGGTGG | | | | | | | KGLEWVSVIYSGGS | | | | | | |
| | | TAGCACATTCTACGCAGACTCCGTTAAGGGCCGATTCACCA | | | | | | | TFYADSVKGRFTIS | | | | | | |
| | | TCTCCAGAGACAAATCCAAGAACACGCTGTATCTTCAAATG | | | | | | | RDKSKNTLYLQMNS | | | | | | |
| | | AACAGCTTGAGAGCCGAGGACACGGCCGTGTATTATTGTGC | | | | | | | LRAEDTAVYYCARM | | | | | | |
| | | GAGAATGCCTTACGGTATGGACGTCTGGGGCCAAGGGACCA | | | | | | | PYGMDVWGQGTTVT | | | | | | |
| | | CGGTCACCGTCTCCTCA | | | | | | | VSS | | | | | | |
| ADI-81862 | 1286 | GAGGTGCAGCTGTTGGAGTCTGGGGGAGGCTTGGTACAGCC | | | | | | 7152 | EVQLLESGGGLVQP | | 7503 | 3 | | 3 | |
| | | TGGCAGGTCCCTGAGACTCTCCTGTGCAGCCTCTGGATTCA | | | | | | | GRSLRLSCAASGFT | | | | | | |
| | | CCTTTGATGATTATGCCTTGCACTGGGTCCGGCAAGCTCCA | | | | | | | FDDYALHWVRQAPG | | | | | | |
| | | GGGAAGGGCCTGGAGTGGGTCTCAGGTATTAGTTGGAATAG | | | | | | | KGLEWVSGISWNSV | | | | | | |
| | | TGTTAGCATAGACTATGCGGACTCTGTGAAGGGCCGATTCA | | | | | | | SIDYADSVKGRFTI | | | | | | |
| | | CCATCTCCAGAGACAACGCCAAGAACTCCCTGTATCTGCAA | | | | | | | SRDNAKNSLYLQMN | | | | | | |
| | | ATGAACAGTCTGAGAGCTGAGGACACGGCCTTATATTACTG | | | | | | | SLRAEDTALYYCAK | | | | | | |
| | | TGCAAAAGAGGGATGTAGTAGTACCAGCTGCTACGACTACT | | | | | | | EGCSSTSCYDYWGQ | | | | | | |
| | | GGGGCCAGGGAACCCTGGTCACCGTCTCCTCA | | | | | | | GTLVTVSS | | | | | | |
| ADI-81898 | 1286 | CGGGGAGTCTCTGAAGATCTCCTGTAAGGGTTCTGGATACG | | | | | | 7153 | QVQLVQSGAEVKKP | | 7504 | 20 | | 15 | |
| | | ACTTTAGCAACCTCTGGATCGGCTGGGTGCGCCTGATGCCC | | | | | | | GESLKISCKGSGYD | | | | | | |
| | | GGGAAAGGCCCGGAGTGGATGGGGATCATCTCTCCTCCCGA | | | | | | | FSNLWIGWVRLMPG | | | | | | |
| | | CTCTGATACCAGATACAACCCGTCCTTCGAAGGCCAGGTCA | | | | | | | KGPEWMGIISPPDS | | | | | | |
| | | CCATCTCAGTCGACAACTCCATCAATACCGCCTACCTGCAG | | | | | | | DTRYNPSFEGQVTI | | | | | | |
| | | TGGAACAGCCTGAAGGCCTCGGACACCGCCATCTATTACTG | | | | | | | SVDNSINTAYLQWN | | | | | | |
| | | TGCGAGACACTTAGGAGTAGAATTGGGTACAATACGCGGTT | | | | | | | SLKASDTAIYYCAR | | | | | | |
| | | ATTTTGACTCCTGGGGCCAGGGAACCCTGGTCACCGTCTCC | | | | | | | HLGVELGTIRGYFD | | | | | | |
| | | TCA | | | | | | | SWGQGTLVTVSS | | | | | | |
| ADI-81585 | 1287 | CAGGTGCAGCTACAGCAGTGGGGCGCAGGGCTGTTGAAGCC | | | | | | 7154 | QVQLQQWGAGLLKP | | 7505 | 18 | | 17 | |
| | | TTCGGAGACCCTGTCCCTCACTTGTGCTGTCTATGATGAGT | | | | | | | SETLSLTCAVYDES | | | | | | |
| | | CCTTCAGAGATTACTTCTGGAATTGGATCCGGCAACCCCCA | | | | | | | FRDYFWNWIRQPPG | | | | | | |
| | | GGTCAGGGGCTGGAGTGGATGGGGGAAGTCACTCATACTGG | | | | | | | QGLEWMGEVTHTGN | | | | | | |
| | | AAACATCAACTACAACCCGTCCCTTAAGAGTCGAGTCACCA | | | | | | | INYNPSLKSRVTIS | | | | | | |
| | | TATCCGTGGACACGTCCAAGAACCAAATCTCCCTGAACCTG | | | | | | | VDTSKNQISLNLRS | | | | | | |
| | | AGGTCTGTGAGCGCCGCGGACACGGCCGTTTATTACTGTGC | | | | | | | VSAADTAVYYCARG | | | | | | |
| | | GAGAGGCGATTTTTATAGCACCAGGCTCGCTTTTGATATCT | | | | | | | DFYSTRLAFDIWGQ | | | | | | |
| | | GGGGCCAAGGGACCACGGTCACCGTCTCCTCA | | | | | | | GTTVTVSS | | | | | | |
| ADI-81613 | 1286 | CAGGTGCAGCTGCAGCAGTCGGGCCCAGGACTAGGACTGGT | | | | | | 7155 | QVQLQQSGPGLGLV | | 7506 | 17 | | 10 | |
| | | GAAGCCCTCGGAGACCCTGCCCCTCACCTGCACTGTCTCTG | | | | | | | KPSETLPLTCTVSG | | | | | | |
| | | GTGACTCCATCAGTGGTTACTACTGGAGCTGGATCCGGCAG | | | | | | | DSISGYYWSWIRQP | | | | | | |
| | | CCCCCAGGGAAGGGACTGGAGTGGATTGGCTATATCTATAA | | | | | | | PGKGLEWIGYIYNS | | | | | | |
| | | TAGTGAGACTACTGAGTACAACCCCTCCCTCAAGAGTCGAG | | | | | | | ETTEYNPSLKSRVT | | | | | | |
| | | TCACCATCTCAGTAGACACGTCCAAGAACCAGATCTCCCTG | | | | | | | ISVDTSKNQISLKL | | | | | | |
| | | AAGCTGAGCTCTGTGACCGCCGCAGACACGGCCGTGTATTA | | | | | | | SSVTAADTAVYYCA | | | | | | |
| | | CTGTGCGAGAGGGGCTCAGTACGGCGACTTCTTTGACTACT | | | | | | | RGAQYGDFFDYWGQ | | | | | | |
| | | GGGGCCAGGGAACCCTGGTCACCGTCTCCTCA | | | | | | | GTLVTVSS | | | | | | |
| ADI-81690 | 1287 | TGGGAGGTCCCTGAGACTCTCCTGTGCAGCCTCTGGATTCA | | | | | | 7156 | EVQLVGVWGRRGPA | | 7507 | 17 | | 11 | |
| | | CCTTCAGTAGCTATGAAATCCACTGGGTCCGCCAGGCTCCA | | | | | | | GRSLRLSCAASGFT | | | | | | |
| | | GGCAAGGGGCTGGAGTGGGTGACACTTATATCATATGACGG | | | | | | | FSSYEIHWVRQAPG | | | | | | |
| | | AAGCAATAAATACTACGCAGACTCCGTGGAGGGCCGATTCA | | | | | | | KGLEWVTLISYDGS | | | | | | |
| | | CCATCTCCAGAGACAATTCCAAGAACACGCTGTATCTGCAA | | | | | | | NKYYADSVEGRFTI | | | | | | |
| | | ATGAACAGCCTGAGACCTGAGGACACGGCTGTGTATTACTG | | | | | | | SRDNSKNTLYLQMN | | | | | | |
| | | TGCGAGAGCAAAGCAGTGGGTGCAACGGGGGTACTACTACC | | | | | | | SLRPEDTAVYYCAR | | | | | | |
| | | CTATGGACGTCTGGGGCCAAGGAACCACGGTCACCGTCTCC | | | | | | | AKQWVQRGYYYPMD | | | | | | |
| | | TCA | | | | | | | VWGQGTTVTVSS | | | | | | |
| | VH | VH | | SEQ | | SEQ | | SEQ | | SEQ | | SEQ | | SEQ | |
| | CDR3 | Germ- | VH | ID | VH | ID | VH | ID | VH | ID | VH | ID | VH | ID | VH |
| Clone ID | Lineage | line | FR1 | NO: | CDR1 | NO: | FR2 | NO: | CDR2 | NO: | FR3 | NO: | CDR3 | NO: | FR4 |
| ADI-81784 | 60 | IGHV3- | EVQLL | 5373 | FTFSHY | 5755 | WVRQAP | 431 | LISYDG | 6152 | RFTISR | 6455 | AKRVDTY | 6777 | WGQGTL |
| | | 30 | ESGGG | | GMH | | GKGLEW | | TKTSYA | | DNSKNT | | CYADCLG | | VTVSS |
| | | | VVQPG | | | | VA | | DSVKG | | LLLEMN | | FPTTLDY | | |
| | | | RSLRL | | | | | | | | SLRGED | | | | |
| | | | SCAAS | | | | | | | | TAVYYC | | | | |
| | | | G | | | | | | | | | | | | |
| ADI-81863 | 41 | IGHV1- | EVQLV | 5385 | YTFTTY | 5756 | WVRQAP | 433 | IINPDA | 6153 | RVTMTS | 6456 | ARDIFLV | 6778 | WGQGTT |
| | | 46 | ESGAE | | YVH | | GQGLEW | | GSTTYG | | DTSTST | | PAISAME | | VTVSS |
| | | | VKKPG | | | | MG | | QQFRG | | VYMELS | | V | | |
| | | | ASVKV | | | | | | | | SLRSED | | | | |
| | | | SCKAS | | | | | | | | TAVYYC | | | | |
| | | | G | | | | | | | | | | | | |
| ADI-81645 | 18 | IGHV4- | EVQLL | 5506 | GSFSNY | 5757 | WIRQPP | 5866 | YIFYSG | 6154 | RLTISV | 6457 | ARDLGYS | 6779 | WGQGTT |
| | | 59 | ESGPG | | YWS | | GKRLEW | | STNYNP | | DTSKNQ | | SGWPDAF | | VTVSS |
| | | | LVKLS | | | | IG | | SLRS | | FSLNLR | | DI | | |
| | | | ETLSL | | | | | | | | SVTAAD | | | | |
| | | | TCKVS | | | | | | | | TAVYYC | | | | |
| | | | G | | | | | | | | | | | | |
| ADI-81806 | 77 | IGHV3- | EVQLV | 5338 | FTFRRS | 5758 | WVRQAP | 431 | DVSSDG | 6155 | RFTISR | 6458 | ARDVDTA | 6780 | WGQGTL |
| | | 30 | ESGGG | | VMH | | GKGLEW | | SIKTYA | | DNSKYT | | MVTILDY | | VTVSS |
| | | | VVQPG | | | | VA | | DSVKG | | LYLQMN | | | | |
| | | | RSLRL | | | | | | | | SLRAED | | | | |
| | | | SCAAS | | | | | | | | TAVYYC | | | | |
| | | | G | | | | | | | | | | | | |
| ADI-81801 | 77 | IGHV3- | EVQLL | 5373 | FTFGSY | 5759 | WVRQAP | 431 | DVSSDG | 6155 | RFTISR | 6458 | ARDVDTA | 6780 | WGQGTL |
| | | 30 | ESGGG | | VMH | | GKGLEW | | SIKTYA | | DNSKYT | | MVTILDY | | VTVSS |
| | | | VVQPG | | | | VA | | DSVKG | | LYLQMN | | | | |
| | | | RSLRL | | | | | | | | SLRAED | | | | |
| | | | SCAAS | | | | | | | | TAVYYC | | | | |
| | | | G | | | | | | | | | | | | |
| ADI-81769 | 45 | IGHV3- | QVQLL | 74 | VTVSAN | 5760 | WVRQAP | 437 | IIYSGG | 6156 | RFTISR | 777 | ARDLEQF | 6781 | WGRGTL |
| | | 66 | ESGGG | | YMR | | GKGLEW | | STFYAD | | DNSKNT | | GIDL | | VTVSS |
| | | | LVQPG | | | | VS | | SVKD | | LYLQMN | | | | |
| | | | GSLRL | | | | | | | | SLRAED | | | | |
| | | | SCAAS | | | | | | | | TAVYYC | | | | |
| | | | G | | | | | | | | | | | | |
| ADI-81625 | 81 | IGHV3- | QVQLV | 10 | FTFRSY | 198 | WVRQAP | 431 | VILYDG | 6157 | RFTISR | 6459 | AKQMGSH | 6782 | WGQGTL |
| | | 30 | QSGGG | | GMH | | GKGLEW | | SDKYYA | | DNSKNT | | CSAGNCY | | VTVSS |
| | | | VVQPG | | | | VA | | DSVKG | | LYLQMN | | SATFDY | | |
| | | | RSLRL | | | | | | | | SLKRED | | | | |
| | | | SCAAS | | | | | | | | TAVYYC | | | | |
| | | | G | | | | | | | | | | | | |
| ADI-81741 | 18 | IGHV3- | EVQLV | 5379 | ITVSSN | 300 | WVRQAP | 437 | VVYAGG | 6158 | RFTISR | 6460 | AREAYAF | 6783 | WGQGTT |
| | | 53 | ESGGG | | YMS | | GKGLEW | | STFYAD | | HNSKNT | | DI | | VTVSS |
| | | | LVQPG | | | | VS | | SVKG | | LYLQMN | | | | |
| | | | GSLRL | | | | | | | | SLRVED | | | | |
| | | | SCTAS | | | | | | | | TAVYYC | | | | |
| | | | G | | | | | | | | | | | | |
| | SEQ | | | | | | | SEQ | | | SEQ | VH | | VH Amino | |
| | ID | | | | | | | ID | | | ID | Nucleotide | | Acid | |
| Clone ID | NO: | VH DNA | | | | | | NO: | VH Protein | | NO: | Substitution | | Substitution | |
| ADI-81784 | 1286 | GAGGTGCAGCTGTTGGAGTCTGGGGGAGGCGTGGTCCAGCC | | | | | | 7157 | EVQLLESGGGVVQP | | 7508 | 14 | | 9 | |
| | | TGGGAGGTCCCTGAGACTCTCCTGCGCAGCCTCTGGATTCA | | | | | | | GRSLRLSCAASGFT | | | | | | |
| | | CCTTCAGTCACTATGGCATGCACTGGGTCCGCCAGGCTCCA | | | | | | | FSHYGMHWVRQAPG | | | | | | |
| | | GGCAAGGGGCTGGAGTGGGTGGCACTGATTTCATATGATGG | | | | | | | KGLEWVALISYDGT | | | | | | |
| | | AACCAAAACATCCTATGCAGACTCCGTGAAGGGCCGATTCA | | | | | | | KTSYADSVKGRFTI | | | | | | |
| | | CCATCTCCAGAGACAATTCGAAGAACACACTGCTCCTGGAA | | | | | | | SRDNSKNTLLLEMN | | | | | | |
| | | ATGAACAGCCTGAGAGGTGAAGACACGGCTGTGTATTACTG | | | | | | | SLRGEDTAVYYCAK | | | | | | |
| | | TGCGAAAAGGGTCGATACATATTGTTATGCTGATTGCTTGG | | | | | | | RVDTYCYADCLGFP | | | | | | |
| | | GATTTCCCACCACCCTTGACTATTGGGGCCAGGGAACCCTG | | | | | | | TTLDYWGQGTLVTV | | | | | | |
| | | GTCACCGTCTCCTCA | | | | | | | SS | | | | | | |
| ADI-81863 | 1287 | GAGGTGCAGCTGGTGGAGTCTGGGGCTGAGGTGAAGAAGCC | | | | | | 7158 | EVQLVESGAEVKKP | | 7509 | 13 | | 9 | |
| | | TGGGGCCTCAGTGAAAGTTTCCTGCAAGGCATCTGGATATA | | | | | | | GASVKVSCKASGYT | | | | | | |
| | | CGTTCACAACCTACTATGTTCACTGGGTGCGACAGGCCCCT | | | | | | | FTTYYVHWVRQAPG | | | | | | |
| | | GGACAAGGGCTTGAGTGGATGGGAATAATCAACCCTGATGC | | | | | | | QGLEWMGIINPDAG | | | | | | |
| | | TGGAAGCACCACGTACGGACAGCAATTCCGGGGCAGAGTCA | | | | | | | STTYGQQFRGRVTM | | | | | | |
| | | CCATGACCAGCGACACGTCCACGAGCACAGTCTACATGGAG | | | | | | | TSDTSTSTVYMELS | | | | | | |
| | | CTGAGTAGCCTGAGATCTGAGGACACGGCCGTATATTACTG | | | | | | | SLRSEDTAVYYCAR | | | | | | |
| | | TGCGAGAGATATTTTTTTAGTACCAGCCATAAGCGCTATGG | | | | | | | DIFLVPAISAMEVW | | | | | | |
| | | AAGTCTGGGGCCAGGGGACCACGGTCACCGTCTCCTCA | | | | | | | GQGTTVTVSS | | | | | | |
| ADI-81645 | 1287 | GAGGTGCAGCTGTTGGAGTCGGGCCCAGGACTGGTGAAGCT | | | | | | 7159 | EVQLLESGPGLVKL | | 7510 | 12 | | 10 | |
| | | TTCGGAGACCCTGTCCCTCACCTGCAAAGTCTCTGGTGGCT | | | | | | | SETLSLTCKVSGGS | | | | | | |
| | | CCTTCAGTAATTACTACTGGAGCTGGATTCGGCAGCCCCCC | | | | | | | FSNYYWSWIRQPPG | | | | | | |
| | | GGGAAGAGACTGGAATGGATTGGATATATCTTCTACAGTGG | | | | | | | KRLEWIGYIFYSGS | | | | | | |
| | | GAGCACCAACTACAACCCCTCCCTCAGGAGTCGACTCACCA | | | | | | | TNYNPSLRSRLTIS | | | | | | |
| | | TATCAGTAGACACGTCCAAGAACCAATTCTCCCTGAACCTG | | | | | | | VDTSKNQFSLNLRS | | | | | | |
| | | AGATCTGTGACCGCTGCGGACACGGCCGTGTATTACTGTGC | | | | | | | VTAADTAVYYCARD | | | | | | |
| | | GAGAGATCTCGGATATAGCAGTGGCTGGCCTGATGCTTTTG | | | | | | | LGYSSGWPDAFDIW | | | | | | |
| | | ATATCTGGGGCCAAGGGACCACGGTCACCGTCTCCTCA | | | | | | | GQGTTVTVSS | | | | | | |
| ADI-81806 | 1286 | GAGGTGCAGCTGGTGGAGTCCGGGGGAGGCGTGGTCCAGCC | | | | | | 7160 | EVQLVESGGGVVQP | | 7511 | 11 | | 10 | |
| | | TGGGAGGTCCCTGAGACTCTCCTGTGCAGCCTCTGGATTCA | | | | | | | GRSLRLSCAASGFT | | | | | | |
| | | CCTTCCGTAGGTCTGTTATGCACTGGGTCCGCCAGGCTCCA | | | | | | | FRRSVMHWVRQAPG | | | | | | |
| | | GGCAAGGGGCTGGAGTGGGTGGCAGATGTATCATCTGATGG | | | | | | | KGLEWVADVSSDGS | | | | | | |
| | | AAGCATTAAAACCTACGCAGACTCCGTGAAGGGCCGATTCA | | | | | | | IKTYADSVKGRFTI | | | | | | |
| | | CCATCTCCAGAGACAATTCCAAGTACACGCTGTATCTGCAA | | | | | | | SRDNSKYTLYLQMN | | | | | | |
| | | ATGAACAGCCTGAGAGCTGAGGACACGGCTGTGTATTACTG | | | | | | | SLRAEDTAVYYCAR | | | | | | |
| | | TGCGAGAGATGTGGATACAGCTATGGTTACTATTCTTGACT | | | | | | | DVDTAMVTILDYWG | | | | | | |
| | | ACTGGGGCCAGGGAACCCTGGTCACCGTCTCCTCA | | | | | | | QGTLVTVSS | | | | | | |
| ADI-81801 | 1286 | GAGGTGCAGCTGTTGGAGTCCGGGGGAGGCGTGGTCCAGCC | | | | | | 7161 | EVQLLESGGGVVQP | | 7512 | 9 | | 8 | |
| | | TGGGAGGTCCCTGAGACTCTCCTGTGCAGCCTCTGGATTTA | | | | | | | GRSLRLSCAASGFT | | | | | | |
| | | CCTTCGGTAGCTATGTTATGCACTGGGTCCGCCAGGCTCCA | | | | | | | FGSYVMHWVRQAPG | | | | | | |
| | | GGCAAGGGGCTGGAGTGGGTGGCAGATGTATCATCTGATGG | | | | | | | KGLEWVADVSSDGS | | | | | | |
| | | AAGCATTAAAACCTACGCAGACTCCGTGAAGGGCCGATTCA | | | | | | | IKTYADSVKGRFTI | | | | | | |
| | | CCATCTCCAGAGACAATTCCAAGTACACGCTGTATCTGCAA | | | | | | | SRDNSKYTLYLQMN | | | | | | |
| | | ATGAACAGCCTGAGAGCTGAGGACACGGCTGTGTATTACTG | | | | | | | SLRAEDTAVYYCAR | | | | | | |
| | | TGCGAGAGATGTGGATACAGCTATGGTTACTATTCTTGACT | | | | | | | DVDTAMVTILDYWG | | | | | | |
| | | ACTGGGGCCAGGGAACCCTGGTCACCGTCTCCTCA | | | | | | | QGTLVTVSS | | | | | | |
| ADI-81769 | 1288 | CAGGTGCAGCTGTTGGAGTCTGGGGGAGGGTTGGTCCAGCC | | | | | | 7162 | QVQLLESGGGLVQP | | 7513 | 8 | | 6 | |
| | | TGGGGGGTCCCTGAGACTCTCCTGTGCAGCCTCTGGAGTCA | | | | | | | GGSLRLSCAASGVT | | | | | | |
| | | CCGTCAGTGCCAACTACATGAGGTGGGTCCGCCAGGCTCCA | | | | | | | VSANYMRWVRQAPG | | | | | | |
| | | GGGAAGGGGCTGGAGTGGGTCTCAATTATTTATAGCGGTGG | | | | | | | KGLEWVSIIYSGGS | | | | | | |
| | | AAGCACATTTTACGCAGACTCCGTGAAGGACAGATTCACCA | | | | | | | TFYADSVKDRFTIS | | | | | | |
| | | TCTCCAGAGACAACTCCAAGAACACACTGTATCTTCAAATG | | | | | | | RDNSKNTLYLQMNS | | | | | | |
| | | AACAGCCTGCGAGCCGAGGACACGGCTGTCTATTACTGTGC | | | | | | | LRAEDTAVYYCARD | | | | | | |
| | | GAGAGACTTAGAACAGTTCGGGATCGATCTCTGGGGCCGTG | | | | | | | LEQFGIDLWGRGTL | | | | | | |
| | | GCACCCTGGTCACCGTCTCCTCA | | | | | | | VTVSS | | | | | | |
| ADI-81625 | 1286 | CAGGTGCAGCTGGTGCAGTCTGGGGGAGGCGTGGTCCAGCC | | | | | | 7163 | QVQLVQSGGGVVQP | | 7514 | 7 | | 5 | |
| | | TGGGAGGTCCCTGAGACTCTCCTGTGCAGCCTCTGGATTCA | | | | | | | GRSLRLSCAASGFT | | | | | | |
| | | CCTTCAGAAGTTATGGCATGCACTGGGTCCGCCAGGCTCCA | | | | | | | FRSYGMHWVRQAPG | | | | | | |
| | | GGCAAGGGGCTGGAGTGGGTGGCAGTTATATTATATGATGG | | | | | | | KGLEWVAVILYDGS | | | | | | |
| | | AAGTGACAAATACTATGCAGACTCCGTGAAGGGCCGATTCA | | | | | | | DKYYADSVKGRFTI | | | | | | |
| | | CCATCTCCAGAGACAATTCCAAGAACACGCTGTATCTGCAA | | | | | | | SRDNSKNTLYLQMN | | | | | | |
| | | ATGAACAGTCTGAAACGTGAGGACACGGCTGTGTACTACTG | | | | | | | SLKREDTAVYYCAK | | | | | | |
| | | TGCGAAACAGATGGGGTCACATTGTAGTGCTGGGAACTGCT | | | | | | | QMGSHCSAGNCYSA | | | | | | |
| | | ACTCAGCTACTTTTGACTACTGGGGCCAGGGAACCCTGGTC | | | | | | | TFDYWGQGTLVTVS | | | | | | |
| | | ACCGTCTCCTCA | | | | | | | S | | | | | | |
| ADI-81741 | 1287 | GAGGTGCAGCTGGTGGAGTCTGGAGGAGGCTTGGTCCAGCC | | | | | | 7164 | EVQLVESGGGLVQP | | 7515 | 7 | | 6 | |
| | | TGGGGGGTCCCTGAGACTCTCCTGTACAGCCTCTGGGATCA | | | | | | | GGSLRLSCTASGIT | | | | | | |
| | | CCGTCAGTAGCAACTACATGAGTTGGGTCCGCCAGGCTCCA | | | | | | | VSSNYMSWVRQAPG | | | | | | |
| | | GGGAAGGGGCTGGAGTGGGTCTCAGTTGTTTATGCCGGAGG | | | | | | | KGLEWVSVVYAGGS | | | | | | |
| | | TAGCACATTCTATGCAGACTCCGTGAAGGGCCGATTCACCA | | | | | | | TFYADSVKGRFTIS | | | | | | |
| | | TCTCCAGACACAATTCCAAGAACACACTGTATCTTCAAATG | | | | | | | RHNSKNTLYLQMNS | | | | | | |
| | | AACAGTCTCAGAGTTGAGGACACGGCCGTGTATTACTGTGC | | | | | | | LRVEDTAVYYCARE | | | | | | |
| | | GAGAGAGGCTTATGCCTTTGATATCTGGGGCCAAGGGACCA | | | | | | | AYAFDIWGQGTTVT | | | | | | |
| | | CGGTCACCGTCTCCTCA | | | | | | | VSS | | | | | | |
| | VH | VH | | SEQ | | SEQ | | SEQ | | SEQ | | SEQ | | SEQ | |
| | CDR3 | Germ- | VH | ID | VH | ID | VH | ID | VH | ID | VH | ID | VH | ID | VH |
| Clone ID | Lineage | line | FR1 | NO: | CDR1 | NO: | FR2 | NO: | CDR2 | NO: | FR3 | NO: | CDR3 | NO: | FR4 |
| ADI-81761 | 37 | IGHV1- | EVQLV | 5507 | YTFTNY | 5761 | WVRQAP | 433 | IINPSA | 6159 | RVTMTT | 6461 | ARDIVQI | 6784 | WGQGTL |
| | | 46 | QSGAE | | YIH | | GQGLEW | | GSTSYA | | DTSTST | | TAAMGLE | | VTVSS |
| | | | VRKPG | | | | MG | | QKFQG | | VYMELS | | Y | | |
| | | | ASVKV | | | | | | | | SLRSED | | | | |
| | | | SCKAS | | | | | | | | TAIYYC | | | | |
| | | | G | | | | | | | | | | | | |
| ADI-81867 | 45 | IGHV3- | EVQLV | 5508 | FTFSSY | 199 | WVRQAP | 431 | VISYDG | 6160 | RFTISR | 6462 | ARGVRWN | 6785 | WGQGTL |
| | | 30 | ESGGG | | AMH | | GKGLEW | | HNKYYA | | DNSKNT | | GDYAVDY | | VTVSS |
| | | | VVQPG | | | | VA | | DSVKG | | LYLQMD | | | | |
| | | | RSLRV | | | | | | | | SLRADE | | | | |
| | | | SCAAS | | | | | | | | TAVYYC | | | | |
| | | | G | | | | | | | | | | | | |
| ADI-81655 | 28 | IGHV4- | EVQLL | 5509 | GSISSG | 5762 | WIRQHP | 450 | YIFYSG | 6161 | RVTISV | 6463 | ARGRQLI | 6786 | WGQGTL |
| | | 31 | ESGPG | | DYYWS | | GKGLEW | | STYYNP | | DTSKNQ | | NWFDP | | VTVSS |
| | | | LVRPS | | | | IG | | SLKS | | FSLKLN | | | | |
| | | | QTLSL | | | | | | | | SVTAAD | | | | |
| | | | TCTVS | | | | | | | | TAVYHC | | | | |
| | | | G | | | | | | | | | | | | |
| ADI-81791 | 67 | IGHV1- | QVQLV | 5510 | YTFTSY | 5763 | WVRQAP | 433 | IINPSG | 6162 | RVTMTR | 6464 | ARGGRGF | 6787 | WGQGTT |
| | | 46 | ESGAE | | YIH | | GQGLEW | | GSTTYA | | DTSTST | | LEGVLSD | | VTVSS |
| | | | VKKPG | | | | MG | | QKFQG | | VYMELS | | ENYYHYY | | |
| | | | ASVTV | | | | | | | | SLRSED | | GMDA | | |
| | | | SCKAP | | | | | | | | TAVYFC | | | | |
| | | | A | | | | | | | | | | | | |
| ADI-81842 | 20 | IGHV4- | EVQLL | 5511 | GSISSD | 5764 | WIRQPP | 445 | YIYHSE | 6163 | RVTISV | 6465 | AGEVVRG | 6788 | WGQGTP |
| | | 30-2 | ESGSG | | DYSWN | | GKGLEW | | STYYNP | | DRSKNQ | | NGRNAFH | | VTVSS |
| | | | LVKPS | | | | IG | | SLES | | FSLNLS | | I | | |
| | | | QTLSL | | | | | | | | SVTAAD | | | | |
| | | | TCAVS | | | | | | | | TAVYYC | | | | |
| | | | G | | | | | | | | | | | | |
| ADI-81846 | 24 | IGHV3- | EVQLL | 5373 | FTFSGY | 5765 | WVRQAP | 431 | VISYDG | 6164 | RFTISR | 6466 | ARDSHPP | 6789 | WGQGTL |
| | | 30 | ESGGG | | AMH | | GKGLEW | | INKYYA | | DNSMTT | | VHYFWSG | | VTVSS |
| | | | VVQPG | | | | VA | | DSVKG | | LFLQMN | | YYCDY | | |
| | | | RSLRL | | | | | | | | SLRAED | | | | |
| | | | SCAAS | | | | | | | | TAVYYC | | | | |
| | | | G | | | | | | | | | | | | |
| ADI-81894 | 16 | IGHV3- | QVQLV | 24 | FTFSSY | 5603 | WVRQAP | 437 | GVSGSG | 6165 | RFTISR | 777 | GKDSNLI | 6790 | WGQGTL |
| | | 23 | ESGGG | | AMS | | GKGLEW | | DGTFYA | | DNSKNT | | TMIVVDE | | VTVSS |
| | | | LVQPG | | | | VS | | DSVKG | | LYLQMN | | Y | | |
| | | | GSLRL | | | | | | | | SLRAED | | | | |
| | | | SCAAS | | | | | | | | TAVYYC | | | | |
| | | | G | | | | | | | | | | | | |
| ADI-81912 | 86 | IGHV3- | EVQLV | 5338 | FTFNNF | 5766 | WVRQAP | 431 | VISYDG | 6166 | RFTISR | 777 | ASAMVAH | 6791 | WGQGTT |
| | | 30 | ESGGG | | AFH | | GKGLEW | | SNKYYA | | DNSKNT | | YYYYYGM | | VTVSS |
| | | | VVQPG | | | | VA | | DSVKG | | LYLQMN | | DV | | |
| | | | RSLRL | | | | | | | | SLRAED | | | | |
| | | | SCAAS | | | | | | | | TAVYYC | | | | |
| | | | G | | | | | | | | | | | | |
| | SEQ | | | | | | | SEQ | | | SEQ | VH | | VH Amino | |
| | ID | | | | | | | ID | | | ID | Nucleotide | | Acid | |
| Clone ID | NO: | VH DNA | | | | | | NO: | VH Protein | | NO: | Substitution | | Substitution | |
| ADI-81761 | 1286 | GAGGTGCAGCTGGTGCAGTCTGGGGCTGAGGTGAGGAAGCC | | | | | | 7165 | EVQLVQSGAEVRKP | | 7516 | 7 | | 6 | |
| | | TGGGGCCTCAGTGAAGGTTTCCTGCAAGGCATCTGGATACA | | | | | | | GASVKVSCKASGYT | | | | | | |
| | | CCTTCACCAACTACTATATACACTGGGTGCGACAGGCCCCT | | | | | | | FTNYYIHWVRQAPG | | | | | | |
| | | GGACAAGGGCTTGAGTGGATGGGAATAATCAACCCTAGTGC | | | | | | | QGLEWMGIINPSAG | | | | | | |
| | | TGGTAGCACAAGCTACGCACAGAAGTTCCAGGGCAGAGTCA | | | | | | | STSYAQKFQGRVTM | | | | | | |
| | | CCATGACCACGGACACGTCCACGAGCACAGTCTACATGGAG | | | | | | | TTDTSTSTVYMELS | | | | | | |
| | | CTGAGCAGCCTGAGATCTGAGGACACGGCCATATATTACTG | | | | | | | SLRSEDTAIYYCAR | | | | | | |
| | | TGCGAGAGATATTGTACAAATAACAGCTGCTATGGGGCTTG | | | | | | | DIVQITAAMGLEYW | | | | | | |
| | | AGTACTGGGGCCAGGGAACCCTGGTCACCGTCTCCTCA | | | | | | | GQGTLVTVSS | | | | | | |
| ADI-81867 | 1286 | GAGGTGCAGCTGGTGGAGTCTGGGGGAGGCGTGGTCCAGCC | | | | | | 7166 | EVQLVESGGGVVQP | | 7517 | 7 | | 5 | |
| | | TGGGAGGTCCCTGAGAGTCTCCTGTGCAGCCTCTGGATTCA | | | | | | | GRSLRVSCAASGFT | | | | | | |
| | | CCTTCAGTTCCTATGCTATGCACTGGGTCCGCCAGGCTCCA | | | | | | | FSSYAMHWVRQAPG | | | | | | |
| | | GGCAAGGGGCTGGAGTGGGTGGCAGTTATATCATATGATGG | | | | | | | KGLEWVAVISYDGH | | | | | | |
| | | ACACAATAAATACTACGCAGATTCCGTGAAGGGCCGATTCA | | | | | | | NKYYADSVKGRFTI | | | | | | |
| | | CCATCTCCAGAGACAATTCCAAGAACACGCTGTATCTGCAA | | | | | | | SRDNSKNTLYLQMD | | | | | | |
| | | ATGGACAGCCTGAGAGCTGACGAGACGGCTGTGTATTACTG | | | | | | | SLRADETAVYYCAR | | | | | | |
| | | TGCGAGAGGGGTAAGGTGGAACGGTGACTACGCCGTTGACT | | | | | | | GVRWNGDYAVDYWG | | | | | | |
| | | ACTGGGGCCAGGGAACCCTGGTCACCGTCTCCTCA | | | | | | | QGTLVTVSS | | | | | | |
| ADI-81655 | 1286 | GAGGTGCAGCTGTTGGAGTCGGGCCCAGGACTGGTGAGGCC | | | | | | 7167 | EVQLLESGPGLVRP | | 7518 | 6 | | 6 | |
| | | TTCACAGACCCTGTCCCTCACCTGCACTGTCTCTGGTGGCT | | | | | | | SQTLSLTCTVSGGS | | | | | | |
| | | CCATCAGCAGTGGCGATTACTACTGGAGCTGGATCCGCCAG | | | | | | | ISSGDYYWSWIRQH | | | | | | |
| | | CACCCAGGGAAGGGCCTGGAGTGGATTGGGTACATCTTTTA | | | | | | | PGKGLEWIGYIFYS | | | | | | |
| | | CAGTGGGAGCACCTATTACAACCCGTCCCTCAAGAGTCGAG | | | | | | | GSTYYNPSLKSRVT | | | | | | |
| | | TTACCATATCAGTAGACACGTCTAAGAACCAATTCTCCCTG | | | | | | | ISVDTSKNQFSLKL | | | | | | |
| | | AAGCTGAACTCTGTGACTGCCGCGGACACGGCCGTGTATCA | | | | | | | NSVTAADTAVYHCA | | | | | | |
| | | CTGTGCGAGAGGTCGACAGCTAATAAACTGGTTCGACCCCT | | | | | | | RGRQLINWFDPWGQ | | | | | | |
| | | GGGGCCAAGGAACCCTGGTCACCGTCTCCTCA | | | | | | | GTLVTVSS | | | | | | |
| ADI-81791 | 1287 | CAGGTGCAGCTGGTGGAGTCTGGGGCTGAGGTGAAGAAGCC | | | | | | 7168 | QVQLVESGAEVKKP | | 7519 | 6 | | 6 | |
| | | TGGGGCCTCAGTGACGGTTTCCTGCAAGGCACCTGCATACA | | | | | | | GASVTVSCKAPAYT | | | | | | |
| | | CCTTCACCAGCTACTATATACACTGGGTGCGACAGGCCCCT | | | | | | | FTSYYIHWVRQAPG | | | | | | |
| | | GGACAAGGGCTTGAGTGGATGGGAATAATCAACCCTAGTGG | | | | | | | QGLEWMGIINPSGG | | | | | | |
| | | TGGTAGCACAACCTACGCCCAGAAGTTCCAGGGCAGAGTCA | | | | | | | STTYAQKFQGRVTM | | | | | | |
| | | CCATGACCAGGGACACGTCCACGAGCACAGTCTACATGGAG | | | | | | | TRDTSTSTVYMELS | | | | | | |
| | | CTGAGCAGCCTGAGATCTGAGGACACGGCCGTGTATTTCTG | | | | | | | SLRSEDTAVYFCAR | | | | | | |
| | | TGCGAGAGGAGGGCGGGGATTTTTGGAGGGGGTATTATCGG | | | | | | | GGRGFLEGVLSDEN | | | | | | |
| | | ATGAGAATTACTACCACTACTACGGTATGGACGCCTGGGGC | | | | | | | YYHYYGMDAWGQGT | | | | | | |
| | | CAAGGGACCACGGTCACCGTCTCCTCA | | | | | | | TVTVSS | | | | | | |
| ADI-81842 | 6805 | GAGGTGCAGCTGTTGGAGTCCGGCTCAGGACTGGTGAAGCC | | | | | | 7169 | EVQLLESGSGLVKP | | 7520 | 6 | | 6 | |
| | | TTCACAGACCCTGTCCCTCACCTGCGCTGTCTCTGGTGGCT | | | | | | | SQTLSLTCAVSGGS | | | | | | |
| | | CCATCAGCAGTGATGATTATTCCTGGAACTGGATCCGGCAG | | | | | | | ISSDDYSWNWIRQP | | | | | | |
| | | CCACCAGGGAAGGGCCTGGAGTGGATTGGGTACATCTATCA | | | | | | | PGKGLEWIGYIYHS | | | | | | |
| | | TAGTGAGAGTACCTACTACAACCCGTCCCTCGAGAGTCGAG | | | | | | | ESTYYNPSLESRVT | | | | | | |
| | | TCACCATATCAGTCGACAGGTCCAAGAACCAGTTCTCCCTG | | | | | | | ISVDRSKNQFSLNL | | | | | | |
| | | AACCTCAGCTCTGTGACCGCCGCGGACACGGCCGTGTATTA | | | | | | | SSVTAADTAVYYCA | | | | | | |
| | | CTGTGCCGGAGAAGTCGTTAGGGGTAACGGACGGAATGCTT | | | | | | | GEVVRGNGRNAFHI | | | | | | |
| | | TTCATATCTGGGGCCAAGGGACACCGGTCACCGTCTCCTCA | | | | | | | WGQGTPVTVSS | | | | | | |
| ADI-81846 | 1286 | TGGGAGGTCCCTGAGACTCTCCTGTGCAGCCTCCGGATTCA | | | | | | 7170 | EVQLLESGGGVVQP | | 7521 | 5 | | 5 | |
| | | CCTTCAGTGGCTATGCTATGCACTGGGTCCGCCAGGCTCCA | | | | | | | GRSLRLSCAASGFT | | | | | | |
| | | GGCAAGGGCCTAGAGTGGGTGGCAGTTATATCATATGATGG | | | | | | | FSGYAMHWVRQAPG | | | | | | |
| | | AATTAATAAATACTACGCAGACTCCGTGAAGGGCCGATTCA | | | | | | | KGLEWVAVISYDGI | | | | | | |
| | | CCATCTCCAGAGACAATTCCATGACCACGCTGTTTCTGCAA | | | | | | | NKYYADSVKGRFTI | | | | | | |
| | | ATGAACAGCCTCAGAGCTGAGGACACGGCTGTGTATTACTG | | | | | | | SRDNSMTTLFLQMN | | | | | | |
| | | TGCGAGAGATTCCCACCCTCCTGTTCATTACTTTTGGAGTG | | | | | | | SLRAEDTAVYYCAR | | | | | | |
| | | GTTATTATTGCGACTACTGGGGCCAGGGAACCCTGGTCACC | | | | | | | DSHPPVHYFWSGYY | | | | | | |
| | | GTCTCCTCA | | | | | | | CDYWGQGTLVTVSS | | | | | | |
| ADI-81894 | 1286 | CAGGTGCAGCTGGTGGAGTCTGGGGGAGGCTTGGTACAGCC | | | | | | 7171 | QVQLVESGGGLVQP | | 7522 | 5 | | 5 | |
| | | TGGGGGGTCCCTAAGACTCTCCTGTGCAGCCTCTGGATTCA | | | | | | | GGSLRLSCAASGFT | | | | | | |
| | | CCTTTAGCAGCTATGCCATGAGCTGGGTCCGCCAGGCTCCA | | | | | | | FSSYAMSWVRQAPG | | | | | | |
| | | GGGAAGGGGCTGGAGTGGGTCTCAGGTGTTAGTGGTAGTGG | | | | | | | KGLEWVSGVSGSGD | | | | | | |
| | | TGATGGCACATTCTACGCAGACTCCGTGAAGGGCCGGTTCA | | | | | | | GTFYADSVKGRFTI | | | | | | |
| | | CCATCTCCAGAGACAATTCCAAGAACACGCTGTATCTGCAA | | | | | | | SRDNSKNTLYLQMN | | | | | | |
| | | ATGAACAGCCTGAGAGCCGAGGACACGGCCGTATATTACTG | | | | | | | SLRAEDTAVYYCGK | | | | | | |
| | | TGGGAAAGATAGTAACCTTATTACTATGATAGTAGTTGATG | | | | | | | DSNLITMIVVDEYW | | | | | | |
| | | AGTACTGGGGCCAGGGAACCCTGGTCACCGTCTCCTCA | | | | | | | GQGTLVTVSS | | | | | | |
| ADI-81912 | 1287 | GAGGTGCAGCTGGTGGAGTCTGGGGGAGGCGTGGTCCAGCC | | | | | | 7172 | EVQLVESGGGVVQP | | 7523 | 5 | | 4 | |
| | | TGGGAGGTCCCTGAGACTCTCCTGTGCAGCCTCTGGATTCA | | | | | | | GRSLRLSCAASGFT | | | | | | |
| | | CCTTCAATAACTTTGCTTTTCACTGGGTCCGCCAGGCTCCA | | | | | | | FNNFAFHWVRQAPG | | | | | | |
| | | GGCAAGGGGCTAGAGTGGGTGGCAGTTATATCATATGATGG | | | | | | | KGLEWVAVISYDGS | | | | | | |
| | | AAGTAATAAATACTACGCAGACTCCGTGAAGGGCCGATTCA | | | | | | | NKYYADSVKGRFTI | | | | | | |
| | | CCATCTCCAGAGACAATTCCAAGAACACGCTGTATCTGCAA | | | | | | | SRDNSKNTLYLQMN | | | | | | |
| | | ATGAACAGCCTGAGAGCTGAGGACACGGCTGTGTATTACTG | | | | | | | SLRAEDTAVYYCAS | | | | | | |
| | | TGCGAGCGCTATGGTGGCTCATTACTACTACTACTACGGTA | | | | | | | AMVAHYYYYYGMDV | | | | | | |
| | | TGGACGTCTGGGGCCAAGGGACCACGGTCACCGTCTCCTCA | | | | | | | WGQGTTVTVSS | | | | | | |
| | VH | VH | | SEQ | | SEQ | | SEQ | | SEQ | | SEQ | | SEQ | |
| | CDR3 | Germ- | VH | ID | VH | ID | VH | ID | VH | ID | VH | ID | VH | ID | VH |
| Clone ID | Lineage | line | FR1 | NO: | CDR1 | NO: | FR2 | NO: | CDR2 | NO: | FR3 | NO: | CDR3 | NO: | FR4 |
| ADI-81848 | 26 | IGHV4- | EVQLL | 5346 | GSISSD | 5767 | WIRQHP | 450 | YIYYSG | 611 | RVTISV | 1009 | ARNSRFL | 6792 | WGQGTL |
| | | 31 | ESGPG | | IYYWS | | GKGLEW | | STYYNP | | DTSKNQ | | GTNYFDY | | VTVSS |
| | | | LVKPS | | | | IG | | SLKS | | FSLKLS | | | | |
| | | | QTLSL | | | | | | | | SVTAAD | | | | |
| | | | TCTVS | | | | | | | | TAVYYC | | | | |
| | | | G | | | | | | | | | | | | |
| ADI-81915 | 89 | IGHV4- | EVQLL | 5346 | DSISSG | 418 | WIRQHP | 450 | YIYYSG | 611 | RVTMSL | 6467 | ARDWGRG | 6793 | WGQGTT |
| | | 31 | ESGPG | | GYYWS | | GKGLEW | | STYYNP | | DTSKNQ | | SSSSPEH | | VTVSS |
| | | | LVKPS | | | | IG | | SLKS | | FSLKLS | | DAFDI | | |
| | | | QTLSL | | | | | | | | SVTAAD | | | | |
| | | | TCTVS | | | | | | | | TAVYYC | | | | |
| | | | G | | | | | | | | | | | | |
| ADI-81605 | 63 | IGHV3- | QVQLV | 45 | FTFSSY | 262 | WVRQAP | 431 | LIWYDG | 6167 | RFTISR | 777 | ARAVPGT | 6794 | WGQGTL |
| | | 33 | QSGGG | | GMH | | GKGLEW | | SNKYYA | | DNSKNT | | NYFDY | | VTVSS |
| | | | VVQPG | | | | VA | | DSVKG | | LYLQMN | | | | |
| | | | RSLRL | | | | | | | | SLRAED | | | | |
| | | | SCVAS | | | | | | | | TAVYYC | | | | |
| | | | G | | | | | | | | | | | | |
| ADI-81870 | 29 | IGHV4- | EVQLL | 5346 | GSISSG | 5768 | WIRQHP | 450 | YIYYSG | 611 | RVTISV | 1009 | ARTYYYD | 6795 | WGQGTL |
| | | 31 | ESGPG | | GYYWS | | GKGLEW | | STYYNP | | DTSKNQ | | SSGNYYQ | | VTVSS |
| | | | LVKPS | | | | IG | | SLKS | | FSLKLS | | YYFDY | | |
| | | | QTLSL | | | | | | | | SVTAAD | | | | |
| | | | TCTVS | | | | | | | | TAVYYC | | | | |
| | | | G | | | | | | | | | | | | |
| ADI-81902 | 76 | IGHV1- | QVQLV | 5512 | YTFTNY | 5761 | WVRQAP | 433 | LINPSG | 6168 | RVTLTR | 6468 | ARGGRGF | 6796 | WGQGTT |
| | | 46 | QSGAA | | YIH | | GQGLEW | | GSSNYA | | GTATNT | | LEKILSD | | VTVSS |
| | | | VKKPG | | | | MG | | QKFQG | | VYMELS | | EGYYDYF | | |
| | | | ASVKV | | | | | | | | SLRSED | | GMDV | | |
| | | | SCQAS | | | | | | | | MAVYYC | | | | |
| | | | G | | | | | | | | | | | | |
| ADI-81617 | 74 | IGHV3- | RSSWW | 5513 | FTFSSY | 5769 | WVRQAP | 5867 | ALSASG | 6169 | RFTISR | 6469 | AKQAGSP | 6797 | WGQGTL |
| | | 23 | QSGGG | | ALS | | GKGLEC | | DAPYYA | | DNSRNT | | PDYFDY | | VTVSS |
| | | | LVQPG | | | | VS | | DSVKG | | LYLQMN | | | | |
| | | | GPLRL | | | | | | | | SLRAED | | | | |
| | | | SCAAS | | | | | | | | TAVYYC | | | | |
| | | | G | | | | | | | | | | | | |
| ADI-81570 | 33 | IGHV3- | QVQLV | 5514 | FIVSSN | 260 | WVRQAP | 437 | VIYPGG | 649 | RFTISR | 6470 | ARDYGDF | 6798 | WGQGTL |
| | | 53 | ESGGG | | YMS | | GKGLEW | | STFYAD | | DSSKNT | | YFDF | | VTVSS |
| | | | LIQPG | | | | VS | | SVKG | | LFLQMN | | | | |
| | | | GSLRL | | | | | | | | SLRAED | | | | |
| | | | SCAAS | | | | | | | | TAVYYC | | | | |
| | | | E | | | | | | | | | | | | |
| | SEQ | | | | | | | SEQ | | | SEQ | VH | | VH Amino | |
| | ID | | | | | | | ID | | | ID | Nucleotide | | Acid | |
| Clone ID | NO: | VH DNA | | | | | | NO: | VH Protein | | NO: | Substitution | | Substitution | |
| ADI-81848 | 1286 | GAGGTGCAGCTGTTGGAGTCGGGCCCAGGACTGGTGAAGCC | | | | | | 7173 | EVQLLESGPGLVKP | | 7524 | 4 | | 3 | |
| | | TTCACAGACCCTGTCCCTCACCTGCACTGTCTCTGGTGGCT | | | | | | | SQTLSLTCTVSGGS | | | | | | |
| | | CCATCAGCAGTGATATTTACTACTGGAGCTGGATCCGCCAG | | | | | | | ISSDIYYWSWIRQH | | | | | | |
| | | CACCCAGGGAAGGGCCTGGAGTGGATTGGGTACATCTATTA | | | | | | | PGKGLEWIGYIYYS | | | | | | |
| | | CAGTGGGAGCACCTACTACAACCCGTCCCTCAAGAGTCGAG | | | | | | | GSTYYNPSLKSRVT | | | | | | |
| | | TTACCATATCAGTAGACACGTCTAAGAACCAGTTCTCCCTG | | | | | | | ISVDTSKNQFSLKL | | | | | | |
| | | AAGCTGAGCTCTGTGACTGCCGCGGACACGGCCGTGTATTA | | | | | | | SSVTAADTAVYYCA | | | | | | |
| | | CTGTGCGAGAAATTCGAGATTCTTAGGGACAAACTACTTTG | | | | | | | RNSRFLGTNYFDYW | | | | | | |
| | | ACTACTGGGGCCAGGGAACCCTGGTCACCGTCTCCTCA | | | | | | | GQGTLVTVSS | | | | | | |
| ADI-81915 | 1287 | GAGGTGCAGCTGTTGGAGTCGGGCCCAGGACTGGTGAAGCC | | | | | | 7174 | EVQLLESGPGLVKP | | 7525 | 4 | | 4 | |
| | | TTCACAGACCCTGTCCCTCACCTGCACTGTCTCTGGTGACT | | | | | | | SQTLSLTCTVSGDS | | | | | | |
| | | CCATCAGTAGTGGTGGTTACTACTGGAGCTGGATCCGCCAG | | | | | | | ISSGGYYWSWIRQH | | | | | | |
| | | CACCCAGGGAAGGGCCTGGAGTGGATTGGGTACATCTATTA | | | | | | | PGKGLEWIGYIYYS | | | | | | |
| | | CAGTGGGAGCACCTACTACAACCCGTCCCTCAAGAGTCGAG | | | | | | | GSTYYNPSLKSRVT | | | | | | |
| | | TTACCATGTCATTAGACACGTCTAAGAACCAGTTCTCCCTG | | | | | | | MSLDTSKNQFSLKL | | | | | | |
| | | AAGCTGAGCTCTGTGACTGCCGCGGACACGGCCGTGTATTA | | | | | | | SSVTAADTAVYYCA | | | | | | |
| | | CTGTGCGAGAGATTGGGGTCGCGGGTCTAGCAGCTCGCCGG | | | | | | | RDWGRGSSSSPEHD | | | | | | |
| | | AACATGATGCTTTTGATATCTGGGGCCAAGGGACCACGGTC | | | | | | | AFDIWGQGTTVTVS | | | | | | |
| | | ACCGTCTCCTCA | | | | | | | S | | | | | | |
| ADI-81605 | 1286 | CAGGTGCAGCTGGTGCAGTCTGGGGGAGGCGTGGTCCAGCC | | | | | | 7175 | QVQLVQSGGGVVQP | | 7526 | 2 | | 2 | |
| | | TGGGAGGTCCCTGAGACTCTCCTGTGTAGCGTCTGGATTCA | | | | | | | GRSLRLSCVASGFT | | | | | | |
| | | CCTTCAGTAGCTATGGCATGCACTGGGTCCGCCAGGCTCCA | | | | | | | FSSYGMHWVRQAPG | | | | | | |
| | | GGCAAGGGGCTGGAGTGGGTGGCACTTATATGGTATGATGG | | | | | | | KGLEWVALIWYDGS | | | | | | |
| | | AAGTAATAAATATTATGCAGACTCCGTGAAGGGCCGATTCA | | | | | | | NKYYADSVKGRFTI | | | | | | |
| | | CCATCTCCAGAGACAATTCCAAGAACACGCTGTATCTGCAA | | | | | | | SRDNSKNTLYLQMN | | | | | | |
| | | ATGAACAGCCTGAGAGCCGAGGACACGGCTGTGTATTACTG | | | | | | | SLRAEDTAVYYCAR | | | | | | |
| | | TGCGAGAGCGGTGCCTGGTACTAACTACTTTGACTACTGGG | | | | | | | AVPGTNYFDYWGQG | | | | | | |
| | | GCCAGGGAACCCTGGTCACCGTCTCCTCA | | | | | | | TLVTVSS | | | | | | |
| ADI-81870 | 1286 | GAGGTGCAGCTGTTGGAGTCGGGCCCAGGACTGGTGAAGCC | | | | | | 7176 | EVQLLESGPGLVKP | | 7527 | 1 | | 1 | |
| | | TTCACAGACCCTGTCCCTCACCTGCACTGTCTCTGGTGGCT | | | | | | | SQTLSLTCTVSGGS | | | | | | |
| | | CCATCAGCAGTGGTGGTTACTACTGGAGCTGGATCCGCCAG | | | | | | | ISSGGYYWSWIRQH | | | | | | |
| | | CACCCAGGGAAGGGCCTGGAGTGGATTGGGTACATCTATTA | | | | | | | PGKGLEWIGYIYYS | | | | | | |
| | | CAGTGGGAGCACCTACTACAACCCGTCCCTCAAGAGTCGAG | | | | | | | GSTYYNPSLKSRVT | | | | | | |
| | | TTACCATATCAGTAGACACGTCTAAGAACCAGTTCTCCCTG | | | | | | | ISVDTSKNQFSLKL | | | | | | |
| | | AAGCTGAGCTCTGTGACTGCCGCGGACACGGCCGTTTATTA | | | | | | | SSVTAADTAVYYCA | | | | | | |
| | | TTGTGCGAGGACGTATTACTATGATAGCAGTGGTAATTACT | | | | | | | RTYYYDSSGNYYQY | | | | | | |
| | | ACCAGTACTACTTTGACTACTGGGGCCAGGGAACCCTGGTC | | | | | | | YFDYWGQGTLVTVS | | | | | | |
| | | ACCGTCTCCTCA | | | | | | | S | | | | | | |
| ADI-81902 | 1287 | CAGGTCCAGCTGGTGCAGTCTGGGGCTGCGGTGAAGAAGCC | | | | | | 7177 | QVQLVQSGAAVKKP | | 7528 | 13 | | 12 | |
| | | TGGGGCCTCAGTGAAAGTTTCCTGTCAGGCATCTGGATACA | | | | | | | GASVKVSCQASGYT | | | | | | |
| | | CCTTCACTAATTACTATATTCACTGGGTGCGACAGGCCCCT | | | | | | | FTNYYIHWVRQAPG | | | | | | |
| | | GGACAAGGGCTTGAGTGGATGGGATTAATCAATCCTAGTGG | | | | | | | QGLEWMGLINPSGG | | | | | | |
| | | TGGGAGCTCAAACTACGCACAGAAGTTCCAGGGCAGAGTCA | | | | | | | SSNYAQKFQGRVTL | | | | | | |
| | | CCTTGACCAGGGGCACGGCCACGAACACAGTTTACATGGAG | | | | | | | TRGTATNTVYMELS | | | | | | |
| | | CTGAGCAGCCTGAGATCCGAGGACATGGCCGTGTATTATTG | | | | | | | SLRSEDMAVYYCAR | | | | | | |
| | | TGCGAGAGGAGGGCGGGGATTTTTGGAGAAAATTTTATCGG | | | | | | | GGRGFLEKILSDEG | | | | | | |
| | | ATGAGGGTTACTACGACTATTTCGGTATGGACGTCTGGGGC | | | | | | | YYDYFGMDVWGQGT | | | | | | |
| | | CAAGGGACCACGGTCACCGTCTCCTCA | | | | | | | TVTVSS | | | | | | |
| ADI-81617 | 1286 | AGGTCCAGCTGGTGGCAGTCTGGGGGAGGCTTGGTACAGCC | | | | | | 7178 | RSSWWQSGGGLVQP | | 7529 | 12 | | 9 | |
| | | TGGGGGGCCCCTGCGACTCTCCTGTGCAGCCTCTGGATTCA | | | | | | | GGPLRLSCAASGFT | | | | | | |
| | | CCTTTAGCAGCTATGCCTTGAGCTGGGTCCGCCAGGCTCCA | | | | | | | FSSYALSWVRQAPG | | | | | | |
| | | GGGAAGGGGCTGGAGTGCGTCTCAGCTCTTAGTGCTAGTGG | | | | | | | KGLECVSALSASGD | | | | | | |
| | | TGATGCCCCTTACTACGCAGACTCCGTGAAGGGCCGGTTCA | | | | | | | APYYADSVKGRFTI | | | | | | |
| | | CCATCTCCAGAGACAATTCCCGGAACACGCTGTATCTGCAA | | | | | | | SRDNSRNTLYLQMN | | | | | | |
| | | ATGAACAGCCTGAGAGCCGAGGACACGGCCGTATATTACTG | | | | | | | SLRAEDTAVYYCAK | | | | | | |
| | | TGCGAAACAAGCTGGTTCACCCCCCGACTACTTTGACTACT | | | | | | | QAGSPPDYFDYWGQ | | | | | | |
| | | GGGGCCAGGGAACCCTGGTCACCGTCTCCTCA | | | | | | | GTLVTVSS | | | | | | |
| ADI-81570 | 1286 | CAGGTGCAGCTGGTGGAGTCTGGAGGAGGCTTGATCCAGCC | | | | | | 7179 | QVQLVESGGGLIQP | | 7530 | 8 | | 6 | |
| | | TGGGGGGTCCCTGAGACTCTCCTGTGCAGCCTCTGAATTCA | | | | | | | GGSLRLSCAASEFI | | | | | | |
| | | TCGTCAGTAGCAACTACATGAGTTGGGTCCGCCAGGCTCCA | | | | | | | VSSNYMSWVRQAPG | | | | | | |
| | | GGGAAGGGGCTGGAGTGGGTCTCAGTTATTTATCCCGGTGG | | | | | | | KGLEWVSVIYPGGS | | | | | | |
| | | TAGCACATTCTACGCAGACTCCGTGAAGGGCCGATTCACCA | | | | | | | TFYADSVKGRFTIS | | | | | | |
| | | TCTCCAGAGACAGTTCCAAGAACACACTGTTTCTTCAAATG | | | | | | | RDSSKNTLFLQMNS | | | | | | |
| | | AACAGCCTGAGAGCCGAGGACACGGCCGTGTACTACTGTGC | | | | | | | LRAEDTAVYYCARD | | | | | | |
| | | GAGGGATTACGGTGACTTCTACTTTGACTTCTGGGGCCAGG | | | | | | | YGDFYFDFWGQGTL | | | | | | |
| | | GAACCCTGGTCACCGTCTCCTCA | | | | | | | VTVSS | | | | | | |
| | VH | VH | | SEQ | | SEQ | | SEQ | | SEQ | | SEQ | | SEQ | |
| | CDR3 | Germ- | VH | ID | VH | ID | VH | ID | VH | ID | VH | ID | VH | ID | VH |
| Clone ID | Lineage | line | FR1 | NO: | CDR1 | NO: | FR2 | NO: | CDR2 | NO: | FR3 | NO: | CDR3 | NO: | FR4 |
| ADI-81664 | 36 | IGHV3- | EVQLV | 5362 | FTFSSF | 5770 | WVRQAP | 437 | AISNSG | 6170 | RFTISR | 6471 | AKQAYSS | 6799 | WGQGTL |
| | | 23 | ESGGG | | AMS | | GKGLEW | | GSTYYA | | DNSKNT | | GWYAAGL | | VTVSS |
| | | | LIQPG | | | | VS | | DSVKG | | LYLQMN | | VFDY | | |
| | | | GSLRL | | | | | | | | SLRAED | | | | |
| | | | SCAAS | | | | | | | | TALYYC | | | | |
| | | | G | | | | | | | | | | | | |
| ADI-81666 | 18 | IGHV4- | EVQLL | 5335 | GSISNY | 5771 | WIRQPP | 445 | YIFYGG | 6171 | RLTISV | 6472 | ARDLGYS | 6779 | WGQGTT |
| | | 59 | ESGPG | | YWS | | GKGLEW | | STNYNP | | DTSKNQ | | SGWPDAF | | VTVSS |
| | | | LVKPS | | | | IG | | SLRS | | FSLRLS | | DI | | |
| | | | ETLSL | | | | | | | | SVTAAD | | | | |
| | | | TCTVS | | | | | | | | TAVYYC | | | | |
| | | | G | | | | | | | | | | | | |
| ADI-81809 | 83 | IGHV3- | EVQLL | 5373 | FTFSSY | 199 | WVRQAP | 431 | VISSDG | 6172 | RFTISR | 6473 | ARDAENL | 6800 | WGQGTL |
| | | 30 | ESGGG | | AMH | | GKGLEW | | SMKFYA | | DNSKNT | | VTEFDY | | VTVSS |
| | | | VVQPG | | | | VA | | DSVKG | | LFLQMN | | | | |
| | | | RSLRL | | | | | | | | SLRPED | | | | |
| | | | SCAAS | | | | | | | | TAVYYC | | | | |
| | | | G | | | | | | | | | | | | |
| ADI-81539 | 7 | IGHV1- | QVQLV | 35 | YTFTTY | 5772 | WVRLAP | 5868 | IINPSG | 6173 | RVTMTR | 881 | VREGCSS | 6801 | WGQGTL |
| | | 46 | QSGAE | | YMH | | GQGLEW | | GGTSYA | | DTSTST | | TSCFDY | | VTVSS |
| | | | VKKPG | | | | MG | | QKFQG | | VYMELS | | | | |
| | | | ASVKV | | | | | | | | SLRSED | | | | |
| | | | SCKAS | | | | | | | | TAVYYC | | | | |
| | | | G | | | | | | | | | | | | |
| ADI-81648 | 21 | IGHV3- | EVQLV | 5338 | FTFSSY | 262 | WVRQAP | 431 | VIWYDG | 679 | RFTISR | 777 | ARDKIIW | 6802 | WGKGTT |
| | | 33 | ESGGG | | GMH | | GKGLEW | | SNKYYA | | DNSKNT | | ESGYHKN | | VTVSS |
| | | | VVQPG | | | | VA | | DSVKG | | LYLQMN | | DV | | |
| | | | RSLRL | | | | | | | | SLRAED | | | | |
| | | | SCAAS | | | | | | | | TAVYYC | | | | |
| | | | G | | | | | | | | | | | | |

| | SEQ | | SEQ | | SEQ | VH | VH Amino |
|---|---|---|---|---|---|---|---|
| | ID | | ID | | ID | Nucleotide | Acid |
| Clone ID | NO: | VH DNA | NO: | VH Protein | NO: | Substitution | Substitution |
| ADI-81664 | 1286 | TGGGGGGTCCCTGAGACTCTCCTGTGCAGCCTCTGGATTCA | 7180 | EVQLVESGGGLIQP | 7531 | 6 | 4 |
| | | CCTTTAGCAGCTTTGCCATGAGCTGGGTCCGCCAGGCTCCA | | GGSLRLSCAASGFT | | | |
| | | GGGAAGGGGCTGGAGTGGGTCTCAGCTATTAGTAATAGTGG | | FSSFAMSWVRQAPG | | | |
| | | TGGTAGCACATACTACGCAGACTCCGTGAAGGGCCGCTTCA | | KGLEWVSAISNSGG | | | |
| | | CCATCTCCAGAGACAATTCCAAGAACACGCTGTATCTGCAA | | STYYADSVKGRFTI | | | |
| | | ATGAACAGCCTGAGAGCCGAGGACACGGCCCTTTATTACTG | | SRDNSKNTLYLQMN | | | |
| | | TGCGAAACAAGCGTATAGCAGTGGCTGGTACGCCGCCGGGT | | SLRAEDTALYYCAK | | | |
| | | TAGTATTTGACTACTGGGGCCAGGGAACCCTGGTCACCGTC | | QAYSSGWYAAGLVF | | | |
| | | TCCTCA | | DYWGQGTLVTVSS | | | |
| ADI-81666 | 1287 | GAGGTGCAGCTGTTGGAGTCGGGCCCAGGACTGGTGAAGCC | 7181 | EVQLLESGPGLVKP | 7532 | 6 | 6 |
| | | TTCGGAGACCCTGTCCCTCACCTGCACTGTCTCTGGCGGCT | | SETLSLTCTVSGGS | | | |
| | | CCATCAGTAATTACTACTGGAGCTGGATCCGGCAGCCCCCA | | ISNYYWSWIRQPPG | | | |
| | | GGGAAGGGACTGGAGTGGATTGGGTATATCTTTTACGGTGG | | KGLEWIGYIFYGGS | | | |
| | | CAGCACCAACTACAACCCCTCTCTCAGGAGTCGACTCACCA | | TNYNPSLRSRLTIS | | | |
| | | TATCAGTAGACACGTCCAAGAACCAGTTCTCCCTGAGGCTG | | VDTSKNQFSLRLSS | | | |
| | | AGCTCTGTGACCGCGGCGGACACGGCCGTTTATTACTGTGC | | VTAADTAVYYCARD | | | |
| | | GAGAGATCTCGGGTATAGCAGTGGCTGGCCTGATGCTTTTG | | LGYSSGWPDAFDIW | | | |
| | | ATATCTGGGGCCAAGGGACCACGGTCACCGTCTCCTCA | | GQGTTVTVSS | | | |
| ADI-81809 | 1286 | GAGGTGCAGCTGTTGGAGTCTGGGGGAGGCGTGGTCCAGCC | 7182 | EVQLLESGGGVVQP | 7533 | 6 | 5 |
| | | TGGGAGGTCCCTGAGACTCTCCTGTGCAGCCTCTGGATTCA | | GRSLRLSCAASGFT | | | |
| | | CCTTCAGTAGCTATGCTATGCACTGGGTCCGCCAGGCTCCA | | FSSYAMHWVRQAPG | | | |
| | | GGCAAGGGGCTGGAGTGGGTGGCAGTTATATCATCTGATGG | | KGLEWVAVISSDGS | | | |
| | | AAGCATGAAATTCTACGCAGACTCCGTGAAGGGCCGATTCA | | MKFYADSVKGRFTI | | | |
| | | CCATCTCCAGAGACAATTCCAAGAACACGCTGTTTCTGCAA | | SRDNSKNTLFLQMN | | | |
| | | ATGAACAGCCTCAGACCTGAGGACACGGCTGTATATTACTG | | SLRPEDTAVYYCAR | | | |
| | | TGCGAGAGATGCCGAAAACCTGGTTACCGAGTTTGACTACT | | DAENLVTEFDYWGQ | | | |
| | | GGGGCCAGGGAACCCTGGTCACCGTCTCCTCA | | GTLVTVSS | | | |
| ADI-81539 | 1286 | CAGGTGCAGCTGGTGCAGTCTGGGGCTGAGGTGAAGAAGCC | 7183 | QVQLVQSGAEVKKP | 7534 | 4 | 3 |
| | | TGGGGCCTCAGTGAAGGTTTCCTGCAAGGCATCTGGATACA | | GASVKVSCKASGYT | | | |
| | | CCTTCACCACTTACTATATGCACTGGGTGCGACTGGCCCCT | | FTTYYMHWVRLAPG | | | |
| | | GGACAAGGGCTTGAGTGGATGGGAATAATCAACCCTAGTGG | | QGLEWMGIINPSGG | | | |
| | | TGGTGGCACAAGCTACGCACAGAAGTTCCAGGGCAGAGTCA | | GTSYAQKFQGRVTM | | | |
| | | CCATGACCAGGGACACGTCCACGAGCACAGTCTACATGGAG | | TRDTSTSTVYMELS | | | |
| | | CTGAGCAGCCTGAGATCTGAGGACACGGCCGTGTATTATTG | | SLRSEDTAVYYCVR | | | |
| | | TGTGAGAGAAGGTTGTAGTAGTACCAGCTGCTTTGACTACT | | EGCSSTSCFDYWGQ | | | |
| | | GGGGCCAGGGAACCCTGGTCACCGTCTCCTCA | | GTLVTVSS | | | |
| ADI-81648 | 1291 | GAGGTGCAGCTGGTGGAGTCTGGGGGAGGCGTGGTCCAGCC | 7184 | EVQLVESGGGVVQP | 7535 | 0 | 0 |
| | | TGGGAGGTCCCTGAGACTCTCCTGTGCAGCGTCTGGATTCA | | GRSLRLSCAASGFT | | | |
| | | CCTTCAGTAGCTATGGCATGCACTGGGTCCGCCAGGCTCCA | | FSSYGMHWVRQAPG | | | |
| | | GGCAAGGGGCTGGAGTGGGTGGCAGTTATATGGTATGATGG | | KGLEWVAVIWYDGS | | | |
| | | AAGTAATAAATACTATGCAGACTCCGTGAAGGGCCGATTCA | | NKYYADSVKGRFTI | | | |
| | | CCATCTCCAGAGACAATTCCAAGAACACGCTGTATCTGCAA | | SRDNSKNTLYLQMN | | | |
| | | ATGAACAGCCTGAGAGCCGAGGACACGGCTGTGTATTACTG | | SLRAEDTAVYYCAR | | | |
| | | TGCGAGAGACAAAATCATTTGGGAGAGTGGTTATCACAAAA | | DKIIWESGYHKNYY | | | |
| | | ATTACTACTACTACTACTACATGGACGTCTGGGGCAAAGGG | | YYYYMDVWGKGTTV | | | |
| | | ACCACGGTCACCGTCTCCTCA | | TVSS | | | |

TABLE 6

| | | | SEQ | | SEQ | | SEQ | | SEQ | | SEQ | | SEQ | |
|---|---|---|---|---|---|---|---|---|---|---|---|---|---|---|
| | VL | VL | ID | VL | ID | VL | ID | VL | ID | VL | ID | VL | ID | VL |
| Clone ID | Germline | FR1 | NO: | CDR1 | NO: | FR2 | NO: | CDR2 | NO: | FR3 | NO: | CDR3 | NO: | FR4 |
| ADI-81604 | IGKV1D-39 | DTLMKQ | 3528 | AASKSS | 3709 | WYQQKP | 3906 | GASSRA | 4024 | GVPDRF | 4153 | QQSDSS | 4326 | FGRGTK |
| | | SPSSLL | | GSYLT | | GQAPRV | | S | | SGSGSG | | PFT | | VEIK |
| | | ASVGDA | | | | LIY | | | | TDFTLT | | | | |
| | | VISSS | | | | | | | | ISRLQP | | | | |
| | | | | | | | | | | EDFATY | | | | |
| | | | | | | | | | | FC | | | | |
| ADI-81710 | IGLV3-21 | SYELTQ | 3529 | GGNNIG | 3710 | WYQQKP | 3907 | DDSDRP | 2399 | GIPERF | 2545 | QVWDSN | 4327 | FGGGTK |
| | | PPSVSV | | SKGVH | | GQAPVL | | S | | SGSNSG | | SDLVV | | LTVL |
| | | APGQTA | | | | VVYDDS | | | | NTATLT | | | | |
| | | SITC | | | | DRPSGV | | | | ISRVEA | | | | |
| | | | | | | Y | | | | GDEADY | | | | |
| | | | | | | | | | | YC | | | | |
| ADI-81579 | IGKV1D-39 | DIQMTQ | 1878 | RSSQYV | 3711 | WYQLKP | 3908 | SASSLQ | 4025 | GVPSRF | 4154 | QQTFGH | 4328 | FGQGTK |
| | | SPSSLS | | SNFLN | | GKAPML | | D | | SGGGSG | | PWT | | VEIK |
| | | ASVGDR | | | | LIY | | | | TDFTLT | | | | |
| | | VTITC | | | | | | | | ITNVEP | | | | |
| | | | | | | | | | | ADFATY | | | | |
| | | | | | | | | | | SC | | | | |
| ADI-81656 | IGKV1D-39 | DITVTQ | 3530 | RANESI | 3712 | WYQLKP | 3909 | AASSLP | 4026 | GVPSRF | 2567 | QQSYSF | 4329 | FGQGTK |
| | | SPSSLS | | STFLS | | GKAPKL | | STLQS | | SGSGSG | | PWT | | VEIK |
| | | TSVGDR | | | | LIY | | | | TDFTLT | | | | |
| | | VTITC | | | | | | | | ISSLQP | | | | |
| | | | | | | | | | | EDFATY | | | | |
| | | | | | | | | | | FC | | | | |
| ADI-81640 | IGLV7-46 | PSEVTQ | 3531 | GSSTGP | 3713 | WFQQRP | 3910 | DTNYRQ | 4027 | WTPARF | 4155 | LLDYTY | 4330 | FGGGTK |
| | | EPSLTV | | VTTGHW | | GQAPRT | | S | | SGSLVG | | FRI | | LTVL |
| | | SPGGTV | | PF | | LFC | | | | GKAALT | | | | |
| | | TLTC | | | | | | | | LSGAQP | | | | |
| | | | | | | | | | | EDEAVY | | | | |
| | | | | | | | | | | YC | | | | |
| ADI-81586 | IGKV1-5 | DIQMTQ | 3532 | RASQSI | 3714 | WYQQKP | 2371 | DVSSLK | 4028 | GVPSRF | 4156 | QQYNSY | 4331 | FGQGTK |
| | | TPSTLS | | DTWLA | | GKAPEL | | RGER | | SGSGSG | | PWT | | VEIK |
| | | ASVGDR | | | | LIY | | | | TEFTLT | | | | |
| | | VTITC | | | | | | | | ISRLQP | | | | |
| | | | | | | | | | | DDLATY | | | | |
| | | | | | | | | | | YC | | | | |
| ADI-81663 | IGKV1-13 | ETTIKQ | 3533 | RASQSI | 3715 | WYQQKP | 3911 | DVSTLQ | 4029 | GVPSRF | 4157 | QHYHSY | 4332 | FGGGTK |
| | | SPSSLS | | SRFLK | | GKAHKL | | S | | SGSGCG | | PLT | | VEIK |
| | | ALVGDR | | | | MIH | | | | TDFTLT | | | | |
| | | VTITC | | | | | | | | ISSLQP | | | | |
| | | | | | | | | | | EDFATY | | | | |
| | | | | | | | | | | YC | | | | |

| | | | | | | VL | VL Amino |
|---|---|---|---|---|---|---|---|
| | SEQ | | SEQ | | SEQ | Nucleotide | Acid |
| | ID | | ID | | ID | Sub- | Sub- |
| Clone ID | NO: | VL DNA | NO: | VL Protein | NO: | stitutions | stitutions |
| ADI-81604 | 2941 | GACACACTGATGAAGCAGTCTCCATCCTCCTTGTTGGCATCAG | 4606 | DTLMKQSPSSLLASV | 4960 | 33 | 20 |
| | | TAGGAGACGCCGTCATCTCCAGCAGCGCCGCAAGTAAGAGCAG | | GDAVISSSAASKSSG | | | |
| | | CGGCAGCTATTTAACTTGGTATCAGCAAAAACCAGGCCAAGCC | | SYLTWYQQKPGQAPR | | | |
| | | CCCAGGGTCCTGATCTATGGTGCATCCAGCAGGGCCAGTGGGG | | VLIYGASSRASGVPD | | | |
| | | TCCCAGACAGGTTCAGTGGCAGTGGATCTGGGACAGATTTCAC | | RFSGSGSGTDFTLTI | | | |
| | | TCTCACCATCAGCAGACTGCAACCTGAAGATTTTGCAACGTAT | | SRLQPEDFATYFCQQ | | | |
| | | TTCTGTCAACAGAGTGACAGTTCCCCGTTCACTTTCGGCCGGG | | SDSSPFTFGRGTKVE | | | |
| | | GGACCAAGGTGGAGATCAAA | | IK | | | |
| ADI-81710 | 2939 | TCGTATGAGCTGACACAGCCACCCTCGGTGTCAGTGGCCCCAG | 4607 | SYELTQPPSVSVAPG | 4961 | 32 | 12 |
| | | GACAGACGGCCAGCATTACCTGTGGGGGAAACAACATTGGAAG | | QTASITCGGNNIGSK | | | |
| | | TAAAGGTGTTCACTGGTACCAGCAGAAGCCAGGCCAGGCCCCT | | GVHWYQQKPGQAPVL | | | |
| | | GTGTTGGTCGTCTATGATGATAGCGACCGGCCCTCAGGGGTCT | | VVYDDSDRPSGVYDD | | | |
| | | ATGATGATAGCGACCGGCCCTCAGGGATCCCTGAGCGATTCTC | | SDRPSGIPERFSGSN | | | |
| | | TGGCTCCAACTCTGGGAACACGGCCACCCTGACCATCAGCAGG | | SGNTATLTISRVEAG | | | |
| | | GTCGAAGCCGGGGATGAGGCCGACTATTACTGTCAGGTGTGGG | | DEADYYCQVWDSNSD | | | |
| | | ATAGTAATAGTGATCTTGTGGTATTCGGCGGGGGGACCAAGCT | | LWVFGGGTKLTVL | | | |
| | | CACCGTCCTA | | | | | |
| ADI-81579 | 2937 | GACATCCAGATGACCCAGTCTCCGTCCTCTCTGTCCGCATCTG | 4608 | DIQMTQSPSSLSASV | 4962 | 23 | 16 |
| | | TAGGAGACAGAGTCACCATCACTTGTCGATCAAGTCAGTATGT | | GDRVTITCRSSQYVS | | | |
| | | CAGTAATTTTTTAAATTGGTATCAACTAAAACCAGGGAAAGCC | | NFLNWYQLKPGKAPM | | | |
| | | CCGATGCTCCTGATCTACTCTGCATCCAGTTTACAAGATGGGG | | LLIYSASSLQDGVPS | | | |
| | | TCCCATCCAGGTTCAGTGGCGGTGGATCTGGGACAGATTTCAC | | RFSGGGSGTDFTLTI | | | |
| | | TCTCACCATCACCAATGTTGAACCTGCAGATTTTGCGACCTAC | | TNVEPADFATYSCQQ | | | |
| | | TCCTGTCAGCAGACTTTTGGTCACCCGTGGACCTTCGGCCAAG | | TFGHPWTFGQGTKVE | | | |
| | | GGACCAAGGTGGAAATCAAA | | IK | | | |
| ADI-81656 | 2937 | GACATCACAGTGACCCAGTCTCCATCGTCCCTGTCTACATCTG | 4609 | DITVTQSPSSLSTSV | 4963 | 20 | 12 |
| | | TGGGAGACAGAGTCACCATCACTTGCCGGGCAAATGAGAGCAT | | GDRVTITCRANESIS | | | |
| | | TAGTACCTTTTTAAGTTGGTATCAGCTGAAACCAGGGAAAGCC | | TFLSWYQLKPGKAPK | | | |
| | | CCTAAGCTCCTGATCTATGCTGCATCCAGTCTACCCTCCACTT | | LLIYAASSLPSTLQS | | | |
| | | TACAAAGTGGGGTCCCATCAAGGTTCAGTGGCAGTGGATCTGG | | GVPSRFSGSGSGTDF | | | |
| | | GACAGATTTCACTCTCACCATCAGCAGTCTGCAACCTGAAGAT | | TLTISSLOPEDFATY | | | |
| | | TTTGCAACCTACTTCTGTCAACAAAGTTACAGTTTCCCGTGGA | | FCQQSYSFPWTFGQG | | | |
| | | CGTTCGGCCAAGGGACCAAGGTGGAAATCAAA | | TKVEIK | | | |
| ADI-81640 | 2939 | CCGTCTGAGGTGACTCAGGAGCCCTCACTGACTGTGTCCCCAG | 4610 | PSEVTQEPSLTVSPG | 4964 | 19 | 13 |
| | | GAGGGACAGTCACTCTCACCTGTGGCTCCAGCACTGGACCTGT | | GTVTLTCGSSTGPVT | | | |
| | | CACCACTGGTCATTGGCCCTTTTGGTTCCAGCAGAGGCCTGGC | | TGHWPFWFQQRPGQA | | | |
| | | CAAGCCCCCAGGACATTATTTTGTGATACAAATTACAGGCAGT | | PRTLFCDTNYRQSWT | | | |
| | | CTTGGACCCCTGCCAGGTTTTCAGGCTCCCTCGTCGGGGGCAA | | PARFSGSLVGGKAAL | | | |
| | | GGCTGCCCTGACCCTTTCGGGTGCGCAGCCTGAAGATGAGGCT | | TLSGAQPEDEAVYYC | | | |
| | | GTCTATTATTGCTTACTCGACTATACTTATTTTCGGATATTCG | | LLDYTYFRIFGGGTK | | | |
| | | GCGGAGGGACCAAGCTGACCGTCCTA | | LTVL | | | |
| ADI-81586 | 2937 | GACATCCAGATGACCCAGACTCCCTCCACCCTGTCTGCATCTG | 4611 | DIQMTQTPSTLSASV | 4965 | 18 | 10 |
| | | TGGGAGACAGAGTCACAATCACTTGCCGGGCCAGTCAGAGTAT | | GDRVTITCRASQSID | | | |
| | | CGATACCTGGTTGGCCTGGTATCAGCAAAAACCAGGGAAAGCC | | TWLAWYQQKPGKAPE | | | |
| | | CCTGAACTCCTGATTTATGATGTCTCCAGTTTGAAAAGAGGGG | | LLIYDVSSLKRGERG | | | |
| | | AAAGAGGGGTCCCATCAAGGTTCAGCGGCAGTGGATCTGGGAC | | VPSRFSGSGSGTEFT | | | |
| | | AGAATTCACTCTCACCATCAGCAGACTGCAGCCTGATGATCTT | | LTISRLQPDDLATYY | | | |
| | | GCAACTTATTATTGCCAACAGTATAATAGTTACCCTTGGACGT | | CQQYNSYPWTFGQGT | | | |
| | | TCGGCCAAGGGACCAAGGTGGAAATCAAA | | KVEIK | | | |
| ADI-81663 | 2936 | GAAACGACAATCAAGCAGTCTCCATCCTCCTTGTCTGCATTAG | 4612 | ETTIKQSPSSLSALV | 4966 | 18 | 12 |
| | | TAGGAGACAGAGTCACCATCACTTGCCGGGCAAGTCAGAGTAT | | GDRVTITCRASQSIS | | | |
| | | TAGTAGGTTTTTAAAGTGGTATCAGCAGAAACCAGGGAAAGCC | | RFLKWYQQKPGKAHK | | | |
| | | CATAAACTCATGATCCATGATGTTTCCACTTTGCAAAGTGGGG | | LMIHDVSTLQSGVPS | | | |
| | | TCCCATCAAGGTTCAGCGGCAGTGGATGTGGGACAGATTTCAC | | RFSGSGCGTDFTLTI | | | |
| | | TCTCACCATCAGCAGCCTGCAGCCTGAAGATTTTGCAACTTAT | | SSLQPEDFATYYCQH | | | |
| | | TATTGCCAACACTATCATAGTTACCCTCTCACTTTCGGCGGAG | | YHSYPLTFGGGTKVE | | | |
| | | GGACCAAGGTGGAGATCAAA | | IK | | | |

| | | | SEQ | | SEQ | | SEQ | | SEQ | | SEQ | | SEQ | |
|---|---|---|---|---|---|---|---|---|---|---|---|---|---|---|
| | VL | VL | ID | VL | ID | VL | ID | VL | ID | VL | ID | VL | ID | VL |
| Clone ID | Germline | FR1 | NO: | CDR1 | NO: | FR2 | NO: | CDR2 | NO: | FR3 | NO: | CDR3 | NO: | FR4 |
| ADI-81829 | IGKV3-20 | EMTLTQ | 3534 | RASQ- | 3716 | WYQQKP | 3912 | GASTRA | 4030 | GIPDRF | 4158 | HQYSDS | 4333 | FGGGTK |
| | | SPATLS | | NINIYL | | GQAPRL | | S | | SGSGSG | | PPLT | | VEIK |
| | | LSPGER | | A | | LIF | | | | TDFTLT | | | | |
| | | ATLSC | | | | | | | | VRRLEP | | | | |
| | | | | | | | | | | EDFAVY | | | | |
| | | | | | | | | | | FC | | | | |
| ADI-81786 | IGKV1-33 | EMAMTQ | 3535 | QASQDI | 3717 | WYQQKP | 3913 | TAANLE | 4031 | GVSSRF | 4159 | QQYNDF | 4334 | FGQGTK |
| | | SPSSMS | | TDYLN | | GSAPKL | | A | | SGSGSG | | PYT | | VEIK |
| | | ASVGDR | | | | LIY | | | | THFTFT | | | | |
| | | VTITC | | | | | | | | ISGLQP | | | | |
| | | | | | | | | | | EDVATY | | | | |
| | | | | | | | | | | YC | | | | |
| ADI-81651 | IGLV2-14 | QSALTQ | 3536 | TGASGD | 3718 | WYQQEP | 3914 | GVSNRP | 4032 | GVSDRF | 4160 | SSYTRS | 4335 | FGGGTK |
| | | PASVSG | | IDTYNY | | GKAPKL | | S | | SGSKSA | | NTVK | | ILTVL |
| | | SAGQSI | | VS | | MIY | | | | NTASLT | | | | |
| | | TISC | | | | | | | | ISGLQP | | | | |
| | | | | | | | | | | EDEADY | | | | |
| | | | | | | | | | | YC | | | | |
| ADI-81725 | IGLV1-40 | QSVLTQ | 3537 | TGSTSN | 2149 | WYQQLP | 2317 | LNNNRP | 2454 | GVPDRF | 2601 | QSYDSS | 2800 | FGGGTK |
| | | PPSVSG | | IGGGYD | | GEAPKL | | S | | SGSKSG | | LSVWV | | LTVL |
| | | APGRGV | | VH | | LIY | | | | TSASLA | | | | |
| | | TISC | | | | | | | | ITGLQP | | | | |
| | | | | | | | | | | VDEADY | | | | |
| | | | | | | | | | | YC | | | | |
| ADI-81706 | IGKV1D-39 | EIQMTQ | 1881 | RASQDI | 3719 | WYQQKP | 3915 | AASTLQ | 4033 | GVPSRF | 4161 | QQTYST | 4336 | FGQGTK |
| | | SPSSLS | | STYVN | | GGAPKL | | T | | TGSGSG | | HMST | | VEIK |
| | | ASVGDR | | | | LIY | | | | THFTLT | | | | |
| | | VTITC | | | | | | | | ITSLQP | | | | |
| | | | | | | | | | | EDFATY | | | | |
| | | | | | | | | | | SC | | | | |
| ADI-81881 | IGLV1-40 | QSVLTQ | 1948 | TGSSSN | 2250 | WYQVLP | 3916 | GYTKRP | 4034 | GVPARF | 4162 | QSYDNS | 4337 | FGGGTK |
| | | PPSVSG | | IGTGYD | | GSAPKL | | S | | SGSRSG | | LSASV | | LTVL |
| | | APGQRV | | VH | | LIY | | | | SSASLV | | | | |
| | | TISC | | | | | | | | ITGLQA | | | | |
| | | | | | | | | | | EDEADY | | | | |
| | | | | | | | | | | YC | | | | |
| ADI-81607 | IGKV1-12 | DIQMTQ | 1878 | RASQDV | 3720 | WYQQKP | 2257 | SASFLY | 4035 | GVPSRF | 4163 | QQHYTT | 4338 | FGQGTK |
| | | SPSSLS | | NTAVA | | GKAPKL | | S | | SGSRSG | | PPT | | VEIK |
| | | ASVGDR | | | | LIY | | | | TDFTLT | | | | |
| | | VTITC | | | | | | | | ISSLQP | | | | |
| | | | | | | | | | | EDFATY | | | | |
| | | | | | | | | | | YC | | | | |
| ADI-81766 | IGKV3-20 | EIMLTQ | 3538 | GSGFLA | 3721 | WYQQKP | 2258 | AGSGRA | 4036 | GIPDRF | 4164 | QQYGSS | 2929 | FGQGTK |
| | | SPGTLS | | RARQSV | | GQAPRL | | P | | SGSGFG | | PYT | | VDIK |
| | | LSPGER | | | | LIY | | | | TDFTLT | | | | |
| | | ATLSR | | | | | | | | LSRLEP | | | | |
| | | | | | | | | | | EDFAVY | | | | |
| | | | | | | | | | | YC | | | | |

| | | | | | | VL | VL Amino |
|---|---|---|---|---|---|---|---|
| | SEQ | | SEQ | | SEQ | Nucleotide | Acid |
| | ID | | ID | | ID | Sub- | Sub- |
| Clone ID | NO: | VL DNA | NO: | VL Protein | NO: | stitutions | stitutions |
| ADI-81829 | 2936 | GAAATGACATTGACGCAGTCTCCAGCCACCCTGTCTTTGTCTC | 4613 | EMTLTQSPATLSLSP | 4967 | 17 | 12 |
| | | CAGGGGAAAGAGCCACCCTCTCCTGCAGGGCCAGTCAGAATAT | | GERATLSCRASQNIN | | | |
| | | TAACATCTACTTAGCCTGGTACCAGCAGAAACCTGGCCAGGCT | | IYLAWYQQKPGQAPR | | | |
| | | CCCAGGCTCCTCATCTTTGGTGCTTCTACGAGGGCCAGTGGCA | | LLIFGASTRASGIPD | | | |
| | | TCCCAGACAGGTTCAGTGGCAGTGGGTCTGGGACAGACTTCAC | | RFSGSGSGTDFTLTV | | | |
| | | TCTCACCGTCAGGAGACTGGAGCCTGAAGATTTTGCAGTCTAT | | RRLEPEDFAVYFCHQ | | | |
| | | TTCTGCCATCAATACAGTGACTCACCTCCGCTCACTTTCGGCG | | YSDSPPLTFGGGTKV | | | |
| | | GAGGGACCAAGGTGGAGATCAAA | | EIK | | | |
| ADI-81786 | 2937 | GAAATGGCGATGACGCAGTCTCCATCCTCCATGTCTGCATCTG | 4614 | EMAMTQSPSSMSASV | 4968 | 15 | 11 |
| | | TGGGAGACAGAGTCACCATCACCTGCCAGGCGAGTCAGGACAT | | GDRVTITCQASQDIT | | | |
| | | TACCGACTATTTAAATTGGTATCAGCAGAAACCAGGGAGTGCC | | DYLNWYQQKPGSAPK | | | |
| | | CCTAAACTCCTGATCTACACTGCAGCCAATTTGGAAGCCGGGG | | LLIYTAANLEAGVSS | | | |
| | | TCTCGTCCAGGTTCAGTGGAAGTGGATCTGGGACACATTTTAC | | RFSGSGSGTHFTFTI | | | |
| | | TTTCACCATCAGCGGCCTCCAGCCTGAAGATGTTGCAACATAT | | SGLQPEDVATYYCQQ | | | |
| | | TACTGTCAACAGTATAATGATTTCCCATACACTTTTGGCCAGG | | YNDFPYTFGQGTKVE | | | |
| | | GGACCAAGGTGGAAATCAAA | | IK | | | |
| ADI-81651 | 2939 | CAGTCTGCCCTGACTCAGCCTGCCTCCGTGTCTGGGTCTGCTG | 4615 | QSALTQPASVSGSAG | 4969 | 14 | 11 |
| | | GACAGTCGATCACCATCTCCTGCACTGGAGCCAGCGGTGACAT | | QSITISCTGASGDID | | | |
| | | TGATACTTATAACTATGTCTCCTGGTACCAACAGGAACCAGGC | | TYNYVSWYQQEPGKA | | | |
| | | AAAGCCCCCAAACTCATGATTTATGGTGTCAGTAATCGGCCCT | | PKLMIYGVSNRPSGV | | | |
| | | CAGGGGTTTCTGATCGCTTCTCTGGCTCCAAGTCTGCCAACAC | | SDRFSGSKSANTASL | | | |
| | | GGCCTCCCTGACCATCTCTGGGCTCCAGCCTGAGGACGAGGCT | | TISGLQPEDEADYYC | | | |
| | | GATTATTACTGCAGCTCATATACAAGGAGTAACACTGTGAAAT | | SSYTRSNTVKFGGGT | | | |
| | | TCGGCGGCGGGACCAAGCTCACCGTCCTA | | KLTVL | | | |
| ADI-81725 | 2939 | CAGTCTGTCCTGACGCAGCCGCCCTCAGTGTCTGGGGCCCCAG | 4616 | QSVLTQPPSVSGAPG | 4970 | 14 | 9 |
| | | GGCGGGGGGTCACCATCTCCTGCACTGGGAGCACCTCCAACAT | | RGVTISCTGSTSNIG | | | |
| | | CGGGGGAGGTTATGATGTGCACTGGTACCAGCAGCTTCCAGGA | | GGYDVHWYQQLPGEA | | | |
| | | GAGGCCCCCAAACTCCTCATCTATCTTAACAATAATCGGCCCT | | PKLLIYLNNNRPSGV | | | |
| | | CAGGGGTCCCTGACCGATTCTCTGGCTCCAAGTCTGGCACCTC | | PDRFSGSKSGTSASL | | | |
| | | AGCCTCCCTGGCCATCACTGGGCTCCAGCCTGTCGATGAGGCT | | AITGLQPVDEADYYC | | | |
| | | GATTATTACTGCCAGTCGTATGACAGCAGCCTGAGTGTTTGGG | | QSYDSSLSVWVFGGG | | | |
| | | TGTTCGGCGGAGGGACCAAGCTCACCGTCCTA | | TKLTVL | | | |
| ADI-81706 | 2937 | GAAATCCAGATGACCCAGTCTCCATCCTCCCTGTCTGCATCTG | 4617 | EIQMTQSPSSLSASV | 4971 | 14 | 10 |
| | | TAGGAGACAGAGTCACCATCACTTGCCGGGCAAGTCAAGACAT | | GDRVTITCRASQDIS | | | |
| | | TAGTACTTATGTAAATTGGTATCAGCAGAAACCTGGGGGGGCC | | TYVNWYQQKPGGAPK | | | |
| | | CCTAAACTCCTGATCTATGCTGCCTCCACTTTGCAAACTGGGG | | LLIYAASTLQTGVPS | | | |
| | | TCCCATCAAGGTTTACTGGCAGTGGATCTGGGACACATTTCAC | | RFTGSGSGTHFTLTI | | | |
| | | TCTCACCATCACCAGTCTGCAACCTGAAGATTTTGCAACTTAC | | TSLQPEDFATYSCQQ | | | |
| | | TCCTGTCAACAGACTTACAGTACCCACATGTCCACTTTTGGCC | | TYSTHMSTFGQGTKV | | | |
| | | AGGGGACCAAGGTGGAAATCAAA | | EIK | | | |
| ADI-81881 | 2939 | CAGTCTGTGTTGACGCAGCCGCCCTCAGTGTCTGGGGCCCCAG | 4618 | QSVLTQPPSVSGAPG | 4972 | 14 | 10 |
| | | GGCAGAGGGTCACCATCTCCTGCACTGGGAGCAGCTCCAACAT | | QRVTISCTGSSSNIG | | | |
| | | CGGGACAGGTTATGATGTACACTGGTACCAGGTTCTTCCAGGA | | TGYDVHWYQVLPGSA | | | |
| | | TCCGCCCCCAAACTCCTCATCTATGGTTACACAAAACGGCCCT | | PKLLIYGYTKRPSGV | | | |
| | | CAGGGGTCCCTGCCCGATTCTCTGGCTCCAGGTCTGGCAGCTC | | PARFSGSRSGSSASL | | | |
| | | AGCCTCCCTGGTCATCACTGGGCTCCAGGCTGAGGATGAGGCT | | VITGLQAEDEADYYC | | | |
| | | GATTATTACTGCCAGTCCTATGACAACAGCCTGAGTGCTTCGG | | QSYDNSLSASVFGGG | | | |
| | | TGTTCGGCGGAGGGACCAAGCTCACCGTCCTA | | TKLTVL | | | |
| ADI-81607 | 2937 | GACATCCAAATGACCCAGTCTCCATCTTCCCTGTCTGCATCTG | 4619 | DIQMTQSPSSLSASV | 4973 | 14 | 11 |
| | | TAGGAGACAGAGTCACCATCACTTGTCGGGCGAGTCAGGATGT | | GDRVTITCRASQDVN | | | |
| | | TAACACCGCGGTAGCCTGGTATCAGCAGAAACCAGGGAAAGCC | | TAVAWYQQKPGKAPK | | | |
| | | CCTAAGCTCCTGATCTATTCTGCATCCTTTTTGTACAGTGGGG | | LLIYSASFLYSGVPS | | | |
| | | TCCCATCAAGGTTCAGCGGCAGTAGATCTGGGACAGATTTCAC | | RFSGSRSGTDFTLTI | | | |
| | | TCTCACCATCAGCAGCCTGCAGCCTGAAGATTTTGCAACTTAC | | SSLQPEDFATYYCQQ | | | |
| | | TATTGTCAGCAACACTACACTACGCCACCCACGTTCGGCCAAG | | HYTTPPTFGQGTKVE | | | |
| | | GGACCAAGGTGGAAATCAAA | | IK | | | |
| ADI-81766 | 2944 | GAAATTATGCTGACCCAGTCTCCAGGCACCCTGTCTTTGTCTC | 4620 | EIMLTQSPGTLSLSP | 4974 | 13 | 11 |
| | | CAGGGGAAAGAGCCACCCTCTCCCGCAGGGCCCGTCAGAGTGT | | GERATLSRRARQSVG | | | |
| | | TGGCAGCGGCTTTTTAGCCTGGTACCAGCAGAAACCCGGCCAG | | SGFLAWYQQKPGQAP | | | |
| | | GCTCCCAGGCTCCTCATTTATGCTGGGTCCGGCAGGGCCCCTG | | RLLIYAGSGRAPGIP | | | |
| | | GCATCCCAGACAGGTTCAGTGGCAGTGGCTTTGGGACAGACTT | | DRFSGSGFGTDFTLT | | | |
| | | CACTCTCACCCTCAGCAGACTGGAGCCTGAAGATTTTGCAGTG | | LSRLEPEDFAVYYCQ | | | |
| | | TATTACTGTCAGCAGTATGGTAGCTCACCGTACACTTTTGGCC | | QYGSSPYTFGQGTKV | | | |
| | | AGGGGACCAAAGTGGATATCAAA | | DIK | | | |

| | | | SEQ | | SEQ | | SEQ | | SEQ | | SEQ | | SEQ | |
|---|---|---|---|---|---|---|---|---|---|---|---|---|---|---|
| | VL | VL | ID | VL | ID | VL | ID | VL | ID | VL | ID | VL | ID | VL |
| Clone ID | Germline | FR1 | NO: | CDR1 | NO: | FR2 | NO: | CDR2 | NO: | FR3 | NO: | CDR3 | NO: | FR4 |
| ADI-81687 | IGKV1D-39 | DIRLTQ | 3539 | RASQNI | 3722 | WYQKKP | 3917 | AASTLQ | 2392 | VVPPRF | 4165 | QQSYNT | 4339 | FGQGTR |
| | | SPSSLS | | ATFLN | | GKALKL | | S | | SGSGSG | | LSIT | | LEIK |
| | | ASVGDR | | | | LIY | | | | TDFTLT | | | | |
| | | VTITC | | | | | | | | ISSLQP | | | | |
| | | | | | | | | | | DDFATY | | | | |
| | | | | | | | | | | YC | | | | |
| ADI-81908 | IGKV1D-39 | DIRLTQ | 3539 | RASQTV | 3723 | WYQQRP | 2309 | AASTLE | 4037 | GVPSRF | 4166 | QQSYST | 4340 | FGGGTK |
| | | SPSSLS | | NSYLN | | GKAPKL | | T | | TGSGSG | | LELT | | VDIK |
| | | ASVGDR | | | | LIY | | | | TDFTLT | | | | |
| | | VTITC | | | | | | | | ISGLQP | | | | |
| | | | | | | | | | | EDFATY | | | | |
| | | | | | | | | | | YC | | | | |
| ADI-81827 | IGLV3-21 | SYELTQ | 3529 | GGNNIA | 3724 | WYQQKP | 2287 | DDRERP | 4038 | GIPERF | 4167 | QVWDRS | 4341 | FGTGTK |
| | | PPSVSV | | DQIVH | | GQAPVL | | S | | SGSHSG | | GHHPVF | | VTVL |
| | | APGQTA | | | | VVF | | | | NTATLT | | V | | |
| | | SITC | | | | | | | | ISRVEA | | | | |
| | | | | | | | | | | GDEGDY | | | | |
| | | | | | | | | | | YC | | | | |
| ADI-81875 | IGKV3-11 | EIPMTQ | 3540 | RASQSV | 3725 | WYQQRP | 3918 | DASHRA | 4039 | DIPARF | 4168 | HQRRNW | 4342 | FGQGTK |
| | | SPATLS | | GTYLG | | GQAPRL | | T | | SGSGSG | | PPT | | VEIK |
| | | LAPGDR | | | | LIF | | | | TNFTLT | | | | |
| | | ATLSC | | | | | | | | ISSLEP | | | | |
| | | | | | | | | | | EDFVVY | | | | |
| | | | | | | | | | | YC | | | | |
| ADI-81885 | IGLV2-14 | SLFLTQ | 3541 | TGASSD | 3726 | WYQQHP | 3919 | EVFNRP | 4040 | GVSSRF | 4169 | CSYTSR | 4343 | FGTGTK |
| | | PASVSG | | VGGYNF | | GKTPKL | | S | | SGSKSG | | STYV | | VTVL |
| | | SPGQSI | | VS | | ILY | | | | STASLT | | | | |
| | | TISC | | | | | | | | ISGLQD | | | | |
| | | | | | | | | | | EDEADY | | | | |
| | | | | | | | | | | YC | | | | |
| ADI-81638 | IGKV1-5 | EIPMTQ | 3542 | RASQSI | 3727 | WYQQKP | 2371 | KASSIE | 4041 | GVPSRF | 4170 | QQYSAY | 4344 | FGQGTK |
| | | SPSTLS | | GPWLA | | GKAPEL | | T | | SGSWSG | | PYT | | VEIK |
| | | ASVGDR | | | | LIY | | | | TEFTLT | | | | |
| | | VTITC | | | | | | | | ISSLQA | | | | |
| | | | | | | | | | | SDFATY | | | | |
| | | | | | | | | | | YC | | | | |
| ADI-81554 | IGKV1D-39 | EIQMTQ | 3543 | RASQSI | 3728 | WYQQKP | 2316 | AASYLQ | 4042 | GVPSRF | 4171 | QQSYTT | 4345 | FGGGTK |
| | | SPPSLS | | SRYLH | | GKAPKV | | S | | SGSGSG | | PLT | | VEIK |
| | | ASVGDS | | | | LIY | | | | TDFSLT | | | | |
| | | VTITC | | | | | | | | ISGLQP | | | | |
| | | | | | | | | | | EDLATY | | | | |
| | | | | | | | | | | YC | | | | |
| ADI-81756 | IGKV1D-39 | EMTVTQ | 3544 | RASQYI | 3729 | WYQQKP | 2257 | AASTLQ | 4033 | GVPSRF | 4172 | QQSYNT | 4346 | FGGGTK |
| | | SPSSLS | | NNYLN | | GKAPKL | | T | | SGSGSG | | PPLT | | VEIK |
| | | ASVGDR | | | | LIY | | | | TDFSLT | | | | |
| | | VTISC | | | | | | | | ISSLHP | | | | |
| | | | | | | | | | | EDFATY | | | | |
| | | | | | | | | | | YC | | | | |

| | | | | | | VL | VL Amino |
|---|---|---|---|---|---|---|---|
| | SEQ | | SEQ | | SEQ | Nucleotide | Acid |
| | ID | | ID | | ID | Sub- | Sub- |
| Clone ID | NO: | VL DNA | NO: | VL Protein | NO: | stitutions | stitutions |
| ADI-81687 | 2940 | GACATCCGGTTGACCCAGTCTCCATCCTCCCTGTCTGCATCTG | 4621 | DIRLTQSPSSLSASV | 4975 | 12 | 10 |
| | | TGGGAGACAGAGTCACCATCACTTGCCGGGCAAGTCAGAACAT | | GDRVTITCRASQNIA | | | |
| | | TGCCACCTTTTTAAATTGGTATCAAAAGAAACCAGGGAAAGCC | | TFLNWYQKKPGKALK | | | |
| | | CTTAAACTCTTGATTTATGCTGCATCCACCTTGCAAAGTGTGG | | LLIYAASTLQSVVPP | | | |
| | | TCCCGCCAAGGTTCAGTGGCAGTGGATCTGGGACAGATTTCAC | | RFSGSGSGTDFTLTI | | | |
| | | TCTCACCATCAGCAGTCTGCAACCTGACGATTTTGCAACTTAC | | SSLQPDDFATYYCQQ | | | |
| | | TACTGTCAACAGAGTTACAATACCCTCTCTATCACCTTCGGCC | | SYNTLSITFGQGTRL | | | |
| | | AAGGGACACGACTGGAGATTAAA | | EIK | | | |
| ADI-81908 | 2938 | GACATCCGGTTGACCCAGTCTCCATCCTCCCTGTCTGCATCTG | 4622 | DIRLTQSPSSLSASV | 4976 | 11 | 9 |
| | | TAGGAGACAGAGTCACCATCACTTGCCGGGCAAGTCAGACTGT | | GDRVTITCRASQTVN | | | |
| | | TAACTCCTATTTAAATTGGTATCAGCAGAGACCAGGTAAAGCC | | SYLNWYQQRPGKAPK | | | |
| | | CCTAAGCTCCTGATCTATGCTGCTTCCACTTTAGAAACTGGGG | | LLIYAASTLETGVPS | | | |
| | | TCCCATCAAGGTTCACCGGCAGTGGATCTGGGACAGATTTCAC | | RFTGSGSGTDFTLTI | | | |
| | | TCTCACCATCAGCGGTCTGCAACCTGAGGATTTTGCAACTTAC | | SGLQPEDFATYYCQQ | | | |
| | | TACTGTCAACAGAGTTACAGTACCCTTGAGCTCACTTTCGGCG | | SYSTLELTFGGGTKV | | | |
| | | GAGGGACCAAGGTGGATATCAAA | | DIK | | | |
| ADI-81827 | 2945 | TCGTATGAGCTGACTCAGCCACCCTCGGTGTCAGTGGCCCCCG | 4623 | SYELTQPPSVSVAPG | 4977 | 11 | 10 |
| | | GACAGACGGCCAGCATTACCTGTGGGGGAAACAATATTGCAGA | | QTASITCGGNNIADQ | | | |
| | | TCAAATTGTGCACTGGTACCAGCAGAAGCCAGGCCAGGCCCCT | | IVHWYQQKPGQAPVL | | | |
| | | GTTTTGGTCGTCTTTGATGATCGCGAGCGGCCCTCAGGGATCC | | VVFDDRERPSGIPER | | | |
| | | CTGAGCGATTCTCTGGCTCCCACTCTGGGAACACGGCCACCCT | | FSGSHSGNTATLTIS | | | |
| | | GACCATCAGCAGGGTCGAAGCCGGGGACGAGGGCGACTATTAT | | RVEAGDEGDYYCQVW | | | |
| | | TGTCAGGTGTGGGATCGGAGTGGTCATCATCCAGTTTTTGTCT | | DRSGHHPVFVFGTGT | | | |
| | | TCGGCACTGGCACCAAGGTCACCGTCCTA | | KVTVL | | | |
| ADI-81875 | 2937 | GAAATCCCAATGACCCAGTCTCCAGCCACCCTGTCTTTGGCTC | 4624 | EIPMTQSPATLSLAP | 4978 | 11 | 11 |
| | | CAGGGGACAGGGCCACCCTCTCCTGCAGGGCCAGTCAGAGTGT | | GDRATLSCRASQSVG | | | |
| | | TGGCACCTACTTAGGCTGGTACCAACAAAGACCTGGCCAGGCT | | TYLGWYQQRPGQAPR | | | |
| | | CCCAGGCTCCTCATCTTTGATGCATCCCACAGGGCCACTGACA | | LLIFDASHRATDIPA | | | |
| | | TCCCAGCCAGGTTCAGTGGCAGTGGGTCTGGGACAAACTTCAC | | RFSGSGSGTNFTLTI | | | |
| | | TCTCACCATCAGCAGCCTAGAGCCTGAAGACTTTGTAGTTTAT | | SSLEPEDFVVYYCHQ | | | |
| | | TACTGTCACCAGCGTCGCAACTGGCCTCCGACTTTCGGCCAGG | | RRNWPPTFGQGTKVE | | | |
| | | GGACCAAGGTGGAGATCAAA | | IK | | | |
| ADI-81885 | 2945 | AGTCTGTTCCTGACTCAGCCTGCCTCCGTGTCTGGGTCTCCTG | 4625 | SLFLTQPASVSGSPG | 4979 | 11 | 9 |
| | | GACAGTCGATCACCATCTCCTGCACTGGAGCCAGCAGTGACGT | | QSITISCTGASSDVG | | | |
| | | TGGTGGTTATAACTTTGTTTCCTGGTACCAACAACACCCAGGG | | GYNFVSWYQQHPGKT | | | |
| | | AAAACCCCCAAACTCATACTTTATGAGGTCTTCAATCGCCCCT | | PKLILYEVFNRPSGV | | | |
| | | CAGGGGTGTCCAGTCGCTTCTCTGGCTCCAAGTCTGGCAGCAC | | SSRFSGSKSGSTASL | | | |
| | | GGCCTCCCTGACGATCTCTGGGCTCCAGGATGAGGACGAGGCT | | TISGLQDEDEADYYC | | | |
| | | GATTACTACTGCTGTTCATATACAAGCAGGAGCACTTATGTCT | | CSYTSRSTYVFGTGT | | | |
| | | TCGGAACTGGGACCAAGGTCACCGTCCTA | | KVTVL | | | |
| ADI-81638 | 2937 | GAAATCCCGATGACCCAGTCTCCTTCCACCCTGTCTGCATCTG | 4626 | EIPMTQSPSTLSASV | 4980 | 11 | 8 |
| | | TAGGAGACAGAGTCACCATCACTTGCCGGGCCAGTCAGAGTAT | | GDRVTITCRASQSIG | | | |
| | | TGGTCCCTGGTTGGCCTGGTATCAGCAGAAACCAGGGAAAGCC | | PWLAWYQQKPGKAPE | | | |
| | | CCTGAGCTCCTGATCTATAAGGCGTCTAGTATAGAAACTGGGG | | LLIYKASSIETGVPS | | | |
| | | TCCCATCAAGGTTCAGCGGCAGTTGGTCTGGGACAGAATTCAC | | RFSGSWSGTEFTLTI | | | |
| | | TCTCACCATCAGCAGCCTGCAGGCTTCTGATTTTGCAACTTAT | | SSLQASDFATYYCQQ | | | |
| | | TACTGCCAACAGTATAGCGCTTATCCGTACACTTTTGGCCAGG | | YSAYPYTFGQGTKVE | | | |
| | | GGACCAAGGTGGAGATCAAA | | IK | | | |
| ADI-81554 | 2936 | GAAATCCAGATGACCCAGTCTCCACCCTCCCTGTCTGCATCTG | 4627 | EIQMTQSPPSLSASV | 4981 | 11 | 9 |
| | | TAGGAGACAGCGTCACCATCACTTGCCGGGCAAGTCAGAGCAT | | GDSVTITCRASQSIS | | | |
| | | TAGTAGGTATTTACATTGGTATCAGCAGAAACCCGGGAAAGCC | | RYLHWYQQKPGKAPK | | | |
| | | CCTAAGGTTCTGATCTATGCTGCATCCTATTTGCAAAGTGGGG | | VLIYAASYLQSGVPS | | | |
| | | TCCCTTCAAGGTTCAGTGGCAGTGGATCTGGGACAGATTTCAG | | RFSGSGSGTDFSLTI | | | |
| | | TCTCACCATCAGCGGTCTGCAGCCTGAAGATCTTGCAACTTAC | | SGLQPEDLATYYCQQ | | | |
| | | TACTGTCAACAGAGTTACACTACCCCGCTCACTTTCGGCGGAG | | SYTTPLTFGGGTKVE | | | |
| | | GGACCAAGGTGGAAATCAAA | | IK | | | |
| ADI-81756 | 2936 | GAAATGACGGTGACGCAGTCTCCATCCTCCCTGTCTGCATCTG | 4628 | EMTVTQSPSSLSASV | 4982 | 11 | 8 |
| | | TAGGAGACAGAGTCACCATCAGTTGCCGGGCAAGCCAGTACAT | | GDRVTISCRASQYIN | | | |
| | | TAATAATTATTTAAATTGGTATCAGCAGAAACCAGGGAAAGCC | | NYLNWYQQKPGKAPK | | | |
| | | CCTAAGCTCCTGATCTATGCTGCATCCACTTTGCAAACTGGGG | | LLIYAASTLQTGVPS | | | |
| | | TCCCATCAAGGTTCAGTGGCAGTGGATCTGGGACAGATTTCAG | | RFSGSGSGTDFSLTI | | | |
| | | TCTCACCATCAGCAGTCTACACCCTGAAGATTTTGCAACTTAC | | SSLHPEDFATYYCQQ | | | |
| | | TACTGTCAGCAGAGTTACAATACCCCTCCGCTCACTTTCGGCG | | SYNTPPLTFGGGTKV | | | |
| | | GAGGGACCAAGGTGGAAATCAAA | | EIK | | | |

| | | | SEQ | | SEQ | | SEQ | | SEQ | | SEQ | | SEQ | |
|---|---|---|---|---|---|---|---|---|---|---|---|---|---|---|
| | VL | VL | ID | VL | ID | VL | ID | VL | ID | VL | ID | VL | ID | VL |
| Clone ID | Germline | FR1 | NO: | CDR1 | NO: | FR2 | NO: | CDR2 | NO: | FR3 | NO: | CDR3 | NO: | FR4 |
| ADI-81773 | IGKV1D-39 | DIRMTQ | 1937 | RASQSI | 3730 | WYQQKT | 3920 | AASRLQ | 2406 | GVPSRF | 4173 | QQTYIM | 4347 | FGQGTK |
| | | SPSSLS | | GGYLN | | GRAPRL | | S | | SGSGSG | | PPWT | | VEIK |
| | | ASVGDR | | | | LIF | | | | TEFTLT | | | | |
| | | VTITC | | | | | | | | ISGLQP | | | | |
| | | | | | | | | | | DDFATY | | | | |
| | | | | | | | | | | YC | | | | |
| ADI-81575 | IGKV1D-39 | DIQMTQ | 1907 | RASQNI | 3731 | WYQQKP | 3921 | AAASLH | 4043 | GVPSRF | 4174 | QQSYST | 2715 | FGLGTR |
| | | SPSSLS | | STYLN | | GTAPNL | | S | | SGSGSG | | PIT | | LEIK |
| | | ASIGDR | | | | LIY | | | | TDFTLT | | | | |
| | | VTITC | | | | | | | | ISSLER | | | | |
| | | | | | | | | | | EDFATY | | | | |
| | | | | | | | | | | YC | | | | |
| ADI-81727 | IGKV2D-29 | DIVMTQ | 3545 | ESSKSL | 3732 | WYLQRP | 3922 | EVSKRF | 4044 | GVPDRF | 4175 | MQSIQL | 4348 | FGQGTK |
| | | SPLSLS | | LHSGDG | | GQPPQL | | A | | TGSGSG | | PPFT | | VEIK |
| | | VTPGQS | | KTYLY | | LIY | | | | TDFTLK | | | | |
| | | ASISC | | | | | | | | ISRVEA | | | | |
| | | | | | | | | | | EDVGIY | | | | |
| | | | | | | | | | | YC | | | | |
| ADI-81704 | IGKV3-20 | EITLTQ | 3546 | RASESV | 3733 | WHQQRP | 2342 | GASKRP | 4045 | GIPDRF | 2616 | HQFASA | 2848 | FGQGTR |
| | | SPGTLS | | SSEHLA | | GQAPRL | | T | | SGSGSG | | PIT | | LEIK |
| | | LSPGER | | | | LIY | | | | TDFTLT | | | | |
| | | ATLSC | | | | | | | | ISRLEP | | | | |
| | | | | | | | | | | EDFAVY | | | | |
| | | | | | | | | | | YC | | | | |
| ADI-81768 | IGLV2-8 | QPVMTQ | 3547 | TGTSSD | 3734 | WYQQHP | 3923 | EVNKRP | 2394 | GVPDRL | 4176 | SSNAGV | 4349 | FGGGTK |
| | | PPSASG | | VGDSNY | | GNPPKL | | S | | SGSKSG | | TALI | | VTVL |
| | | SPGQSV | | VS | | IIY | | | | NTASLT | | | | |
| | | TISC | | | | | | | | VSGLLP | | | | |
| | | | | | | | | | | EDEAHY | | | | |
| | | | | | | | | | | YC | | | | |
| ADI-81775 | IGKV1D-39 | EIVMTQ | 1891 | RASQTI | 3735 | WYQHKP | 3924 | GASTLL | 4046 | GVPSRF | 4177 | QQTYST | 4350 | FAQGTK |
| | | SPSSLS | | NSYLN | | GKAPKL | | S | | SGSESG | | PPWT | | VDIK |
| | | ASVGDR | | | | LIY | | | | TDYTLT | | | | |
| | | VTITC | | | | | | | | INGLQP | | | | |
| | | | | | | | | | | EDFATY | | | | |
| | | | | | | | | | | YC | | | | |
| ADI-81598 | IGKV1D-39 | DIQMTQ | 1878 | RTSLNI | 3736 | WYQQKP | 2257 | AASTLQ | 2392 | GVPSRF | 4178 | QQSYVT | 4351 | FGQGTK |
| | | SPSSLS | | KNYLN | | GKAPKL | | S | | RGSGSG | | PPWT | | VEIK |
| | | ASVGDR | | | | LIY | | | | TDFTLT | | | | |
| | | VTITC | | | | | | | | ISGLQP | | | | |
| | | | | | | | | | | EDFATY | | | | |
| | | | | | | | | | | FC | | | | |
| ADI-81914 | IGLV3-21 | QSVLTQ | 3548 | GGDNIG | 3737 | WYQRKP | 3925 | DDSDRP | 2399 | GIPERF | 4179 | QVWDTS | 4352 | FGAGTK |
| | | PPSVSL | | SYRVH | | GQAPIL | | S | | SGSTSG | | RSTHHR | | LTVL |
| | | APGQTA | | | | VVY | | | | NTATLT | | GV | | |
| | | RITC | | | | | | | | ISGVEA | | | | |
| | | | | | | | | | | GDEADY | | | | |
| | | | | | | | | | | YC | | | | |

| | | | | | | VL | VL Amino |
|---|---|---|---|---|---|---|---|
| | SEQ | | SEQ | | SEQ | Nucleotide | Acid |
| | ID | | ID | | ID | Sub- | Sub- |
| Clone ID | NO: | VL DNA | NO: | VL Protein | NO: | stitutions | stitutions |
| ADI-81773 | 2937 | GACATCCGAATGACCCAGTCTCCTTCCTCCCTGTCTGCATCTG | 4629 | DIRMTQSPSSLSASV | 4983 | 11 | 10 |
| | | TAGGAGACAGAGTCACCATCACTTGCCGGGCAAGTCAGAGCAT | | GDRVTITCRASQSIG | | | |
| | | TGGCGGATATCTAAATTGGTATCAGCAGAAAACAGGGAGAGCC | | GYLNWYQQKTGRAPR | | | |
| | | CCTAGGCTACTGATCTTTGCTGCATCCAGACTGCAAAGTGGGG | | LLIFAASRLQSGVPS | | | |
| | | TCCCATCAAGGTTCAGTGGCAGTGGATCTGGGACAGAATTCAC | | RFSGSGSGTEFTLTI | | | |
| | | TCTCACCATCAGCGGTCTGCAACCTGACGATTTTGCAACTTAC | | SGLQPDDFATYYCQQ | | | |
| | | TACTGTCAACAGACTTACATTATGCCTCCGTGGACGTTCGGCC | | TYIMPPWTFGQGTKV | | | |
| | | AAGGGACCAAGGTGGAGATCAAA | | EIK | | | |
| ADI-81575 | 4592 | GACATCCAGATGACCCAGTCTCCATCCTCCCTGTCTGCATCTA | 4630 | DIQMTQSPSSLSASI | 4984 | 11 | 9 |
| | | TCGGAGACAGAGTCACCATCACTTGCCGGGCAAGTCAGAATAT | | GDRVTITCRASQNIS | | | |
| | | TAGTACCTATTTAAATTGGTATCAGCAAAAACCAGGGACAGCC | | TYLNWYQQKPGTAPN | | | |
| | | CCAAACCTCCTGATTTATGCTGCAGCCAGTTTGCACAGTGGTG | | LLIYAAASLHSGVPS | | | |
| | | TCCCATCAAGGTTCAGTGGCAGTGGATCTGGGACAGATTTCAC | | RFSGSGSGTDFTLTI | | | |
| | | TCTCACCATCAGCAGTCTGGAACGTGAAGATTTTGCAACTTAC | | SSLEREDFATYYCQQ | | | |
| | | TACTGTCAGCAGAGTTACAGTACCCCGATCACCTTCGGCCTAG | | SYSTPITFGLGTRLE | | | |
| | | GGACACGACTGGAGATTAAA | | IK | | | |
| ADI-81727 | 2937 | GACATCGTGATGACCCAGTCTCCACTCTCTCTGTCCGTCACCC | 4631 | DIVMTQSPLSLSVTP | 4985 | 11 | 9 |
| | | CTGGTCAGTCGGCCTCCATCTCCTGCGAGTCCAGTAAGAGCCT | | GQSASISCESSKSLL | | | |
| | | CCTGCATAGTGGTGATGGAAAGACCTATTTGTATTGGTATTTG | | HSGDGKTYLYWYLQR | | | |
| | | CAGAGGCCAGGCCAGCCACCACAACTCCTGATCTATGAGGTTT | | PGQPPQLLIYEVSKR | | | |
| | | CCAAACGGTTCGCTGGAGTGCCAGATAGGTTCACTGGCAGCGG | | FAGVPDRFTGSGSGT | | | |
| | | GTCAGGGACGGATTTCACACTGAAAATCAGCCGGGTGGAGGCT | | DFTLKISRVEAEDVG | | | |
| | | GAGGATGTTGGGATTTATTACTGCATGCAGAGTATACAGCTTC | | IYYCMQSIQLPPFTF | | | |
| | | CTCCGTTCACTTTTGGCCAGGGGACCAAGGTGGAAATCAAA | | GQGTKVEIK | | | |
| ADI-81704 | 2940 | GAAATCACATTGACGCAGTCTCCAGGCACACTGTCTTTGTCTC | 4632 | EITLTQSPGTLSLSP | 4986 | 10 | 7 |
| | | CAGGGGAAAGAGCCACCCTCTCCTGCAGGGCCAGTGAGAGCGT | | GERATLSCRASESVS | | | |
| | | TAGCAGCGAGCACCTAGCCTGGCACCAGCAGAGACCTGGCCAG | | SEHLAWHQQRPGQAP | | | |
| | | GCTCCCAGGCTCCTCATCTATGGTGCATCCAAAAGGCCCACGG | | RLLIYGASKRPTGIP | | | |
| | | GCATCCCAGACAGGTTCAGTGGCAGTGGGTCTGGGACAGACTT | | DRFSGSGSGTDFTLT | | | |
| | | CACTCTCACCATCAGCAGACTGGAGCCTGAAGATTTTGCAGTG | | ISRLEPEDFAVYYCH | | | |
| | | TATTACTGTCACCAGTTTGCTAGCGCACCGATCACCTTCGGCC | | QFASAPITFGQGTRL | | | |
| | | AAGGGACACGACTGGAGATTAAA | | EIK | | | |
| ADI-81768 | 2947 | CAGCCTGTGATGACTCAGCCTCCCTCCGCGTCCGGGTCTCCTG | 4633 | QPVMTQPPSASGSPG | 4987 | 10 | 10 |
| | | GACAATCAGTCACCATCTCCTGCACTGGAACCAGCAGTGACGT | | QSVTISCTGTSSDVG | | | |
| | | TGGTGATTCTAACTATGTCTCCTGGTACCAACAACACCCAGGC | | DSNYVSWYQQHPGNP | | | |
| | | AACCCCCCCAAACTCATAATTTATGAGGTCAATAAGCGGCCCT | | PKLIIYEVNKRPSGV | | | |
| | | CAGGGGTCCCTGATCGTTTGTCTGGCTCCAAGTCTGGCAACAC | | PDRLSGSKSGNTASL | | | |
| | | GGCCTCCCTGACCGTCTCTGGGCTCCTGCCTGAGGATGAGGCT | | TVSGLLPEDEAHYYC | | | |
| | | CATTATTACTGCAGCTCAAATGCAGGCGTCACCGCCCTGATCT | | SSNAGVTALIFGGGT | | | |
| | | TCGGCGGAGGGACCAAGGTCACCGTCCTA | | KVTVL | | | |
| ADI-81775 | 2952 | GAAATTGTGATGACCCAGTCTCCATCCTCCCTGTCTGCATCTG | 4634 | EIVMTQSPSSLSASV | 4988 | 10 | 10 |
| | | TAGGAGACAGAGTCACCATCACTTGCCGGGCAAGTCAGACCAT | | GDRVTITCRASQTIN | | | |
| | | TAACAGCTATTTAAATTGGTATCAGCATAAACCAGGGAAAGCC | | SYLNWYQHKPGKAPK | | | |
| | | CCAAAACTCCTGATCTATGGTGCATCCACTTTACTAAGTGGGG | | LLIYGASTLLSGVPS | | | |
| | | TCCCATCAAGGTTCAGTGGGAGTGAATCTGGGACAGATTACAC | | RFSGSESGTDYTLTI | | | |
| | | TCTCACCATCAACGGTCTGCAACCTGAAGATTTTGCAACTTAC | | NGLQPEDFATYYCQQ | | | |
| | | TACTGTCAACAGACTTACAGTACACCTCCGTGGACGTTCGCCC | | TYSTPPWTFAQGTKV | | | |
| | | AAGGGACCAAGGTGGATATCAAA | | DIK | | | |
| ADI-81598 | 2937 | GACATCCAAATGACCCAGTCTCCATCCTCCCTGTCTGCATCTG | 4635 | DIQMTQSPSSLSASV | 4989 | 10 | 9 |
| | | TTGGGGACAGAGTCACCATCACTTGCCGGACAAGTCTGAACAT | | GDRVTITCRTSLNIK | | | |
| | | TAAGAACTATTTAAACTGGTATCAGCAGAAGCCAGGGAAAGCC | | NYLNWYQQKPGKAPK | | | |
| | | CCTAAGCTCCTGATCTATGCTGCATCCACTTTGCAAAGTGGGG | | LLIYAASTLQSGVPS | | | |
| | | TCCCATCAAGGTTCAGAGGTAGTGGTTCTGGGACAGATTTCAC | | RFRGSGSGTDFTLTI | | | |
| | | TCTCACCATCAGCGGTCTGCAACCAGAGGACTTTGCAACTTAC | | SGLQPEDFATYFCQQ | | | |
| | | TTCTGTCAACAGAGTTACGTTACCCCCCCGTGGACTTTTGGCC | | SYVTPPWTFGQGTKV | | | |
| | | AGGGGACCAAAGTGGAAATCAAA | | EIK | | | |
| ADI-81914 | 2958 | CAGTCTGTGCTGACGCAGCCGCCCTCGGTGTCACTGGCCCCAG | 4636 | QSVLTQPPSVSLAPG | 4990 | 10 | 8 |
| | | GACAGACGGCCAGGATTACCTGTGGGGGAGACAATATTGGAAG | | QTARITCGGDNIGSY | | | |
| | | TTATCGTGTGCACTGGTACCAGCGGAAGCCAGGCCAGGCCCCT | | RVHWYQRKPGQAPIL | | | |
| | | ATACTGGTCGTCTATGATGATAGCGACCGGCCCTCAGGGATCC | | VVYDDSDRPSGIPER | | | |
| | | CTGAGCGATTCTCTGGCTCCACCTCTGGGAACACGGCCACCCT | | FSGSTSGNTATLTIS | | | |
| | | GACCATCAGCGGGGTCGAGGCCGGGGATGAGGCCGACTATTAC | | GVEAGDEADYYCQVW | | | |
| | | TGTCAGGTGTGGGATACTAGTAGAAGTACTCATCATCGGGGAG | | DTSRSTHHRGVFGAG | | | |
| | | TCTTCGGAGCTGGGACCAAGCTCACCGTCCTA | | TKLTVL | | | |

| | | | SEQ | | SEQ | | SEQ | | SEQ | | SEQ | | SEQ | |
|---|---|---|---|---|---|---|---|---|---|---|---|---|---|---|
| | VL | VL | ID | VL | ID | VL | ID | VL | ID | VL | ID | VL | ID | VL |
| Clone ID | Germline | FR1 | NO: | CDR1 | NO: | FR2 | NO: | CDR2 | NO: | FR3 | NO: | CDR3 | NO: | FR4 |
| ADI-81637 | IGKV1D-39 | DIVLTQ | 3549 | RASQSI | 3738 | WYQQKP | 2257 | AASTLQ | 2392 | GVPSRF | 4180 | QQSYRS | 4353 | FGQGTK |
| | | SPSSLS | | NNYLN | | GKAPKL | | S | | AGSGSG | | RT | | VEIK |
| | | ASIGDR | | | | LIY | | | | TDFTLT | | | | |
| | | VTFTC | | | | | | | | ITSLQP | | | | |
| | | | | | | | | | | EDYATY | | | | |
| | | | | | | | | | | YC | | | | |
| ADI-81641 | IGKV3-20 | EIVLTQ | 3550 | RASQSV | 3739 | WFQQKP | 3926 | DASTRA | 2424 | GIPDRF | 4181 | QQFARS | 4354 | FGQGTK |
| | | SPGTLS | | TSS-LA | | GQAPRL | | T | | SGSGSG | | PRT | | VEIK |
| | | LSPGER | | | | LVY | | | | TDFTLT | | | | |
| | | ATLAC | | | | | | | | ISRLER | | | | |
| | | | | | | | | | | EDFAVY | | | | |
| | | | | | | | | | | YC | | | | |
| ADI-81729 | IGKV1-5 | DIPVTQ | 3551 | RASQSI | 3740 | WYQQKP | 3927 | KAFTLE | 4047 | GVPSKF | 4182 | QQYNRY | 4355 | FGPGTK |
| | | SPSTLS | | NNRLA | | GRAPKL | | S | | SGSGSG | | TWT | | VDIK |
| | | ASVGDR | | | | LIS | | | | TEFTLT | | | | |
| | | VTITC | | | | | | | | ISSLQP | | | | |
| | | | | | | | | | | DDFATY | | | | |
| | | | | | | | | | | YC | | | | |
| ADI-81643 | IGKV1D-39 | EIGMTQ | 3552 | RASQSI | 3741 | WYQQKP | 2263 | AASSLD | 4048 | GVPSRF | 4183 | QQSHRA | 4356 | FGQGTK |
| | | SPSSLS | | SSSYLN | | GKAPNL | | A | | SASGSG | | PAT | | VEIK |
| | | ASVGDR | | | | LIY | | | | TDFTLT | | | | |
| | | VTITC | | | | | | | | ISSLQP | | | | |
| | | | | | | | | | | EDFATY | | | | |
| | | | | | | | | | | YC | | | | |
| ADI-81701 | IGLV3-27 | SSVLIQ | 3553 | SGDLLA | 3742 | WFQQKP | 3928 | KDNERP | 4049 | GIPERF | 4184 | YSAAGN | 4357 | FGGGTK |
| | | PPSVSV | | NTYAR | | GQAPVL | | S | | SGSSSG | | NRE | | LTVL |
| | | SPGQTA | | | | FIY | | | | TTVTLT | | | | |
| | | SITC | | | | | | | | ISGAQV | | | | |
| | | | | | | | | | | DDEAVY | | | | |
| | | | | | | | | | | YC | | | | |
| ADI-81720 | IGLV1-40 | QSVLTQ | 3554 | TGSSSN | 3743 | WYQQLP | 3929 | DN- | 4050 | GVPDRF | 2599 | QSYDSS | 4358 | FGTGTK |
| | | PPSVSG | | IGAGHD | | GTAPRL | | NRPS | | SGSKSG | | LSIYYV | | LTVL |
| | | APGQTV | | VH | | LMF | | | | TSASLA | | | | |
| | | TISC | | | | | | | | ITGLQA | | | | |
| | | | | | | | | | | EDEADY | | | | |
| | | | | | | | | | | YC | | | | |
| ADI-81632 | IGKV1-NL1 | DIRLTQ | 3555 | RASQGI | 2062 | WYQQKP | 2296 | GASTLE | 4051 | GVPSRF | 4185 | QQYYST | 2739 | FGQGTK |
| | | SPSSLC | | SNSLA | | GKAPKF | | S | | SGSGCG | | PPRT | | VEIK |
| | | ASVGDR | | | | LLY | | | | TDFTLT | | | | |
| | | VSITC | | | | | | | | ISSLQP | | | | |
| | | | | | | | | | | EDFAIY | | | | |
| | | | | | | | | | | YC | | | | |
| ADI-81859 | IGKV1-33 | DIPMTQ | 1947 | QASQDI | 3744 | WYQQKP | 2257 | DASNLE | 2416 | GVPSRF | 4186 | QQYKSF | 4359 | FGGGTK |
| | | SPSSLS | | GTYLS | | GKAPKL | | T | | SGSGSG | | PPT | | VEIK |
| | | ASVGDR | | | | LIY | | | | TGSTLT | | | | |
| | | VTITC | | | | | | | | ISGLQP | | | | |
| | | | | | | | | | | EDFATY | | | | |
| | | | | | | | | | | YC | | | | |

| | | | | | | VL | VL Amino |
|---|---|---|---|---|---|---|---|
| | SEQ | | SEQ | | SEQ | Nucleotide | Acid |
| | ID | | ID | | ID | Sub- | Sub- |
| Clone ID | NO: | VL DNA | NO: | VL Protein | NO: | stitutions | stitutions |
| ADI-81637 | 2937 | GATATTGTGCTGACCCAGTCTCCATCCTCCCTGTCTGCATCTA | 4637 | DIVLTQSPSSLSASI | 4991 | 10 | 8 |
| | | TTGGAGACAGAGTCACCTTCACTTGCCGGGCAAGTCAGAGCAT | | GDRVTFTCRASQSIN | | | |
| | | TAACAACTATTTAAATTGGTATCAGCAGAAACCAGGGAAAGCC | | NYLNWYQQKPGKAPK | | | |
| | | CCTAAGCTCCTGATTTATGCTGCATCCACTTTGCAGAGTGGGG | | LLIYAASTLQSGVPS | | | |
| | | TCCCATCAAGGTTCGCTGGCAGTGGATCCGGAACAGATTTCAC | | RFAGSGSGTDFTLTI | | | |
| | | TCTCACCATCACCAGTCTGCAACCTGAAGATTATGCAACTTAC | | TSLQPEDYATYYCQQ | | | |
| | | TACTGCCAACAGAGTTACAGGAGCCGGACGTTCGGCCAAGGGA | | SYRSRTFGQGTKVEI | | | |
| | | CCAAGGTGGAGATCAAA | | K | | | |
| ADI-81641 | 2937 | GAAATTGTGTTGACCCAGTCTCCAGGCACCCTGTCTTTGTCTC | 4638 | EIVLTQSPGTLSLSP | 4992 | 10 | 8 |
| | | CAGGGGAAAGAGCCACCCTCGCCTGCAGGGCCAGTCAGAGTGT | | GERATLACRASQSVT | | | |
| | | TACCAGCTCCTTAGCCTGGTTCCAGCAGAAACCTGGCCAGGCT | | SSLAWFQQKPGQAPR | | | |
| | | CCCAGGCTCCTCGTCTATGATGCATCCACCAGGGCCACTGGCA | | LLVYDASTRATGIPD | | | |
| | | TCCCAGACAGGTTCAGTGGCAGTGGGTCTGGGACTGACTTCAC | | RFSGSGSGTDFTLTI | | | |
| | | TCTCACCATCAGCAGACTGGAGCGTGAAGATTTTGCAGTGTAT | | SRLEREDFAVYYCQQ | | | |
| | | TACTGTCAGCAGTTTGCTAGGTCACCTCGCACTTTTGGCCAGG | | FARSPRTFGQGTKVE | | | |
| | | GGACCAAGGTGGAAATCAAA | | IK | | | |
| ADI-81729 | 2950 | GACATCCCGGTGACCCAGTCTCCTTCCACCCTGTCTGCATCTG | 4639 | DIPVTQSPSTLSASV | 4993 | 10 | 8 |
| | | TTGGAGACAGAGTCACCATCACTTGCCGGGCCAGTCAGAGTAT | | GDRVTITCRASQSIN | | | |
| | | TAATAATAGGTTGGCCTGGTATCAGCAGAAACCAGGGAGAGCC | | NRLAWYQQKPGRAPK | | | |
| | | CCTAAGCTCCTGATTTCTAAGGCGTTTACCTTAGAAAGTGGGG | | LLISKAFTLESGVPS | | | |
| | | TCCCATCAAAGTTCAGCGGCAGTGGATCTGGGACAGAATTCAC | | KFSGSGSGTEFTLTI | | | |
| | | CCTTACCATCAGCAGCCTGCAGCCTGATGATTTTGCAACTTAT | | SSLQPDDFATYYCQQ | | | |
| | | TATTGTCAACAGTATAATAGGTATACGTGGACGTTCGGCCCAG | | YNRYTWTFGPGTKVD | | | |
| | | GGACCAAAGTGGATATCAAA | | IK | | | |
| ADI-81643 | 2937 | GAAATCGGGATGACCCAGTCTCCATCCTCCCTGTCTGCATCTG | 4640 | EIGMTQSPSSLSASV | 4994 | 10 | 5 |
| | | TAGGAGACAGAGTCACCATCACTTGCCGGGCAAGTCAGAGCAT | | GDRVTITCRASQSIS | | | |
| | | TAGCAGCAGCTATTTAAATTGGTATCAGCAGAAACCAGGGAAA | | SSYLNWYQQKPGKAP | | | |
| | | GCCCCTAACCTCCTGATCTATGCTGCATCCAGTTTGGATGCAG | | NLLIYAASSLDAGVP | | | |
| | | GGGTCCCATCAAGGTTCAGTGCCAGTGGATCTGGGACAGATTT | | SRFSASGSGTDFTLT | | | |
| | | CACTCTCACCATCAGTAGTCTGCAACCTGAAGATTTTGCAACT | | ISSLQPEDFATYYCQ | | | |
| | | TACTACTGTCAACAGAGTCACAGGGCCCCCGCCACTTTTGGCC | | QSHRAPATFGQGTKV | | | |
| | | AGGGGACCAAGGTGGAGATCAAA | | EIK | | | |
| ADI-81701 | 2939 | TCGTCAGTGCTGATTCAGCCACCCTCAGTGTCAGTGTCTCCGG | 4641 | SSVLIQPPSVSVSPG | 4995 | 10 | 9 |
| | | GACAGACAGCCAGTATCACGTGCTCGGGAGACCTATTGGCAAA | | QTASITCSGDLLANT | | | |
| | | TACATATGCTCGGTGGTTCCAGCAGAAGCCAGGCCAGGCCCCT | | YARWFQQKPGQAPVL | | | |
| | | GTTTTGTTCATTTATAAAGACAATGAGCGGCCCTCAGGGATCC | | FIYKDNERPSGIPER | | | |
| | | CTGAGCGATTCTCCGGCTCCAGCTCAGGGACCACAGTCACCTT | | FSGSSSGTTVTLTIS | | | |
| | | GACCATCAGCGGGGCCCAGGTTGACGATGAGGCTGTCTATTAC | | GAQVDDEAVYYCYSA | | | |
| | | TGTTACTCTGCGGCCGGCAACAATCGAGAGTTCGGCGGAGGGA | | AGNNREFGGGTKLTV | | | |
| | | CCAAGCTCACCGTCCTA | | L | | | |
| ADI-81720 | 2949 | CAGTCTGTGTTGACGCAGCCGCCCTCAGTGTCTGGGGCCCCAG | 4642 | QSVLTQPPSVSGAPG | 4996 | 10 | 7 |
| | | GGCAGACGGTCACCATCTCCTGCACTGGGAGCAGCTCCAACAT | | QTVTISCTGSSSNIG | | | |
| | | CGGGGCAGGTCATGATGTACACTGGTATCAGCAGCTTCCAGGA | | AGHDVHWYQQLPGTA | | | |
| | | ACAGCCCCCAGACTCCTCATGTTTGACAACAATCGGCCCTCAG | | PRLLMFDNNRPSGVP | | | |
| | | GGGTCCCTGACCGATTCTCTGGCTCCAAGTCTGGCACCTCAGC | | DRFSGSKSGTSASLA | | | |
| | | CTCCCTGGCCATCACTGGGCTCCAGGCTGAGGATGAGGCTGAT | | ITGLQAEDEADYYCQ | | | |
| | | TATTACTGCCAGTCCTATGACAGCAGCCTGAGTATTTATTATG | | SYDSSLSIYYVFGTG | | | |
| | | TCTTCGGAACTGGGACCAAGCTCACCGTCCTA | | TKLTVL | | | |
| ADI-81632 | 2937 | GACATCCGGTTGACCCAGTCTCCATCCTCCCTGTGCGCATCTG | 4643 | DIRLTQSPSSLCASV | 4997 | 10 | 8 |
| | | TAGGAGACAGAGTCAGCATCACTTGCCGGGCGAGTCAGGGCAT | | GDRVSITCRASQGIS | | | |
| | | TAGCAATTCTTTAGCCTGGTATCAGCAAAAACCAGGGAAAGCC | | NSLAWYQQKPGKAPK | | | |
| | | CCTAAATTCCTGCTATATGGTGCATCCACTTTGGAAAGTGGGG | | FLLYGASTLESGVPS | | | |
| | | TCCCATCCAGGTTCAGTGGCAGTGGATGTGGGACGGATTTCAC | | RFSGSGCGTDFTLTI | | | |
| | | TCTCACCATCAGCAGCCTGCAGCCTGAAGATTTTGCAATTTAT | | SSLQPEDFAIYYCQQ | | | |
| | | TACTGTCAACAGTATTATAGTACTCCTCCGAGGACGTTCGGCC | | YYSTPPRTFGQGTKV | | | |
| | | AAGGGACCAAGGTGGAAATCAAA | | EIK | | | |
| ADI-81859 | 2936 | GACATCCCGATGACCCAGTCTCCATCCTCCCTGTCTGCATCTG | 4644 | DIPMTQSPSSLSASV | 4998 | 10 | 8 |
| | | TAGGAGACAGAGTCACCATCACTTGCCAGGCGAGTCAGGACAT | | GDRVTITCQASQDIG | | | |
| | | TGGCACCTATTTAAGTTGGTATCAACAGAAACCCGGAAAAGCC | | TYLSWYQQKPGKAPK | | | |
| | | CCTAAACTCCTGATCTACGATGCATCCAATTTAGAAACGGGGG | | LLIYDASNLETGVPS | | | |
| | | TCCCATCAAGGTTCAGTGGAAGTGGATCTGGGACAGGCTCGAC | | RFSGSGSGTGSTLTI | | | |
| | | TTTAACCATCAGCGGCCTGCAGCCTGAGGATTTTGCAACATAT | | SGLQPEDFATYYCQQ | | | |
| | | TACTGTCAACAATATAAAAGTTTCCCTCCGACTTTCGGCGGGG | | YKSFPPTFGGGTKVE | | | |
| | | GGACCAAGGTGGAAATCAAA | | IK | | | |

| | | | SEQ | | SEQ | | SEQ | | SEQ | | SEQ | | SEQ | |
|---|---|---|---|---|---|---|---|---|---|---|---|---|---|---|
| | VL | VL | ID | VL | ID | VL | ID | VL | ID | VL | ID | VL | ID | VL |
| Clone ID | Germline | FR1 | NO: | CDR1 | NO: | FR2 | NO: | CDR2 | NO: | FR3 | NO: | CDR3 | NO: | FR4 |
| ADI-81891 | IGKV1-NL1 | EIELTQ | 3556 | RASHGI | 3745 | WYQQKP | 3930 | AASSLE | 4052 | GVPSRF | 4187 | QQYYSP | 4360 | FGQGTK |
| | | SPSSLS | | TDSLA | | GKAPRL | | T | | SGSGFG | | PNA | | VEIK |
| | | ASVGDR | | | | LLY | | | | TDFTLT | | | | |
| | | VTITQ | | | | | | | | ITSLQP | | | | |
| | | | | | | | | | | EDFATY | | | | |
| | | | | | | | | | | YC | | | | |
| ADI-81814 | IGKV1-NL1 | DIQVTQ | 2019 | RASHDI | 3746 | WYQQTL | 3931 | AASTLE | 2398 | GVPSRF | 2626 | QQYYGS | 4361 | FGQGTK |
| | | SPSSLS | | SKSLA | | GKAPKL | | S | | RGSGSG | | PRT | | VDIK |
| | | ASVGDR | | | | LLY | | | | TDFTLT | | | | |
| | | VTITC | | | | | | | | ISSLQP | | | | |
| | | | | | | | | | | EDFATY | | | | |
| | | | | | | | | | | YC | | | | |
| ADI-81602 | IGLV1-47 | SYELIQ | 3557 | SGSSSN | 3747 | WYQQLP | 3932 | RENLRP | 4053 | GVPDRI | 4188 | AAWDDS | 4362 | FGGGTK |
| | | PPSASG | | IGSNFV | | GTAPRL | | S | | SGSKSG | | LSGVV | | VTVL |
| | | TPGQRV | | Y | | LIY | | | | TSVSLA | | | | |
| | | TISC | | | | | | | | ISGLRA | | | | |
| | | | | | | | | | | EDEADY | | | | |
| | | | | | | | | | | YC | | | | |
| ADI-81572 | IGLV1-40 | QSVLTQ | 1948 | TGTTSN | 3748 | WYQQVP | 3933 | RNTNRP | 4054 | GVPDRF | 2622 | QSYDSS | 4363 | FGGGTK |
| | | PPSVSG | | IGAGYD | | GSAPKL | | S | | SGSKSD | | LTGVV | | LTVL |
| | | APGQRV | | AH | | IIY | | | | TSASLA | | | | |
| | | TISC | | | | | | | | ITGLQA | | | | |
| | | | | | | | | | | EDEADY | | | | |
| | | | | | | | | | | YC | | | | |
| ADI-81871 | IGKV1D-39 | DIPMTQ | 3558 | RAAQSI | 3749 | WYQQKP | 2257 | AASTLH | 4055 | GVPSRF | 2536 | QQSYVT | 4364 | FGPGTR |
| | | SPSSLS | | GTYLN | | GKAPKL | | S | | SGSGSG | | PSIT | | LEIK |
| | | ASVGDR | | | | LIY | | | | TDFTLT | | | | |
| | | VSFTC | | | | | | | | INSLQP | | | | |
| | | | | | | | | | | EDFATY | | | | |
| | | | | | | | | | | YC | | | | |
| ADI-81560 | IGKV3-20 | DIQLTQ | 3559 | RASQSV | 3750 | WYQQKP | 2258 | GPSSRA | 4056 | GIPARF | 4189 | QQYGDS | 4365 | FGQGTK |
| | | SPGSLS | | RSSYLA | | GQAPRL | | I | | SGSGSG | | PWT | | VEIK |
| | | LSPGER | | | | LIY | | | | TDFSLT | | | | |
| | | ATLFC | | | | | | | | ISRLEA | | | | |
| | | | | | | | | | | EDVAVY | | | | |
| | | | | | | | | | | YC | | | | |
| ADI-81802 | IGKV1D-39 | EIVVTQ | 3560 | RASQSI | 3751 | WYQQKP | 2371 | AASGLH | 4057 | GVPSRF | 4190 | QQSHSI | 4366 | FGQGTR |
| | | SPSSLS | | DNYLN | | GKAPEL | | I | | SGSGSG | | PIT | | LEIK |
| | | ASVGDR | | | | LIY | | | | TDFTLT | | | | |
| | | VTIIC | | | | | | | | ISGLQP | | | | |
| | | | | | | | | | | EDFATY | | | | |
| | | | | | | | | | | YC | | | | |
| ADI-81558 | IGLV3-27 | QSVVTQ | 3561 | SGDLVE | 3752 | WFQQKP | 3934 | RDRERP | 4058 | GIPERF | 4191 | YSAADN | 4367 | FGGGTK |
| | | PPSVSV | | KKYVR | | GQAPVL | | S | | SGSNSG | | NLGV | | VTVL |
| | | SPGQTA | | | | VIY | | | | TTVTLT | | | | |
| | | RITC | | | | | | | | ISGAQV | | | | |
| | | | | | | | | | | EDEADY | | | | |
| | | | | | | | | | | FC | | | | |

| | | | | | | VL | VL Amino |
|---|---|---|---|---|---|---|---|
| | SEQ | | SEQ | | SEQ | Nucleotide | Acid |
| | ID | | ID | | ID | Sub- | Sub- |
| Clone ID | NO: | VL DNA | NO: | VL Protein | NO: | stitutions | stitutions |
| ADI-81891 | 2937 | GAAATCGAGTTGACCCAGTCTCCATCCTCCCTGTCTGCATCTG | 4645 | EIELTQSPSSLSASV | 4999 | 10 | 9 |
| | | TAGGAGACAGAGTCACCATCACTTGCCGGGCGAGTCACGGCAT | | GDRVTITCRASHGIT | | | |
| | | TACTGATTCTTTAGCCTGGTATCAGCAGAAACCAGGGAAAGCC | | DSLAWYQQKPGKAPR | | | |
| | | CCTAGGCTCCTGCTCTATGCTGCATCCAGCTTGGAAACTGGGG | | LLLYAASSLETGVPS | | | |
| | | TCCCATCCCGGTTCAGTGGCAGTGGATTTGGGACGGATTTCAC | | RFSGSGFGTDFTLTI | | | |
| | | TCTCACCATCACCAGCCTGCAGCCTGAAGATTTTGCAACTTAT | | TSLQPEDFATYYCQQ | | | |
| | | TACTGTCAACAGTATTATTCTCCCCCCAACGCTTTTGGCCAGG | | YYSPPNAFGQGTKVE | | | |
| | | GGACCAAGGTGGAGATCAAA | | IK | | | |
| ADI-81814 | 2944 | GACATCCAGGTGACCCAGTCTCCATCCTCCCTGTCTGCATCTG | 4646 | DIQVTQSPSSLSASV | 5000 | 9 | 8 |
| | | TAGGAGACAGAGTCACCATCACTTGCCGGGCGAGTCACGACAT | | GDRVTITCRASHDIS | | | |
| | | TAGCAAATCTTTAGCCTGGTATCAGCAGACATTAGGGAAAGCC | | KSLAWYQQTLGKAPK | | | |
| | | CCTAAGCTCCTGCTCTATGCTGCCTCCACATTGGAAAGTGGGG | | LLLYAASTLESGVPS | | | |
| | | TCCCATCCAGGTTCCGTGGCAGTGGATCTGGGACGGATTTCAC | | RFRGSGSGTDFTLTI | | | |
| | | TCTCACCATCAGCAGCCTCCAGCCTGAAGATTTTGCAACTTAT | | SSLQPEDFATYYCQQ | | | |
| | | TACTGTCAACAGTATTATGGTTCCCCTCGAACGTTCGGCCAAG | | YYGSPRTFGQGTKVD | | | |
| | | GGACCAAAGTGGATATCAAA | | IK | | | |
| ADI-81602 | 2947 | TCCTATGAGCTGATACAGCCACCCTCAGCGTCTGGGACCCCCG | 4647 | SYELIQPPSASGTPG | 5001 | 9 | 7 |
| | | GGCAGAGGGTCACCATCTCTTGTTCTGGAAGCAGCTCCAACAT | | QRVTISCSGSSSNIG | | | |
| | | CGGGAGTAATTTTGTATATTGGTACCAGCAGCTCCCAGGAACG | | SNFVYWYQQLPGTAP | | | |
| | | GCCCCCAGACTCCTCATTTATAGGGAGAATCTTCGGCCCTCAG | | RLLIYRENLRPSGVP | | | |
| | | GGGTCCCTGACCGAATCTCTGGCTCCAAGTCTGGCACCTCAGT | | DRISGSKSGTSVSLA | | | |
| | | CTCCCTGGCCATCAGTGGGCTCCGGGCCGAGGATGAGGCTGAC | | ISGLRAEDEADYYCA | | | |
| | | TATTACTGTGCAGCATGGGATGACAGCCTGAGTGGAGTGGTCT | | AWDDSLSGVVFGGGT | | | |
| | | TCGGCGGAGGGACCAAGGTCACCGTCCTA | | KVTVL | | | |
| ADI-81572 | 2939 | CAGTCTGTGCTGACGCAGCCGCCCTCAGTGTCTGGGGCCCCAG | 4648 | QSVLTQPPSVSGAPG | 5002 | 9 | 9 |
| | | GGCAGAGGGTCACCATCTCCTGCACTGGGACCACCTCCAACAT | | QRVTISCTGTTSNIG | | | |
| | | CGGGGCAGGTTATGATGCACACTGGTACCAGCAGGTTCCAGGG | | AGYDAHWYQQVPGSA | | | |
| | | TCAGCCCCCAAACTCATCATCTATCGTAACACCAATCGGCCCT | | PKLIIYRNTNRPSGV | | | |
| | | CAGGAGTCCCTGACCGATTCTCTGGCTCCAAGTCTGACACCTC | | PDRFSGSKSDTSASL | | | |
| | | GGCCTCCCTGGCCATCACTGGGCTCCAGGCTGAGGATGAGGCT | | AITGLQAEDEADYYC | | | |
| | | GATTATTACTGCCAGTCCTATGACAGCAGCCTGACTGGTGTGG | | QSYDSSLTGVVFGGG | | | |
| | | TCTTCGGCGGAGGGACCAAGCTCACCGTCCTA | | TKLTVL | | | |
| ADI-81871 | 4593 | GACATCCCGATGACCCAGTCTCCATCCTCCCTGTCTGCATCTG | 4649 | DIPMTQSPSSLSASV | 5003 | 9 | 8 |
| | | TAGGAGACAGAGTCAGCTTCACTTGCCGGGCAGCTCAGAGCAT | | GDRVSFTCRAAQSIG | | | |
| | | CGGCACCTATTTAAATTGGTATCAACAGAAACCAGGGAAAGCC | | TYLNWYQQKPGKAPK | | | |
| | | CCTAAGCTCCTGATCTATGCTGCATCCACTTTGCACAGTGGCG | | LLIYAASTLHSGVPS | | | |
| | | TCCCATCAAGGTTCAGTGGCAGTGGATCTGGGACAGATTTCAC | | RFSGSGSGTDFTLTI | | | |
| | | TCTCACCATCAACAGTCTGCAACCTGAAGATTTTGCAACTTAC | | NSLQPEDFATYYCQQ | | | |
| | | TACTGTCAACAGAGTTACGTTACCCCCTCGATCACCTTCGGCC | | SYVTPSITFGPGTRL | | | |
| | | CAGGGACACGACTGGAGATTAAA | | EIK | | | |
| ADI-81560 | 2937 | GACATCCAGTTGACCCAGTCTCCAGGCAGTCTGTCTTTGTCTC | 4650 | DIQLTQSPGSLSLSP | 5004 | 9 | 8 |
| | | CAGGGGAAAGAGCCACCCTCTTCTGCAGGGCCAGCCAGAGTGT | | GERATLFCRASQSVR | | | |
| | | TCGCAGTAGTTATTTAGCCTGGTACCAGCAGAAACCTGGCCAG | | SSYLAWYQQKPGQAP | | | |
| | | GCTCCCAGGCTTCTCATCTATGGTCCATCCAGTAGGGCCACCG | | RLLIYGPSSRATGIP | | | |
| | | GCATCCCAGCCAGGTTCAGTGGCAGTGGATCTGGGACAGACTT | | ARFSGSGSGTDFSLT | | | |
| | | CAGTCTCACCATCAGCAGACTGGAGGCTGAAGATGTTGCAGTG | | ISRLEAEDVAVYYCQ | | | |
| | | TATTATTGTCAGCAGTATGGTGACTCACCGTGGACGTTCGGCC | | QYGDSPWTFGQGTKV | | | |
| | | AAGGGACCAAGGTGGAAATCAAA | | EIK | | | |
| ADI-81802 | 2940 | GAAATTGTAGTGACCCAGTCTCCATCCTCCCTGTCTGCCTCTG | 4651 | EIVVTQSPSSLSASV | 5005 | 9 | 8 |
| | | TAGGAGACAGAGTCACCATCATTTGCCGGGCAAGTCAGAGCAT | | GDRVTIICRASQSID | | | |
| | | TGACAACTATTTAAATTGGTATCAGCAGAAACCAGGGAAAGCC | | NYLNWYQQKPGKAPE | | | |
| | | CCTGAGCTCCTGATCTATGCTGCATCCGGTTTACACATTGGGG | | LLIYAASGLHIGVPS | | | |
| | | TCCCATCAAGGTTCAGTGGCAGTGGATCTGGGACAGATTTCAC | | RFSGSGSGTDFTLTI | | | |
| | | TCTCACCATCAGCGGTCTGCAGCCTGAAGATTTTGCAACTTAT | | SGLQPEDFATYYCQQ | | | |
| | | TACTGTCAACAGAGTCACAGTATCCCGATCACCTTCGGCCAAG | | SHSIPITFGQGTRLE | | | |
| | | GGACACGACTGGAGATTAAA | | IK | | | |
| ADI-81558 | 2947 | CAGTCTGTGGTGACGCAGCCGCCCTCAGTGTCAGTGTCTCCGG | 4652 | QSVVTQPPSVSVSPG | 5006 | 9 | 9 |
| | | GACAGACAGCCAGGATCACCTGCTCAGGAGATTTAGTGGAAAA | | QTARITCSGDLVEKK | | | |
| | | AAAATATGTTCGGTGGTTCCAGCAGAAGCCAGGCCAGGCCCCT | | YVRWFQQKPGQAPVL | | | |
| | | GTACTGGTGATTTATAGAGACCGTGAGCGGCCCTCAGGGATCC | | VIYRDRERPSGIPER | | | |
| | | CTGAGCGATTCTCCGGCTCCAACTCAGGGACCACGGTCACCTT | | FSGSNSGTTVTLTIS | | | |
| | | GACCATCAGCGGGGCCCAGGTTGAGGATGAGGCTGACTATTTC | | GAQVEDEADYFCYSA | | | |
| | | TGTTACTCTGCGGCTGACAACAATTTGGGGGTGTTCGGCGGAG | | ADNNLGVFGGGTKVT | | | |
| | | GGACCAAGGTCACCGTCCTA | | VL | | | |

| | | | SEQ | | SEQ | | SEQ | | SEQ | | SEQ | | SEQ | |
|---|---|---|---|---|---|---|---|---|---|---|---|---|---|---|
| | VL | VL | ID | VL | ID | VL | ID | VL | ID | VL | ID | VL | ID | VL |
| Clone ID | Germline | FR1 | NO: | CDR1 | NO: | FR2 | NO: | CDR2 | NO: | FR3 | NO: | CDR3 | NO: | FR4 |
| ADI-81695 | IGLV3-21 | YYELTQ | 3562 | GGKNIG | 3753 | WYQQKP | 2283 | DDSDRP | 2399 | GIPERL | 4192 | QVWDSS | 4368 | FGGGTK |
| | | PPSVSV | | GQSVQ | | GQAPVL | | S | | SGSKSG | | SDHPG | | VTVL |
| | | APGQTA | | | | VVY | | | | TTATLT | | | | |
| | | RITQ | | | | | | | | ITRVEA | | | | |
| | | | | | | | | | | GDEADY | | | | |
| | | | | | | | | | | SC | | | | |
| ADI-81719 | IGKV3-11 | EIALTQ | 1930 | RASQNV | 3754 | WYQHKP | 2328 | DASRRA | 4059 | GIAARF | 4193 | QQRSNW | 4369 | FGGGTK |
| | | SPATLS | | SNYLG | | GQAPRL | | T | | SGSGSG | | PLT | | VEIK |
| | | LSPGER | | | | LIY | | | | TDFTLT | | | | |
| | | ATLSC | | | | | | | | ISSLEP | | | | |
| | | | | | | | | | | EDFVVY | | | | |
| | | | | | | | | | | YC | | | | |
| ADI-81758 | IGKV1-9 | EMTLTQ | 3563 | RASQGI | 2140 | WYQQRP | 2278 | GASTLQ | 2447 | GVPLRF | 4194 | QHLDSY | 2792 | FGQGTK |
| | | SPSFLS | | SSFLA | | GKAPKL | | S | | SGSGSV | | PRYT | | VEIK |
| | | ASVGDR | | | | LIF | | | | TEFTLT | | | | |
| | | VAITC | | | | | | | | ISGLQP | | | | |
| | | | | | | | | | | EDSATY | | | | |
| | | | | | | | | | | YC | | | | |
| ADI-81780 | IGKV1-NL1 | DIGMTQ | 3564 | RASQGI | 2067 | WYQQRP | 3935 | AASTLE | 2398 | GVPPRF | 4195 | QQYYSP | 2779 | FGQGTK |
| | | SPSSLS | | TNSLA | | GKAPTL | | S | | SGGGSG | | PPRT | | VEIK |
| | | ASVGDR | | | | LLY | | | | TVFTLT | | | | |
| | | VTITC | | | | | | | | ISSLQP | | | | |
| | | | | | | | | | | EDFATY | | | | |
| | | | | | | | | | | YC | | | | |
| ADI-81574 | IGKV1D-39 | DIQMTQ | 1899 | RASQMI | 3755 | WYQQKP | 2257 | GASSLQ | 2403 | GVPSRF | 4196 | QQSYST | 2741 | FGQGTK |
| | | SPSSLP | | RTFLN | | GKAPKL | | S | | SGTGSG | | PPWT | | VEIK |
| | | ASVGDR | | | | LIY | | | | TDFTLT | | | | |
| | | VTITC | | | | | | | | ISSLQP | | | | |
| | | | | | | | | | | EDFAIY | | | | |
| | | | | | | | | | | YC | | | | |
| ADI-81698 | IGLV2-14 | QSVLTQ | 1918 | TGTSSD | 3756 | WYQQYP | 3936 | EVTYRP | 4060 | GISGRF | 4197 | SSYRSS | 4370 | FGGGTK |
| | | PASVSG | | IGAYNY | | GKAPKL | | S | | SGSKSG | | ITSPS | | LTVL |
| | | SPGQSI | | VS | | IIY | | | | NTASLT | | | | |
| | | TISC | | | | | | | | ISGLQA | | | | |
| | | | | | | | | | | EDEADY | | | | |
| | | | | | | | | | | YC | | | | |
| ADI-81831 | IGKV3-20 | ETTLTQ | 3565 | RASQSI | 3757 | WYQQKP | 2258 | GASTRA | 2383 | GIPDRF | 4198 | QHYGSS | 4371 | FGQGTK |
| | | SPGTLS | | SDSRYL | | GQAPRL | | T | | SGSGSG | | LWT | | VEIK |
| | | VFPGER | | A | | LIY | | | | TDFTLT | | | | |
| | | ATLSC | | | | | | | | VSRLEP | | | | |
| | | | | | | | | | | EDFAVY | | | | |
| | | | | | | | | | | YC | | | | |
| ADI-81712 | IGLV1-44 | QSVLTQ | 3566 | SGHFSN | 3758 | WYQQVP | 3937 | NNNQRP | 4061 | GVPDRF | 2615 | AVWDDS | 4372 | FGGGTK |
| | | PPSASG | | IGDNTV | | GTAPKL | | S | | SGSKSG | | LDGPV | | VTVL |
| | | TPGQRV | | N | | LIH | | | | TSASLA | | | | |
| | | TISC | | | | | | | | ISGLQS | | | | |
| | | | | | | | | | | EDEADY | | | | |
| | | | | | | | | | | YC | | | | |

| | | | | | | VL | VL Amino |
|---|---|---|---|---|---|---|---|
| | SEQ | | SEQ | | SEQ | Nucleotide | Acid |
| | ID | | ID | | ID | Sub- | Sub- |
| Clone ID | NO: | VL DNA | NO: | VL Protein | NO: | stitutions | stitutions |
| ADI-81695 | 2947 | TATTATGAGCTGACTCAGCCACCTTCGGTGTCAGTGGCCCCAG | 4653 | YYELTQPPSVSVAPG | 5007 | 9 | 9 |
| | | GACAGACGGCCAGGATTACCTGTGGGGGAAAAAACATTGGAGG | | QTARITCGGKNIGGQ | | | |
| | | TCAAAGTGTGCAGTGGTACCAGCAGAAGCCAGGCCAGGCCCCT | | SVQWYQQKPGQAPVL | | | |
| | | GTGCTGGTCGTCTATGATGATAGCGACCGGCCCTCAGGGATCC | | VVYDDSDRPSGIPER | | | |
| | | CTGAGCGATTATCTGGTTCCAAGTCTGGGACCACGGCCACCCT | | LSGSKSGTTATLTIT | | | |
| | | GACCATCACCAGGGTCGAAGCCGGGGATGAGGCCGACTATTCC | | RVEAGDEADYSCQVW | | | |
| | | TGTCAGGTGTGGGATAGTAGTAGTGATCATCCAGGCTTCGGCG | | DSSSDHPGFGGGTKV | | | |
| | | GAGGGACCAAGGTGACCGTCCTA | | TVL | | | |
| ADI-81719 | 2936 | GAAATCGCATTGACGCAGTCTCCAGCCACCCTGTCTTTGTCTC | 4654 | EIALTQSPATLSLSP | 5008 | 9 | 7 |
| | | CGGGGGAAAGAGCCACCCTCTCCTGCAGGGCCAGTCAGAATGT | | GERATLSCRASQNVS | | | |
| | | TAGCAACTACTTAGGTTGGTACCAACATAAACCTGGCCAGGCT | | NYLGWYQHKPGQAPR | | | |
| | | CCCAGGCTCCTCATTTATGATGCATCCAGGAGGGCCACTGGCA | | LLIYDASRRATGIAA | | | |
| | | TCGCAGCCAGGTTCAGTGGCAGTGGGTCTGGGACAGACTTCAC | | RFSGSGSGTDFTLTI | | | |
| | | TCTCACCATCAGCAGCCTAGAGCCTGAAGATTTTGTAGTTTAT | | SSLEPEDFVVYYCQQ | | | |
| | | TACTGTCAGCAGCGTAGCAACTGGCCGCTCACTTTCGGCGGAG | | RSNWPLTFGGGTKVE | | | |
| | | GGACCAAGGTGGAAATCAAA | | IK | | | |
| ADI-81758 | 2937 | GAAATGACACTCACGCAGTCTCCATCCTTCCTGTCTGCATCTG | 4655 | EMTLTQSPSFLSASV | 5009 | 9 | 9 |
| | | TAGGAGACAGAGTCGCCATCACTTGCCGGGCCAGTCAGGGCAT | | GDRVAITCRASQGIS | | | |
| | | TAGCAGTTTTTTAGCCTGGTATCAGCAAAGACCAGGGAAAGCC | | SFLAWYQQRPGKAPK | | | |
| | | CCTAAGCTCCTGATCTTTGGTGCATCCACTTTGCAAAGTGGGG | | LLIFGASTLQSGVPL | | | |
| | | TCCCATTAAGGTTCAGCGGCAGTGGATCTGTGACAGAATTCAC | | RFSGSGSVTEFTLTI | | | |
| | | TCTCACAATCAGCGGCCTGCAGCCTGAAGATTCTGCAACTTAT | | SGLQPEDSATYYCQH | | | |
| | | TACTGTCAACACCTTGATAGTTACCCTCGGTACACTTTTGGCC | | LDSYPRYTFGQGTKV | | | |
| | | AGGGGACCAAGGTGGAGATCAAA | | EIK | | | |
| ADI-81780 | 2937 | GACATCGGGATGACCCAGTCTCCGTCCTCCCTGTCTGCATCTG | 4656 | DIGMTQSPSSLSASV | 5010 | 9 | 8 |
| | | TAGGAGACAGAGTCACCATCACTTGCCGGGCGAGTCAGGGCAT | | GDRVTITCRASQGIT | | | |
| | | TACCAATTCTTTAGCCTGGTATCAGCAAAGACCAGGGAAAGCC | | NSLAWYQQRPGKAPT | | | |
| | | CCAACCCTCCTTCTCTATGCTGCATCCACACTGGAAAGTGGGG | | LLLYAASTLESGVPP | | | |
| | | TCCCACCCAGGTTCAGTGGCGGTGGATCTGGGACGGTTTTCAC | | RFSGGGSGTVFTLTI | | | |
| | | TCTCACCATCAGCAGCCTGCAGCCTGAAGATTTTGCAACTTAT | | SSLQPEDFATYYCQQ | | | |
| | | TACTGTCAGCAGTACTATAGTCCCCCTCCCCGGACGTTCGGCC | | YYSPPPRTFGQGTKV | | | |
| | | AAGGGACCAAGGTGGAAATCAAA | | EIK | | | |
| ADI-81574 | 2937 | GACATCCAGATGACCCAGTCTCCATCCTCCCTGCCTGCATCTG | 4657 | DIQMTQSPSSLPASV | 5011 | 9 | 8 |
| | | TGGGAGACAGAGTCACCATCACTTGCCGGGCAAGTCAGATGAT | | GDRVTITCRASQMIR | | | |
| | | TAGGACCTTTTTAAATTGGTATCAGCAGAAGCCAGGGAAAGCC | | TFLNWYQQKPGKAPK | | | |
| | | CCTAAGCTCCTGATCTATGGTGCATCCAGTTTGCAAAGTGGGG | | LLIYGASSLQSGVPS | | | |
| | | TCCCATCAAGGTTCAGTGGCACTGGATCTGGGACAGATTTCAC | | RFSGTGSGTDFTLTI | | | |
| | | TCTCACCATCAGCAGTCTGCAACCTGAAGATTTTGCAATTTAC | | SSLQPEDFAIYYCQQ | | | |
| | | TACTGTCAACAGAGTTACAGTACCCCTCCGTGGACGTTCGGCC | | SYSTPPWTFGQGTKV | | | |
| | | AAGGGACCAAGGTGGAAATCAAA | | EIK | | | |
| ADI-81698 | 2939 | CAGTCTGTTCTGACTCAGCCTGCCTCCGTGTCTGGGTCTCCTG | 4658 | QSVLTQPASVSGSPG | 5012 | 9 | 8 |
| | | GACAGTCGATCACCATCTCCTGCACTGGGACCAGCAGTGACAT | | QSITISCTGTSSDIG | | | |
| | | TGGTGCTTATAACTATGTCTCCTGGTACCAACAGTACCCAGGC | | AYNYVSWYQQYPGKA | | | |
| | | AAAGCCCCCAAACTCATAATTTATGAGGTCACTTATCGGCCCT | | PKLIIYEVTYRPSGI | | | |
| | | CAGGGATTTCTGGTCGCTTCTCTGGCTCCAAGTCTGGTAACAC | | SGRFSGSKSGNTASL | | | |
| | | GGCCTCCCTGACCATCTCTGGGCTCCAGGCTGAGGACGAGGCT | | TISGLQAEDEADYYC | | | |
| | | GATTATTACTGCAGCTCATATAGAAGTAGCACTTCTCCCTCAT | | SSYRSSTSPSFGGGT | | | |
| | | TCGGCGGTGGGACCAAGCTCACCGTCCTA | | KLTVL | | | |
| ADI-81831 | 2937 | GAAACGACACTCACGCAGTCTCCAGGCACGCTGTCTGTGTTTC | 4659 | ETTLTQSPGTLSVFP | 5013 | 9 | 7 |
| | | CAGGGGAAAGAGCCACCCTCTCCTGCAGGGCCAGTCAGAGTAT | | GERATLSCRASQSIS | | | |
| | | TAGCGACAGCAGATATTTAGCCTGGTACCAGCAGAAACCTGGC | | DSRYLAWYQQKPGQA | | | |
| | | CAGGCTCCCAGACTCCTCATCTATGGTGCATCCACCAGGGCCA | | PRLLIYGASTRATGI | | | |
| | | CTGGCATCCCAGACAGGTTCAGTGGCAGTGGGTCTGGGACAGA | | PDRFSGSGSGTDFTL | | | |
| | | CTTCACTCTCACCGTCAGCAGACTGGAGCCTGAAGATTTTGCA | | TVSRLEPEDFAVYYC | | | |
| | | GTTTATTACTGTCAGCACTATGGTAGCTCACTGTGGACGTTCG | | QHYGSSLWTFGQGTK | | | |
| | | GCCAAGGGACCAAGGTGGAAATCAAA | | VEIK | | | |
| ADI-81712 | 2947 | CAGTCTGTGCTGACGCAGCCGCCCTCAGCGTCTGGGACCCCCG | 4660 | QSVLTQPPSASGTPG | 5014 | 9 | 6 |
| | | GGCAGAGGGTCACCATCTCCTGTTCTGGGCACTTCTCCAACAT | | QRVTISCSGHFSNIG | | | |
| | | CGGAGATAATACTGTTAACTGGTACCAGCAGGTCCCAGGAACG | | DNTVNWYQQVPGTAP | | | |
| | | GCCCCCAAACTCCTCATACATAATAATAATCAGCGGCCCTCAG | | KLLIHNNNQRPSGVP | | | |
| | | GGGTCCCTGACCGCTTCTCTGGCTCCAAGTCTGGCACCTCAGC | | DRFSGSKSGTSASLA | | | |
| | | CTCCCTGGCCATCAGTGGGCTCCAGTCTGAGGATGAGGCTGAT | | ISGLQSEDEADYYCA | | | |
| | | TATTACTGTGCAGTATGGGATGACAGCCTGGATGGTCCGGTGT | | VWDDSLDGPVFGGGT | | | |
| | | TCGGCGGAGGGACCAAGGTGACCGTCCTC | | KVTVL | | | |

| | | | SEQ | | SEQ | | SEQ | | SEQ | | SEQ | | SEQ | |
|---|---|---|---|---|---|---|---|---|---|---|---|---|---|---|
| | VL | VL | ID | VL | ID | VL | ID | VL | ID | VL | ID | VL | ID | VL |
| Clone ID | Germline | FR1 | NO: | CDR1 | NO: | FR2 | NO: | CDR2 | NO: | FR3 | NO: | CDR3 | NO: | FR4 |
| ADI-81746 | IGKV1D-39 | EITLTQ | 3567 | RASQNI | 3759 | WYQQKP | 2371 | AASTLQ | 2417 | GVPSRF | 4199 | QQSHST | 4373 | FGPGTK |
| | | SPSSLS | | VGYLN | | GKAPEL | | R | | SGSGSE | | PFT | | VEIK |
| | | ASVGDR | | | | LIY | | | | TDFTLT | | | | |
| | | VTITC | | | | | | | | ISSLQP | | | | |
| | | | | | | | | | | EDIATY | | | | |
| | | | | | | | | | | YC | | | | |
| ADI-81752 | IGKV1-12 | DIEMTQ | 3568 | RASQDI | 3760 | WYQQKS | 3938 | DASSLE | 2434 | GVPSRF | 4200 | LQANSF | 4374 | FGPGTK |
| | | SPSSVS | | RSRLG | | GKAPKL | | S | | SGSGYG | | SLA | | VEIK |
| | | ASVGDR | | | | LIF | | | | TDFTLT | | | | |
| | | VTITC | | | | | | | | ISSLQP | | | | |
| | | | | | | | | | | EDFATY | | | | |
| | | | | | | | | | | YC | | | | |
| ADI-81836 | IGKV1D-39 | EIQLTQ | 3569 | RAGHSI | 3761 | WYQQKP | 3939 | VSSSLQ | 4062 | GVPSRF | 4201 | QQSFSP | 4375 | FGQGTK |
| | | SPSSLS | | RNYLN | | GTAPKL | | S | | SGSGSG | | PYT | | VDIK |
| | | ASLGDR | | | | LIY | | | | TDFTLT | | | | |
| | | VTITC | | | | | | | | ISSLQP | | | | |
| | | | | | | | | | | EDSATY | | | | |
| | | | | | | | | | | YC | | | | |
| ADI-81864 | IGKV1-17 | DIQVTQ | 3570 | RASQGI | 2187 | WFQQKP | 3940 | GASSLQ | 4063 | GVALRF | 4202 | LQHNSS | 4376 | FGQGTR |
| | | SPSSMS | | SNYLA | | GKVPKR | | A | | SGSGSG | | PIT | | VEIK |
| | | ASVGDR | | | | LIY | | | | TEFTFT | | | | |
| | | VTITC | | | | | | | | ITSLQP | | | | |
| | | | | | | | | | | EDFATY | | | | |
| | | | | | | | | | | YC | | | | |
| ADI-81722 | IGKV1-33 | EIVMTQ | 3571 | QASQDI | 3762 | WYQHKP | 3924 | AASNLE | 4064 | GVPSRF | 2528 | QQFDIL | 4377 | FGQGTK |
| | | SPSSLS | | RSFLN | | GKAPKL | | I | | SGSGSG | | PWT | | VDIK |
| | | ASVGDR | | | | LIY | | | | TDFTFT | | | | |
| | | VAITC | | | | | | | | ISSLQP | | | | |
| | | | | | | | | | | EDFATY | | | | |
| | | | | | | | | | | YC | | | | |
| ADI-81595 | IGLV1-40 | SYELTQ | 3572 | TGSDSN | 3763 | WYRQLP | 3941 | GDNNRP | 2524 | GVPDRF | 4203 | | 2908 | FGGGTK |
| | | PPSVSG | | IGAGYD | | GTAPKL | | S | | SGSKSG | | QSYDSS | | LTVL |
| | | APGLRV | | VH | | LIY | | | | ISASLA | | LSGSV | | |
| | | TISC | | | | | | | | ITGLQA | | | | |
| | | | | | | | | | | EDEADY | | | | |
| | | | | | | | | | | YC | | | | |
| ADI-81587 | IGKV1-5 | EMTLTQ | 3573 | RASQNI | 3764 | WYQQKP | 3942 | DASSLE | 2388 | GVPSRF | 2532 | QQYKTY | 4378 | FGQGTK |
| | | SPPSLA | | NNWLA | | GKAPKL | | G | | SGSGSG | | ST | | VDIK |
| | | ASVGDR | | | | LIF | | | | TEFTLT | | | | |
| | | VTITC | | | | | | | | ISSLQP | | | | |
| | | | | | | | | | | DDFATY | | | | |
| | | | | | | | | | | YC | | | | |
| ADI-81597 | IGLV3-21 | YYVLTQ | 3574 | GGSDIG | 3765 | WYQQRP | 3943 | DDTDRP | 2419 | GIPERF | 4204 | QVWDVG | 4379 | FGGGTK |
| | | PPSVSV | | SKGVH | | GQAPVL | | S | | LGSNSG | | AV | | VTVL |
| | | APGQTA | | | | VVN | | | | NTATLT | | | | |
| | | RITC | | | | | | | | ISRVEA | | | | |
| | | | | | | | | | | GDEADY | | | | |
| | | | | | | | | | | YC | | | | |

| | | | | | | VL | VL Amino |
|---|---|---|---|---|---|---|---|
| | SEQ | | SEQ | | SEQ | Nucleotide | Acid |
| | ID | | ID | | ID | Sub- | Sub- |
| Clone ID | NO: | VL DNA | NO: | VL Protein | NO: | stitutions | stitutions |
| ADI-81746 | 2942 | GAAATCACACTGACCCAGTCTCCATCCTCCCTGTCAGCGTCTG | 4661 | EITLTQSPSSLSASV | 5015 | 9 | 8 |
| | | TAGGAGACAGAGTCACCATCACTTGCCGGGCAAGTCAGAACAT | | GDRVTITCRASQNIV | | | |
| | | TGTCGGCTATTTAAATTGGTATCAGCAGAAACCAGGGAAAGCC | | GYLNWYQQKPGKAPE | | | |
| | | CCTGAGCTCCTGATCTATGCTGCGTCCACTTTGCAAAGAGGGG | | LLIYAASTLQRGVPS | | | |
| | | TCCCATCAAGGTTCAGTGGCAGTGGATCTGAGACAGATTTCAC | | RFSGSGSETDFTLTI | | | |
| | | TCTCACCATCAGCAGTCTGCAACCTGAAGATATTGCAACCTAC | | SSLQPEDIATYYCQQ | | | |
| | | TACTGTCAACAGAGTCACAGTACCCCCTTCACTTTCGGCCCTG | | SHSTPFTFGPGTKVE | | | |
| | | GGACCAAGGTGGAAATCAAA | | IK | | | |
| ADI-81752 | 2942 | GACATCGAGATGACCCAGTCTCCATCTTCCGTGTCTGCATCTG | 4662 | DIEMTQSPSSVSASV | 5016 | 9 | 9 |
| | | TAGGAGACAGAGTCACCATCACTTGTCGGGCGAGTCAGGATAT | | GDRVTITCRASQDIR | | | |
| | | TCGCAGCCGGTTAGGCTGGTATCAGCAGAAATCAGGGAAAGCC | | SRLGWYQQKSGKAPK | | | |
| | | CCTAAACTCCTGATCTTTGATGCATCCAGTTTGGAAAGTGGGG | | LLIFDASSLESGVPS | | | |
| | | TCCCATCAAGGTTCAGCGGCAGTGGCTATGGGACAGACTTCAC | | RFSGSGYGTDFTLTI | | | |
| | | TCTTACCATCAGCAGCCTGCAGCCTGAAGATTTTGCAACTTAC | | SSLQPEDFATYYCLQ | | | |
| | | TATTGTCTACAGGCTAATAGTTTCTCTCTCGCTTTCGGCCCTG | | ANSFSLAFGPGTKVE | | | |
| | | GACCAAGGTGGAGATCAAA | | IK | | | |
| ADI-81836 | 2944 | GAAATCCAGTTGACCCAGTCTCCATCCTCCCTGTCAGCATCTT | 4663 | EIQLTQSPSSLSASL | 5017 | 9 | 9 |
| | | TAGGAGACAGAGTCACCATCACTTGCCGGGCAGGTCACAGCAT | | GDRVTITCRAGHSIR | | | |
| | | TAGGAACTATTTAAATTGGTATCAGCAGAAACCAGGGACAGCC | | NYLNWYQQKPGTAPK | | | |
| | | CCTAAGCTCCTGATCTATGTTTCATCCAGTTTGCAAAGTGGGG | | LLIYVSSSLQSGVPS | | | |
| | | TCCCATCAAGGTTCAGTGGCAGTGGATCTGGGACAGATTTCAC | | RFSGSGSGTDFTLTI | | | |
| | | TCTCACCATCAGCAGTCTGCAACCTGAGGATTCTGCAACTTAC | | SSLQPEDSATYYCQQ | | | |
| | | TACTGTCAACAGAGTTTCAGTCCCCCTTACACTTTTGGCCAGG | | SFSPPYTFGQGTKVD | | | |
| | | GGACCAAGGTGGATATCAAA | | IK | | | |
| ADI-81864 | 4594 | GACATCCAGGTGACCCAGTCTCCATCCTCCATGTCTGCATCTG | 4664 | DIQVTQSPSSMSASV | 5018 | 9 | 7 |
| | | TAGGAGACAGAGTCACCATCACTTGTCGGGCGAGTCAGGGCAT | | GDRVTITCRASQGIS | | | |
| | | TAGCAATTATTTAGCCTGGTTTCAGCAGAAACCAGGGAAAGTC | | NYLAWFQQKPGKVPK | | | |
| | | CCTAAGCGCCTGATCTATGGTGCATCCAGTTTGCAAGCAGGGG | | RLIYGASSLQAGVAL | | | |
| | | TCGCATTAAGGTTCAGCGGCAGTGGATCTGGGACAGAATTCAC | | RFSGSGSGTEFTFTI | | | |
| | | TTTCACCATCACCAGCCTGCAGCCTGAAGATTTTGCAACATAT | | TSLQPEDFATYYCLQ | | | |
| | | TACTGTCTACAACATAATAGTTCTCCTATCACCTTCGGCCAAG | | HNSSPITFGQGTRVE | | | |
| | | GGACCCGAGTGGAGATTAAA | | IK | | | |
| ADI-81722 | 2944 | GAAATCGTGATGACGCAGTCTCCATCCTCCCTGTCTGCATCTG | 4665 | EIVMTQSPSSLSASV | 5019 | 8 | 8 |
| | | TAGGAGACAGAGTCGCCATCACTTGCCAGGCGAGTCAGGACAT | | GDRVAITCQASQDIR | | | |
| | | TAGGAGCTTTTTAAATTGGTATCAGCATAAACCAGGGAAAGCC | | SFLNWYQHKPGKAPK | | | |
| | | CCTAAGCTCCTGATCTACGCTGCATCCAATTTGGAAATAGGGG | | LLIYAASNLEIGVPS | | | |
| | | TCCCATCAAGGTTCAGTGGAAGTGGATCTGGGACAGATTTTAC | | RFSGSGSGTDFTFTI | | | |
| | | TTTCACCATCAGCAGCCTGCAGCCTGAAGATTTTGCAACATAT | | SSLQPEDFATYYCQQ | | | |
| | | TACTGTCAACAGTTTGATATTCTCCCCTGGACTTTTGGCCAGG | | FDILPWTFGQGTKVD | | | |
| | | GGACCAAGGTGGATATCAAA | | IK | | | |
| ADI-81595 | 2939 | TCGTATGAGCTGACTCAGCCACCCTCAGTGTCTGGGGCCCCAG | 4666 | SYELTQPPSVSGAPG | 5020 | 8 | 6 |
| | | GGCTGAGGGTCACCATCTCCTGCACTGGGAGCGACTCCAACAT | | LRVTISCTGSDSNIG | | | |
| | | CGGGGCAGGATATGATGTACACTGGTACCGGCAGCTTCCAGGG | | AGYDVHWYRQLPGTA | | | |
| | | ACAGCCCCCAAACTCCTCATCTATGGTGACAATAATCGGCCCT | | PKLLIYGDNNRPSGV | | | |
| | | CAGGGGTCCCTGACCGATTCTCTGGCTCCAAGTCTGGCATCTC | | PDRFSGSKSGISASL | | | |
| | | AGCCTCCCTGGCCATCACTGGTCTCCAGGCTGAGGATGAGGCT | | AITGLQAEDEADYYC | | | |
| | | GATTATTACTGCCAGTCCTATGACAGCAGCCTGAGTGGCAGCG | | QSYDSSLSGSVFGGG | | | |
| | | TTTTCGGCGGGGGGACCAAGCTCACCGTCCTA | | TKLTVL | | | |
| ADI-81587 | 2944 | GAAATGACACTCACGCAGTCTCCCCCCTCCCTGGCTGCATCTG | 4667 | EMTLTQSPPSLAASV | 5021 | 8 | 8 |
| | | TAGGAGACAGAGTCACCATCACTTGCCGGGCCAGTCAGAATAT | | GDRVTITCRASQNIN | | | |
| | | TAATAACTGGTTGGCCTGGTATCAGCAGAAACCAGGAAAAGCC | | NWLAWYQQKPGKAPK | | | |
| | | CCTAAGCTCCTGATCTTTGATGCCTCCAGTTTGGAAGGTGGGG | | LLIFDASSLEGGVPS | | | |
| | | TCCCATCAAGGTTCAGCGGCAGTGGATCTGGGACAGAATTCAC | | RFSGSGSGTEFTLTI | | | |
| | | TCTCACCATCAGCAGCCTGCAGCCTGATGATTTTGCAACTTAC | | SSLQPDDFATYYCQQ | | | |
| | | TACTGCCAGCAGTATAAAACTTACTCGACGTTCGGCCAAGGGA | | YKTYSTFGQGTKVDI | | | |
| | | CCAAGGTGGATATCAAA | | K | | | |
| ADI-81597 | 2947 | TACTATGTGCTGACTCAGCCACCCTCGGTGTCAGTGGCCCCAG | 4668 | YYVLTQPPSVSVAPG | 5022 | 8 | 7 |
| | | GACAGACGGCCAGAATTACCTGTGGGGGAAGCGACATTGGAAG | | QTARITCGGSDIGSK | | | |
| | | TAAGGGTGTGCACTGGTACCAACAGAGGCCAGGCCAGGCCCCT | | GVHWYQQRPGQAPVL | | | |
| | | GTGCTGGTCGTCAATGATGATACCGACCGGCCCTCAGGGATTC | | VVNDDTDRPSGIPER | | | |
| | | CTGAGCGATTCCTTGGCTCCAACTCTGGGAACACGGCCACCCT | | FLGSNSGNTATLTIS | | | |
| | | GACCATCAGCAGGGTCGAGGCCGGAGATGAGGCCGACTATTAC | | RVEAGDEADYYCQVW | | | |
| | | TGTCAGGTGTGGGATGTTGGTGCGGTGTTCGGCGGAGGGACCA | | DVGAVFGGGTKVTVL | | | |
| | | AGGTCACCGTCCTA | | | | | |

| | | | SEQ | | SEQ | | SEQ | | SEQ | | SEQ | | SEQ | |
|---|---|---|---|---|---|---|---|---|---|---|---|---|---|---|
| | VL | VL | ID | VL | ID | VL | ID | VL | ID | VL | ID | VL | ID | VL |
| Clone ID | Germline | FR1 | NO: | CDR1 | NO: | FR2 | NO: | CDR2 | NO: | FR3 | NO: | CDR3 | NO: | FR4 |
| ADI-81693 | IGKV1-9 | EMTLTQ | 3575 | RASQGI | 3766 | WYQQKP | 2257 | GASTLQ | 2447 | GVPLRF | 4205 | QHLDSY | 2792 | FGQGTK |
| | | SPSYLS | | NNFLA | | GKAPKL | | S | | SGSGSE | | PRYT | | VEIK |
| | | ASAGDR | | | | LIY | | | | TEFTLT | | | | |
| | | VTITC | | | | | | | | ISSLQP | | | | |
| | | | | | | | | | | EDFATY | | | | |
| | | | | | | | | | | YC | | | | |
| ADI-81783 | GKV1-NL1 | DIRMTQ | 3576 | RASQGI | 2062 | WYQQRP | 3944 | GASTLE | 4051 | GVASRF | 4206 | QQYYGP | 4380 | FGQGTK |
| | | SPSSLS | | SNSLA | | GRAPKL | | S | | SGSGSG | | PHT | | VEIK |
| | | TSVGDR | | | | LLY | | | | TDFTLT | | | | |
| | | VTITC | | | | | | | | ISSLQP | | | | |
| | | | | | | | | | | EDFATY | | | | |
| | | | | | | | | | | YC | | | | |
| ADI-81823 | IGKV3-20 | EIVMTQ | 1935 | RASQSV | 3767 | WYQQRP | 2306 | GTSNRA | 4065 | GIPDRF | 4207 | QQSVNF | 4381 | FGQGTK |
| | | SPGTLS | | SSGHLA | | GQAPRL | | T | | SGSGSG | | PRT | | VEIK |
| | | LSPGER | | | | LIY | | | | TDFILT | | | | |
| | | ATLSC | | | | | | | | ISRLES | | | | |
| | | | | | | | | | | EDIAVY | | | | |
| | | | | | | | | | | YC | | | | |
| ADI-81888 | IGKV1-NL1 | EIVVTQ | 3577 | RASQGI | 2067 | WYQQKP | 2259 | SASTLE | 4066 | GVPSRF | 4208 | QQYYIL | 4382 | FGQGTK |
| | | SPSSLS | | TNSLA | | GKAPKL | | G | | SGSGSG | | RT | | VEIK |
| | | ASVGDR | | | | LLY | | | | TDFILT | | | | |
| | | VTITC | | | | | | | | IDSLQP | | | | |
| | | | | | | | | | | EDFATY | | | | |
| | | | | | | | | | | YC | | | | |
| ADI-81593 | IGLV1-40 | QSVLTQ | 3578 | TGSNSN | 3768 | WYQKLP | 3945 | GNNNRP | 2492 | GVPDRF | 4209 | QSYDSS | 4383 | FGGGTK |
| | | PPSVSG | | LGAGYD | | GTAPKL | | S | | SGSKSG | | LSSSL | | LTVL |
| | | APVQRV | | VH | | LIY | | | | TSASLA | | | | |
| | | TISC | | | | | | | | IAGLQA | | | | |
| | | | | | | | | | | EDEADY | | | | |
| | | | | | | | | | | FC | | | | |
| ADI-81884 | IGKV1-33 | DITMTQ | 1882 | QASHDI | 3769 | WYQQKP | 2257 | DVLNLK | 4067 | GVPSRF | 4210 | QQYNDF | 4334 | FGQGTK |
| | | SPSSLS | | SDYLN | | GKAPKL | | T | | SGSGSG | | PYT | | VEIK |
| | | ASVGDR | | | | LIY | | | | THFTFT | | | | |
| | | VTITC | | | | | | | | ISSLQP | | | | |
| | | | | | | | | | | EDIATY | | | | |
| | | | | | | | | | | YC | | | | |
| ADI-81545 | IGKV1D-39 | DIQLTQ | 1876 | RASQSI | 3770 | WYQQRP | 2309 | AASTLQ | 2392 | GVPSRF | 4211 | QQSYSS | 4384 | FGPGTK |
| | | SPSSLS | | MRYLN | | GKAPKL | | S | | SGSGSG | | PPWT | | VEIK |
| | | ASVGDR | | | | LIY | | | | TDFRLT | | | | |
| | | VTITC | | | | | | | | ISSLQP | | | | |
| | | | | | | | | | | EDYATY | | | | |
| | | | | | | | | | | YC | | | | |
| ADI-81555 | IGKV1D-39 | EIQLTQ | 3579 | RASQNI | 3771 | WYQQKP | 2257 | AASSLQ | 2391 | GVPSRF | 4212 | QQSYSI | 4385 | FGPGTK |
| | | SPSSLS | | NSYLN | | GKAPKL | | S | | SGSGSK | | PPIT | | VDIK |
| | | ASIGDR | | | | LIY | | | | TNFTLT | | | | |
| | | VIITC | | | | | | | | ITSLQP | | | | |
| | | | | | | | | | | EDFATY | | | | |
| | | | | | | | | | | YC | | | | |

| | | | | | | VL | VL Amino |
|---|---|---|---|---|---|---|---|
| | SEQ | | SEQ | | SEQ | Nucleotide | Acid |
| | ID | | ID | | ID | Sub- | Sub- |
| Clone ID | NO: | VL DNA | NO: | VL Protein | NO: | stitutions | stitutions |
| ADI-81693 | 2937 | GAAATGACACTGACGCAGTCTCCATCCTACCTGTCTGCATCTG | 4669 | EMTLTQSPSYLSASA | 5023 | 8 | 8 |
| | | CAGGAGACAGAGTCACCATCACTTGCCGGGCCAGTCAGGGCAT | | GDRVTITCRASQGIN | | | |
| | | TAACAATTTTTTAGCCTGGTATCAACAAAAACCAGGGAAAGCC | | NFLAWYQQKPGKAPK | | | |
| | | CCTAAGCTCCTGATCTATGGTGCATCCACTTTGCAAAGTGGGG | | LLIYGASTLQSGVPL | | | |
| | | TCCCATTAAGATTCAGCGGCAGTGGATCTGAGACAGAATTCAC | | RFSGSGSETEFTLTI | | | |
| | | TCTCACAATCAGCAGCCTGCAGCCGGAAGATTTTGCAACTTAT | | SSLQPEDFATYYCQH | | | |
| | | TACTGTCAACACCTTGATAGTTACCCTCGGTACACTTTTGGCC | | LDSYPRYTFGQGTKV | | | |
| | | AGGGGACCAAGGTGGAAATCAAA | | EIK | | | |
| ADI-81783 | 2937 | GACATCCGGATGACCCAGTCTCCATCCTCCCTGTCTACATCTG | 4670 | DIRMTQSPSSLSTSV | 5024 | 8 | 7 |
| | | TAGGAGACCGAGTCACCATCACTTGCCGGGCGAGTCAGGGCAT | | GDRVTITCRASQGIS | | | |
| | | TAGCAATTCTTTAGCCTGGTATCAGCAGAGACCAGGGAGAGCC | | NSLAWYQQRPGRAPK | | | |
| | | CCTAAACTCCTGCTCTATGGTGCATCCACATTGGAAAGTGGGG | | LLLYGASTLESGVAS | | | |
| | | TCGCGTCCAGGTTCAGTGGCAGTGGATCTGGGACGGATTTCAC | | RFSGSGSGTDFTLTI | | | |
| | | TCTCACCATCAGCAGCCTGCAGCCTGAAGATTTTGCAACTTAT | | SSLQPEDFATYYCQQ | | | |
| | | TACTGTCAACAGTACTATGGGCCCCCTCACACTTTTGGCCAGG | | YYGPPHTFGQGTKVE | | | |
| | | GGACCAAGGTGGAGATCAAA | | IK | | | |
| ADI-81823 | 2937 | GAAATTGTGATGACGCAGTCTCCAGGCACCCTGTCTTTGTCTC | 4671 | EIVMTQSPGTLSLSP | 5025 | 8 | 8 |
| | | CAGGGGAAAGAGCCACACTCTCCTGCAGGGCCAGTCAGAGTGT | | GERATLSCRASQSVS | | | |
| | | TAGCAGCGGCCACCTAGCCTGGTACCAGCAGAGACCTGGCCAG | | SGHLAWYQQRPGQAP | | | |
| | | GCTCCCAGGCTCCTCATCTATGGTACATCCAACAGGGCCACTG | | RLLIYGTSNRATGIP | | | |
| | | GCATCCCTGACAGGTTCAGTGGCAGTGGGTCTGGGACAGACTT | | DRFSGSGSGTDFILT | | | |
| | | CATTCTCACCATCAGCAGACTGGAGTCTGAAGATATTGCAGTG | | ISRLESEDIAVYYCQ | | | |
| | | TACTATTGTCAGCAATCCGTTAACTTCCCGAGAACGTTCGGCC | | QSVNFPRTFGQGTKV | | | |
| | | AAGGGACCAAGGTGGAAATCAAA | | EIK | | | |
| ADI-81888 | 2937 | GAAATCGTGGTGACGCAGTCTCCATCCTCCCTGTCTGCATCTG | 4672 | EIVVTQSPSSLSASV | 5026 | 8 | 7 |
| | | TAGGAGACAGAGTCACCATCACTTGCCGGGCGAGTCAGGGCAT | | GDRVTITCRASQGIT | | | |
| | | TACCAATTCCTTAGCCTGGTATCAGCAGAAACCAGGGAAAGCC | | NSLAWYQQKPGKAPK | | | |
| | | CCTAAGCTCCTACTCTATTCTGCATCCACATTGGAAGGTGGGG | | LLLYSASTLEGGVPS | | | |
| | | TCCCATCCAGGTTCAGTGGCAGTGGATCTGGGACGGATTTCAT | | RFSGSGSGTDFILTI | | | |
| | | TCTCACCATCGACAGCCTGCAGCCTGAAGATTTTGCAACTTAT | | DSLQPEDFATYYCQQ | | | |
| | | TACTGTCAACAGTATTATATTCTCCGGACGTTCGGCCAGGGGA | | YYILRTFGQGTKVEI | | | |
| | | CCAAGGTGGAGATCAAA | | K | | | |
| ADI-81593 | 2939 | CAGTCTGTGTTGACGCAGCCGCCCTCAGTGTCTGGGGCCCCAG | 4673 | QSVLTQPPSVSGAPV | 5027 | 8 | 7 |
| | | TGCAGAGAGTCACCATCTCCTGCACTGGGAGCAACTCCAACCT | | QRVTISCTGSNSNLG | | | |
| | | CGGGGCAGGTTATGATGTACACTGGTATCAGAAACTTCCAGGG | | AGYDVHWYQKLPGTA | | | |
| | | ACAGCCCCCAAACTCCTCATCTATGGAAACAACAATCGGCCCT | | PKLLIYGNNNRPSGV | | | |
| | | CAGGGGTCCCTGACCGATTCTCTGGCTCCAAGTCTGGCACCTC | | PDRFSGSKSGTSASL | | | |
| | | AGCCTCCCTGGCCATCGCTGGTCTCCAGGCTGAGGATGAGGCT | | AIAGLQAEDEADYFC | | | |
| | | GATTATTTCTGCCAGTCCTATGACAGCAGCCTGAGTTCTTCGC | | QSYDSSLSSSLFGGG | | | |
| | | TGTTCGGCGGCGGGACCAAGCTCACCGTCCTA | | TKLTVL | | | |
| ADI-81884 | 2937 | GACATCACGATGACCCAGTCTCCATCCTCCCTGTCTGCATCTG | 4674 | DITMTQSPSSLSASV | 5028 | 8 | 6 |
| | | TCGGGGACAGAGTCACCATCACTTGCCAGGCGAGTCACGACAT | | GDRVTITCQASHDIS | | | |
| | | TAGCGACTATTTAAATTGGTATCAGCAAAAACCAGGGAAGGCC | | DYLNWYQQKPGKAPK | | | |
| | | CCTAAGCTCCTGATCTACGATGTGTTAAATTTGAAAACAGGGG | | LLIYDVLNLKTGVPS | | | |
| | | TCCCCTCAAGGTTCAGTGGAAGTGGATCTGGGACACATTTTAC | | RFSGSGSGTHFTFTI | | | |
| | | TTTCACCATCAGCAGCCTGCAGCCTGAAGATATTGCAACATAT | | SSLQPEDIATYYCQQ | | | |
| | | TACTGTCAACAATATAATGATTTCCCGTACACTTTTGGCCAGG | | YNDFPYTFGQGTKVE | | | |
| | | GGACCAAGGTGGAGATCAAA | | IK | | | |
| ADI-81545 | 2942 | GACATCCAGTTGACCCAGTCTCCATCCTCCCTGTCTGCATCTG | 4675 | DIQLTQSPSSLSASV | 5029 | 8 | 6 |
| | | TAGGAGACAGAGTCACCATCACTTGCCGGGCAAGTCAGTCCAT | | GDRVTITCRASQSIM | | | |
| | | TATGAGATACTTAAATTGGTATCAGCAGAGACCAGGGAAGGCC | | RYLNWYQQRPGKAPK | | | |
| | | CCTAAGCTCCTGATCTATGCTGCATCCACTTTGCAAAGTGGGG | | LLIYAASTLQSGVPS | | | |
| | | TCCCATCAAGGTTCAGTGGCAGTGGATCTGGGACAGATTTCAG | | RFSGSGSGTDFRLTI | | | |
| | | GCTCACCATCAGCAGTCTGCAACCTGAAGACTATGCAACTTAT | | SSLQPEDYATYYCQQ | | | |
| | | TACTGTCAACAGAGTTACAGTAGTCCTCCGTGGACGTTCGGCC | | SYSSPPWTFGPGTKV | | | |
| | | CAGGGACCAAAGTGGAAATCAAA | | EIK | | | |
| ADI-81555 | 2950 | GAAATCCAATTGACCCAGTCTCCATCCTCCCTGTCTGCATCTA | 4676 | EIQLTQSPSSLSASI | 5030 | 8 | 7 |
| | | TAGGAGACAGAGTCATCATCACTTGCCGGGCAAGTCAGAACAT | | GDRVIITCRASQNIN | | | |
| | | TAACAGCTATTTAAATTGGTATCAGCAGAAACCAGGGAAAGCC | | SYLNWYQQKPGKAPK | | | |
| | | CCTAAGCTCCTGATCTATGCTGCATCCAGTTTGCAAAGTGGGG | | LLIYAASSLQSGVPS | | | |
| | | TCCCATCAAGGTTCAGTGGCAGTGGATCTAAGACAAATTTCAC | | RFSGSGSKTNFTLTI | | | |
| | | TCTCACCATCACCAGTCTGCAACCTGAAGATTTTGCAACTTAC | | TSLQPEDFATYYCQQ | | | |
| | | TACTGTCAACAGAGTTACAGTATCCCCCCAATCACTTTCGGCC | | SYSIPPITFGPGTKV | | | |
| | | CTGGGACCAAGGTGGATATCAAA | | DIK | | | |

| | | | SEQ | | SEQ | | SEQ | | SEQ | | SEQ | | SEQ | |
|---|---|---|---|---|---|---|---|---|---|---|---|---|---|---|
| | VL | VL | ID | VL | ID | VL | ID | VL | ID | VL | ID | VL | ID | VL |
| Clone ID | Germline | FR1 | NO: | CDR1 | NO: | FR2 | NO: | CDR2 | NO: | FR3 | NO: | CDR3 | NO: | FR4 |
| ADI-81838 | IGLV2-14 | QSVLTQ | 3580 | TATSSD | 3772 | WYQLHP | 3946 | EVSNRP | 2427 | GVFNRF | 4213 | SSYTHD | 4386 | FGGGTK |
| | | PASVYG | | VGSYNY | | GKAPKL | | S | | FGSKSG | | STV | | LTVL |
| | | SPGQSI | | VS | | LIY | | | | NTASLT | | | | |
| | | TISC | | | | | | | | ISGLQA | | | | |
| | | | | | | | | | | EDEADY | | | | |
| | | | | | | | | | | YC | | | | |
| ADI-81623 | IGKV1-16 | EIQLTQ | 1917 | RASQAI | 3773 | WFQQQP | 3947 | AASNLQ | 4068 | GVSSRF | 4214 | QQYKTY | 4387 | FGGGTK |
| | | SPSSLS | | GNYVA | | GKAPKS | | G | | SGSGSG | | PLT | | VEIK |
| | | ASVGDR | | | | LID | | | | TDFTLT | | | | |
| | | VTITC | | | | | | | | ISSLQP | | | | |
| | | | | | | | | | | EDFATY | | | | |
| | | | | | | | | | | YC | | | | |
| ADI-81551 | IGKV3-20 | EIVLTQ | 3581 | RASQSV | 3774 | WYQLKP | 3948 | TVSSRA | 4069 | GIPDRF | 2616 | QQYGTS | 4388 | FGQGTK |
| | | SPGTLS | | RSDYLA | | GQAPRL | | T | | SGSGSG | | PWT | | VEIK |
| | | LSPGER | | | | LIY | | | | TDFTLT | | | | |
| | | ATLSC | | | | | | | | ISRLEP | | | | |
| | | | | | | | | | | EDFAVY | | | | |
| | | | | | | | | | | YC | | | | |
| ADI-81594 | IGKV1-16 | DIQMTQ | 1878 | RASQGI | 3775 | WFQQKP | 3949 | GASNLQ | 4070 | GVSSKF | 4215 | QQYKSF | 4389 | FGGGTK |
| | | SPSSLS | | RTYLA | | GEAPKS | | S | | SGSGSG | | PLT | | VEIK |
| | | ASVGDR | | | | LIE | | | | TDFTLT | | | | |
| | | VTITC | | | | | | | | ISSLQP | | | | |
| | | | | | | | | | | EDFATY | | | | |
| | | | | | | | | | | YC | | | | |
| ADI-81681 | IGLV2-8 | QSVLTQ | 3582 | TGTNSD | 3776 | WYQHHP | 3950 | EVNKRP | 2394 | GVPDRF | 4216 | TSYADT | 4390 | FGGGTK |
| | | PPSASG | | VGGHNS | | GKAPKL | | S | | SGSKSG | | GDCVL | | VTVL |
| | | SPGQSV | | VS | | VIF | | | | NTASLT | | | | |
| | | TISC | | | | | | | | VSGLQA | | | | |
| | | | | | | | | | | DDEADY | | | | |
| | | | | | | | | | | YC | | | | |
| ADI-81833 | IGKV3D-15 | EMTLTQ | 3583 | RASQSV | 3777 | WYQQKP | 2258 | DASTRA | 2424 | GIPARF | 4217 | LQYNNW | 4391 | FGGGTK |
| | | SPATLS | | SRKLA | | GQAPRL | | T | | TGSGSG | | PPLT | | VDIK |
| | | LSPGER | | | | ILIY | | | | TEFTLT | | | | |
| | | ADLSC | | | | | | | | ISSLQS | | | | |
| | | | | | | | | | | EDFAIY | | | | |
| | | | | | | | | | | YC | | | | |
| ADI-81672 | IGLV1-44 | QSKLTQ | 3584 | CGSSSN | 3778 | WYQQLP | 3951 | SNNQRP | 2463 | GVPDRF | 2615 | ATWDDS | 4392 | FGGGTK |
| | | PPSAFG | | LGSNCV | | RTAPKL | | S | | SGSKSG | | VTGPV | | LPVL |
| | | TPGQRV | | N | | LVY | | | | TSASLA | | | | |
| | | TISC | | | | | | | | ISGLQS | | | | |
| | | | | | | | | | | EDEADY | | | | |
| | | | | | | | | | | YC | | | | |
| ADI-81872 | IGKV1-NL1 | DIPMTQ | 1947 | RASQDI | 2113 | WYQQKP | 2296 | AASVLE | 4071 | GVPSRF | 4218 | QHYYSN | 4393 | FGQGTK |
| | | SPSSLS | | SNSLA | | GKAPKF | | S | | SGRGSG | | PRT | | VEIK |
| | | ASVGDR | | | | LLY | | | | TNFTLA | | | | |
| | | VTITC | | | | | | | | ISSLQP | | | | |
| | | | | | | | | | | EDFATY | | | | |
| | | | | | | | | | | YC | | | | |

| | | | | | | VL | VL Amino |
|---|---|---|---|---|---|---|---|
| | SEQ | | SEQ | | SEQ | Nucleotide | Acid |
| | ID | | ID | | ID | Sub- | Sub- |
| Clone ID | NO: | VL DNA | NO: | VL Protein | NO: | stitutions | stitutions |
| ADI-81838 | 2939 | CAGTCTGTCCTGACTCAGCCTGCCTCCGTGTATGGGTCTCCTG | 4677 | QSVLTQPASVYGSPG | 5031 | 8 | 7 |
| | | GACAGTCGATCACCATCTCCTGCACTGCAACCAGCAGTGACGT | | QSITISCTATSSDVG | | | |
| | | TGGTAGTTATAATTATGTCTCCTGGTACCAACTGCACCCAGGC | | SYNYVSWYQLHPGKA | | | |
| | | AAAGCCCCCAAACTCCTCATTTATGAGGTCAGTAATCGGCCCT | | PKLLIYEVSNRPSGV | | | |
| | | CAGGAGTTTTTAATCGCTTCTTTGGCTCCAAGTCTGGCAACAC | | FNRFFGSKSGNTASL | | | |
| | | GGCCTCCCTGACCATCTCTGGACTTCAGGCTGAGGACGAGGCT | | TISGLQAEDEADYYC | | | |
| | | GATTATTACTGCAGTTCATATACACACGACAGCACGGTCTTCG | | SSYTHDSTVFGGGTK | | | |
| | | GCGGAGGGACCAAGCTCACCGTCCTA | | ILTVL | | | |
| ADI-81623 | 2936 | GAAATCCAGTTGACCCAGTCTCCATCCTCACTGTCTGCATCTG | 4678 | EIQLTQSPSSLSASV | 5032 | 8 | 8 |
| | | TAGGAGACAGGGTCACCATCACTTGTCGGGCGAGTCAGGCCAT | | GDRVTITCRASQAIG | | | |
| | | TGGCAATTATGTAGCCTGGTTTCAGCAGCAACCAGGGAAAGCC | | NYVAWFQQQPGKAPK | | | |
| | | CCTAAGTCCCTTATAGATGCTGCATCAAATTTGCAAGGTGGGG | | SLIDAASNLQGGVSS | | | |
| | | TCTCATCAAGATTCAGCGGCAGTGGATCTGGCACAGATTTCAC | | RFSGSGSGTDFTLTI | | | |
| | | TCTCACCATCAGCAGCCTGCAGCCCGAAGATTTTGCAACTTAT | | SSLQPEDFATYYCQQ | | | |
| | | TACTGCCAACAGTACAAAACTTACCCCCTCACTTTCGGCGGGG | | YKTYPLTFGGGTKVE | | | |
| | | GGACCAAGGTGGAAATCAAA | | IK | | | |
| ADI-81551 | 2937 | GAAATTGTGTTGACACAGTCTCCAGGCACCCTGTCTTTGTCTC | 4679 | EIVLTQSPGTLSLSP | 5033 | 8 | 5 |
| | | CAGGGGAAAGAGCCACCCTGTCCTGCAGGGCCAGTCAGAGTGT | | GERATLSCRASQSVR | | | |
| | | TCGCAGCGACTACTTAGCCTGGTACCAGCTGAAACCTGGCCAG | | SDYLAWYQLKPGQAP | | | |
| | | GCTCCCAGGCTCCTCATTTATACTGTTTCCAGCAGGGCCACTG | | RLLIYTVSSRATGIP | | | |
| | | GCATCCCTGACAGGTTCAGTGGCAGTGGGTCTGGGACAGACTT | | DRFSGSGSGTDFTLT | | | |
| | | CACTCTCACCATCAGCAGACTGGAGCCTGAAGATTTTGCAGTG | | ISRLEPEDFAVYYCQ | | | |
| | | TATTACTGTCAGCAGTATGGTACCTCACCCTGGACGTTCGGCC | | QYGTSPWTFGQGTKV | | | |
| | | AAGGGACCAAGGTGGAAATCAAA | | EIK | | | |
| ADI-81594 | 2936 | GACATCCAGATGACCCAGTCTCCATCCTCACTGTCTGCATCTG | 4680 | DIQMTQSPSSLSASV | 5034 | 8 | 7 |
| | | TAGGAGACAGAGTCACCATCACTTGTCGGGCGAGTCAGGGCAT | | GDRVTITCRASQGIR | | | |
| | | TAGGACTTATTTAGCCTGGTTTCAGCAGAAACCAGGCGAAGCC | | TYLAWFQQKPGEAPK | | | |
| | | CCTAAGTCCCTGATCGAGGGTGCATCAAATTTGCAAAGTGGGG | | SLIEGASNLQSGVSS | | | |
| | | TCTCATCAAAATTCAGCGGCAGTGGATCTGGCACAGATTTCAC | | KFSGSGSGTDFTLTI | | | |
| | | TCTCACCATCAGCAGCCTGCAGCCTGAAGATTTTGCAACTTAC | | SSLQPEDFATYYCQQ | | | |
| | | TACTGCCAACAGTATAAAAGTTTCCCCCTCACTTTCGGCGGAG | | YKSFPLTFGGGTKVE | | | |
| | | GGACCAAAGTGGAAATCAAA | | IK | | | |
| ADI-81681 | 2947 | CAGTCTGTGCTGACTCAGCCTCCCTCCGCGTCCGGGTCTCCTG | 4681 | QSVLTQPPSASGSPG | 5035 | 8 | 8 |
| | | GACAGTCAGTCACCATCTCCTGCACTGGAACCAACAGTGACGT | | QSVTISCTGTNSDVG | | | |
| | | TGGTGGTCATAACTCTGTCTCCTGGTACCAACACCACCCAGGC | | GHNSVSWYQHHPGKA | | | |
| | | AAAGCCCCCAAACTCGTGATTTTTGAGGTCAATAAGCGGCCCT | | PKLVIFEVNKRPSGV | | | |
| | | CAGGGGTCCCTGATCGCTTCTCTGGCTCCAAGTCTGGCAACAC | | PDRFSGSKSGNTASL | | | |
| | | GGCCTCCCTGACCGTCTCTGGGCTCCAGGCTGACGATGAGGCT | | TVSGLQADDEADYYC | | | |
| | | GATTATTACTGCACCTCATATGCAGACACCGGCGATTGTGTGC | | TSYADTGDCVLFGGG | | | |
| | | TTTTCGGCGGAGGGACCAAGGTCACCGTCCTA | | TKVTVL | | | |
| ADI-81833 | 2938 | GAAATGACACTCACGCAGTCTCCAGCCACCCTGTCTTTGTCTC | 4682 | EMTLTQSPATLSLSP | 5036 | 8 | 7 |
| | | CAGGTGAAAGAGCCGACCTCTCTTGCAGGGCCAGTCAGAGCGT | | GERADLSCRASQSVS | | | |
| | | TAGCCGCAAGTTAGCCTGGTATCAACAGAAACCTGGCCAGGCT | | RKLAWYQQKPGQAPR | | | |
| | | CCCAGGCTCCTCATTTATGATGCATCCACCAGGGCCACTGGCA | | LLIYDASTRATGIPA | | | |
| | | TCCCAGCCAGGTTCACTGGCAGTGGGTCTGGGACAGAGTTCAC | | RFTGSGSGTEFTLTI | | | |
| | | TCTCACCATCAGCAGCCTGCAGTCTGAAGATTTTGCAATTTAT | | SSLQSEDFAIYYCLQ | | | |
| | | TACTGTCTGCAGTATAATAATTGGCCTCCCCTCACTTTCGGCG | | YNNWPPLTFGGGTKV | | | |
| | | GAGGGACCAAGGTGGATATCAAA | | DIK | | | |
| ADI-81672 | 4595 | CAGTCAAAACTGACTCAGCCACCCTCAGCGTTTGGGACCCCCG | 4683 | QSKLTQPPSAFGTPG | 5037 | 8 | 6 |
| | | GGCAGAGGGTCACCATCTCTTGTTGTGGAAGCAGCTCCAACCT | | QRVTISCCGSSSNLG | | | |
| | | TGGAAGTAATTGTGTAAACTGGTACCAGCAACTCCCAAGAACG | | SNCVNWYQQLPRTAP | | | |
| | | GCCCCCAAACTCCTCGTCTATAGTAATAATCAGCGGCCCTCAG | | KLLVYSNNQRPSGVP | | | |
| | | GGGTCCCTGACCGATTCTCTGGCTCCAAGTCCGGCACCTCAGC | | DRFSGSKSGTSASLA | | | |
| | | CTCCCTGGCCATCAGTGGGCTCCAGTCTGAGGATGAGGCTGAT | | ISGLQSEDEADYYCA | | | |
| | | TATTACTGCGCAACATGGGATGACAGCGTGACTGGTCCGGTGT | | TWDDSVTGPVFGGGT | | | |
| | | TCGGCGGAGGGACCAAGCTCCCCGTCTTA | | KLPVL | | | |
| ADI-81872 | 2937 | GACATCCCAATGACCCAGTCTCCATCCTCCCTGTCTGCATCTG | 4684 | DIPMTQSPSSLSASV | 5038 | 8 | 7 |
| | | TTGGAGACAGAGTCACCATCACTTGCCGGGCGAGTCAGGACAT | | GDRVTITCRASQDIS | | | |
| | | TAGCAATTCTTTAGCCTGGTATCAGCAGAAACCAGGGAAAGCC | | NSLAWYQQKPGKAPK | | | |
| | | CCTAAGTTCCTCCTCTATGCTGCATCCGTATTGGAAAGTGGGG | | FLLYAASVLESGVPS | | | |
| | | TCCCATCCAGGTTCAGTGGCCGTGGATCTGGGACCAATTTCAC | | RFSGRGSGTNFTLAI | | | |
| | | TCTCGCCATCAGCAGCCTGCAGCCTGAAGATTTTGCAACTTAT | | SSLQPEDFATYYCQH | | | |
| | | TACTGTCAACATTATTATAGTAATCCTCGGACTTTTGGCCAGG | | YYSNPRTFGQGTKVE | | | |
| | | GGACCAAGGTGGAGATCAAA | | IK | | | |

| | | | SEQ | | SEQ | | SEQ | | SEQ | | SEQ | | SEQ | |
|---|---|---|---|---|---|---|---|---|---|---|---|---|---|---|
| | VL | VL | ID | VL | ID | VL | ID | VL | ID | VL | ID | VL | ID | VL |
| Clone ID | Germline | FR1 | NO: | CDR1 | NO: | FR2 | NO: | CDR2 | NO: | FR3 | NO: | CDR3 | NO: | FR4 |
| ADI-81679 | IGKV1D-39 | DIQMTQ | 3585 | RASQSI | 3738 | WYQHKP | 3952 | AASSLQ | 2391 | GVPSRF | 2534 | QQSYTL | 4394 | FGGGTK |
| | | SPSSLS | | NNYLN | | GRAPKL | | S | | SGSGSG | | PGAT | | VEIK |
| | | AFVGDR | | | | LIY | | | | TDFTLT | | | | |
| | | ISITC | | | | | | | | ISSLQP | | | | |
| | | | | | | | | | | EDFATY | | | | |
| | | | | | | | | | | YC | | | | |
| ADI-81553 | IGKV3D-15 | EIVMTQ | 2034 | RASQSI | 2129 | WYQQKF | 3953 | GISTGA | 4072 | GTPARF | 4219 | QQYNHW | 4395 | FGQGTK |
| | | SPATLS | | SSNLA | | GQAPRL | | T | | RGSGSG | | PGT | | VEIK |
| | | VSPGER | | | | LIY | | | | TEFTLT | | | | |
| | | ATLSC | | | | | | | | ISSLQS | | | | |
| | | | | | | | | | | EDFAVY | | | | |
| | | | | | | | | | | YC | | | | |
| ADI-81636 | IGLV1-40 | QSVLTQ | 3586 | TGSSSN | 2201 | WYQQLP | 2314 | SNNNRP | 4073 | GVPDRI | 4220 | QSYDSN | 4396 | LGEGTK |
| | | PPSVSG | | IGAGYD | | GTAPKL | | S | | SGSRSD | | VFGKV | | LTVL |
| | | APGHRV | | VH | | LIY | | | | TSASLA | | | | |
| | | TISC | | | | | | | | ITGLQA | | | | |
| | | | | | | | | | | EDEADY | | | | |
| | | | | | | | | | | FC | | | | |
| ADI-81536 | IGLV2-14 | QPVLTQ | 1933 | TGTSSD | 3779 | WYQQHP | 3954 | EFSNRP | 4074 | GVSHRF | 4221 | SSYTTD | 4397 | FGGGTK |
| | | PASVSG | | LGNFNY | | GKGPKL | | S | | SGSKSG | | SVV | | VTVL |
| | | SPGQSI | | VS | | MIY | | | | NTASLT | | | | |
| | | TISC | | | | | | | | ISGLQP | | | | |
| | | | | | | | | | | EDEADY | | | | |
| | | | | | | | | | | YC | | | | |
| ADI-81684 | IGKV1D-39 | DIAMTQ | 3587 | RASQSI | 3780 | WYQQKP | 3942 | GASTLQ | 2447 | GVPSRF | 4222 | QQSYSS | 4398 | FGQGTK |
| | | SPSSLS | | FSYLN | | GKAPKL | | S | | SGSGSG | | MWT | | VEIK |
| | | ASVGDR | | | | LIF | | | | TDFTLT | | | | |
| | | VTISC | | | | | | | | ISSLQP | | | | |
| | | | | | | | | | | EDLATY | | | | |
| | | | | | | | | | | SC | | | | |
| ADI-81794 | IGLV1-44 | QSELTQ | 3588 | SGSSSN | 3781 | WYQQLP | 3955 | NNNQRP | 4061 | GVPDRF | 4223 | AAWDDS | 4399 | FGGGTK |
| | | PPSTSG | | IGGNVV | | GTTPKV | | S | | SGSKSG | | LNGPLV | | LTVL |
| | | TPGQRV | | N | | LIY | | | | TTASLA | | | | |
| | | TISC | | | | | | | | ISGLOS | | | | |
| | | | | | | | | | | EDEADY | | | | |
| | | | | | | | | | | YC | | | | |
| ADI-81869 | IGKV1D-39 | EMTITQ | 3589 | RASQSI | 3782 | WYQHKP | 3924 | DSSSLQ | 4075 | GVPSRF | 2534 | QQSYST | 2741 | FGQGTK |
| | | SPSSLS | | RGHLN | | GKAPKL | | S | | SGSGSG | | PPWT | | VEIK |
| | | ASVGDR | | | | LIY | | | | TDFTLT | | | | |
| | | ITITC | | | | | | | | ISSLQP | | | | |
| | | | | | | | | | | EDFATY | | | | |
| | | | | | | | | | | YC | | | | |
| ADI-81659 | IGLV1-40 | QSVLTQ | 1948 | TGSNSN | 2143 | WYRQLP | 3956 | GNTNRP | 2484 | GVPDRF | 4224 | QSYDSS | 4400 | FGGGTK |
| | | PPSVSG | | IGAGYD | | GTAPQL | | S | | SASKSG | | LSGVI | | VTVL |
| | | APGQRV | | VH | | IFY | | | | TSASLA | | | | |
| | | TISC | | | | | | | | ITGLQA | | | | |
| | | | | | | | | | | DDEADY | | | | |
| | | | | | | | | | | YC | | | | |

| | | | | | | VL | VL Amino |
|---|---|---|---|---|---|---|---|
| | SEQ | | SEQ | | SEQ | Nucleotide | Acid |
| | ID | | ID | | ID | Sub- | Sub- |
| Clone ID | NO: | VL DNA | NO: | VL Protein | NO: | stitutions | stitutions |
| ADI-81679 | 2936 | GACATCCAGATGACCCAGTCTCCATCCTCCCTGTCTGCATTTG | 4685 | DIQMTQSPSSLSAFV | 5039 | 8 | 7 |
| | | TAGGAGACAGAATCAGCATCACTTGCCGGGCAAGTCAGAGCAT | | GDRISITCRASQSIN | | | |
| | | TAACAATTACCTAAATTGGTATCAGCACAAACCGGGGAGAGCC | | NYLNWYQHKPGRAPK | | | |
| | | CCTAAGCTCCTGATCTATGCTGCATCCAGTTTGCAAAGTGGGG | | LLIYAASSLQSGVPS | | | |
| | | TCCCATCAAGGTTCAGTGGTAGTGGATCTGGGACAGATTTCAC | | RFSGSGSGTDFTLTI | | | |
| | | TCTCACCATCAGCAGTCTGCAACCTGAAGATTTTGCAACTTAT | | SSLQPEDFATYYCQQ | | | |
| | | TACTGTCAACAGAGTTACACTCTCCCTGGAGCCACTTTCGGCG | | SYTLPGATFGGGTKV | | | |
| | | GAGGGACCAAGGTGGAGATCAAA | | EIK | | | |
| ADI-81553 | 2937 | GAAATTGTGATGACCCAGTCTCCAGCCACCCTGTCTGTGTCTC | 4686 | EIVMTQSPATLSVSP | 5040 | 8 | 6 |
| | | CAGGGGAAAGAGCCACCCTCTCCTGCAGGGCCAGTCAGAGTAT | | GERATLSCRASQSIS | | | |
| | | TAGCAGCAACTTAGCCTGGTACCAGCAGAAATTTGGCCAGGCT | | SNLAWYQQKFGQAPR | | | |
| | | CCCAGGCTCCTCATCTATGGTATATCCACCGGGGCCACTGGTA | | LLIYGISTGATGTPA | | | |
| | | CCCCAGCCAGGTTCAGAGGCAGTGGGTCTGGGACAGAGTTCAC | | RFRGSGSGTEFTLTI | | | |
| | | TCTCACCATCAGCAGCCTGCAGTCTGAAGATTTTGCAGTTTAT | | SSLQSEDFAVYYCQQ | | | |
| | | TACTGTCAGCAGTATAATCACTGGCCGGGCACGTTCGGCCAAG | | YNHWPGTFGQGTKVE | | | |
| | | GGACCAAGGTGGAAATCAAA | | IK | | | |
| ADI-81636 | 4596 | CAGTCTGTCTTGACGCAGCCGCCCTCAGTGTCTGGGGCCCCAG | 4687 | QSVLTQPPSVSGAPG | 5041 | 8 | 7 |
| | | GACATAGGGTCACCATCTCCTGCACTGGGAGCAGCTCCAACAT | | HRVTISCTGSSSNIG | | | |
| | | CGGGGCAGGTTATGATGTGCACTGGTACCAGCAGCTTCCAGGA | | AGYDVHWYQQLPGTA | | | |
| | | ACAGCCCCCAAACTCCTCATCTATAGTAATAATAATCGGCCCT | | PKLLIYSNNNRPSGV | | | |
| | | CAGGGGTCCCTGACCGAATCTCTGGCTCCAGGTCTGACACCTC | | PDRISGSRSDTSASL | | | |
| | | AGCCTCCCTGGCCATCACTGGACTCCAGGCTGAGGATGAGGCT | | AITGLQAEDEADYFC | | | |
| | | GATTATTTCTGCCAGTCCTATGACAGTAACGTGTTCGGTAAGG | | QSYDSNVFGKVLGEG | | | |
| | | TATTGGGCGAAGGGACCAAGCTGACCGTCCTA | | TKLTVL | | | |
| ADI-81536 | 2947 | CAGCCTGTGCTGACTCAGCCTGCCTCCGTGTCTGGGTCTCCTG | 4688 | QPVLTQPASVSGSPG | 5042 | 8 | 7 |
| | | GACAGTCGATCACCATCTCCTGCACTGGAACCAGCAGTGACCT | | QSITISCTGTSSDLG | | | |
| | | TGGTAATTTTAACTATGTCTCCTGGTACCAACAACACCCAGGC | | NFNYVSWYQQHPGKG | | | |
| | | AAGGGCCCCAAACTCATGATTTATGAGTTCAGTAATCGGCCCT | | PKLMIYEFSNRPSGV | | | |
| | | CAGGGGTTTCTCATCGCTTCTCTGGCTCCAAGTCTGGCAACAC | | SHRFSGSKSGNTASL | | | |
| | | GGCCTCCCTGACCATCTCTGGGCTCCAGCCTGAGGACGAGGCT | | TISGLQPEDEADYYC | | | |
| | | GATTATTACTGCAGCTCATATACAACCGACAGCGTCGTTTTCG | | SSYTTDSVVFGGGTK | | | |
| | | GCGGAGGGACCAAGGTCACCGTCCTA | | VTVL | | | |
| ADI-81684 | 2937 | GACATCGCGATGACCCAGTCTCCATCCTCCCTGTCTGCATCTG | 4689 | DIAMTQSPSSLSASV | 5043 | 8 | 7 |
| | | TAGGAGACAGAGTCACCATCAGTTGTCGGGCAAGTCAGAGTAT | | GDRVTISCRASQSIF | | | |
| | | TTTCAGCTATTTAAATTGGTATCAACAGAAACCAGGGAAAGCC | | SYLNWYQQKPGKAPK | | | |
| | | CCTAAGCTCCTGATCTTTGGTGCATCCACTTTGCAAAGTGGGG | | LLIFGASTLQSGVPS | | | |
| | | TCCCATCAAGGTTCAGTGGCAGTGGATCTGGGACAGATTTCAC | | RFSGSGSGTDFTLTI | | | |
| | | TCTCACCATCAGCAGTCTGCAACCTGAAGATCTTGCAACTTAC | | SSLQPEDLATYSCQQ | | | |
| | | TCCTGTCAACAGAGTTACAGTTCAATGTGGACGTTCGGCCAAG | | SYSSMWTFGQGTKVE | | | |
| | | GGACCAAGGTGGAAATCAAA | | IK | | | |
| ADI-81794 | 2939 | CAGTCTGAGCTGACTCAGCCACCCTCAACGTCTGGGACCCCCG | 4690 | QSELTQPPSTSGTPG | 5044 | 8 | 7 |
| | | GGCAGAGGGTCACCATCTCTTGTTCTGGAAGCAGCTCCAACAT | | QRVTISCSGSSSNIG | | | |
| | | CGGAGGTAATGTTGTGAACTGGTACCAGCAGCTGCCAGGAACG | | GNVVNWYQQLPGTTP | | | |
| | | ACCCCCAAAGTCCTCATCTATAATAATAATCAGCGGCCCTCAG | | KVLIYNNNQRPSGVP | | | |
| | | GGGTCCCTGACCGATTCTCTGGCTCCAAGTCTGGCACCACAGC | | DRFSGSKSGTTASLA | | | |
| | | CTCCCTGGCCATCAGTGGGCTCCAGTCTGAGGATGAGGCTGAT | | ISGLQSEDEADYYCA | | | |
| | | TATTACTGTGCAGCATGGGATGACAGCCTGAATGGCCCCTTGG | | AWDDSLNGPLVFGGG | | | |
| | | TATTCGGCGGAGGGACCAAGCTCACCGTCCTA | | TKLTVL | | | |
| ADI-81869 | 2937 | GAAATGACGATCACGCAGTCTCCATCCTCCCTGTCTGCATCTG | 4691 | EMTITQSPSSLSASV | 5045 | 8 | 7 |
| | | TAGGAGACAGAATCACCATCACTTGCCGGGCAAGTCAGAGCAT | | GDRITITCRASQSIR | | | |
| | | TAGAGGACATTTAAACTGGTATCAGCACAAACCAGGGAAAGCC | | GHLNWYQHKPGKAPK | | | |
| | | CCTAAGCTCCTGATCTATGATTCATCCAGTTTGCAAAGTGGGG | | LLIYDSSSLQSGVPS | | | |
| | | TCCCATCAAGGTTCAGTGGCAGTGGATCTGGGACAGATTTCAC | | RFSGSGSGTDFTLTI | | | |
| | | TCTCACCATCAGCAGTCTGCAGCCTGAAGATTTTGCAACTTAC | | SSLQPEDFATYYCQQ | | | |
| | | TACTGTCAACAGAGTTACAGTACCCCTCCGTGGACGTTCGGCC | | SYSTPPWTFGQGTKV | | | |
| | | AAGGGACCAAGGTGGAGATCAAA | | EIK | | | |
| ADI-81659 | 2947 | CAGTCTGTCTTGACGCAGCCGCCCTCAGTGTCTGGGGCCCCAG | 4692 | QSVLTQPPSVSGAPG | 5046 | 8 | 8 |
| | | GGCAGAGGGTCACCATCTCCTGCACTGGGAGCAACTCCAACAT | | QRVTISCTGSNSNIG | | | |
| | | CGGGGCAGGTTATGATGTACACTGGTACCGGCAACTTCCTGGA | | AGYDVHWYRQLPGTA | | | |
| | | ACAGCCCCCCAACTCATCTTCTACGGGAACACCAATCGGCCCT | | PQLIFYGNTNRPSGV | | | |
| | | CAGGGGTCCCTGACCGATTCTCTGCCTCCAAGTCTGGCACTTC | | PDRFSASKSGTSASL | | | |
| | | AGCCTCCCTGGCCATCACTGGGCTCCAGGCTGACGATGAGGCT | | AITGLQADDEADYYC | | | |
| | | GATTATTACTGCCAGTCCTATGACAGCAGCCTGAGTGGTGTGA | | QSYDSSLSGVIFGGG | | | |
| | | TATTCGGCGGAGGGACCAAGGTCACCGTCCTA | | TKVTVL | | | |

| | | | SEQ | | SEQ | | SEQ | | SEQ | | SEQ | | SEQ | |
|---|---|---|---|---|---|---|---|---|---|---|---|---|---|---|
| | VL | VL | ID | VL | ID | VL | ID | VL | ID | VL | ID | VL | ID | VL |
| Clone ID | Germline | FR1 | NO: | CDR1 | NO: | FR2 | NO: | CDR2 | NO: | FR3 | NO: | CDR3 | NO: | FR4 |
| ADI-81861 | IGKV1-5 | EIVMTQ | 3590 | RARQSI | 3783 | WYQKKP | 3957 | KVSTLE | 4076 | GVPSRF | 2532 | QQSSSY | 4401 | FGQGTK |
| | | SPSTLS | | SNWLA | | GKAPTL | | S | | SGSGSG | | YT | | VDIK |
| | | ASVGDR | | | | LIY | | | | TEFTLT | | | | |
| | | VTITC | | | | | | | | ISSLQP | | | | |
| | | | | | | | | | | DDFATY | | | | |
| | | | | | | | | | | YC | | | | |
| ADI-81707 | IGKV1D-39 | DIQMTQ | 1878 | RASQTI | 3784 | WYQQRP | 2309 | GASTLQ | 2447 | GVPSRF | 4225 | QQSYSS | 4384 | FGPGTK |
| | | SPSSLS | | SRYLN | | GKAPKL | | S | | SGTGSG | | PPWT | | VDIK |
| | | ASVGDR | | | | LIY | | | | TDFTLT | | | | |
| | | VTITC | | | | | | | | IGSLQP | | | | |
| | | | | | | | | | | EDFATY | | | | |
| | | | | | | | | | | YC | | | | |
| ADI-81584 | IGKV1-12 | DIVLTQ | 3591 | RASQDI | 3785 | WYQQRP | 2278 | AASSLE | 4077 | GVPSRF | 4226 | QQAHSF | 4402 | FGQGTK |
| | | SPSSVS | | SSYLA | | GKAPKL | | S | | SGSGSR | | PWT | | VDIK |
| | | ASVGDR | | | | LIF | | | | TDFTLT | | | | |
| | | VTITC | | | | | | | | ISSLQP | | | | |
| | | | | | | | | | | EDFATY | | | | |
| | | | | | | | | | | YC | | | | |
| ADI-81717 | IGKV1D-39 | EIPLTQ | 3592 | RASQSI | 3751 | WYQQKP | 2257 | GASSLQ | 2403 | GVPSRF | 4227 | QQSYGP | 4403 | FGQGTR |
| | | SPSSLS | | DNYLN | | GKAPKL | | S | | SGSGSG | | PPTT | | LEIK |
| | | ASVGDR | | | | LIY | | | | TDFTLT | | | | |
| | | VTLTC | | | | | | | | ISSLQP | | | | |
| | | | | | | | | | | EDFATY | | | | |
| | | | | | | | | | | LC | | | | |
| ADI-81726 | IGKV1D-39 | DIGMTQ | 3564 | RASQTI | 3735 | WYQQKP | 3939 | AASSLQ | 2391 | GVPSRF | 4228 | QQTHSP | 4404 | FGQGTK |
| | | SPSSLS | | NSYLN | | GTAPKL | | S | | SGSGSE | | PRA | | VEIK |
| | | ASVGDR | | | | LIY | | | | THFTLT | | | | |
| | | VTITC | | | | | | | | ITNLQP | | | | |
| | | | | | | | | | | EDFATY | | | | |
| | | | | | | | | | | YC | | | | |
| ADI-81897 | IGKV3-11 | EIVMTQ | 3593 | RASQSF | 3786 | WYQQKP | 2258 | DASNRA | 2448 | GIPARF | 4229 | QHRSN | 4405 | FGQGTR |
| | | SPATLS | | NNYLA | | GQAPRL | | T | | SGSGSG | | | | LELK |
| | | LSPGDR | | | | LIY | | | | TDFTLT | | | | |
| | | ATLSC | | | | | | | | ISSVEP | | | | |
| | | | | | | | | | | EDFAIY | | | | |
| | | | | | | | | | | LC | | | | |
| ADI-81718 | IGKV1D-39 | EIPMTQ | 1912 | RASQSI | 3787 | WYQQKA | 3958 | GASSLQ | 2403 | GVPARF | 4230 | QQSYDY | 4406 | FGQGTK |
| | | SPSSLS | | SGYLN | | GKAPKL | | S | | SGSGSG | | PRT | | VDIK |
| | | ASVGDR | | | | LIY | | | | TDFTLT | | | | |
| | | VTITC | | | | | | | | INTLQP | | | | |
| | | | | | | | | | | DDFATY | | | | |
| | | | | | | | | | | YC | | | | |
| ADI-81770 | IGKV1D-39 | EIVMTQ | 1891 | RASQSI | 3788 | WYQQKP | 2257 | STSNLQ | 4078 | GVPSRF | 2534 | QESYTT | 4407 | FGQGTK |
| | | SPSSLS | | RDFLN | | GKAPKL | | S | | SGSGSG | | PPA | | VEIK |
| | | ASVGDR | | | | LIY | | | | TDFTLT | | | | |
| | | VTITC | | | | | | | | ISSLQP | | | | |
| | | | | | | | | | | EDFATY | | | | |
| | | | | | | | | | | YC | | | | |

| | | | | | | VL | VL Amino |
|---|---|---|---|---|---|---|---|
| | SEQ | | SEQ | | SEQ | Nucleotide | Acid |
| | ID | | ID | | ID | Sub- | Sub- |
| Clone ID | NO: | VL DNA | NO: | VL Protein | NO: | stitutions | stitutions |
| ADI-81861 | 2944 | GAAATCGTGATGACGCAGTCTCCTTCCACCCTGTCTGCATCTG | 4693 | EIVMTQSPSTLSASV | 5047 | 7 | 6 |
| | | TAGGAGACAGAGTCACCATCACTTGCCGGGCCCGTCAGAGTAT | | GDRVTITCRARQSIS | | | |
| | | TAGTAACTGGTTGGCCTGGTATCAGAAGAAACCAGGGAAAGCC | | NWLAWYQKKPGKAPT | | | |
| | | CCTACGCTCCTAATCTATAAGGTATCTACTTTAGAAAGTGGGG | | LLIYKVSTLESGVPS | | | |
| | | TCCCATCAAGGTTCAGCGGCAGTGGATCTGGGACAGAATTCAC | | RFSGSGSGTEFTLTI | | | |
| | | TCTCACCATCAGCAGCCTGCAGCCTGATGATTTTGCAACTTAT | | SSLQPDDFATYYCQQ | | | |
| | | TACTGCCAACAGTCTAGTAGTTATTACACTTTTGGCCAGGGGA | | SSSYYTFGQGTKVDI | | | |
| | | CCAAAGTGGATATCAAA | | K | | | |
| ADI-81707 | 2950 | GACATCCAGATGACCCAGTCTCCATCCTCCCTGTCTGCATCTG | 4694 | DIQMTQSPSSLSASV | 5048 | 7 | 7 |
| | | TAGGAGACAGAGTCACCATCACTTGCCGGGCAAGTCAGACCAT | | GDRVTITCRASQTIS | | | |
| | | TAGTCGCTATTTAAATTGGTATCAGCAGAGACCAGGGAAAGCC | | RYLNWYQQRPGKAPK | | | |
| | | CCTAAGCTCCTGATCTATGGTGCATCCACTTTGCAAAGTGGGG | | LLIYGASTLQSGVPS | | | |
| | | TCCCATCAAGGTTCAGTGGCACTGGATCTGGGACAGATTTCAC | | RFSGTGSGTDFTLTI | | | |
| | | TCTCACCATTGGCAGTCTGCAACCTGAAGATTTTGCAACTTAC | | GSLQPEDFATYYCQQ | | | |
| | | TACTGTCAACAGAGTTACAGCAGTCCACCTTGGACATTCGGCC | | SYSSPPWTFGPGTKV | | | |
| | | CAGGGACCAAGGTGGATATCAAA | | DIK | | | |
| ADI-81584 | 2944 | GACATCGTGCTGACCCAGTCTCCATCTTCCGTGTCCGCCTCTG | 4695 | DIVLTQSPSSVSASV | 5049 | 7 | 6 |
| | | TAGGAGACAGAGTCACCATCACTTGTCGGGCGAGTCAGGATAT | | GDRVTITCRASQDIS | | | |
| | | TAGCAGTTACTTAGCCTGGTATCAGCAGAGACCAGGGAAAGCC | | SYLAWYQQRPGKAPK | | | |
| | | CCTAAGCTCCTGATCTTTGCTGCATCCAGTTTGGAAAGTGGGG | | LLIFAASSLESGVPS | | | |
| | | TCCCATCAAGGTTCAGCGGCAGTGGATCTAGGACAGATTTCAC | | RFSGSGSRTDFTLTI | | | |
| | | TCTCACCATCAGCAGCCTGCAGCCTGAAGACTTTGCGACTTAT | | SSLQPEDFATYYCQQ | | | |
| | | TATTGTCAACAGGCTCACAGTTTCCCGTGGACGTTCGGCCAAG | | AHSFPWTFGQGTKVD | | | |
| | | GGACCAAAGTGGATATCAAA | | IK | | | |
| ADI-81717 | 2940 | GAAATCCCATTGACCCAGTCTCCATCCTCCCTGTCTGCATCTG | 4696 | EIPLTQSPSSLSASV | 5050 | 7 | 5 |
| | | TAGGAGACAGAGTCACCCTCACTTGCCGGGCAAGTCAGAGCAT | | GDRVTLTCRASQSID | | | |
| | | TGACAACTATTTAAATTGGTATCAACAGAAACCAGGGAAAGCC | | NYLNWYQQKPGKAPK | | | |
| | | CCTAAACTCCTGATATATGGTGCATCCAGTTTGCAAAGTGGGG | | LLIYGASSLQSGVPS | | | |
| | | TCCCATCAAGGTTCAGTGGCAGTGGATCTGGGACAGACTTCAC | | RFSGSGSGTDFTLTI | | | |
| | | TCTCACCATCAGCAGTCTGCAACCTGAAGATTTTGCAACCTAC | | SSLQPEDFATYLCQQ | | | |
| | | CTCTGTCAACAGAGTTACGGTCCCCCTCCGACCACCTTCGGCC | | SYGPPPTTFGQGTRL | | | |
| | | AGGGGACACGACTGGAGATTAAA | | EIK | | | |
| ADI-81726 | 2937 | GACATCGGGATGACCCAGTCTCCATCCTCCCTGTCTGCATCTG | 4697 | DIGMTQSPSSLSASV | 5051 | 7 | 7 |
| | | TTGGAGACAGAGTCACCATCACTTGTCGGGCAAGTCAGACCAT | | GDRVTITCRASQTIN | | | |
| | | TAACAGCTATTTAAATTGGTATCAGCAAAAACCAGGGACAGCC | | SYLNWYQQKPGTAPK | | | |
| | | CCTAAACTCCTGATCTATGCTGCATCCAGTTTGCAAAGTGGGG | | LLIYAASSLQSGVPS | | | |
| | | TCCCATCAAGGTTCAGTGGCAGTGGATCTGAGACACATTTCAC | | RFSGSGSETHFTLTI | | | |
| | | TCTCACCATCACCAATCTGCAACCTGAAGATTTTGCAACTTAC | | TNLQPEDFATYYCQQ | | | |
| | | TACTGTCAACAGACTCACAGTCCCCCTCGGGCGTTCGGCCAAG | | THSPPRAFGQGTKVE | | | |
| | | GGACCAAGGTGGAGATCAAA | | IK | | | |
| ADI-81897 | 4597 | GAAATTGTGATGACACAGTCTCCAGCCACCCTGTCTTTGTCTC | 4698 | EIVMTQSPATLSLSP | 5052 | 7 | 6 |
| | | CAGGGGACAGAGCCACCCTCTCCTGCAGGGCCAGTCAGAGTTT | | GDRATLSCRASQSFN | | | |
| | | TAATAACTACTTAGCCTGGTACCAACAGAAACCTGGCCAGGCT | | NYLAWYQQKPGQAPR | | | |
| | | CCCAGGCTCCTCATCTATGATGCATCCAACAGGGCCACTGGCA | | LLIYDASNRATGIPA | | | |
| | | TCCCAGCCAGGTTCAGTGGCAGTGGGTCTGGGACAGACTTCAC | | RFSGSGSGTDFTLTI | | | |
| | | TCTCACCATCAGCAGCGTAGAGCCTGAAGATTTTGCAATTTAT | | SSVEPEDFAIYYCQH | | | |
| | | TACTGTCAACATCGTAGCAACTTCGGCCAAGGGACACGACTGG | | RSNFGQGTRLELK | | | |
| | | AGCTTAAA | | | | | |
| ADI-81718 | 2944 | GAAATCCCGATGACCCAGTCTCCATCCTCCCTGTCTGCATCTG | 4699 | EIPMTQSPSSLSASV | 5053 | 7 | 7 |
| | | TAGGAGACAGAGTCACCATCACTTGCCGGGCAAGTCAGAGCAT | | GDRVTITCRASQSIS | | | |
| | | CAGCGGCTATTTAAATTGGTATCAACAAAAAGCAGGCAAAGCC | | GYLNWYQQKAGKAPK | | | |
| | | CCTAAACTCCTGATCTATGGTGCATCAAGTTTGCAAAGTGGGG | | LLIYGASSLQSGVPA | | | |
| | | TCCCAGCAAGGTTCAGTGGCAGTGGATCTGGGACAGATTTCAC | | RFSGSGSGTDFTLTI | | | |
| | | TCTCACCATCAACACTCTGCAACCTGACGACTTTGCAACTTAT | | NTLQPDDFATYYCQQ | | | |
| | | TACTGTCAACAGAGTTACGATTATCCGCGGACGTTCGGCCAAG | | SYDYPRTFGQGTKVD | | | |
| | | GGACCAAAGTGGATATCAAA | | IK | | | |
| ADI-81770 | 2937 | GAAATCGTGATGACCCAGTCTCCATCGTCCCTGTCTGCATCTG | 4700 | EIVMTQSPSSLSASV | 5054 | 7 | 6 |
| | | TGGGAGACAGGGTCACCATCACTTGCCGGGCAAGTCAGAGCAT | | GDRVTITCRASQSIR | | | |
| | | TCGCGACTTTTTAAATTGGTATCAGCAGAAACCAGGGAAAGCC | | DFLNWYQQKPGKAPK | | | |
| | | CCTAAACTCCTAATCTATTCTACATCCAATTTGCAAAGTGGGG | | LLIYSTSNLQSGVPS | | | |
| | | TCCCATCAAGGTTCAGTGGCAGTGGATCTGGGACAGATTTCAC | | RFSGSGSGTDFTLTI | | | |
| | | TCTCACCATCAGCAGTCTGCAACCTGAAGATTTCGCAACTTAC | | SSLQPEDFATYYCQE | | | |
| | | TACTGTCAAGAGAGCTACACAACCCCTCCGGCTTTTGGGCAGG | | SYTTPPAFGQGTKVE | | | |
| | | GGACCAAAGTGGAAATCAAA | | IK | | | |

| | | | SEQ | | SEQ | | SEQ | | SEQ | | SEQ | | SEQ | |
|---|---|---|---|---|---|---|---|---|---|---|---|---|---|---|
| | VL | VL | ID | VL | ID | VL | ID | VL | ID | VL | ID | VL | ID | VL |
| Clone ID | Germline | FR1 | NO: | CDR1 | NO: | FR2 | NO: | CDR2 | NO: | FR3 | NO: | CDR3 | NO: | FR4 |
| ADI-81772 | IGLV1-44 | QSELTQ | 3594 | SGTNSN | 3789 | WYQQLP | 2314 | NNYQRP | 4079 | GVPDRF | 4231 | ATWDDS | 4408 | FGTGTK |
| | | PPSASG | | IGGNTV | | GTAPKL | | S | | SGSKSG | | LDGHNV | | LTVL |
| | | TPGQRV | | N | | LIY | | | | TSASLA | | | | |
| | | SISC | | | | | | | | ISGLQS | | | | |
| | | | | | | | | | | EDEAEY | | | | |
| | | | | | | | | | | YC | | | | |
| ADI-81834 | IGLV1-40 | QFVVTQ | 3595 | TGSNSN | 2143 | WYQQLP | 2314 | DNNNRP | 2476 | GVPDRF | 4232 | QSYDSS | 2840 | FGGGTQ |
| | | PPSVFG | | IGAGYD | | GTAPKL | | S | | SGSKFD | | LSDSV | | LTVL |
| | | APGQRV | | VH | | LIY | | | | TSASLA | | | | |
| | | TISC | | | | | | | | ITGLQA | | | | |
| | | | | | | | | | | EDEADY | | | | |
| | | | | | | | | | | YC | | | | |
| ADI-81757 | IGKV1-5 | EITLTQ | 3596 | RASQSI | 2052 | WYQQKP | 3959 | KASSLQ | 4080 | GVPARF | 4233 | QQYDTY | 4409 | FGQGTK |
| | | SPSTLS | | SRWLA | | GKSPNL | | S | | SGSASG | | PWT | | VEIK |
| | | ASVGDR | | | | LIY | | | | TEFTLT | | | | |
| | | VTITC | | | | | | | | ISRLQP | | | | |
| | | | | | | | | | | DDFATY | | | | |
| | | | | | | | | | | YC | | | | |
| ADI-81835 | IGKV1-9 | EIPMTQ | 3597 | RASQGI | 3790 | WYQQKP | 2333 | GVSTLQ | 4081 | GVPLRF | 2595 | QYLDTY | 4410 | FGQGTK |
| | | SPSFLS | | PSFLA | | GKAPKL | | S | | SGSGSG | | PRYT | | VDIK |
| | | ASVGDR | | | | LIS | | | | TEFTLT | | | | |
| | | VTITC | | | | | | | | ISSLQP | | | | |
| | | | | | | | | | | EDFATY | | | | |
| | | | | | | | | | | YC | | | | |
| ADI-81845 | IGKV1D-39 | EIELTQ | 3598 | RASQSI | 3791 | WYQQKP | 2275 | ATSRLQ | 4082 | GVPSRF | 2534 | QQSYSM | 4411 | FGQGTK |
| | | SPSPLS | | GKYLN | | GRAPKL | | S | | SGSGSG | | PPWT | | VEIK |
| | | ASVGDR | | | | LIY | | | | TDFTLT | | | | |
| | | VTITC | | | | | | | | ISSLQP | | | | |
| | | | | | | | | | | EDFATY | | | | |
| | | | | | | | | | | YC | | | | |
| ADI-81860 | IGKV1D-39 | DITLTQ | 1900 | RASQSI | 2249 | WYQWKP | 3960 | AASSLQ | 2391 | GVPSRF | 2592 | QQSYIN | 4412 | FGQGTR |
| | | SPSSLS | | GTYLN | | GKAPKF | | S | | SGSGSG | | PQVT | | LEIK |
| | | ASVGDR | | | | LIY | | | | TEFTLT | | | | |
| | | VTITC | | | | | | | | ISSLQP | | | | |
| | | | | | | | | | | EDFATY | | | | |
| | | | | | | | | | | YC | | | | |
| ADI-81590 | IGLV1-44 | SYELTQ | 3599 | SGGSSN | 3792 | WYHQLP | 3961 | NNNQRP | 4061 | GVPDRF | 2615 | AAWDDS | 4413 | FGTGTK |
| | | PLSASG | | IGSYPV | | GTAPKL | | S | | SGSKSG | | LNGYV | | LTVL |
| | | TPGQRV | | S | | LIY | | | | TSASLA | | | | |
| | | TISC | | | | | | | | ISGLQS | | | | |
| | | | | | | | | | | EDEADY | | | | |
| | | | | | | | | | | YC | | | | |
| ADI-81708 | IGKV1D-39 | ETTLTQ | 3600 | RASQSI | 3793 | WYQQKP | 3962 | AASSLQ | 2391 | GVPSRF | 2534 | QQSYSS | 4384 | FGQGTK |
| | | SPSSVS | | HTYLN | | GKARKL | | S | | SGSGSG | | PPWT | | VDIK |
| | | ASVGDT | | | | LIY | | | | TDFTLT | | | | |
| | | VTITC | | | | | | | | ISSLQP | | | | |
| | | | | | | | | | | EDFATY | | | | |
| | | | | | | | | | | YC | | | | |

| | | | | | | VL | VL Amino |
|---|---|---|---|---|---|---|---|
| | SEQ | | SEQ | | SEQ | Nucleotide | Acid |
| | ID | | ID | | ID | Sub- | Sub- |
| Clone ID | NO: | VL DNA | NO: | VL Protein | NO: | stitutions | stitutions |
| ADI-81772 | 2949 | CAGTCTGAGCTGACTCAGCCACCCTCAGCGTCTGGGACCCCCG | 4701 | QSELTQPPSASGTPG | 5055 | 7 | 7 |
| | | GGCAGAGGGTCTCCATCTCTTGTTCTGGAACCAACTCCAACAT | | QRVSISCSGTNSNIG | | | |
| | | CGGAGGTAATACTGTAAACTGGTATCAGCAGCTCCCAGGAACG | | GNTVNWYQQLPGTAP | | | |
| | | GCCCCCAAACTGCTCATCTATAATAATTATCAGCGGCCCTCAG | | KLLIYNNYQRPSGVP | | | |
| | | GGGTCCCTGACCGATTCTCTGGCTCCAAGTCTGGCACCTCAGC | | DRFSGSKSGTSASLA | | | |
| | | CTCCCTGGCCATCAGTGGACTCCAGTCTGAGGATGAGGCTGAA | | ISGLQSEDEAEYYCA | | | |
| | | TATTACTGTGCAACATGGGATGACAGCCTGGATGGTCATAATG | | TWDDSLDGHNVFGTG | | | |
| | | TCTTCGGAACTGGGACCAAGCTCACCGTCCTA | | TKLTVL | | | |
| ADI-81834 | 2948 | CAGTTTGTGGTGACGCAGCCGCCCTCAGTGTTTGGGGCCCCAG | 4702 | QFVVTQPPSVFGAPG | 5056 | 7 | 6 |
| | | GGCAGAGGGTCACCATCTCCTGCACTGGGAGCAACTCCAACAT | | QRVTISCTGSNSNIG | | | |
| | | CGGGGCAGGTTATGATGTTCACTGGTATCAGCAGCTTCCAGGA | | AGYDVHWYQQLPGTA | | | |
| | | ACAGCCCCCAAACTCCTCATCTATGACAACAACAATCGGCCCT | | PKLLIYDNNNRPSGV | | | |
| | | CAGGGGTCCCTGACCGATTCTCTGGCTCCAAGTTTGACACCTC | | PDRFSGSKFDTSASL | | | |
| | | AGCCTCCCTGGCCATCACTGGGCTCCAGGCTGAGGATGAGGCT | | AITGLQAEDEADYYC | | | |
| | | GATTATTACTGCCAGTCCTATGACAGCAGCCTGAGTGATTCGG | | QSYDSSLSDSVFGGG | | | |
| | | TGTTCGGCGGAGGGACCCAGCTCACCGTCCTA | | TQLTVL | | | |
| ADI-81757 | 2937 | GAAATCACACTGACCCAGTCTCCTTCCACCCTGTCTGCATCTG | 4703 | EITLTQSPSTLSASV | 5057 | 7 | 7 |
| | | TAGGAGACAGAGTCACCATCACTTGCCGGGCCAGTCAGAGTAT | | GDRVTITCRASQSIS | | | |
| | | TAGTAGGTGGTTGGCCTGGTATCAGCAGAAACCAGGGAAATCC | | RWLAWYQQKPGKSPN | | | |
| | | CCTAACCTCCTGATCTATAAGGCGTCTAGTTTACAAAGTGGGG | | LLIYKASSLQSGVPA | | | |
| | | TCCCAGCAAGGTTCAGCGGCAGTGCATCTGGGACAGAATTCAC | | RFSGSASGTEFTLTI | | | |
| | | TCTCACCATCAGCCGCCTGCAGCCTGACGATTTTGCAACTTAT | | SRLQPDDFATYYCQQ | | | |
| | | TACTGCCAACAGTATGATACTTATCCGTGGACGTTCGGCCAGG | | YDTYPWTFGQGTKVE | | | |
| | | GGACCAAGGTGGAGATCAAA | | IK | | | |
| ADI-81835 | 2944 | GAAATCCCAATGACCCAGTCTCCATCCTTCCTGTCTGCATCTG | 4704 | EIPMTQSPSFLSASV | 5058 | 7 | 6 |
| | | TAGGAGACAGAGTCACCATCACTTGCCGGGCCAGTCAGGGCAT | | GDRVTITCRASQGIP | | | |
| | | TCCCAGTTTTTTAGCCTGGTATCAGCAAAAACCAGGGAAAGCC | | SFLAWYQQKPGKAPK | | | |
| | | CCTAAGCTCCTGATCTCTGGTGTATCCACTTTGCAAAGTGGGG | | LLISGVSTLQSGVPL | | | |
| | | TCCCATTAAGGTTCAGCGGCAGTGGATCTGGGACAGAATTCAC | | RFSGSGSGTEFTLTI | | | |
| | | TCTCACAATCAGCAGCCTGCAGCCTGAAGATTTTGCAACTTAT | | SSLQPEDFATYYCQY | | | |
| | | TACTGTCAATACCTTGATACTTACCCTCGGTACACTTTTGGCC | | LDTYPRYTFGQGTKV | | | |
| | | AGGGGACCAAGGTGGATATCAAA | | DIK | | | |
| ADI-81845 | 2937 | GAAATCGAGTTGACCCAGTCTCCATCCCCCCTGTCTGCATCTG | 4705 | EIELTQSPSPLSASV | 5059 | 7 | 6 |
| | | TAGGAGACAGAGTCACCATCACTTGCCGGGCAAGTCAGAGCAT | | GDRVTITCRASQSIG | | | |
| | | AGGCAAGTATTTAAATTGGTATCAGCAGAAACCAGGGAGAGCC | | KYLNWYQQKPGRAPK | | | |
| | | CCTAAGCTCCTGATTTACGCTACATCCCGTTTGCAAAGTGGGG | | LLIYATSRLQSGVPS | | | |
| | | TCCCATCAAGGTTCAGTGGCAGTGGATCTGGGACAGATTTCAC | | RFSGSGSGTDFTLTI | | | |
| | | TCTCACCATCAGCAGTCTGCAACCTGAAGATTTTGCAACTTAT | | SSLQPEDFATYYCQQ | | | |
| | | TACTGTCAGCAGAGTTACAGTATGCCTCCGTGGACGTTCGGCC | | SYSMPPWTFGQGTKV | | | |
| | | AAGGGACCAAGGTGGAGATCAAA | | EIK | | | |
| ADI-81860 | 2940 | GACATCACACTGACCCAGTCTCCATCCTCCCTGTCTGCATCTG | 4706 | DITLTQSPSSLSASV | 5060 | 7 | 5 |
| | | TAGGAGACCGAGTCACCATCACTTGCCGGGCAAGTCAGAGCAT | | GDRVTITCRASQSIG | | | |
| | | TGGCACCTATTTAAATTGGTATCAGTGGAAACCAGGGAAAGCC | | TYLNWYQWKPGKAPK | | | |
| | | CCTAAGTTTTTGATCTATGCTGCATCCAGTTTGCAAAGTGGGG | | FLIYAASSLQSGVPS | | | |
| | | TCCCATCAAGGTTCAGTGGCAGTGGATCTGGGACAGAGTTCAC | | RFSGSGSGTEFTLTI | | | |
| | | TCTCACCATCAGCAGTCTGCAACCTGAAGATTTTGCAACTTAC | | SSLQPEDFATYYCQQ | | | |
| | | TACTGTCAACAGAGTTACATTAACCCTCAGGTCACCTTCGGCC | | SYINPQVTFGQGTRL | | | |
| | | AAGGGACACGACTGGAGATTAAA | | EIK | | | |
| ADI-81590 | 2949 | TCGTATGAGCTGACTCAGCCACTCTCAGCGTCTGGGACCCCCG | 4707 | SYELTQPLSASGTPG | 5061 | 7 | 7 |
| | | GGCAGAGGGTCACCATCTCTTGTTCTGGAGGCAGCTCCAACAT | | QRVTISCSGGSSNIG | | | |
| | | CGGAAGTTATCCTGTGAGCTGGTACCACCAGCTCCCAGGAACG | | SYPVSWYHQLPGTAP | | | |
| | | GCCCCCAAACTCCTCATCTATAATAATAATCAGCGGCCCTCAG | | KLLIYNNNQRPSGVP | | | |
| | | GGGTCCCTGACCGATTCTCTGGCTCCAAGTCTGGCACCTCAGC | | DRFSGSKSGTSASLA | | | |
| | | CTCCCTGGCCATCAGTGGGCTCCAGTCTGAGGATGAGGCTGAT | | ISGLQSEDEADYYCA | | | |
| | | TATTACTGTGCAGCATGGGATGACAGCCTGAATGGTTATGTCT | | AWDDSLNGYVFGTGT | | | |
| | | TCGGAACTGGGACCAAGCTCACCGTCCTA | | KLTVL | | | |
| ADI-81708 | 2944 | GAAACAACATTGACCCAGTCTCCATCTTCCGTGTCTGCATCTG | 4708 | ETTLTQSPSSVSASV | 5062 | 7 | 5 |
| | | TAGGAGACACAGTCACCATCACTTGCCGGGCAAGTCAGAGCAT | | GDTVTITCRASQSIH | | | |
| | | TCACACGTATTTAAATTGGTATCAACAGAAACCAGGGAAAGCC | | TYLNWYQQKPGKARK | | | |
| | | CGTAAACTCCTGATATATGCTGCATCCAGTTTGCAAAGTGGGG | | LLIYAASSLQSGVPS | | | |
| | | TCCCATCAAGGTTCAGTGGCAGTGGATCTGGGACAGATTTCAC | | RFSGSGSGTDFTLTI | | | |
| | | TCTCACCATCAGCAGTCTGCAACCTGAAGATTTTGCAACTTAT | | SSLQPEDFATYYCQQ | | | |
| | | TACTGTCAACAGAGTTACAGTAGTCCTCCGTGGACGTTCGGCC | | SYSSPPWTFGQGTKV | | | |
| | | AAGGGACCAAAGTGGATATCAAA | | DIK | | | |

| | | | SEQ | | SEQ | | SEQ | | SEQ | | SEQ | | SEQ | |
|---|---|---|---|---|---|---|---|---|---|---|---|---|---|---|
| | VL | VL | ID | VL | ID | VL | ID | VL | ID | VL | ID | VL | ID | VL |
| Clone ID | Germline | FR1 | NO: | CDR1 | NO: | FR2 | NO: | CDR2 | NO: | FR3 | NO: | CDR3 | NO: | FR4 |
| ADI-81737 | IGKV3D-15 | EMTITQ | 3601 | RASQSV | 2227 | WYQQKP | 2258 | GASTRA | 2383 | DIPARF | 4234 | QQYNNW | 4414 | FGQGTK |
| | | SPATLF | | SSNLA | | GQAPRL | | T | | SGSGFG | | PRA | | VEIK |
| | | VSPGDR | | | | LIY | | | | AEFTLT | | | | |
| | | ATLSC | | | | | | | | ISSLQF | | | | |
| | | | | | | | | | | EDFAVY | | | | |
| | | | | | | | | | | YC | | | | |
| ADI-81905 | IGKV1-33 | EMTMTQ | 3602 | QAGQDI | 3794 | WYQQEP | 3963 | DASNLE | 2416 | GVPSRF | 4235 | QQYEDL | 4415 | FGGGTK |
| | | SPSSLS | | SNHLS | | GKAPKL | | T | | TGSGSG | | PPT | | VDIK |
| | | ASVGDR | | | | LIY | | | | TDFTFT | | | | |
| | | VTITQ | | | | | | | | ISSLQP | | | | |
| | | | | | | | | | | EDVTTY | | | | |
| | | | | | | | | | | YC | | | | |
| ADI-81618 | IGLV3-25 | SHELTQ | 3603 | SGDALP | 3795 | WYQQKP | 3964 | KDIERP | 4083 | GIPERF | 4236 | QSSDNT | 4416 | FGGGTK |
| | | PPSVSV | | SQYAY | | GQAPLL | | S | | SGSSSG | | GTYVV | | LTVL |
| | | SPGQTA | | | | MIY | | | | TTVTLT | | | | |
| | | RITC | | | | | | | | ISGVQA | | | | |
| | | | | | | | | | | EDEADY | | | | |
| | | | | | | | | | | FC | | | | |
| ADI-81901 | IGKV1D-39 | DIGMTQ | 3604 | RASQTI | 3796 | WYQQRP | 3965 | VASSLQ | 2418 | GVPSRF | 4163 | QQSYST | 4417 | FGQGTK |
| | | SPSSLS | | SNYLN | | GKGPKL | | S | | SGSRSG | | PPT | | VEIK |
| | | AAVGDR | | | | LIY | | | | TDFTLT | | | | |
| | | VTITC | | | | | | | | ISSLQP | | | | |
| | | | | | | | | | | EDFATY | | | | |
| | | | | | | | | | | YC | | | | |
| ADI-81532 | IGKV1D-39 | EIVLTQ | 1888 | RASQSI | 3797 | WYQHKP | 3966 | AASTLQ | 2392 | GVPSRF | 2536 | QQSYSM | 4411 | FGQGTK |
| | | SPSSLS | | TRYLN | | GNAPKL | | S | | SGSGSG | | PPWT | | VEIK |
| | | ASVGDR | | | | LIY | | | | TDFTLT | | | | |
| | | VTITC | | | | | | | | INSLQP | | | | |
| | | | | | | | | | | EDFATY | | | | |
| | | | | | | | | | | YC | | | | |
| ADI-81537 | IGKV1D-39 | DIQMTQ | 1878 | RASQSI | 3797 | WYQHKP | 3966 | AASTLQ | 2392 | GVPSRF | 2536 | QQSYSM | 4411 | FGQGTK |
| | | SPSSLS | | TRYLN | | GNAPKL | | S | | SGSGSG | | PPWT | | VEIK |
| | | ASVGDR | | | | LIY | | | | TDFTLT | | | | |
| | | VTITC | | | | | | | | INSLQP | | | | |
| | | | | | | | | | | EDFATY | | | | |
| | | | | | | | | | | YC | | | | |
| ADI-81565 | IGLV1-40 | QSVLTQ | 3605 | SGSNSN | 3798 | WYQQLP | 2314 | RNNNRP | 4084 | GVPDRF | 4237 | QSYDSS | 2853 | FGEGTK |
| | | PPSVSG | | IGAGYD | | GTAPKL | | S | | SGSKSA | | LSGVV | | LTVL |
| | | APGQRV | | VH | | LIY | | | | TSASLA | | | | |
| | | TIPC | | | | | | | | ITGLQA | | | | |
| | | | | | | | | | | EDEADY | | | | |
| | | | | | | | | | | YC | | | | |
| ADI-81811 | IGLV3-10 | QYVLTQ | 3606 | SGDALP | 3799 | WYQQKS | 3967 | EDRERP | 4085 | GIPERF | 4238 | YSTDSS | 4418 | FGGGTK |
| | | PPSVSV | | RKYAH | | GQAPVL | | S | | SGSRSG | | GTQGV | | LTVL |
| | | SPGQTA | | | | VIH | | | | TVATLT | | | | |
| | | RITC | | | | | | | | ISGAQV | | | | |
| | | | | | | | | | | EDEADY | | | | |
| | | | | | | | | | | YC | | | | |

| | | | | | | VL | VL Amino |
|---|---|---|---|---|---|---|---|
| | SEQ | | SEQ | | SEQ | Nucleotide | Acid |
| | ID | | ID | | ID | Sub- | Sub- |
| Clone ID | NO: | VL DNA | NO: | VL Protein | NO: | stitutions | stitutions |
| ADI-81737 | 2937 | GAAATGACAATCACGCAGTCTCCAGCCACCCTGTTTGTGTCTC | 4709 | EMTITQSPATLFVSP | 5063 | 7 | 6 |
| | | CAGGGGATAGAGCCACCCTCTCCTGCAGGGCCAGTCAGAGTGT | | GDRATLSCRASQSVS | | | |
| | | TAGCAGCAACTTAGCCTGGTACCAGCAGAAACCTGGCCAGGCT | | SNLAWYQQKPGQAPR | | | |
| | | CCCAGGCTCCTCATCTATGGTGCATCCACCAGGGCCACTGATA | | LLIYGASTRATDIPA | | | |
| | | TCCCAGCCAGGTTCAGTGGCAGTGGGTTTGGGGCAGAGTTCAC | | RFSGSGFGAEFTLTI | | | |
| | | TCTCACCATCAGCAGCCTGCAGTTTGAAGATTTTGCAGTTTAT | | SSLQFEDFAVYYCQQ | | | |
| | | TACTGTCAGCAGTATAATAACTGGCCTCGGGCGTTCGGCCAAG | | YNNWPRAFGQGTKVE | | | |
| | | GGACCAAGGTGGAAATCAAA | | IK | | | |
| ADI-81905 | 2938 | GAAATGACAATGACGCAGTCTCCATCCTCCCTGTCTGCATCTG | 4710 | EMTMTQSPSSLSASV | 5064 | 7 | 7 |
| | | TAGGAGACAGAGTCACCATCACTTGCCAGGCTGGTCAGGACAT | | GDRVTITCQAGQDIS | | | |
| | | TTCCAACCATTTAAGTTGGTATCAGCAGGAACCAGGGAAAGCC | | NHLSWYQQEPGKAPK | | | |
| | | CCTAAGCTCCTGATCTACGATGCATCCAATTTGGAAACAGGGG | | LLIYDASNLETGVPS | | | |
| | | TCCCATCAAGGTTCACTGGAAGTGGATCTGGGACAGATTTTAC | | RFTGSGSGTDFTFTI | | | |
| | | TTTCACCATCAGCAGCCTGCAGCCTGAAGATGTTACAACATAT | | SSLQPEDVTTYYCQQ | | | |
| | | TACTGTCAACAGTATGAGGATCTCCCTCCGACTTTCGGCGGAG | | YEDLPPTFGGGTKVD | | | |
| | | GGACCAAAGTGGATATCAAA | | IK | | | |
| ADI-81618 | 2939 | TCGCATGAGCTGACACAGCCACCCTCGGTGTCAGTGTCCCCAG | 4711 | SHELTQPPSVSVSPG | 5065 | 7 | 5 |
| | | GACAGACGGCCAGGATCACCTGCTCTGGAGATGCCTTGCCAAG | | QTARITCSGDALPSQ | | | |
| | | CCAATATGCTTATTGGTACCAACAGAAGCCAGGCCAGGCCCCT | | YAYWYQQKPGQAPLL | | | |
| | | CTACTAATGATCTATAAAGACATTGAGAGGCCCTCAGGGATCC | | MIYKDIERPSGIPER | | | |
| | | CTGAGCGATTCTCTGGCTCCAGCTCAGGGACAACAGTCACGTT | | FSGSSSGTTVTLTIS | | | |
| | | GACCATCAGTGGAGTCCAGGCAGAAGACGAGGCTGACTATTTC | | GVQAEDEADYFCQSS | | | |
| | | TGTCAATCATCAGACAATACTGGTACTTATGTGGTGTTCGGCG | | DNTGTYVVFGGGTKL | | | |
| | | GAGGGACCAAGCTGACCGTCCTA | | TVL | | | |
| ADI-81901 | 2937 | GACATCGGGATGACCCAGTCTCCATCCTCCCTGTCTGCAGCTG | 4712 | DIGMTQSPSSLSAAV | 5066 | 7 | 7 |
| | | TAGGAGACAGAGTCACCATCACTTGCCGGGCAAGTCAGACCAT | | GDRVTITCRASQTIS | | | |
| | | TAGCAACTATTTAAATTGGTATCAGCAGAGACCAGGGAAAGGC | | NYLNWYQQRPGKGPK | | | |
| | | CCTAAGCTCCTGATCTATGTTGCATCCAGTTTGCAAAGTGGGG | | LLIYVASSLQSGVPS | | | |
| | | TCCCATCAAGGTTCAGTGGCAGTAGATCTGGGACAGATTTCAC | | RFSGSRSGTDFTLTI | | | |
| | | TCTCACCATCAGCAGTCTGCAACCTGAAGATTTTGCAACTTAC | | SSLQPEDFATYYCQQ | | | |
| | | TACTGTCAACAGAGTTATAGTACCCCTCCCACTTTTGGCCAGG | | SYSTPPTFGQGTKVE | | | |
| | | GGACCAAGGTGGAGATCAAA | | IK | | | |
| ADI-81532 | 2937 | GAAATTGTATTGACACAGTCTCCATCCTCCCTGTCTGCATCTG | 4713 | EIVLTQSPSSLSASV | 5067 | 7 | 6 |
| | | TAGGAGACAGAGTCACCATCACTTGCCGGGCAAGTCAGAGCAT | | GDRVTITCRASQSIT | | | |
| | | TACCCGGTATTTAAATTGGTATCAACACAAACCAGGGAACGCC | | RYLNWYQHKPGNAPK | | | |
| | | CCTAAGCTCCTGATCTATGCTGCATCCACTTTGCAAAGTGGGG | | LLIYAASTLQSGVPS | | | |
| | | TCCCATCAAGGTTCAGTGGCAGTGGATCTGGTACAGATTTCAC | | RFSGSGSGTDFTLTI | | | |
| | | TCTCACCATCAACAGTCTGCAACCTGAAGATTTTGCAACTTAC | | NSLQPEDFATYYCQQ | | | |
| | | TACTGTCAACAGAGTTACAGTATGCCTCCGTGGACGTTCGGCC | | SYSMPPWTFGQGTKV | | | |
| | | AAGGGACCAAGGTGGAAATCAAA | | EIK | | | |
| ADI-81537 | 2937 | GACATCCAGATGACCCAGTCTCCATCCTCCCTGTCTGCATCTG | 4714 | DIQMTQSPSSLSASV | 5068 | 7 | 6 |
| | | TAGGAGACAGAGTCACCATCACTTGCCGGGCAAGTCAGAGCAT | | GDRVTITCRASQSIT | | | |
| | | TACCCGGTATTTAAATTGGTATCAACACAAACCAGGGAACGCC | | RYLNWYQHKPGNAPK | | | |
| | | CCTAAGCTCCTGATCTATGCTGCATCCACTTTGCAAAGTGGGG | | LLIYAASTLQSGVPS | | | |
| | | TCCCATCAAGGTTCAGTGGCAGTGGATCTGGTACAGATTTCAC | | RFSGSGSGTDFTLTI | | | |
| | | TCTCACCATCAACAGTCTGCAACCTGAAGATTTTGCAACTTAC | | NSLQPEDFATYYCQQ | | | |
| | | TACTGTCAACAGAGTTACAGTATGCCTCCGTGGACGTTCGGCC | | SYSMPPWTFGQGTKV | | | |
| | | AAGGGACCAAGGTGGAAATCAAA | | EIK | | | |
| ADI-81565 | 4598 | CAGTCTGTCTTGACGCAGCCGCCCTCAGTGTCTGGGGCCCCAG | 4715 | QSVLTQPPSVSGAPG | 5069 | 7 | 6 |
| | | GGCAGAGGGTCACCATCCCCTGCAGTGGGAGCAACTCCAACAT | | QRVTIPCSGSNSNIG | | | |
| | | CGGGGCAGGTTATGATGTACACTGGTACCAGCAACTTCCAGGA | | AGYDVHWYQQLPGTA | | | |
| | | ACAGCCCCCAAACTCCTCATTTATAGAAACAACAATCGGCCCT | | PKLLIYRNNNRPSGV | | | |
| | | CAGGGGTCCCTGACCGCTTCTCTGGCTCCAAGTCTGCCACCTC | | PDRFSGSKSATSASL | | | |
| | | AGCCTCCCTGGCCATCACTGGGCTCCAGGCTGAGGATGAGGCT | | AITGLQAEDEADYYC | | | |
| | | GATTATTACTGCCAGTCGTATGACAGCAGCCTGAGTGGTGTGG | | QSYDSSLSGVVFGEG | | | |
| | | TTTTCGGCGAAGGGACCAAGCTGACCGTCCTA | | TKLTVL | | | |
| ADI-81811 | 2939 | CAGTATGTGCTGACGCAGCCACCCTCGGTGTCAGTGTCCCCAG | 4716 | QYVLTQPPSVSVSPG | 5070 | 7 | 7 |
| | | GACAAACGGCCAGGATCACCTGCTCTGGAGATGCACTGCCAAG | | QTARITCSGDALPRK | | | |
| | | AAAATATGCTCATTGGTACCAGCAGAAGTCAGGCCAGGCCCCT | | YAHWYQQKSGQAPVL | | | |
| | | GTGTTGGTCATCCATGAAGACAGGGAACGACCCTCCGGAATCC | | VIHEDRERPSGIPER | | | |
| | | CTGAGAGATTCTCTGGCTCCAGATCAGGGACAGTGGCCACCTT | | FSGSRSGTVATLTIS | | | |
| | | GACTATCAGTGGGGCCCAGGTGGAGGATGAGGCTGACTACTAC | | GAQVEDEADYYCYST | | | |
| | | TGTTACTCAACAGACAGCAGTGGTACTCAAGGGGTCTTCGGCG | | DSSGTQGVFGGGTKL | | | |
| | | GAGGGACCAAGCTCACCGTCCTA | | TVL | | | |

| | | | SEQ | | SEQ | | SEQ | | SEQ | | SEQ | | SEQ | |
|---|---|---|---|---|---|---|---|---|---|---|---|---|---|---|
| | VL | VL | ID | VL | ID | VL | ID | VL | ID | VL | ID | VL | ID | VL |
| Clone ID | Germline | FR1 | NO: | CDR1 | NO: | FR2 | NO: | CDR2 | NO: | FR3 | NO: | CDR3 | NO: | FR4 |
| ADI-81883 | IGKV1D-39 | DIRMTQ | 360 | RASQTI | 3796 | WYQQRP | 3965 | VASSLQ | 2418 | GVPSRF | 4163 | QQSYST | 4417 | FGQGTK |
| | | SPSSLS | | SNYLN | | GKGPKL | | S | | SGSRSG | | PPT | | VDIK |
| | | AAVGDR | | | | LIY | | | | TDFTLT | | | | |
| | | VTITC | | | | | | | | ISSLQP | | | | |
| | | | | | | | | | | EDFATY | | | | |
| | | | | | | | | | | YC | | | | |
| ADI-81686 | IGKV1D-39 | EMTLTQ | 3608 | RASQII | 3800 | WYQQKP | 2263 | AASNLQ | 2408 | GVPSRF | 2534 | QQSYTT | 2833 | FGQGTK |
| | | SPSSLS | | TAYLN | | GKAPNL | | S | | SGSGSG | | PYT | | VEIK |
| | | AYVGDR | | | | LIY | | | | TDFTLT | | | | |
| | | VTITC | | | | | | | | ISSLQP | | | | |
| | | | | | | | | | | EDFATY | | | | |
| | | | | | | | | | | YC | | | | |
| ADI-81825 | IGKV1D-39 | EITLTQ | 3567 | RASQSI | 2066 | WYQQKP | 3968 | AVSSLK | 4086 | GVPSRF | 4239 | QQSYTT | 4419 | FGGGTK |
| | | SPSSLS | | STYLN | | GKAPQL | | S | | SGSGSG | | PALT | | VDIK |
| | | ASVGDR | | | | LIY | | | | TDFTLT | | | | |
| | | VTITC | | | | | | | | ISSLQP | | | | |
| | | | | | | | | | | EDSAAY | | | | |
| | | | | | | | | | | YC | | | | |
| ADI-81748 | IGKV1-12 | EIPVTQ | 3609 | RASQHF | 3801 | WYQLKP | 3909 | AASTLQ | 2392 | GVPSRF | 4240 | QQANSF | 4420 | FGQGTK |
| | | SPSSVS | | SNWLA | | GKAPKL | | S | | SGSGSG | | PYT | | VEIK |
| | | ASVGDR | | | | LIY | | | | TDFTLT | | | | |
| | | VTITC | | | | | | | | ISSLLP | | | | |
| | | | | | | | | | | EDFATY | | | | |
| | | | | | | | | | | YC | | | | |
| ADI-81840 | IGKV1-5 | DIRMTQ | 3610 | RASQSI | 3802 | WSQQKP | 3969 | GASTLG | 4087 | GVPSRF | 4241 | QQYKSY | 4421 | FGQGTK |
| | | SPSTLS | | SGWLA | | GKAPKL | | S | | SGSGFG | | SYT | | VEIK |
| | | ASVGDR | | | | LIY | | | | TEFTLT | | | | |
| | | VTITC | | | | | | | | ISSLQP | | | | |
| | | | | | | | | | | DDFATY | | | | |
| | | | | | | | | | | YC | | | | |
| ADI-81692 | IGLV2-14 | QFVLNQ | 3611 | TGTSSD | 3803 | WYQHHP | 3970 | EVTNRP | 2465 | GDSDRF | 4242 | SSYTSS | 4422 | FGTGTK |
| | | PASVSG | | VGDYNY | | GTAPKL | | S | | SGSKSG | | NTLV | | LTVL |
| | | SPGQSI | | VS | | MIY | | | | NTASLT | | | | |
| | | TISC | | | | | | | | ISGLQA | | | | |
| | | | | | | | | | | EDEADY | | | | |
| | | | | | | | | | | YC | | | | |
| ADI-81730 | IGKV3-20 | EIVMTQ | 3612 | RASQSI | 3804 | WYQQKP | 2258 | ATSTRA | 4088 | GIPDRF | 2616 | QQYGSS | 4423 | FGQGTK |
| | | SPGSLS | | SRTYLA | | GQAPRL | | T | | SGSGSG | | PMYT | | VDIK |
| | | LSPGER | | | | LIY | | | | TDFTLT | | | | |
| | | ATLSC | | | | | | | | ISRLEP | | | | |
| | | | | | | | | | | EDFAVY | | | | |
| | | | | | | | | | | YC | | | | |
| ADI-81889 | IGKV1-5 | EMPMTQ | 3613 | RASQSI | 3805 | WYQQKP | 3971 | KASSLE | 2386 | GVPSRF | 4243 | QQYNSY | 4424 | FGGGTK |
| | | SPSTLS | | GSRLA | | GKAPSL | | S | | SGSGSG | | SLT | | VEIK |
| | | ASVGDR | | | | LIY | | | | TEFTLT | | | | |
| | | VTITC | | | | | | | | ISSLQP | | | | |
| | | | | | | | | | | DDLATY | | | | |
| | | | | | | | | | | FC | | | | |

| | | | | | | VL | VL Amino |
|---|---|---|---|---|---|---|---|
| | SEQ | | SEQ | | SEQ | Nucleotide | Acid |
| | ID | | ID | | ID | Sub- | Sub- |
| Clone ID | NO: | VL DNA | NO: | VL Protein | NO: | stitutions | stitutions |
| ADI-81883 | 2944 | GACATCCGGATGACCCAGTCTCCATCCTCCCTGTCTGCAGCTG | 4717 | DIRMTQSPSSLSAAV | 5071 | 7 | 7 |
| | | TAGGAGACAGAGTCACCATCACTTGCCGGGCAAGTCAGACCAT | | GDRVTITCRASQTIS | | | |
| | | TAGCAACTATTTAAATTGGTATCAGCAGAGACCAGGGAAAGGC | | NYLNWYQQRPGKGPK | | | |
| | | CCTAAGCTCCTGATCTATGTTGCATCCAGTTTGCAAAGTGGGG | | LLIYVASSLQSGVPS | | | |
| | | TCCCATCAAGGTTCAGTGGCAGTAGATCTGGGACAGATTTCAC | | RFSGSRSGTDFTLTI | | | |
| | | TCTCACCATCAGCAGTCTGCAACCTGAAGATTTTGCAACTTAC | | SSLQPEDFATYYCQQ | | | |
| | | TACTGTCAACAGAGTTATAGTACCCCTCCCACTTTTGGCCAGG | | SYSTPPTFGQGTKVD | | | |
| | | GGACCAAAGTGGATATCAAA | | IK | | | |
| ADI-81686 | 2937 | GAAATGACACTGACGCAGTCTCCATCCTCCCTGTCTGCATATG | 4718 | EMTLTQSPSSLSAYV | 5072 | 7 | 6 |
| | | TAGGAGACAGAGTCACCATCACTTGCCGGGCAAGTCAGATCAT | | GDRVTITCRASQIIT | | | |
| | | TACCGCCTATTTAAATTGGTATCAGCAGAAACCAGGTAAAGCC | | AYLNWYQQKPGKAPN | | | |
| | | CCTAACCTCCTGATCTATGCTGCCTCCAATTTGCAAAGTGGGG | | LLIYAASNLQSGVPS | | | |
| | | TCCCATCAAGGTTCAGTGGCAGTGGATCTGGGACAGATTTCAC | | RFSGSGSGTDFTLTI | | | |
| | | TCTCACCATTAGCAGTCTGCAACCTGAAGATTTTGCAACTTAC | | SSLQPEDFATYYCQQ | | | |
| | | TACTGTCAACAGAGTTACACTACCCCGTACACCTTTGGCCAGG | | SYTTPYTFGQGTKVE | | | |
| | | GGACCAAGGTGGAGATCAAA | | IK | | | |
| ADI-81825 | 2938 | GAAATCACACTCACCCAGTCTCCATCCTCCCTGTCTGCATCTG | 4719 | EITLTQSPSSLSASV | 5073 | 7 | 6 |
| | | TTGGAGACAGAGTCACCATCACTTGCCGGGCAAGTCAGAGCAT | | GDRVTITCRASQSIS | | | |
| | | TAGCACCTATTTAAATTGGTATCAGCAGAAACCAGGGAAAGCC | | TYLNWYQQKPGKAPQ | | | |
| | | CCTCAGCTCCTGATCTATGCTGTTTCCAGTTTGAAAAGTGGGG | | LLIYAVSSLKSGVPS | | | |
| | | TCCCATCAAGGTTCAGTGGCAGTGGGTCTGGGACAGACTTCAC | | RFSGSGSGTDFTLTI | | | |
| | | TCTCACCATCAGCAGTCTGCAACCTGAGGATTCTGCAGCTTAC | | SSLQPEDSAAYYCQQ | | | |
| | | TATTGTCAACAGAGTTACACTACCCCCGCGCTCACTTTCGGCG | | SYTTPALTFGGGTKV | | | |
| | | GAGGGACCAAGGTGGATATCAAA | | DIK | | | |
| ADI-81748 | 2937 | GAAATCCCGGTGACCCAGTCTCCATCTTCTGTGTCTGCATCTG | 4720 | EIPVTQSPSSVSASV | 5074 | 7 | 6 |
| | | TAGGAGACAGAGTCACCATCACTTGTCGGGCGAGTCAACATTT | | GDRVTITCRASQHFS | | | |
| | | TAGCAACTGGTTAGCCTGGTATCAGCTGAAACCAGGGAAAGCC | | NWLAWYQLKPGKAPK | | | |
| | | CCTAAACTCCTGATCTATGCTGCATCCACTTTGCAGAGTGGGG | | LLIYAASTLQSGVPS | | | |
| | | TCCCATCAAGGTTCAGCGGCAGTGGGTCTGGGACAGATTTCAC | | RFSGSGSGTDFTLTI | | | |
| | | TCTCACTATCAGCAGCCTGCTGCCTGAAGATTTTGCAACTTAC | | SSLLPEDFATYYCQQ | | | |
| | | TATTGTCAACAGGCTAACAGTTTCCCGTACACTTTTGGCCAGG | | ANSFPYTFGQGTKVE | | | |
| | | GGACCAAGGTGGAAATCAAA | | IK | | | |
| ADI-81840 | 2937 | GACATCCGGATGACCCAGTCTCCTTCCACCCTGTCTGCATCTG | 4721 | DIRMTQSPSTLSASV | 5075 | 7 | 6 |
| | | TAGGAGACAGAGTCACCATCACTTGCCGGGCCAGTCAGAGTAT | | GDRVTITCRASQSIS | | | |
| | | TAGTGGCTGGTTGGCCTGGTCTCAGCAGAAACCAGGGAAAGCC | | GWLAWSQQKPGKAPK | | | |
| | | CCTAAGCTCCTGATCTATGGGGCATCTACTTTAGGAAGTGGGG | | LLIYGASTLGSGVPS | | | |
| | | TCCCATCAAGGTTCAGCGGCAGTGGATTTGGGACAGAATTCAC | | RFSGSGFGTEFTLTI | | | |
| | | TCTCACCATCAGCAGCCTGCAGCCTGATGATTTTGCAACTTAT | | SSLQPDDFATYYCQQ | | | |
| | | TACTGCCAACAATATAAAAGTTATTCCTATACTTTTGGCCAGG | | YKSYSYTFGQGTKVE | | | |
| | | GGACCAAGGTGGAAATCAAA | | IK | | | |
| ADI-81692 | 2949 | CAGTTTGTTCTGAATCAGCCTGCCTCCGTGTCTGGGTCTCCTG | 4722 | QFVLNQPASVSGSPG | 5076 | 7 | 6 |
| | | GACAGTCGATCACCATCTCCTGCACTGGAACCAGCAGTGACGT | | QSITISCTGTSSDVG | | | |
| | | TGGTGATTATAACTATGTCTCCTGGTACCAACACCACCCAGGC | | DYNYVSWYQHHPGTA | | | |
| | | ACCGCCCCCAAACTCATGATTTATGAGGTCACTAATCGGCCCT | | PKLMIYEVTNRPSGD | | | |
| | | CAGGGGATTCTGATCGCTTCTCTGGCTCCAAGTCTGGCAACAC | | SDRFSGSKSGNTASL | | | |
| | | GGCCTCCCTGACCATCTCTGGCCTCCAGGCTGAGGACGAGGCT | | TISGLQAEDEADYYC | | | |
| | | GATTATTACTGCAGCTCATATACAAGCAGCAACACTCTCGTCT | | SSYTSSNTLVFGTGT | | | |
| | | TCGGAACTGGGACCAAGCTCACCGTCCTA | | KLTVL | | | |
| ADI-81730 | 2944 | GAAATTGTGATGACGCAGTCTCCAGGCTCCCTGTCTTTGTCTC | 4723 | EIVMTQSPGSLSLSP | 5077 | 7 | 7 |
| | | CAGGGGAAAGAGCCACCCTCTCCTGCAGGGCCAGTCAGAGTAT | | GERATLSCRASQSIS | | | |
| | | TAGCAGAACCTACTTAGCCTGGTACCAGCAGAAACCTGGCCAG | | RTYLAWYQQKPGQAP | | | |
| | | GCTCCCAGGCTCCTCATCTATGCTACATCCACCAGGGCCACTG | | RLLIYATSTRATGIP | | | |
| | | GCATCCCAGACAGGTTCAGTGGCAGTGGGTCTGGGACAGACTT | | DRFSGSGSGTDFTLT | | | |
| | | CACTCTCACCATCAGCAGACTGGAGCCTGAAGATTTTGCAGTG | | ISRLEPEDFAVYYCQ | | | |
| | | TATTACTGTCAGCAGTATGGTAGTTCACCTATGTATACTTTTG | | QYGSSPMYTFGQGTK | | | |
| | | GCCAGGGGACCAAGGTGGATATCAAA | | VDIK | | | |
| ADI-81889 | 2936 | GAAATGCCAATGACGCAGTCTCCTTCCACCCTGTCTGCATCTG | 4724 | EMPMTQSPSTLSASV | 5078 | 6 | 5 |
| | | TGGGAGACAGAGTCACCATCACTTGCCGGGCCAGTCAGAGTAT | | GDRVTITCRASQSIG | | | |
| | | TGGTAGCAGGTTGGCCTGGTATCAGCAGAAACCAGGGAAAGCC | | SRLAWYQQKPGKAPS | | | |
| | | CCTAGCCTCTTGATCTATAAGGCATCTAGTTTAGAAAGTGGGG | | LLIYKASSLESGVPS | | | |
| | | TCCCATCAAGGTTCAGCGGCAGTGGATCTGGGACAGAATTCAC | | RFSGSGSGTEFTLTI | | | |
| | | TCTCACCATCAGCAGCCTGCAGCCTGATGATTTGGCAACTTAT | | SSLQPDDLATYFCQQ | | | |
| | | TTCTGCCAACAGTATAATAGTTACTCCCTCACTTTCGGCGGAG | | YNSYSLTFGGGTKVE | | | |
| | | GGACCAAGGTGGAAATCAAA | | IK | | | |

| | | | SEQ | | SEQ | | SEQ | | SEQ | | SEQ | | SEQ | |
|---|---|---|---|---|---|---|---|---|---|---|---|---|---|---|
| | VL | VL | ID | VL | ID | VL | ID | VL | ID | VL | ID | VL | ID | VL |
| Clone ID | Germline | FR1 | NO: | CDR1 | NO: | FR2 | NO: | CDR2 | NO: | FR3 | NO: | CDR3 | NO: | FR4 |
| ADI-81608 | IGKV1-33 | DIQLTQ | 1876 | QASQDI | 2212 | WYQQKP | 2257 | DASNYD | 4089 | GVPSRF | 4244 | QQYDSL | 4425 | FGGGTK |
| | | SPSSLS | | SNYLN | | GKAPKL | | T | | SGTGSG | | PLT | | VEIK |
| | | ASVGDR | | | | LIY | | | | TDFTFT | | | | |
| | | VTITC | | | | | | | | ISSLQP | | | | |
| | | | | | | | | | | EDIAIY | | | | |
| | | | | | | | | | | FC | | | | |
| ADI-81616 | IGKV4-1 | DIQLTQ | 3614 | KSSQSV | 3806 | WYQQRP | 2381 | WASTRE | 2422 | GVPDRF | 2619 | QQYYSW | 4426 | FGQGTK |
| | | SPDSLA | | FSSSNN | | GQPPKL | | S | | SGSGSG | | YS | | VEIK |
| | | VPLGER | | RNNLA | | LIY | | | | TDFTLT | | | | |
| | | ATINC | | | | | | | | ISSLQA | | | | |
| | | | | | | | | | | EDVAVY | | | | |
| | | | | | | | | | | YC | | | | |
| ADI-81734 | IGKV1D-39 | DITMTQ | 1882 | RASQNI | 3807 | WYQQKP | 3972 | AASTLQ | 2392 | GVPSRF | 2534 | QQSYES | 4427 | FGQGTK |
| | | SPSSLS | | NGYLN | | GKGPKV | | S | | SGSGSG | | PPWT | | VDIK |
| | | ASVGDR | | | | LIY | | | | TDFTLT | | | | |
| | | VTITC | | | | | | | | ISSLQP | | | | |
| | | | | | | | | | | EDFATY | | | | |
| | | | | | | | | | | YC | | | | |
| ADI-81767 | IGKV3-20 | EMTLTQ | 1963 | RASQSV | 3808 | WYQQKP | 2258 | AASGRA | 4090 | GIPDRF | 2616 | QQYGSS | 2929 | FGQGTK |
| | | SPGTLS | | GSGFLA | | GQAPRL | | P | | SGSGSG | | PYT | | VDIK |
| | | LSPGER | | | | LIY | | | | TDFTLT | | | | |
| | | ATLSC | | | | | | | | ISRLEP | | | | |
| | | | | | | | | | | EDFAVY | | | | |
| | | | | | | | | | | YC | | | | |
| ADI-81688 | IGLV1-47 | NYVLTQ | 3615 | SGNRSN | 3809 | WYQQFP | 2324 | KNNQRP | 4091 | GVPDRF | 2669 | ASWHNG | 4428 | FGGGTK |
| | | PPSASG | | IGDNYV | | GTAPKL | | S | | SGSKSG | | LSGSNW | | LTVL |
| | | TPGQRV | | Y | | LIY | | | | TSASLA | | A | | |
| | | TISC | | | | | | | | ISGLRS | | | | |
| | | | | | | | | | | EDEADY | | | | |
| | | | | | | | | | | YC | | | | |
| ADI-81697 | IGKV1D-39 | DITLTQ | 1900 | RASQNI | 3771 | WYQHRP | 3973 | AASSLH | 2426 | GVPSRF | 2534 | QQSYSI | 4429 | FGQGTK |
| | | SPSSLS | | NSYLN | | GIAPKL | | S | | SGSGSG | | SPYT | | VEIK |
| | | ASVGDR | | | | LIY | | | | TDFTLT | | | | |
| | | VTITC | | | | | | | | ISSLQP | | | | |
| | | | | | | | | | | EDFATY | | | | |
| | | | | | | | | | | YC | | | | |
| ADI-81549 | IGLV3-21 | QHVLTQ | 3616 | GGNNIG | 2215 | WYQQRP | 3974 | YDSDRP | 2498 | GIPERF | 4245 | QVWDSR | 4430 | FGTGTK |
| | | PPSLSV | | TKSVH | | GQAPVM | | S | | SGSNSG | | GVYV | | VTVL |
| | | APGRTA | | | | VIY | | | | NTATLT | | | | |
| | | RITC | | | | | | | | ISRAEA | | | | |
| | | | | | | | | | | GDEADY | | | | |
| | | | | | | | | | | YC | | | | |
| ADI-81562 | IGKV1-9 | DIQLTQ | 3617 | RASQGF | 3810 | WYQQKP | 3975 | AASPLQ | 4092 | GVPSRF | 4246 | QQLNSY | 4431 | FGGGTK |
| | | SPSFLS | | GSYVA | | GKAPKL | | S | | SGSGSG | | PIT | | VEIK |
| | | ASVGDR | | | | LTY | | | | TEFTLT | | | | |
| | | VTITC | | | | | | | | ISSLQP | | | | |
| | | | | | | | | | | EDFATY | | | | |
| | | | | | | | | | | FC | | | | |

| | | | | | | VL | VL Amino |
|---|---|---|---|---|---|---|---|
| | SEQ | | SEQ | | SEQ | Nucleotide | Acid |
| | ID | | ID | | ID | Sub- | Sub- |
| Clone ID | NO: | VL DNA | NO: | VL Protein | NO: | stitutions | stitutions |
| ADI-81608 | 2936 | GACATCCAGTTGACCCAGTCTCCATCCTCCCTGTCTGCATCTG | 4725 | DIQLTQSPSSLSASV | 5079 | 6 | 5 |
| | | TGGGAGACAGAGTCACCATCACTTGCCAGGCGAGTCAGGACAT | | GDRVTITCQASQDIS | | | |
| | | AAGCAACTATTTAAATTGGTATCAGCAAAAACCAGGGAAAGCC | | NYLNWYQQKPGKAPK | | | |
| | | CCAAAGCTCCTGATCTACGATGCATCCAATTACGACACAGGGG | | LLIYDASNYDTGVPS | | | |
| | | TCCCATCAAGGTTCAGTGGGACTGGATCTGGGACAGATTTTAC | | RFSGTGSGTDFTFTI | | | |
| | | TTTCACCATCAGCAGCCTGCAGCCTGAAGATATTGCAATATAT | | SSLQPEDIAIYFCQQ | | | |
| | | TTCTGTCAACAGTATGATAGTCTCCCCCTCACTTTCGGCGGAG | | YDSLPLTFGGGTKVE | | | |
| | | GGACCAAGGTGGAGATCAAA | | IK | | | |
| ADI-81616 | 2937 | GACATCCAGTTGACCCAGTCTCCAGACTCCCTGGCTGTGCCTC | 4726 | DIQLTQSPDSLAVPL | 5080 | 6 | 6 |
| | | TGGGCGAGAGGGCCACCATCAACTGCAAGTCCAGCCAGAGTGT | | GERATINCKSSQSVF | | | |
| | | TTTCTCCAGCTCCAACAATAGGAACAACTTAGCTTGGTACCAG | | SSSNNRNNLAWYQQR | | | |
| | | CAGAGACCAGGACAGCCTCCTAAGTTGCTCATTTACTGGGCAT | | PGQPPKLLIYWASTR | | | |
| | | CTACCCGGGAATCCGGGGTCCCTGACCGCTTCAGTGGCAGCGG | | ESGVPDRFSGSGSGT | | | |
| | | GTCTGGGACAGATTTCACTCTCACCATCAGCAGCCTGCAGGCT | | DFTLTISSLQAEDVA | | | |
| | | GAAGATGTGGCAGTTTATTACTGTCAGCAATATTATAGTTGGT | | VYYCQQYYSWYSFGQ | | | |
| | | ACAGTTTTGGCCAGGGGACCAAGGTGGAGATCAAA | | GTKVEIK | | | |
| ADI-81734 | 2944 | GACATCACAATGACCCAGTCTCCATCCTCCCTGTCTGCATCTG | 4727 | DITMTQSPSSLSASV | 5081 | 6 | 6 |
| | | TAGGAGACAGAGTCACCATCACTTGCCGGGCAAGTCAGAACAT | | GDRVTITCRASQNIN | | | |
| | | TAACGGCTATTTAAATTGGTATCAGCAAAAACCAGGGAAAGGC | | GYLNWYQQKPGKGPK | | | |
| | | CCTAAGGTCCTGATCTACGCTGCATCCACTTTGCAAAGTGGAG | | VLIYAASTLQSGVPS | | | |
| | | TCCCATCAAGGTTCAGTGGCAGTGGTTCTGGGACAGATTTCAC | | RFSGSGSGTDFTLTI | | | |
| | | TCTCACCATCAGCAGTCTGCAACCTGAAGATTTTGCAACTTAC | | SSLQPEDFATYYCQQ | | | |
| | | TACTGTCAACAGAGTTATGAATCCCCCCCGTGGACGTTCGGCC | | SYESPPWTFGQGTKV | | | |
| | | AAGGGACCAAGGTGGATATCAAA | | DIK | | | |
| ADI-81767 | 2944 | GAAATGACACTGACCCAGTCTCCAGGCACCCTGTCTTTGTCTC | 4728 | EMTLTQSPGTLSLSP | 5082 | 6 | 6 |
| | | CAGGGGAAAGAGCCACCCTCTCCTGCAGGGCCAGTCAGAGTGT | | GERATLSCRASQSVG | | | |
| | | TGGCAGCGGCTTCTTAGCCTGGTACCAGCAGAAACCTGGCCAG | | SGFLAWYQQKPGQAP | | | |
| | | GCTCCCAGGCTCCTCATCTATGCTGCGTCCGGCAGGGCCCCTG | | RLLIYAASGRAPGIP | | | |
| | | GCATCCCAGACAGGTTCAGTGGCAGTGGCTCTGGGACAGACTT | | DRFSGSGSGTDFTLT | | | |
| | | CACTCTCACCATCAGCAGACTGGAGCCTGAAGATTTTGCAGTG | | ISRLEPEDFAVYYCQ | | | |
| | | TATTACTGTCAGCAGTATGGTAGCTCACCGTACACTTTTGGCC | | QYGSSPYTFGQGTKV | | | |
| | | AGGGGACCAAAGTGGATATCAAA | | DIK | | | |
| ADI-81688 | 2939 | AATTATGTGCTGACTCAGCCACCCTCAGCGTCTGGGACCCCCG | 4729 | NYVLTQPPSASGTPG | 5083 | 6 | 5 |
| | | GGCAGAGGGTCACCATCTCTTGCTCTGGAAACAGATCCAACAT | | QRVTISCSGNRSNIG | | | |
| | | AGGAGATAATTATGTATATTGGTACCAGCAGTTCCCAGGAACG | | DNYVYWYQQFPGTAP | | | |
| | | GCCCCCAAACTCCTCATCTATAAGAATAATCAGCGGCCCTCAG | | KLLIYKNNQRPSGVP | | | |
| | | GGGTCCCTGACCGATTCTCTGGCTCCAAGTCTGGCACCTCAGC | | DRFSGSKSGTSASLA | | | |
| | | CTCCCTGGCCATCAGTGGGCTCCGGTCCGAGGATGAGGCTGAT | | ISGLRSEDEADYYCA | | | |
| | | TATTACTGTGCATCATGGCATAACGGCCTGAGTGGCTCTAATT | | SWHNGLSGSNWAFGG | | | |
| | | GGGCGTTCGGCGGAGGGACCAAGCTCACCGTCCTA | | GTKLTVL | | | |
| ADI-81697 | 2937 | GACATCACACTCACGCAGTCTCCATCCTCCCTGTCTGCATCTG | 4730 | DITLTQSPSSLSASV | 5084 | 6 | 6 |
| | | TAGGAGACAGAGTCACCATCACTTGCCGGGCAAGTCAGAACAT | | GDRVTITCRASQNIN | | | |
| | | TAACAGCTATTTAAATTGGTATCAGCACAGACCAGGGATAGCC | | SYLNWYQHRPGIAPK | | | |
| | | CCTAAGCTCCTGATCTATGCTGCATCCAGTTTGCATAGTGGGG | | LLIYAASSLHSGVPS | | | |
| | | TCCCATCAAGGTTCAGTGGCAGTGGATCTGGGACAGATTTCAC | | RFSGSGSGTDFTLTI | | | |
| | | TCTCACCATCAGCAGTCTGCAACCTGAAGATTTTGCAACTTAC | | SSLQPEDFATYYCQQ | | | |
| | | TACTGTCAACAGAGTTACAGTATCTCTCCGTACACTTTTGGCC | | SYSISPYTFGQGTKV | | | |
| | | AGGGGACCAAGGTGGAAATCAAA | | EIK | | | |
| ADI-81549 | 2945 | CAGCATGTGCTGACTCAGCCACCCTCTTTGTCAGTGGCCCCAG | 4731 | QHVLTQPPSLSVAPG | 5085 | 6 | 6 |
| | | GAAGGACGGCCAGGATTACCTGTGGGGGGAACAACATTGGAAC | | RTARITCGGNNIGTK | | | |
| | | TAAGAGTGTGCACTGGTACCAACAGAGGCCAGGCCAGGCCCCT | | SVHWYQQRPGQAPVM | | | |
| | | GTGATGGTCATCTATTATGATAGTGACCGGCCCTCAGGGATCC | | VIYYDSDRPSGIPER | | | |
| | | CTGAGCGATTCTCTGGCTCCAACTCTGGGAACACGGCCACCCT | | FSGSNSGNTATLTIS | | | |
| | | GACCATCAGCAGGGCCGAAGCCGGGGATGAGGCCGACTATTAC | | RAEAGDEADYYCQVW | | | |
| | | TGTCAGGTGTGGGATAGTCGTGGTGTTTATGTCTTCGGAACTG | | DSRGVYVFGTGTKVT | | | |
| | | GGACCAAGGTCACCGTCCTA | | VL | | | |
| ADI-81562 | 2936 | GACATCCAGTTGACCCAGTCTCCATCCTTTCTGTCTGCATCTG | 4732 | DIQLTQSPSFLSASV | 5086 | 6 | 6 |
| | | TAGGAGACAGAGTCACCATCACTTGCCGGGCCAGTCAGGGCTT | | GDRVTITCRASQGFG | | | |
| | | TGGCAGTTATGTAGCCTGGTATCAGCAAAAACCAGGGAAAGCC | | SYVAWYQQKPGKAPK | | | |
| | | CCTAAGCTCCTGACCTATGCTGCATCCCCTTTGCAAAGTGGGG | | LLTYAASPLQSGVPS | | | |
| | | TCCCATCAAGATTCAGCGGCAGTGGATCTGGGACAGAATTCAC | | RFSGSGSGTEFTLTI | | | |
| | | TCTCACAATCAGCAGCCTGCAGCCTGAAGATTTTGCAACTTAT | | SSLQPEDFATYFCQQ | | | |
| | | TTCTGTCAACAACTTAATAGTTACCCTATCACTTTCGGCGGAG | | LNSYPITFGGGTKVE | | | |
| | | GGACCAAGGTGGAGATCAAA | | IK | | | |

| | | | SEQ | | SEQ | | SEQ | | SEQ | | SEQ | | SEQ | |
|---|---|---|---|---|---|---|---|---|---|---|---|---|---|---|
| | VL | VL | ID | VL | ID | VL | ID | VL | ID | VL | ID | VL | ID | VL |
| Clone ID | Germline | FR1 | NO: | CDR1 | NO: | FR2 | NO: | CDR2 | NO: | FR3 | NO: | CDR3 | NO: | FR4 |
| ADI-81813 | IGKV1-6 | DIRVTQ | 3618 | RASQGI | 3811 | WYQQHP | 3976 | AASSLE | 4052 | GVPSRF | 2539 | LQDYSN | 4432 | FGQGTK |
| | | SPSSLS | | RNDLG | | GKAPKL | | T | | SGSGSG | | FWT | | VEIK |
| | | ASVGDR | | | | LIS | | | | TDFTLT | | | | |
| | | VTITC | | | | | | | | ITSLQP | | | | |
| | | | | | | | | | | EDFATY | | | | |
| | | | | | | | | | | YC | | | | |
| ADI-81890 | IGKV1-5 | EMTMTQ | 3619 | RASQSI | 3812 | WYQQKP | 2257 | MTSRLE | 4093 | GVPSRF | 2532 | QHYNSY | 4433 | FGQGTK |
| | | SPSTLS | | SNWLA | | GKAPKL | | G | | SGSGSG | | SEMYT | | VEIK |
| | | ASVGDR | | | | LIY | | | | TEFTLT | | | | |
| | | VTITC | | | | | | | | ISSLQP | | | | |
| | | | | | | | | | | DDFATY | | | | |
| | | | | | | | | | | YC | | | | |
| ADI-81612 | IGLV1-40 | QPVVTQ | 3620 | TGTNSN | 2171 | WYQLLP | 3977 | RNTNRP | 4054 | GVPDRF | 2599 | QSYDSS | 2908 | FGGGTK |
| | | PPSVSG | | IGAGYD | | GTPPKL | | S | | SGSKSG | | LSGSV | | LTVL |
| | | APGQRV | | VH | | LIY | | | | TSASLA | | | | |
| | | TISC | | | | | | | | ITGLQA | | | | |
| | | | | | | | | | | EDEADY | | | | |
| | | | | | | | | | | YC | | | | |
| ADI-81723 | IGKV4-1 | ETTLTQ | 3621 | KSSQSV | 3813 | WYQHKP | 3978 | WASTRQ | 4094 | GVPDRF | 2581 | QQYYSS | 4434 | FGQGTK |
| | | SPDSLA | | LSSSNN | | GQPPKL | | S | | SGSGSG | | PYT | | VDIK |
| | | VSLGER | | RNYLS | | LIY | | | | TDFTLT | | | | |
| | | ATINC | | | | | | | | ISSLQP | | | | |
| | | | | | | | | | | EDVAVY | | | | |
| | | | | | | | | | | YC | | | | |
| ADI-81543 | IGLV1-40 | QSVLTQ | 1948 | TGSNSN | 2143 | WYQQLP | 3979 | DNANRP | 4095 | GVPDRF | 2622 | QSYDSS | 2864 | FGTGTK |
| | | PPSVSG | | IGAGYD | | GSAPKL | | S | | SGSKSD | | LIGSV | | LTVL |
| | | APGQRV | | VH | | LIY | | | | TSASLA | | | | |
| | | TISC | | | | | | | | ITGLQA | | | | |
| | | | | | | | | | | EDEADY | | | | |
| | | | | | | | | | | YC | | | | |
| ADI-81583 | IGKV1D-39 | DIVMTQ | 1902 | RASQSV | 3814 | WYQHKP | 3924 | GASSLQ | 2403 | GVPSRF | 2539 | QQSYST | 4435 | FGGGTK |
| | | SPSSLS | | RTYLN | | GKAPKL | | S | | SGSGSG | | PPLT | | VEIK |
| | | ASVGDR | | | | LIY | | | | TDFTLT | | | | |
| | | VTITC | | | | | | | | ITSLQP | | | | |
| | | | | | | | | | | EDFATY | | | | |
| | | | | | | | | | | YC | | | | |
| ADI-81620 | IGLV3-21 | QHVLTQ | 3622 | GGNNVG | 3815 | WYQQKP | 2283 | GDRDRP | 4096 | GIPERF | 2636 | QVWDSS | 4436 | FGGGTK |
| | | PPSVSV | | STSVH | | GQAPVL | | S | | SGSKSG | | TDHWV | | VTVL |
| | | APGQTA | | | | VVY | | | | NTATLT | | | | |
| | | RVTC | | | | | | | | ISRVEA | | | | |
| | | | | | | | | | | GDEADY | | | | |
| | | | | | | | | | | YC | | | | |
| ADI-81743 | IGKV1D-39 | EIVMTQ | 3623 | RASQSI | 3816 | WYQQRP | 2309 | AASTLQ | 2392 | GVPSRF | 2539 | QQSFST | 4437 | FGQGTK |
| | | SPSSLS | | SSHLS | | GKAPKL | | S | | SGSGSG | | PPT | | VDIK |
| | | ASVRDR | | | | LIY | | | | TDFTLT | | | | |
| | | VTITC | | | | | | | | ITSLQP | | | | |
| | | | | | | | | | | EDFATY | | | | |
| | | | | | | | | | | YC | | | | |

| | | | | | | VL | VL Amino |
|---|---|---|---|---|---|---|---|
| | SEQ | | SEQ | | SEQ | Nucleotide | Acid |
| | ID | | ID | | ID | Sub- | Sub- |
| Clone ID | NO: | VL DNA | NO: | VL Protein | NO: | stitutions | stitutions |
| ADI-81813 | 2937 | GACATCCGGGTGACCCAGTCTCCATCCTCCCTGTCTGCATCTG | 4733 | DIRVTQSPSSLSASV | 5087 | 6 | 5 |
| | | TAGGAGACAGAGTCACCATCACTTGCCGGGCAAGTCAGGGCAT | | GDRVTITCRASQGIR | | | |
| | | TAGAAATGATTTAGGGTGGTATCAACAACACCCTGGGAAAGCC | | NDLGWYQQHPGKAPK | | | |
| | | CCTAAGCTCCTGATTTCTGCTGCCTCCAGTTTAGAAACTGGGG | | LLISAASSLETGVPS | | | |
| | | TCCCATCAAGGTTCAGCGGCAGTGGATCTGGCACAGATTTCAC | | RFSGSGSGTDFTLTI | | | |
| | | TCTCACCATCACCAGCCTGCAGCCTGAAGATTTTGCAACTTAT | | TSLQPEDFATYYCLQ | | | |
| | | TACTGTCTACAAGATTACAGTAACTTCTGGACGTTCGGCCAAG | | DYSNFWTFGQGTKVE | | | |
| | | GGACCAAGGTGGAGATCAAA | | IK | | | |
| ADI-81890 | 2937 | GAAATGACGATGACGCAGTCTCCTTCCACCCTGTCTGCATCTG | 4734 | EMTMTQSPSTLSASV | 5088 | 6 | 5 |
| | | TAGGAGACAGAGTCACCATCACTTGCCGGGCCAGTCAGAGTAT | | GDRVTITCRASQSIS | | | |
| | | TAGTAACTGGTTGGCCTGGTATCAGCAGAAACCAGGAAAAGCC | | NWLAWYQQKPGKAPK | | | |
| | | CCTAAACTCCTGATCTATATGACATCTCGTTTAGAAGGTGGGG | | LLIYMTSRLEGGVPS | | | |
| | | TCCCATCAAGGTTCAGCGGCAGTGGATCTGGGACAGAATTCAC | | RFSGSGSGTEFTLTI | | | |
| | | TCTCACCATCAGCAGCCTGCAGCCTGATGATTTTGCAACGTAT | | SSLQPDDFATYYCQH | | | |
| | | TACTGTCAGCACTATAATAGTTATTCTGAGATGTACACTTTTG | | YNSYSEMYTFGQGTK | | | |
| | | GCCAGGGGACCAAGGTGGAAATCAAA | | VEIK | | | |
| ADI-81612 | 2939 | CAGCCTGTGGTGACGCAGCCGCCCTCAGTGTCTGGGGCCCCAG | 4735 | QPVVTQPPSVSGAPG | 5089 | 6 | 6 |
| | | GGCAGAGGGTCACCATCTCCTGCACTGGGACCAACTCCAACAT | | QRVTISCTGTNSNIG | | | |
| | | CGGGGGGGGTTATGATGTACACTGGTACCAGCTGCTTCCAGGA | | AGYDVHWYQLLPGTP | | | |
| | | ACACCCCCCAAACTCCTCATCTATCGTAACACCAATCGGCCCT | | PKLLIYRNTNRPSGV | | | |
| | | CAGGGGTCCCTGACCGATTCTCTGGCTCCAAGTCTGGCACCTC | | PDRFSGSKSGTSASL | | | |
| | | AGCCTCCCTGGCCATCACTGGGCTCCAGGCTGAGGATGAGGCT | | AITGLQAEDEADYYC | | | |
| | | GATTATTACTGCCAGTCCTATGACAGCAGCCTGAGTGGTTCGG | | QSYDSSLSGSVFGGG | | | |
| | | TGTTCGGCGGAGGGACCAAGCTGACCGTCCTA | | TKLTVL | | | |
| ADI-81723 | 2944 | GAAACGACACTCACGCAGTCTCCAGACTCCCTGGCTGTGTCTC | 4736 | ETTLTQSPDSLAVSL | 5090 | 6 | 6 |
| | | TGGGCGAGAGGGCCACCATCAACTGCAAGTCCAGCCAGAGTGT | | GERATINCKSSQSVL | | | |
| | | TTTATCCAGCTCCAACAATAGGAACTACTTATCTTGGTACCAG | | SSSNNRNYLSWYQHK | | | |
| | | CACAAACCAGGACAGCCTCCTAAGCTGCTCATTTACTGGGCAT | | PGQPPKLLIYWASTR | | | |
| | | CTACCCGGCAATCCGGGGTCCCTGACCGATTCAGTGGCAGCGG | | QSGVPDRFSGSGSGT | | | |
| | | GTCTGGGACAGATTTCACTCTCACCATCAGCAGCCTGCAACCT | | DFTLTISSLQPEDVA | | | |
| | | GAAGATGTGGCAGTTTATTACTGTCAGCAATATTATAGTTCTC | | VYYCQQYYSSPYTFG | | | |
| | | CCTACACTTTTGGCCAGGGGACCAAAGTGGATATCAAA | | QGTKVDIK | | | |
| ADI-81543 | 2949 | CAGTCTGTGTTGACTCAGCCGCCCTCAGTGTCTGGGGCCCCAG | 4737 | QSVLTQPPSVSGAPG | 5091 | 6 | 5 |
| | | GGCAGAGGGTCACCATCTCCTGCACTGGCAGCAACTCCAACAT | | QRVTISCTGSNSNIG | | | |
| | | CGGGGCAGGTTATGATGTACACTGGTATCAGCAGCTTCCCGGA | | AGYDVHWYQQLPGSA | | | |
| | | TCAGCCCCCAAACTCCTCATCTATGATAACGCCAATCGGCCCT | | PKLLIYDNANRPSGV | | | |
| | | CAGGGGTCCCTGACCGATTCTCTGGCTCCAAGTCTGACACCTC | | PDRFSGSKSDTSASL | | | |
| | | AGCCTCCCTGGCCATCACTGGCCTCCAGGCTGAGGATGAGGCT | | AITGLQAEDEADYYC | | | |
| | | GATTATTACTGCCAGTCCTATGACAGCAGTCTTATTGGTTCTG | | QSYDSSLIGSVFGTG | | | |
| | | TCTTCGGAACTGGGACCAAGCTCACCGTCCTA | | TKLTVL | | | |
| ADI-81583 | 2936 | GACATTGTGATGACCCAGTCTCCATCCTCCCTGTCTGCATCTG | 4738 | DIVMTQSPSSLSASV | 5092 | 6 | 6 |
| | | TGGGAGACAGAGTCACCATCACTTGCCGGGCAAGTCAGAGCGT | | GDRVTITCRASQSVR | | | |
| | | TCGCACCTATTTAAATTGGTATCAGCATAAACCAGGGAAAGCC | | TYLNWYQHKPGKAPK | | | |
| | | CCTAAACTCCTGATCTATGGTGCATCCAGCTTGCAAAGTGGGG | | LLIYGASSLQSGVPS | | | |
| | | TCCCATCAAGGTTCAGTGGCAGTGGATCTGGGACAGATTTCAC | | RFSGSGSGTDFTLTI | | | |
| | | TCTCACCATCACCAGTCTGCAACCTGAAGATTTTGCGACTTAC | | TSLQPEDFATYYCQQ | | | |
| | | TACTGTCAACAGAGTTACAGTACCCCCCCGCTCACTTTCGGCG | | SYSTPPLTFGGGTKV | | | |
| | | GAGGGACCAAGGTGGAAATCAAA | | EIK | | | |
| ADI-81620 | 2947 | CAGCATGTGCTGACTCAGCCACCCTCGGTGTCAGTGGCCCCAG | 4739 | QHVLTQPPSVSVAPG | 5093 | 6 | 6 |
| | | GACAGACGGCCAGGGTTACCTGTGGGGGAAACAACGTTGGGAG | | QTARVTCGGNNVGST | | | |
| | | TACAAGTGTGCACTGGTACCAGCAGAAGCCAGGCCAGGCCCCT | | SVHWYQQKPGQAPVL | | | |
| | | GTGTTGGTCGTCTATGGTGATAGAGACCGGCCCTCAGGGATCC | | VVYGDRDRPSGIPER | | | |
| | | CTGAGCGATTCTCTGGCTCCAAGTCTGGGAACACGGCCACCCT | | FSGSKSGNTATLTIS | | | |
| | | GACCATCAGCAGGGTCGAAGCCGGGGATGAGGCCGACTATTAT | | RVEAGDEADYYCQVW | | | |
| | | TGTCAGGTGTGGGATAGCAGTACTGATCATTGGGTGTTCGGCG | | DSSTDHWVFGGGTKV | | | |
| | | GAGGGACCAAGGTCACCGTCCTA | | TVL | | | |
| ADI-81743 | 2944 | GAAATCGTAATGACCCAGTCTCCATCCTCCCTGTCTGCATCTG | 4740 | EIVMTQSPSSLSASV | 5094 | 6 | 6 |
| | | TAAGAGACAGAGTCACCATCACTTGCCGGGCAAGTCAGAGCAT | | RDRVTITCRASQSIS | | | |
| | | TAGCAGCCATTTAAGTTGGTATCAGCAGAGACCAGGGAAAGCC | | SHLSWYQQRPGKAPK | | | |
| | | CCTAAGCTCCTGATCTATGCTGCATCCACTTTGCAAAGTGGGG | | LLIYAASTLQSGVPS | | | |
| | | TCCCATCAAGGTTCAGTGGCAGTGGATCTGGGACAGATTTCAC | | RFSGSGSGTDFTLTI | | | |
| | | TCTCACCATCACCAGTCTGCAACCTGAAGATTTTGCAACTTAC | | TSLQPEDFATYYCQQ | | | |
| | | TACTGTCAACAGAGTTTCAGTACCCCTCCCACTTTTGGCCAGG | | SFSTPPTFGQGTKVD | | | |
| | | GGACCAAGGTGGATATCAAA | | IK | | | |

| | | | SEQ | | SEQ | | SEQ | | SEQ | | SEQ | | SEQ | |
|---|---|---|---|---|---|---|---|---|---|---|---|---|---|---|
| | VL | VL | ID | VL | ID | VL | ID | VL | ID | VL | ID | VL | ID | VL |
| Clone ID | Germline | FR1 | NO: | CDR1 | NO: | FR2 | NO: | CDR2 | NO: | FR3 | NO: | CDR3 | NO: | FR4 |
| ADI-81795 | IGKV1D-39 | EIVLTQ | 1888 | RASQSI | 2050 | WFQQKP | 2300 | AASTLQ | 2417 | GVPSRF | 4247 | QQSYSS | 2731 | FGGGTK |
| | | SPSSLS | | SSYLN | | GKAPKL | | R | | SGSESG | | PLT | | VEIK |
| | | ASVGDR | | | | LIY | | | | TDFTLT | | | | |
| | | VTITC | | | | | | | | ISSLQP | | | | |
| | | | | | | | | | | EDFANY | | | | |
| | | | | | | | | | | FC | | | | |
| ADI-81812 | IGKV3D-15 | EMTMTQ | 3624 | RASQSV | 3817 | WYQQKP | 2258 | DASTRA | 2424 | GIPARF | 4248 | QQYNDW | 4438 | FGQGTK |
| | | SPGTLS | | DSNLA | | GQAPRL | | T | | SGSGSG | | PPGYT | | VEIK |
| | | VSPGER | | | | LIY | | | | TEFILT | | | | |
| | | ATLSC | | | | | | | | ISSLQS | | | | |
| | | | | | | | | | | EDFAVY | | | | |
| | | | | | | | | | | FC | | | | |
| ADI-81877 | IGLV3-21 | QSVLTQ | 2010 | GGNNIG | 2068 | WYQQKP | 3980 | TNSDRP | 4097 | GIPERF | 4249 | QVWDSA | 4439 | FGGGTK |
| | | PPSVSV | | SRSVH | | GHAPVL | | S | | SGSNSG | | SDQVV | | LTVL |
| | | APGQTA | | | | VVY | | | | NTATLT | | | | |
| | | RITC | | | | | | | | ISRVDA | | | | |
| | | | | | | | | | | GDEADY | | | | |
| | | | | | | | | | | YC | | | | |
| ADI-81577 | IGKV1D-39 | EIVMTQ | 1891 | RASQSI | 2142 | WYQQNP | 3981 | AASRLQ | 2406 | GVPSRF | 4250 | QQSYNI | 4440 | FGGGTK |
| | | SPSSLS | | TTYLN | | GKAPNL | | S | | SGSGSG | | PQLT | | VDIK |
| | | ASVGDR | | | | LIY | | | | TNFTLT | | | | |
| | | VTITC | | | | | | | | ISSLQP | | | | |
| | | | | | | | | | | EDFATY | | | | |
| | | | | | | | | | | YC | | | | |
| ADI-81742 | IGKV1D-39 | EMTMTQ | 3625 | RASQSI | 2077 | WYQQKP | 3942 | DATSLQ | 4098 | GVPSRF | 4251 | QQSYTT | 4441 | FGQGTK |
| | | SPSSLS | | SNYLN | | GKAPKL | | S | | SGSGSG | | WVT | | VEIK |
| | | ASVGDR | | | | LIF | | | | TDFTLT | | | | |
| | | VTIAC | | | | | | | | ISSLQP | | | | |
| | | | | | | | | | | EDFATY | | | | |
| | | | | | | | | | | SC | | | | |
| ADI-81781 | IGKV3D-15 | EMTLTQ | 3626 | RASQSI | 2129 | WYQQKP | 3912 | GASARA | 4099 | GVPARF | 4252 | QHYYDW | 4442 | FGQGTK |
| | | SPGTLS | | SSNLA | | GQAPRL | | T | | SGSGSG | | PPYT | | VEIK |
| | | VSPGER | | | | LIF | | | | TEFTLT | | | | |
| | | ATLSC | | | | | | | | ISSLQS | | | | |
| | | | | | | | | | | EDFAVY | | | | |
| | | | | | | | | | | YC | | | | |
| ADI-81611 | IGKV1-27 | DIQMTQ | 1977 | RASQDI | 3818 | WYQQKP | 3982 | AASTLQ | 2392 | GVPSRF | 4253 | QKYYNV | 4443 | FGQGTK |
| | | SPSSLS | | SNFLA | | GKVPRL | | S | | SGSRSG | | PWT | | VDIK |
| | | ASVGDS | | | | LIY | | | | TDFTLT | | | | |
| | | VTITC | | | | | | | | ITSLQP | | | | |
| | | | | | | | | | | EDVATY | | | | |
| | | | | | | | | | | YC | | | | |
| ADI-81622 | IGKV1D-39 | DIQMTQ | 1878 | RASQSI | 3819 | WYQQKP | 2275 | AASSFQ | 4100 | GVPLRF | 4254 | QQSYSI | 4444 | FGGGTK |
| | | SPSSLS | | SDYLN | | GRAPKL | | S | | TGSGSG | | PLT | | VEIK |
| | | ASVGDR | | | | LIY | | | | TDFTLT | | | | |
| | | VTITC | | | | | | | | ISSLQP | | | | |
| | | | | | | | | | | EDFATY | | | | |
| | | | | | | | | | | YC | | | | |

| | | | | | | VL | VL Amino |
|---|---|---|---|---|---|---|---|
| | SEQ | | SEQ | | SEQ | Nucleotide | Acid |
| | ID | | ID | | ID | Sub- | Sub- |
| Clone ID | NO: | VL DNA | NO: | VL Protein | NO: | stitutions | stitutions |
| ADI-81795 | 2936 | GAAATTGTGTTGACCCAGTCTCCATCCTCCCTGTCTGCATCTG | 4741 | EIVLTQSPSSLSASV | 5095 | 6 | 6 |
| | | TAGGAGACAGAGTCACCATCACTTGCCGGGCAAGTCAGAGCAT | | GDRVTITCRASQSIS | | | |
| | | TAGCAGCTATTTAAATTGGTTTCAGCAGAAACCAGGGAAAGCC | | SYLNWFQQKPGKAPK | | | |
| | | CCTAAGCTCCTGATCTATGCTGCATCCACTTTGCAACGTGGGG | | LLIYAASTLQRGVPS | | | |
| | | TCCCATCAAGGTTCAGTGGCAGTGAATCTGGGACAGATTTCAC | | RFSGSESGTDFTLTI | | | |
| | | TCTCACCATCAGCAGTCTGCAACCGGAAGATTTTGCAAATTAC | | SSLQPEDFANYFCQQ | | | |
| | | TTCTGTCAACAGAGTTACAGTAGCCCGCTCACTTTCGGCGGAG | | SYSSPLTFGGGTKVE | | | |
| | | GGACCAAGGTGGAAATCAAA | | IK | | | |
| ADI-81812 | 2937 | GAAATGACAATGACGCAGTCTCCAGGCACCCTGTCTGTGTCTC | 4742 | EMTMTQSPGTLSVSP | 5096 | 6 | 5 |
| | | CAGGGGAAAGAGCCACCCTCTCCTGCAGGGCCAGTCAGAGTGT | | GERATLSCRASQSVD | | | |
| | | TGACAGCAACTTAGCCTGGTACCAGCAGAAACCTGGCCAGGCT | | SNLAWYQQKPGQAPR | | | |
| | | CCCAGGCTCCTCATCTATGATGCATCCACCAGGGCCACTGGTA | | LLIYDASTRATGIPA | | | |
| | | TCCCAGCCAGGTTCAGTGGCAGTGGGTCTGGGACAGAGTTCAT | | RFSGSGSGTEFILTI | | | |
| | | TCTCACCATCAGCAGCCTGCAGTCTGAAGATTTTGCAGTTTAT | | SSLQSEDFAVYFCQQ | | | |
| | | TTCTGTCAGCAGTATAATGACTGGCCTCCGGGGTACACTTTTG | | YNDWPPGYTFGQGTK | | | |
| | | GCCAGGGGACCAAGGTGGAAATCAAA | | VEIK | | | |
| ADI-81877 | 2939 | CAGTCTGTGCTGACTCAGCCCCCCTCGGTGTCAGTGGCCCCAG | 4743 | QSVLTQPPSVSVAPG | 5097 | 6 | 5 |
| | | GACAGACGGCCAGGATTACCTGTGGGGGAAACAACATTGGAAG | | QTARITCGGNNIGSR | | | |
| | | TAGAAGTGTGCACTGGTACCAGCAGAAGCCAGGCCACGCCCCT | | SVHWYQQKPGHAPVL | | | |
| | | GTGCTGGTCGTCTATACTAATAGCGACCGGCCCTCAGGGATCC | | VVYTNSDRPSGIPER | | | |
| | | CTGAGCGATTCTCTGGCTCCAACTCTGGGAACACGGCCACCCT | | FSGSNSGNTATLTIS | | | |
| | | GACCATCAGCAGGGTCGACGCCGGGGATGAGGCCGACTATTAC | | RVDAGDEADYYCQVW | | | |
| | | TGTCAGGTGTGGGATAGTGCTAGTGATCAGGTGGTATTCGGCG | | DSASDQVVFGGGTKL | | | |
| | | GAGGGACCAAGCTCACCGTCCTA | | TVL | | | |
| ADI-81577 | 2938 | GAAATTGTGATGACCCAGTCTCCATCTTCCCTGTCTGCATCTG | 4744 | EIVMTQSPSSLSASV | 5098 | 6 | 6 |
| | | TTGGAGACAGAGTCACCATCACTTGTCGGGCAAGTCAGAGCAT | | GDRVTITCRASQSIT | | | |
| | | TACCACCTATTTAAATTGGTATCAACAGAATCCAGGGAAAGCC | | TYLNWYQQNPGKAPN | | | |
| | | CCTAACCTCCTGATCTATGCTGCATCCAGGTTGCAGAGTGGGG | | LLIYAASRLQSGVPS | | | |
| | | TCCCATCAAGGTTCAGTGGCAGTGGATCTGGGACAAATTTCAC | | RFSGSGSGTNFTLTI | | | |
| | | TCTCACGATCAGCAGCCTGCAACCCGAAGATTTTGCAACTTAC | | SSLQPEDFATYYCQQ | | | |
| | | TACTGTCAACAGAGTTACAATATTCCTCAACTCACTTTCGGCG | | SYNIPQLTFGGGTKV | | | |
| | | GAGGGACCAAGGTGGATATCAAA | | DIK | | | |
| ADI-81742 | 2937 | GAAATGACAATGACGCAGTCTCCATCCTCCCTGTCTGCATCTG | 4745 | EMTMTQSPSSLSASV | 5099 | 6 | 6 |
| | | TTGGCGACAGAGTCACCATCGCTTGCCGGGCAAGTCAGAGCAT | | GDRVTIACRASQSIS | | | |
| | | CAGCAACTATTTAAATTGGTATCAGCAGAAACCAGGGAAAGCC | | NYLNWYQQKPGKAPK | | | |
| | | CCTAAACTCCTCATCTTTGATGCTACCAGTTTGCAAAGTGGGG | | LLIFDATSLQSGVPS | | | |
| | | TCCCATCAAGGTTCAGTGGCAGTGGATCTGGGACAGATTTCAC | | RFSGSGSGTDFTLTI | | | |
| | | TCTCACCATCAGCAGTCTGCAACCTGAAGATTTTGCAACTTAC | | SSLQPEDFATYSCQQ | | | |
| | | TCCTGTCAACAGAGTTACACTACCTGGGTCACTTTTGGCCAGG | | SYTTWVTFGQGTKVE | | | |
| | | GGACCAAGGTGGAAATCAAA | | IK | | | |
| ADI-81781 | 2937 | GAAATGACACTGACGCAGTCTCCAGGTACCCTGTCTGTGTCTC | 4746 | EMTLTQSPGTLSVSP | 5100 | 6 | 5 |
| | | CAGGGGAAAGAGCCACCCTCTCTTGCAGGGCCAGTCAGAGTAT | | GERATLSCRASQSIS | | | |
| | | TAGCAGCAACTTAGCCTGGTACCAGCAGAAACCTGGCCAGGCT | | SNLAWYQQKPGQAPR | | | |
| | | CCCAGGCTCCTCATCTTTGGTGCATCCGCCAGGGCCACTGGTG | | LLIFGASARATGVPA | | | |
| | | TCCCAGCCAGGTTCAGTGGCAGTGGGTCTGGGACAGAGTTCAC | | RFSGSGSGTEFTLTI | | | |
| | | TCTCACCATCAGCAGCCTGCAGTCTGAAGATTTTGCAGTTTAT | | SSLQSEDFAVYYCQH | | | |
| | | TACTGTCAGCACTATTATGACTGGCCTCCGTACACTTTTGGCC | | YYDWPPYTFGQGTKV | | | |
| | | AGGGGACCAAGGTGGAAATCAAA | | EIK | | | |
| ADI-81611 | 2944 | GACATCCAGATGACCCAGTCTCCATCCTCCCTGTCTGCATCTG | 4747 | DIQMTQSPSSLSASV | 5101 | 6 | 6 |
| | | TGGGAGACAGCGTCACCATCACTTGCCGGGCGAGTCAGGACAT | | GDSVTITCRASQDIS | | | |
| | | CAGCAATTTTTTAGCCTGGTATCAGCAGAAACCAGGGAAAGTT | | NFLAWYQQKPGKVPR | | | |
| | | CCTAGGCTCCTGATCTATGCTGCATCCACTTTGCAATCAGGGG | | LLIYAASTLQSGVPS | | | |
| | | TCCCATCTCGGTTCAGTGGCAGTAGATCTGGGACAGATTTCAC | | RFSGSRSGTDFTLTI | | | |
| | | TCTCACCATCACCAGCCTGCAGCCTGAAGATGTTGCAACTTAT | | TSLQPEDVATYYCQK | | | |
| | | TACTGTCAAAAGTATTACAATGTCCCTTGGACGTTCGGCCAAG | | YYNVPWTFGQGTKVD | | | |
| | | GGACCAAAGTGGATATCAAA | | IK | | | |
| ADI-81622 | 2936 | GACATCCAGATGACCCAGTCTCCATCCTCCCTGTCTGCATCTG | 4748 | DIQMTQSPSSLSASV | 5102 | 6 | 5 |
| | | TAGGAGACAGAGTCACCATCACTTGCCGGGCAAGTCAGAGCAT | | GDRVTITCRASQSIS | | | |
| | | TAGCGACTATTTAAATTGGTATCAACAAAAACCAGGGAGAGCC | | DYLNWYQQKPGRAPK | | | |
| | | CCTAAGCTCCTCATCTATGCTGCATCCAGTTTTCAAAGTGGGG | | LLIYAASSFQSGVPL | | | |
| | | TCCCATTAAGGTTCACTGGCAGTGGATCTGGGACAGATTTCAC | | RFTGSGSGTDFTLTI | | | |
| | | TCTCACCATCAGCAGTCTGCAACCTGAAGATTTTGCAACTTAC | | SSLQPEDFATYYCQQ | | | |
| | | TACTGTCAACAGAGTTACAGTATCCCGCTCACTTTCGGCGGAG | | SYSIPLTFGGGTKVE | | | |
| | | GGACCAAGGTGGAAATCAAA | | IK | | | |

| | | | SEQ | | SEQ | | SEQ | | SEQ | | SEQ | | SEQ | |
|---|---|---|---|---|---|---|---|---|---|---|---|---|---|---|
| | VL | VL | ID | VL | ID | VL | ID | VL | ID | VL | ID | VL | ID | VL |
| Clone ID | Germline | FR1 | NO: | CDR1 | NO: | FR2 | NO: | CDR2 | NO: | FR3 | NO: | CDR3 | NO: | FR4 |
| ADI-81644 | IGLV3-21 | SYELTQ | 3627 | GGNNIG | 3820 | WYQQKP | 2304 | YHSDRP | 4101 | GFPERF | 4255 | QVWDSG | 4445 | FGGGTK |
| | | PPSVSV | | SKSVY | | GQAPVL | | S | | SGFNSG | | NNHVV | | VTVL |
| | | APGKTA | | | | VIY | | | | STATLT | | | | |
| | | RITC | | | | | | | | ISGVEA | | | | |
| | | | | | | | | | | GDEADY | | | | |
| | | | | | | | | | | YC | | | | |
| ADI-81858 | IGKV1-33 | EIVLTQ | 1888 | QASQDI | 3821 | WYQQKP | 3942 | DVSNLE | 4102 | GVPSRF | 2528 | QHYDNL | 4446 | FGPGTK |
| | | SPSSLS | | DNFLN | | GKAPKL | | T | | SGSGSG | | KFT | | VEIK |
| | | ASVGDR | | | | LIF | | | | TDFTFT | | | | |
| | | VTITC | | | | | | | | ISSLQP | | | | |
| | | | | | | | | | | EDFATY | | | | |
| | | | | | | | | | | YC | | | | |
| ADI-81603 | IGLV1-40 | QSVLTQ | 1948 | TGTNSN | 2171 | WYQRLP | 3983 | VNNNRP | 2471 | GVPDRF | 2599 | QSYDSS | 4383 | FGGGTQ |
| | | PPSVSG | | IGAGYD | | GTAPKL | | S | | SGSKSG | | LSSSL | | LTVL |
| | | APGQRV | | VH | | LIY | | | | TSASLA | | | | |
| | | TISC | | | | | | | | ITGLQA | | | | |
| | | | | | | | | | | EDEADY | | | | |
| | | | | | | | | | | YC | | | | |
| ADI-81535 | IGLV1-40 | QSVLTQ | 1948 | TGSDSN | 3763 | WYQQLP | 2314 | INTNRP | 4103 | GVPDRF | 4256 | QSYDSS | 2840 | FGGGTK |
| | | PPSVSG | | IGAGYD | | GTAPKL | | S | | SGSKSG | | LSDSV | | LTVL |
| | | APGQRV | | VH | | LIY | | | | TSASLA | | | | |
| | | TISC | | | | | | | | ITGLLA | | | | |
| | | | | | | | | | | EDEADY | | | | |
| | | | | | | | | | | YC | | | | |
| ADI-81713 | IGKV3-20 | ETTLTQ | 3628 | RASQSV | 3822 | WYQQKP | 2258 | GSSSRA | 4104 | GIPDRF | 4257 | QQYGTS | 4388 | FGQGTK |
| | | SPGTLS | | RSGYLA | | GQAPRL | | T | | SASGSG | | PWT | | VDIK |
| | | LSPGER | | | | LIY | | | | TDFTLT | | | | |
| | | ATLSC | | | | | | | | ISRLEP | | | | |
| | | | | | | | | | | EDFAVY | | | | |
| | | | | | | | | | | FC | | | | |
| ADI-81816 | IGKV1-5 | EIVMTQ | 3590 | RASQTI | 3823 | WYQQKP | 2257 | MTSRLE | 4105 | GVPSRF | 4241 | QHYNSY | 4447 | FGQGTK |
| | | SPSTLS | | SSWLA | | GKAPKL | | S | | SGSGFG | | FEMYT | | VEIK |
| | | ASVGDR | | | | LIY | | | | TEFTLT | | | | |
| | | VTITC | | | | | | | | ISSLQP | | | | |
| | | | | | | | | | | DDFATY | | | | |
| | | | | | | | | | | YC | | | | |
| ADI-81895 | IGKV3-20 | ETTLTQ | 3629 | RASLSV | 3824 | WYRQKP | 3984 | GASSRA | 2464 | GIPDRF | 2616 | QQYGTS | 4448 | FGQGTR |
| | | SPGTLY | | SAGYLA | | GQAPRL | | T | | SGSGSG | | PIT | | LEIK |
| | | LSPGER | | | | LIY | | | | TDFTLT | | | | |
| | | ATLSC | | | | | | | | ISRLEP | | | | |
| | | | | | | | | | | EDFAVY | | | | |
| | | | | | | | | | | YC | | | | |
| ADI-81793 | IGKV2-24 | EMTLTQ | 3630 | RSSESL | 3825 | WLQQRP | 3985 | KISKRF | 4106 | GVPDRF | 4258 | TQATEF | 4449 | FGQGTK |
| | | SPLSSH | | VHSDGN | | GQPPRL | | S | | IGSGAG | | PQT | | VEIK |
| | | VTLGQP | | TYLN | | LIY | | | | TDFTLK | | | | |
| | | ASISC | | | | | | | | ISRVEA | | | | |
| | | | | | | | | | | EDVGVY | | | | |
| | | | | | | | | | | YC | | | | |

| | | | | | | VL | VL Amino |
|---|---|---|---|---|---|---|---|
| | SEQ | | SEQ | | SEQ | Nucleotide | Acid |
| | ID | | ID | | ID | Sub- | Sub- |
| Clone ID | NO: | VL DNA | NO: | VL Protein | NO: | stitutions | stitutions |
| ADI-81644 | 2947 | TCGTATGAGCTGACGCAGCCACCCTCAGTGTCAGTGGCCCCAG | 4749 | SYELTQPPSVSVAPG | 5103 | 6 | 6 |
| | | GAAAGACGGCCAGGATTACCTGTGGGGGAAACAACATTGGAAG | | KTARITCGGNNIGSK | | | |
| | | TAAAAGTGTGTACTGGTACCAACAGAAGCCAGGCCAGGCCCCT | | SVYWYQQKPGQAPVL | | | |
| | | GTGCTGGTCATCTACTATCATAGCGACCGGCCCTCAGGGTTCC | | VIYYHSDRPSGFPER | | | |
| | | CTGAGCGATTCTCTGGCTTCAACTCTGGGAGCACGGCCACCCT | | FSGFNSGSTATLTIS | | | |
| | | GACCATCAGCGGGGTCGAAGCCGGGGATGAGGCCGACTATTAC | | GVEAGDEADYYCQVW | | | |
| | | TGTCAGGTCTGGGATAGTGGTAACAATCACGTGGTTTTCGGCG | | DSGNNHVVFGGGTKV | | | |
| | | GAGGCACCAAGGTCACCGTCCTA | | TVL | | | |
| ADI-81858 | 2942 | GAAATCGTGTTGACCCAGTCTCCATCCTCCCTGTCTGCATCTG | 4750 | EIVLTQSPSSLSASV | 5104 | 6 | 5 |
| | | TAGGAGACAGAGTCACCATCACTTGCCAGGCGAGTCAGGACAT | | GDRVTITCQASQDID | | | |
| | | TGACAACTTTTTAAATTGGTATCAGCAAAAACCAGGGAAAGCC | | NFLNWYQQKPGKAPK | | | |
| | | CCTAAACTCCTGATCTTCGATGTATCGAATTTGGAAACAGGGG | | LLIFDVSNLETGVPS | | | |
| | | TCCCATCAAGGTTCAGTGGCAGTGGATCTGGGACAGATTTTAC | | RFSGSGSGTDFTFTI | | | |
| | | TTTCACCATCAGCAGCCTGCAGCCTGAAGATTTTGCAACATAT | | SSLQPEDFATYYCQH | | | |
| | | TACTGTCAACACTATGATAATCTCAAATTCACTTTCGGCCCTG | | YDNLKFTFGPGTKVE | | | |
| | | GGACCAAGGTGGAGATCAAA | | IK | | | |
| ADI-81603 | 2948 | CAGTCTGTCTTGACGCAGCCGCCCTCAGTGTCTGGGGCCCCAG | 4751 | QSVLTQPPSVSGAPG | 5105 | 6 | 5 |
| | | GGCAGAGGGTCACCATCTCCTGCACTGGGACCAACTCCAACAT | | QRVTISCTGTNSNIG | | | |
| | | CGGGGCAGGTTATGATGTACACTGGTACCAGCGACTTCCAGGA | | AGYDVHWYQRLPGTA | | | |
| | | ACAGCCCCCAAACTCCTCATCTATGTTAACAACAATCGGCCCT | | PKLLIYVNNNRPSGV | | | |
| | | CAGGGGTCCCTGACCGATTCTCTGGCTCCAAGTCTGGCACCTC | | PDRFSGSKSGTSASL | | | |
| | | AGCCTCCCTGGCCATCACTGGGCTCCAGGCTGAGGATGAGGCT | | AITGLQAEDEADYYC | | | |
| | | GATTATTACTGCCAGTCCTATGACAGCAGCCTGAGTTCTTCGC | | QSYDSSLSSSLFGGG | | | |
| | | TATTCGGCGGAGGCACCCAGCTGACCGTCCTC | | TQLTVL | | | |
| ADI-81535 | 2939 | CAGTCTGTGCTGACGCAGCCGCCCTCAGTGTCTGGGGCCCCCG | 4752 | QSVLTQPPSVSGAPG | 5106 | 6 | 4 |
| | | GGCAGAGGGTCACCATCTCCTGCACTGGGAGCGACTCCAACAT | | QRVTISCTGSDSNIG | | | |
| | | CGGGGCAGGTTATGATGTACACTGGTACCAGCAGCTTCCAGGA | | AGYDVHWYQQLPGTA | | | |
| | | ACAGCCCCCAAACTCCTCATCTATATTAATACCAATCGGCCCT | | PKLLIYINTNRPSGV | | | |
| | | CAGGGGTCCCTGACCGATTCTCTGGCTCCAAGTCTGGCACCTC | | PDRFSGSKSGTSASL | | | |
| | | AGCCTCCCTGGCCATCACTGGGCTCCTGGCTGAGGATGAGGCT | | AITGLLAEDEADYYC | | | |
| | | GATTATTACTGCCAGTCCTATGACAGCAGCCTGAGTGACTCGG | | QSYDSSLSDSVFGGG | | | |
| | | TATTCGGCGGAGGGACCAAGCTCACCGTCCTA | | TKLTVL | | | |
| ADI-81713 | 2944 | GAAACGACACTCACGCAGTCTCCAGGCACCCTGTCTTTGTCTC | 4753 | ETTLTQSPGTLSLSP | 5107 | 6 | 5 |
| | | CAGGGGAAAGAGCCACCCTCTCCTGCAGGGCCAGTCAGAGTGT | | GERATLSCRASQSVR | | | |
| | | AAGAAGTGGTTACTTAGCCTGGTACCAACAGAAACCTGGCCAG | | SGYLAWYQQKPGQAP | | | |
| | | GCTCCCAGGCTCCTCATCTATGGTTCATCCAGCAGGGCCACTG | | RLLIYGSSSRATGIP | | | |
| | | GCATCCCAGACAGGTTCAGTGCCAGTGGGTCTGGGACAGACTT | | DRFSASGSGTDFTLT | | | |
| | | CACTCTCACCATCAGCAGACTGGAGCCTGAAGATTTTGCAGTG | | ISRLEPEDFAVYFCQ | | | |
| | | TATTTCTGTCAGCAGTATGGTACCTCACCGTGGACGTTCGGCC | | QYGTSPWTFGQGTKV | | | |
| | | AAGGGACCAAAGTGGATATCAAA | | DIK | | | |
| ADI-81816 | 2937 | GAAATTGTGATGACGCAGTCTCCTTCCACCCTGTCTGCATCTG | 4754 | EIVMTQSPSTLSASV | 5108 | 6 | 5 |
| | | TAGGAGACAGAGTCACCATCACTTGCCGGGCCAGTCAGACTAT | | GDRVTITCRASQTIS | | | |
| | | TAGTAGCTGGTTGGCCTGGTATCAGCAGAAACCAGGGAAAGCC | | SWLAWYQQKPGKAPK | | | |
| | | CCTAAGCTCCTGATCTATATGACATCTCGTTTAGAAAGTGGGG | | LLIYMTSRLESGVPS | | | |
| | | TCCCATCAAGGTTCAGCGGCAGTGGATTTGGGACAGAATTCAC | | RFSGSGFGTEFTLTI | | | |
| | | TCTCACCATCAGCAGCCTGCAGCCTGATGATTTTGCAACGTAT | | SSLQPDDFATYYCQH | | | |
| | | TACTGCCAACACTATAATAGTTATTTTGAGATGTACACTTTTG | | YNSYFEMYTFGQGTK | | | |
| | | GCCAGGGGACCAAGGTGGAAATCAAA | | VEIK | | | |
| ADI-81895 | 2940 | GAAACGACACTCACGCAGTCTCCAGGCACCCTGTATTTGTCTC | 4755 | ETTLTQSPGTLYLSP | 5109 | 6 | 5 |
| | | CAGGGGAAAGAGCCACCCTCTCCTGCAGGGCCAGTCTGAGTGT | | GERATLSCRASLSVS | | | |
| | | TAGCGCCGGCTACTTAGCCTGGTACCGGCAGAAACCTGGCCAG | | AGYLAWYRQKPGQAP | | | |
| | | GCTCCCAGGCTCCTCATCTATGGTGCATCCAGCAGGGCCACTG | | RLLIYGASSRATGIP | | | |
| | | GCATCCCAGACAGGTTCAGTGGCAGTGGGTCTGGGACAGACTT | | DRFSGSGSGTDFTLT | | | |
| | | CACTCTCACCATCAGCAGACTGGAGCCTGAAGATTTTGCAGTG | | ISRLEPEDFAVYYCQ | | | |
| | | TATTATTGTCAGCAGTATGGAACCTCACCGATCACCTTCGGCC | | QYGTSPITFGQGTRL | | | |
| | | AAGGGACACGACTGGAGATTAAA | | EIK | | | |
| ADI-81793 | 2937 | GAAATGACACTCACGCAGTCTCCACTCTCCTCACATGTCACCC | 4756 | EMTLTQSPLSSHVTL | 5110 | 5 | 5 |
| | | TTGGACAGCCGGCCTCCATCTCCTGCAGGTCTAGTGAAAGCCT | | GQPASISCRSSESLV | | | |
| | | CGTACACAGTGATGGAAACACCTACTTGAATTGGCTTCAGCAG | | HSDGNTYLNWLQQRP | | | |
| | | AGGCCAGGCCAGCCTCCAAGACTCCTAATCTATAAGATTTCTA | | GQPPRLLIYKISKRF | | | |
| | | AGCGGTTCTCTGGGGTCCCAGACAGATTCATTGGCAGTGGGGC | | SGVPDRFIGSGAGTD | | | |
| | | AGGGACCGATTTCACACTGAAAATCAGCAGGGTGGAAGCTGAG | | FTLKISRVEAEDVGV | | | |
| | | GATGTCGGGGTTTATTACTGCACGCAAGCTACAGAGTTTCCTC | | YYCTQATEFPQTFGQ | | | |
| | | AAACTTTTGGCCAGGGGACCAAGGTGGAGATCAAA | | GTKVEIK | | | |

| | | | SEQ | | SEQ | | SEQ | | SEQ | | SEQ | | SEQ | |
|---|---|---|---|---|---|---|---|---|---|---|---|---|---|---|
| | VL | VL | ID | VL | ID | VL | ID | VL | ID | VL | ID | VL | ID | VL |
| Clone ID | Germline | FR1 | NO: | CDR1 | NO: | FR2 | NO: | CDR2 | NO: | FR3 | NO: | CDR3 | NO: | FR4 |
| ADI-81724 | IGKV1D-39 | EIPMTQ | 1912 | RASQSI | 2050 | WYQQKG | 3986 | AASSLE | 4077 | GVPARF | 4259 | QQSYTT | 2752 | FGQGTK |
| | | SPSSLS | | SSYLN | | GKAPKL | | S | | SGSGSG | | PRT | | VEIK |
| | | ASVGDR | | | | LIY | | | | TDFTLT | | | | |
| | | VTITC | | | | | | | | IRSLQP | | | | |
| | | | | | | | | | | EDFATY | | | | |
| | | | | | | | | | | YC | | | | |
| ADI-81599 | IGKV1D-39 | DIQMTQ | 3631 | RASQSI | 2153 | WYQQKP | 2257 | AASSLQ | 2391 | GVPSRF | 4260 | QQSYST | 2804 | FGQGTR |
| | | SPSSLS | | STFLN | | GKAPKL | | S | | SGSGSG | | PS | | LEIK |
| | | ASVGDR | | | | LIY | | | | TDFTLT | | | | |
| | | VTVTC | | | | | | | | ISGLQP | | | | |
| | | | | | | | | | | EDFAIY | | | | |
| | | | | | | | | | | YC | | | | |
| ADI-81705 | IGKV1-5 | DIGMTQ | 3632 | RASQSI | 2146 | WYQQKA | 3987 | KASTLE | 2518 | GVPSRF | 2532 | QQYNNY | 4450 | FGQGTR |
| | | SPSTLA | | STWLA | | GKAPNL | | S | | SGSGSG | | PIT | | LEIK |
| | | ASVGDR | | | | LIY | | | | TEFTLT | | | | |
| | | VTITC | | | | | | | | ISSLQP | | | | |
| | | | | | | | | | | DDFATY | | | | |
| | | | | | | | | | | YC | | | | |
| ADI-81760 | IGKV3-20 | ETTLTQ | 3628 | RASQSV | 3826 | WYQQKP | 2258 | GASNRA | 4107 | GIPDRF | 2624 | QQYRSP | 4451 | FGGGTK |
| | | SPGTLS | | STTYLA | | GQAPRL | | T | | SGGGSG | | PRLT | | VEIK |
| | | LSPGER | | | | LIY | | | | TDFTLT | | | | |
| | | ATLSC | | | | | | | | ISRLEP | | | | |
| | | | | | | | | | | EDFAVY | | | | |
| | | | | | | | | | | YC | | | | |
| ADI-81843 | IGKV3-11 | ETTLTQ | 3633 | RASQSV | 3827 | WYQQKP | 3988 | DASNRA | 4108 | GIPARF | 2607 | QQRHNR | 4452 | FGGGTK |
| | | SPATLS | | SDYLA | | GQAPRL | | A | | SGSGSG | | LT | | VEIK |
| | | LSPGER | | | | FIS | | | | TDFTLT | | | | |
| | | ATLSC | | | | | | | | ISSLEP | | | | |
| | | | | | | | | | | EDFAVY | | | | |
| | | | | | | | | | | YC | | | | |
| ADI-81887 | IGKV1D-39 | EIPMTQ | 1912 | RASQSI | 3828 | WYQQKP | 2257 | NASSLQ | 4109 | GVPSRF | 2534 | QQSYNT | 2702 | FGQGTK |
| | | SPSSLS | | SRFFN | | GKAPKL | | S | | SGSGSG | | PPWT | | VDIK |
| | | ASVGDR | | | | LIY | | | | TDFTLT | | | | |
| | | VTITC | | | | | | | | ISSLQP | | | | |
| | | | | | | | | | | EDFATY | | | | |
| | | | | | | | | | | YC | | | | |
| ADI-81580 | IGLV1-40 | QSVLTQ | 3634 | TGSNSN | 2143 | WYQQLP | 2314 | DNINRP | 4110 | GVPDRF | 2622 | QSYDSS | 2840 | FGAGTK |
| | | PPSVSA | | IGAGYD | | GTAPKL | | S | | SGSKSD | | LSDSV | | LTVL |
| | | APGQRV | | VH | | LIY | | | | TSASLA | | | | |
| | | TISC | | | | | | | | ITGLQA | | | | |
| | | | | | | | | | | EDEADY | | | | |
| | | | | | | | | | | YC | | | | |
| ADI-81591 | IGKV1D-39 | DIQMTQ | 1878 | RASQTV | 3829 | WYQQKP | 2257 | AASSLQ | 2391 | GVPSRF | 4240 | QQSYST | 2729 | FGQGTK |
| | | SPSSLS | | SKYLN | | GKAPKL | | S | | SGSGSG | | PRT | | VEIK |
| | | ASVGDR | | | | LIY | | | | TDFTLT | | | | |
| | | VTITQ | | | | | | | | ISSLLP | | | | |
| | | | | | | | | | | EDFATY | | | | |
| | | | | | | | | | | YC | | | | |

| | | | | | | VL | VL Amino |
|---|---|---|---|---|---|---|---|
| | SEQ | | SEQ | | SEQ | Nucleotide | Acid |
| | ID | | ID | | ID | Sub- | Sub- |
| Clone ID | NO: | VL DNA | NO: | VL Protein | NO: | stitutions | stitutions |
| ADI-81724 | 2937 | GAAATCCCGATGACCCAGTCTCCATCCTCCCTGTCTGCATCTG | 4757 | EIPMTQSPSSLSASV | 5111 | 5 | 4 |
| | | TAGGAGACAGAGTCACCATCACTTGCCGGGCAAGTCAGAGTAT | | GDRVTITCRASQSIS | | | |
| | | TAGTAGTTATTTAAATTGGTATCAACAAAAAGGAGGGAAGGCC | | SYLNWYQQKGGKAPK | | | |
| | | CCTAAACTCCTGATTTATGCTGCATCCAGTTTGGAAAGTGGGG | | LLIYAASSLESGVPA | | | |
| | | TCCCAGCAAGGTTCAGTGGCAGTGGATCTGGCACAGATTTCAC | | RFSGSGSGTDFTLTI | | | |
| | | TCTCACCATCAGAAGTCTGCAACCTGAAGATTTTGCAACTTAC | | RSLQPEDFATYYCQQ | | | |
| | | TACTGTCAACAGAGTTACACTACGCCTCGGACGTTCGGCCAAG | | SYTTPRTFGQGTKVE | | | |
| | | GGACCAAGGTGGAGATCAAA | | IK | | | |
| ADI-81599 | 2940 | GACATCCAAATGACACAGTCTCCATCCTCCCTGTCTGCATCTG | 4758 | DIQMTQSPSSLSASV | 5112 | 5 | 5 |
| | | TAGGAGACAGAGTCACCGTCACTTGCCGGGCAAGTCAGAGTAT | | GDRVTVTCRASQSIS | | | |
| | | AAGCACCTTTTTAAATTGGTATCAACAAAAACCAGGGAAAGCC | | TFLNWYQQKPGKAPK | | | |
| | | CCTAAGCTCCTGATCTATGCTGCATCCAGTTTGCAAAGTGGGG | | LLIYAASSLQSGVPS | | | |
| | | TCCCATCAAGGTTCAGTGGCAGTGGATCTGGGACAGATTTCAC | | RFSGSGSGTDFTLTI | | | |
| | | TCTCACCATCAGCGGTCTGCAACCTGAAGATTTTGCAATTTAT | | SGLQPEDFAIYYCQQ | | | |
| | | TACTGTCAGCAGAGTTACAGTACCCCTTCCTTCGGCCAAGGGA | | SYSTPSFGQGTRLEI | | | |
| | | CACGACTGGAGATTAAA | | K | | | |
| ADI-81705 | 2940 | GATATCGGGATGACGCAGTCTCCTTCCACCCTGGCTGCATCTG | 4759 | DIGMTQSPSTLAASV | 5113 | 5 | 5 |
| | | TAGGAGACAGAGTCACCATTACTTGCCGGGCCAGTCAGAGTAT | | GDRVTITCRASQSIS | | | |
| | | TAGTACCTGGTTGGCCTGGTATCAGCAGAAAGCAGGGAAAGCC | | TWLAWYQQKAGKAPN | | | |
| | | CCGAACCTCCTGATCTATAAGGCGTCTACTTTAGAAAGTGGGG | | LLIYKASTLESGVPS | | | |
| | | TCCCATCAAGGTTCAGCGGCAGTGGATCTGGGACAGAATTCAC | | RFSGSGSGTEFTLTI | | | |
| | | TCTCACCATCAGCAGCCTGCAGCCTGATGATTTTGCGACTTAT | | SSLQPDDFATYYCQQ | | | |
| | | TACTGCCAACAGTATAATAATTACCCTATCACCTTCGGCCAGG | | YNNYPITFGQGTRLE | | | |
| | | GGACACGACTGGAGATTAAA | | IK | | | |
| ADI-81760 | 2936 | GAAACGACACTGACGCAGTCTCCAGGCACCCTGTCTTTGTCTC | 4760 | ETTLTQSPGTLSLSP | 5114 | 5 | 4 |
| | | CAGGGGAAAGAGCCACCCTCTCCTGCAGGGCCAGTCAGAGTGT | | GERATLSCRASQSVS | | | |
| | | TAGCACCACCTACTTAGCCTGGTACCAACAGAAACCTGGCCAG | | TTYLAWYQQKPGQAP | | | |
| | | GCTCCCAGGCTCCTCATCTATGGTGCATCCAATAGGGCCACTG | | RLLIYGASNRATGIP | | | |
| | | GCATCCCAGACAGGTTCAGTGGCGGTGGGTCTGGGACAGACTT | | DRFSGGGSGTDFTLT | | | |
| | | CACTCTCACCATCAGCAGACTGGAGCCTGAAGATTTTGCAGTG | | ISRLEPEDFAVYYCQ | | | |
| | | TATTACTGTCAGCAGTATCGTAGCCCACCTCGGCTCACTTTCG | | QYRSPPRLTFGGGTK | | | |
| | | GCGGAGGGACCAAGGTGGAAATCAAA | | VEIK | | | |
| ADI-81843 | 2936 | GAAACGACACTCACGCAGTCTCCAGCCACCCTGTCTTTGTCTC | 4761 | ETTLTQSPATLSLSP | 5115 | 5 | 4 |
| | | CAGGGGAAAGAGCCACCCTCTCCTGCAGGGCCAGTCAGAGTGT | | GERATLSCRASQSVS | | | |
| | | TAGCGACTACTTAGCCTGGTACCAACAGAAACCTGGCCAGGCT | | DYLAWYQQKPGQAPR | | | |
| | | CCCAGGCTCTTCATTTCTGATGCATCCAACAGGGCCGCTGGCA | | LFISDASNRAAGIPA | | | |
| | | TCCCAGCCAGGTTCAGTGGCAGTGGGTCTGGGACAGACTTCAC | | RFSGSGSGTDFTLTI | | | |
| | | TCTCACCATCAGCAGTCTAGAGCCTGAAGATTTCGCAGTTTAT | | SSLEPEDFAVYYCQQ | | | |
| | | TACTGTCAGCAACGTCACAACCGCCTCACTTTCGGCGGAGGGA | | RHNRLTFGGGTKVEI | | | |
| | | CCAAGGTGGAGATCAAA | | K | | | |
| ADI-81887 | 2944 | GAAATCCCGATGACCCAGTCTCCATCCTCCCTGTCTGCATCTG | 4762 | EIPMTQSPSSLSASV | 5116 | 5 | 4 |
| | | TAGGAGACAGAGTCACCATCACTTGCCGGGCAAGTCAGAGCAT | | GDRVTITCRASQSIS | | | |
| | | TAGCAGGTTTTTTAATTGGTATCAGCAGAAACCAGGGAAAGCC | | RFFNWYQQKPGKAPK | | | |
| | | CCTAAACTCCTGATCTATAATGCATCCAGTTTGCAAAGTGGGG | | LLIYNASSLQSGVPS | | | |
| | | TCCCATCAAGGTTCAGCGGCAGTGGATCTGGGACAGATTTCAC | | RFSGSGSGTDFTLTI | | | |
| | | GCTCACCATCAGCAGTCTGCAACCTGAAGATTTTGCAACTTAC | | SSLQPEDFATYYCQQ | | | |
| | | TACTGTCAACAGAGTTACAATACCCCTCCGTGGACGTTCGGCC | | SYNTPPWTFGQGTKV | | | |
| | | AAGGGACCAAGGTGGATATCAAA | | DIK | | | |
| ADI-81580 | 2958 | CAGTCTGTCCTGACGCAGCCGCCCTCAGTGTCTGCGGCCCCAG | 4763 | QSVLTQPPSVSAAPG | 5117 | 5 | 5 |
| | | GGCAGAGGGTCACCATCTCCTGCACTGGGAGCAACTCCAACAT | | QRVTISCTGSNSNIG | | | |
| | | CGGGGCAGGTTATGATGTACACTGGTACCAGCAACTTCCAGGA | | AGYDVHWYQQLPGTA | | | |
| | | ACAGCCCCCAAACTCCTCATCTATGATAACATCAATCGGCCCT | | PKLLIYDNINRPSGV | | | |
| | | CAGGGGTCCCTGACCGATTCTCTGGCTCCAAGTCTGACACCTC | | PDRFSGSKSDTSASL | | | |
| | | AGCCTCCCTGGCCATCACTGGGCTCCAGGCTGAGGATGAGGCT | | AITGLQAEDEADYYC | | | |
| | | GATTATTACTGCCAGTCCTATGACAGCAGCCTGAGTGATTCTG | | QSYDSSLSDSVFGAG | | | |
| | | TCTTCGGAGCTGGGACCAAGCTCACCGTCCTA | | TKLTVL | | | |
| ADI-81591 | 2937 | GACATCCAGATGACCCAGTCTCCATCCTCCCTGTCTGCATCTG | 4764 | DIQMTQSPSSLSASV | 5118 | 5 | 4 |
| | | TCGGAGACAGAGTCACCATCACTTGCCGGGCAAGCCAGACCGT | | GDRVTITCRASQTVS | | | |
| | | TAGCAAGTATTTAAATTGGTATCAGCAGAAACCAGGGAAAGCC | | KYLNWYQQKPGKAPK | | | |
| | | CCTAAGCTCCTAATCTATGCTGCATCCAGTTTGCAAAGTGGGG | | LLIYAASSLQSGVPS | | | |
| | | TCCCATCAAGGTTCAGTGGCAGTGGATCTGGGACAGATTTCAC | | RFSGSGSGTDFTLTI | | | |
| | | TCTCACCATCAGCAGTCTGCTACCTGAAGATTTTGCAACTTAC | | SSLLPEDFATYYCQQ | | | |
| | | TACTGTCAACAGAGTTACAGTACCCCTCGGACTTTTGGCCAGG | | SYSTPRTFGQGTKVE | | | |
| | | GGACCAAGGTGGAAATCAAA | | IK | | | |

| | | | SEQ | | SEQ | | SEQ | | SEQ | | SEQ | | SEQ | |
|---|---|---|---|---|---|---|---|---|---|---|---|---|---|---|
| | VL | VL | ID | VL | ID | VL | ID | VL | ID | VL | ID | VL | ID | VL |
| Clone ID | Germline | FR1 | NO: | CDR1 | NO: | FR2 | NO: | CDR2 | NO: | FR3 | NO: | CDR3 | NO: | FR4 |
| ADI-81731 | IGLV2-8 | QSVLTQ | 3582 | TGSSSD | 3830 | WYQQHP | 3989 | EVTKRP | 2449 | GVPDRF | 4261 | SSYAGS | 4453 | FGGGTK |
| | | PPSASG | | VGGYNY | | GKAPKL | | S | | SGSKSG | | NIVV | | LTVL |
| | | SPGQSV | | VS | | IIF | | | | NTASLT | | | | |
| | | TISC | | | | | | | | VSGLQA | | | | |
| | | | | | | | | | | EDEANY | | | | |
| | | | | | | | | | | YC | | | | |
| ADI-81750 | IGKV1-33 | EIPMTQ | 1912 | QASQHI | 3831 | WYQQKP | 2333 | DASNLE | 2416 | GVPSRF | 4262 | QHSRT | 4454 | FGPGTK |
| | | SPSSLS | | NNYLN | | GKAPKL | | T | | SGSRSG | | | | VEIK |
| | | ASVGDR | | | | LIS | | | | TDFSFT | | | | |
| | | VTITC | | | | | | | | ISSLQP | | | | |
| | | | | | | | | | | EDIATY | | | | |
| | | | | | | | | | | YC | | | | |
| ADI-81830 | IGLV1-44 | QSVLTQ | 3566 | SGSNSN | 3832 | WYQKLP | 3990 | TNNQRP | 4111 | GVPDRF | 2615 | AAWDDS | 4455 | FGGGTK |
| | | PPSASG | | IGSNTV | | GTAPKL | | S | | SGSKSG | | LSGHVV | | VTVL |
| | | TPGQRV | | S | | LIS | | | | TSASLA | | | | |
| | | TISC | | | | | | | | ISGLQS | | | | |
| | | | | | | | | | | EDEADY | | | | |
| | | | | | | | | | | YC | | | | |
| ADI-81774 | IGKV1-33 | DIRMTQ | 1937 | QASQDI | 3833 | WYQQKP | 2257 | DASSLE | 2434 | GVPSRF | 4263 | QQYDNL | 4456 | FGQGTK |
| | | SPSSLS | | TTYLN | | GKAPKL | | S | | SGSGSG | | PYT | | VDIK |
| | | ASVGDR | | | | LIY | | | | TDFTFT | | | | |
| | | VTITC | | | | | | | | ISRLQP | | | | |
| | | | | | | | | | | EDIATY | | | | |
| | | | | | | | | | | YC | | | | |
| ADI-81804 | IGLV1-44 | SYELTQ | 1962 | SGSSSN | 2217 | WYQQLP | 3991 | NKNRRP | 4112 | GVPDRF | 4264 | AAWDDS | 2813 | FGGGTK |
| | | PPSASG | | IGSNTV | | GTAPKL | | S | | SASKSG | | LNGVV | | LTVL |
| | | TPGQRV | | N | | FIY | | | | TSASLA | | | | |
| | | TISC | | | | | | | | ISGLQS | | | | |
| | | | | | | | | | | EDEADY | | | | |
| | | | | | | | | | | YC | | | | |
| ADI-81544 | IGLV1-40 | QSVLTQ | 1948 | TGSNSN | 2143 | WYQQLP | 3992 | VNSNRP | 4113 | GVPDRF | 4265 | QSYDSS | 2911 | FGGGTK |
| | | PPSVSG | | IGAGYD | | GTAPKL | | S | | SGSRSG | | LSGSL | | LTVL |
| | | APGQRV | | VH | | LIS | | | | TSAFLA | | | | |
| | | TISC | | | | | | | | ITGLQA | | | | |
| | | | | | | | | | | EDEADY | | | | |
| | | | | | | | | | | YC | | | | |
| ADI-81691 | IGKV1D-39 | EIPMTQ | 1912 | RASQSI | 2050 | WYQQKP | 2257 | AASKLH | 4114 | GVPSRF | 2626 | QQSYSS | 4384 | FGPGTK |
| | | SPSSLS | | SSYLN | | GKAPKL | | G | | RGSGSG | | PPWT | | VDIK |
| | | ASVGDR | | | | LIY | | | | TDFTLT | | | | |
| | | VTITC | | | | | | | | ISSLQP | | | | |
| | | | | | | | | | | EDFATY | | | | |
| | | | | | | | | | | YC | | | | |
| ADI-81571 | IGLV1-40 | QSVLTQ | 1948 | TGSNSN | 2143 | WYQQLP | 2331 | VNNNRP | 2471 | GVPDRF | 2622 | QSYDSS | 2826 | FGGGTK |
| | | PPSVSG | | IGAGYD | | GRAPKL | | S | | SGSKSD | | LSASV | | VTVL |
| | | APGQRV | | IVH | | ILIY | | | | TSASLA | | | | |
| | | TISC | | | | | | | | ITGLQA | | | | |
| | | | | | | | | | | EDEADY | | | | |
| | | | | | | | | | | YC | | | | |

| | | | | | | VL | VL Amino |
|---|---|---|---|---|---|---|---|
| | SEQ | | SEQ | | SEQ | Nucleotide | Acid |
| | ID | | ID | | ID | Sub- | Sub- |
| Clone ID | NO: | VL DNA | NO: | VL Protein | NO: | stitutions | stitutions |
| ADI-81731 | 2939 | CAGTCTGTGCTGACTCAGCCTCCCTCCGCGTCCGGGTCTCCTG | 4765 | QSVLTQPPSASGSPG | 5119 | 5 | 5 |
| | | GACAGTCAGTCACCATCTCCTGCACTGGAAGCAGCAGTGACGT | | QSVTISCTGSSSDVG | | | |
| | | TGGTGGTTACAACTATGTCTCCTGGTACCAACAACACCCAGGC | | GYNYVSWYQQHPGKA | | | |
| | | AAAGCCCCCAAACTCATCATTTTTGAGGTCACTAAGCGGCCCT | | PKLIIFEVTKRPSGV | | | |
| | | CAGGGGTCCCTGATCGTTTCTCTGGCTCCAAGTCTGGCAACAC | | PDRFSGSKSGNTASL | | | |
| | | GGCCTCCCTGACCGTCTCTGGGCTCCAGGCTGAGGATGAGGCT | | TVSGLQAEDEANYYC | | | |
| | | AATTATTACTGCAGCTCATATGCAGGCAGCAACATTGTGGTAT | | SSYAGSNIVVFGGGT | | | |
| | | TCGGCGGAGGGACCAAGCTCACCGTCCTA | | KLTVL | | | |
| ADI-81750 | 2942 | GAAATCCCAATGACCCAGTCTCCATCCTCCCTGTCTGCATCTG | 4766 | EIPMTQSPSSLSASV | 5120 | 5 | 5 |
| | | TAGGAGACAGAGTCACCATCACTTGCCAGGCGAGTCAGCACAT | | GDRVTITCQASQHIN | | | |
| | | AAACAACTATTTAAATTGGTATCAGCAGAAACCAGGGAAAGCC | | NYLNWYQQKPGKAPK | | | |
| | | CCTAAGCTCCTGATCTCCGATGCATCCAATTTGGAAACAGGGG | | LLISDASNLETGVPS | | | |
| | | TCCCATCAAGATTCAGTGGAAGTAGATCTGGGACAGATTTTAG | | RFSGSRSGTDFSFTI | | | |
| | | TTTCACCATCAGCAGCCTGCAGCCTGAAGATATTGCAACATAT | | SSLQPEDIATYYCQH | | | |
| | | TACTGTCAACACTCAAGGACTTTCGGCCCTGGGACCAAGGTGG | | SRTFGPGTKVEIK | | | |
| | | AAATCAAA | | | | | |
| ADI-81830 | 2947 | CAGTCTGTGCTGACTCAGCCACCCTCAGCGTCTGGGACCCCCG | 4767 | QSVLTQPPSASGTPG | 5121 | 5 | 5 |
| | | GGCAGAGGGTCACCATCTCTTGCTCTGGAAGCAACTCCAACAT | | QRVTISCSGSNSNIG | | | |
| | | CGGAAGTAATACTGTAAGCTGGTACCAGAAGCTCCCAGGAACG | | SNTVSWYQKLPGTAP | | | |
| | | GCCCCCAAACTCCTCATCTCTACTAATAATCAGCGGCCCTCAG | | KLLISTNNQRPSGVP | | | |
| | | GGGTCCCTGACCGATTCTCTGGCTCCAAGTCTGGCACCTCAGC | | DRFSGSKSGTSASLA | | | |
| | | CTCCCTGGCCATCAGTGGGCTCCAGTCTGAGGATGAGGCTGAT | | ISGLQSEDEADYYCA | | | |
| | | TATTACTGTGCAGCATGGGATGACAGCCTGAGTGGTCATGTGG | | AWDDSLSGHVVFGGG | | | |
| | | TATTCGGCGGAGGGACCAAGGTCACCGTCCTA | | TKVTVL | | | |
| ADI-81774 | 2944 | GACATCCGGATGACCCAGTCTCCATCCTCCCTGTCTGCATCTG | 4768 | DIRMTQSPSSLSASV | 5122 | 5 | 5 |
| | | TAGGAGACAGAGTCACCATCACTTGCCAGGCGAGTCAGGACAT | | GDRVTITCQASQDIT | | | |
| | | TACCACCTATTTAAATTGGTATCAGCAGAAACCAGGGAAAGCC | | TYLNWYQQKPGKAPK | | | |
| | | CCTAAGCTCCTGATCTACGATGCATCCAGTTTGGAATCAGGGG | | LLIYDASSLESGVPS | | | |
| | | TCCCATCAAGGTTCAGTGGAAGTGGATCTGGGACAGATTTTAC | | RFSGSGSGTDFTFTI | | | |
| | | TTTCACCATCAGCAGACTGCAGCCTGAAGATATTGCAACATAT | | SRLQPEDIATYYCQQ | | | |
| | | TACTGTCAACAATATGATAATCTCCCGTACACTTTTGGCCAGG | | YDNLPYTFGQGTKVD | | | |
| | | GGACCAAGGTGGATATCAAA | | IK | | | |
| ADI-81804 | 2939 | TCGTATGAGCTGACTCAGCCACCCTCAGCGTCTGGGACCCCCG | 4769 | SYELTQPPSASGTPG | 5123 | 5 | 5 |
| | | GGCAGAGGGTCACCATCTCTTGTTCTGGAAGCAGCTCCAACAT | | QRVTISCSGSSSNIG | | | |
| | | CGGAAGTAATACTGTGAACTGGTACCAGCAGCTCCCAGGAACG | | SNTVNWYQQLPGTAP | | | |
| | | GCCCCCAAACTCTTCATTTATAATAAGAATCGGCGGCCCTCAG | | KLFIYNKNRRPSGVP | | | |
| | | GGGTCCCTGACCGATTCTCTGCCTCCAAGTCTGGCACCTCTGC | | DRFSASKSGTSASLA | | | |
| | | CTCCCTGGCCATCAGTGGGCTCCAGTCTGAGGATGAGGCTGAT | | ISGLQSEDEADYYCA | | | |
| | | TATTACTGTGCAGCCTGGGATGACAGCCTGAATGGTGTGGTGT | | AWDDSLNGVVFGGGT | | | |
| | | TCGGCGGAGGGACCAAGCTCACCGTCCTA | | KLTVL | | | |
| ADI-81544 | 2939 | CAGTCTGTGTTGACGCAGCCGCCCTCAGTGTCTGGGGCCCCTG | 4770 | QSVLTQPPSVSGAPG | 5124 | 5 | 5 |
| | | GGCAGAGGGTCACCATCTCCTGCACTGGGAGCAACTCCAACAT | | QRVTISCTGSNSNIG | | | |
| | | CGGGGCAGGCTATGATGTACACTGGTACCAGCAACTTCCAGGG | | AGYDVHWYQQLPGTA | | | |
| | | ACAGCCCCCAAACTCCTCATCTCTGTTAACAGCAATCGGCCCT | | PKLLISVNSNRPSGV | | | |
| | | CAGGGGTCCCTGACCGATTCTCTGGCTCCAGGTCTGGCACCTC | | PDRFSGSRSGTSAFL | | | |
| | | AGCCTTCCTGGCCATCACTGGGCTCCAGGCTGAGGATGAGGCT | | AITGLQAEDEADYYC | | | |
| | | GATTATTACTGCCAGTCCTATGACAGCAGTCTCAGTGGTTCGC | | QSYDSSLSGSLFGGG | | | |
| | | TATTCGGCGGAGGCACCAAGCTGACCGTCCTA | | TKLTVL | | | |
| ADI-81691 | 2950 | GAAATCCCGATGACCCAGTCTCCATCCTCCCTGTCTGCATCAG | 4771 | EIPMTQSPSSLSASV | 5125 | 5 | 4 |
| | | TAGGAGACAGAGTCACCATCACTTGCCGGGCAAGTCAGAGCAT | | GDRVTITCRASQSIS | | | |
| | | TAGCAGCTATTTAAATTGGTATCAGCAGAAACCAGGGAAAGCC | | SYLNWYQQKPGKAPK | | | |
| | | CCTAAGCTCCTGATCTATGCTGCATCCAAATTGCACGGTGGGG | | LLIYAASKLHGGVPS | | | |
| | | TCCCATCAAGGTTCAGAGGCAGTGGATCTGGGACAGATTTCAC | | RFRGSGSGTDFTLTI | | | |
| | | TCTCACCATCAGCAGTCTGCAACCTGAAGATTTTGCAACTTAC | | SSLQPEDFATYYCQQ | | | |
| | | TACTGTCAACAGAGTTACAGCTCCCCTCCGTGGACGTTCGGCC | | SYSSPPWTFGPGTKV | | | |
| | | CAGGGACCAAGGTGGATATCAAA | | DIK | | | |
| ADI-81571 | 2947 | CAGTCTGTGTTGACGCAGCCGCCCTCAGTGTCTGGGGCCCCAG | 4772 | QSVLTQPPSVSGAPG | 5126 | 5 | 5 |
| | | GGCAGAGGGTCACCATCTCCTGCACTGGGAGCAACTCCAACAT | | QRVTISCTGSNSNIG | | | |
| | | CGGGGCAGGTTATGATGTGCACTGGTACCAGCAGCTTCCAGGA | | AGYDVHWYQQLPGRA | | | |
| | | AGAGCCCCCAAACTCCTCATCTATGTTAACAACAATCGGCCCT | | PKLLIYVNNNRPSGV | | | |
| | | CAGGGGTCCCTGACCGATTCTCTGGCTCCAAGTCTGACACCTC | | PDRFSGSKSDTSASL | | | |
| | | CGCCTCCCTGGCCATCACTGGGCTCCAGGCTGAGGATGAGGCT | | AITGLQAEDEADYYC | | | |
| | | GACTATTACTGCCAGTCCTATGACAGCAGCCTGAGTGCCTCGG | | QSYDSSLSASVFGGG | | | |
| | | TTTTCGGCGGAGGGACCAAGGTCACCGTCCTA | | TKVTVL | | | |

| | | | SEQ | | SEQ | | SEQ | | SEQ | | SEQ | | SEQ | |
|---|---|---|---|---|---|---|---|---|---|---|---|---|---|---|
| | VL | VL | ID | VL | ID | VL | ID | VL | ID | VL | ID | VL | ID | VL |
| Clone ID | Germline | FR1 | NO: | CDR1 | NO: | FR2 | NO: | CDR2 | NO: | FR3 | NO: | CDR3 | NO: | FR4 |
| ADI-81850 | IGKV1D-39 | EMTLTQ | 1914 | RASQSI | 3834 | WYQQKP | 2257 | AASTLH | 4115 | GVPSRF | 2692 | QQSYSN | 4457 | FGQGTR |
| | | SPSSLS | | SSYLH | | GKAPKL | | T | | SGGGSG | | PQVT | | LEIK |
| | | ASVGDR | | | | LIY | | | | TDFTLT | | | | |
| | | VTITC | | | | | | | | ISSLQP | | | | |
| | | | | | | | | | | EDFATY | | | | |
| | | | | | | | | | | YC | | | | |
| ADI-81628 | IGKV1D-39 | DIVMTQ | 1902 | RASQSV | 2234 | WYQQKP | 2263 | AASSLQ | 2391 | GVPSRF | 4266 | QQSYTT | 2833 | FGQGTK |
| | | SPSSLS | | SNYLN | | GKAPNL | | S | | SGSGSG | | PYT | | VEIK |
| | | ASVGDR | | | | LIY | | | | TDFTLT | | | | |
| | | VTITC | | | | | | | | ITSLQP | | | | |
| | | | | | | | | | | EDFATY | | | | |
| | | | | | | | | | | HC | | | | |
| ADI-81678 | IGKV1-5 | DIVMTQ | 3635 | RASQSI | 3812 | WYQQKP | 3993 | RASSLE | 4116 | GVPSRF | 4267 | QQSNSP | 4458 | FGQGTK |
| | | SPSTLS | | SNWLA | | GKVPKL | | S | | SGSRSG | | WT | | VEIK |
| | | ASVGDR | | | | LIS | | | | TEFTLT | | | | |
| | | VTITQ | | | | | | | | ISSLQP | | | | |
| | | | | | | | | | | DDFATY | | | | |
| | | | | | | | | | | YC | | | | |
| ADI-81738 | IGKV1D-39 | EIRLTQ | 3636 | RASQSI | 3816 | WYQQRP | 2309 | AASSLQ | 4117 | GVPSRF | 2534 | QQSFST | 4437 | FGQGTK |
| | | SPSSLS | | SSHLS | | GKAPKL | | T | | SGSGSG | | PPT | | VDIK |
| | | ASVRDR | | | | LIY | | | | TDFTLT | | | | |
| | | VTITC | | | | | | | | ISSLQP | | | | |
| | | | | | | | | | | EDFATY | | | | |
| | | | | | | | | | | YC | | | | |
| ADI-81667 | IGKV1-5 | DIRMTQ | 3610 | RASQSI | 2146 | WYQQKP | 3994 | KASTLK | 4118 | GVPSRF | 2532 | QQYNTY | 4459 | FGQGTK |
| | | SPSTLS | | STWLA | | GKAPNV | | S | | SGSGSG | | SEA | | VEIK |
| | | ASVGDR | | | | LIY | | | | TEFTLT | | | | |
| | | VTITC | | | | | | | | ISSLQP | | | | |
| | | | | | | | | | | DDFATY | | | | |
| | | | | | | | | | | YC | | | | |
| ADI-81832 | IGKV1-33 | EIVMTQ | 1891 | QASQDI | 3835 | WYQQKP | 2316 | DASNLE | 2397 | GVPSRF | 4268 | QQYDNL | 2700 | FGGGTK |
| | | SPSSLS | | RNYLN | | GKAPKV | | A | | SGSGSG | | PLT | | VEIK |
| | | ASVGDR | | | | LIY | | | | TDFSFT | | | | |
| | | VTITC | | | | | | | | ISSLQP | | | | |
| | | | | | | | | | | EDIATY | | | | |
| | | | | | | | | | | YC | | | | |
| ADI-81711 | IGKV1-33 | EITMTQ | 3637 | QASQDI | 3835 | WYQQKP | 2316 | AASDLE | 4119 | GVPSRF | 4269 | QQYDNL | 4460 | FGQGTK |
| | | SPSSLS | | RNYLN | | GKAPKV | | T | | SGSGSG | | YT | | VEIK |
| | | ASVGDR | | | | LIY | | | | TDFTLT | | | | |
| | | VTITQ | | | | | | | | ISSLQP | | | | |
| | | | | | | | | | | EDIATY | | | | |
| | | | | | | | | | | YC | | | | |
| ADI-81762 | IGKV1D-39 | DIPMTQ | 1947 | RASQSI | 2088 | WYQQKP | 3995 | AASTLQ | 2392 | GVPSRF | 4270 | QQTYIP | 4461 | FGQGTK |
| | | SPSSLS | | NSYLN | | GKAPKF | | S | | SGSGSE | | PRT | | VEIK |
| | | ASVGDR | | | | LIY | | | | THFTLT | | | | |
| | | VTITQ | | | | | | | | ISSLQP | | | | |
| | | | | | | | | | | EDFATY | | | | |
| | | | | | | | | | | YC | | | | |

| | | | | | | VL | VL Amino |
|---|---|---|---|---|---|---|---|
| | SEQ | | SEQ | | SEQ | Nucleotide | Acid |
| | ID | | ID | | ID | Sub- | Sub- |
| Clone ID | NO: | VL DNA | NO: | VL Protein | NO: | stitutions | stitutions |
| ADI-81850 | 2940 | GAAATGACACTGACCCAGTCTCCATCCTCCCTGTCTGCATCTG | 4773 | EMTLTQSPSSLSASV | 5127 | 5 | 5 |
| | | TAGGAGACAGAGTCACAATCACTTGCCGGGCAAGTCAGAGCAT | | GDRVTITCRASQSIS | | | |
| | | TAGCAGCTATTTACATTGGTATCAGCAGAAACCAGGGAAAGCC | | SYLHWYQQKPGKAPK | | | |
| | | CCTAAGCTCCTGATCTATGCTGCATCCACTTTGCACACTGGGG | | LLIYAASTLHTGVPS | | | |
| | | TCCCATCAAGGTTCAGTGGCGGTGGATCTGGGACAGATTTCAC | | RFSGGGSGTDFTLTI | | | |
| | | TCTCACCATCAGCAGTCTGCAACCTGAAGATTTTGCAACTTAC | | SSLQPEDFATYYCQQ | | | |
| | | TACTGTCAACAGAGTTACAGTAACCCTCAGGTCACCTTCGGCC | | SYSNPQVTFGQGTRL | | | |
| | | AAGGGACACGACTGGAGATTAAA | | EIK | | | |
| ADI-81628 | 2937 | GACATTGTGATGACCCAGTCTCCATCCTCCCTGTCTGCGTCTG | 4774 | DIVMTQSPSSLSASV | 5128 | 5 | 5 |
| | | TAGGAGACAGAGTCACCATCACTTGCCGGGCAAGTCAGAGCGT | | GDRVTITCRASQSVS | | | |
| | | TAGCAACTATTTAAATTGGTATCAGCAGAAACCAGGGAAAGCC | | NYLNWYQQKPGKAPN | | | |
| | | CCTAACCTCCTGATCTATGCTGCATCCAGTTTGCAAAGTGGGG | | LLIYAASSLQSGVPS | | | |
| | | TCCCATCAAGGTTCAGTGGCAGTGGATCTGGGACAGACTTCAC | | RFSGSGSGTDFTLTI | | | |
| | | TCTCACCATCACCAGTCTGCAACCTGAAGATTTTGCAACTTAC | | TSLQPEDFATYHCQQ | | | |
| | | CACTGTCAGCAGAGTTACACTACCCCGTACACTTTTGGCCAGG | | SYTTPYTFGQGTKVE | | | |
| | | GGACCAAGGTGGAAATCAAA | | IK | | | |
| ADI-81678 | 2937 | GATATTGTGATGACCCAGTCTCCTTCCACCCTGTCTGCATCTG | 4775 | DIVMTQSPSTLSASV | 5129 | 5 | 5 |
| | | TAGGAGACAGAGTCACCATCACTTGCCGGGCCAGTCAGAGTAT | | GDRVTITCRASQSIS | | | |
| | | TAGTAACTGGTTGGCCTGGTATCAGCAGAAACCAGGGAAAGTC | | NWLAWYQQKPGKVPK | | | |
| | | CCTAAACTCCTGATCTCTAGGGCGTCTAGTTTAGAAAGTGGGG | | LLISRASSLESGVPS | | | |
| | | TCCCATCAAGGTTCAGCGGCAGTAGATCTGGGACAGAATTCAC | | RFSGSRSGTEFTLTI | | | |
| | | TCTCACCATCAGCAGCCTGCAGCCTGATGATTTTGCAACTTAT | | SSLQPDDFATYYCQQ | | | |
| | | TACTGCCAACAGAGTAATAGTCCGTGGACGTTCGGCCAAGGGA | | SNSPWTFGQGTKVEI | | | |
| | | CCAAGGTGGAGATCAAA | | K | | | |
| ADI-81738 | 2944 | GAAATCCGGTTGACCCAGTCTCCATCCTCCCTGTCTGCATCTG | 4776 | EIRLTQSPSSLSASV | 5130 | 5 | 5 |
| | | TAAGAGACAGAGTCACCATCACTTGCCGGGCAAGTCAGAGCAT | | RDRVTITCRASQSIS | | | |
| | | TAGCAGCCATTTAAGTTGGTATCAGCAGAGACCAGGGAAAGCC | | SHLSWYQQRPGKAPK | | | |
| | | CCTAAGCTCCTGATCTATGCTGCATCCAGTTTGCAAACTGGGG | | LLIYAASSLQTGVPS | | | |
| | | TCCCATCAAGGTTCAGTGGCAGTGGATCTGGGACAGATTTCAC | | RFSGSGSGTDFTLTI | | | |
| | | TCTCACCATCAGCAGTCTGCAACCTGAAGATTTTGCAACTTAC | | SSLQPEDFATYYCQQ | | | |
| | | TACTGTCAACAGAGTTTCAGTACCCCTCCCACTTTTGGCCAGG | | SFSTPPTFGQGTKVD | | | |
| | | GGACCAAGGTGGATATCAAA | | IK | | | |
| ADI-81667 | 2937 | GACATCCGGATGACCCAGTCTCCTTCCACCCTGTCTGCATCTG | 4777 | DIRMTQSPSTLSASV | 5131 | 5 | 5 |
| | | TAGGAGACAGAGTCACCATCACTTGCCGGGCCAGTCAGAGTAT | | GDRVTITCRASQSIS | | | |
| | | TAGTACCTGGTTGGCCTGGTATCAGCAGAAACCAGGGAAAGCC | | TWLAWYQQKPGKAPN | | | |
| | | CCTAATGTCCTGATCTATAAGGCGTCTACTTTAAAAAGTGGGG | | VLIYKASTLKSGVPS | | | |
| | | TCCCATCAAGGTTCAGCGGCAGTGGATCTGGGACAGAATTCAC | | RFSGSGSGTEFTLTI | | | |
| | | TCTCACCATCAGCAGCCTGCAGCCTGATGATTTTGCAACTTAT | | SSLQPDDFATYYCQQ | | | |
| | | TACTGCCAACAGTATAATACTTATTCTGAAGCGTTCGGCCAAG | | YNTYSEAFGQGTKVE | | | |
| | | GGACCAAGGTGGAGATCAAA | | IK | | | |
| ADI-81832 | 2936 | GAGATTGTGATGACCCAGTCTCCATCCTCCCTGTCTGCATCTG | 4778 | EIVMTQSPSSLSASV | 5132 | 5 | 4 |
| | | TAGGAGACAGAGTCACCATCACTTGCCAGGCGAGTCAGGACAT | | GDRVTITCQASQDIR | | | |
| | | TAGAAACTATTTAAATTGGTATCAGCAGAAACCAGGGAAAGCC | | NYLNWYQQKPGKAPK | | | |
| | | CCTAAGGTGCTGATCTACGATGCATCCAATTTGGAAGCAGGGG | | VLIYDASNLEAGVPS | | | |
| | | TCCCATCAAGATTCAGTGGAAGTGGATCTGGGACAGATTTTTC | | RFSGSGSGTDFSFTI | | | |
| | | TTTCACCATCAGCAGCCTGCAGCCTGAAGATATTGCAACATAT | | SSLQPEDIATYYCQQ | | | |
| | | TACTGTCAACAGTATGATAATCTTCCGCTCACTTTCGGCGGAG | | YDNLPLTFGGGTKVE | | | |
| | | GGACCAAGGTGGAGATCAAA | | IK | | | |
| ADI-81711 | 2937 | GAAATCACAATGACCCAGTCTCCATCCTCCCTGTCTGCATCTG | 4779 | EITMTQSPSSLSASV | 5133 | 5 | 5 |
| | | TAGGAGACAGAGTCACCATCACTTGCCAGGCGAGTCAGGACAT | | GDRVTITCQASQDIR | | | |
| | | TAGGAACTATTTAAATTGGTATCAGCAGAAACCAGGGAAAGCC | | NYLNWYQQKPGKAPK | | | |
| | | CCTAAGGTCCTGATCTACGCTGCATCCGATTTGGAAACAGGGG | | VLIYAASDLETGVPS | | | |
| | | TCCCGTCAAGGTTCAGTGGAAGTGGATCTGGGACAGATTTTAC | | RFSGSGSGTDFTLTI | | | |
| | | TCTCACCATCAGCAGCCTGCAGCCTGAAGATATTGCAACATAT | | SSLQPEDIATYYCQQ | | | |
| | | TACTGTCAACAGTATGATAATCTTTACACTTTTGGCCAGGGGA | | YDNLYTFGQGTKVEI | | | |
| | | CCAAGGTGGAAATCAAA | | K | | | |
| ADI-81762 | 2937 | GACATCCCGATGACCCAGTCTCCATCCTCCCTGTCTGCATCTG | 4780 | DIPMTQSPSSLSASV | 5134 | 5 | 5 |
| | | TAGGAGACAGAGTCACCATCACTTGCCGGGCAAGTCAGAGCAT | | GDRVTITCRASQSIN | | | |
| | | TAACAGCTATTTAAATTGGTATCAGCAGAAACCAGGGAAAGCC | | SYLNWYQQKPGKAPK | | | |
| | | CCTAAGTTCCTGATCTATGCTGCCTCCACTCTTCAAAGTGGGG | | FLIYAASTLQSGVPS | | | |
| | | TCCCATCACGCTTCAGTGGCAGTGGATCTGAGACACATTTCAC | | RFSGSGSETHFTLTI | | | |
| | | TCTCACCATCAGCAGTCTGCAACCTGAAGATTTTGCAACTTAC | | SSLQPEDFATYYCQQ | | | |
| | | TACTGTCAACAGACTTACATTCCCCCTCGAACGTTCGGCCAAG | | TYIPPRTFGQGTKVE | | | |
| | | GGACCAAGGTGGAAATCAAA | | IK | | | |

| | | | SEQ | | SEQ | | SEQ | | SEQ | | SEQ | | SEQ | |
|---|---|---|---|---|---|---|---|---|---|---|---|---|---|---|
| | VL | VL | ID | VL | ID | VL | ID | VL | ID | VL | ID | VL | ID | VL |
| Clone ID | Germline | FR1 | NO: | CDR1 | NO: | FR2 | NO: | CDR2 | NO: | FR3 | NO: | CDR3 | NO: | FR4 |
| ADI-81626 | IGKV4-1 | DIPMTQ | 1978 | KTSQSV | 3836 | WYQQKP | 2290 | WASTRE | 2422 | GVPDRF | 2619 | QQCSVT | 4462 | FGQGTK |
| | | SPDSLA | | LDRSDN | | GQPPKL | | S | | SGSGSG | | PPMCS | | VEIK |
| | | VSLGER | | RNYLA | | LIY | | | | TDFTLT | | | | |
| | | ATINC | | | | | | | | ISSLQA | | | | |
| | | | | | | | | | | EDVAVY | | | | |
| | | | | | | | | | | YC | | | | |
| ADI-81803 | IGKV1D-39 | DIQMTQ | 1878 | RASQNI | 3837 | WYQQKP | 2316 | AASSLQ | 2391 | GVPSRF | 2551 | QQSYSS | 4463 | FGQGTK |
| | | SPSSLS | | NTYLN | | GKAPKV | | S | | TGSGSG | | PRT | | VEIK |
| | | ASVGDR | | | | LIY | | | | TDFTLT | | | | |
| | | VTITC | | | | | | | | ISSLQP | | | | |
| | | | | | | | | | | EDFATY | | | | |
| | | | | | | | | | | YC | | | | |
| ADI-81882 | IGKV1-33 | DITLTQ | 3638 | QASQDI | 3838 | WYQQKP | 3942 | DVSNLE | 4102 | GVPSRF | 2537 | QHYDNL | 4446 | FGPGTK |
| | | SPSSLS | | NNFLN | | GKAPKL | | T | | SGSGSG | | KFT | | VEIK |
| | | ASVGDR | | | | LIF | | | | TDFTFT | | | | |
| | | VTFTC | | | | | | | | ISSLQP | | | | |
| | | | | | | | | | | EDIATY | | | | |
| | | | | | | | | | | YC | | | | |
| ADI-81911 | IGKV1D-39 | EIVMTQ | 1891 | RASQSI | 3839 | WYQQKP | 2257 | GASSLQ | 2403 | GVPSRI | 4271 | QQSYST | 4464 | FGGGTK |
| | | SPSSLS | | YNYLN | | GKAPKL | | S | | SGSGSG | | PGT | | VDIK |
| | | ASVGDR | | | | LIY | | | | TDFTLT | | | | |
| | | VTITC | | | | | | | | ISSLQP | | | | |
| | | | | | | | | | | EDFATY | | | | |
| | | | | | | | | | | YC | | | | |
| ADI-81557 | IGKV3-20 | EIVLTQ | 3581 | RASQSV | 2173 | WYQQKP | 3996 | DASSRA | 4120 | GIPDRF | 4272 | QQYGSS | 4465 | FGQGTK |
| | | SPGTLS | | SSNYLA | | GQAPRL | | A | | SGSGSG | | PGS | | VEIK |
| | | LSPGER | | | | LIS | | | | TDFTLT | | | | |
| | | ATLSC | | | | | | | | IGRLEP | | | | |
| | | | | | | | | | | EDFAVY | | | | |
| | | | | | | | | | | YC | | | | |
| ADI-81886 | IGKV4-1 | DMTLTQ | 3639 | KSSQSV | 3840 | WYQQKP | 3997 | WASTRE | 2422 | GVPDRF | 4273 | QQSYSP | 4466 | FGQGTK |
| | | SPDSLA | | LSSSNN | | GRPPKL | | S | | SGGGSG | | PYT | | VEIK |
| | | VSLGER | | KNYLT | | LIY | | | | TDFTLS | | | | |
| | | ATINC | | | | | | | | ISSLQA | | | | |
| | | | | | | | | | | EDVAVY | | | | |
| | | | | | | | | | | YC | | | | |
| ADI-81819 | IGKV1-33 | EIVMTQ | 1891 | QASQDI | 3841 | WYQQKP | 2257 | DASNLE | 2416 | GVPSRF | 4274 | QQYYNL | 4467 | FGGGTK |
| | | SPSSLS | | FNYLT | | GKAPKL | | T | | SGSGSG | | PPT | | VEIK |
| | | ASVGDR | | | | LIY | | | | TDFTLT | | | | |
| | | VTITC | | | | | | | | ISSLQP | | | | |
| | | | | | | | | | | EDIATY | | | | |
| | | | | | | | | | | SC | | | | |
| ADI-81621 | IGLV3-21 | QHVLTQ | 3640 | GVNNFG | 3842 | WYQQKP | 2283 | DDSDRP | 2399 | GIPERF | 2660 | QVWDST | 4468 | FGGGTK |
| | | PPSVSV | | SKSVP | | GQAPVL | | S | | SGSNSG | | SDHWV | | LTVL |
| | | APGQTA | | | | VVY | | | | NTATLT | | | | |
| | | SITC | | | | | | | | ISRVEV | | | | |
| | | | | | | | | | | GDEADY | | | | |
| | | | | | | | | | | YC | | | | |

| | | | | | | VL | VL Amino |
|---|---|---|---|---|---|---|---|
| | SEQ | | SEQ | | SEQ | Nucleotide | Acid |
| | ID | | ID | | ID | Sub- | Sub- |
| Clone ID | NO: | VL DNA | NO: | VL Protein | NO: | stitutions | stitutions |
| ADI-81626 | 2937 | GACATCCCGATGACCCAGTCTCCAGACTCCCTGGCTGTGTCTC | 4781 | DIPMTQSPDSLAVSL | 5135 | 5 | 5 |
| | | TGGGCGAGAGGGCCACCATCAACTGCAAGACCAGCCAGAGTGT | | GERATINCKTSQSVL | | | |
| | | TTTAGACAGGTCCGACAATAGGAACTACTTAGCTTGGTACCAG | | DRSDNRNYLAWYQQK | | | |
| | | CAGAAACCAGGACAGCCTCCTAAGCTGCTCATTTACTGGGCAT | | PGQPPKLLIYWASTR | | | |
| | | CTACGCGGGAATCCGGGGTCCCTGACCGATTCAGTGGCAGCGG | | ESGVPDRFSGSGSGT | | | |
| | | GTCTGGGACAGATTTCACTCTCACCATCAGCAGCCTGCAGGCT | | DFTLTISSLQAEDVA | | | |
| | | GAAGATGTGGCAGTTTATTACTGTCAACAATGTTCTGTTACTC | | VYYCQQCSVTPPMCS | | | |
| | | CTCCGATGTGCAGTTTTGGCCAGGGGACCAAGGTGGAAATCAA | | FGQGTKVEIK | | | |
| | | A | | | | | |
| ADI-81803 | 2937 | GACATCCAGATGACCCAGTCTCCATCCTCCCTGTCTGCATCTG | 4782 | DIQMTQSPSSLSASV | 5136 | 5 | 5 |
| | | TAGGAGACAGAGTCACCATCACTTGCCGGGCAAGTCAGAACAT | | GDRVTITCRASQNIN | | | |
| | | TAACACCTATTTAAATTGGTATCAGCAGAAACCAGGGAAAGCC | | TYLNWYQQKPGKAPK | | | |
| | | CCTAAGGTCCTGATCTATGCTGCATCCAGTTTGCAAAGTGGGG | | VLIYAASSLQSGVPS | | | |
| | | TCCCGTCAAGGTTCACTGGCAGTGGATCTGGGACAGATTTCAC | | RFTGSGSGTDFTLTI | | | |
| | | TCTCACCATCAGCAGTCTGCAACCTGAAGATTTTGCAACTTAC | | SSLQPEDFATYYCQQ | | | |
| | | TACTGTCAACAGAGTTACAGTTCCCCTCGGACGTTCGGCCAAG | | SYSSPRTFGQGTKVE | | | |
| | | GGACCAAGGTGGAAATCAAA | | IK | | | |
| ADI-81882 | 2942 | GACATCACACTGACGCAGTCTCCATCCTCCCTGTCTGCATCTG | 4783 | DITLTQSPSSLSASV | 5137 | 5 | 5 |
| | | TAGGAGACAGAGTCACCTTCACTTGCCAGGCGAGTCAGGACAT | | GDRVTFTCQASQDIN | | | |
| | | TAACAACTTTTTAAATTGGTATCAACAAAAACCAGGGAAAGCC | | NFLNWYQQKPGKAPK | | | |
| | | CCTAAACTCCTGATCTTCGATGTATCGAATTTGGAAACAGGGG | | LLIFDVSNLETGVPS | | | |
| | | TCCCATCAAGATTCAGTGGCAGTGGATCTGGGACAGATTTTAC | | RFSGSGSGTDFTFTI | | | |
| | | TTTCACCATCAGCAGCCTGCAGCCTGAAGATATTGCAACATAT | | SSLQPEDIATYYCQH | | | |
| | | TACTGTCAACACTATGATAATCTCAAATTCACTTTCGGCCCTG | | YDNLKFTFGPGTKVE | | | |
| | | GGACCAAGGTGGAAATCAAA | | IK | | | |
| ADI-81911 | 2938 | GAAATTGTGATGACCCAGTCTCCATCCTCCCTGTCTGCATCTG | 4784 | EIVMTQSPSSLSASV | 5138 | 5 | 4 |
| | | TAGGAGACAGAGTCACCATCACTTGCCGGGCAAGTCAGAGCAT | | GDRVTITCRASQSIY | | | |
| | | TTACAACTACTTAAATTGGTATCAGCAGAAACCAGGGAAAGCC | | NYLNWYQQKPGKAPK | | | |
| | | CCTAAGCTCCTGATCTATGGTGCATCCAGTTTGCAAAGTGGGG | | LLIYGASSLQSGVPS | | | |
| | | TCCCATCAAGGATCAGTGGCAGTGGATCTGGGACAGATTTCAC | | RISGSGSGTDFTLTI | | | |
| | | TCTCACCATCAGCAGTCTGCAACCTGAAGATTTTGCAACTTAC | | SSLQPEDFATYYCQQ | | | |
| | | TACTGTCAACAGAGTTACAGTACCCCGGGCACTTTCGGCGGAG | | SYSTPGTFGGGTKVD | | | |
| | | GGACCAAGGTGGATATCAAA | | IK | | | |
| ADI-81557 | 2937 | GAAATTGTGTTGACCCAGTCTCCAGGCACCCTGTCTTTGTCTC | 4785 | EIVLTQSPGTLSLSP | 5139 | 5 | 5 |
| | | CAGGGGAAAGAGCCACCCTCTCCTGCAGGGCCAGTCAGAGTGT | | GERATLSCRASQSVS | | | |
| | | TAGCAGCAACTACTTAGCCTGGTACCAGCAGAAACCTGGCCAG | | SNYLAWYQQKPGQAP | | | |
| | | GCTCCCAGGCTCCTCATCTCTGATGCATCCAGCAGGGCCGCTG | | RLLISDASSRAAGIP | | | |
| | | GCATCCCAGACAGGTTCAGTGGCAGTGGGTCTGGGACAGACTT | | DRFSGSGSGTDFTLT | | | |
| | | CACTCTCACCATCGGCAGACTGGAGCCTGAAGATTTTGCAGTG | | IGRLEPEDFAVYYCQ | | | |
| | | TATTACTGTCAGCAGTATGGTAGCTCACCTGGCAGTTTTGGCC | | QYGSSPGSFGQGTKV | | | |
| | | AGGGGACCAAGGTGGAAATCAAA | | EIK | | | |
| ADI-81886 | 2937 | GACATGACACTCACGCAGTCTCCAGACTCCCTGGCTGTGTCTC | 4786 | DMTLTQSPDSLAVSL | 5140 | 5 | 5 |
| | | TGGGCGAGAGGGCCACCATCAACTGCAAGTCCAGCCAGAGTGT | | GERATINCKSSQSVL | | | |
| | | TTTATCCAGCTCCAACAATAAGAACTACTTAACTTGGTACCAG | | SSSNNKNYLTWYQQK | | | |
| | | CAAAAACCGGGACGGCCTCCTAAGCTGCTCATTTACTGGGCTT | | PGRPPKLLIYWASTR | | | |
| | | CCACCCGGGAATCCGGGGTCCCTGACCGATTCAGTGGCGGCGG | | ESGVPDRFSGGGSGT | | | |
| | | GTCTGGGACAGATTTCACTCTCTCCATCAGCAGTCTGCAGGCT | | DFTLSISSLQAEDVA | | | |
| | | GAGGATGTGGCAGTTTATTACTGTCAGCAATCTTATAGTCCTC | | VYYCQQSYSPPYTFG | | | |
| | | CGTACACTTTTGGCCAGGGGACCAAGGTGGAAATCAAA | | QGTKVEIK | | | |
| ADI-81819 | 2936 | GAAATTGTGATGACCCAGTCTCCATCCTCCCTGTCTGCATCTG | 4787 | EIVMTQSPSSLSASV | 5141 | 5 | 4 |
| | | TAGGAGACAGAGTCACCATCACTTGCCAGGCGAGTCAGGACAT | | GDRVTITCQASQDIF | | | |
| | | TTTCAACTATTTAACTTGGTATCAACAGAAGCCAGGGAAAGCC | | NYLTWYQQKPGKAPK | | | |
| | | CCTAAGCTCCTGATCTACGATGCATCCAATTTGGAAACAGGGG | | LLIYDASNLETGVPS | | | |
| | | TCCCATCAAGGTTCAGTGGAAGTGGATCTGGGACAGATTTTAC | | RFSGSGSGTDFTLTI | | | |
| | | TTTAACCATCAGCAGCCTGCAGCCTGAAGATATTGCAACATAT | | SSLQPEDIATYSCQQ | | | |
| | | TCCTGTCAACAGTATTATAATCTCCCTCCGACTTTCGGCGGAG | | YYNLPPTFGGGTKVE | | | |
| | | GGACCAAGGTGGAGATCAAA | | IK | | | |
| ADI-81621 | 2939 | CAGCATGTGCTGACTCAGCCACCCTCGGTGTCAGTGGCCCCAG | 4788 | EIVMTQSPSSLSASV | 5141 | 5 | 5 |
| | | GACAGACGGCCAGCATCACCTGTGGGGTAAACAACTTTGGAAG | | GDRVTITCQASQDIF | | | |
| | | TAAAAGTGTACCCTGGTACCAGCAGAAGCCAGGCCAGGCCCCT | | NYLTWYQQKPGKAPK | | | |
| | | GTCCTGGTCGTCTATGATGATAGCGACCGGCCCTCAGGGATCC | | LLIYDASNLETGVPS | | | |
| | | CTGAGCGATTCTCTGGCTCCAACTCTGGGAACACGGCCACCCT | | RFSGSGSGTDFTLTI | | | |
| | | GACCATCAGCAGGGTCGAAGTCGGGGATGAGGCCGACTATTAC | | SSLQPEDIATYSCQQ | | | |
| | | TGTCAGGTGTGGGATAGTACTAGTGATCATTGGGTGTTCGGCG | | YYNLPPTFGGGTKVE | | | |
| | | GAGGGACCAAGCTCACCGTCCTA | | IK | | | |

| | | | SEQ | | SEQ | | SEQ | | SEQ | | SEQ | | SEQ | |
|---|---|---|---|---|---|---|---|---|---|---|---|---|---|---|
| | VL | VL | ID | VL | ID | VL | ID | VL | ID | VL | ID | VL | ID | VL |
| Clone ID | Germline | FR1 | NO: | CDR1 | NO: | FR2 | NO: | CDR2 | NO: | FR3 | NO: | CDR3 | NO: | FR4 |
| ADI-81821 | IGLV1-40 | QSVLTQ | 1948 | TGSNSN | 2143 | WYQQLP | 3998 | INSNRP | 4121 | GVPDRF | 2599 | QSYDSS | 2908 | FGGGTK |
| | | PPSVSG | | IGAGYD | | GTAPTL | | S | | SGSKSG | | LSGSV | | VTVL |
| | | APGQRV | | VH | | LIS | | | | TSASLA | | | | |
| | | TISC | | | | | | | | ITGLQA | | | | |
| | | | | | | | | | | EDEADY | | | | |
| | | | | | | | | | | YC | | | | |
| ADI-81857 | IGKV1-12 | DIPLTQ | 3641 | RASQDI | 3843 | WYQQKP | 2294 | AATTLQ | 4122 | GVPSRF | 2534 | QQANTF | 4469 | FGQGTK |
| | | SPSSVS | | SGWLA | | GKAPRL | | S | | SGSGSG | | PRT | | VDIK |
| | | ASVGDR | | | | LIY | | | | TDFTLT | | | | |
| | | VTITC | | | | | | | | ISSLQP | | | | |
| | | | | | | | | | | EDFATY | | | | |
| | | | | | | | | | | YC | | | | |
| ADI-81909 | IGKV1D-39 | DIPVTQ | 3642 | RASQSI | 2090 | WYQHKP | 3924 | AVSSLQ | 4123 | GVPSRF | 4275 | QQNYNS | 4470 | FGGGTK |
| | | SPSSLS | | SSFLN | | GKAPKL | | S | | SGSEYG | | PLT | | VEIK |
| | | ASVGDR | | | | LIY | | | | TDFTLT | | | | |
| | | VTITC | | | | | | | | ISSLQP | | | | |
| | | | | | | | | | | EDFATY | | | | |
| | | | | | | | | | | YC | | | | |
| ADI-81564 | IGLV1-40 | QSVLTQ | 1948 | TGSNSN | 2143 | WYQQLP | 2314 | DNTNRP | 2450 | GVPDRF | 4276 | QSYDSS | 2872 | FGGGTQ |
| | | PPSVSG | | IGAGYD | | GTAPKL | | S | | SGSKSG | | LIGSL | | LTVL |
| | | APGQRV | | VH | | LIY | | | | TSASLT | | | | |
| | | TISC | | | | | | | | ITGLQA | | | | |
| | | | | | | | | | | EDEADY | | | | |
| | | | | | | | | | | YC | | | | |
| ADI-81606 | IGKV1D-39 | DIQMTQ | 1878 | RASQSI | 2134 | WYQQKP | 2257 | AAFILQ | 4124 | GVPSRF | 2534 | QQSYSA | 2775 | FGRGTK |
| | | SPSSLS | | SRYLN | | GKAPKL | | S | | SGSGSG | | PPWT | | VDIK |
| | | ASVGDR | | | | LIY | | | | TDFTLT | | | | |
| | | VTITC | | | | | | | | ISSLQP | | | | |
| | | | | | | | | | | EDFATY | | | | |
| | | | | | | | | | | YC | | | | |
| ADI-81782 | IGKV1-NL1 | DIRVTQ | 3618 | RASQAI | 2051 | WYQQKP | 2259 | AASTLE | 2398 | GVPPRF | 4277 | QQYYTF | 4471 | FGQGTK |
| | | SPSSLS | | SNSLA | | GKAPKL | | S | | SGSGSG | | RT | | VDIK |
| | | ASVGDR | | | | LLY | | | | TDFTLT | | | | |
| | | VTITC | | | | | | | | ISSLQP | | | | |
| | | | | | | | | | | EDFATY | | | | |
| | | | | | | | | | | YC | | | | |
| ADI-81627 | IGKV3-11 | EIVMTQ | 1996 | RASQSV | 3844 | WYQQKP | 2258 | DTSNRA | 4125 | GIPARF | 2607 | QLRNNW | 4472 | FGGGTK |
| | | SPATLS | | TNYLA | | GQAPRL | | T | | SGSGSG | | PPGALT | | VEIK |
| | | LSPGER | | | | LIY | | | | TDFTLT | | | | |
| | | ATLSC | | | | | | | | ISSLEP | | | | |
| | | | | | | | | | | EDFAVY | | | | |
| | | | | | | | | | | YC | | | | |
| ADI-81609 | IGKV3D-15 | DITMTQ | 3643 | RASQSV | 3845 | WYQQKP | 2258 | GATTRA | 4126 | GIPARF | 4278 | QQYNNW | 4473 | FGGGTK |
| | | TPATLS | | SGNLA | | GQAPRL | | S | | SGSESG | | LT | | VEIK |
| | | VSPGER | | | | LIY | | | | TEFTLT | | | | |
| | | ATLSC | | | | | | | | ISSLQS | | | | |
| | | | | | | | | | | EDFAVY | | | | |
| | | | | | | | | | | YC | | | | |

| | | | | | | VL | VL Amino |
|---|---|---|---|---|---|---|---|
| | SEQ | | SEQ | | SEQ | Nucleotide | Acid |
| | ID | | ID | | ID | Sub- | Sub- |
| Clone ID | NO: | VL DNA | NO: | VL Protein | NO: | stitutions | stitutions |
| ADI-81821 | 2947 | CAGTCTGTCTTGACGCAGCCGCCCTCAGTGTCTGGGGCCCCAG | 4789 | QSVLTQPPSVSGAPG | 5142 | 5 | 4 |
| | | GGCAGAGGGTCACCATCTCCTGCACTGGGAGCAACTCCAACAT | | QRVTISCTGSNSNIG | | | |
| | | CGGGGCAGGTTATGATGTACACTGGTACCAGCAGCTTCCAGGA | | AGYDVHWYQQLPGTA | | | |
| | | ACAGCCCCCACACTCCTCATCTCTATTAACAGCAATCGGCCCT | | PTLLISINSNRPSGV | | | |
| | | CAGGGGTCCCTGACCGATTCTCTGGCTCCAAGTCTGGCACCTC | | PDRFSGSKSGTSASL | | | |
| | | AGCCTCCCTGGCCATCACTGGGCTCCAGGCTGAGGATGAGGCT | | AITGLQAEDEADYYC | | | |
| | | GATTATTACTGCCAGTCCTATGACAGCAGCCTGAGTGGTTCGG | | QSYDSSLSGSVFGGG | | | |
| | | TATTCGGCGGAGGGACCAAGGTCACCGTCCTA | | TKVTVL | | | |
| ADI-81857 | 2944 | GACATCCCACTCACCCAGTCTCCATCTTCCGTGTCTGCATCTG | 4790 | DIPLTQSPSSVSASV | 5143 | 5 | 5 |
| | | TGGGAGACAGAGTCACCATCACTTGTCGGGCGAGTCAGGATAT | | GDRVTITCRASQDIS | | | |
| | | TAGCGGCTGGTTAGCCTGGTATCAGCAGAAACCAGGGAAAGCC | | GWLAWYQQKPGKAPR | | | |
| | | CCTAGGCTCCTGATCTATGCTGCAACCACTTTGCAAAGTGGGG | | LLIYAATTLQSGVPS | | | |
| | | TCCCATCAAGGTTCAGCGGCAGTGGCTCTGGGACAGATTTCAC | | RFSGSGSGTDFTLTI | | | |
| | | TCTCACCATCAGCAGCCTGCAGCCTGAAGATTTTGCAACTTAC | | SSLQPEDFATYYCQQ | | | |
| | | TATTGTCAACAGGCTAACACTTTCCCCCGGACGTTCGGCCAAG | | ANTFPRTFGQGTKVD | | | |
| | | GGACCAAGGTGGATATCAAA | | IK | | | |
| ADI-81909 | 2936 | GACATCCCGGTGACCCAGTCTCCATCCTCCCTGTCTGCATCTG | 4791 | DIPVTQSPSSLSASV | 5144 | 5 | 5 |
| | | TAGGAGACAGAGTCACCATCACTTGCCGGGCAAGTCAGAGCAT | | GDRVTITCRASQSIS | | | |
| | | TAGCAGCTTTTTAAATTGGTATCAACACAAACCAGGGAAAGCC | | SFLNWYQHKPGKAPK | | | |
| | | CCTAAGCTCCTGATCTATGCTGTATCCAGTTTGCAAAGTGGGG | | LLIYAVSSLQSGVPS | | | |
| | | TCCCATCAAGGTTCAGTGGCAGTGAATATGGGACAGATTTCAC | | RFSGSEYGTDFTLTI | | | |
| | | TCTCACCATCAGCAGTTTGCAACCTGAAGATTTTGCAACTTAC | | SSLQPEDFATYYCQQ | | | |
| | | TACTGTCAACAAAATTACAATTCCCCCCTCACTTTCGGCGGAG | | NYNSPLTFGGGTKVE | | | |
| | | GGACCAAGGTGGAGATCAAA | | IK | | | |
| ADI-81564 | 2948 | CAGTCTGTGTTGACGCAGCCGCCCTCAGTGTCTGGGGCCCCAG | 4792 | QSVLTQPPSVSGAPG | 5145 | 4 | 4 |
| | | GGCAGAGGGTCACCATCTCCTGCACTGGGAGCAACTCCAACAT | | QRVTISCTGSNSNIG | | | |
| | | CGGGGCAGGTTATGATGTACACTGGTACCAGCAACTTCCAGGA | | AGYDVHWYQQLPGTA | | | |
| | | ACAGCCCCCAAACTCCTCATCTATGATAACACCAATCGGCCCT | | PKLLIYDNTNRPSGV | | | |
| | | CAGGGGTCCCTGACCGATTCTCTGGCTCCAAGTCTGGCACCTC | | PDRFSGSKSGTSASL | | | |
| | | AGCCTCCCTGACCATCACTGGGCTCCAGGCTGAGGATGAGGCT | | TITGLQAEDEADYYC | | | |
| | | GATTACTACTGCCAGTCCTATGACAGCAGCCTGATTGGTTCGC | | QSYDSSLIGSLFGGG | | | |
| | | TGTTCGGCGGAGGCACCCAGCTGACCGTCCTC | | TQLTVL | | | |
| ADI-81606 | 4599 | GACATCCAGATGACCCAGTCTCCATCCTCCCTGTCTGCGTCTG | 4793 | DIQMTQSPSSLSASV | 5146 | 4 | 3 |
| | | TTGGCGACAGAGTCACCATCACTTGCCGGGCAAGTCAGAGCAT | | GDRVTITCRASQSIS | | | |
| | | TAGCAGATATTTAAATTGGTATCAGCAGAAACCAGGGAAAGCC | | RYLNWYQQKPGKAPK | | | |
| | | CCTAAGCTCCTGATCTATGCTGCATTTATTTTGCAAAGTGGGG | | LLIYAAFILQSGVPS | | | |
| | | TCCCATCAAGGTTCAGTGGCAGTGGATCTGGAACAGATTTCAC | | RFSGSGSGTDFTLTI | | | |
| | | TCTCACCATCAGCAGTCTGCAACCTGAAGATTTTGCAACTTAT | | SSLQPEDFATYYCQQ | | | |
| | | TACTGTCAACAGAGTTACAGTGCCCCTCCGTGGACGTTCGGCC | | SYSAPPWTFGRGTKV | | | |
| | | GAGGGACCAAGGTGGATATCAAA | | DIK | | | |
| ADI-81782 | 2944 | GACATCCGGGTGACCCAGTCTCCATCCTCCCTGTCTGCATCTG | 4794 | DIRVTQSPSSLSASV | 5147 | 4 | 4 |
| | | TAGGAGACAGAGTCACCATCACTTGCCGGGCGAGTCAGGCCAT | | GDRVTITCRASQAIS | | | |
| | | TAGCAATTCTTTAGCCTGGTATCAGCAGAAACCAGGTAAAGCC | | NSLAWYQQKPGKAPK | | | |
| | | CCGAAACTCCTTCTCTATGCTGCATCCACATTGGAAAGTGGGG | | LLLYAASTLESGVPP | | | |
| | | TCCCACCCAGGTTCAGTGGCAGTGGGTCTGGGACGGATTTCAC | | RFSGSGSGTDFTLTI | | | |
| | | TCTCACCATCAGCAGCCTGCAGCCTGAAGATTTTGCAACTTAT | | SSLQPEDFATYYCQQ | | | |
| | | TACTGTCAACAGTACTATACTTTCCGGACGTTCGGCCAAGGGA | | YYTFRTFGQGTKVDI | | | |
| | | CCAAAGTGGATATCAAA | | K | | | |
| ADI-81627 | 2936 | GAAATTGTGATGACCCAGTCTCCAGCCACCCTGTCTTTGTCTC | 4795 | EIVMTQSPATLSLSP | 5148 | 4 | 4 |
| | | CAGGGGAAAGAGCCACCCTCTCCTGCAGGGCCAGTCAGAGTGT | | GERATLSCRASQSVT | | | |
| | | TACCAACTACTTAGCCTGGTACCAACAGAAACCTGGCCAGGCT | | NYLAWYQQKPGQAPR | | | |
| | | CCCAGGCTCCTCATCTATGATACATCCAACAGGGCCATTGGCA | | LLIYDTSNRAIGIPA | | | |
| | | TCCCAGCCAGGTTCAGTGGCAGTGGGTCTGGGACAGACTTCAC | | RFSGSGSGTDFTLTI | | | |
| | | TCTCACCATCAGCAGCCTAGAGCCTGAAGATTTTGCAGTTTAT | | SSLEPEDFAVYYCQL | | | |
| | | TACTGTCAACTACGTAACAACTGGCCTCCGGGAGCGCTCACTT | | RNNWPPGALTFGGGT | | | |
| | | TCGGCGGAGGGACCAAGGTGGAAATCAAA | | KVEIK | | | |
| ADI-81609 | 2936 | GACATCACAATGACGCAGACTCCAGCCACCCTGTCTGTGTCTC | 4796 | DITMTQTPATLSVSP | 5149 | 4 | 4 |
| | | CAGGGGAAAGAGCCACCCTCTCCTGCAGGGCCAGTCAGAGTGT | | GERATLSCRASQSVS | | | |
| | | TAGCGGCAACTTAGCCTGGTACCAGCAGAAACCTGGCCAGGCT | | GNLAWYQQKPGQAPR | | | |
| | | CCCAGGCTCCTCATCTATGGTGCAACCACCAGGGCCTCTGGTA | | LLIYGATTRASGIPA | | | |
| | | TCCCAGCCAGGTTCAGTGGCAGTGAGTCTGGGACAGAGTTCAC | | RFSGSESGTEFTLTI | | | |
| | | TCTCACCATCAGCAGCCTACAGTCTGAAGATTTTGCAGTTTAT | | SSLQSEDFAVYYCQQ | | | |
| | | TACTGTCAACAATATAATAACTGGCTCACTTTCGGCGGAGGGA | | YNNWLTFGGGTKVEI | | | |
| | | CCAAGGTGGAAATCAAA | | K | | | |

| | | | SEQ | | SEQ | | SEQ | | SEQ | | SEQ | | SEQ | |
|---|---|---|---|---|---|---|---|---|---|---|---|---|---|---|
| | VL | VL | ID | VL | ID | VL | ID | VL | ID | VL | ID | VL | ID | VL |
| Clone ID | Germline | FR1 | NO: | CDR1 | NO: | FR2 | NO: | CDR2 | NO: | FR3 | NO: | CDR3 | NO: | FR4 |
| ADI-81777 | IGKV3-20 | ETALTQ | 3644 | RASESV | 3846 | WYQQKP | 3912 | GAASRA | 4127 | GIPDRF | 2616 | QQYHNS | 4474 | FGQGTK |
| | | SPGTLS | | SSGYLA | | GQAPRL | | T | | SGSGSG | | PRT | | VEIK |
| | | LSPGER | | | | LIF | | | | TDFTLT | | | | |
| | | ATLSC | | | | | | | | ISRLEP | | | | |
| | | | | | | | | | | EDFAVY | | | | |
| | | | | | | | | | | YC | | | | |
| ADI-81728 | IGKV1D-39 | EIGMTQ | 3552 | RASQSI | 2050 | WYQQKP | 2257 | TASSLQ | 2506 | GVPSRF | 4279 | QQSYST | 2905 | FGQGTK |
| | | SPSSLS | | SSYLN | | GKAPKL | | S | | SGSGCG | | PLT | | VEIK |
| | | ASVGDR | | | | LIY | | | | TDFTLT | | | | |
| | | VTITC | | | | | | | | ISSVQR | | | | |
| | | | | | | | | | | EDFATY | | | | |
| | | | | | | | | | | YC | | | | |
| ADI-81732 | IGKV1D-39 | EMTLTQ | 1914 | RASQTI | 3847 | WYQQKP | 2257 | AASTLQ | 2392 | GVPSRF | 2534 | QQSYVL | 4475 | FGQGTK |
| | | SPSSLS | | NRYLN | | GKAPKL | | S | | SGSGSG | | PMYT | | VEIK |
| | | ASVGDR | | | | LIY | | | | TDFTLT | | | | |
| | | VTITC | | | | | | | | ISSLQP | | | | |
| | | | | | | | | | | EDFATY | | | | |
| | | | | | | | | | | YC | | | | |
| ADI-81588 | IGKV1D-39 | DIVLTQ | 3645 | RASQSI | 2050 | WYQQKP | 2257 | GASSLH | 2407 | GVPSRF | 2534 | QQSYST | 2729 | FGQGTK |
| | | SPSSLP | | SSYLN | | GKAPKL | | T | | SGSGSG | | PRT | | VDIK |
| | | ASVGDR | | | | LIY | | | | TDFTLT | | | | |
| | | VTITC | | | | | | | | ISSLQP | | | | |
| | | | | | | | | | | EDFATY | | | | |
| | | | | | | | | | | YC | | | | |
| ADI-81685 | IGKV1D-39 | EIVLTQ | 1888 | RASQSI | 2249 | WYQQKP | 2257 | TASSLQ | 2506 | GVPSRF | 2534 | QQSYNT | 2702 | FGQGTK |
| | | SPSSLS | | GTYLN | | GKAPKL | | S | | SGSGSG | | PPWT | | VEIK |
| | | ASVGDR | | | | LIY | | | | TDFTLT | | | | |
| | | VTITC | | | | | | | | ISSLQP | | | | |
| | | | | | | | | | | EDFATY | | | | |
| | | | | | | | | | | YC | | | | |
| ADI-81589 | IGKV1D-39 | DIQMTQ | 1878 | RASQTI | 3848 | WYQQKP | 2257 | AGSTLQ | 4128 | GVPSRF | 2534 | QQSDTT | 4476 | FGGGTK |
| | | SPSSLS | | STYLN | | GKAPKL | | S | | SGSGSG | | PQIT | | VEIK |
| | | ASVGDR | | | | LIY | | | | TDFTLT | | | | |
| | | VTITC | | | | | | | | ISSLQP | | | | |
| | | | | | | | | | | EDFATY | | | | |
| | | | | | | | | | | YC | | | | |
| ADI-81592 | IGKV1-5 | DITLTQ | 3646 | RASQSI | 3849 | WYQQKP | 3999 | DASSLE | 2434 | GVPSRF | 2532 | QQYHSF | 4477 | FGGGTK |
| | | SPSTLS | | NTWLA | | GNAPKL | | S | | SGSGSG | | SPLT | | VEIK |
| | | ASVGAR | | | | LIY | | | | TEFTLT | | | | |
| | | VTITC | | | | | | | | ISSLQP | | | | |
| | | | | | | | | | | DDFATY | | | | |
| | | | | | | | | | | YC | | | | |
| ADI-81751 | IGKV2D-28 | EIVMTQ | 1923 | RYTQSL | 3850 | WYLQKP | 2260 | LGSHRA | 4129 | GVPDRF | 2533 | MQALQT | 4478 | FGQGTK |
| | | SPLSLP | | LLSNGY | | GQSPQL | | S | | SGSGSG | | PQT | | VDIK |
| | | VTPGEP | | NYLD | | LIY | | | | TDFTLK | | | | |
| | | ASISC | | | | | | | | ISRVEA | | | | |
| | | | | | | | | | | EDVGVY | | | | |
| | | | | | | | | | | YC | | | | |

| | | | | | | VL | VL Amino |
|---|---|---|---|---|---|---|---|
| | SEQ | | SEQ | | SEQ | Nucleotide | Acid |
| | ID | | ID | | ID | Sub- | Sub- |
| Clone ID | NO: | VL DNA | NO: | VL Protein | NO: | stitutions | stitutions |
| ADI-81777 | 2937 | GAAACGGCACTGACGCAGTCTCCAGGCACCCTGTCTTTGTCTC | 4797 | ETALTQSPGTLSLSP | 5150 | 4 | 4 |
| | | CGGGGGAAAGAGCCACCCTCTCCTGCAGGGCCAGTGAGAGTGT | | GERATLSCRASESVS | | | |
| | | TAGCAGCGGCTACTTAGCCTGGTACCAGCAGAAACCTGGCCAG | | SGYLAWYQQKPGQAP | | | |
| | | GCTCCCAGGCTCCTCATCTTTGGTGCCGCCAGCAGGGCCACTG | | RLLIFGAASRATGIP | | | |
| | | GCATCCCAGACAGGTTCAGTGGCAGTGGGTCTGGGACAGACTT | | DRFSGSGSGTDFTLT | | | |
| | | CACTCTCACCATCAGCAGACTGGAGCCTGAAGATTTTGCAGTA | | ISRLEPEDFAVYYCQ | | | |
| | | TATTACTGTCAGCAGTATCATAACTCACCTCGGACGTTCGGCC | | QYHNSPRTFGQGTKV | | | |
| | | AAGGGACCAAGGTGGAAATCAAA | | EIK | | | |
| ADI-81728 | 2937 | GAAATCGGAATGACCCAGTCTCCATCCTCCCTGTCTGCATCTG | 4798 | EIGMTQSPSSLSASV | 5151 | 4 | 4 |
| | | TAGGAGACAGAGTCACCATCACTTGCCGGGCAAGTCAGAGCAT | | GDRVTITCRASQSIS | | | |
| | | TAGCAGCTATTTAAATTGGTATCAGCAGAAACCAGGGAAAGCC | | SYLNWYQQKPGKAPK | | | |
| | | CCTAAACTTTTAATCTATACTGCATCCAGTTTGCAAAGTGGGG | | LLIYTASSLQSGVPS | | | |
| | | TCCCATCAAGGTTCAGTGGCAGTGGATGTGGGACAGATTTCAC | | RFSGSGCGTDFTLTI | | | |
| | | TCTCACCATCAGCAGTGTGCAACGTGAAGATTTTGCTACTTAC | | SSVQREDFATYYCQQ | | | |
| | | TACTGTCAACAGAGTTACAGTACCCCTCTAACGTTCGGCCAAG | | SYSTPLTFGQGTKVE | | | |
| | | GGACCAAGGTGGAAATCAAA | | IK | | | |
| ADI-81732 | 2937 | GAAATGACACTCACGCAGTCTCCATCCTCCCTGTCTGCATCTG | 4799 | EMTLTQSPSSLSASV | 5152 | 4 | 4 |
| | | TTGGAGACAGAGTCACCATCACTTGCCGGGCAAGTCAGACCAT | | GDRVTITCRASQTIN | | | |
| | | TAACAGATATTTAAATTGGTATCAGCAGAAACCAGGGAAAGCC | | RYLNWYQQKPGKAPK | | | |
| | | CCTAAGCTCCTGATCTATGCTGCATCCACTTTGCAAAGTGGGG | | LLIYAASTLQSGVPS | | | |
| | | TCCCATCAAGGTTCAGTGGCAGTGGATCTGGGACAGATTTCAC | | RFSGSGSGTDFTLTI | | | |
| | | TCTCACCATCAGCAGTCTCCAACCTGAAGATTTTGCAACTTAC | | SSLQPEDFATYYCQQ | | | |
| | | TACTGTCAACAGAGTTATGTTCTCCCCATGTACACTTTTGGCC | | SYVLPMYTFGQGTKV | | | |
| | | AGGGGACCAAGGTGGAGATCAAA | | EIK | | | |
| ADI-81588 | 2944 | GACATCGTGTTGACCCAGTCTCCATCCTCCCTGCCTGCATCTG | 4800 | DIVLTQSPSSLPASV | 5153 | 4 | 4 |
| | | TAGGAGACAGAGTCACCATCACTTGCCGGGCAAGTCAGAGCAT | | GDRVTITCRASQSIS | | | |
| | | TAGCAGTTATTTAAATTGGTATCAGCAAAAACCAGGGAAAGCC | | SYLNWYQQKPGKAPK | | | |
| | | CCTAAGCTCCTGATTTATGGTGCATCCAGTTTGCATACTGGGG | | LLIYGASSLHTGVPS | | | |
| | | TCCCATCAAGGTTCAGTGGCAGTGGATCTGGGACAGATTTCAC | | RFSGSGSGTDFTLTI | | | |
| | | TCTCACCATCAGCAGTCTGCAACCTGAAGATTTTGCAACTTAC | | SSLQPEDFATYYCQQ | | | |
| | | TACTGTCAACAGAGTTACAGTACCCCTCGGACTTTTGGCCAGG | | SYSTPRTFGQGTKVD | | | |
| | | GGACCAAGGTGGATATCAAA | | IK | | | |
| ADI-81685 | 2937 | GAAATTGTGTTGACGCAGTCTCCATCCTCCCTGTCTGCATCTG | 4801 | EIVLTQSPSSLSASV | 5154 | 4 | 3 |
| | | TAGGAGACAGAGTCACCATCACTTGCCGGGCAAGTCAGAGCAT | | GDRVTITCRASQSIG | | | |
| | | TGGGACCTATTTAAATTGGTATCAGCAGAAACCGGGGAAAGCC | | TYLNWYQQKPGKAPK | | | |
| | | CCTAAGCTCCTGATCTATACTGCATCCAGTTTGCAAAGTGGGG | | LLIYTASSLQSGVPS | | | |
| | | TCCCATCAAGGTTCAGTGGCAGTGGATCTGGGACAGATTTCAC | | RFSGSGSGTDFTLTI | | | |
| | | TCTCACCATCAGCAGTCTGCAACCTGAAGATTTTGCAACTTAC | | SSLQPEDFATYYCQQ | | | |
| | | TACTGTCAACAGAGTTACAATACCCCTCCGTGGACGTTCGGCC | | SYNTPPWTFGQGTKV | | | |
| | | AAGGGACCAAGGTGGAGATCAAA | | EIK | | | |
| ADI-81589 | 2936 | GACATCCAGATGACCCAGTCTCCATCCTCCCTGTCTGCATCTG | 4802 | DIQMTQSPSSLSASV | 5155 | 4 | 4 |
| | | TAGGAGACAGAGTCACCATTACTTGCCGGGCAAGTCAGACCAT | | GDRVTITCRASQTIS | | | |
| | | TAGCACCTATTTAAATTGGTATCAGCAGAAACCAGGGAAAGCC | | TYLNWYQQKPGKAPK | | | |
| | | CCTAAGCTCCTGATCTATGCTGGATCCACTTTGCAAAGTGGGG | | LLIYAGSTLQSGVPS | | | |
| | | TCCCATCAAGGTTCAGTGGCAGTGGATCTGGGACAGATTTCAC | | RFSGSGSGTDFTLTI | | | |
| | | TCTCACCATCAGCAGTCTGCAACCTGAGGATTTTGCAACTTAC | | SSLQPEDFATYYCQQ | | | |
| | | TACTGTCAACAGAGTGACACTACCCCTCAGATCACTTTCGGCG | | SDTTPQITFGGGTKV | | | |
| | | GAGGGACCAAGGTGGAAATCAAA | | EIK | | | |
| ADI-81592 | 2936 | GACATCACATTGACGCAGTCTCCTTCCACCCTGTCTGCATCTG | 4803 | DITLTQSPSTLSASV | 5156 | 4 | 4 |
| | | TAGGAGCCAGAGTCACCATCACTTGCCGGGCCAGTCAGAGTAT | | GARVTITCRASQSIN | | | |
| | | TAATACCTGGTTGGCCTGGTATCAGCAGAAACCAGGGAACGCC | | TWLAWYQQKPGNAPK | | | |
| | | CCTAAACTCCTGATCTATGATGCCTCCTCTTTGGAAAGTGGGG | | LLIYDASSLESGVPS | | | |
| | | TCCCTTCAAGATTCAGCGGCAGTGGATCTGGGACAGAATTCAC | | RFSGSGSGTEFTLTI | | | |
| | | TCTCACCATCAGCAGCCTGCAGCCTGATGATTTTGCAACTTAT | | SSLQPDDFATYYCQQ | | | |
| | | TACTGCCAACAGTATCATAGTTTTTCTCCGCTCACTTTCGGCG | | YHSFSPLTFGGGTKV | | | |
| | | GAGGGACCAAGGTGGAAATCAAA | | EIK | | | |
| ADI-81751 | 2944 | GAAATTGTGATGACGCAGTCTCCACTCTCCCTGCCCGTCACCC | 4804 | EIVMTQSPLSLPVTP | 5157 | 4 | 4 |
| | | CTGGAGAGCCGGCCTCCATCTCCTGCAGGTATACTCAGAGCCT | | GEPASISCRYTQSLL | | | |
| | | CCTGCTTAGTAATGGATACAACTACTTGGATTGGTACCTGCAG | | LSNGYNYLDWYLQKP | | | |
| | | AAGCCAGGGCAGTCTCCACAACTCCTGATCTATTTGGGTTCTC | | GQSPQLLIYLGSHRA | | | |
| | | ATCGGGCCTCCGGGGTCCCTGACAGGTTCAGTGGCAGTGGATC | | SGVPDRFSGSGSGTD | | | |
| | | AGGCACAGATTTTACACTGAAAATCAGCAGAGTGGAGGCTGAG | | FTLKISRVEAEDVGV | | | |
| | | GATGTTGGGGTTTATTACTGCATGCAAGCTCTACAAACTCCTC | | YYCMQALQTPQTFGQ | | | |
| | | AGACGTTCGGCCAAGGGACCAAAGTGGATATCAAA | | GTKVDIK | | | |

| | | | SEQ | | SEQ | | SEQ | | SEQ | | SEQ | | SEQ | |
|---|---|---|---|---|---|---|---|---|---|---|---|---|---|---|
| | VL | VL | ID | VL | ID | VL | ID | VL | ID | VL | ID | VL | ID | VL |
| Clone ID | Germline | FR1 | NO: | CDR1 | NO: | FR2 | NO: | CDR2 | NO: | FR3 | NO: | CDR3 | NO: | FR4 |
| ADI-81533 | IGKV1D-39 | DIQMTQ | 1897 | RASQSI | 2066 | WYQQKP | 2263 | AASSLQ | 2391 | GVPSRF | 4280 | QQSYNI | 4440 | FGGGTK |
| | | SPSSLS | | STYLN | | GKAPNL | | S | | SGSGSG | | PQLT | | VEIK |
| | | ASVGDR | | | | LIY | | | | TDFTLT | | | | |
| | | ITITC | | | | | | | | ISSLQP | | | | |
| | | | | | | | | | | EDFAIY | | | | |
| | | | | | | | | | | YC | | | | |
| ADI-81548 | IGLV1-40 | QPVLTQ | 3647 | TGSNSN | 2143 | WYQQLP | 4000 | VNSNRP | 4113 | GVPDRF | 2622 | QSYDSS | 2853 | FGGGTK |
| | | PPSVSG | | IGAGYD | | GTAPKL | | S | | SGSKSD | | LSGVV | | VTVL |
| | | APGQRV | | VH | | LIF | | | | TSASLA | | | | |
| | | TISC | | | | | | | | ITGLQA | | | | |
| | | | | | | | | | | EDEADY | | | | |
| | | | | | | | | | | YC | | | | |
| ADI-81582 | IGLV1-40 | QSVVTQ | 1972 | TGSNSN | 2143 | WYQQLP | 2314 | DNNNRP | 2476 | GVPDRF | 2622 | QSYDSS | 2864 | FGTGTK |
| | | PPSVSG | | IGAGYD | | GTAPKL | | S | | SGSKSD | | LIGSV | | LTVL |
| | | APGQRV | | VH | | LIY | | | | TSASLA | | | | |
| | | TISC | | | | | | | | ITGLQA | | | | |
| | | | | | | | | | | EDEADY | | | | |
| | | | | | | | | | | YC | | | | |
| ADI-81541 | IGLV1-40 | QSVVTQ | 1972 | TGSNSN | 2143 | WYQQLP | 3992 | VNNNRP | 2471 | GVPDRF | 2599 | QSYDSS | 2908 | FGGGTK |
| | | PPSVSG | | IGAGYD | | GTAPKL | | S | | SGSKSG | | LSGSV | | LTVL |
| | | APGQRV | | VH | | LIS | | | | TSASLA | | | | |
| | | TISC | | | | | | | | ITGLQA | | | | |
| | | | | | | | | | | EDEADY | | | | |
| | | | | | | | | | | YC | | | | |
| ADI-81629 | IGLV1-40 | QSVLTQ | 1948 | TGSNSN | 2143 | WYQQLP | 2314 | INTNRP | 4103 | GVPDRF | 2599 | QSYDSS | 2908 | FGGGTK |
| | | PPSVSG | | IGAGYD | | GTAPKL | | S | | SGSKSG | | LSGSV | | LTVL |
| | | APGQRV | | VH | | LIY | | | | TSASLA | | | | |
| | | TISC | | | | | | | | ITGLQA | | | | |
| | | | | | | | | | | EDEADY | | | | |
| | | | | | | | | | | YC | | | | |
| ADI-81646 | IGKV1-9 | DMTMTQ | 3648 | RASQGI | 3851 | WYQQKP | 2325 | AASSLQ | 4130 | GVPSRF | 2592 | QQLSGY | 4479 | FGGGTK |
| | | SPSFLS | | SSYVA | | GKAPKL | | G | | SGSGSG | | FT | | VEIK |
| | | ASVGDR | | | | LMY | | | | TEFTLT | | | | |
| | | VTITC | | | | | | | | ISSLQP | | | | |
| | | | | | | | | | | EDFATY | | | | |
| | | | | | | | | | | YC | | | | |
| ADI-81745 | IGLV3-21 | SYVLTQ | 1883 | GEDGIG | 3852 | WYQQKP | 2283 | DDSDRP | 2399 | GIPERF | 2545 | QVWGFS | 4480 | FGGGTK |
| | | PPSVSV | | SKSVH | | GQAPVL | | S | | SGSNSG | | GDHWV | | LTVL |
| | | APGQTA | | | | VVY | | | | NTATLT | | | | |
| | | RITC | | | | | | | | ISRVEA | | | | |
| | | | | | | | | | | GDEADY | | | | |
| | | | | | | | | | | YC | | | | |
| ADI-81630 | IGLV1-40 | SSELSQ | 3649 | TGSNSN | 2143 | WYQQLP | 2314 | GNTNRP | 2484 | GVPDRF | 2622 | QSYDSG | 2903 | FGGGTK |
| | | QPSVSG | | IGAGYD | | GTAPKL | | S | | SGSKSD | | LTGSL | | LTVL |
| | | APGQRV | | VH | | LIY | | | | TSASLA | | | | |
| | | IISC | | | | | | | | ITGLQA | | | | |
| | | | | | | | | | | EDEADY | | | | |
| | | | | | | | | | | YC | | | | |

| | | | | | | VL | VL Amino |
|---|---|---|---|---|---|---|---|
| | SEQ | | SEQ | | SEQ | Nucleotide | Acid |
| | ID | | ID | | ID | Sub- | Sub- |
| Clone ID | NO: | VL DNA | NO: | VL Protein | NO: | stitutions | stitutions |
| ADI-81533 | 2936 | GACATCCAGATGACCCAGTCTCCATCTTCCCTGTCTGCATCTG | 4805 | DIQMTQSPSSLSASV | 5158 | 4 | 4 |
| | | TAGGAGACAGAATCACCATCACTTGTCGGGCAAGTCAGAGCAT | | GDRITITCRASQSIS | | | |
| | | TAGCACCTATTTAAATTGGTATCAGCAGAAACCAGGGAAAGCC | | TYLNWYQQKPGKAPN | | | |
| | | CCTAACCTCCTGATCTATGCTGCATCCAGTTTGCAAAGTGGGG | | LLIYAASSLQSGVPS | | | |
| | | TCCCATCAAGGTTCAGTGGCAGTGGATCTGGGACAGATTTCAC | | RFSGSGSGTDFTLTI | | | |
| | | TCTCACCATCAGCAGCCTGCAACCCGAAGATTTTGCAATTTAC | | SSLQPEDFAIYYCQQ | | | |
| | | TACTGTCAACAGAGTTACAATATTCCTCAACTCACTTTCGGCG | | SYNIPQLTFGGGTKV | | | |
| | | GAGGGACCAAGGTGGAAATCAAA | | EIK | | | |
| ADI-81548 | 2947 | CAGCCTGTGCTGACTCAGCCGCCCTCAGTGTCTGGGGCCCCAG | 4806 | QPVLTQPPSVSGAPG | 5159 | 4 | 4 |
| | | GGCAGAGGGTCACCATCTCCTGCACTGGGAGCAACTCCAACAT | | QRVTISCTGSNSNIG | | | |
| | | CGGGGCAGGTTATGATGTACACTGGTACCAGCAACTTCCAGGA | | AGYDVHWYQQLPGTA | | | |
| | | ACAGCCCCCAAACTCCTCATCTTTGTTAACAGCAATCGGCCCT | | PKLLIFVNSNRPSGV | | | |
| | | CAGGGGTCCCTGACCGATTCTCTGGCTCCAAGTCTGACACCTC | | PDRFSGSKSDTSASL | | | |
| | | AGCCTCCCTGGCCATCACTGGGCTCCAGGCTGAGGATGAGGCT | | AITGLQAEDEADYYC | | | |
| | | GATTATTACTGCCAGTCTTATGACAGCAGCCTGAGTGGTGTGG | | QSYDSSLSGVVFGGG | | | |
| | | TCTTCGGCGGAGGGACCAAGGTCACCGTCCTA | | TKVTVL | | | |
| ADI-81582 | 2949 | CAGTCTGTGGTGACGCAGCCGCCCTCAGTGTCTGGAGCCCCAG | 4807 | QSVVTQPPSVSGAPG | 5160 | 4 | 4 |
| | | GGCAGAGGGTCACCATCTCCTGCACTGGGAGCAACTCCAACAT | | QRVTISCTGSNSNIG | | | |
| | | CGGGGCAGGTTATGATGTACACTGGTACCAGCAGCTTCCAGGA | | AGYDVHWYQQLPGTA | | | |
| | | ACAGCCCCCAAACTCCTCATCTATGATAACAACAATCGCCCCT | | PKLLIYDNNNRPSGV | | | |
| | | CAGGGGTCCCTGACCGATTCTCTGGCTCCAAGTCTGACACCTC | | PDRFSGSKSDTSASL | | | |
| | | AGCCTCCCTGGCCATCACTGGGCTCCAGGCTGAGGATGAGGCT | | AITGLQAEDEADYYC | | | |
| | | GATTATTACTGCCAGTCCTATGATAGCAGCCTGATTGGTTCTG | | QSYDSSLIGSVFGTG | | | |
| | | TCTTCGGAACTGGGACCAAGCTCACCGTCCTA | | TKLTVL | | | |
| ADI-81541 | 2939 | CAGTCTGTGGTGACGCAGCCGCCCTCAGTGTCTGGGGCCCCAG | 4808 | QSVVTQPPSVSGAPG | 5161 | 4 | 4 |
| | | GGCAGAGAGTCACCATCTCCTGCACTGGGAGCAACTCCAACAT | | QRVTISCTGSNSNIG | | | |
| | | CGGGGCAGGCTATGATGTACACTGGTACCAGCAGCTTCCAGGA | | AGYDVHWYQQLPGTA | | | |
| | | ACAGCCCCCAAACTCCTCATCTCTGTTAACAACAATCGGCCCT | | PKLLISVNNNRPSGV | | | |
| | | CAGGGGTCCCTGACCGATTCTCTGGCTCCAAGTCTGGCACCTC | | PDRFSGSKSGTSASL | | | |
| | | AGCCTCCCTGGCCATCACTGGGCTCCAGGCTGAGGATGAGGCT | | AITGLQAEDEADYYC | | | |
| | | GATTATTACTGCCAGTCCTATGACAGCAGTCTGAGTGGTTCGG | | QSYDSSLSGSVFGGG | | | |
| | | TATTCGGCGGAGGGACCAAGCTCACCGTCCTA | | TKLTVL | | | |
| ADI-81629 | 2939 | CAGTCTGTTCTGACTCAGCCGCCCTCAGTGTCTGGGGCCCCAG | 4809 | QSVLTQPPSVSGAPG | 5162 | 4 | 3 |
| | | GGCAGAGGGTCACCATCTCCTGCACTGGGAGCAACTCCAACAT | | QRVTISCTGSNSNIG | | | |
| | | CGGGGCAGGTTATGATGTACACTGGTACCAGCAGCTTCCAGGA | | AGYDVHWYQQLPGTA | | | |
| | | ACAGCCCCCAAACTCCTCATCTATATTAACACCAATCGGCCCT | | PKLLIYINTNRPSGV | | | |
| | | CAGGGGTCCCTGACCGATTCTCTGGCTCCAAGTCTGGCACCTC | | PDRFSGSKSGTSASL | | | |
| | | AGCCTCCCTGGCCATCACTGGGCTCCAGGCTGAGGATGAGGCT | | AITGLQAEDEADYYC | | | |
| | | GATTATTACTGCCAGTCGTATGACAGCAGTCTGAGTGGTTCGG | | QSYDSSLSGSVFGGG | | | |
| | | TGTTCGGCGGAGGGACCAAGCTCACCGTCCTA | | TKLTVL | | | |
| ADI-81646 | 2936 | GACATGACGATGACGCAGTCTCCATCCTTCCTGTCTGCATCTG | 4810 | DMTMTQSPSFLSASV | 5163 | 4 | 4 |
| | | TAGGAGACAGAGTCACCATCACTTGCCGGGCCAGTCAGGGCAT | | GDRVTITCRASQGIS | | | |
| | | TAGCAGTTATGTAGCCTGGTATCAGCAAAAACCAGGGAAAGCC | | SYVAWYQQKPGKAPK | | | |
| | | CCTAAGCTCCTGATGTATGCTGCATCCAGTTTGCAGGGTGGGG | | LLMYAASSLQGGVPS | | | |
| | | TCCCATCAAGGTTCAGCGGCAGTGGATCTGGGACAGAATTCAC | | RFSGSGSGTEFTLTI | | | |
| | | TCTCACAATCAGCAGCCTGCAGCCTGAAGATTTTGCAACTTAT | | SSLQPEDFATYYCQQ | | | |
| | | TACTGTCAACAGCTTAGTGGTTACTTCACTTTCGGCGGAGGGA | | LSGYFTFGGGTKVEI | | | |
| | | CCAAGGTGGAAATCAAA | | K | | | |
| ADI-81745 | 2939 | TCGTATGTGCTGACTCAGCCACCCTCGGTGTCGGTGGCCCCAG | 4811 | SYVLTQPPSVSVAPG | 5164 | 4 | 3 |
| | | GACAGACGGCCAGGATTACCTGTGGGGAAGACGGCATTGGAAG | | QTARITCGEDGIGSK | | | |
| | | TAAAAGTGTACACTGGTACCAGCAGAAGCCAGGCCAGGCCCCT | | SVHWYQQKPGQAPVL | | | |
| | | GTGCTGGTCGTCTATGATGATAGCGACCGGCCCTCAGGGATCC | | VVYDDSDRPSGIPER | | | |
| | | CTGAGCGATTCTCTGGCTCCAACTCTGGGAACACGGCCACCCT | | FSGSNSGNTATLTIS | | | |
| | | GACCATCAGCAGGGTCGAAGCCGGGGATGAGGCCGACTATTAC | | RVEAGDEADYYCQVW | | | |
| | | TGTCAGGTGTGGGGTTTTAGTGGTGATCACTGGGTGTTCGGCG | | GFSGDHWVFGGGTKL | | | |
| | | GAGGGACCAAGCTCACCGTCCTA | | TVL | | | |
| ADI-81630 | 2939 | TCGTCTGAGCTGAGTCAGCAGCCCTCAGTGTCTGGGGCCCCAG | 4812 | SSELSQQPSVSGAPG | 5165 | 4 | 4 |
| | | GGCAGAGGGTCATCATCTCCTGCACTGGGAGCAACTCCAACAT | | QRVIISCTGSNSNIG | | | |
| | | CGGGGCAGGTTATGATGTACACTGGTACCAGCAGCTTCCAGGA | | AGYDVHWYQQLPGTA | | | |
| | | ACAGCCCCCAAACTCCTCATCTATGGTAACACCAATCGGCCCT | | PKLLIYGNTNRPSGV | | | |
| | | CAGGGGTCCCTGACCGGTTCTCTGGCTCCAAGTCTGACACCTC | | PDRFSGSKSDTSASL | | | |
| | | AGCCTCCCTGGCCATCACTGGGCTCCAGGCTGAGGATGAGGCT | | AITGLQAEDEADYYC | | | |
| | | GATTATTACTGCCAGTCCTATGACAGCGGCCTGACTGGTTCGC | | QSYDSGLTGSLFGGG | | | |
| | | TTTTCGGCGGAGGGACCAAGCTCACCGTCCTA | | TKLTVL | | | |

| | | | SEQ | | SEQ | | SEQ | | SEQ | | SEQ | | SEQ | |
|---|---|---|---|---|---|---|---|---|---|---|---|---|---|---|
| | VL | VL | ID | VL | ID | VL | ID | VL | ID | VL | ID | VL | ID | VL |
| Clone ID | Germline | FR1 | NO: | CDR1 | NO: | FR2 | NO: | CDR2 | NO: | FR3 | NO: | CDR3 | NO: | FR4 |
| ADI-81660 | IGLV1-40 | QSGLTQ | 3650 | TGSNSN | 2143 | WYQQLP | 3992 | VNSNRP | 4113 | GVPDRF | 4281 | QSYDSS | 2840 | FGGGTK |
| | | PPSVSG | | IGAGYD | | GTAPKL | | S | | SGSKSG | | LSDSV | | VTVL |
| | | APGQRV | | VH | | LIS | | | | TSASLA | | | | |
| | | TISC | | | | | | | | ITGLQA | | | | |
| | | | | | | | | | | EDEAAY | | | | |
| | | | | | | | | | | YC | | | | |
| ADI-81733 | IGLV3-25 | SHVLTQ | 3651 | SGDAFP | 2092 | WYQQKP | 2304 | KDNERP | 4049 | GIPERF | 4282 | QTADSS | 4481 | FGGGTK |
| | | PPSVSV | | NQYAY | | GQAPVL | | S | | SGSSSG | | RVV | | LTVL |
| | | SPRQTA | | | | VIY | | | | TTVTLT | | | | |
| | | RITC | | | | | | | | ISGVQA | | | | |
| | | | | | | | | | | EDEADY | | | | |
| | | | | | | | | | | YC | | | | |
| ADI-81736 | IGLV6-57 | QPMLTQ | 3652 | TRNSGS | 3853 | WYQQRP | 2366 | EDKQRP | 4131 | GVPDRF | 2574 | QSSHNS | 4482 | FGGGTK |
| | | PHSVSE | | IASNYV | | GSAPTT | | S | | SGSIDS | | KGV | | LTVL |
| | | SPGKTV | | Q | | VIF | | | | SSNSAS | | | | |
| | | TISC | | | | | | | | LTISGL | | | | |
| | | | | | | | | | | KTEDEA | | | | |
| | | | | | | | | | | DYYC | | | | |
| ADI-81759 | IGKV1-NL1 | EIEMTQ | 3653 | RASQGI | 2062 | WYQQKP | 2259 | AASTLE | 2398 | GVPSRF | 4283 | QQYYSN | 4483 | FGQGTK |
| | | SPSSLF | | SNSLA | | GKAPKL | | S | | SGSGSG | | LGRT | | VDIK |
| | | ASVGDR | | | | LLY | | | | TDFTLT | | | | |
| | | VTITC | | | | | | | | ISSLQP | | | | |
| | | | | | | | | | | EDFSTY | | | | |
| | | | | | | | | | | YC | | | | |
| ADI-81542 | IGKV1D-39 | EIQMTQ | 3654 | RASQSI | 2134 | WYQQKP | 2371 | AASSLQ | 2391 | GVPSRF | 4284 | QQSYSH | 4484 | FGQGTK |
| | | SPSSLS | | SRYLN | | GKAPEL | | S | | SGSGSG | | PPEGS | | VEIK |
| | | ASIGDR | | | | LIY | | | | TDFTLT | | | | |
| | | VTITC | | | | | | | | ISSLHP | | | | |
| | | | | | | | | | | EDFATY | | | | |
| | | | | | | | | | | YC | | | | |
| ADI-81639 | IGKV1-27 | DMRMTQ | 3655 | RASQGI | 2187 | WYQQKP | 4001 | GASTLQ | 2447 | GVSYRF | 4285 | QKYNTA | 4485 | FGQGTK |
| | | SPSSLS | | SNYLA | | GKVPKL | | S | | SGSGSG | | PCT | | VEIK |
| | | ASVGDR | | | | LIH | | | | TDFTLT | | | | |
| | | VTITC | | | | | | | | ISSLQP | | | | |
| | | | | | | | | | | EDVATY | | | | |
| | | | | | | | | | | YC | | | | |
| ADI-81815 | IGKV1-NL1 | EIRLTQ | 3656 | RASQDI | 2113 | WYQQKP | 2259 | AASTLE | 2398 | GVPSRF | 4286 | QQYYST | 4486 | FGQGTK |
| | | SPSSLP | | SNSLA | | GKAPKL | | S | | SGSASG | | PPFT | | VEIK |
| | | ASVGDR | | | | LLY | | | | TDYTLT | | | | |
| | | VTITC | | | | | | | | ISSLQP | | | | |
| | | | | | | | | | | EDFATY | | | | |
| | | | | | | | | | | YC | | | | |
| ADI-81852 | IGLV1-44 | QHVLTQ | 3657 | SGSSSN | 2162 | WYQQLP | 4002 | INNRRP | 4132 | GVPDRF | 2615 | ASWDDS | 4487 | FGGGTK |
| | | PPSASG | | IGSNSV | | GTAPKP | | S | | SGSKSG | | LNGLV | | LTVL |
| | | TPGQRV | | N | | LIY | | | | TSASLA | | | | |
| | | TISC | | | | | | | | ISGLQS | | | | |
| | | | | | | | | | | EDEADY | | | | |
| | | | | | | | | | | YC | | | | |

| | | | | | | VL | VL Amino |
|---|---|---|---|---|---|---|---|
| | SEQ | | SEQ | | SEQ | Nucleotide | Acid |
| | ID | | ID | | ID | Sub- | Sub- |
| Clone ID | NO: | VL DNA | NO: | VL Protein | NO: | stitutions | stitutions |
| ADI-81660 | 2947 | CAGTCAGGGCTGACTCAGCCGCCCTCAGTGTCTGGAGCCCCAG | 4813 | QSGLTQPPSVSGAPG | 5166 | 4 | 4 |
| | | GGCAGAGGGTCACCATCTCCTGCACTGGGAGCAACTCCAACAT | | QRVTISCTGSNSNIG | | | |
| | | CGGGGCAGGTTATGATGTACACTGGTACCAACAACTTCCAGGA | | AGYDVHWYQQLPGTA | | | |
| | | ACAGCCCCCAAACTCCTCATCTCTGTTAACAGCAATCGGCCCT | | PKLLISVNSNRPSGV | | | |
| | | CAGGGGTCCCTGACCGATTCTCTGGCTCCAAGTCTGGCACCTC | | PDRFSGSKSGTSASL | | | |
| | | AGCCTCCCTGGCCATCACTGGGCTCCAGGCTGAGGATGAGGCT | | AITGLQAEDEAAYYC | | | |
| | | GCTTATTACTGCCAGTCCTATGACAGCAGCCTGAGTGATTCGG | | QSYDSSLSDSVFGGG | | | |
| | | TGTTCGGCGGAGGGACCAAGGTCACCGTCCTA | | TKVTVL | | | |
| ADI-81733 | 2939 | TCGCATGTGCTGACTCAGCCACCCTCGGTGTCGGTGTCTCCAA | 4814 | SHVLTQPPSVSVSPR | 5167 | 4 | 4 |
| | | GACAGACGGCCAGGATCACCTGCTCTGGAGATGCATTTCCAAA | | QTARITCSGDAFPNQ | | | |
| | | CCAATATGCTTATTGGTACCAACAGAAGCCAGGCCAGGCCCCT | | YAYWYQQKPGQAPVL | | | |
| | | GTGTTAGTGATATATAAAGACAATGAGAGGCCCTCAGGGATCC | | VIYKDNERPSGIPER | | | |
| | | CTGAGCGATTCTCTGGCTCCAGTTCAGGGACAACAGTCACGTT | | FSGSSSGTTVTLTIS | | | |
| | | GACCATCAGTGGAGTCCAGGCAGAAGACGAGGCTGACTATTAC | | GVQAEDEADYYCQTA | | | |
| | | TGTCAAACAGCAGACAGCAGTCGTGTGGTATTCGGCGGAGGGA | | DSSRVVFGGGTKLTV | | | |
| | | CCAAGCTCACCGTCCTA | | L | | | |
| ADI-81736 | 2939 | CAGCCTATGCTGACTCAGCCCCACTCTGTGTCGGAGTCTCCGG | 4815 | QPMLTQPHSVSESPG | 5168 | 4 | 4 |
| | | GGAAGACGGTTACCATCTCCTGCACCCGCAACAGTGGCAGCAT | | KTVTISCTRNSGSIA | | | |
| | | TGCCAGCAACTATGTGCAGTGGTACCAGCAGCGCCCGGGCAGT | | SNYVQWYQQRPGSAP | | | |
| | | GCCCCCACCACTGTGATCTTTGAAGATAAACAAAGACCCTCTG | | TTVIFEDKQRPSGVP | | | |
| | | GTGTCCCTGATCGGTTCTCTGGCTCCATCGACAGCTCCTCCAA | | DRFSGSIDSSSNSAS | | | |
| | | CTCTGCCTCCCTCACCATCTCTGGACTGAAGACTGAGGACGAA | | LTISGLKTEDEADYY | | | |
| | | GCTGACTACTACTGTCAGTCTTCTCATAACAGTAAGGGGGTGT | | CQSSHNSKGVFGGGT | | | |
| | | TCGGCGGAGGGACCAAGCTCACCGTCCTA | | KLTVL | | | |
| ADI-81759 | 2944 | GAAATTGAGATGACGCAGTCTCCATCCTCCCTGTTTGCATCTG | 4816 | EIEMTQSPSSLFASV | 5169 | 4 | 4 |
| | | TAGGAGACAGAGTCACCATCACTTGCCGGGCGAGTCAGGGTAT | | GDRVTITCRASQGIS | | | |
| | | TAGCAATTCTTTAGCCTGGTATCAGCAGAAACCAGGGAAAGCC | | NSLAWYQQKPGKAPK | | | |
| | | CCTAAGCTCCTGCTCTATGCTGCATCCACATTGGAAAGTGGGG | | LLLYAASTLESGVPS | | | |
| | | TCCCTTCCAGGTTCAGTGGCAGTGGATCTGGGACGGATTTCAC | | RFSGSGSGTDFTLTI | | | |
| | | TCTCACCATCAGCAGCCTGCAGCCTGAAGATTTTTCAACTTAT | | SSLQPEDFSTYYCQQ | | | |
| | | TACTGTCAACAGTATTATAGTAACCTCGGGAGGACGTTCGGCC | | YYSNLGRTFGQGTKV | | | |
| | | AAGGGACCAAGGTGGATATCAAA | | DIK | | | |
| ADI-81542 | 2937 | GAAATCCAGATGACCCAGTCTCCATCCTCCCTGTCTGCATCTA | 4817 | EIQMTQSPSSLSASI | 5170 | 4 | 4 |
| | | TAGGAGACAGAGTCACCATCACTTGCCGGGCAAGTCAGAGCAT | | GDRVTITCRASQSIS | | | |
| | | TAGCAGATATTTAAATTGGTATCAACAAAAACCTGGGAAAGCC | | RYLNWYQQKPGKAPE | | | |
| | | CCTGAGCTCCTGATCTATGCTGCATCCAGTTTGCAAAGTGGGG | | LLIYAASSLQSGVPS | | | |
| | | TCCCATCAAGGTTCAGTGGCAGTGGATCTGGGACAGATTTCAC | | RFSGSGSGTDFTLTI | | | |
| | | TCTCACCATCAGCAGTCTGCACCCTGAAGATTTTGCAACTTAC | | SSLHPEDFATYYCQQ | | | |
| | | TACTGTCAACAGAGTTACAGTCACCCTCCGGAGGGCAGTTTTG | | SYSHPPEGSFGQGTK | | | |
| | | GCCAGGGGACCAAGGTGGAAATCAAA | | VEIK | | | |
| ADI-81639 | 2937 | GACATGCGGATGACCCAGTCTCCATCTTCCCTGTCTGCATCTG | 4818 | DMRMTQSPSSLSASV | 5171 | 4 | 4 |
| | | TAGGAGACAGAGTCACCATCACTTGCCGGGCGAGTCAGGGCAT | | GDRVTITCRASQGIS | | | |
| | | AAGCAATTATTTAGCCTGGTATCAGCAGAAACCAGGGAAAGTT | | NYLAWYQQKPGKVPK | | | |
| | | CCTAAGCTCCTGATCCATGGTGCATCCACTTTGCAATCGGGGG | | LLIHGASTLQSGVSY | | | |
| | | TCTCATATAGGTTCAGTGGCAGTGGATCTGGGACAGATTTCAC | | RFSGSGSGTDFTLTI | | | |
| | | TCTCACCATCAGCAGCCTGCAGCCTGAAGATGTTGCAACTTAT | | SSLQPEDVATYYCQK | | | |
| | | TACTGTCAAAAGTACAACACTGCCCCGTGCACGTTCGGCCAAG | | YNTAPCTFGQGTKVE | | | |
| | | GGACCAAGGTGGAGATCAAA | | IK | | | |
| ADI-81815 | 2937 | GAAATCCGGTTGACCCAGTCTCCATCCTCCCTGCCTGCATCTG | 4819 | EIRLTQSPSSLPASV | 5172 | 4 | 4 |
| | | TAGGAGACAGAGTCACCATCACTTGCCGGGCGAGTCAGGACAT | | GDRVTITCRASQDIS | | | |
| | | TAGCAATTCTTTAGCCTGGTATCAGCAGAAACCAGGGAAAGCC | | NSLAWYQQKPGKAPK | | | |
| | | CCTAAGCTCCTGCTCTATGCTGCATCCACATTGGAAAGTGGGG | | LLLYAASTLESGVPS | | | |
| | | TCCCATCCAGGTTCAGTGGCAGTGCATCTGGGACGGATTACAC | | RFSGSASGTDYTLTI | | | |
| | | TCTCACCATCAGCAGCCTGCAGCCTGAAGATTTTGCAACTTAT | | SSLQPEDFATYYCQQ | | | |
| | | TACTGTCAACAGTATTATAGTACCCCTCCGTTCACTTTTGGCC | | YYSTPPFTFGQGTKV | | | |
| | | AGGGGACCAAGGTGGAGATCAAA | | EIK | | | |
| ADI-81852 | 2939 | CAGCATGTGCTGACTCAGCCACCCTCAGCGTCTGGGACCCCCG | 4820 | QHVLTQPPSASGTPG | 5173 | 4 | 4 |
| | | GGCAGAGGGTCACCATCTCTTGTTCTGGAAGCAGCTCCAACAT | | QRVTISCSGSSSNIG | | | |
| | | CGGAAGTAATTCTGTAAACTGGTACCAGCAGCTCCCAGGAACG | | SNSVNWYQQLPGTAP | | | |
| | | GCCCCCAAACCCCTCATCTATATTAATAATCGGCGGCCCTCAG | | KPLIYINNRRPSGVP | | | |
| | | GGGTCCCTGACCGATTCTCTGGCTCCAAGTCTGGCACCTCAGC | | DRFSGSKSGTSASLA | | | |
| | | CTCCCTGGCCATCAGTGGGCTCCAGTCTGAGGATGAGGCTGAT | | ISGLQSEDEADYYCA | | | |
| | | TATTACTGTGCATCATGGGATGACAGCCTGAATGGTTTGGTTT | | SWDDSLNGLVFGGGT | | | |
| | | TCGGCGGAGGGACCAAGCTCACCGTCCTA | | KLTVL | | | |

| | | | SEQ | | SEQ | | SEQ | | SEQ | | SEQ | | SEQ | |
|---|---|---|---|---|---|---|---|---|---|---|---|---|---|---|
| | VL | VL | ID | VL | ID | VL | ID | VL | ID | VL | ID | VL | ID | VL |
| Clone ID | Germline | FR1 | NO: | CDR1 | NO: | FR2 | NO: | CDR2 | NO: | FR3 | NO: | CDR3 | NO: | FR4 |
| ADI-81853 | IGKV1-5 | DIQMTQ | 3658 | RASQSI | 2052 | WYQQKP | 2263 | KASTLE | 2518 | GVPSRF | 2532 | QQYNSF | 4488 | FGQGTK |
| | | SPSTLS | | SRWLA | | GKAPNL | | S | | SGSGSG | | SWT | | VEIK |
| | | ASVGDR | | | | LIY | | | | TEFTLT | | | | |
| | | VAITC | | | | | | | | ISSLQP | | | | |
| | | | | | | | | | | DDFATY | | | | |
| | | | | | | | | | | YC | | | | |
| ADI-81647 | IGLV1-40 | QSVLTQ | 1948 | TGSGSN | 3854 | WYQQLP | 4000 | RNSNRP | 4133 | GVPDRF | 4287 | QSYDSS | 4489 | FGTGTK |
| | | PPSVSG | | IGAGYD | | GTAPKL | | S | | SGSMSG | | LSGSI | | LTVL |
| | | APGQRV | | VH | | LIF | | | | TSASLA | | | | |
| | | TISC | | | | | | | | ITGLQA | | | | |
| | | | | | | | | | | EDEADY | | | | |
| | | | | | | | | | | YC | | | | |
| ADI-81689 | IGKV3D-15 | ETTLTQ | 2022 | RASQTI | 3855 | WYQQKP | 2258 | GASTRA | 2383 | GIPARF | 4288 | QHYDNW | 4490 | FGQGTK |
| | | SPATLS | | SNNLA | | GQAPRL | | T | | SGSGSG | | PPEYT | | VEIK |
| | | VSPGER | | | | LIY | | | | TEFTLT | | | | |
| | | ATLSC | | | | | | | | ISSLQS | | | | |
| | | | | | | | | | | EDSAVY | | | | |
| | | | | | | | | | | YC | | | | |
| ADI-81550 | IGLV1-40 | QSVVTQ | 1972 | TGSNSN | 2143 | WYQQLP | 2314 | RNTNRP | 4054 | GVPDRF | 2599 | QSYDSS | 4491 | FGGGTK |
| | | PPSVSG | | IGAGYD | | GTAPKL | | S | | SGSKSG | | LTGSL | | LTVL |
| | | APGQRV | | VH | | LIY | | | | TSASLA | | | | |
| | | TISC | | | | | | | | ITGLQA | | | | |
| | | | | | | | | | | EDEADY | | | | |
| | | | | | | | | | | YC | | | | |
| ADI-81552 | IGLV1-40 | QSVVTQ | 1972 | TGSNSN | 2143 | WYQQLP | 2314 | RNTNRP | 4054 | GVPDRF | 2599 | QSYDSS | 4491 | FGGGTQ |
| | | PPSVSG | | IGAGYD | | GTAPKL | | S | | SGSKSG | | LTGSL | | LTVL |
| | | APGQRV | | VH | | LIY | | | | TSASLA | | | | |
| | | TISC | | | | | | | | ITGLQA | | | | |
| | | | | | | | | | | EDEADY | | | | |
| | | | | | | | | | | Y | | | | |
| ADI-81601 | IGLV1-40 | QSVLTQ | 1948 | TGSNSN | 2196 | WYQQLP | 2314 | GNTNRP | 2484 | GVPDRF | 2622 | QSYDSS | 2862 | FGGGTK |
| | | PPSVSG | | IGAGYD | | GTAPKL | | S | | SGSKSD | | LSGVL | | LTVL |
| | | APGQRV | | IH | | LIY | | | | TSASLA | | | | |
| | | TISC | | | | | | | | ITGLQA | | | | |
| | | | | | | | | | | EDEADY | | | | |
| | | | | | | | | | | YC | | | | |
| ADI-81653 | IGKV3D-15 | EMTLTQ | 3659 | RASQSV | 2100 | WYQQKP | 4003 | GASTRA | 2383 | GIPARF | 4289 | QQYNKW | 4492 | FGQGTR |
| | | SPATLS | | SSSLA | | GQAPRL | | T | | SGSGSG | | PPIT | | LEIK |
| | | VSPGER | | | | LIH | | | | TEFTLT | | | | |
| | | ATLFC | | | | | | | | ISSLQS | | | | |
| | | | | | | | | | | EDVAVY | | | | |
| | | | | | | | | | | YC | | | | |
| ADI-81661 | IGLV1-40 | QSVVTQ | 1972 | AGSGSN | 3856 | WYQQLP | 2314 | GNNNRP | 2492 | GVPDRF | 4237 | QSYDSS | 4493 | FGGGTK |
| | | PPSVSG | | IGAGYD | | GTAPKL | | S | | SGSKSA | | LSDVI | | LTVL |
| | | APGQRV | | VH | | LIY | | | | TSASLA | | | | |
| | | TISC | | | | | | | | ITGLQA | | | | |
| | | | | | | | | | | EDEADY | | | | |
| | | | | | | | | | | YC | | | | |

| | | | | | | VL | VL Amino |
|---|---|---|---|---|---|---|---|
| | SEQ | | SEQ | | SEQ | Nucleotide | Acid |
| | ID | | ID | | ID | Sub- | Sub- |
| Clone ID | NO: | VL DNA | NO: | VL Protein | NO: | stitutions | stitutions |
| ADI-81853 | 2937 | GACATCCAGATGACGCAGTCTCCTTCCACCCTGTCTGCATCTG | 4821 | DIQMTQSPSTLSASV | 5174 | 4 | 4 |
| | | TAGGAGACAGAGTCGCCATCACTTGCCGGGCCAGTCAGAGTAT | | GDRVAITCRASQSIS | | | |
| | | TAGTAGGTGGTTGGCCTGGTATCAGCAGAAACCAGGGAAAGCC | | RWLAWYQQKPGKAPN | | | |
| | | CCTAACCTCCTGATTTATAAGGCGTCTACTTTAGAAAGTGGGG | | LLIYKASTLESGVPS | | | |
| | | TCCCATCAAGGTTCAGCGGCAGTGGATCTGGGACAGAATTCAC | | RFSGSGSGTEFTLTI | | | |
| | | TCTCACCATCAGCAGCCTGCAGCCTGATGATTTTGCAACTTAT | | SSLQPDDFATYYCQQ | | | |
| | | TACTGCCAACAGTATAATAGTTTTTCGTGGACGTTCGGCCAAG | | YNSFSWTFGQGTKVE | | | |
| | | GGACCAAGGTGGAAATCAAA | | IK | | | |
| ADI-81647 | 2949 | CAGTCTGTGCTGACGCAGCCGCCCTCAGTGTCTGGGGCCCCAG | 4822 | QSVLTQPPSVSGAPG | 5175 | 4 | 4 |
| | | GGCAGAGGGTCACCATCTCCTGCACTGGGAGCGGCTCCAACAT | | QRVTISCTGSGSNIG | | | |
| | | CGGGGCAGGTTATGATGTACACTGGTATCAGCAGCTTCCAGGA | | AGYDVHWYQQLPGTA | | | |
| | | ACAGCCCCCAAACTCCTCATCTTTCGTAACTCCAATCGGCCCT | | PKLLIFRNSNRPSGV | | | |
| | | CAGGGGTCCCTGACCGATTCTCTGGCTCCATGTCTGGCACCTC | | PDRFSGSMSGTSASL | | | |
| | | AGCCTCCCTGGCCATCACTGGGCTCCAGGCTGAGGATGAGGCT | | AITGLQAEDEADYYC | | | |
| | | GATTATTACTGCCAGTCGTATGACAGCAGCCTGAGTGGATCGA | | QSYDSSLSGSIFGTG | | | |
| | | TCTTCGGAACTGGGACCAAGCTCACCGTCCTA | | TKLTVL | | | |
| ADI-81689 | 2937 | GAAACGACACTCACGCAGTCTCCAGCCACCCTGTCTGTGTCTC | 4823 | ETTLTQSPATLSVSP | 5176 | 4 | 4 |
| | | CAGGGGAAAGAGCCACTCTCTCCTGCAGGGCCAGTCAGACTAT | | GERATLSCRASQTIS | | | |
| | | TTCCAACAACTTAGCCTGGTACCAGCAGAAACCTGGCCAGGCT | | NNLAWYQQKPGQAPR | | | |
| | | CCCAGGCTCCTCATCTATGGTGCATCTACCAGGGCCACTGGTA | | LLIYGASTRATGIPA | | | |
| | | TCCCAGCCAGGTTCAGTGGCAGTGGGTCTGGGACAGAGTTCAC | | RFSGSGSGTEFTLTI | | | |
| | | TCTCACCATCAGCAGCCTGCAGTCTGAAGATTCTGCAGTTTAT | | SSLQSEDSAVYYCQH | | | |
| | | TACTGTCAACACTATGATAACTGGCCTCCGGAATACACTTTTG | | YDNWPPEYTFGQGTK | | | |
| | | GCCAGGGGACCAAGGTGGAGATCAAA | | VEIK | | | |
| ADI-81550 | 2939 | CAGTCTGTGGTGACGCAGCCGCCCTCAGTGTCTGGGGCCCCAG | 4824 | QSVVTQPPSVSGAPG | 5177 | 4 | 3 |
| | | GGCAGAGGGTCACCATCTCCTGCACTGGGAGCAACTCCAACAT | | QRVTISCTGSNSNIG | | | |
| | | CGGGGCAGGTTATGATGTACACTGGTACCAGCAACTTCCAGGA | | AGYDVHWYQQLPGTA | | | |
| | | ACAGCCCCCAAACTCCTCATCTATAGAAACACCAATCGGCCCT | | PKLLIYRNTNRPSGV | | | |
| | | CAGGGGTCCCTGACCGATTCTCTGGGTCCAAGTCTGGCACCTC | | PDRFSGSKSGTSASL | | | |
| | | AGCCTCCCTGGCCATTACTGGGCTCCAGGCTGAGGATGAGGCT | | AITGLQAEDEADYYC | | | |
| | | GATTATTACTGCCAGTCCTATGACAGCAGCCTGACTGGTTCGC | | QSYDSSLTGSLFGGG | | | |
| | | TATTCGGCGGAGGGACCAAGCTCACCGTCCTA | | TKLTVL | | | |
| ADI-81552 | 2948 | CAGTCAGTGGTGACGCAGCCGCCCTCAGTGTCTGGGGCCCCAG | 4825 | QSVVTQPPSVSGAPG | 5178 | 4 | 3 |
| | | GGCAGAGGGTCACCATCTCCTGCACTGGGAGCAACTCCAACAT | | QRVTISCTGSNSNIG | | | |
| | | CGGGGCAGGTTATGATGTACACTGGTACCAGCAGCTTCCAGGA | | AGYDVHWYQQLPGTA | | | |
| | | ACAGCCCCCAAACTCCTCATCTATAGAAACACCAATCGGCCCT | | PKLLIYRNTNRPSGV | | | |
| | | CAGGGGTCCCTGACCGATTCTCTGGGTCCAAGTCTGGCACCTC | | PDRFSGSKSGTSASL | | | |
| | | AGCCTCCCTGGCCATCACTGGGCTCCAGGCTGAGGATGAGGCT | | AITGLQAEDEADYYC | | | |
| | | GATTATTACTGCCAGTCCTATGACAGCAGCCTGACTGGTTCGC | | QSYDSSLTGSLFGGG | | | |
| | | TGTTCGGCGGAGGCACCCAGCTGACCGTCCTC | | TQLTVL | | | |
| ADI-81601 | 2939 | CAGTCTGTCCTGACTCAGCCGCCCTCAGTATCTGGGGCCCCAG | 4826 | QSVLTQPPSVSGAPG | 5179 | 4 | 4 |
| | | GGCAGAGGGTCACCATCTCCTGCACTGGGAGCAACTCCAACAT | | QRVTISCTGSNSNIG | | | |
| | | CGGAGCAGGTTATGATATACACTGGTACCAGCAGCTTCCAGGA | | AGYDIHWYQQLPGTA | | | |
| | | ACAGCCCCCAAACTCCTCATCTATGGTAACACCAATCGGCCCT | | PKLLIYGNTNRPSGV | | | |
| | | CAGGGGTCCCTGACCGATTCTCTGGCTCCAAGTCTGACACCTC | | PDRFSGSKSDTSASL | | | |
| | | AGCCTCCCTGGCCATCACTGGGCTCCAGGCTGAGGATGAGGCT | | AITGLQAEDEADYYC | | | |
| | | GATTATTACTGCCAGTCTTATGACAGCAGCCTGAGTGGTGTGC | | QSYDSSLSGVLFGGG | | | |
| | | TATTCGGCGGAGGGACCAAGCTCACCGTCCTA | | TKLTVL | | | |
| ADI-81653 | 2940 | GAAATGACACTCACGCAGTCTCCAGCCACCCTGTCTGTGTCTC | 4827 | EMTLTQSPATLSVSP | 5180 | 4 | 4 |
| | | CAGGGGAAAGAGCCACCCTCTTCTGCAGGGCCAGTCAGAGTGT | | GERATLFCRASQSVS | | | |
| | | TAGCAGCAGCTTAGCCTGGTACCAGCAGAAACCTGGCCAGGCT | | SSLAWYQQKPGQAPR | | | |
| | | CCCAGGCTCCTCATCCATGGTGCATCCACCAGGGCCACTGGTA | | LLIHGASTRATGIPA | | | |
| | | TCCCAGCCAGGTTCAGTGGCAGTGGGTCTGGGACAGAGTTCAC | | RFSGSGSGTEFTLTI | | | |
| | | TCTCACCATCAGCAGCCTGCAGTCTGAAGATGTTGCAGTTTAT | | SSLQSEDVAVYYCQQ | | | |
| | | TACTGTCAGCAGTATAATAAGTGGCCTCCGATCACCTTCGGCC | | YNKWPPITFGQGTRL | | | |
| | | AAGGGACACGACTGGAGATTAAA | | EIK | | | |
| ADI-81661 | 2939 | CAGTCTGTCGTGACGCAGCCGCCCTCAGTGTCTGGGGCCCCAG | 4828 | QSVVTQPPSVSGAPG | 5181 | 4 | 4 |
| | | GGCAGAGGGTCACCATCTCCTGCGCTGGGAGCGGCTCCAACAT | | QRVTISCAGSGSNIG | | | |
| | | CGGGGCAGGTTACGATGTGCACTGGTACCAGCAACTTCCAGGA | | AGYDVHWYQQLPGTA | | | |
| | | ACAGCCCCCAAACTCCTCATCTATGGTAACAACAATCGGCCCT | | PKLLIYGNNNRPSGV | | | |
| | | CAGGGGTCCCTGACCGATTCTCTGGCTCCAAGTCTGCCACCTC | | PDRFSGSKSATSASL | | | |
| | | AGCCTCCCTGGCCATCACTGGACTCCAGGCTGAGGATGAGGCT | | AITGLQAEDEADYYC | | | |
| | | GATTATTACTGCCAGTCCTATGACAGCAGCCTGAGTGATGTGA | | QSYDSSLSDVIFGGG | | | |
| | | TATTCGGCGGAGGGACCAAGCTCACCGTCCTA | | TKLTVL | | | |

| | | | SEQ | | SEQ | | SEQ | | SEQ | | SEQ | | SEQ | |
|---|---|---|---|---|---|---|---|---|---|---|---|---|---|---|
| | VL | VL | ID | VL | ID | VL | ID | VL | ID | VL | ID | VL | ID | VL |
| Clone ID | Germline | FR1 | NO: | CDR1 | NO: | FR2 | NO: | CDR2 | NO: | FR3 | NO: | CDR3 | NO: | FR4 |
| ADI-81763 | IGKV1D-39 | EMTLTQ | 3660 | RASQSI | 2120 | WYQQKP | 2257 | ATSSLQ | 4134 | GVPSRF | 2534 | QQSSSN | 4494 | FGPGTK |
| | | SPPSLS | | GSYLN | | GKAPKL | | S | | SGSGSG | | FPT | | VDIK |
| | | ASVGDR | | | | LIY | | | | TDFTLT | | | | |
| | | VSITC | | | | | | | | ISSLQP | | | | |
| | | | | | | | | | | EDFATY | | | | |
| | | | | | | | | | | YC | | | | |
| ADI-81807 | IGLV1-40 | QSVLTQ | 1948 | TGSSSN | 3857 | WYQQLP | 2314 | TNTNRP | 4135 | GVPDRF | 2599 | QSYDTS | 4495 | FGGGTK |
| | | PPSVSG | | IGAGSD | | GTAPKL | | S | | SGSKSG | | LSGVV | | LTVL |
| | | APGQRV | | VH | | LIY | | | | TSASLA | | | | |
| | | TISC | | | | | | | | ITGLQA | | | | |
| | | | | | | | | | | EDEADY | | | | |
| | | | | | | | | | | YC | | | | |
| ADI-81849 | IGLV3-25 | QPVLTQ | 3661 | SGEALP | 3858 | WYQQKP | 2304 | KDTERP | 2459 | GIPERF | 4282 | QSADTS | 4496 | FGGGTK |
| | | PPSVSV | | MQYTY | | GQAPVL | | S | | SGSSSG | | GNYRGV | | LTVL |
| | | SPGQTA | | | | VIY | | | | TTVTLT | | | | |
| | | RITC | | | | | | | | ISGVQA | | | | |
| | | | | | | | | | | EDEADY | | | | |
| | | | | | | | | | | YC | | | | |
| ADI-81851 | IGKV3-20 | ETTLTQ | 3628 | RASQSV | 3859 | WYQQKP | 4004 | GASSRA | 4024 | GIPDRF | 2644 | QQYAFS | 4497 | FGGGTK |
| | | SPGTLS | | SSGYLA | | GQAPSL | | S | | SGSGSG | | PLT | | VEIK |
| | | LSPGER | | | | LIY | | | | TDFTLT | | | | |
| | | ATLSC | | | | | | | | ITRLEP | | | | |
| | | | | | | | | | | EDFAVY | | | | |
| | | | | | | | | | | YC | | | | |
| ADI-81747 | IGLV2-8 | QFVLTQ | 3662 | TGTSSD | 3860 | WYQQHP | 4005 | EVNKRP | 2394 | GVPDRF | 2538 | SSYAGS | 4498 | FGGGTK |
| | | PPSASG | | IGGYNY | | GKAPKL | | S | | SGSKSG | | NTVV | | LTVL |
| | | SPGQSV | | VS | | MAY | | | | NTASLT | | | | |
| | | TISC | | | | | | | | VSGLQA | | | | |
| | | | | | | | | | | EDEADY | | | | |
| | | | | | | | | | | YC | | | | |
| ADI-81753 | IGKV1-5 | EIGVTQ | 3663 | RASQSI | 2146 | WYQQKP | 2263 | KASLLE | 4136 | GVPSRF | 2532 | QLYNSD | 4499 | FGQGTK |
| | | SPSTLS | | STWLA | | GKAPNL | | S | | SGSGSG | | SWT | | VEIK |
| | | ASVGDR | | | | LIY | | | | TEFTLT | | | | |
| | | VTITC | | | | | | | | ISSLQP | | | | |
| | | | | | | | | | | DDFATY | | | | |
| | | | | | | | | | | YC | | | | |
| ADI-81874 | IGKV1-33 | DIVLTQ | 1957 | QATQDI | 3861 | WYQQKP | 2294 | DASNLE | 2416 | GVPSRF | 2537 | QQYDIF | 4500 | FGPGTK |
| | | SPSSLS | | NNSLN | | GKAPRL | | T | | SGSGSG | | IGFT | | VDIK |
| | | ASVGDR | | | | LIY | | | | TDFTFT | | | | |
| | | VTITC | | | | | | | | ISSLQP | | | | |
| | | | | | | | | | | EDIATY | | | | |
| | | | | | | | | | | YC | | | | |
| ADI-81879 | IGKV3D-15 | EMTLTQ | 1916 | RASQSI | 3862 | GQAPRL | 4006 | GASTRA | 2383 | GIPARF | 2569 | QHYNNW | 4501 | FGQGTK |
| | | SPATLS | | STTLA | | WYQQKP | | T | | SGSGSG | | TPT | | VEIK |
| | | VSPGER | | | | LMY | | | | TEFTLT | | | | |
| | | ATLSC | | | | | | | | ISSLQS | | | | |
| | | | | | | | | | | EDFAVY | | | | |
| | | | | | | | | | | YC | | | | |

| | | | | | | VL | VL Amino |
|---|---|---|---|---|---|---|---|
| | SEQ | | SEQ | | SEQ | Nucleotide | Acid |
| | ID | | ID | | ID | Sub- | Sub- |
| Clone ID | NO: | VL DNA | NO: | VL Protein | NO: | stitutions | stitutions |
| ADI-81763 | 2950 | GAAATGACACTCACGCAGTCTCCACCCTCCCTGTCTGCATCTG | 4829 | EMTLTQSPPSLSASV | 5182 | 4 | 4 |
| | | TAGGAGACAGAGTCAGCATCACTTGCCGGGCAAGTCAGAGCAT | | GDRVSITCRASQSIG | | | |
| | | TGGCAGCTATTTAAATTGGTATCAGCAGAAACCAGGGAAAGCC | | SYLNWYQQKPGKAPK | | | |
| | | CCTAAGCTCCTGATCTATGCTACATCCAGTTTGCAAAGTGGGG | | LLIYATSSLQSGVPS | | | |
| | | TCCCCTCAAGGTTCAGTGGCAGTGGATCTGGGACGGATTTCAC | | RFSGSGSGTDFTLTI | | | |
| | | TCTCACCATCAGCAGTCTGCAACCTGAAGATTTTGCAACTTAC | | SSLQPEDFATYYCQQ | | | |
| | | TACTGTCAACAGAGTTCCAGTAATTTTCCCACTTTCGGCCCTG | | SSSNFPTFGPGTKVD | | | |
| | | GGACCAAGGTGGATATCAAA | | IK | | | |
| ADI-81807 | 2939 | CAGTCTGTGTTGACGCAGCCGCCCTCAGTGTCTGGGGCCCCAG | 4830 | QSVLTQPPSVSGAPG | 5183 | 4 | 3 |
| | | GGCAGAGGGTCACCATCTCCTGCACTGGGAGCAGCTCCAACAT | | QRVTISCTGSSSNIG | | | |
| | | CGGGGCAGGTTCTGATGTACACTGGTACCAGCAGCTTCCAGGA | | AGSDVHWYQQLPGTA | | | |
| | | ACAGCCCCCAAACTCCTCATCTATACTAACACCAATCGGCCCT | | PKLLIYTNTNRPSGV | | | |
| | | CAGGGGTCCCTGACCGATTCTCTGGCTCCAAGTCCGGCACCTC | | PDRFSGSKSGTSASL | | | |
| | | AGCCTCCCTGGCCATCACGGGGCTCCAGGCTGAGGATGAGGCT | | AITGLQAEDEADYYC | | | |
| | | GATTATTACTGCCAGTCCTATGACACCAGCTTGAGTGGGGTGG | | QSYDTSLSGVVFGGG | | | |
| | | TTTTCGGCGGAGGGACCAAGCTCACCGTCCTA | | TKLTVL | | | |
| ADI-81849 | 2939 | CAGCCTGTGCTGACTCAGCCCCCCTCGGTGTCAGTGTCCCCAG | 4831 | QPVLTQPPSVSVSPG | 5184 | 4 | 4 |
| | | GACAGACGGCCAGGATCACCTGCTCTGGAGAAGCATTGCCAAT | | QTARITCSGEALPMQ | | | |
| | | GCAATATACTTATTGGTACCAGCAGAAGCCAGGCCAGGCCCCT | | YTYWYQQKPGQAPVL | | | |
| | | GTATTGGTGATATATAAAGACACTGAGAGGCCCTCAGGGATCC | | VIYKDTERPSGIPER | | | |
| | | CTGAGCGATTCTCTGGCTCCAGCTCAGGGACAACAGTCACGTT | | FSGSSSGTTVTLTIS | | | |
| | | GACCATCAGTGGAGTCCAGGCAGAAGACGAGGCTGACTATTAC | | GVQAEDEADYYCQSA | | | |
| | | TGTCAATCAGCGGACACCAGTGGTAATTATCGGGGGGTTTTCG | | DTSGNYRGVFGGGTK | | | |
| | | GCGGAGGGACCAAGCTCACCGTCCTA | | LTVL | | | |
| ADI-81851 | 2936 | GAAACGACACTCACGCAGTCTCCAGGCACCCTGTCTTTGTCTC | 4832 | ETTLTQSPGTLSLSP | 5185 | 4 | 4 |
| | | CAGGGGAAAGAGCCACCCTCTCCTGCAGGGCCAGTCAGAGTGT | | GERATLSCRASQSVS | | | |
| | | TAGCAGCGGCTACTTAGCCTGGTACCAGCAGAAACCTGGCCAG | | SGYLAWYQQKPGQAP | | | |
| | | GCTCCCAGTCTCCTCATCTATGGTGCCTCCAGCAGGGCCTCTG | | SLLIYGASSRASGIP | | | |
| | | GCATCCCAGACAGGTTCAGTGGCAGTGGGTCTGGGACAGACTT | | DRFSGSGSGTDFTLT | | | |
| | | CACTCTCACCATCACCAGACTGGAGCCTGAAGATTTTGCAGTA | | ITRLEPEDFAVYYCQ | | | |
| | | TATTACTGTCAGCAGTATGCTTTCTCACCTCTCACTTTCGGCG | | QYAFSPLTFGGGTKV | | | |
| | | GAGGGACCAAGGTGGAAATCAAA | | EIK | | | |
| ADI-81747 | 2939 | CAGTTTGTGCTGACTCAGCCCCCCTCCGCGTCCGGGTCTCCTG | 4833 | QFVLTQPPSASGSPG | 5186 | 4 | 3 |
| | | GACAGTCAGTCACCATCTCCTGCACTGGAACCAGCAGTGACAT | | QSVTISCTGTSSDIG | | | |
| | | TGGTGGTTATAACTATGTCTCCTGGTACCAACAACACCCAGGC | | GYNYVSWYQQHPGKA | | | |
| | | AAAGCCCCCAAACTCATGGCTTATGAGGTCAATAAGCGGCCCT | | PKLMAYEVNKRPSGV | | | |
| | | CAGGGGTCCCTGATCGCTTCTCTGGCTCCAAGTCTGGCAACAC | | PDRFSGSKSGNTASL | | | |
| | | GGCCTCCCTGACCGTCTCTGGGCTCCAGGCTGAGGATGAGGCT | | TVSGLQAEDEADYYC | | | |
| | | GATTATTATTGCAGCTCATATGCCGGCAGCAACACTGTGGTTT | | SSYAGSNTVVFGGGT | | | |
| | | TCGGCGGAGGGACCAAGCTCACCGTCCTA | | KLTVL | | | |
| ADI-81753 | 2937 | GAAATCGGGGTGACCCAGTCTCCTTCCACCCTGTCTGCATCTG | 4834 | EIGVTQSPSTLSASV | 5187 | 4 | 3 |
| | | TAGGAGACAGAGTCACCATCACTTGCCGGGCCAGTCAGAGTAT | | GDRVTITCRASQSIS | | | |
| | | TAGTACCTGGTTGGCCTGGTATCAGCAGAAACCAGGGAAAGCC | | TWLAWYQQKPGKAPN | | | |
| | | CCTAACCTCCTGATCTATAAGGCGTCTCTTTTGGAAAGTGGGG | | LLIYKASLLESGVPS | | | |
| | | TCCCATCAAGGTTCAGCGGCAGTGGATCTGGGACAGAATTCAC | | RFSGSGSGTEFTLTI | | | |
| | | TCTCACCATCAGCAGCCTGCAGCCTGATGATTTTGCAACTTAT | | SSLQPDDFATYYCQL | | | |
| | | TACTGCCAACTGTATAATAGTGATTCGTGGACGTTCGGCCAAG | | YNSDSWTFGQGTKVE | | | |
| | | GGACCAAGGTGGAAATCAAA | | IK | | | |
| ADI-81874 | 2950 | GACATCGTGTTGACCCAGTCTCCATCCTCCCTGTCTGCATCTG | 4835 | DIVLTQSPSSLSASV | 5188 | 4 | 4 |
| | | TAGGAGACAGAGTCACCATCACTTGCCAGGCGACTCAGGACAT | | GDRVTITCQATQDIN | | | |
| | | TAACAACTCTTTAAATTGGTATCAGCAGAAACCAGGGAAAGCC | | NSLNWYQQKPGKAPR | | | |
| | | CCTAGGCTCCTGATCTACGATGCATCCAATTTGGAAACAGGGG | | LLIYDASNLETGVPS | | | |
| | | TCCCATCAAGGTTCAGTGGAAGTGGATCTGGGACAGATTTTAC | | RFSGSGSGTDFTFTI | | | |
| | | TTTCACCATCAGCAGCCTGCAGCCTGAGGATATTGCAACATAT | | SSLQPEDIATYYCQQ | | | |
| | | TACTGTCAACAGTATGACATTTTCGGGTTCACTTTCGGCCCTG | | YDIFGFTFGPGTKVD | | | |
| | | GGACCAAAGTGGATATCAAA | | IK | | | |
| ADI-81879 | 2937 | GAAATGACACTCACGCAGTCTCCAGCCACCCTGTCTGTGTCTC | 4836 | EMTLTQSPATLSVSP | 5189 | 4 | 4 |
| | | CAGGGGAAAGAGCCACCCTCTCCTGCAGGGCCAGTCAGAGTAT | | GERATLSCRASQSIS | | | |
| | | TAGCACCACCTTAGCCTGGTACCAGCAGAAACCTGGCCAGGCT | | TTLAWYQQKPGQAPR | | | |
| | | CCCAGACTCCTCATGTATGGTGCATCCACCAGGGCCACAGGTA | | LLMYGASTRATGIPA | | | |
| | | TTCCAGCCAGGTTCAGTGGCAGTGGGTCTGGGACAGAGTTCAC | | RFSGSGSGTEFTLTI | | | |
| | | TCTCACCATCAGCAGCCTGCAGTCTGAAGATTTTGCAGTTTAT | | SSLQSEDFAVYYCQH | | | |
| | | TACTGTCAGCACTATAATAACTGGACTCCGACGTTCGGCCAAG | | YNNWTPTFGQGTKVE | | | |
| | | GGACCAAGGTGGAAATCAAA | | IK | | | |

| | | | SEQ | | SEQ | | SEQ | | SEQ | | SEQ | | SEQ | |
|---|---|---|---|---|---|---|---|---|---|---|---|---|---|---|
| | VL | VL | ID | VL | ID | VL | ID | VL | ID | VL | ID | VL | ID | VL |
| Clone ID | Germline | FR1 | NO: | CDR1 | NO: | FR2 | NO: | CDR2 | NO: | FR3 | NO: | CDR3 | NO: | FR4 |
| ADI-81547 | IGKV1D-39 | DIQMTQ | 1878 | RASQSI | 2117 | WYQQKP | 2257 | DASSLQ | 2389 | GVPSRF | 4290 | QQSYNT | 2702 | FGQGTK |
| | | SPSSLS | | RSYLN | | GKAPKL | | S | | FGSGSG | | PPWT | | VEIK |
| | | ASVGDR | | | | LIY | | | | TDFTLT | | | | |
| | | VTITC | | | | | | | | ISSLQP | | | | |
| | | | | | | | | | | EDFATY | | | | |
| | | | | | | | | | | YC | | | | |
| ADI-81556 | IGLV1-40 | QSVLTQ | 1948 | TGSNSN | 2143 | WYQQFP | 4007 | RNSNRP | 4133 | GVPDRF | 2599 | QSYDSG | 4502 | FGGGTK |
| | | PPSVSG | | IGAGYD | | GTAPKL | | S | | SGSKSG | | LSGSV | | LTVL |
| | | APGQRV | | VH | | LIF | | | | TSASLA | | | | |
| | | TISC | | | | | | | | ITGLQA | | | | |
| | | | | | | | | | | EDEADY | | | | |
| | | | | | | | | | | YC | | | | |
| ADI-81610 | IGLV1-40 | QSVLTQ | 1948 | TGSNSN | 2143 | WYQQLP | 2314 | RNTNRP | 4054 | GVPDRF | 4291 | QSYDSS | 2908 | FGGGTK |
| | | PPSVSG | | IGAGYD | | GTAPKL | | S | | SGSKSG | | LSGSV | | VTVL |
| | | APGQRV | | VH | | LIY | | | | ASASLA | | | | |
| | | TISC | | | | | | | | ITGLQA | | | | |
| | | | | | | | | | | EDEADY | | | | |
| | | | | | | | | | | YC | | | | |
| ADI-81764 | IGKV1D-39 | DIAMTQ | 3664 | RASQSI | 3863 | WYQQKP | 2257 | AASTLQ | 2392 | GVPSRF | 2534 | QQSYTT | 4503 | FGQGTK |
| | | SPSSLS | | GIYLN | | GKAPKL | | S | | SGSGSG | | PTWT | | VDIK |
| | | ASVGDR | | | | LIY | | | | TDFTLT | | | | |
| | | VTFTC | | | | | | | | ISSLQP | | | | |
| | | | | | | | | | | EDFATY | | | | |
| | | | | | | | | | | YC | | | | |
| ADI-81868 | IGLV1-40 | QSVLTQ | 2027 | TGSDSN | 3763 | WYQQLA | 4008 | GNSNRP | 2477 | GVPDRF | 2599 | QSFDSS | 4504 | FGTGTK |
| | | PPSVSG | | IGAGYD | | GTAPKL | | S | | SGSKSG | | LSGPNY | | LTVL |
| | | APGQRV | | VH | | LIY | | | | TSASLA | | V | | |
| | | IISC | | | | | | | | ITGLQA | | | | |
| | | | | | | | | | | EDEADY | | | | |
| | | | | | | | | | | YC | | | | |
| ADI-81876 | IGLV6-57 | NFMLTQ | 1992 | TRSSGG | 3864 | WYQQRP | 4009 | EDNQRP | 2431 | GVPDRF | 4292 | QSYDTS | 4505 | FGGGTK |
| | | PHSVSE | | IVNNYV | | GSSPTT | | S | | SGSIDS | | NHGV | | LTVL |
| | | SPGKTV | | Q | | VIY | | | | SSNSAS | | | | |
| | | TISC | | | | | | | | LTISGL | | | | |
| | | | | | | | | | | KTEDEA | | | | |
| | | | | | | | | | | VYYC | | | | |
| ADI-81800 | IGKV3D-15 | EMTMTQ | 2003 | RASQSI | 3862 | WYQQKP | 4006 | GASTRA | 2383 | GIPARF | 2569 | QQYNNW | 4506 | FGQGTK |
| | | SPATLS | | STTLA | | GQAPRL | | T | | SGSGSG | | TPT | | VEIK |
| | | VSPGER | | | | LMY | | | | TEFTLT | | | | |
| | | ATLSC | | | | | | | | ISSLQS | | | | |
| | | | | | | | | | | EDFAVY | | | | |
| | | | | | | | | | | YC | | | | |
| ADI-81892 | IGKV1D-39 | EMTLTQ | 1914 | RPSQSI | 3865 | WYQQKP | 2275 | AASSLQ | 2391 | GVPSRF | 4293 | QQNYNS | 4470 | FGGGTK |
| | | SPSSLS | | SSFLN | | GRAPKL | | S | | SGSESG | | PLT | | VEIK |
| | | ASVGDR | | | | LIY | | | | TDFTLT | | | | |
| | | VTITC | | | | | | | | ISSLQP | | | | |
| | | | | | | | | | | EDFATY | | | | |
| | | | | | | | | | | YC | | | | |

| | | | | | | VL | VL Amino |
|---|---|---|---|---|---|---|---|
| | SEQ | | SEQ | | SEQ | Nucleotide | Acid |
| | ID | | ID | | ID | Sub- | Sub- |
| Clone ID | NO: | VL DNA | NO: | VL Protein | NO: | stitutions | stitutions |
| ADI-81547 | 2937 | GACATCCAGATGACCCAGTCTCCATCCTCCCTGTCTGCATCTG | 4837 | DIQMTQSPSSLSASV | 5190 | 4 | 3 |
| | | TAGGAGACAGAGTCACCATCACTTGCCGGGCAAGTCAGAGCAT | | GDRVTITCRASQSIR | | | |
| | | TAGGAGCTATTTAAATTGGTATCAGCAGAAACCAGGGAAAGCC | | SYLNWYQQKPGKAPK | | | |
| | | CCTAAGCTCCTGATCTATGATGCATCCAGTTTGCAAAGTGGGG | | LLIYDASSLQSGVPS | | | |
| | | TCCCATCAAGGTTCTTTGGCAGTGGATCTGGGACAGATTTCAC | | RFFGSGSGTDFTLTI | | | |
| | | TCTCACCATCAGCAGTCTGCAACCTGAAGATTTTGCAACTTAC | | SSLQPEDFATYYCQQ | | | |
| | | TACTGTCAACAGAGTTACAATACCCCCCCGTGGACGTTCGGCC | | SYNTPPWTFGQGTKV | | | |
| | | AAGGGACCAAGGTGGAGATCAAA | | EIK | | | |
| ADI-81556 | 2939 | CAGTCTGTGTTGACGCAGCCGCCCTCAGTGTCTGGGGCCCCAG | 4838 | QSVLTQPPSVSGAPG | 5191 | 4 | 4 |
| | | GGCAGAGGGTCACCATCTCCTGCACTGGGAGCAACTCCAACAT | | QRVTISCTGSNSNIG | | | |
| | | CGGGGCAGGTTATGATGTACACTGGTACCAGCAGTTTCCAGGA | | AGYDVHWYQQFPGTA | | | |
| | | ACAGCCCCCAAACTCCTCATCTTTCGTAACAGCAATCGACCCT | | PKLLIFRNSNRPSGV | | | |
| | | CAGGGGTCCCTGACCGATTCTCTGGCTCCAAGTCTGGCACCTC | | PDRFSGSKSGTSASL | | | |
| | | AGCCTCCCTGGCCATCACTGGGCTCCAGGCTGAGGATGAGGCT | | AITGLQAEDEADYYC | | | |
| | | GATTATTACTGCCAGTCCTATGACAGCGGCCTGAGTGGTTCGG | | QSYDSGLSGSVFGGG | | | |
| | | TATTCGGCGGAGGGACCAAGCTGACCGTCCTA | | TKLTVL | | | |
| ADI-81610 | 2947 | CAGTCTGTGCTGACTCAGCCGCCCTCAGTGTCTGGGGCCCCAG | 4839 | QSVLTQPPSVSGAPG | 5192 | 4 | 4 |
| | | GGCAGAGGGTCACCATCTCCTGCACTGGGAGCAACTCCAACAT | | QRVTISCTGSNSNIG | | | |
| | | CGGGGCAGGTTATGATGTGCACTGGTACCAGCAGCTTCCAGGA | | AGYDVHWYQQLPGTA | | | |
| | | ACAGCCCCCAAACTCCTCATCTATCGTAACACCAATCGGCCCT | | PKLLIYRNTNRPSGV | | | |
| | | CAGGGGTCCCTGACCGATTCTCTGGCTCCAAGTCTGGCGCCTC | | PDRFSGSKSGASASL | | | |
| | | AGCCTCCCTGGCCATCACTGGGCTCCAGGCTGAGGATGAGGCT | | AITGLQAEDEADYYC | | | |
| | | GATTATTACTGCCAGTCCTATGACAGCAGCCTGAGTGGTTCGG | | QSYDSSLSGSVFGGG | | | |
| | | TGTTCGGCGGAGGGACCAAGGTCACCGTCCTA | | TKVTVL | | | |
| ADI-81764 | 2944 | GACATCGCGATGACCCAGTCTCCATCCTCCCTGTCTGCATCTG | 4840 | DIAMTQSPSSLSASV | 5193 | 4 | 4 |
| | | TAGGAGACAGAGTCACCTTCACTTGCCGGGCAAGTCAGAGCAT | | GDRVTFTCRASQSIG | | | |
| | | TGGCATCTATTTAAATTGGTATCAGCAGAAACCAGGGAAAGCC | | IYLNWYQQKPGKAPK | | | |
| | | CCTAAACTCCTGATCTATGCTGCATCCACTTTGCAAAGTGGGG | | LLIYAASTLQSGVPS | | | |
| | | TCCCGTCAAGGTTCAGTGGCAGTGGATCTGGGACAGATTTCAC | | RFSGSGSGTDFTLTI | | | |
| | | TCTCACCATCAGCAGTCTGCAACCTGAAGATTTTGCAACTTAC | | SSLQPEDFATYYCQQ | | | |
| | | TACTGTCAACAGAGTTACACAACCCCCACGTGGACGTTCGGCC | | SYTTPTWTFGQGTKV | | | |
| | | AAGGGACCAAAGTGGATATCAAA | | DIK | | | |
| ADI-81868 | 2949 | CAGTCTGTCCTGACGCAGCCGCCCTCAGTGTCTGGGGCCCCAG | 4841 | QSVLTQPPSVSGAPG | 5194 | 4 | 3 |
| | | GGCAGAGGGTCATCATCTCCTGCACTGGGAGCGACTCCAACAT | | QRVIISCTGSDSNIG | | | |
| | | CGGGGCAGGTTATGATGTACACTGGTACCAGCAGCTTGCAGGA | | AGYDVHWYQQLAGTA | | | |
| | | ACAGCCCCCAAACTCCTCATCTATGGTAACAGTAATCGGCCCT | | PKLLIYGNSNRPSGV | | | |
| | | CAGGGGTCCCTGACCGATTCTCTGGCTCCAAGTCTGGCACCTC | | PDRFSGSKSGTSASL | | | |
| | | AGCCTCCCTGGCCATCACTGGGCTCCAGGCTGAGGATGAGGCT | | AITGLQAEDEADYYC | | | |
| | | GATTATTACTGCCAGTCCTTTGACAGCAGCCTGAGTGGTCCCA | | QSFDSSLSGPNYVFG | | | |
| | | ATTATGTCTTCGGAACTGGGACCAAGCTCACCGTCCTA | | TGTKLTVL | | | |
| ADI-81876 | 2939 | AATTTTATGCTGACTCAGCCCCACTCTGTGTCGGAGTCTCCGG | 4842 | NFMLTQPHSVSESPG | 5195 | 4 | 4 |
| | | GGAAGACGGTAACCATCTCCTGCACCCGCAGCAGTGGCGGCAT | | KTVTISCTRSSGGIV | | | |
| | | TGTCAACAACTATGTGCAGTGGTACCAGCAGCGCCCGGGCAGT | | NNYVQWYQQRPGSSP | | | |
| | | TCCCCCACCACTGTGATCTATGAGGATAACCAAAGACCCTCTG | | TTVIYEDNQRPSGVP | | | |
| | | GGGTCCCTGATCGGTTCTCTGGCTCCATCGACAGCTCCTCCAA | | DRFSGSIDSSSNSAS | | | |
| | | CTCTGCCTCCCTCACCATCTCTGGACTGAAGACTGAGGACGAG | | LTISGLKTEDEAVYY | | | |
| | | GCTGTCTACTACTGTCAGTCTTATGATACTAGCAATCATGGGG | | CQSYDTSNHGVFGGG | | | |
| | | TGTTCGGCGGCGGGACCAAGCTCACCGTCCTA | | TKLTVL | | | |
| ADI-81800 | 2937 | GAAATGACAATGACGCAGTCTCCAGCCACCCTGTCTGTGTCTC | 4843 | EMTMTQSPATLSVSP | 5196 | 4 | 4 |
| | | CAGGGGAAAGAGCCACCCTCTCCTGCAGGGCCAGTCAGAGTAT | | GERATLSCRASQSIS | | | |
| | | TAGCACCACCTTAGCCTGGTACCAGCAGAAACCTGGCCAGGCT | | TTLAWYQQKPGQAPR | | | |
| | | CCCAGACTCCTCATGTATGGTGCATCCACCAGGGCCACAGGTA | | LLMYGASTRATGIPA | | | |
| | | TCCCAGCCAGGTTCAGTGGCAGTGGGTCTGGGACAGAGTTCAC | | RFSGSGSGTEFTLTI | | | |
| | | TCTCACCATCAGCAGCCTGCAGTCTGAAGATTTTGCAGTTTAT | | SSLQSEDFAVYYCQQ | | | |
| | | TACTGTCAGCAGTATAATAATTGGACTCCGACGTTCGGCCAAG | | YNNWTPTFGQGTKVE | | | |
| | | GGACCAAGGTGGAGATCAAA | | IK | | | |
| ADI-81892 | 2936 | GAAATGACACTCACGCAGTCTCCATCCTCCCTGTCTGCATCTG | 4844 | EMTLTQSPSSLSASV | 5197 | 4 | 4 |
| | | TAGGAGACAGAGTCACCATCACTTGCCGGCCAAGTCAGAGCAT | | GDRVTITCRPSQSIS | | | |
| | | TAGCAGTTTTTTAAATTGGTATCAGCAGAAACCAGGGAGAGCC | | SFLNWYQQKPGRAPK | | | |
| | | CCTAAGCTCCTGATCTATGCTGCATCCAGTTTGCAAAGTGGGG | | LLIYAASSLQSGVPS | | | |
| | | TCCCATCAAGGTTCAGTGGCAGTGAATCTGGGACAGATTTCAC | | RFSGSESGTDFTLTI | | | |
| | | TCTCACCATCAGCAGTCTCCAACCTGAAGATTTTGCAACTTAC | | SSLQPEDFATYYCQQ | | | |
| | | TACTGTCAGCAGAATTACAATTCCCCCCTCACTTTCGGCGGTG | | NYNSPLTFGGGTKVE | | | |
| | | GGACCAAAGTGGAGATCAAA | | IK | | | |

| | | | SEQ | | SEQ | | SEQ | | SEQ | | SEQ | | SEQ | |
|---|---|---|---|---|---|---|---|---|---|---|---|---|---|---|
| | VL | VL | ID | VL | ID | VL | ID | VL | ID | VL | ID | VL | ID | VL |
| Clone ID | Germline | FR1 | NO: | CDR1 | NO: | FR2 | NO: | CDR2 | NO: | FR3 | NO: | CDR3 | NO: | FR4 |
| ADI-81657 | IGLV8-61 | QSVVTQ | 3665 | GLSSGS | 3866 | WYRQTP | 4010 | NTKTRS | 4137 | GVPDRF | 4294 | MLYMGS | 4507 | FGGGTK |
| | | EPSFSV | | VSTSYY | | GQAPRT | | S | | SGSILG | | GIWV | | LTVL |
| | | SPGGTV | | PS | | LIY | | | | NKAALT | | | | |
| | | TLTC | | | | | | | | ITGAQA | | | | |
| | | | | | | | | | | DDESDY | | | | |
| | | | | | | | | | | HC | | | | |
| ADI-81776 | IGLV3-21 | SYELTQ | 1919 | GGNNIG | 2208 | WYQLKA | 4011 | DDSDRP | 2399 | GIPERF | 4295 | HVWDSS | 4508 | FGGGTK |
| | | PPSVSV | | SKSVH | | GQAPVL | | S | | SGSKSG | | SDHWV | | LTVV |
| | | APGQTA | | | | VVY | | | | NTATLI | | | | |
| | | RITC | | | | | | | | ISRVEA | | | | |
| | | | | | | | | | | GDEADY | | | | |
| | | | | | | | | | | YC | | | | |
| ADI-81810 | IGLV3-21 | SYELTQ | 3666 | GGNNIG | 2208 | WYQQKP | 2283 | DDRDRP | 4138 | GIPERF | 2674 | QVWDSS | 2892 | FGGGTK |
| | | PPSVSV | | SKSVH | | GQAPVL | | S | | SGSSSG | | SDLVI | | VTVL |
| | | APGQTA | | | | VVY | | | | NTATLT | | | | |
| | | RIPC | | | | | | | | LSRVEA | | | | |
| | | | | | | | | | | GDEADY | | | | |
| | | | | | | | | | | YC | | | | |
| ADI-81634 | IGLV3-25 | YYELTQ | 3667 | SGDTLP | 3867 | WYQQKP | 2304 | KDSERP | 2400 | GIPERF | 2546 | QSADSS | 4509 | FGGGTK |
| | | PPSVSV | | TQYAY | | GQAPVL | | S | | SGSTSG | | DIR | | LTVL |
| | | SPGQTA | | | | VIY | | | | TTVTLT | | | | |
| | | RITC | | | | | | | | ISGVQA | | | | |
| | | | | | | | | | | EDEADY | | | | |
| | | | | | | | | | | YC | | | | |
| ADI-81817 | IGKV1D-39 | DIPVTQ | 3642 | RASQSI | 2090 | WYQQKP | 2257 | AVSSLQ | 4123 | GVPSRF | 4293 | QQNYNS | 4470 | FGGGTK |
| | | SPSSLS | | SSFLN | | GKAPKL | | S | | SGSESG | | PLT | | VDIK |
| | | ASVGDR | | | | LIY | | | | TDFTLT | | | | |
| | | VTITC | | | | | | | | ISSLQP | | | | |
| | | | | | | | | | | EDFATY | | | | |
| | | | | | | | | | | YC | | | | |
| ADI-81805 | IGLV6-57 | NFMLTQ | 1992 | TRSSGS | 2109 | WYQQRP | 2378 | EDNQRP | 2431 | GVPDRF | 2694 | QSYDSS | 2922 | FGGGTK |
| | | PHSVSE | | IASNYV | | GSSPST | | S | | SGSIDS | | LWV | | LTVL |
| | | SPGKTV | | Q | | VIY | | | | SSNSAS | | | | |
| | | TISC | | | | | | | | LTISGL | | | | |
| | | | | | | | | | | QTDDEA | | | | |
| | | | | | | | | | | DYYC | | | | |
| ADI-81576 | IGKV3-20 | ETTLTQ | 3668 | RASQSV | 3868 | WYQQKP | 2258 | GASSRA | 2464 | GIPDRF | 4296 | QQYRSS | 4510 | FGQGTK |
| | | SPGTLS | | SSSHLA | | GQAPRL | | T | | SGSGSG | | PWT | | VDIK |
| | | LSPGER | | | | LIY | | | | TDFTLT | | | | |
| | | ATFSC | | | | | | | | ISRLEP | | | | |
| | | | | | | | | | | EDVAVY | | | | |
| | | | | | | | | | | YC | | | | |
| ADI-81665 | IGKV3-20 | ETTLTQ | 3669 | RASQSV | 2230 | WYQQKP | 3996 | GASSRA | 4139 | GIPDRF | 2616 | QQYVTS | 4511 | FGQGTK |
| | | SPGTLS | | SSSYLA | | GQAPRL | | P | | SGSGSG | | PT | | VEIK |
| | | LSPGER | | | | LIS | | | | TDFTLT | | | | |
| | | VTLSC | | | | | | | | ISRLEP | | | | |
| | | | | | | | | | | EDFAVY | | | | |
| | | | | | | | | | | YC | | | | |

| | | | | | | VL | VL Amino |
|---|---|---|---|---|---|---|---|
| | SEQ | | SEQ | | SEQ | Nucleotide | Acid |
| | ID | | ID | | ID | Sub- | Sub- |
| Clone ID | NO: | VL DNA | NO: | VL Protein | NO: | stitutions | stitutions |
| ADI-81657 | 2939 | CAGTCTGTGGTGACTCAGGAGCCATCGTTCTCAGTGTCCCCTG | 4845 | QSVVTQEPSFSVSPG | 5198 | 4 | 4 |
| | | GAGGGACAGTCACACTCACTTGTGGCTTGAGCTCTGGCTCAGT | | GTVTLTCGLSSGSVS | | | |
| | | CTCTACTAGTTACTACCCCAGCTGGTACCGGCAGACCCCAGGC | | TSYYPSWYRQTPGQA | | | |
| | | CAGGCTCCACGCACGCTCATCTACAACACAAAGACTCGCTCTT | | PRTLIYNTKTRSSGV | | | |
| | | CTGGGGTCCCTGATCGCTTCTCTGGCTCCATCCTTGGGAACAA | | PDRFSGSILGNKAAL | | | |
| | | AGCTGCCCTCACCATCACGGGGGCCCAGGCAGATGATGAATCT | | TITGAQADDESDYHC | | | |
| | | GATTATCACTGTATGCTATATATGGGTAGTGGCATTTGGGTGT | | MLYMGSGIWVFGGGT | | | |
| | | TCGGCGGAGGGACCAAGCTCACCGTCCTA | | KLTVL | | | |
| ADI-81776 | 4600 | TCGTATGAGCTGACTCAGCCACCCTCGGTGTCAGTGGCCCCAG | 4846 | SYELTQPPSVSVAPG | 5199 | 4 | 4 |
| | | GACAGACGGCCAGGATTACCTGTGGGGGAAACAACATTGGAAG | | QTARITCGGNNIGSK | | | |
| | | TAAAAGTGTGCACTGGTACCAGCTGAAGGCAGGCCAGGCCCCT | | SVHWYQLKAGQAPVL | | | |
| | | GTGCTGGTCGTCTATGATGATAGCGACCGGCCCTCAGGGATCC | | VVYDDSDRPSGIPER | | | |
| | | CGGAGCGATTCTCTGGCTCCAAGTCTGGGAACACGGCCACCCT | | FSGSKSGNTATLIIS | | | |
| | | GATCATCAGCAGGGTCGAAGCCGGGGATGAGGCCGACTATTAC | | RVEAGDEADYYCHVW | | | |
| | | TGTCACGTGTGGGATAGTAGTAGTGATCATTGGGTATTCGGCG | | DSSSDHWVFGGGTKL | | | |
| | | GAGGGACCAAGCTCACCGTCGTA | | TWV | | | |
| ADI-81810 | 2947 | TCGTATGAGCTGACTCAGCCACCCTCGGTGTCAGTGGCCCCAG | 4847 | SYELTQPPSVSVAPG | 5200 | 4 | 4 |
| | | GACAGACGGCCAGGATTCCCTGTGGGGGAAACAACATTGGAAG | | QTARIPCGGNNIGSK | | | |
| | | TAAAAGTGTGCACTGGTACCAGCAGAAGCCAGGCCAGGCCCCT | | SVHWYQQKPGQAPVL | | | |
| | | GTGCTGGTCGTCTATGATGATCGCGACCGGCCCTCAGGGATCC | | VVYDDRDRPSGIPER | | | |
| | | CTGAGCGATTCTCTGGCTCCAGCTCTGGGAACACGGCCACCCT | | FSGSSSGNTATLTLS | | | |
| | | GACCCTCAGCAGGGTCGAAGCCGGGGATGAGGCCGACTATTAC | | RVEAGDEADYYCQVW | | | |
| | | TGTCAGGTGTGGGATAGTAGTAGTGATCTTGTGATATTCGGCG | | DSSSDLVIFGGGTKV | | | |
| | | GAGGGACCAAGGTCACCGTCCTA | | TVL | | | |
| ADI-81634 | 2939 | TATTATGAGCTGACTCAGCCACCCTCGGTGTCGGTGTCCCCAG | 4848 | YYELTQPPSVSVSPG | 5201 | 4 | 3 |
| | | GACAGACGGCCAGGATCACCTGCTCTGGAGATACATTGCCAAC | | QTARITCSGDTLPTQ | | | |
| | | ACAATATGCTTATTGGTACCAGCAGAAGCCAGGCCAGGCCCCT | | YAYWYQQKPGQAPVL | | | |
| | | GTGTTGGTGATATATAAAGACAGTGAGAGGCCCTCAGGGATCC | | VIYKDSERPSGIPER | | | |
| | | CTGAGCGATTCTCTGGCTCCACCTCAGGGACAACAGTCACGTT | | FSGSTSGTTVTLTIS | | | |
| | | GACCATCAGTGGAGTCCAGGCAGAAGACGAGGCTGACTATTAC | | GVQAEDEADYYCQSA | | | |
| | | TGTCAATCAGCAGACAGCAGTGATATCCGATTCGGCGGAGGGA | | DSSDIRFGGGTKLTV | | | |
| | | CCAAGCTCACCGTCCTA | | L | | | |
| ADI-81817 | 2938 | GACATCCCGGTGACGCAGTCTCCGTCCTCCCTGTCTGCATCTG | 4849 | DIPVTQSPSSLSASV | 5202 | 4 | 3 |
| | | TAGGAGACAGAGTCACCATCACTTGCCGGGCAAGTCAGAGCAT | | GDRVTITCRASQSIS | | | |
| | | TAGCAGCTTTTTAAACTGGTATCAGCAGAAACCAGGGAAAGCC | | SFLNWYQQKPGKAPK | | | |
| | | CCTAAGCTCCTGATCTATGCTGTGTCCAGTTTGCAAAGTGGGG | | LLIYAVSSLQSGVPS | | | |
| | | TCCCATCAAGGTTCAGTGGCAGTGAATCTGGGACAGATTTCAC | | RFSGSESGTDFTLTI | | | |
| | | TCTCACCATCAGCAGTCTGCAACCTGAAGATTTTGCAACTTAC | | SSLQPEDFATYYCQQ | | | |
| | | TACTGTCAACAGAATTACAATTCCCCCCTCACTTTCGGCGGGG | | NYNSPLTFGGGTKVD | | | |
| | | GGACCAAAGTGGATATCAAA | | IK | | | |
| ADI-81805 | 2939 | AATTTTATGCTGACTCAGCCCCACTCTGTGTCGGAGTCTCCGG | 4850 | NFMLTQPHSVSESPG | 5203 | 3 | 3 |
| | | GGAAGACAGTAACCATCTCCTGCACCCGCAGCAGTGGCAGCAT | | KTVTISCTRSSGSIA | | | |
| | | TGCCAGCAACTATGTGCAGTGGTACCAGCAGCGCCCGGGCAGT | | SNYVQWYQQRPGSSP | | | |
| | | TCACCTTCCACTGTTATCTATGAGGATAACCAAAGACCCTCTG | | STVIYEDNQRPSGVP | | | |
| | | GGGTCCCTGATCGGTTCTCTGGCTCCATCGACAGCTCCTCCAA | | DRFSGSIDSSSNSAS | | | |
| | | CTCTGCCTCCCTCACCATCTCTGGACTGCAGACTGACGACGAG | | LTISGLQTDDEADYY | | | |
| | | GCTGACTACTACTGTCAGTCTTATGATAGCAGCCTTTGGGTGT | | CQSYDSSLWVFGGGT | | | |
| | | TCGGCGGAGGGACCAAGCTCACCGTCCTA | | KLTVL | | | |
| ADI-81576 | 2944 | GAAACGACACTCACGCAGTCTCCAGGCACCCTGTCTTTGTCTC | 4851 | ETTLTQSPGTLSLSP | 5204 | 3 | 3 |
| | | CAGGGGAAAGAGCCACCTTCTCCTGCAGGGCCAGTCAGAGTGT | | GERATFSCRASQSVS | | | |
| | | TAGCAGCAGCCACTTAGCCTGGTACCAGCAGAAACCTGGCCAG | | SSHLAWYQQKPGQAP | | | |
| | | GCTCCCAGGCTCCTCATCTATGGTGCATCCAGCAGGGCCACTG | | RLLIYGASSRATGIP | | | |
| | | GCATCCCAGACAGGTTCAGTGGGAGTGGGTCAGGGACAGACTT | | DRFSGSGSGTDFTLT | | | |
| | | CACTCTCACCATCAGCAGACTGGAGCCTGAAGATGTTGCAGTG | | ISRLEPEDVAVYYCQ | | | |
| | | TATTACTGTCAGCAGTATCGTAGCTCACCGTGGACGTTCGGCC | | QYRSSPWTFGQGTKV | | | |
| | | AAGGGACCAAAGTGGATATCAAA | | DIK | | | |
| ADI-81665 | 2937 | GAAACGACACTCACCCAGTCTCCAGGCACCCTATCTTTGTCTC | 4852 | ETTLTQSPGTLSLSP | 5205 | 3 | 3 |
| | | CAGGTGAAAGAGTCACCCTCTCCTGCAGGGCCAGTCAGAGTGT | | GERVTLSCRASQSVS | | | |
| | | TAGCAGCAGCTACTTAGCCTGGTACCAGCAGAAACCTGGCCAG | | SSYLAWYQQKPGQAP | | | |
| | | GCTCCCAGGCTCCTCATCTCTGGTGCATCCAGCAGGGCCCCTG | | RLLISGASSRAPGIP | | | |
| | | GCATTCCAGACAGGTTCAGTGGCAGTGGGTCTGGGACAGACTT | | DRFSGSGSGTDFTLT | | | |
| | | CACTCTCACCATCAGCAGACTGGAGCCTGAAGATTTTGCAGTG | | ISRLEPEDFAVYYCQ | | | |
| | | TATTACTGTCAGCAGTATGTTACCTCACCCACTTTTGGCCAGG | | QYVTSPTFGQGTKVE | | | |
| | | GGACCAAGGTGGAGATCAAA | | IK | | | |

| | | | SEQ | | SEQ | | SEQ | | SEQ | | SEQ | | SEQ | |
|---|---|---|---|---|---|---|---|---|---|---|---|---|---|---|
| | VL | VL | ID | VL | ID | VL | ID | VL | ID | VL | ID | VL | ID | VL |
| Clone ID | Germline | FR1 | NO: | CDR1 | NO: | FR2 | NO: | CDR2 | NO: | FR3 | NO: | CDR3 | NO: | FR4 |
| ADI-81714 | IGKV1D-39 | EIPMTQ | 1912 | RASQSI | 2066 | WYQQKP | 2257 | AASSLH | 2426 | GVPSRF | 2552 | QQSYST | 4435 | FGGGTK |
| | | SPSSLS | | STYLN | | GKAPKL | | S | | SGSGSG | | PPLT | | VEIK |
| | | ASVGDR | | | | LIY | | | | TDFTLT | | | | |
| | | VTITC | | | | | | | | ISSLQP | | | | |
| | | | | | | | | | | EDLATY | | | | |
| | | | | | | | | | | YC | | | | |
| ADI-81683 | IGKV3-11 | EMALTQ | 3670 | RASQSV | 2119 | WYQQKP | 2258 | GASNRA | 4107 | GIPARF | 2607 | QQRTNW | 4512 | FGQGTK |
| | | SPATLS | | STYLA | | GQAPRL | | T | | SGSGSG | | PRMYT | | VEIK |
| | | LSPGEG | | | | LIY | | | | TDFTLT | | | | |
| | | ATLSC | | | | | | | | ISSLEP | | | | |
| | | | | | | | | | | EDFAVY | | | | |
| | | | | | | | | | | YC | | | | |
| ADI-81820 | IGLV3-21 | SYELTQ | 1919 | GGNEIG | 3869 | WYQQKP | 2358 | DDSDRP | 2399 | GIPERF | 2545 | QVWDSI | 4513 | FGGGTK |
| | | PPSVSV | | SKSVH | | GQAPVL | | S | | SGSNSG | | SHHFNW | | LTVL |
| | | APGQTA | | | | VVN | | | | NTATLT | | V | | |
| | | RITC | | | | | | | | ISRVEA | | | | |
| | | | | | | | | | | GDEADY | | | | |
| | | | | | | | | | | YC | | | | |
| ADI-81569 | IGKV1-33 | EIQLTQ | 1917 | QASQDI | 3870 | WYQQKP | 2257 | DASNFE | 4140 | GVPSRF | 4297 | QQFDSL | 4514 | FGGGTK |
| | | SPSSLS | | TNYLN | | GKAPKL | | T | | SGSGSG | | PLT | | VEIK |
| | | ASVGDR | | | | LIY | | | | TDFTFT | | | | |
| | | VTITC | | | | | | | | ISSLQP | | | | |
| | | | | | | | | | | EDIAIY | | | | |
| | | | | | | | | | | YC | | | | |
| ADI-81873 | IGKV1D-39 | EIRMTQ | 3671 | RASQSI | 2050 | WYQQKP | 2257 | AASTLQ | 2392 | GVPSRF | 4298 | QQSYIM | 4515 | FGQGTK |
| | | SPSSLS | | SSYLN | | GKAPKL | | S | | SGSGFG | | PPWT | | VEIK |
| | | ASVGDR | | | | LIY | | | | TDFTLT | | | | |
| | | VTITC | | | | | | | | ISSLQP | | | | |
| | | | | | | | | | | EDFATY | | | | |
| | | | | | | | | | | HC | | | | |
| ADI-81534 | IGKV1D-39 | DIQMTQ | 1878 | RASQRI | 2135 | WYQQKV | 4012 | AASSLQ | 2391 | GVPSRF | 2534 | QQSYVM | 4516 | FGQGTK |
| | | SPSSLS | | SSYLN | | GKAPKL | | S | | SGSGSG | | PPWT | | VEIK |
| | | ASVGDR | | | | LIY | | | | TDFTLT | | | | |
| | | VTITC | | | | | | | | ISSLQP | | | | |
| | | | | | | | | | | EDFATY | | | | |
| | | | | | | | | | | YC | | | | |
| ADI-81671 | IGLV1-44 | QSVLTQ | 3566 | SGSSSN | 2162 | WYQQLP | 3951 | SNNQRP | 2463 | GVPDRF | 2615 | ATWDDS | 2815 | FGGGTK |
| | | PPSASG | | IGSNSV | | RTAPKL | | S | | SGSKSG | | LTGPV | | VTVL |
| | | TPGQRV | | N | | LVY | | | | TSASLA | | | | |
| | | TISC | | | | | | | | ISGLQS | | | | |
| | | | | | | | | | | EDEADY | | | | |
| | | | | | | | | | | YC | | | | |
| ADI-81749 | IGKV3-11 | ETTLTQ | 3633 | RASQSV | 3871 | WYQQKP | 2258 | DASNRA | 2448 | GIPGRF | 4299 | QLRSNW | 4517 | FGGGTK |
| | | SPATLS | | SNYLA | | GQAPRL | | T | | SGSGSG | | PPRLS | | VEIK |
| | | LSPGER | | | | LIY | | | | TDFTLT | | | | |
| | | ATLSC | | | | | | | | ISGLEP | | | | |
| | | | | | | | | | | EDFAVY | | | | |
| | | | | | | | | | | YC | | | | |

| | | | | | | VL | VL Amino |
|---|---|---|---|---|---|---|---|
| | SEQ | | SEQ | | SEQ | Nucleotide | Acid |
| | ID | | ID | | ID | Sub- | Sub- |
| Clone ID | NO: | VL DNA | NO: | VL Protein | NO: | stitutions | stitutions |
| ADI-81714 | 2936 | GAAATCCCAATGACCCAGTCTCCATCCTCCCTGTCTGCATCTG | 4853 | EIPMTQSPSSLSASV | 5206 | 3 | 3 |
| | | TAGGAGACAGAGTCACCATCACTTGCCGGGCAAGTCAGAGCAT | | GDRVTITCRASQSIS | | | |
| | | TAGCACCTATTTAAATTGGTATCAGCAGAAACCAGGGAAAGCC | | TYLNWYQQKPGKAPK | | | |
| | | CCTAAACTCCTGATCTATGCTGCTTCCAGTTTGCATAGTGGGG | | LLIYAASSLHSGVPS | | | |
| | | TCCCATCAAGGTTCAGTGGCAGTGGATCAGGGACAGATTTCAC | | RFSGSGSGTDFTLTI | | | |
| | | TCTCACCATCAGCAGTCTGCAACCTGAAGATCTTGCAACTTAC | | SSLQPEDLATYYCQQ | | | |
| | | TACTGTCAACAGAGTTACAGTACCCCTCCGCTCACTTTCGGCG | | SYSTPPLTFGGGTKV | | | |
| | | GAGGGACCAAGGTGGAGATCAAA | | EIK | | | |
| ADI-81683 | 2937 | GAAATGGCACTCACGCAGTCTCCAGCCACCCTGTCTTTGTCTC | 4854 | EMALTQSPATLSLSP | 5207 | 3 | 3 |
| | | CAGGGGAAGGAGCCACCCTCTCCTGCAGGGCCAGTCAGAGTGT | | GEGATLSCRASQSVS | | | |
| | | TAGCACCTACTTAGCCTGGTACCAACAGAAACCTGGCCAGGCT | | TYLAWYQQKPGQAPR | | | |
| | | CCCAGGCTCCTCATCTATGGTGCATCCAACAGGGCCACTGGCA | | LLIYGASNRATGIPA | | | |
| | | TCCCAGCCAGGTTCAGTGGCAGTGGGTCTGGGACAGACTTCAC | | RFSGSGSGTDFTLTI | | | |
| | | TCTCACCATCAGCAGCCTAGAGCCTGAAGATTTTGCAGTTTAT | | SSLEPEDFAVYYCQQ | | | |
| | | TACTGTCAGCAGCGTACCAACTGGCCTCGGATGTACACTTTTG | | RTNWPRMYTFGQGTK | | | |
| | | GCCAGGGGACCAAGGTGGAGATCAAA | | VEIK | | | |
| ADI-81820 | 2939 | TCGTATGAGCTGACGCAGCCACCCTCGGTGTCAGTGGCCCCAG | 4855 | SYELTQPPSVSVAPG | 5208 | 3 | 2 |
| | | GACAGACGGCCAGGATTACCTGTGGGGGAAATGAGATTGGAAG | | QTARITCGGNEIGSK | | | |
| | | TAAAAGTGTGCACTGGTACCAGCAGAAGCCAGGCCAGGCCCCT | | SVHWYQQKPGQAPVL | | | |
| | | GTGCTGGTCGTCAATGATGATAGCGACCGGCCCTCAGGGATCC | | VVNDDSDRPSGIPER | | | |
| | | CTGAGCGATTCTCTGGCTCCAACTCTGGAAACACGGCCACCCT | | FSGSNSGNTATLTIS | | | |
| | | GACCATCAGCAGGGTCGAAGCCGGGGATGAGGCCGACTATTAC | | RVEAGDEADYYCQVW | | | |
| | | TGTCAGGTGTGGGATAGTATTAGTCATCATTTTAATTGGGTGT | | DSISHHFNWVFGGGT | | | |
| | | TCGGCGGAGGGACCAAGCTCACCGTCCTA | | KLTVL | | | |
| ADI-81569 | 2936 | GAAATCCAGTTGACCCAGTCTCCATCCTCCCTGTCTGCATCTG | 4856 | EIQLTQSPSSLSASV | 5209 | 3 | 3 |
| | | TAGGAGACAGAGTCACCATCACTTGCCAGGCGAGTCAGGACAT | | GDRVTITCQASQDIT | | | |
| | | TACCAACTATTTAAATTGGTATCAGCAGAAACCAGGGAAAGCC | | NYLNWYQQKPGKAPK | | | |
| | | CCTAAGCTCCTGATCTACGATGCATCCAATTTCGAAACAGGGG | | LLIYDASNFETGVPS | | | |
| | | TCCCATCAAGGTTCAGTGGAAGTGGATCTGGGACAGATTTTAC | | RFSGSGSGTDFTFTI | | | |
| | | TTTCACCATCAGCAGCCTGCAGCCTGAAGATATTGCAATATAT | | SSLQPEDIAIYYCQQ | | | |
| | | TACTGTCAACAGTTTGATAGTCTCCCCCTCACTTTCGGCGGAG | | FDSLPLTFGGGTKVE | | | |
| | | GGACCAAGGTGGAAATCAAA | | IK | | | |
| ADI-81873 | 2937 | GAAATCCGGATGACCCAGTCTCCATCCTCCCTGTCTGCATCTG | 4857 | EIRMTQSPSSLSASV | 5210 | 3 | 3 |
| | | TAGGAGACAGAGTCACCATCACTTGCCGGGCAAGTCAGAGCAT | | GDRVTITCRASQSIS | | | |
| | | TAGCAGCTATTTAAATTGGTATCAGCAGAAACCAGGGAAAGCC | | SYLNWYQQKPGKAPK | | | |
| | | CCTAAGCTCCTGATTTATGCTGCATCCACTTTGCAAAGTGGGG | | LLIYAASTLQSGVPS | | | |
| | | TCCCATCAAGATTCAGTGGCAGTGGATTTGGGACAGATTTCAC | | RFSGSGFGTDFTLTI | | | |
| | | TCTCACCATCAGCAGTCTGCAACCTGAAGATTTTGCAACTTAC | | SSLQPEDFATYHCQQ | | | |
| | | CACTGTCAACAGAGTTACATTATGCCACCCTGGACGTTCGGCC | | SYIMPPWTFGQGTKV | | | |
| | | AAGGGACCAAGGTGGAAATCAAA | | EIK | | | |
| ADI-81534 | 2937 | GACATCCAGATGACCCAGTCTCCATCCTCCCTGTCTGCATCTG | 4858 | DIQMTQSPSSLSASV | 5211 | 3 | 2 |
| | | TAGGAGACAGAGTCACCATCACTTGTCGGGCAAGTCAGAGGAT | | GDRVTITCRASQRIS | | | |
| | | TAGCAGTTATTTAAATTGGTATCAGCAAAAAGTAGGGAAGGCC | | SYLNWYQQKVGKAPK | | | |
| | | CCTAAGCTCCTGATCTATGCTGCATCCAGTTTGCAAAGTGGGG | | LLIYAASSLQSGVPS | | | |
| | | TCCCATCAAGGTTCAGTGGCAGTGGATCTGGGACAGATTTCAC | | RFSGSGSGTDFTLTI | | | |
| | | TCTCACCATCAGCAGTCTGCAACCTGAAGATTTTGCCACTTAC | | SSLQPEDFATYYCQQ | | | |
| | | TACTGTCAACAGAGTTACGTTATGCCCCCGTGGACGTTCGGCC | | SYVMPPWTFGQGTKV | | | |
| | | AAGGGACCAAGGTGGAAATCAAA | | EIK | | | |
| ADI-81671 | 2947 | CAGTCTGTGCTGACTCAGCCCCCCTCAGCGTCTGGGACCCCCG | 4859 | QSVLTQPPSASGTPG | 5212 | 3 | 3 |
| | | GGCAGAGGGTCACCATCTCTTGTTCTGGAAGCAGCTCCAACAT | | QRVTISCSGSSSNIG | | | |
| | | CGGAAGTAATTCTGTAAACTGGTACCAGCAACTCCCAAGAACG | | SNSVNWYQQLPRTAP | | | |
| | | GCCCCCAAACTCCTCGTCTATAGTAATAATCAGCGGCCCTCAG | | KLLVYSNNQRPSGVP | | | |
| | | GGGTCCCTGACCGATTCTCTGGCTCCAAGTCTGGCACCTCAGC | | DRFSGSKSGTSASLA | | | |
| | | CTCCCTGGCCATCAGTGGGCTCCAGTCTGAGGATGAGGCTGAT | | ISGLQSEDEADYYCA | | | |
| | | TATTACTGCGCAACATGGGATGACAGCCTGACTGGTCCGGTGT | | TWDDSLTGPVFGGGT | | | |
| | | TCGGCGGAGGGACCAAGGTCACCGTCCTA | | KVTVL | | | |
| ADI-81749 | 2936 | GAAACGACACTCACGCAGTCTCCAGCCACCCTGTCTTTGTCTC | 4860 | ETTLTQSPATLSLSP | 5213 | 3 | 3 |
| | | CAGGGGAAAGAGCCACCCTCTCCTGCAGGGCCAGTCAGAGTGT | | GERATLSCRASQSVS | | | |
| | | TAGCAACTACTTAGCCTGGTACCAACAGAAACCTGGCCAGGCT | | NYLAWYQQKPGQAPR | | | |
| | | CCCAGGCTCCTCATCTATGATGCTTCCAACAGGGCCACTGGCA | | LLIYDASNRATGIPG | | | |
| | | TCCCAGGCAGGTTCAGTGGCAGTGGGTCTGGGACAGACTTCAC | | RFSGSGSGTDFTLTI | | | |
| | | TCTCACCATCAGCGGCCTAGAGCCTGAAGACTTTGCAGTTTAT | | SGLEPEDFAVYYCQL | | | |
| | | TACTGTCAGCTGCGTAGCAACTGGCCTCCGCGCCTCTCTTTCG | | RSNWPPRLSFGGGTK | | | |
| | | GCGGAGGGACCAAGGTGGAAATCAAA | | VEIK | | | |

| | | | SEQ | | SEQ | | SEQ | | SEQ | | SEQ | | SEQ | |
|---|---|---|---|---|---|---|---|---|---|---|---|---|---|---|
| | VL | VL | ID | VL | ID | VL | ID | VL | ID | VL | ID | VL | ID | VL |
| Clone ID | Germline | FR1 | NO: | CDR1 | NO: | FR2 | NO: | CDR2 | NO: | FR3 | NO: | CDR3 | NO: | FR4 |
| ADI-81668 | IGKV4-1 | DIVMTQ | 2046 | KSSQSV | 3872 | WYQQKP | 4013 | WASTRE | 2422 | GVPDRF | 2619 | QQYYST | 4518 | FGQGTK |
| | | SPDSLA | | LYSSNS | | GQPPKL | | S | | SGSGSG | | PLT | | VDIK |
| | | VSLGER | | QNYLA | | LLY | | | | TDFTLT | | | | |
| | | ATINC | | | | | | | | ISSLQA | | | | |
| | | | | | | | | | | EDVAVY | | | | |
| | | | | | | | | | | YC | | | | |
| ADI-81771 | IGKV3-20 | EMTLTQ | 1963 | RASQSV | 3873 | WYQQKA | 4014 | GASSRA | 2464 | GIPDRF | 4300 | QQYGYA | 4519 | FGQGTK |
| | | SPGTLS | | SSTYLA | | GQAPRL | | T | | SGSGAG | | PWT | | VEIK |
| | | LSPGER | | | | LIY | | | | TDFTLT | | | | |
| | | ATLSC | | | | | | | | ISRLEP | | | | |
| | | | | | | | | | | EDFAVY | | | | |
| | | | | | | | | | | YC | | | | |
| ADI-81865 | IGKV1-5 | EIVLTQ | 3672 | RASQSI | 2190 | WYQQKP | 2316 | KATNLE | 4141 | GVPSRF | 2532 | QQYNSY | 2798 | FGQGTK |
| | | SPSTLS | | SSWLA | | GKAPKV | | S | | SGSGSG | | YT | | VEIK |
| | | ASVGDR | | | | LIY | | | | TEFTLT | | | | |
| | | VTITC | | | | | | | | ISSLQP | | | | |
| | | | | | | | | | | DDFATY | | | | |
| | | | | | | | | | | YC | | | | |
| ADI-81670 | IGKV1-5 | EIVLTQ | 3672 | RASQSI | 2190 | WYQQKP | 2263 | KASSLE | 4142 | GVPSRF | 4301 | QQYNSF | 4520 | FGQGTK |
| | | SPSTLS | | SSWLA | | GKAPNL | | N | | SGSGSG | | PYT | | VEIK |
| | | ASVGDR | | | | LIY | | | | TEFTLT | | | | |
| | | VTITC | | | | | | | | ITSLQP | | | | |
| | | | | | | | | | | DDFATY | | | | |
| | | | | | | | | | | YC | | | | |
| ADI-81702 | IGKV1-5 | EMTMTQ | 3673 | RASQSI | 3812 | WYQQKP | 2275 | KASSLE | 2386 | GVPSRF | 2532 | QQYSSY | 4521 | FGQGTK |
| | | SPSTVS | | SNWLA | | GRAPKL | | S | | SGSGSG | | PRT | | VEIK |
| | | ASVGDR | | | | LIY | | | | TEFTLT | | | | |
| | | VTITC | | | | | | | | ISSLQP | | | | |
| | | | | | | | | | | DDFATY | | | | |
| | | | | | | | | | | YC | | | | |
| ADI-81754 | IGKV1-33 | EIQMTQ | 1881 | QASQDI | 3874 | WYQQKP | 2257 | DASNLE | 2416 | GVPSRF | 4269 | QQYDNL | 4522 | FGQGTK |
| | | SPSSLS | | SNSLH | | GKAPKL | | T | | SGSGSG | | PSYT | | VEIK |
| | | ASVGDR | | | | LIY | | | | TDFTLT | | | | |
| | | VTITC | | | | | | | | ISSLQP | | | | |
| | | | | | | | | | | EDIATY | | | | |
| | | | | | | | | | | YC | | | | |
| ADI-81855 | IGKV1-NL1 | EIAMTQ | 3674 | RASQGI | 2062 | WYQQKP | 2259 | AASTLE | 2398 | GVPSRF | 4283 | QQYYSN | 4483 | FGQGTK |
| | | SPSSLS | | SNSLA | | GKAPKL | | S | | SGSGSG | | LGRT | | VDIK |
| | | ASVGDR | | | | LLY | | | | TDFTLT | | | | |
| | | VTITC | | | | | | | | ISSLQP | | | | |
| | | | | | | | | | | EDFSTY | | | | |
| | | | | | | | | | | YC | | | | |
| ADI-81573 | IGLV1-44 | SYELTQ | 1962 | SGSSSN | 3875 | WYQQLP | 2314 | NNNQRP | 4061 | GVPDRF | 4302 | AAWDDS | 4413 | FGTGTK |
| | | PPSASG | | IGSNTL | | GTAPKL | | S | | SGSKSG | | LNGYV | | LTVL |
| | | TPGQRV | | N | | LIY | | | | TSASLA | | | | |
| | | TISC | | | | | | | | IRGLQS | | | | |
| | | | | | | | | | | EDEADY | | | | |
| | | | | | | | | | | YC | | | | |

| | | | | | | VL | VL Amino |
|---|---|---|---|---|---|---|---|
| | SEQ | | SEQ | | SEQ | Nucleotide | Acid |
| | ID | | ID | | ID | Sub- | Sub- |
| Clone ID | NO: | VL DNA | NO: | VL Protein | NO: | stitutions | stitutions |
| ADI-81668 | 2944 | GACATCGTGATGACCCAGTCTCCAGACTCCCTGGCTGTGTCTC | 4861 | DIVMTQSPDSLAVSL | 5214 | 3 | 3 |
| | | TGGGCGAGAGGGCCACCATCAACTGCAAGTCCAGCCAGAGTGT | | GERATINCKSSQSVL | | | |
| | | TTTATACAGCTCCAACAGTCAGAATTACTTAGCTTGGTACCAG | | YSSNSQNYLAWYQQK | | | |
| | | CAGAAACCAGGACAGCCTCCTAAACTGCTCCTTTACTGGGCAT | | PGQPPKLLLYWASTR | | | |
| | | CTACCCGGGAATCCGGGGTCCCTGACCGATTCAGTGGCAGCGG | | ESGVPDRFSGSGSGT | | | |
| | | GTCTGGGACAGATTTCACTCTCACCATCAGCAGCCTGCAGGCT | | DFTLTISSLQAEDVA | | | |
| | | GAAGATGTGGCGGTTTATTACTGTCAGCAATATTATAGTACTC | | VYYCQQYYSTPLTFG | | | |
| | | CTCTGACGTTCGGCCAAGGGACCAAAGTGGATATCAAA | | QGTKVDIK | | | |
| ADI-81771 | 2937 | GAAATGACACTGACGCAGTCTCCAGGCACCCTGTCTTTGTCTC | 4862 | EMTLTQSPGTLSLSP | 5215 | 3 | 3 |
| | | CAGGGGAAAGAGCCACCCTCTCCTGCAGGGCCAGTCAGAGTGT | | GERATLSCRASQSVS | | | |
| | | TAGTAGCACCTACTTAGCCTGGTACCAGCAGAAAGCTGGCCAG | | STYLAWYQQKAGQAP | | | |
| | | GCTCCCAGGCTCCTCATCTATGGTGCATCCAGCAGGGCCACTG | | RLLIYGASSRATGIP | | | |
| | | GGATCCCAGACAGGTTCAGTGGCAGTGGGGCTGGGACAGACTT | | DRFSGSGAGTDFTLT | | | |
| | | CACTCTCACGATCAGTAGACTGGAGCCTGAAGATTTTGCAGTG | | ISRLEPEDFAVYYCQ | | | |
| | | TATTACTGTCAGCAATATGGTTACGCACCGTGGACGTTCGGCC | | QYGYAPWTFGQGTKV | | | |
| | | AAGGGACCAAGGTGGAAATCAAA | | EIK | | | |
| ADI-81865 | 2937 | GAAATCGTGTTGACCCAGTCTCCTTCCACCCTGTCTGCATCTG | 4863 | EIVLTQSPSTLSASV | 5216 | 3 | 3 |
| | | TAGGAGACAGAGTCACCATCACTTGCCGGGCCAGTCAGAGTAT | | GDRVTITCRASQSIS | | | |
| | | TAGTAGCTGGTTGGCCTGGTATCAGCAGAAACCAGGGAAAGCC | | SWLAWYQQKPGKAPK | | | |
| | | CCTAAGGTCCTGATCTATAAGGCAACTAATTTAGAAAGTGGGG | | VLIYKATNLESGVPS | | | |
| | | TCCCATCAAGGTTCAGCGGCAGTGGATCTGGGACAGAATTCAC | | RFSGSGSGTEFTLTI | | | |
| | | TCTCACCATCAGCAGCCTGCAGCCTGATGATTTTGCAACCTAT | | SSLQPDDFATYYCQQ | | | |
| | | TACTGCCAACAGTATAATAGTTATTACACTTTTGGCCAGGGGA | | YNSYYTFGQGTKVEI | | | |
| | | CCAAAGTGGAAATCAAA | | K | | | |
| ADI-81670 | 2937 | GAAATCGTGTTGACCCAGTCTCCCTCCACCCTGTCTGCATCTG | 4864 | EIVLTQSPSTLSASV | 5217 | 3 | 3 |
| | | TAGGAGACAGAGTCACCATCACTTGCCGGGCCAGTCAGAGTAT | | GDRVTITCRASQSIS | | | |
| | | TAGTAGTTGGTTGGCCTGGTATCAGCAGAAACCTGGGAAGGCC | | SWLAWYQQKPGKAPN | | | |
| | | CCTAACCTCCTGATCTATAAGGCGTCTAGTTTAGAAAATGGGG | | LLIYKASSLENGVPS | | | |
| | | TCCCATCAAGGTTCAGCGGCAGTGGATCTGGGACAGAATTCAC | | RFSGSGSGTEFTLTI | | | |
| | | TCTCACCATCACCAGCCTGCAGCCTGATGATTTTGCAACTTAT | | TSLQPDDFATYYCQQ | | | |
| | | TACTGCCAACAGTATAATAGTTTTCCGTACACTTTTGGCCAGG | | YNSFPYTFGQGTKVE | | | |
| | | GGACCAAGGTGGAAATCAAA | | IK | | | |
| ADI-81702 | 2937 | GAAATGACAATGACGCAGTCTCCTTCCACCGTGTCTGCATCTG | 4865 | EMTMTQSPSTVSASV | 5218 | 3 | 3 |
| | | TAGGAGACAGAGTCACCATCACTTGCCGGGCCAGTCAGAGTAT | | GDRVTITCRASQSIS | | | |
| | | TAGTAACTGGTTGGCCTGGTATCAACAAAAACCAGGGAGAGCC | | NWLAWYQQKPGRAPK | | | |
| | | CCTAAACTCCTGATCTATAAGGCGTCTAGTTTAGAAAGTGGGG | | LLIYKASSLESGVPS | | | |
| | | TCCCATCAAGGTTCAGTGGCAGTGGATCTGGGACAGAATTCAC | | RFSGSGSGTEFTLTI | | | |
| | | TCTCACCATCAGCAGCCTGCAGCCTGATGATTTTGCAACTTAT | | SSLQPDDFATYYCQQ | | | |
| | | TACTGCCAACAGTATAGCAGTTATCCAAGGACGTTCGGCCAAG | | YSSYPRTFGQGTKVE | | | |
| | | GGACCAAGGTGGAGATCAAA | | IK | | | |
| ADI-81754 | 2937 | GAAATCCAAATGACCCAGTCTCCTTCCTCCCTGTCTGCATCTG | 4866 | EIQMTQSPSSLSASV | 5219 | 3 | 3 |
| | | TAGGAGACAGAGTCACCATCACTTGCCAGGCGAGTCAGGACAT | | GDRVTITCQASQDIS | | | |
| | | TAGCAACTCTTTACATTGGTATCAGCAGAAACCAGGGAAAGCC | | NSLHWYQQKPGKAPK | | | |
| | | CCTAAGCTCCTGATCTACGATGCATCCAATTTGGAAACAGGTG | | LLIYDASNLETGVPS | | | |
| | | TCCCATCAAGGTTCAGTGGAAGTGGATCTGGGACAGATTTTAC | | RFSGSGSGTDFTLTI | | | |
| | | TCTCACCATCAGCAGCCTGCAGCCTGAAGATATTGCAACATAT | | SSLQPEDIATYYCQQ | | | |
| | | TACTGTCAACAGTATGATAATCTCCCTTCGTATACTTTTGGCC | | YDNLPSYTFGQGTKV | | | |
| | | AGGGGACCAAGGTGGAGATCAAA | | EIK | | | |
| ADI-81855 | 2944 | GAAATCGCAATGACCCAGTCTCCATCCTCCCTGTCTGCATCTG | 4867 | EIAMTQSPSSLSASV | 5220 | 3 | 3 |
| | | TAGGAGACAGAGTCACCATCACTTGCCGGGCGAGTCAGGGTAT | | GDRVTITCRASQGIS | | | |
| | | TAGCAATTCTTTAGCCTGGTATCAGCAGAAACCAGGGAAAGCC | | NSLAWYQQKPGKAPK | | | |
| | | CCTAAGCTCCTGCTCTATGCTGCATCCACATTGGAAAGTGGGG | | LLLYAASTLESGVPS | | | |
| | | TCCCTTCCAGGTTCAGTGGCAGTGGATCTGGGACGGATTTCAC | | RFSGSGSGTDFTLTI | | | |
| | | TCTCACCATCAGCAGCCTGCAGCCTGAAGATTTTTCAACTTAT | | SSLQPEDFSTYYCQQ | | | |
| | | TACTGTCAACAGTATTATAGTAACCTCGGGAGGACGTTCGGCC | | YYSNLGRTFGQGTKV | | | |
| | | AAGGGACCAAGGTGGATATCAAA | | DIK | | | |
| ADI-81573 | 2949 | TCGTATGAGCTGACTCAGCCACCCTCAGCGTCTGGGACCCCCG | 4868 | SYELTQPPSASGTPG | 5221 | 3 | 3 |
| | | GGCAGAGGGTCACCATCTCTTGTTCTGGAAGCAGCTCCAACAT | | QRVTISCSGSSSNIG | | | |
| | | CGGAAGTAATACTTTAAACTGGTACCAGCAGCTCCCAGGAACG | | SNTLNWYQQLPGTAP | | | |
| | | GCCCCCAAACTCCTCATCTATAATAATAATCAGCGGCCCTCAG | | KLLIYNNNQRPSGVP | | | |
| | | GGGTCCCTGACCGATTCTCTGGCTCCAAGTCTGGCACCTCAGC | | DRFSGSKSGTSASLA | | | |
| | | CTCCCTGGCCATCAGGGGGCTCCAGTCTGAGGATGAGGCTGAT | | IRGLQSEDEADYYCA | | | |
| | | TATTACTGTGCAGCATGGGATGACAGCCTGAATGGTTATGTCT | | AWDDSLNGYVFGTGT | | | |
| | | TCGGAACTGGGACCAAGCTCACCGTCCTA | | KLTVL | | | |

| | | | SEQ | | SEQ | | SEQ | | SEQ | | SEQ | | SEQ | |
|---|---|---|---|---|---|---|---|---|---|---|---|---|---|---|
| | VL | VL | ID | VL | ID | VL | ID | VL | ID | VL | ID | VL | ID | VL |
| Clone ID | Germline | FR1 | NO: | CDR1 | NO: | FR2 | NO: | CDR2 | NO: | FR3 | NO: | CDR3 | NO: | FR4 |
| ADI-81614 | IGKV1D-39 | DIQMTQ | 1878 | RASQRI | 2135 | WYQQKP | 2257 | AASTLH | 4055 | GVPSRF | 2534 | QQSYST | 2715 | FGPGTR |
| | | SPSSLS | | SSYLN | | GKAPKL | | S | | SGSGSG | | PIT | | LEIK |
| | | ASVGDR | | | | LIY | | | | TDFTLT | | | | |
| | | VTITC | | | | | | | | ISSLQP | | | | |
| | | | | | | | | | | EDFATY | | | | |
| | | | | | | | | | | YC | | | | |
| ADI-81635 | IGLV3-21 | SYELTQ | 1919 | GGNDIG | 3876 | WYQQKP | 2283 | DDSDRP | 2399 | GIPERF | 4303 | QLWDST | 4523 | FGGGTK |
| | | PPSVSV | | SKNVH | | GQAPVL | | S | | SGSNSG | | GDHPEV | | LTVL |
| | | APGQTA | | | | VVY | | | | NTATLT | | IL | | |
| | | RITC | | | | | | | | ISRVEG | | | | |
| | | | | | | | | | | GDEADY | | | | |
| | | | | | | | | | | YC | | | | |
| ADI-81652 | IGKV2D-28 | EIVMTQ | 1923 | RSSQSL | 3877 | WYLQKP | 2260 | LASNRA | 4143 | GVPDRF | 4304 | MQALQT | 2765 | FGQGTR |
| | | SPLSLP | | LHSNGH | | GQSPQL | | S | | SGSGSG | | PIT | | LEIK |
| | | VTPGEP | | NYLD | | LIY | | | | TDFTLR | | | | |
| | | ASISC | | | | | | | | ISRVEA | | | | |
| | | | | | | | | | | EDVGVY | | | | |
| | | | | | | | | | | YC | | | | |
| ADI-81906 | IGKV3D-15 | EMTLTQ | 3675 | RASQSV | 3878 | WYQQKP | 2258 | GASTRA | 2383 | GIPARF | 4305 | QQYNIQ | 4524 | FGQGTK |
| | | SPATLS | | SNNLA | | GQAPRL | | T | | SGSGSG | | WT | | VEIK |
| | | VSPGGR | | | | LIY | | | | TEFTLT | | | | |
| | | ATLSC | | | | | | | | ISSLQA | | | | |
| | | | | | | | | | | EDFAVY | | | | |
| | | | | | | | | | | YC | | | | |
| ADI-81578 | IGLV1-40 | QSVLTQ | 1948 | TGSNSN | 2143 | WYQQLP | 2314 | GNTNRP | 2484 | GVPDRF | 2666 | QSYDSS | 4525 | FGGGTK |
| | | PPSVSG | | IGAGYD | | GTAPKL | | S | | SGSRSG | | LSTVF | | LTVL |
| | | APGQRV | | VH | | LIY | | | | TSASLA | | | | |
| | | TISC | | | | | | | | ITGLQA | | | | |
| | | | | | | | | | | EDEADY | | | | |
| | | | | | | | | | | YC | | | | |
| ADI-81856 | IGKV3D-15 | EMTLTQ | 3676 | RASQSV | 2227 | WYQQKP | 4015 | GASTRA | 2383 | GIPARF | 2569 | QQYHSW | 4526 | FGPGTK |
| | | SPGTLS | | SSNLA | | GQAPRL | | T | | SGSGSG | | PLFT | | VEIK |
| | | VSPGKR | | | | FIY | | | | TEFTLT | | | | |
| | | ATLSC | | | | | | | | ISSLQS | | | | |
| | | | | | | | | | | EDFAVY | | | | |
| | | | | | | | | | | YC | | | | |
| ADI-81896 | IGKV3D-15 | EIVMTQ | 3677 | RASQSV | 3879 | WYQQKP | 2258 | GASTRA | 2383 | GIPARF | 2529 | HQYTHW | 4527 | FGPGTK |
| | | SPATLS | | RSNLA | | GQAPRL | | T | | SGSGSG | | PLT | | VEIK |
| | | VSPGER | | | | LIY | | | | TEFTLT | | | | |
| | | VTLSC | | | | | | | | ISSLQS | | | | |
| | | | | | | | | | | EDFAVY | | | | |
| | | | | | | | | | | FC | | | | |
| ADI-81567 | IGLV1-40 | QSVMTQ | 3678 | TGSNSN | 2143 | WYQQLP | 3992 | VNSNRP | 4113 | GVPDRF | 2599 | QSYDSA | 4528 | FGGGTK |
| | | PPSVSG | | IGAGYD | | GTAPKL | | S | | SGSKSG | | LSGSV | | LTVL |
| | | APGQRV | | VH | | LIS | | | | TSASLA | | | | |
| | | TISC | | | | | | | | ITGLQA | | | | |
| | | | | | | | | | | EDEADY | | | | |
| | | | | | | | | | | YC | | | | |

| | | | | | | VL | VL Amino |
|---|---|---|---|---|---|---|---|
| | SEQ | | SEQ | | SEQ | Nucleotide | Acid |
| | ID | | ID | | ID | Sub- | Sub- |
| Clone ID | NO: | VL DNA | NO: | VL Protein | NO: | stitutions | stitutions |
| ADI-81614 | 4593 | GACATCCAGATGACCCAGTCTCCATCCTCCCTGTCTGCATCTG | 4869 | DIQMTQSPSSLSASV | 5222 | 3 | 3 |
| | | TAGGAGACAGAGTCACCATCACTTGCCGGGCAAGTCAGCGCAT | | GDRVTITCRASQRIS | | | |
| | | TAGCAGCTATTTAAATTGGTATCAGCAGAAACCAGGGAAAGCC | | SYLNWYQQKPGKAPK | | | |
| | | CCTAAGCTCCTGATCTATGCTGCATCCACTTTGCACAGTGGGG | | LLIYAASTLHSGVPS | | | |
| | | TCCCATCAAGGTTCAGTGGCAGTGGATCTGGGACAGATTTCAC | | RFSGSGSGTDFTLTI | | | |
| | | TCTCACCATCAGCAGTCTGCAACCTGAAGATTTTGCAACTTAC | | SSLQPEDFATYYCQQ | | | |
| | | TACTGTCAACAGAGTTACAGTACCCCGATCACCTTCGGCCCAG | | SYSTPITFGPGTRLE | | | |
| | | GGACACGACTGGAGATTAAA | | IK | | | |
| ADI-81635 | 2939 | TCGTATGAGCTGACGCAGCCACCCTCGGTGTCAGTGGCCCCAG | 4870 | SYELTQPPSVSVAPG | 5223 | 3 | 3 |
| | | GGCAGACGGCCAGGATTACCTGTGGGGGAAACGACATTGGAAG | | QTARITCGGNDIGSK | | | |
| | | TAAAAATGTGCACTGGTACCAACAGAAGCCAGGCCAGGCCCCT | | NVHWYQQKPGQAPVL | | | |
| | | GTGTTGGTCGTCTATGATGATAGCGACCGGCCCTCAGGGATCC | | VVYDDSDRPSGIPER | | | |
| | | CTGAGCGATTCTCTGGCTCCAACTCTGGGAACACGGCCACCCT | | FSGSNSGNTATLTIS | | | |
| | | GACCATCAGCAGGGTCGAAGGCGGGGATGAGGCCGACTATTAC | | RVEGGDEADYYCQLW | | | |
| | | TGTCAGCTGTGGGATAGTACTGGTGATCATCCGGAGGTGTTAT | | DSTGDHPEVLFGGGT | | | |
| | | TCGGCGGAGGGACCAAGCTCACCGTCCTA | | KLTVL | | | |
| ADI-81652 | 2940 | GAAATTGTGATGACTCAGTCTCCACTCTCCCTGCCCGTCACCC | 4871 | EIVMTQSPLSLPVTP | 5224 | 3 | 3 |
| | | CTGGAGAGCCGGCCTCCATCTCCTGCAGGTCTAGTCAGAGCCT | | GEPASISCRSSQSLL | | | |
| | | CCTGCATAGTAATGGACACAACTATTTGGATTGGTACCTGCAG | | HSNGHNYLDWYLQKP | | | |
| | | AAGCCAGGGCAGTCTCCACAACTCCTGATCTATTTGGCTTCTA | | GQSPQLLIYLASNRA | | | |
| | | ATCGGGCCTCCGGGGTCCCTGACAGGTTCAGTGGCAGTGGATC | | SGVPDRFSGSGSGTD | | | |
| | | AGGCACAGATTTTACACTGAGAATCAGCAGAGTGGAGGCTGAG | | FTLRISRVEAEDVGV | | | |
| | | GATGTTGGGGTTTATTACTGCATGCAAGCTCTACAAACTCCGA | | YYCMQALQTPITFGQ | | | |
| | | TCACCTTCGGCCAAGGGACACGACTGGAGATTAAA | | GTRLEIK | | | |
| ADI-81906 | 2937 | GAAATGACACTCACGCAGTCTCCAGCCACCCTGTCTGTGTCTC | 4872 | EMTLTQSPATLSVSP | 5225 | 3 | 3 |
| | | CAGGGGGAAGAGCCACCCTCTCCTGCAGGGCCAGTCAGAGTGT | | GGRATLSCRASQSVS | | | |
| | | TAGCAACAACTTAGCCTGGTACCAGCAGAAACCTGGCCAGGCT | | NNLAWYQQKPGQAPR | | | |
| | | CCCAGGCTCCTCATCTATGGTGCATCCACCAGGGCCACTGGTA | | LLIYGASTRATGIPA | | | |
| | | TCCCAGCCAGGTTCAGTGGCAGCGGGTCTGGGACAGAGTTCAC | | RFSGSGSGTEFTLTI | | | |
| | | TCTCACCATCAGCAGCCTGCAGGCTGAAGACTTTGCAGTTTAT | | SSLQAEDFAVYYCQQ | | | |
| | | TACTGTCAGCAGTATAATATCCAGTGGACGTTCGGCCAAGGGA | | YNIQWTFGQGTKVEI | | | |
| | | CCAAGGTGGAAATCAAA | | K | | | |
| ADI-81578 | 2939 | CAGTCTGTGCTGACGCAGCCGCCCTCAGTGTCTGGGGCCCCAG | 4873 | QSVLTQPPSVSGAPG | 5226 | 3 | 3 |
| | | GGCAGAGGGTCACCATCTCCTGCACTGGGAGCAACTCCAACAT | | QRVTISCTGSNSNIG | | | |
| | | CGGGGCAGGTTATGATGTACACTGGTACCAGCAGCTTCCAGGA | | AGYDVHWYQQLPGTA | | | |
| | | ACAGCCCCCAAACTCCTCATCTATGGTAACACCAATCGTCCCT | | PKLLIYGNTNRPSGV | | | |
| | | CAGGGGTCCCTGACCGATTCTCTGGCTCCAGGTCTGGCACCTC | | PDRFSGSRSGTSASL | | | |
| | | AGCCTCCCTGGCCATCACTGGGCTCCAGGCTGAGGATGAGGCT | | AITGLQAEDEADYYC | | | |
| | | GATTATTACTGCCAGTCTTATGACAGCAGCCTGAGTACTGTGT | | QSYDSSLSTVFFGGG | | | |
| | | TCTTCGGCGGAGGGACCAAGCTCACCGTCCTA | | TKLTVL | | | |
| ADI-81856 | 2942 | GAAATGACGCTGACGCAGTCTCCAGGCACCCTGTCTGTGTCTC | 4874 | EMTLTQSPGTLSVSP | 5227 | 3 | 3 |
| | | CAGGAAAACGAGCCACCCTCTCCTGCAGGGCCAGTCAGAGTGT | | GKRATLSCRASQSVS | | | |
| | | TAGCAGCAACTTAGCCTGGTACCAGCAGAAACCTGGCCAGGCT | | SNLAWYQQKPGQAPR | | | |
| | | CCCAGGCTCTTCATTTATGGTGCATCCACCAGGGCCACTGGTA | | LFIYGASTRATGIPA | | | |
| | | TCCCAGCCAGGTTCAGTGGCAGTGGGTCTGGGACAGAGTTCAC | | RFSGSGSGTEFTLTI | | | |
| | | TCTCACCATCAGCAGCCTGCAGTCTGAAGATTTTGCAGTTTAT | | SSLQSEDFAVYYCQQ | | | |
| | | TACTGTCAGCAGTATCATAGCTGGCCTTTATTCACTTTCGGCC | | YHSWPLFTFGPGTKV | | | |
| | | CTGGGACCAAGGTGGAAATCAAA | | EIK | | | |
| ADI-81896 | 2942 | GAAATCGTAATGACGCAGTCTCCAGCCACCCTGTCTGTGTCTC | 4875 | EIVMTQSPATLSVSP | 5228 | 3 | 3 |
| | | CAGGGGAAAGAGTCACCCTCTCCTGCAGGGCCAGTCAGAGTGT | | GERVTLSCRASQSVR | | | |
| | | TAGAAGCAACTTAGCCTGGTACCAACAAAAACCTGGCCAGGCT | | SNLAWYQQKPGQAPR | | | |
| | | CCCAGGCTCCTCATTTACGGTGCATCCACCAGGGCCACTGGTA | | LLIYGASTRATGIPA | | | |
| | | TCCCAGCCAGGTTCAGTGGCAGTGGGTCTGGGACAGAGTTCAC | | RFSGSGSGTEFTLTI | | | |
| | | TCTCACCATCAGCAGCCTGCAGTCTGAAGATTTTGCAGTTTAT | | SSLQSEDFAVYFCHQ | | | |
| | | TTCTGTCACCAGTATACTCACTGGCCTCTCACTTTCGGCCCTG | | YTHWPLTFGPGTKVE | | | |
| | | GGACCAAAGTGGAGATCAAA | | | | | |
| ADI-81567 | 2939 | CAGTCTGTGATGACTCAGCCGCCCTCAGTGTCTGGGGCCCCAG | 4876 | QSVMTQPPSVSGAPG | 5229 | 3 | 3 |
| | | GGCAGAGGGTCACCATCTCCTGCACTGGGAGCAACTCCAACAT | | QRVTISCTGSNSNIG | | | |
| | | CGGGGCAGGCTATGATGTACACTGGTACCAGCAGCTTCCAGGA | | AGYDVHWYQQLPGTA | | | |
| | | ACAGCCCCCAAACTCCTCATCTCTGTTAACAGCAATCGGCCCT | | PKLLISVNSNRPSGV | | | |
| | | CAGGGGTCCCTGACCGATTTTCTGGCTCCAAGTCTGGCACTTC | | PDRFSGSKSGTSASL | | | |
| | | AGCCTCCCTGGCCATCACTGGGCTCCAGGCTGAGGATGAGGCT | | AITGLQAEDEADYYC | | | |
| | | GATTATTACTGCCAGTCCTATGACAGCGCCCTGAGTGGTTCGG | | QSYDSALSGSVFGGG | | | |
| | | TATTCGGCGGAGGGACCAAGCTGACCGTCCTA | | TKLKLTVL | | | |

| | | | SEQ | | SEQ | | SEQ | | SEQ | | SEQ | | SEQ | |
|---|---|---|---|---|---|---|---|---|---|---|---|---|---|---|
| | VL | VL | ID | VL | ID | VL | ID | VL | ID | VL | ID | VL | ID | VL |
| Clone ID | Germline | FR1 | NO: | CDR1 | NO: | FR2 | NO: | CDR2 | NO: | FR3 | NO: | CDR3 | NO: | FR4 |
| ADI-81721 | IGKV1D-39 | EITMTQ | 3637 | RASQSI | 2066 | WYQQKP | 2257 | AASSLQ | 2391 | MVPSRF | 4306 | QHSYST | 4529 | FGQGTK |
| | | SPSSLS | | STYLN | | GKAPKL | | S | | SGSGSG | | PPWT | | VEIK |
| | | ASVGDR | | | | LIY | | | | TDFTLT | | | | |
| | | VTITC | | | | | | | | ISSLQP | | | | |
| | | | | | | | | | | EDFATY | | | | |
| | | | | | | | | | | YC | | | | |
| ADI-81789 | IGKV1D-39 | DIRMTQ | 1937 | RASQTI | 3880 | WYQQKP | 2257 | GASSLQ | 2403 | GVPSRF | 4307 | QQSYTM | 4530 | FGPGTK |
| | | SPSSLS | | SSYLN | | GKAPKL | | S | | SGSGSG | | PPIT | | VDIK |
| | | ASVGDR | | | | LIY | | | | TDFTLT | | | | |
| | | VTITC | | | | | | | | ISSLQA | | | | |
| | | | | | | | | | | EDFATY | | | | |
| | | | | | | | | | | YC | | | | |
| ADI-81559 | IGKV1D-39 | DIQMTQ | 1878 | RASQSI | 2117 | WYQQKP | 2263 | DASSLQ | 2389 | GVPSRF | 2534 | QQSYNT | 2702 | FGRGTK |
| | | SPSSLS | | RSYLN | | GKAPNL | | S | | SGSGSG | | PPWT | | VEIK |
| | | ASVGDR | | | | LIY | | | | TDFTLT | | | | |
| | | VTITC | | | | | | | | ISSLQP | | | | |
| | | | | | | | | | | EDFATY | | | | |
| | | | | | | | | | | YC | | | | |
| ADI-81642 | IGLV3-21 | QPVLTQ | 1982 | GGDNIG | 2180 | WYQQKP | 2283 | DDSDRP | 2399 | GIPERF | 2643 | QVWDST | 2836 | FGTGTK |
| | | PPSVSV | | SKGVH | | GQAPVL | | S | | SGSNSG | | SDHPAY | | VTVL |
| | | APGQTA | | | | VVY | | | | NTATLT | | V | | |
| | | RITC | | | | | | | | ISRVEA | | | | |
| | | | | | | | | | | GDEADY | | | | |
| | | | | | | | | | | FC | | | | |
| ADI-81799 | IGKV3-11 | EMTLTQ | 3534 | RASQSL | 3881 | WYQQKP | 2258 | DASNRA | 2448 | GIPARF | 4308 | QQRSSW | 4531 | FGQGTK |
| | | SPATLS | | SGYLA | | GQAPRL | | T | | SGSGSG | | PRLYT | | VEIK |
| | | LSPGER | | | | LIY | | | | TDFTLT | | | | |
| | | ATLSC | | | | | | | | ISSLEP | | | | |
| | | | | | | | | | | EDFALY | | | | |
| | | | | | | | | | | YC | | | | |
| ADI-81913 | IGKV1-NL1 | DIQMTQ | 1878 | RASQGI | 3882 | WYQQKP | 2303 | VASRLE | 2411 | GVPSRF | 2531 | QQYYNT | 2732 | FGQGTK |
| | | SPSSLS | | SYSLA | | GKAPKL | | S | | SGSGSG | | PVT | | VEIK |
| | | ASVGDR | | | | LVY | | | | TDYTLT | | | | |
| | | VTITC | | | | | | | | ISSLQP | | | | |
| | | | | | | | | | | EDFATY | | | | |
| | | | | | | | | | | YC | | | | |
| ADI-81546 | IGKV1-5 | EIQLTQ | 3679 | RASQSI | 2190 | WYQQKP | 2257 | EASSLD | 4144 | GVPSRF | 2532 | QQYNSY | 4532 | FGGGTK |
| | | SPSTLS | | SSWLA | | GKAPKL | | T | | SGSGSG | | LT | | VDIK |
| | | ASVGDR | | | | LIY | | | | TEFTLT | | | | |
| | | VTITC | | | | | | | | ISSLQP | | | | |
| | | | | | | | | | | DDFATY | | | | |
| | | | | | | | | | | YC | | | | |
| ADI-81563 | IGLV1-40 | QPGLTQ | 3680 | TGSNSN | 2143 | WYQQLP | 2314 | DNINRP | 4110 | GVPDRF | 2599 | QSYDSS | 2864 | FGTATK |
| | | PPSVSG | | IGAGYD | | GTAPKL | | S | | SGSKSG | | LIGSV | | VTVL |
| | | APGQRV | | VH | | LIY | | | | TSASLA | | | | |
| | | TISC | | | | | | | | ITGLQA | | | | |
| | | | | | | | | | | EDEADY | | | | |
| | | | | | | | | | | YC | | | | |

| | | | | | | VL | VL Amino |
|---|---|---|---|---|---|---|---|
| | SEQ | | SEQ | | SEQ | Nucleotide | Acid |
| | ID | | ID | | ID | Sub- | Sub- |
| Clone ID | NO: | VL DNA | NO: | VL Protein | NO: | stitutions | stitutions |
| ADI-81721 | 2937 | GAAATCACGATGACCCAGTCTCCATCCTCCCTGTCTGCATCTG | 4877 | EITMTQSPSSLSASV | 5230 | 3 | 2 |
| | | TAGGAGACAGAGTCACCATCACTTGCCGGGCAAGTCAGAGCAT | | GDRVTITCRASQSIS | | | |
| | | TAGCACCTATTTAAATTGGTATCAGCAGAAACCAGGGAAAGCC | | TYLNWYQQKPGKAPK | | | |
| | | CCTAAGCTCCTGATCTATGCTGCATCCAGTTTGCAAAGTATGG | | LLIYAASSLQSMVPS | | | |
| | | TCCCATCAAGGTTCAGTGGCAGTGGATCTGGGACAGATTTCAC | | RFSGSGSGTDFTLTI | | | |
| | | TCTCACCATCAGCAGTCTGCAACCTGAAGATTTTGCTACTTAC | | SSLQPEDFATYYCQH | | | |
| | | TACTGTCAACACAGTTACAGTACGCCTCCGTGGACCTTCGGCC | | SYSTPPWTFGQGTKV | | | |
| | | AAGGGACCAAGGTGGAAATCAAA | | EIK | | | |
| ADI-81789 | 2950 | GACATCCGGATGACCCAGTCTCCATCTTCCCTGTCTGCATCTG | 4878 | DIRMTQSPSSLSASV | 5231 | 3 | 3 |
| | | TAGGAGACAGAGTCACCATCACTTGCCGGGCAAGTCAGACCAT | | GDRVTITCRASQTIS | | | |
| | | TAGCAGCTATTTAAATTGGTATCAGCAGAAACCAGGGAAAGCC | | SYLNWYQQKPGKAPK | | | |
| | | CCTAAGCTCCTGATCTATGGTGCATCCAGTTTGCAAAGTGGGG | | LLIYGASSLQSGVPS | | | |
| | | TCCCATCAAGGTTCAGTGGCAGTGGCTCTGGGACAGATTTCAC | | RFSGSGSGTDFTLTI | | | |
| | | TCTCACCATCAGCAGTCTGCAAGCTGAAGATTTTGCAACTTAC | | SSLQAEDFATYYCQQ | | | |
| | | TACTGTCAACAGAGTTACACTATGCCTCCGATCACCTTCGGCC | | SYTMPPITFGPGTKV | | | |
| | | CTGGGACCAAAGTGGATATCAAA | | DIK | | | |
| ADI-81559 | 2941 | GACATCCAGATGACCCAGTCTCCATCCTCCCTGTCTGCATCTG | 4879 | DIQMTQSPSSLSASV | 5232 | 3 | 3 |
| | | TAGGAGACAGAGTCACCATCACTTGCCGGGCAAGTCAGAGCAT | | GDRVTITCRASQSIR | | | |
| | | TAGGAGCTATTTAAATTGGTATCAGCAGAAACCAGGGAAAGCC | | SYLNWYQQKPGKAPN | | | |
| | | CCTAACCTCCTGATCTATGATGCATCCAGTTTGCAAAGTGGAG | | LLIYDASSLQSGVPS | | | |
| | | TCCCATCAAGGTTCAGTGGCAGTGGATCTGGGACAGATTTCAC | | RFSGSGSGTDFTLTI | | | |
| | | TCTCACCATCAGCAGTCTGCAACCTGAAGATTTTGCAACTTAC | | SSLQPEDFATYYCQQ | | | |
| | | TACTGTCAACAGAGTTACAATACCCCCCCGTGGACGTTCGGCC | | SYNTPPWTFGRGTKV | | | |
| | | GAGGGACCAAGGTGGAAATCAAA | | EIK | | | |
| ADI-81642 | 2945 | CAGCCTGTGCTGACGCAGCCACCCTCGGTGTCAGTGGCCCCGG | 4880 | QPVLTQPPSVSVAPG | 5233 | 3 | 3 |
| | | GACAGACGGCCAGGATTACCTGTGGGGGAGACAACATTGGGAG | | QTARITCGGDNIGSK | | | |
| | | CAAAGGTGTTCACTGGTACCAGCAGAAGCCAGGCCAGGCCCCT | | GVHWYQQKPGQAPVL | | | |
| | | GTGTTGGTCGTCTATGATGATAGCGACCGGCCCTCAGGGATCC | | VVYDDSDRPSGIPER | | | |
| | | CTGAGCGATTCTCTGGCTCCAACTCGGGGAACACGGCCACCCT | | FSGSNSGNTATLTIS | | | |
| | | GACCATCAGCAGGGTCGAAGCCGGGGATGAGGCCGACTACTTC | | RVEAGDEADYFCQVW | | | |
| | | TGTCAGGTGTGGGATAGTACGAGTGATCATCCGGCTTATGTCT | | DSTSDHPAYVFGTGT | | | |
| | | TCGGAACTGGGACCAAGGTCACCGTCCTA | | KVTVL | | | |
| ADI-81799 | 2937 | GAAATGACACTCACCCAGTCTCCAGCCACCCTGTCTTTGTCTC | 4881 | EMTLTQSPATLSLSP | 5234 | 3 | 3 |
| | | CAGGGGAAAGAGCCACCCTCTCCTGCAGGGCCAGTCAGAGTCT | | GERATLSCRASQSLS | | | |
| | | TAGCGGCTACTTAGCCTGGTACCAACAGAAACCTGGCCAGGCT | | GYLAWYQQKPGQAPR | | | |
| | | CCCAGGCTCCTCATCTATGATGCATCCAACAGGGCCACTGGCA | | LLIYDASNRATGIPA | | | |
| | | TCCCAGCCAGGTTCAGTGGCAGTGGGTCTGGGACAGACTTCAC | | RFSGSGSGTDFTLTI | | | |
| | | TCTCACCATCAGCAGCCTAGAGCCTGAAGATTTTGCACTTTAT | | SSLEPEDFALYYCQQ | | | |
| | | TACTGTCAACAGCGTAGCAGCTGGCCTCGGTTGTACACTTTTG | | RSSWPRLYTFGQGTK | | | |
| | | GCCAGGGGACCAAGGTGGAGATCAAA | | VEIK | | | |
| ADI-81913 | 2937 | GACATCCAGATGACCCAGTCTCCATCCTCCCTGTCTGCATCTG | 4882 | DIQMTQSPSSLSASV | 5235 | 3 | 3 |
| | | TAGGAGACAGAGTCACCATCACTTGCCGGGCGAGTCAGGGCAT | | GDRVTITCRASQGIS | | | |
| | | TAGCTATTCTTTAGCCTGGTATCAGCAGAAACCAGGGAAAGCC | | YSLAWYQQKPGKAPK | | | |
| | | CCTAAGCTCCTGGTCTATGTTGCATCCAGATTGGAAAGTGGCG | | LLVYVASRLESGVPS | | | |
| | | TCCCATCCAGGTTCAGTGGCAGTGGATCTGGGACAGATTACAC | | RFSGSGSGTDYTLTI | | | |
| | | TCTCACCATCAGCAGCCTGCAGCCTGAAGATTTTGCAACTTAT | | SSLQPEDFATYYCQQ | | | |
| | | TACTGTCAACAGTATTATAATACCCCCGTGACGTTCGGCCAAG | | YYNTPVTFGQGTKVE | | | |
| | | GGACCAAGGTGGAAATCAAA | | IK | | | |
| ADI-81546 | 2938 | GAAATCCAATTGACCCAGTCTCCTTCCACCCTGTCTGCATCTG | 4883 | EIQLTQSPSTLSASV | 5236 | 3 | 3 |
| | | TAGGAGACAGAGTCACCATCACTTGCCGGGCCAGTCAGAGTAT | | GDRVTITCRASQSIS | | | |
| | | TAGTAGCTGGTTGGCCTGGTATCAGCAGAAACCAGGGAAAGCC | | SWLAWYQQKPGKAPK | | | |
| | | CCTAAGCTCCTGATCTATGAGGCGTCTAGTTTAGATACTGGGG | | LLIYEASSLDTGVPS | | | |
| | | TCCCATCAAGGTTCAGCGGCAGTGGATCTGGGACAGAATTCAC | | RFSGSGSGTEFTLTI | | | |
| | | TCTCACCATCAGCAGCCTGCAGCCTGATGATTTTGCAACTTAT | | SSLQPDDFATYYCQQ | | | |
| | | TACTGCCAACAGTATAATAGTTATCTCACTTTCGGCGGAGGGA | | YNSYLTFGGGTKVDI | | | |
| | | CCAAGGTGGATATCAAA | | K | | | |
| ADI-81563 | 4601 | CAGCCAGGGCTGACTCAGCCACCCTCAGTGTCTGGGGCCCCAG | 4884 | QPGLTQPPSVSGAPG | 5237 | 3 | 3 |
| | | GGCAGAGGGTCACCATCTCCTGCACTGGGAGCAACTCCAACAT | | QRVTISCTGSNSNIG | | | |
| | | CGGGGCAGGTTATGATGTACACTGGTACCAGCAGCTTCCAGGA | | AGYDVHWYQQLPGTA | | | |
| | | ACAGCCCCCAAACTCCTCATCTATGATAACATCAATCGGCCCT | | PKLLIYDNINRPSGV | | | |
| | | CAGGGGTCCCTGACCGATTCTCTGGCTCCAAGTCTGGCACCTC | | PDRFSGSKSGTSASL | | | |
| | | AGCCTCCCTGGCCATCACTGGGCTCCAGGCTGAGGATGAGGCT | | AITGLQAEDEADYYC | | | |
| | | GATTATTACTGCCAGTCCTATGACAGCAGCCTCATTGGTTCTG | | QSYDSSLIGSVFGTA | | | |
| | | TCTTCGGAACTGCGACCAAGGTCACCGTCCTA | | TKVTVL | | | |

| | | | SEQ | | SEQ | | SEQ | | SEQ | | SEQ | | SEQ | |
|---|---|---|---|---|---|---|---|---|---|---|---|---|---|---|
| | VL | VL | ID | VL | ID | VL | ID | VL | ID | VL | ID | VL | ID | VL |
| Clone ID | Germline | FR1 | NO: | CDR1 | NO: | FR2 | NO: | CDR2 | NO: | FR3 | NO: | CDR3 | NO: | FR4 |
| ADI-81596 | IGKV3-20 | EIPMTQ | 3681 | RASQSV- | 2163 | WYQQKP | 2258 | GASSRA | 2464 | GIPDRF | 2616 | QQYGSS | 2780 | FGQGTK |
| | | SPGTLS | | SSYLA | | GQAPRL | | T | | SGSGSG | | PRT | | VDIK |
| | | LSPGER | | | | LIY | | | | TDFTLT | | | | |
| | | ATLSC | | | | | | | | ISRLEP | | | | |
| | | | | | | | | | | EDFAVY | | | | |
| | | | | | | | | | | YC | | | | |
| ADI-81900 | IGKV1-16 | EIVMTQ | 1891 | RASQGI | 3766 | WFQQKP | 2346 | AASSLQ | 4145 | GVPSKF | 4309 | QQYHSY | 4533 | FGQGTK |
| | | SPSSLS | | NNFLA | | GKAPKS | | N | | SGSGSG | | PQT | | VDIK |
| | | ASVGDR | | | | LIY | | | | TDFTLT | | | | |
| | | VTITQ | | | | | | | | ISSLQP | | | | |
| | | | | | | | | | | EDFATY | | | | |
| | | | | | | | | | | YC | | | | |
| ADI-81581 | IGLV5-37 | QPVLTQ | 3682 | TLPSDI | 3883 | WYQQKP | 4016 | YYSDSD | 4146 | GVPSRF | 4310 | MIWPSN | 4534 | FGGGTK |
| | | PPSSSA | | NVGSYN | | GRPPRY | | KGQGS | | SGSKDA | | LLGV | | LTVL |
| | | SPGESA | | VY | | LLY | | | | SANTGI | | | | |
| | | RLTC | | | | | | | | LLISGL | | | | |
| | | | | | | | | | | QSEDEA | | | | |
| | | | | | | | | | | DYYC | | | | |
| ADI-81615 | IGLV1-40 | QSVLTQ | 1948 | TGSNSN | 2143 | WYQQLP | 2314 | GNNNRP | 2492 | GVPDRF | 2695 | QSYDSS | 2840 | FGGGTK |
| | | PPSVSG | | IGAGYD | | GTAPKL | | S | | SGSKSV | | LSDSV | | LTVL |
| | | APGQRV | | VH | | LIY | | | | TSASLA | | | | |
| | | TISC | | | | | | | | ITGLQA | | | | |
| | | | | | | | | | | EDEADY | | | | |
| | | | | | | | | | | YC | | | | |
| ADI-81904 | IGKV1-9 | DIRMTQ | 3683 | RASQDI | 3785 | WYQQKR | 4017 | AASTLQ | 2392 | GVPSRF | 2592 | QQLNSY | 4535 | FGQGTR |
| | | SPSFLS | | SSYLA | | GKAPKV | | S | | SGSGSG | | PLT | | LEIK |
| | | ASVGDR | | | | LIY | | | | TEFTLT | | | | |
| | | VTITC | | | | | | | | ISSLQP | | | | |
| | | | | | | | | | | EDFATY | | | | |
| | | | | | | | | | | YC | | | | |
| ADI-81818 | IGKV1-12 | DIQMTQ | 1885 | RASQGI | 3884 | WYQQKP | 2257 | AATTLQ | 4122 | GVPSRF | 2534 | QQANSF | 4536 | FGQGTK |
| | | SPSSVS | | SGWLA | | GKAPKL | | S | | SGSGSG | | PRT | | VEIK |
| | | ASVGDR | | | | LIY | | | | TDFTLT | | | | |
| | | VTITC | | | | | | | | ISSLQP | | | | |
| | | | | | | | | | | EDFATY | | | | |
| | | | | | | | | | | YC | | | | |
| ADI-81540 | IGLV3-21 | SYVLTQ | 3684 | GGNNIG | 2151 | WYQQKP | 2304 | YDSDRP | 2498 | GIPERF | 2545 | QVWDSN | 2881 | FGGGTK |
| | | PPSVSV | | SKHVH | | GQAPVL | | S | | SGSNSG | | SDHRV | | VTVL |
| | | APGKTA | | | | VIY | | | | NTATLT | | | | |
| | | KITC | | | | | | | | ISRVEA | | | | |
| | | | | | | | | | | GDEADY | | | | |
| | | | | | | | | | | YC | | | | |
| ADI-81880 | IGKV3-20 | EMTMTQ | 1990 | RASQSV | 3885 | WYQHKP | 2328 | GASSRA | 2464 | GIPDRF | 2616 | QQYDSS | 4537 | FGGGTK |
| | | SPGTLS | | SSSFLA | | GQAPRL | | T | | SGSGSG | | PLT | | VEIK |
| | | LSPGER | | | | LIY | | | | TDFTLT | | | | |
| | | ATLSC | | | | | | | | ISRLEP | | | | |
| | | | | | | | | | | EDFAVY | | | | |
| | | | | | | | | | | YC | | | | |

| | | | | | | VL | VL Amino |
|---|---|---|---|---|---|---|---|
| | SEQ | | SEQ | | SEQ | Nucleotide | Acid |
| | ID | | ID | | ID | Sub- | Sub- |
| Clone ID | NO: | VL DNA | NO: | VL Protein | NO: | stitutions | stitutions |
| ADI-81596 | 2944 | GAAATCCCAATGACACAGTCTCCAGGCACCCTGTCTTTGTCTC | 4885 | EIPMTQSPGTLSLSP | 5238 | 3 | 1 |
| | | CAGGGGAAAGAGCCACCCTCTCCTGCAGGGCCAGTCAGAGTGT | | GERATLSCRASQSVS | | | |
| | | TAGCAGCTACTTAGCCTGGTACCAACAGAAACCTGGCCAGGCT | | SYLAWYQQKPGQAPR | | | |
| | | CCCAGGCTCCTCATCTATGGTGCATCCAGCAGGGCCACTGGCA | | LLIYGASSRATGIPD | | | |
| | | TCCCAGACAGGTTCAGTGGCAGTGGGTCTGGGACAGACTTCAC | | RFSGSGSGTDFTLTI | | | |
| | | TCTCACCATCAGCAGACTGGAGCCTGAAGATTTTGCAGTGTAT | | SRLEPEDFAVYYCQQ | | | |
| | | TACTGTCAGCAGTATGGTAGCTCACCGAGGACGTTCGGCCAAG | | YGSSPRTFGQGTKVD | | | |
| | | GGACCAAAGTGGATATCAAA | | IK | | | |
| ADI-81900 | 2944 | GAAATCGTGATGACCCAGTCTCCATCCTCACTGTCTGCATCTG | 4886 | EIVMTQSPSSLSASV | 5239 | 3 | 3 |
| | | TAGGAGACAGAGTCACCATCACTTGTCGGGCGAGTCAGGGCAT | | GDRVTITCRASQGIN | | | |
| | | TAACAATTTTTTAGCCTGGTTTCAGCAGAAACCAGGGAAAGCC | | NFLAWFQQKPGKAPK | | | |
| | | CCTAAGTCCCTGATCTATGCTGCATCCAGTTTGCAAAATGGGG | | SLIYAASSLQNGVPS | | | |
| | | TCCCATCAAAGTTCAGCGGCAGTGGATCTGGGACAGATTTCAC | | KFSGSGSGTDFTLTI | | | |
| | | TCTCACCATCAGCAGCCTGCAGCCTGAAGATTTTGCAACTTAT | | SSLQPEDFATYYCQQ | | | |
| | | TACTGCCAACAGTATCATAGTTACCCTCAGACGTTCGGCCAAG | | YHSYPQTFGQGTKVD | | | |
| | | GGACCAAAGTGGATATCAAA | | IK | | | |
| ADI-81581 | 2939 | CAGCCTGTGCTGACTCAGCCACCTTCCTCCTCCGCATCTCCTG | 4887 | QPVLTQPPSSSASPG | 5240 | 3 | 2 |
| | | GAGAATCCGCCAGACTCACCTGCACCTTGCCCAGTGACATCAA | | ESARLTCTLPSDINV | | | |
| | | TGTTGGTAGTTACAACGTGTACTGGTACCAGCAGAAGCCAGGG | | GSYNVYWYQQKPGRP | | | |
| | | CGCCCTCCCAGGTATCTCCTGTACTACTACTCAGACTCAGATA | | PRYLLYYYSDSDKGQ | | | |
| | | AGGGCCAGGGCTCTGGAGTCCCCAGCCGCTTCTCTGGATCCAA | | GSGVPSRFSGSKDAS | | | |
| | | AGATGCTTCAGCCAATACAGGGATTTTACTCATCTCCGGGCTC | | ANTGILLISGLQSED | | | |
| | | CAGTCTGAGGATGAGGCTGACTATTACTGTATGATTTGGCCAA | | EADYYCMIWPSNLLG | | | |
| | | GCAATCTTCTAGGGGTGTTCGGCGGAGGGACCAAGCTCACCGT | | VFGGGTKLTVL | | | |
| | | CCTA | | | | | |
| ADI-81615 | 2939 | CAGTCTGTGTTGACGCAGCCGCCCTCAGTGTCTGGGGCCCCAG | 4888 | QSVLTQPPSVSGAPG | 5241 | 3 | 3 |
| | | GGCAGAGGGTCACCATCTCCTGCACTGGGAGCAACTCCAACAT | | QRVTISCTGSNSNIG | | | |
| | | CGGGGCAGGTTATGATGTACACTGGTACCAGCAACTTCCAGGA | | AGYDVHWYQQLPGTA | | | |
| | | ACAGCCCCCAAACTCCTCATCTATGGTAACAACAATCGGCCCT | | PKLLIYGNNNRPSGV | | | |
| | | CAGGGGTCCCTGACCGATTCTCTGGCTCCAAGTCTGTCACCTC | | PDRFSGSKSVTSASL | | | |
| | | AGCCTCCCTGGCCATCACTGGGCTCCAGGCTGAGGATGAGGCT | | AITGLQAEDEADYYC | | | |
| | | GATTATTACTGCCAGTCCTATGACAGCAGCCTGAGTGATTCGG | | QSYDSSLSDSVFGGG | | | |
| | | TGTTCGGCGGAGGGACCAAGCTGACCGTCCTA | | TKLTVL | | | |
| ADI-81904 | 2940 | GACATCCGGATGACCCAGTCTCCATCCTTCCTGTCTGCATCTG | 4889 | DIRMTQSPSFLSASV | 5242 | 3 | 3 |
| | | TAGGAGACAGAGTCACCATCACTTGCCGGGCCAGTCAGGACAT | | GDRVTITCRASQDIS | | | |
| | | TAGCAGTTATTTAGCCTGGTATCAGCAAAAACGAGGGAAAGCC | | SYLAWYQQKRGKAPK | | | |
| | | CCTAAGGTCCTGATCTATGCTGCATCCACTTTGCAAAGTGGGG | | VLIYAASTLQSGVPS | | | |
| | | TCCCATCAAGGTTCAGCGGCAGTGGATCTGGGACAGAATTCAC | | RFSGSGSGTEFTLTI | | | |
| | | TCTCACAATCAGCAGCCTGCAGCCTGAAGATTTTGCAACTTAT | | SSLQPEDFATYYCQQ | | | |
| | | TACTGTCAACAACTTAATAGTTACCCTCTCACCTTCGGCCAAG | | LNSYPLTFGQGTRLE | | | |
| | | GGACACGACTGGAGATTAAA | | IK | | | |
| ADI-81818 | 2937 | GACATCCAGATGACCCAGTCTCCATCTTCCGTGTCTGCATCTG | 4890 | DIQMTQSPSSVSASV | 5243 | 3 | 3 |
| | | TCGGAGACAGAGTCACCATCACTTGTCGGGCGAGTCAGGGTAT | | GDRVTITCRASQGIS | | | |
| | | TAGCGGCTGGTTAGCCTGGTATCAGCAGAAACCAGGGAAAGCC | | GWLAWYQQKPGKAPK | | | |
| | | CCTAAGCTCCTCATCTATGCTGCAACCACTTTGCAAAGTGGGG | | LLIYAATTLQSGVPS | | | |
| | | TCCCATCAAGGTTCAGCGGCAGTGGATCTGGGACAGATTTCAC | | RFSGSGSGTDFTLTI | | | |
| | | TCTCACCATCAGCAGCCTGCAGCCTGAAGATTTTGCAACTTAC | | SSLQPEDFATYYCQQ | | | |
| | | TATTGCCAACAGGCTAACAGTTTCCCCCGGACGTTCGGCCAAG | | ANSFPRTFGQGTKVE | | | |
| | | GGACCAAGGTGGAGATCAAA | | IK | | | |
| ADI-81540 | 2947 | TCGTATGTGCTGACTCAGCCACCCTCAGTGTCAGTGGCCCCAG | 4891 | SYVLTQPPSVSVAPG | 5244 | 3 | 2 |
| | | GAAAGACGGCCAAGATTACCTGTGGGGGAAACAACATTGGAAG | | KTAKITCGGNNIGSK | | | |
| | | TAAACATGTGCACTGGTACCAGCAGAAGCCAGGCCAGGCCCCT | | HVHWYQQKPGQAPVL | | | |
| | | GTGCTGGTCATCTATTATGATAGCGACCGGCCCTCAGGGATCC | | VIYYDSDRPSGIPER | | | |
| | | CTGAGCGATTCTCTGGCTCCAACTCTGGGAACACGGCCACCCT | | FSGSNSGNTATLTIS | | | |
| | | GACCATCAGCAGGGTCGAAGCCGGGGATGAGGCCGACTATTAC | | RVEAGDEADYYCQVW | | | |
| | | TGTCAGGTGTGGGATAGTAATAGTGATCATCGTGTGTTCGGCG | | DSNSDHRVFGGGTKV | | | |
| | | GAGGGACCAAGGTCACCGTCCTA | | TVL | | | |
| ADI-81880 | 2936 | GAAATGACAATGACGCAGTCTCCAGGCACCCTGTCTTTGTCTC | 4892 | EMTMTQSPGTLSLSP | 5245 | 3 | 2 |
| | | CAGGGGAAAGAGCCACCCTCTCCTGCAGGGCCAGTCAGAGTGT | | GERATLSCRASQSVS | | | |
| | | TAGCAGCAGCTTTTTAGCCTGGTACCAGCACAAACCTGGCCAG | | SSFLAWYQHKPGQAP | | | |
| | | GCTCCCAGGCTCCTCATCTATGGTGCATCCAGCAGGGCCACTG | | RLLIYGASSRATGIP | | | |
| | | GCATCCCAGACAGGTTCAGTGGCAGTGGGTCTGGGACAGACTT | | DRFSGSGSGTDFTLT | | | |
| | | CACTCTCACCATCAGCAGACTGGAGCCTGAAGATTTTGCAGTG | | ISRLEPEDFAVYYCQ | | | |
| | | TATTACTGTCAGCAGTATGATAGCTCACCTCTCACTTTCGGCG | | QYDSSPLTFGGGTKV | | | |
| | | GAGGGACCAAAGTGGAGATCAAA | | EIK | | | |

| | | | SEQ | | SEQ | | SEQ | | SEQ | | SEQ | | SEQ | |
|---|---|---|---|---|---|---|---|---|---|---|---|---|---|---|
| | VL | VL | ID | VL | ID | VL | ID | VL | ID | VL | ID | VL | ID | VL |
| Clone ID | Germline | FR1 | NO: | CDR1 | NO: | FR2 | NO: | CDR2 | NO: | FR3 | NO: | CDR3 | NO: | FR4 |
| ADI-81568 | IGKV1-9 | EIQMTQ | 3685 | RASQGI | 2154 | WYQQKP | 2257 | AASTLQ | 2392 | GVPARF | 4311 | QQLNSH | 4538 | FGQGTK |
| | | SPSVLS | | SSHLA | | GKAPKL | | S | | SGSGSG | | PCS | | VEIK |
| | | ASVGDR | | | | LIY | | | | TEFTLT | | | | |
| | | VTITC | | | | | | | | ISSLQP | | | | |
| | | | | | | | | | | EDFATY | | | | |
| | | | | | | | | | | YC | | | | |
| ADI-81658 | IGKV1D-39 | DIQMTQ | 1878 | RASQSI | 2066 | WYQQKP | 2257 | AASSLQ | 2391 | GVPSRF | 4312 | QQSSTT | 4539 | FGHGTR |
| | | SPSSLS | | STYLN | | GKAPKL | | S | | SGSGSG | | PIT | | LEIK |
| | | ASVGDR | | | | LIY | | | | TDFTLT | | | | |
| | | VTITC | | | | | | | | ISSLQP | | | | |
| | | | | | | | | | | EDFTTY | | | | |
| | | | | | | | | | | YC | | | | |
| ADI-81785 | IGKV1-NL1 | ETTLTQ | 1905 | RASQGI | 2062 | WYQQKP | 2259 | AASTLE | 2398 | GVPSRF | 2534 | QQYYTT | 2758 | FGQGTK |
| | | SPSSLS | | SNSLA | | GKAPKL | | S | | SGSGSG | | RT | | VEIK |
| | | ASVGDR | | | | LLY | | | | TDFTLT | | | | |
| | | VTITC | | | | | | | | ISSLQP | | | | |
| | | | | | | | | | | EDFATY | | | | |
| | | | | | | | | | | YC | | | | |
| ADI-81631 | IGKV1-33 | DIVMTQ | 1902 | QASQDI | 2148 | WYQQKP | 2257 | DASNLE | 2416 | GVPSRF | 4313 | HQYDNL | 2831 | FGQGTK |
| | | SPSSLS | | NNYLN | | GKAPKL | | T | | SGSGSG | | PRT | | VEIK |
| | | ASVGDR | | | | LIY | | | | TDFTFT | | | | |
| | | VTITC | | | | | | | | ISSLQP | | | | |
| | | | | | | | | | | EDSATY | | | | |
| | | | | | | | | | | YC | | | | |
| ADI-81841 | IGKV1-16 | EIVMTQ | 1891 | RASQGI | 3886 | WFQQKP | 2346 | GASSLQ | 2403 | GVPSKF | 4309 | QQYNDY | 4540 | FGQGTR |
| | | SPSSLS | | RNYLA | | GKAPKS | | S | | SGSGSG | | IPIT | | LEIK |
| | | ASVGDR | | | | LIY | | | | TDFTLT | | | | |
| | | VTITC | | | | | | | | ISSLQP | | | | |
| | | | | | | | | | | EDFATY | | | | |
| | | | | | | | | | | YC | | | | |
| ADI-81669 | IGKV2D-28 | EIAMTQ | 3686 | RSSQSL | 3887 | WYLLKP | 4018 | LGSNRA | 2387 | GVPDRF | 4314 | MQALQT | 2915 | FGGGTK |
| | | SPLSLP | | LHSNGY | | GQSPQL | | S | | SGSGSG | | PLT | | VEIK |
| | | VTPGEP | | NYLD | | LIY | | | | TDFSLK | | | | |
| | | ASISC | | | | | | | | ISRVEA | | | | |
| | | | | | | | | | | EDVGVY | | | | |
| | | | | | | | | | | YC | | | | |
| ADI-81787 | IGKV1D-39 | EIPMTQ | 1912 | RASQSI | 3888 | WYQQKP | 2257 | AASSLQ | 2391 | GVPSRF | 2534 | LQSYNT | 4541 | FGQGTK |
| | | SPSSLS | | NTYLN | | GKAPKL | | S | | SGSGSG | | PPWT | | VEIK |
| | | ASVGDR | | | | LIY | | | | TDFTLT | | | | |
| | | VTITC | | | | | | | | ISSLQP | | | | |
| | | | | | | | | | | EDFATY | | | | |
| | | | | | | | | | | YC | | | | |
| ADI-81788 | IGKV3D-15 | EMTLTQ | 1916 | RASQSV | 3889 | WYQQKP | 2258 | GASTRA | 2383 | GIPARF | 4315 | QQYNNL | 4542 | FGQGTK |
| | | SPATLS | | SSKLA | | GQAPRL | | T | | SGSGSG | | PPWT | | VEIK |
| | | VSPGER | | | | LIY | | | | TEFTLT | | | | |
| | | ATLSC | | | | | | | | ISSLQF | | | | |
| | | | | | | | | | | EDFAVY | | | | |
| | | | | | | | | | | YC | | | | |

| | | | | | | VL | VL Amino |
|---|---|---|---|---|---|---|---|
| | SEQ | | SEQ | | SEQ | Nucleotide | Acid |
| | ID | | ID | | ID | Sub- | Sub- |
| Clone ID | NO: | VL DNA | NO: | VL Protein | NO: | stitutions | stitutions |
| ADI-81568 | 2937 | GAAATCCAAATGACCCAGTCTCCATCCGTCCTGTCTGCATCTG | 4893 | EIQMTQSPSVLSASV | 5246 | 3 | 3 |
| | | TAGGAGACAGAGTCACCATCACTTGCCGGGCCAGTCAGGGCAT | | GDRVTITCRASQGIS | | | |
| | | TAGCAGTCATTTAGCCTGGTATCAGCAAAAACCAGGGAAAGCC | | SHLAWYQQKPGKAPK | | | |
| | | CCTAAACTCCTGATCTATGCTGCATCCACTTTGCAAAGTGGGG | | LLIYAASTLQSGVPA | | | |
| | | TCCCAGCAAGGTTCAGCGGCAGTGGATCTGGGACAGAATTCAC | | RFSGSGSGTEFTLTI | | | |
| | | TCTCACGATCAGCAGCCTGCAGCCTGAAGATTTTGCAACTTAT | | SSLQPEDFATYYCQQ | | | |
| | | TACTGTCAACAGCTTAATAGTCACCCGTGCAGTTTTGGCCAGG | | LNSHPCSFGQGTKVE | | | |
| | | GGACCAAGGTGGAAATCAAA | | IK | | | |
| ADI-81658 | 4602 | GACATCCAGATGACCCAGTCTCCATCCTCCCTGTCTGCATCTG | 4894 | DIQMTQSPSSLSASV | 5247 | 2 | 2 |
| | | TAGGAGACAGAGTCACCATCACTTGCCGGGCAAGTCAGAGCAT | | GDRVTITCRASQSIS | | | |
| | | TAGCACCTATTTAAATTGGTATCAGCAGAAACCAGGGAAAGCC | | TYLNWYQQKPGKAPK | | | |
| | | CCTAAACTCCTGATCTATGCTGCATCCAGTTTGCAAAGTGGGG | | LLIYAASSLQSGVPS | | | |
| | | TCCCATCTAGGTTCAGTGGCAGTGGATCTGGGACAGATTTCAC | | RFSGSGSGTDFTLTI | | | |
| | | TCTCACCATCAGCAGTCTGCAACCTGAAGATTTTACAACTTAC | | SSLQPEDFTTYYCQQ | | | |
| | | TACTGTCAACAGAGTTCCACAACGCCGATCACCTTCGGCCACG | | SSTTPITFGHGTRLE | | | |
| | | GGACACGACTGGAGATTAAA | | IK | | | |
| ADI-81785 | 2937 | GAAACGACACTCACGCAGTCTCCATCCTCCCTGTCTGCATCTG | 4895 | ETTLTQSPSSLSASV | 5248 | 2 | 2 |
| | | TAGGAGACAGAGTCACCATCACTTGCCGGGCGAGTCAGGGCAT | | GDRVTITCRASQGIS | | | |
| | | TAGCAATTCTTTAGCCTGGTATCAGCAGAAACCAGGGAAAGCC | | NSLAWYQQKPGKAPK | | | |
| | | CCTAAGCTCCTGCTCTATGCTGCATCCACATTGGAAAGTGGGG | | LLLYAASTLESGVPS | | | |
| | | TCCCATCCAGGTTCAGTGGCAGTGGATCTGGGACGGATTTCAC | | RFSGSGSGTDFTLTI | | | |
| | | TCTCACCATCAGCAGCCTGCAGCCTGAAGATTTTGCAACTTAT | | SSLQPEDFATYYCQQ | | | |
| | | TACTGTCAACAGTATTATACTACTCGGACGTTCGGCCAAGGGA | | YYTTRTFGQGTKVEI | | | |
| | | CCAAGGTGGAAATCAAA | | K | | | |
| ADI-81631 | 2937 | GATATTGTGATGACCCAGTCTCCATCCTCCCTGTCTGCATCTG | 4896 | DIVMTQSPSSLSASV | 5249 | 2 | 2 |
| | | TAGGAGACAGAGTCACCATCACTTGCCAGGCGAGTCAGGACAT | | GDRVTITCQASQDIN | | | |
| | | TAACAACTATTTAAATTGGTATCAACAGAAACCAGGGAAAGCC | | NYLNWYQQKPGKAPK | | | |
| | | CCTAAGCTCCTGATCTACGATGCATCCAATTTGGAGACAGGGG | | LLIYDASNLETGVPS | | | |
| | | TCCCATCAAGGTTCAGTGGAAGTGGATCTGGGACAGACTTTAC | | RFSGSGSGTDFTFTI | | | |
| | | TTTCACCATCAGCAGCCTGCAGCCTGAAGATAGTGCAACATAT | | SSLQPEDSATYYCHQ | | | |
| | | TACTGTCACCAGTATGATAATCTCCCTAGGACGTTCGGCCAAG | | YDNLPRTFGQGTKVE | | | |
| | | GGACCAAGGTGGAAATCAAA | | IK | | | |
| ADI-81841 | 2940 | GAAATCGTGATGACCCAGTCTCCATCCTCACTGTCTGCATCTG | 4897 | EIVMTQSPSSLSASV | 5250 | 2 | 2 |
| | | TTGGAGACAGAGTCACCATCACTTGTCGGGCGAGTCAGGGCAT | | GDRVTITCRASQGIR | | | |
| | | TAGGAATTATTTAGCCTGGTTTCAGCAGAAACCAGGGAAAGCC | | NYLAWFQQKPGKAPK | | | |
| | | CCTAAGTCCCTGATCTATGGTGCATCCAGTTTGCAAAGCGGGG | | SLIYGASSLQSGVPS | | | |
| | | TCCCATCAAAGTTCAGCGGCAGTGGATCTGGGACAGATTTCAC | | KFSGSGSGTDFTLTI | | | |
| | | TCTCACCATCAGCAGCCTGCAGCCTGAAGACTTTGCAACTTAT | | SSLQPEDFATYYCQQ | | | |
| | | TACTGCCAACAGTATAATGATTACCCGATCACCTTCGGCCAAG | | YNDYPITFGQGTRLE | | | |
| | | GGACACGACTGGAGATTAAA | | IK | | | |
| ADI-81669 | 2936 | GAAATTGCGATGACCCAGTCTCCACTCTCCCTGCCCGTCACCC | 4898 | EIAMTQSPLSLPVTP | 5251 | 2 | 2 |
| | | CTGGAGAGCCGGCCTCCATCTCCTGCAGGTCTAGTCAGAGCCT | | GEPASISCRSSQSLL | | | |
| | | CCTGCATAGTAATGGATACAACTATTTGGATTGGTACCTGCTG | | HSNGYNYLDWYLLKP | | | |
| | | AAGCCAGGGCAGTCTCCACAACTCCTGATCTATTTGGGTTCTA | | GQSPQLLIYLGSNRA | | | |
| | | ATCGGGCCTCCGGGGTCCCTGACAGGTTCAGTGGCAGTGGATC | | SGVPDRFSGSGSGTD | | | |
| | | AGGCACAGATTTTTCACTGAAAATCAGCAGAGTGGAGGCTGAG | | FSLKISRVEAEDVGV | | | |
| | | GATGTTGGGGTTTATTACTGCATGCAAGCTCTACAAACTCCCC | | YYCMQALQTPLTFGG | | | |
| | | TCACTTTCGGCGGAGGGACCAAGGTGGAGATCAAA | | GTKVEIK | | | |
| ADI-81787 | 2937 | GAAATCCCAATGACGCAGTCTCCATCCTCCCTGTCTGCATCTG | 4899 | EIPMTQSPSSLSASV | 5252 | 2 | 2 |
| | | TTGGAGACAGAGTCACCATCACTTGCCGGGCAAGTCAGAGCAT | | GDRVTITCRASQSIN | | | |
| | | TAACACCTATTTAAATTGGTATCAGCAGAAACCAGGGAAAGCC | | TYLNWYQQKPGKAPK | | | |
| | | CCTAAACTCCTGATCTATGCTGCATCCAGTTTGCAAAGTGGGG | | LLIYAASSLQSGVPS | | | |
| | | TCCCATCAAGGTTCAGTGGCAGTGGATCTGGGACAGATTTCAC | | RFSGSGSGTDFTLTI | | | |
| | | TCTCACCATCAGCAGTCTGCAACCTGAAGATTTTGCAACTTAC | | SSLQPEDFATYYCLQ | | | |
| | | TACTGTCTACAGAGTTACAATACCCCTCCGTGGACGTTCGGCC | | SYNTPPWTFGQGTKV | | | |
| | | AAGGGACCAAGGTGGAAATCAAA | | EIK | | | |
| ADI-81788 | 2937 | GAAATGACACTCACGCAGTCTCCAGCCACCCTGTCTGTGTCTC | 4900 | EMTLTQSPATLSVSP | 5253 | 2 | 2 |
| | | CGGGGGAAAGAGCCACCCTCTCCTGCAGGGCCAGTCAGAGTGT | | GERATLSCRASQSVS | | | |
| | | TAGCAGCAAATTAGCCTGGTACCAGCAGAAACCTGGCCAGGCT | | SKLAWYQQKPGQAPR | | | |
| | | CCCAGGCTCCTCATCTATGGTGCATCCACCAGGGCCACTGGTA | | LLIYGASTRATGIPA | | | |
| | | TCCCAGCCAGGTTCAGTGGCAGTGGGTCTGGGACAGAGTTCAC | | RFSGSGSGTEFTLTI | | | |
| | | TCTCACCATCAGCAGCCTGCAGTTTGAAGATTTTGCGGTTTAT | | SSLQFEDFAVYYCQQ | | | |
| | | TACTGTCAGCAGTATAATAACTTGCCTCCGTGGACATTCGGCC | | YNNLPPWTFGQGTKV | | | |
| | | AAGGGACCAAGGTGGAAATCAAA | | EIK | | | |

| | | | SEQ | | SEQ | | SEQ | | SEQ | | SEQ | | SEQ | |
|---|---|---|---|---|---|---|---|---|---|---|---|---|---|---|
| | VL | VL | ID | VL | ID | VL | ID | VL | ID | VL | ID | VL | ID | VL |
| Clone ID | Germline | FR1 | NO: | CDR1 | NO: | FR2 | NO: | CDR2 | NO: | FR3 | NO: | CDR3 | NO: | FR4 |
| ADI-81566 | IGKV1-5 | DIQMTQ | 1879 | RASQSI | 3890 | WYQQKP | 2257 | DASTLE | 4147 | GVPSRF | 2532 | QQYKNY | 4543 | FGQGTK |
| | | SPSTLS | | NSWLA | | GKAPKL | | S | | SGSGSG | | WT | | VEIK |
| | | ASVGDR | | | | LIY | | | | TEFTLT | | | | |
| | | VTITC | | | | | | | | ISSLQP | | | | |
| | | | | | | | | | | DDFATY | | | | |
| | | | | | | | | | | YC | | | | |
| ADI-81662 | IGKV1-9 | DIRLTQ | 3687 | RASQGI | 2136 | WYQQKP | 2275 | AASTLQ | 2392 | GVPSRF | 2592 | QQLNSD | 4544 | FGPGTK |
| | | SPSFLS | | SSYLA | | GRAPKL | | S | | SGSGSG | | LFT | | VEIK |
| | | ASVGDS | | | | LIY | | | | TEFTLT | | | | |
| | | VTITC | | | | | | | | ISSLQP | | | | |
| | | | | | | | | | | EDFATY | | | | |
| | | | | | | | | | | YC | | | | |
| ADI-81694 | IGLV1-40 | QSVLTQ | 1948 | TGSSSN | 2201 | WYQQLP | 2314 | SNNNRP | 4073 | GVPDRF | 2599 | QSYDSS | 4545 | FGGGTK |
| | | PPSVSG | | IGAGYD | | GTAPKL | | S | | SGSKSG | | LSGYVV | | LTVL |
| | | APGQRV | | VH | | LIY | | | | TSASLA | | | | |
| | | TISC | | | | | | | | ITGLQA | | | | |
| | | | | | | | | | | EDEADY | | | | |
| | | | | | | | | | | YC | | | | |
| ADI-81674 | IGKV4-1 | DIPVTQ | 3688 | KSSQSV | 2254 | WYQQKP | 2293 | WASTRE | 2422 | GVPDRF | 4316 | QQYYNT | 4546 | FGGGTK |
| | | SPDSLA | | LYSSNN | | GQPPRL | | S | | SGSGSG | | PLT | | VEIK |
| | | VSLGER | | KNYLA | | LIY | | | | TDFTLT | | | | |
| | | ATINC | | | | | | | | IRSLQA | | | | |
| | | | | | | | | | | EDVAVY | | | | |
| | | | | | | | | | | YC | | | | |
| ADI-81675 | IGKV4-1 | DIQVTQ | 3689 | KSSQSV | 2254 | WYQQKP | 2293 | WASTRE | 2422 | GVPDRF | 4316 | QQYYNT | 4546 | FGGGTK |
| | | SPDSLA | | LYSSNN | | GQPPRL | | S | | SGSGSG | | PLT | | VDIK |
| | | VSLGER | | KNYLA | | LIY | | | | TDFTLT | | | | |
| | | ATINC | | | | | | | | IRSLQA | | | | |
| | | | | | | | | | | EDVAVY | | | | |
| | | | | | | | | | | YC | | | | |
| ADI-81878 | IGLV3-1 | SYVLTQ | 3690 | SGDKLG | 2222 | WYQQKP | 4019 | QDTKRP | 4148 | GIPERF | 4317 | QAWDSS | 4547 | FGAGTK |
| | | PPSVSV | | DKYAC | | GQSPVL | | S | | SGSNSG | | NHYV | | VTVL |
| | | SPGQTA | | | | VIY | | | | NTATLT | | | | |
| | | SITC | | | | | | | | ISGTQP | | | | |
| | | | | | | | | | | MDEADY | | | | |
| | | | | | | | | | | YC | | | | |
| ADI-81619 | IGLV1-44 | QYVLTQ | 3691 | SGSSSN | 2217 | WYQQLP | 2314 | NNNQRP | 4061 | GVPDRF | 2615 | AAWDDS | 4548 | FGGGTK |
| | | PPSASG | | IGSNTV | | GTAPKL | | S | | SGSKSG | | LNGVL | | LTVL |
| | | TPVQRV | | N | | LIY | | | | TSASLA | | | | |
| | | TISC | | | | | | | | ISGLQS | | | | |
| | | | | | | | | | | EDEADY | | | | |
| | | | | | | | | | | YC | | | | |
| ADI-81744 | IGKV1-9 | DIRMTQ | 3683 | RASQGI | 2187 | WYQHKP | 3924 | AASTLQ | 2392 | GVPSRF | 2592 | QQLNSY | 4549 | FGQGTK |
| | | SPSFLS | | SNYLA | | GKAPKL | | S | | SGSGSG | | PRT | | VDIK |
| | | ASVGDR | | | | LIY | | | | TEFTLT | | | | |
| | | VTITC | | | | | | | | ISSLQP | | | | |
| | | | | | | | | | | EDFATY | | | | |
| | | | | | | | | | | YC | | | | |

| | | | | | | VL | VL Amino |
|---|---|---|---|---|---|---|---|
| | SEQ | | SEQ | | SEQ | Nucleotide | Acid |
| | ID | | ID | | ID | Sub- | Sub- |
| Clone ID | NO: | VL DNA | NO: | VL Protein | NO: | stitutions | stitutions |
| ADI-81566 | 2937 | GACATCCAGATGACCCAGTCTCCTTCCACCCTGTCTGCATCTG | 4901 | DIQMTQSPSTLSASV | 5254 | 2 | 2 |
| | | TTGGAGACAGAGTCACCATCACTTGCCGGGCCAGTCAGAGTAT | | GDRVTITCRASQSIN | | | |
| | | TAATAGCTGGTTGGCCTGGTATCAGCAGAAACCAGGGAAAGCC | | SWLAWYQQKPGKAPK | | | |
| | | CCTAAACTCCTGATCTATGATGCCTCCACTTTGGAAAGTGGGG | | LLIYDASTLESGVPS | | | |
| | | TCCCATCAAGGTTCAGCGGCAGTGGATCTGGGACAGAATTCAC | | RFSGSGSGTEFTLTI | | | |
| | | TCTCACCATCAGCAGCCTGCAGCCTGATGATTTCGCAACTTAT | | SSLQPDDFATYYCQQ | | | |
| | | TACTGCCAACAGTATAAAAATTATTGGACGTTCGGCCAAGGGA | | YKNYWTFGQGTKVEI | | | |
| | | CCAAGGTGGAAATCAAA | | K | | | |
| ADI-81662 | 2942 | GACATCCGGTTGACCCAGTCTCCGTCCTTCCTGTCTGCATCTG | 4902 | DIRLTQSPSFLSASV | 5255 | 2 | 2 |
| | | TAGGAGACAGCGTCACCATCACTTGCCGGGCCAGTCAGGGCAT | | GDSVTITCRASQGIS | | | |
| | | TAGCAGTTATTTAGCCTGGTATCAGCAAAAACCAGGGAGAGCC | | SYLAWYQQKPGRAPK | | | |
| | | CCTAAGCTCCTGATCTATGCTGCATCCACTTTGCAAAGTGGAG | | LLIYAASTLQSGVPS | | | |
| | | TCCCATCAAGGTTCAGCGGCAGTGGATCTGGGACAGAATTCAC | | RFSGSGSGTEFTLTI | | | |
| | | TCTCACAATCAGCAGCCTGCAGCCTGAAGATTTTGCTACTTAT | | SSLQPEDFATYYCQQ | | | |
| | | TACTGTCAACAACTTAATAGTGACCTCTTCACTTTCGGCCCTG | | LNSDLFTFGPGTKVE | | | |
| | | GGACCAAGGTGGAGATCAAA | | IK | | | |
| ADI-81694 | 2939 | CAGTCTGTGCTGACGCAGCCGCCCTCAGTGTCTGGGGCCCCAG | 4903 | QSVLTQPPSVSGAPG | 5256 | 2 | 2 |
| | | GGCAGAGGGTCACCATCTCCTGCACTGGGAGCAGCTCCAACAT | | QRVTISCTGSSSNIG | | | |
| | | CGGGGCAGGTTATGATGTACATTGGTACCAGCAACTTCCAGGA | | AGYDVHWYQQLPGTA | | | |
| | | ACAGCCCCCAAACTCCTCATCTATAGTAACAACAATCGGCCCT | | PKLLIYSNNNRPSGV | | | |
| | | CAGGGGTCCCTGACCGATTCTCTGGCTCCAAGTCTGGCACCTC | | PDRFSGSKSGTSASL | | | |
| | | AGCCTCCCTGGCCATCACTGGACTCCAGGCTGAGGATGAGGCT | | AITGLQAEDEADYYC | | | |
| | | GATTATTACTGCCAGTCCTATGACAGCAGCCTGAGTGGCTATG | | QSYDSSLSGYVVFGG | | | |
| | | TGGTATTCGGCGGAGGGACCAAGCTCACCGTCCTA | | GTKLTVL | | | |
| ADI-81674 | 2936 | GACATCCCGGTGACCCAGTCTCCAGACTCCCTGGCTGTGTCTC | 4904 | DIPVTQSPDSLAVSL | 5257 | 2 | 2 |
| | | TGGGCGAGAGGGCCACCATCAACTGCAAGTCCAGCCAGAGTGT | | GERATINCKSSQSVL | | | |
| | | TTTATACAGCTCCAACAATAAGAACTACTTAGCTTGGTACCAG | | YSSNNKNYLAWYQQK | | | |
| | | CAGAAACCAGGACAGCCTCCTAGGCTGCTCATTTACTGGGCAT | | PGQPPRLLIYWASTR | | | |
| | | CTACCCGGGAATCCGGGGTCCCTGACCGATTCAGTGGCAGCGG | | ESGVPDRFSGSGSGT | | | |
| | | GTCTGGGACAGATTTCACTCTCACCATCCGCAGCCTGCAGGCT | | DFTLTIRSLQAEDVA | | | |
| | | GAAGATGTGGCAGTTTATTACTGTCAGCAATATTATAATACCC | | VYYCQQYYNTPLTFG | | | |
| | | CGCTCACTTTCGGCGGAGGGACCAAGGTGGAAATCAAA | | GGTKVEIK | | | |
| ADI-81675 | 2938 | GACATCCAGGTGACCCAGTCTCCAGACTCCCTGGCTGTGTCTC | 4905 | DIQVTQSPDSLAVSL | 5258 | 2 | 2 |
| | | TGGGCGAGAGGGCCACCATCAACTGCAAGTCCAGCCAGAGTGT | | GERATINCKSSQSVL | | | |
| | | TTTATACAGCTCCAACAATAAGAACTACTTAGCTTGGTACCAG | | YSSNNKNYLAWYQQK | | | |
| | | CAGAAACCAGGACAGCCTCCTAGGCTGCTCATTTACTGGGCAT | | PGQPPRLLIYWASTR | | | |
| | | CTACCCGGGAATCCGGGGTCCCTGACCGATTCAGTGGCAGCGG | | ESGVPDRFSGSGSGT | | | |
| | | GTCTGGGACAGATTTCACTCTCACCATCCGCAGCCTGCAGGCT | | DFTLTIRSLQAEDVA | | | |
| | | GAAGATGTGGCAGTTTATTACTGTCAGCAATATTATAATACCC | | VYYCQQYYNTPLTFG | | | |
| | | CGCTCACTTTCGGCGGAGGGACCAAAGTGGATATCAAA | | GGTKVDIK | | | |
| ADI-81878 | 4603 | TCGTATGTGCTGACACAGCCACCCTCAGTGTCCGTGTCCCCAG | 4906 | SYVLTQPPSVSVSPG | 5259 | 2 | 2 |
| | | GACAGACAGCCAGCATCACCTGCTCTGGAGATAAATTGGGGGA | | QTASITCSGDKLGDK | | | |
| | | TAAATATGCTTGCTGGTATCAGCAGAAGCCAGGCCAGTCCCCT | | YACWYQQKPGQSPVL | | | |
| | | GTACTGGTCATCTATCAAGATACCAAGCGGCCCTCAGGGATCC | | VIYQDTKRPSGIPER | | | |
| | | CTGAGCGATTCTCTGGCTCCAACTCTGGGAACACAGCCACTCT | | FSGSNSGNTATLTIS | | | |
| | | GACCATCAGCGGGACCCAGCCTATGGATGAGGCTGACTATTAC | | GTQPMDEADYYCQAW | | | |
| | | TGTCAGGCGTGGGACAGCAGTAATCATTATGTCTTCGGAGCTG | | DSSNHYVFGAGTKVT | | | |
| | | GGACCAAGGTCACCGTCCTA | | VL | | | |
| ADI-81619 | 2939 | CAGTATGTGCTGACTCAGCCACCCTCAGCGTCTGGGACCCCCG | 4907 | QYVLTQPPSASGTPV | 5260 | 2 | 2 |
| | | TGCAGAGGGTCACCATCTCTTGTTCTGGAAGCAGCTCCAACAT | | QRVTISCSGSSSNIG | | | |
| | | CGGAAGTAATACTGTTAACTGGTACCAGCAGCTCCCAGGAACG | | SNTVNWYQQLPGTAP | | | |
| | | GCCCCCAAACTCCTCATCTATAATAATAATCAGCGGCCCTCAG | | KLLIYNNNQRPSGVP | | | |
| | | GGGTCCCTGACCGATTCTCTGGCTCCAAGTCTGGCACCTCAGC | | DRFSGSKSGTSASLA | | | |
| | | CTCCCTGGCCATCAGTGGGCTCCAGTCTGAGGATGAGGCTGAT | | ISGLQSEDEADYYCA | | | |
| | | TATTACTGTGCAGCATGGGATGACAGCCTGAATGGTGTGCTAT | | AWDDSLNGVLFGGGT | | | |
| | | TCGGCGGAGGGACCAAGCTCACCGTCCTA | | KLTVL | | | |
| ADI-81744 | 2944 | GACATCCGGATGACCCAGTCTCCATCCTTCCTGTCTGCATCTG | 4908 | DIRMTQSPSFLSASV | 5261 | 2 | 2 |
| | | TAGGAGACAGAGTCACCATCACTTGCCGGGCCAGTCAGGGCAT | | GDRVTITCRASQGIS | | | |
| | | TAGCAATTATTTAGCCTGGTATCAGCACAAACCAGGGAAAGCC | | NYLAWYQHKPGKAPK | | | |
| | | CCTAAGCTCCTGATCTATGCTGCATCCACTTTGCAAAGTGGGG | | LLIYAASTLQSGVPS | | | |
| | | TCCCATCAAGGTTCAGCGGCAGTGGATCTGGGACAGAATTCAC | | RFSGSGSGTEFTLTI | | | |
| | | TCTCACAATCAGCAGCCTGCAGCCTGAAGATTTTGCAACTTAT | | SSLQPEDFATYYCQQ | | | |
| | | TACTGTCAACAGCTTAATAGTTACCCTCGGACGTTCGGCCAAG | | LNSYPRTFGQGTKVD | | | |
| | | GGACCAAGGTGGATATCAAA | | IK | | | |

| | | | SEQ | | SEQ | | SEQ | | SEQ | | SEQ | | SEQ | |
|---|---|---|---|---|---|---|---|---|---|---|---|---|---|---|
| | VL | VL | ID | VL | ID | VL | ID | VL | ID | VL | ID | VL | ID | VL |
| Clone ID | Germline | FR1 | NO: | CDR1 | NO: | FR2 | NO: | CDR2 | NO: | FR3 | NO: | CDR3 | NO: | FR4 |
| ADI-81633 | IGLV6-57 | KFMLTQ | 3692 | TGSSGY | 3891 | WYQQRP | 2298 | EDNQRP | 2431 | GVPDRF | 2574 | QSYDNT | 4550 | FGGGTK |
| | | PHSVSE | | IASNYV | | GSAPTT | | S | | SGSIDS | | NWV | | LTVL |
| | | SPGKTV | | IQ | | VIY | | | | SSNSAS | | | | |
| | | TISC | | | | | | | | LTISGL | | | | |
| | | | | | | | | | | KTEDEA | | | | |
| | | | | | | | | | | DYYC | | | | |
| ADI-81700 | IGKV1-9 | DIVMTQ | 3693 | RASQGI | 2136 | WYQQKP | 2257 | AASTLQ | 2392 | GVPLRF | 2595 | QQLNSY | 4551 | FGQGTK |
| | | SPSLLS | | SSYLA | | GKAPKL | | S | | SGSGSG | | PRYT | | VDIK |
| | | ASVGDR | | | | LIY | | | | TEFTLT | | | | |
| | | VTITC | | | | | | | | ISSLQP | | | | |
| | | | | | | | | | | EDFATY | | | | |
| | | | | | | | | | | YC | | | | |
| ADI-81797 | IGKV1-5 | EIVMTQ | 3694 | RASQSI | 2190 | WYQQKP | 2257 | KASSLE | 2386 | GVPSRF | 2532 | QQYNSY | 4552 | FGPGTK |
| | | SPSTLS | | SSWLA | | GKAPKL | | S | | SGSGSG | | FT | | VEIK |
| | | ASAGDR | | | | LIY | | | | TEFTLT | | | | |
| | | VTITC | | | | | | | | ISSLQP | | | | |
| | | | | | | | | | | DDFATY | | | | |
| | | | | | | | | | | YC | | | | |
| ADI-81854 | IGKV3D-15 | ETTLTQ | 2022 | RASQSV | 2227 | WYQQKP | 3906 | GASTRA | 2383 | GIPARF | 4288 | QQYDNW | 4553 | FGQGTK |
| | | SPATLS | | SSNLA | | GQAPRV | | T | | SGSGSG | | PPMWT | | VEIK |
| | | VSPGER | | | | LIY | | | | TEFTLT | | | | |
| | | ATLSC | | | | | | | | ISSLQS | | | | |
| | | | | | | | | | | EDSAVY | | | | |
| | | | | | | | | | | YC | | | | |
| ADI-81866 | IGKV3D-15 | EIVMTQ | 2034 | RASQSI | 2129 | WYQQKP | 3996 | GASTRA | 2383 | GIPARF | 2569 | QQHNSW | 4554 | FGQGTR |
| | | SPATLS | | SSNLA | | GQAPRL | | T | | SGSGSG | | PAT | | LEIK |
| | | VSPGER | | | | LIS | | | | TEFTLT | | | | |
| | | ATLSC | | | | | | | | ISSLQS | | | | |
| | | | | | | | | | | EDFAVY | | | | |
| | | | | | | | | | | YC | | | | |
| ADI-81903 | IGKV1D-39 | EMTLTQ | 1914 | RASQSI | 2050 | WYQQKL | 4020 | AASSLQ | 2391 | GVPSRF | 2534 | QQSYST | 4555 | FGQGTK |
| | | SPSSLS | | SSYLN | | GKAPKL | | S | | SGSGSG | | PYT | | VDIK |
| | | ASVGDR | | | | LIY | | | | TDFTLT | | | | |
| | | VTITC | | | | | | | | ISSLQP | | | | |
| | | | | | | | | | | EDFATY | | | | |
| | | | | | | | | | | YC | | | | |
| ADI-81703 | IGKV1-5 | EIRMTQ | 3695 | RASQSI | 2190 | WYQQKP | 2263 | KASILE | 4149 | GVPSRF | 2532 | QQYDSY | 4556 | FGQGTK |
| | | SPSTLS | | SSWLA | | GKAPNL | | S | | SGSGSG | | SGT | | VEIK |
| | | ASVGDR | | | | LIY | | | | TEFTLT | | | | |
| | | VTITC | | | | | | | | ISSLQP | | | | |
| | | | | | | | | | | DDFATY | | | | |
| | | | | | | | | | | YC | | | | |
| ADI-81739 | IGLV1-40 | QSVLTQ | 1948 | TGSSSN | 3892 | WYQQVP | 4021 | GNSNRP | 2477 | GVPDRF | 2599 | QSYDSS | 4557 | FGGGTK |
| | | PPSVSG | | IGAGFD | | GTAPKL | | S | | SGSKSG | | LSGFVI | | LTVL |
| | | APGQRV | | VH | | LIY | | | | TSASLA | | | | |
| | | TISC | | | | | | | | ITGLQA | | | | |
| | | | | | | | | | | EDEADY | | | | |
| | | | | | | | | | | YC | | | | |

| | | | | | | VL | VL Amino |
|---|---|---|---|---|---|---|---|
| | SEQ | | SEQ | | SEQ | Nucleotide | Acid |
| | ID | | ID | | ID | Sub- | Sub- |
| Clone ID | NO: | VL DNA | NO: | VL Protein | NO: | stitutions | stitutions |
| ADI-81633 | 2939 | AAGTTTATGCTGACTCAGCCCCACTCTGTGTCGGAGTCTCCGG | 4909 | KFMLTQPHSVSESPG | 5262 | 2 | 1 |
| | | GGAAGACGGTAACCATCTCCTGCACCGGCAGCAGTGGCTACAT | | KTVTISCTGSSGYIA | | | |
| | | TGCCAGCAACTATGTGCAGTGGTACCAGCAGCGCCCGGGCAGT | | SNYVQWYQQRPGSAP | | | |
| | | GCCCCCACCACTGTGATCTATGAGGATAACCAAAGACCCTCTG | | TTVIYEDNQRPSGVP | | | |
| | | GGGTCCCTGATCGGTTCTCTGGCTCCATCGACAGCTCCTCCAA | | DRFSGSIDSSSNSAS | | | |
| | | TTCTGCCTCCCTCACCATCTCTGGACTGAAGACTGAGGACGAG | | LTISGLKTEDEADYY | | | |
| | | GCTGACTACTACTGTCAGTCTTATGATAACACCAATTGGGTGT | | CQSYDNTNWVFGGGT | | | |
| | | TCGGCGGAGGGACCAAGCTCACCGTCCTA | | KLTVL | | | |
| ADI-81700 | 2944 | GATATTGTGATGACGCAGTCTCCATCCCTCCTGTCTGCATCTG | 4910 | DIVMTQSPSLLSASV | 5263 | 2 | 2 |
| | | TAGGAGACAGAGTCACCATCACTTGCCGGGCCAGTCAGGGCAT | | GDRVTITCRASQGIS | | | |
| | | TAGCAGTTATTTAGCCTGGTATCAGCAAAAACCAGGGAAAGCC | | SYLAWYQQKPGKAPK | | | |
| | | CCTAAGCTCCTGATCTATGCTGCATCCACTTTGCAAAGTGGGG | | LLIYAASTLQSGVPL | | | |
| | | TCCCATTAAGGTTCAGCGGCAGTGGATCTGGGACAGAATTCAC | | RFSGSGSGTEFTLTI | | | |
| | | TCTCACAATCAGCAGCCTGCAGCCTGAAGATTTTGCAACTTAT | | SSLQPEDFATYYCQQ | | | |
| | | TACTGTCAACAGCTTAATAGTTACCCTCGGTACACTTTTGGCC | | LNSYPRYTFGQGTKV | | | |
| | | AGGGGACCAAGGTGGATATCAAA | | DIK | | | |
| ADI-81797 | 2942 | GAAATCGTGATGACCCAGTCTCCTTCCACCCTGTCTGCATCTG | 4911 | EIVMTQSPSTLSASA | 5264 | 2 | 1 |
| | | CTGGAGACAGAGTCACCATCACTTGCCGGGCCAGTCAGAGTAT | | GDRVTITCRASQSIS | | | |
| | | TAGTAGCTGGTTGGCCTGGTATCAGCAGAAACCAGGAAAAGCC | | SWLAWYQQKPGKAPK | | | |
| | | CCTAAACTCCTGATCTATAAGGCGTCTAGTTTAGAAAGTGGGG | | LLIYKASSLESGVPS | | | |
| | | TCCCATCAAGGTTCAGCGGCAGTGGATCTGGGACAGAATTCAC | | RFSGSGSGTEFTLTI | | | |
| | | TCTCACCATCAGCAGCCTGCAGCCTGATGATTTTGCAACTTAT | | SSLQPDDFATYYCQQ | | | |
| | | TACTGCCAACAGTATAATAGTTATTTCACTTTCGGCCCTGGGA | | YNSYFTFGPGTKVEI | | | |
| | | CCAAGGTGGAAATCAAA | | K | | | |
| ADI-81854 | 2937 | GAAACGACACTCACGCAGTCTCCAGCCACCCTGTCTGTGTCTC | 4912 | ETTLTQSPATLSVSP | 5265 | 2 | 2 |
| | | CAGGGGAAAGAGCCACCCTCTCCTGCAGGGCCAGTCAGAGTGT | | GERATLSCRASQSVS | | | |
| | | TAGCAGCAACTTAGCCTGGTACCAGCAGAAGCCTGGCCAGGCT | | SNLAWYQQKPGQAPR | | | |
| | | CCCAGGGTCCTCATCTATGGTGCATCCACCAGGGCCACTGGTA | | VLIYGASTRATGIPA | | | |
| | | TCCCAGCCAGGTTCAGTGGCAGTGGGTCTGGGACAGAGTTCAC | | RFSGSGSGTEFTLTI | | | |
| | | TCTCACCATCAGCAGCCTGCAGTCTGAAGATTCTGCAGTTTAT | | SSLQSEDSAVYYCQQ | | | |
| | | TACTGTCAGCAGTATGATAACTGGCCTCCCATGTGGACGTTCG | | YDNWPPMWTFGQGTK | | | |
| | | GCCAAGGGACCAAGGTGGAAATCAAA | | VEIK | | | |
| ADI-81866 | 2940 | GAAATTGTGATGACGCAGTCTCCAGCCACCCTGTCTGTGTCTC | 4913 | EIVMTQSPATLSVSP | 5266 | 2 | 2 |
| | | CGGGGGAAAGAGCCACCCTCTCCTGCAGGGCCAGTCAGAGTAT | | GERATLSCRASQSIS | | | |
| | | TAGCAGCAACCTAGCCTGGTACCAGCAGAAACCTGGCCAGGCT | | SNLAWYQQKPGQAPR | | | |
| | | CCCAGGCTCCTCATCTCTGGTGCCTCCACCAGGGCCACTGGTA | | LLISGASTRATGIPA | | | |
| | | TCCCAGCCAGGTTCAGTGGCAGTGGGTCTGGGACAGAGTTCAC | | RFSGSGSGTEFTLTI | | | |
| | | TCTCACCATCAGCAGCCTGCAGTCTGAAGATTTTGCAGTTTAT | | SSLQSEDFAVYYCQQ | | | |
| | | TACTGTCAGCAGCATAATTCCTGGCCGGCCACCTTCGGCCAAG | | HNSWPATFGQGTRLE | | | |
| | | GGACACGACTGGAGATTAAA | | IK | | | |
| ADI-81903 | 2944 | GAAATGACGCTGACGCAGTCTCCATCCTCCCTGTCTGCATCTG | 4914 | EMTLTQSPSSLSASV | 5267 | 2 | 1 |
| | | TAGGAGACAGAGTCACCATCACTTGCCGGGCAAGTCAGAGCAT | | GDRVTITCRASQSIS | | | |
| | | TAGCAGTTATTTAAATTGGTATCAGCAAAAACTGGGGAAAGCC | | SYLNWYQQKLGKAPK | | | |
| | | CCTAAGCTCCTGATCTACGCTGCATCCAGTTTGCAAAGTGGGG | | LLIYAASSLQSGVPS | | | |
| | | TCCCATCAAGGTTCAGTGGCAGTGGATCTGGGACAGATTTCAC | | RFSGSGSGTDFTLTI | | | |
| | | TCTCACCATCAGCAGTCTGCAACCTGAAGATTTTGCAACTTAC | | SSLQPEDFATYYCQQ | | | |
| | | TACTGTCAACAGAGTTACAGTACCCCGTACACTTTTGGCCAGG | | SYSTPYTFGQGTKVD | | | |
| | | GGACCAAAGTGGATATCAAA | | IK | | | |
| ADI-81703 | 2937 | GAAATCCGAATGACCCAGTCTCCTTCTACCCTGTCTGCATCTG | 4915 | EIRMTQSPSTLSASV | 5268 | 2 | 2 |
| | | TAGGAGACAGAGTCACCATCACTTGCCGGGCCAGTCAGAGTAT | | GDRVTITCRASQSIS | | | |
| | | TAGTAGCTGGTTGGCCTGGTATCAGCAGAAACCGGGGAAAGCC | | SWLAWYQQKPGKAPN | | | |
| | | CCTAATCTCCTGATCTATAAGGCGTCTATTTTAGAAAGTGGGG | | LLIYKASILESGVPS | | | |
| | | TCCCATCAAGGTTCAGCGGCAGTGGATCTGGGACAGAATTCAC | | RFSGSGSGTEFTLTI | | | |
| | | TCTCACCATCAGCAGCCTGCAGCCTGATGATTTTGCAACTTAT | | SSLQPDDFATYYCQQ | | | |
| | | TACTGCCAACAGTATGACAGTTATTCAGGGACGTTCGGCCAAG | | YDSYSGTFGQGTKVE | | | |
| | | GGACCAAGGTGGAAATCAAA | | IK | | | |
| ADI-81739 | 2939 | CAGTCTGTGTTGACGCAGCCGCCCTCAGTGTCTGGGGCCCCAG | 4916 | QSVLTQPPSVSGAPG | 5269 | 2 | 2 |
| | | GGCAGAGGGTCACCATCTCCTGCACTGGGAGCAGCTCCAACAT | | QRVTISCTGSSSNIG | | | |
| | | CGGGGCAGGTTTTGATGTACATTGGTACCAGCAGGTTCCAGGA | | AGFDVHWYQQVPGTA | | | |
| | | ACAGCCCCCAAACTCCTCATCTATGGTAACAGCAATCGGCCCT | | PKLLIYGNSNRPSGV | | | |
| | | CAGGCGTCCCTGACCGATTCTCTGGCTCCAAGTCCGGCACCTC | | PDRFSGSKSGTSASL | | | |
| | | AGCCTCCCTGGCCATCACTGGGCTCCAGGCTGAGGATGAGGCT | | AITGLQAEDEADYYC | | | |
| | | GATTATTACTGCCAGTCCTATGACAGCAGCCTGAGTGGCTTTG | | QSYDSSLSGFVIFGG | | | |
| | | TCATATTCGGCGGAGGCACCAAGCTCACCGTCCTA | | GTKLTVL | | | |

| | | | SEQ | | SEQ | | SEQ | | SEQ | | SEQ | | SEQ | |
|---|---|---|---|---|---|---|---|---|---|---|---|---|---|---|
| | VL | VL | ID | VL | ID | VL | ID | VL | ID | VL | ID | VL | ID | VL |
| Clone ID | Germline | FR1 | NO: | CDR1 | NO: | FR2 | NO: | CDR2 | NO: | FR3 | NO: | CDR3 | NO: | FR4 |
| ADI-81837 | IGKV1D-39 | EITMTQ | 3637 | RASQSI | 2066 | WYQQKP | 2257 | AASSLQ | 2391 | GVPSRF | 2606 | QQSYSN | 4558 | FGQGTK |
| | | SPSSLS | | STYLN | | GKAPKL | | S | | SGSGSG | | PMYT | | VEIK |
| | | ASVGDR | | | | LIY | | | | TDFTLT | | | | |
| | | VTITC | | | | | | | | ISSLQP | | | | |
| | | | | | | | | | | EDFASY | | | | |
| | | | | | | | | | | YC | | | | |
| ADI-81907 | IGKV3D-15 | EMTLTQ | 3626 | RASQSV | 3889 | WYQQKP | 2258 | GASTRA | 2383 | GIPARF | 2569 | QQYNNW | 4559 | FGGGTK |
| | | SPGTLS | | SSKLA | | GQAPRL | | T | | SGSGSG | | PPLT | | VEIK |
| | | VSPGER | | | | LIY | | | | TEFTLT | | | | |
| | | ATLSC | | | | | | | | ISSLQS | | | | |
| | | | | | | | | | | EDFAVY | | | | |
| | | | | | | | | | | YC | | | | |
| ADI-81654 | IGLV2-14 | QSVLTQ | 1918 | TGTSSD | 3893 | WYQQHP | 2265 | EVSNRP | 2427 | GVSNRF | 4318 | SSYASS | 4560 | FGGVTK |
| | | PASVSG | | VGGHNY | | GKAPKL | | S | | SGSKSG | | TSPVV | | LTVL |
| | | SPGQSI | | VS | | MIY | | | | NTASLT | | | | |
| | | TISC | | | | | | | | ISGLQA | | | | |
| | | | | | | | | | | EDEADY | | | | |
| | | | | | | | | | | SC | | | | |
| ADI-81677 | IGKV1-5 | DIRMTQ | 3610 | RASQSI | 2146 | WYQQKP | 2257 | KASSLE | 2386 | GDPSRF | 4319 | QQYSTY | 4561 | FGQGTK |
| | | SPSTLS | | STWLA | | GKAPKL | | S | | SGSGSG | | PYT | | VEIK |
| | | ASVGDR | | | | LIY | | | | TEFTLT | | | | |
| | | VTITC | | | | | | | | ISSLQP | | | | |
| | | | | | | | | | | DDFATY | | | | |
| | | | | | | | | | | YC | | | | |
| ADI-81790 | IGLV6-57 | NFMLTQ | 1992 | TRSSGS | 3894 | WYQQRP | 4009 | DDNQRP | 4150 | GVPDRF | 2574 | QSHDSS | 4562 | FGGGTK |
| | | PHSVSE | | IASSYV | | GSSPTT | | S | | SGSIDS | | TVI | | LTVL |
| | | SPGKTV | | Q | | VIY | | | | SSNSAS | | | | |
| | | TISC | | | | | | | | LTISGL | | | | |
| | | | | | | | | | | KTEDEA | | | | |
| | | | | | | | | | | DYYC | | | | |
| ADI-81755 | IGKV1-33 | EMTLTQ | 1914 | QASQAI | 3895 | WYQQKP | 2257 | DASNLE | 2416 | GVPSRF | 2542 | QQYDNL | 4563 | FGPGTK |
| | | SPSSLS | | SNYLN | | GKAPKL | | T | | SGSGSG | | PFT | | VDIK |
| | | ASVGDR | | | | ILIY | | | | TDFTFT | | | | |
| | | VTITC | | | | | | | | ISSLQP | | | | |
| | | | | | | | | | | EDIATY | | | | |
| | | | | | | | | | | FC | | | | |
| ADI-81893 | IGKV1D-39 | EIGVTQ | 3696 | RASQSI | 2050 | WYQQKP | 2257 | AASSLQ | 2391 | GVPSRF | 4320 | QQSYRT | 2891 | FGPGTK |
| | | SPSSLS | | SSYLN | | GKAPKL | | S | | SGSGFG | | PPLT | | VEIK |
| | | ASVGDR | | | | LIY | | | | TDFTFT | | | | |
| | | VTITC | | | | | | | | ISSLQP | | | | |
| | | | | | | | | | | EDFATY | | | | |
| | | | | | | | | | | YC | | | | |
| ADI-81649 | IGKV4-1 | DIVLTQ | 3697 | KSSQSV | 3896 | WYQQKP | 2290 | WASTRE | 2422 | GVPDRF | 2619 | QQYYST | 4518 | FGPGTK |
| | | SPDSLA | | LYSSNN | | GQPPKL | | S | | SGSGSG | | PLT | | VEIK |
| | | VSLGER | | ENYLG | | LIY | | | | TDFTLT | | | | |
| | | ATINC | | | | | | | | ISSLQA | | | | |
| | | | | | | | | | | EDVAVY | | | | |
| | | | | | | | | | | YC | | | | |

| | | | | | | VL | VL Amino |
|---|---|---|---|---|---|---|---|
| | SEQ | | SEQ | | SEQ | Nucleotide | Acid |
| | ID | | ID | | ID | Sub- | Sub- |
| Clone ID | NO: | VL DNA | NO: | VL Protein | NO: | stitutions | stitutions |
| ADI-81837 | 2937 | GAAATCACAATGACCCAGTCTCCATCCTCCCTGTCTGCATCTG | 4917 | EITMTQSPSSLSASV | 5270 | 2 | 2 |
| | | TAGGAGACAGAGTCACCATCACTTGCCGGGCAAGTCAGAGCAT | | GDRVTITCRASQSIS | | | |
| | | TAGCACCTATTTAAACTGGTATCAGCAGAAACCAGGGAAAGCC | | TYLNWYQQKPGKAPK | | | |
| | | CCTAAGCTCCTGATCTATGCTGCATCCAGTTTGCAAAGTGGGG | | LLIYAASSLQSGVPS | | | |
| | | TCCCATCAAGGTTCAGTGGCAGTGGATCTGGGACAGATTTCAC | | RFSGSGSGTDFTLTI | | | |
| | | TCTCACCATCAGCAGTCTGCAACCTGAAGATTTTGCAAGTTAC | | SSLQPEDFASYYCQQ | | | |
| | | TATTGTCAACAGAGTTACAGTAACCCCATGTACACTTTTGGCC | | SYSNPMYTFGQGTKV | | | |
| | | AGGGGACCAAGGTGGAAATCAAA | | EIK | | | |
| ADI-81907 | 2936 | GAAATGACACTCACGCAGTCTCCAGGCACCCTGTCTGTGTCTC | 4918 | EMTLTQSPGTLSVSP | 5271 | 2 | 2 |
| | | CAGGGGAAAGAGCCACCCTCTCCTGCAGGGCCAGTCAGAGTGT | | GERATLSCRASQSVS | | | |
| | | TAGCAGCAAGTTAGCCTGGTACCAGCAGAAACCTGGCCAGGCT | | SKLAWYQQKPGQAPR | | | |
| | | CCCAGGCTCCTCATCTATGGTGCATCCACCAGGGCCACTGGTA | | LLIYGASTRATGIPA | | | |
| | | TCCCAGCCAGGTTCAGTGGCAGTGGGTCTGGGACAGAGTTCAC | | RFSGSGSGTEFTLTI | | | |
| | | TCTCACCATCAGCAGCCTGCAGTCTGAAGATTTTGCAGTTTAT | | SSLQSEDFAVYYCQQ | | | |
| | | TACTGTCAGCAGTATAATAACTGGCCTCCGCTCACTTTCGGCG | | YNNWPPLTFGGGTKV | | | |
| | | GAGGGACCAAGGTGGAGATCAAA | | EIK | | | |
| ADI-81654 | 4604 | CAGTCTGTGCTGACTCAGCCTGCCTCCGTGTCTGGGTCTCCTG | 4919 | QSVLTQPASVSGSPG | 5272 | 2 | 2 |
| | | GACAGTCGATCACCATCTCCTGCACTGGAACCAGCAGTGACGT | | QSITISCTGTSSDVG | | | |
| | | TGGTGGTCATAACTATGTCTCCTGGTACCAACAGCACCCAGGC | | GHNYVSWYQQHPGKA | | | |
| | | AAAGCCCCCAAACTCATGATTTATGAGGTCAGTAATCGGCCCT | | PKLMIYEVSNRPSGV | | | |
| | | CAGGGGTTTCTAATCGCTTCTCTGGCTCCAAGTCTGGCAACAC | | SNRFSGSKSGNTASL | | | |
| | | GGCCTCCCTGACCATCTCTGGGCTCCAGGCTGAGGACGAGGCT | | TISGLQAEDEADYSC | | | |
| | | GATTATTCCTGCAGTTCATATGCAAGCAGTACCTCTCCTGTGG | | SSYASSTSPVVFGGV | | | |
| | | TTTTCGGCGGAGTGACCAAGCTCACCGTCCTA | | TKLTVL | | | |
| ADI-81677 | 2937 | GACATCCGGATGACCCAGTCTCCTTCCACCCTGTCTGCATCTG | 4920 | DIRMTQSPSTLSASV | 5273 | 2 | 2 |
| | | TAGGAGACAGAGTCACCATCACTTGCCGGGCCAGTCAGAGTAT | | GDRVTITCRASQSIS | | | |
| | | TAGTACCTGGTTGGCCTGGTATCAGCAGAAACCAGGGAAAGCC | | TWLAWYQQKPGKAPK | | | |
| | | CCTAAGCTCCTGATCTATAAGGCGTCTAGTTTAGAAAGTGGGG | | LLIYKASSLESGDPS | | | |
| | | ACCCATCAAGGTTCAGCGGCAGTGGATCTGGGACAGAATTCAC | | RFSGSGSGTEFTLTI | | | |
| | | TCTCACCATCAGCAGCCTGCAACCTGATGATTTTGCAACTTAT | | SSLQPDDFATYYCQQ | | | |
| | | TACTGCCAACAGTATAGTACTTACCCGTACACTTTTGGCCAGG | | YSTYPYTFGQGTKVE | | | |
| | | GGACCAAGGTGGAGATCAAA | | IK | | | |
| ADI-81790 | 2939 | AATTTTATGCTGACTCAGCCCCACTCTGTGTCGGAGTCTCCGG | 4921 | NFMLTQPHSVSESPG | 5274 | 2 | 2 |
| | | GGAAGACGGTAACCATCTCCTGCACCCGCAGCAGTGGCAGCAT | | KTVTISCTRSSGSIA | | | |
| | | TGCCAGCAGCTATGTGCAGTGGTACCAGCAGCGCCCGGGCAGT | | SSYVQWYQQRPGSSP | | | |
| | | TCCCCCACCACTGTGATCTATGACGATAACCAAAGACCCTCTG | | TTVIYDDNQRPSGVP | | | |
| | | GGGTCCCTGATCGGTTCTCTGGCTCCATCGACAGCTCCTCCAA | | DRFSGSIDSSSNSAS | | | |
| | | CTCTGCCTCCCTCACCATCTCTGGACTGAAGACTGAGGACGAG | | LTISGLKTEDEADYY | | | |
| | | GCTGACTACTACTGTCAGTCTCATGATTCTAGCACTGTGATAT | | CQSHDSSTVIFGGGT | | | |
| | | TCGGCGGAGGGACCAAGCTCACCGTCCTA | | KLTVL | | | |
| ADI-81755 | 2950 | GAAATGACACTCACGCAGTCTCCATCCTCCCTGTCTGCATCTG | 4922 | EMTLTQSPSSLSASV | 5275 | 2 | 2 |
| | | TAGGAGACAGGGTCACCATCACTTGCCAGGCGAGTCAGGCCAT | | GDRVTITCQASQAIS | | | |
| | | TAGCAACTATTTAAATTGGTATCAGCAGAAACCAGGGAAAGCC | | NYLNWYQQKPGKAPK | | | |
| | | CCTAAACTCCTGATCTACGATGCATCCAATTTGGAAACAGGGG | | LLIYDASNLETGVPS | | | |
| | | TCCCATCGAGGTTCAGTGGAAGTGGATCTGGGACAGATTTTAC | | RFSGSGSGTDFTFTI | | | |
| | | TTTCACCATCAGCAGCCTGCAGCCTGAAGATATTGCAACATAT | | SSLQPEDIATYFCQQ | | | |
| | | TTCTGTCAACAGTATGATAATCTCCCTTTCACTTTCGGCCCTG | | YDNLPFTFGPGTKVD | | | |
| | | GGACCAAGGTGGATATCAAA | | IK | | | |
| ADI-81893 | 2942 | GAAATTGGGGTGACGCAGTCTCCATCCTCCCTGTCTGCATCTG | 4923 | EIGVTQSPSSLSASV | 5276 | 2 | 2 |
| | | TAGGAGACAGAGTCACCATCACCTGCCGGGCAAGTCAGAGCAT | | GDRVTITCRASQSIS | | | |
| | | TAGCAGCTATTTAAATTGGTATCAGCAGAAGCCAGGGAAAGCC | | SYLNWYQQKPGKAPK | | | |
| | | CCTAAACTCCTGATTTATGCTGCATCCAGTTTGCAAAGTGGGG | | LLIYAASSLQSGVPS | | | |
| | | TCCCATCAAGGTTCAGTGGCAGTGGATTTGGGACAGATTTCAC | | RFSGSGFGTDFTFTI | | | |
| | | TTTCACCATCAGCAGTTTACAACCTGAGGATTTTGCAACTTAC | | SSLQPEDFATYYCQQ | | | |
| | | TATTGTCAACAGAGTTACAGAACCCCCCCCCTCACTTTCGGCC | | SYRTPPLTFGPGTKV | | | |
| | | CTGGGACCAAGGTGGAAATCAAA | | EIK | | | |
| ADI-81649 | 2942 | GATATTGTGCTGACGCAGTCTCCAGACTCCCTGGCTGTGTCTC | 4924 | DIVLTQSPDSLAVSL | 5277 | 2 | 2 |
| | | TGGGCGAGAGGGCCACCATCAACTGCAAGTCCAGCCAGAGTGT | | GERATINCKSSQSVL | | | |
| | | TTTATATAGTTCCAACAATGAGAACTACTTAGGTTGGTACCAG | | YSSNNENYLGWYQQK | | | |
| | | CAGAAACCAGGACAGCCTCCTAAGTTGCTCATTTACTGGGCAT | | PGQPPKLLIYWASTR | | | |
| | | CTACCCGGGAATCCGGGGTCCCTGACCGATTCAGTGGCAGCGG | | ESGVPDRFSGSGSGT | | | |
| | | GTCTGGGACAGATTTCACTCTCACCATCAGCAGCCTGCAGGCT | | DFTLTISSLQAEDVA | | | |
| | | GAAGATGTGGCAGTTTATTACTGTCAGCAATATTATAGTACTC | | VYYCQQYYSTPLTFG | | | |
| | | CCCTCACTTTCGGCCCTGGGACCAAGGTGGAGATCAAA | | PGTKVEIK | | | |

| | | | SEQ | | SEQ | | SEQ | | SEQ | | SEQ | | SEQ | |
|---|---|---|---|---|---|---|---|---|---|---|---|---|---|---|
| | VL | VL | ID | VL | ID | VL | ID | VL | ID | VL | ID | VL | ID | VL |
| Clone ID | Germline | FR1 | NO: | CDR1 | NO: | FR2 | NO: | CDR2 | NO: | FR3 | NO: | CDR3 | NO: | FR4 |
| ADI-81716 | IGKV3-20 | EMALTQ | 3698 | RASQSV | 3885 | WYQQKP | 2258 | AASSRA | 2486 | GIPDRF | 2616 | HQYGYS | 4564 | FGQGTK |
| | | SPGTLS | | SSSFLA | | GQAPRL | | T | | SGSGSG | | PWT | | VDIK |
| | | LSPGER | | | | LIY | | | | TDFTLT | | | | |
| | | ATLSC | | | | | | | | ISRLEP | | | | |
| | | | | | | | | | | EDFAVY | | | | |
| | | | | | | | | | | YC | | | | |
| ADI-81910 | IGKV1-33 | DIGMTQ | 3564 | QASQDI | 3897 | WYQQKP | 4022 | DASNLE | 2416 | GVPSRF | 2537 | QQFDNL | 4565 | FGQGTR |
| | | SPSSLS | | SNSLN | | GKAPKR | | T | | SGSGSG | | PIT | | LEIK |
| | | ASVGDR | | | | LIY | | | | TDFTFT | | | | |
| | | VTITC | | | | | | | | ISSLQP | | | | |
| | | | | | | | | | | EDIATY | | | | |
| | | | | | | | | | | YC | | | | |
| ADI-81862 | IGLV3-21 | QSVLTQ | 2010 | GGNNIG | 2208 | WYQQKP | 2358 | DDSDRP | 2399 | GIPERF | 4321 | QVWDSN | 4566 | FGTGTK |
| | | PPSVSV | | SKSVH | | GQAPVL | | S | | SGSNSG | | SDHHYV | | LTVL |
| | | APGQTA | | | | VVN | | | | NTATLT | | | | |
| | | RITQ | | | | | | | | ISRVAA | | | | |
| | | | | | | | | | | GDEADY | | | | |
| | | | | | | | | | | YC | | | | |
| ADI-81898 | IGKV4-1 | DIRVTQ | 3699 | KSSQSV | 3898 | WYQQKP | 2290 | WASTRE | 2422 | GVPDRF | 2619 | QQYYST | 4567 | FGQGTK |
| | | SPDSLA | | LYSSNN | | GQPPKL | | S | | SGSGSG | | PWT | | VEIK |
| | | VSLGER | | KNFLA | | LIY | | | | TDFTLT | | | | |
| | | ATINC | | | | | | | | ISSLQA | | | | |
| | | | | | | | | | | EDVAVY | | | | |
| | | | | | | | | | | YC | | | | |
| ADI-81585 | IGKV3-11 | EIVLTQ | 1945 | RASQSV | 2119 | WYQQKP | 2258 | DASNRA | 2448 | GIPARF | 2607 | QQRDNW | 4568 | FGGGTK |
| | | SPATLS | | STYLA | | GQAPRL | | T | | SGSGSG | | VS | | VEIK |
| | | LSPGER | | | | LIY | | | | TDFTLT | | | | |
| | | ATLSC | | | | | | | | ISSLEP | | | | |
| | | | | | | | | | | EDFAVY | | | | |
| | | | | | | | | | | YC | | | | |
| ADI-81613 | IGKV4-1 | DIQMTQ | 1927 | KSSQSV | 3899 | WYQQKP | 2290 | WASTRE | 2422 | GVPDRF | 2619 | QQYYST | 4518 | FGGGTK |
| | | SPDSLA | | LYSSNN | | GQPPKL | | S | | SGSGSG | | PLT | | VEIK |
| | | VSLGER | | NNYLA | | LIY | | | | TDFTLT | | | | |
| | | ATING | | | | | | | | ISSLQA | | | | |
| | | | | | | | | | | EDVAVY | | | | |
| | | | | | | | | | | YC | | | | |
| ADI-81690 | IGKV3D-15 | EIVMTQ | 2034 | RASQSV | 2100 | WYQQKP | 2258 | GASTRA | 2383 | GIPARF | 2569 | QQYNKW | 4569 | FGQGTK |
| | | SPATLS | | SSSLA | | GQAPRL | | T | | SGSGSG | | PRYT | | VDIK |
| | | VSPGER | | | | LIY | | | | TEFTLT | | | | |
| | | ATLSC | | | | | | | | ISSLQS | | | | |
| | | | | | | | | | | EDFAVY | | | | |
| | | | | | | | | | | YC | | | | |
| ADI-81784 | IGKV1-33 | DIRMTQ | 1937 | QASQDI | 2212 | WYQQKP | 2257 | DASNLE | 2416 | GVPSRF | 4268 | QQYHSL | 4570 | FGPGTK |
| | | SPSSLS | | SNYLN | | GKAPKL | | T | | SGSGSG | | PIT | | VDIK |
| | | ASVGDR | | | | LIY | | | | TDFSFT | | | | |
| | | VTITQ | | | | | | | | ISSLQP | | | | |
| | | | | | | | | | | EDIATY | | | | |
| | | | | | | | | | | YC | | | | |

| | | | | | | VL | VL Amino |
|---|---|---|---|---|---|---|---|
| | SEQ | | SEQ | | SEQ | Nucleotide | Acid |
| | ID | | ID | | ID | Sub- | Sub- |
| Clone ID | NO: | VL DNA | NO: | VL Protein | NO: | stitutions | stitutions |
| ADI-81716 | 2944 | GAAATGGCACTGACGCAGTCTCCAGGCACCCTGTCTTTGTCTC | 4925 | EMALTQSPGTLSLSP | 5278 | 2 | 2 |
| | | CAGGGGAAAGAGCCACCCTCTCCTGCAGGGCCAGTCAGAGTGT | | GERATLSCRASQSVS | | | |
| | | TAGCAGCAGCTTCTTAGCATGGTACCAGCAGAAACCTGGCCAG | | SSFLAWYQQKPGQAP | | | |
| | | GCTCCCAGGCTCCTCATCTATGCTGCATCCAGCAGGGCCACTG | | RLLIYAASSRATGIP | | | |
| | | GCATCCCAGACAGGTTCAGTGGCAGTGGGTCTGGGACAGACTT | | DRFSGSGSGTDFTLT | | | |
| | | CACTCTCACCATCAGCAGACTGGAGCCTGAAGATTTTGCAGTG | | ISRLEPEDFAVYYCH | | | |
| | | TATTACTGTCACCAGTATGGTTACTCACCGTGGACGTTCGGCC | | QYGYSPWTFGQGTKV | | | |
| | | AAGGGACCAAAGTGGATATCAAA | | DIK | | | |
| ADI-81910 | 2940 | GACATCGGGATGACCCAGTCTCCATCCTCCCTGTCTGCATCTG | 4926 | DIGMTQSPSSLSASV | 5279 | 2 | 2 |
| | | TAGGAGACAGAGTCACCATCACTTGCCAGGCGAGTCAGGACAT | | GDRVTITCQASQDIS | | | |
| | | TAGCAACTCTTTAAATTGGTATCAGCAGAAACCAGGGAAAGCC | | NSLNWYQQKPGKAPK | | | |
| | | CCTAAGCGCCTGATCTACGATGCATCCAATTTGGAAACAGGGG | | RLIYDASNLETGVPS | | | |
| | | TCCCATCAAGGTTCAGTGGAAGTGGATCTGGGACAGATTTTAC | | RFSGSGSGTDFTFTI | | | |
| | | TTTCACCATCAGCAGCCTGCAGCCTGAAGATATTGCAACATAT | | SSLQPEDIATYYCQQ | | | |
| | | TACTGTCAACAGTTTGATAATCTCCCGATCACCTTCGGCCAAG | | FDNLPITFGQGTRLE | | | |
| | | GGACACGACTGGAGATTAAA | | IK | | | |
| ADI-81862 | 2949 | CAGTCTGTGCTGACTCAGCCACCCTCGGTGTCAGTGGCCCCAG | 4927 | QSVLTQPPSVSVAPG | 5280 | 2 | 2 |
| | | GACAGACGGCCAGGATTACCTGTGGGGGAAACAACATTGGAAG | | QTARITCGGNNIGSK | | | |
| | | TAAAAGTGTGCACTGGTACCAGCAGAAGCCAGGCCAGGCCCCT | | SVHWYQQKPGQAPVL | | | |
| | | GTGCTGGTCGTCAATGATGATAGCGACCGGCCCTCAGGGATCC | | VVNDDSDRPSGIPER | | | |
| | | CTGAGCGATTCTCTGGCTCCAACTCTGGGAACACGGCCACCCT | | FSGSNSGNTATLTIS | | | |
| | | GACCATCAGCAGGGTCGCAGCCGGGGATGAGGCCGACTATTAC | | RVAAGDEADYYCQVW | | | |
| | | TGTCAGGTGTGGGATAGTAATAGTGATCATCATTATGTCTTCG | | DSNSDHHYVFGTGTK | | | |
| | | GAACTGGGACCAAGCTCACCGTCCTA | | LTVL | | | |
| ADI-81898 | 2937 | GACATCCGAGTGACGCAGTCTCCAGACTCCCTGGCTGTGTCTC | 4928 | DIRVTQSPDSLAVSL | 5281 | 1 | 1 |
| | | TGGGCGAGAGGGCCACCATCAACTGCAAGTCCAGCCAGAGTGT | | GERATINCKSSQSVL | | | |
| | | TTTATACAGCTCCAACAATAAGAACTTCTTAGCTTGGTACCAG | | YSSNNKNFLAWYQQK | | | |
| | | CAGAAACCAGGACAGCCTCCTAAGCTGCTCATTTATTGGGCAT | | PGQPPKLLIYWASTR | | | |
| | | CTACCCGGGAATCCGGGGTCCCTGACCGATTCAGTGGCAGCGG | | ESGVPDRFSGSGSGT | | | |
| | | GTCTGGGACAGATTTCACTCTCACCATCAGCAGCCTGCAGGCT | | DFTLTISSLQAEDVA | | | |
| | | GAAGATGTGGCAGTTTATTACTGTCAGCAATATTACAGTACTC | | VYYCQQYYSTPWTFG | | | |
| | | CGTGGACGTTCGGCCAAGGGACCAAGGTGGAAATCAAA | | QGTKVEIK | | | |
| ADI-81585 | 2936 | GAAATTGTGTTGACGCAGTCTCCAGCCACCCTGTCTTTGTCTC | 4929 | EIVLTQSPATLSLSP | 5282 | 1 | 1 |
| | | CAGGGGAAAGAGCCACCCTGTCCTGCAGGGCCAGTCAGAGTGT | | GERATLSCRASQSVS | | | |
| | | TAGCACCTACTTAGCCTGGTACCAACAGAAACCTGGCCAGGCT | | TYLAWYQQKPGQAPR | | | |
| | | CCCAGGCTCCTCATCTATGATGCATCCAACAGGGCCACTGGCA | | LLIYDASNRATGIPA | | | |
| | | TCCCGGCCAGGTTCAGTGGCAGTGGGTCTGGGACAGACTTCAC | | RFSGSGSGTDFTLTI | | | |
| | | TCTCACCATCAGCAGCCTAGAGCCTGAAGATTTTGCAGTTTAT | | SSLEPEDFAVYYCQQ | | | |
| | | TACTGTCAGCAGCGTGACAACTGGGTCTCTTTCGGCGGAGGGA | | RDNWVSFGGGTKVEI | | | |
| | | CCAAGGTGGAAATCAAA | | K | | | |
| ADI-81613 | 2936 | GACATCCAGATGACCCAGTCTCCAGACTCCCTGGCTGTGTCTC | 4930 | DIQMTQSPDSLAVSL | 5283 | 1 | 1 |
| | | TGGGCGAGAGGGCCACCATCAACTGCAAGTCCAGCCAGAGTGT | | GERATINCKSSQSVL | | | |
| | | TTTATACAGCTCCAACAATAACAACTACTTAGCTTGGTACCAG | | YSSNNNNYLAWYQQK | | | |
| | | CAGAAACCAGGACAGCCTCCTAAGCTGCTCATTTACTGGGCAT | | PGQPPKLLIYWASTR | | | |
| | | CTACCCGGGAATCCGGGGTCCCTGACCGATTCAGTGGCAGCGG | | ESGVPDRFSGSGSGT | | | |
| | | GTCTGGGACCGATTTCACTCTCACCATCAGCAGCCTGCAGGCT | | DFTLTISSLQAEDVA | | | |
| | | GAGGATGTTGCAGTTTATTACTGTCAGCAATATTATAGTACTC | | VYYCQQYYSTPLTFG | | | |
| | | CGCTCACTTTCGGCGGAGGGACCAAGGTGGAAATCAAA | | GGTKVEIK | | | |
| ADI-81690 | 2944 | GAAATTGTGATGACTCAGTCTCCAGCCACCCTGTCTGTGTCTC | 4931 | EIVMTQSPATLSVSP | 5284 | 1 | 1 |
| | | CAGGGGAAAGAGCCACCCTCTCCTGCAGGGCCAGTCAGAGTGT | | GERATLSCRASQSVS | | | |
| | | TAGCAGCAGCTTAGCCTGGTACCAGCAGAAACCTGGCCAGGCT | | SSLAWYQQKPGQAPR | | | |
| | | CCCAGGCTCCTCATCTATGGTGCATCCACCAGGGCCACTGGTA | | LLIYGASTRATGIPA | | | |
| | | TCCCAGCCAGGTTCAGTGGCAGTGGGTCTGGGACAGAGTTCAC | | RFSGSGSGTEFTLTI | | | |
| | | TCTCACCATCAGTAGCCTGCAGTCTGAAGATTTTGCAGTTTAT | | SSLQSEDFAVYYCQQ | | | |
| | | TACTGTCAGCAGTATAATAAGTGGCCTCGGTACACTTTTGGCC | | YNKWPRYTFGQGTKV | | | |
| | | AGGGGACCAAGGTGGATATCAAA | | DIK | | | |
| ADI-81784 | 2950 | GACATCCGGATGACCCAGTCTCCATCTTCCCTGTCTGCATCTG | 4932 | DIRMTQSPSSLSASV | 5285 | 1 | 1 |
| | | TAGGAGACAGAGTCACCATCACCTGCCAGGCGAGTCAGGACAT | | GDRVTITCQASQDIS | | | |
| | | AAGCAACTATTTAAATTGGTATCAGCAAAAACCAGGGAAAGCC | | NYLNWYQQKPGKAPK | | | |
| | | CCTAAGCTCCTGATCTACGATGCATCCAATTTGGAAACAGGGG | | LLIYDASNLETGVPS | | | |
| | | TCCCATCACGGTTCAGTGGAAGTGGATCTGGGACAGATTTTAG | | RFSGSGSGTDFSFTI | | | |
| | | TTTCACCATCAGCAGCCTGCAGCCTGAAGATATTGCAACATAT | | SSLQPEDIATYYCQQ | | | |
| | | TACTGTCAACAGTATCATAGTCTCCCGATCACTTTCGGCCCTG | | YHSLPITFGPGTKVD | | | |
| | | GGACCAAGGTGGATATCAAA | | IK | | | |

| | | | SEQ | | SEQ | | SEQ | | SEQ | | SEQ | | SEQ | |
|---|---|---|---|---|---|---|---|---|---|---|---|---|---|---|
| | VL | VL | ID | VL | ID | VL | ID | VL | ID | VL | ID | VL | ID | VL |
| Clone ID | Germline | FR1 | NO: | CDR1 | NO: | FR2 | NO: | CDR2 | NO: | FR3 | NO: | CDR3 | NO: | FR4 |
| ADI-81863 | IGKV3-11 | EMTLTQ | 3534 | RASQSV | 3900 | WYQQKP | 2258 | DASNRA | 2448 | GIPARF | 2607 | QQRSNW | 4571 | FGGGTK |
| | | SPATLS | | RSYLA | | GQAPRL | | T | | SGSGSG | | PRTLT | | VEIK |
| | | LSPGER | | | | LIY | | | | TDFTLT | | | | |
| | | ATLSC | | | | | | | | ISSLEP | | | | |
| | | | | | | | | | | EDFAVY | | | | |
| | | | | | | | | | | YC | | | | |
| ADI-81645 | IGKV3-11 | EIVLTQ | 3581 | RASQSV | 2168 | WYQQKP | 2258 | DASNRA | 2448 | GIPARF | 2607 | QQRGNW | 4572 | FGGGTK |
| | | SPGTLS | | SSYLA | | GQAPRL | | T | | SGSGSG | | PGT | | VEIK |
| | | LSPGER | | | | LIY | | | | TDFTLT | | | | |
| | | ATLSC | | | | | | | | ISSLEP | | | | |
| | | | | | | | | | | EDFAVY | | | | |
| | | | | | | | | | | YC | | | | |
| ADI-81806 | IGKV1D-39 | DIPMTQ | 1947 | RASQRI | 2135 | WYQQKP | 2257 | AASSLQ | 2391 | GVPSRF | 2534 | QQSYST | 2807 | FGGGTK |
| | | SPSSLS | | SSYLN | | GKAPKL | | S | | SGSGSG | | PPVT | | VEIK |
| | | ASVGDR | | | | LIY | | | | TDFTLT | | | | |
| | | VTITC | | | | | | | | ISSLQP | | | | |
| | | | | | | | | | | EDFATY | | | | |
| | | | | | | | | | | YC | | | | |
| ADI-81801 | IGKV1D-39 | EIPMTQ | 1912 | RASQRI | 2135 | WYQQKP | 2257 | AASSLQ | 2391 | GVPSRF | 2534 | QQSYST | 2807 | FGGGTK |
| | | SPSSLS | | SSYLN | | GKAPKL | | S | | SGSGSG | | PPVT | | VDIK |
| | | ASVGDR | | | | LIY | | | | TDFTLT | | | | |
| | | VTITC | | | | | | | | ISSLQP | | | | |
| | | | | | | | | | | EDFATY | | | | |
| | | | | | | | | | | YC | | | | |
| ADI-81769 | IGKV1-12 | DIEMTQ | 3568 | RASQGI | 3901 | WYQQKP | 2257 | AASSLQ | 2391 | GVPSRF | 2534 | QQTISF | 4573 | FGQGTR |
| | | SPSSVS | | SNWLA | | GKAPKL | | S | | SGSGSG | | PAIT | | LEIK |
| | | ASVGDR | | | | LIY | | | | TDFTLT | | | | |
| | | VTITC | | | | | | | | ISSLQP | | | | |
| | | | | | | | | | | EDFATY | | | | |
| | | | | | | | | | | YC | | | | |
| ADI-81625 | IGKV1-33 | DIQMTQ | 1896 | QASQDI | 2212 | WYQQKP | 2257 | DASNLE | 2416 | GVPSRF | 2537 | QQHDNV | 4574 | FGQGTR |
| | | SPSSLS | | SNYLN | | GKAPKL | | T | | SGSGSG | | PLT | | LEIK |
| | | ASVGDR | | | | LIY | | | | TDFTFT | | | | |
| | | VTIAC | | | | | | | | ISSLQP | | | | |
| | | | | | | | | | | EDIATY | | | | |
| | | | | | | | | | | YC | | | | |
| ADI-81741 | IGKV1-9 | DIPMTQ | 3700 | RASQGI | 2136 | WYQQKP | 2257 | TASTLQ | 4151 | GVPSRF | 2592 | QQLNNH | 4575 | FGQGTR |
| | | SPSFLS | | SSYLA | | GKAPKL | | S | | SGSGSG | | PPA | | LEIK |
| | | ASVGDR | | | | LIY | | | | TEFTLT | | | | |
| | | VTITC | | | | | | | | ISSLQP | | | | |
| | | | | | | | | | | EDFATY | | | | |
| | | | | | | | | | | YC | | | | |
| ADI-81761 | IGKV3-11 | EIPLTQ | 3701 | RASQSV | 3871 | WYQQKP | 2258 | DASNRA | 2448 | GIPARF | 2607 | QQRSKW | 4576 | FGQGTK |
| | | SPATLS | | SNYLA | | GQAPRL | | T | | SGSGSG | | RYT | | VEIK |
| | | LSPGER | | | | LIY | | | | TDFTLT | | | | |
| | | ATLSC | | | | | | | | ISSLEP | | | | |
| | | | | | | | | | | EDFAVY | | | | |
| | | | | | | | | | | YC | | | | |

| | | | | | | VL | VL Amino |
|---|---|---|---|---|---|---|---|
| | SEQ | | SEQ | | SEQ | Nucleotide | Acid |
| | ID | | ID | | ID | Sub- | Sub- |
| Clone ID | NO: | VL DNA | NO: | VL Protein | NO: | stitutions | stitutions |
| ADI-81863 | 2936 | GAAATGACACTGACGCAGTCTCCAGCCACCCTGTCTTTGTCTC | 4933 | EMTLTQSPATLSLSP | 5286 | 1 | 1 |
| | | CAGGGGAAAGAGCCACTCTCTCCTGCAGGGCCAGTCAGAGCGT | | GERATLSCRASQSVR | | | |
| | | TCGCAGCTACTTAGCCTGGTACCAACAGAAACCTGGCCAGGCT | | SYLAWYQQKPGQAPR | | | |
| | | CCCAGGCTCCTCATCTATGATGCCTCCAACAGGGCCACTGGCA | | LLIYDASNRATGIPA | | | |
| | | TCCCAGCCAGGTTCAGTGGCAGTGGGTCTGGGACAGACTTCAC | | RFSGSGSGTDFTLTI | | | |
| | | TCTCACCATCAGCAGCCTAGAGCCTGAAGATTTTGCAGTTTAT | | SSLEPEDFAVYYCQQ | | | |
| | | TACTGTCAGCAGCGTAGCAACTGGCCCCGCACACTCACTTTCG | | RSNWPRTLTFGGGTK | | | |
| | | GCGGAGGGACCAAGGTGGAAATCAAA | | VEIK | | | |
| ADI-81645 | 2936 | GAAATTGTGCTGACGCAGTCTCCAGGCACCCTGTCTTTGTCTC | 4934 | EIVLTQSPGTLSLSP | 5287 | 1 | 1 |
| | | CAGGGGAAAGAGCCACCCTCTCCTGCAGGGCCAGTCAGAGTGT | | GERATLSCRASQSVS | | | |
| | | TAGCAGCTACTTAGCCTGGTACCAACAAAAACCTGGCCAGGCT | | SYLAWYQQKPGQAPR | | | |
| | | CCCAGGCTCCTCATCTATGATGCGTCCAACAGGGCCACTGGCA | | LLIYDASNRATGIPA | | | |
| | | TCCCAGCCAGGTTCAGTGGCAGTGGGTCTGGGACAGACTTCAC | | RFSGSGSGTDFTLTI | | | |
| | | TCTCACCATCAGCAGCCTGGAGCCTGAAGATTTTGCAGTTTAT | | SSLEPEDFAVYYCQQ | | | |
| | | TACTGTCAGCAGCGTGGCAACTGGCCGGGGACTTTCGGCGGAG | | RGNWPGTFGGGTKVE | | | |
| | | GGACCAAGGTGGAAATCAAA | | IK | | | |
| ADI-81806 | 2936 | GACATCCCGATGACCCAGTCTCCATCCTCCCTGTCTGCATCTG | 4935 | DIPMTQSPSSLSASV | 5288 | 1 | 1 |
| | | TAGGAGACAGAGTCACCATCACTTGCCGGGCAAGTCAGAGAAT | | GDRVTITCRASQRIS | | | |
| | | AAGCAGCTATTTAAATTGGTATCAGCAGAAACCAGGGAAAGCC | | SYLNWYQQKPGKAPK | | | |
| | | CCTAAGCTCCTGATCTATGCTGCATCCAGTTTGCAAAGTGGGG | | LLIYAASSLQSGVPS | | | |
| | | TCCCATCAAGGTTCAGTGGCAGTGGATCTGGGACAGATTTCAC | | RFSGSGSGTDFTLTI | | | |
| | | TCTCACCATCAGCAGTCTGCAACCTGAAGATTTTGCAACTTAC | | SSLQPEDFATYYCQQ | | | |
| | | TACTGTCAACAGAGTTACAGTACCCCTCCGGTCACTTTCGGCG | | SYSTPPVTFGGGTKV | | | |
| | | GAGGGACCAAGGTGGAAATCAAA | | EIK | | | |
| ADI-81801 | 2938 | GAAATCCCGATGACCCAGTCTCCATCCTCCCTGTCTGCATCTG | 4936 | EIPMTQSPSSLSASV | 5289 | 1 | 1 |
| | | TAGGAGACAGAGTCACCATCACTTGCCGGGCAAGTCAGAGAAT | | GDRVTITCRASQRIS | | | |
| | | AAGCAGCTATTTAAATTGGTATCAGCAGAAACCAGGGAAAGCC | | SYLNWYQQKPGKAPK | | | |
| | | CCTAAGCTCCTGATCTATGCTGCATCCAGTTTGCAAAGTGGGG | | LLIYAASSLQSGVPS | | | |
| | | TCCCATCAAGGTTCAGTGGCAGTGGATCTGGGACAGATTTCAC | | RFSGSGSGTDFTLTI | | | |
| | | TCTCACCATCAGCAGTCTGCAACCTGAAGATTTTGCAACTTAC | | SSLQPEDFATYYCQQ | | | |
| | | TACTGTCAACAGAGTTACAGTACCCCTCCGGTCACTTTCGGCG | | SYSTPPVTFGGGTKV | | | |
| | | GAGGGACCAAGGTGGATATCAAA | | DIK | | | |
| ADI-81769 | 2940 | GACATCGAGATGACCCAGTCTCCATCTTCCGTGTCTGCATCTG | 4937 | DIEMTQSPSSVSASV | 5290 | 1 | 1 |
| | | TGGGAGACAGAGTCACCATCACTTGTCGGGCGAGTCAGGGTAT | | GDRVTITCRASQGIS | | | |
| | | TAGCAACTGGTTAGCCTGGTATCAGCAGAAACCAGGGAAAGCC | | NWLAWYQQKPGKAPK | | | |
| | | CCTAAACTCCTGATCTATGCTGCATCCAGTTTGCAAAGTGGGG | | LLIYAASSLQSGVPS | | | |
| | | TCCCATCAAGGTTCAGCGGCAGTGGATCTGGGACAGATTTCAC | | RFSGSGSGTDFTLTI | | | |
| | | TCTCACCATCAGCAGCCTGCAGCCTGAAGATTTTGCAACTTAC | | SSLQPEDFATYYCQQ | | | |
| | | TATTGTCAACAGACTATCAGTTTTCCGGCGATCACCTTCGGCC | | TISFPAITFGQGTRL | | | |
| | | AAGGGACACGACTGGAGATTAAA | | EIK | | | |
| ADI-81625 | 2940 | GACATCCAGATGACCCAGTCTCCATCCTCCCTGTCTGCATCTG | 4938 | DIQMTQSPSSLSASV | 5291 | 1 | 1 |
| | | TAGGAGACAGAGTCACCATCGCTTGCCAGGCGAGTCAGGACAT | | GDRVTIACQASQDIS | | | |
| | | TAGCAACTATTTAAATTGGTATCAGCAAAAACCAGGGAAAGCC | | NYLNWYQQKPGKAPK | | | |
| | | CCTAAGCTCCTGATCTACGATGCATCCAATTTGGAAACAGGGG | | LLIYDASNLETGVPS | | | |
| | | TCCCATCAAGGTTCAGTGGAAGTGGATCTGGGACAGATTTTAC | | RFSGSGSGTDFTFTI | | | |
| | | TTTCACCATCAGCAGCCTGCAGCCTGAAGATATTGCAACATAT | | SSLQPEDIATYYCQQ | | | |
| | | TACTGTCAACAGCATGATAATGTCCCTCTCACCTTCGGCCAAG | | HDNVPLTFGQGTRLE | | | |
| | | GGACACGACTGGAGATTAAA | | IK | | | |
| ADI-81741 | 2940 | GACATCCCAATGACCCAGTCTCCATCCTTCCTGTCTGCATCTG | 4939 | DIPMTQSPSFLSASV | 5292 | 1 | 1 |
| | | TAGGAGACAGAGTCACCATCACTTGCCGGGCCAGTCAGGGCAT | | GDRVTITCRASQGIS | | | |
| | | TAGCAGTTATTTAGCCTGGTATCAGCAAAAACCAGGGAAAGCC | | SYLAWYQQKPGKAPK | | | |
| | | CCTAAGCTCCTGATCTATACTGCATCCACTTTGCAAAGTGGGG | | LLIYTASTLQSGVPS | | | |
| | | TCCCATCAAGGTTCAGCGGCAGTGGATCTGGGACAGAATTCAC | | RFSGSGSGTEFTLTI | | | |
| | | TCTCACAATCAGCAGCCTGCAGCCTGAAGATTTTGCAACTTAT | | SSLQPEDFATYYCQQ | | | |
| | | TACTGTCAACAGCTTAATAATCACCCTCCGGCCTTCGGCCAAG | | LNNHPPAFGQGTRLE | | | |
| | | GGACACGACTGGAGATTAAA | | IK | | | |
| ADI-81761 | 2937 | GAAATCCCACTGACCCAGTCTCCAGCCACCCTGTCTTTGTCTC | 4940 | EIPLTQSPATLSLSP | 5293 | 1 | 1 |
| | | CAGGGGAAAGAGCCACCCTCTCCTGCAGGGCCAGTCAGAGTGT | | GERATLSCRASQSVS | | | |
| | | TAGCAACTACTTAGCCTGGTACCAACAGAAACCTGGCCAGGCT | | NYLAWYQQKPGQAPR | | | |
| | | CCCAGGCTCCTCATCTATGATGCATCCAACAGGGCCACTGGCA | | LLIYDASNRATGIPA | | | |
| | | TCCCAGCCAGGTTCAGTGGCAGTGGGTCTGGGACAGACTTCAC | | RFSGSGSGTDFTLTI | | | |
| | | TCTCACCATCAGCAGCCTAGAGCCTGAAGATTTTGCAGTTTAT | | SSLEPEDFAVYYCQQ | | | |
| | | TACTGTCAGCAGCGTAGCAAGTGGCGGTACACTTTTGGCCAGG | | RSKWRYTFGQGTKVE | | | |
| | | GGACCAAGGTGGAAATCAAA | | IK | | | |

| | | | SEQ | | SEQ | | SEQ | | SEQ | | SEQ | | SEQ | |
|---|---|---|---|---|---|---|---|---|---|---|---|---|---|---|
| | VL | VL | ID | VL | ID | VL | ID | VL | ID | VL | ID | VL | ID | VL |
| Clone ID | Germline | FR1 | NO: | CDR1 | NO: | FR2 | NO: | CDR2 | NO: | FR3 | NO: | CDR3 | NO: | FR4 |
| ADI-81867 | IGKV2D-28 | DIRMTQ | 3702 | RSSQSL | 3877 | WYLQKP | 2260 | LGSNRA | 2387 | GVPDRF | 2533 | MQALQS | 4577 | FGQGTR |
| | | SPLSLP | | LHSNGH | | GQSPQL | | S | | SGSGSG | | PPA | | LEIK |
| | | VTPGEP | | NYLD | | LIY | | | | TDFTLK | | | | |
| | | ASISC | | | | | | | | ISRVEA | | | | |
| | | | | | | | | | | EDVGVY | | | | |
| | | | | | | | | | | YC | | | | |
| ADI-81655 | IGLV6-57 | NLMLTQ | 1922 | TGSSGS | 3902 | WYQQRP | 2298 | EDDQRP | 2502 | GVPDRF | 2574 | QSYDSS | 4578 | FGGGTK |
| | | PHSVSE | | IASNYV | | GSAPTT | | S | | SGSIDS | | RVV | | LTVL |
| | | SPGKTV | | Q | | VIY | | | | SSNSAS | | | | |
| | | TISC | | | | | | | | LTISGL | | | | |
| | | | | | | | | | | KTEDEA | | | | |
| | | | | | | | | | | DYYC | | | | |
| ADI-81791 | IGKV3D-15 | EIVLTQ | 2033 | RASQSV | 2227 | WYQQKP | 2258 | GASTRA | 2383 | GIPARF | 4322 | QQYNNW | 4559 | FGGGTK |
| | | SPATLS | | SSNLA | | GQAPRL | | T | | SGSGSG | | PPLT | | VDIK |
| | | VSPGER | | | | LIY | | | | TEFTLT | | | | |
| | | ATLSC | | | | | | | | ISSLQS | | | | |
| | | | | | | | | | | EDFALY | | | | |
| | | | | | | | | | | YC | | | | |
| ADI-81842 | IGKV3-11 | EIVLTQ | 1945 | RASQSV | 2168 | WYQQKP | 2258 | DASNRA | 2448 | GIPARF | 4323 | QQRSIW | 4579 | FGPGTK |
| | | SPATLS | | SSYLA | | GQAPRL | | T | | SGSGSG | | PPPFT | | VEIK |
| | | LSPGER | | | | LIY | | | | TDFNLT | | | | |
| | | ATLSC | | | | | | | | ISSLEP | | | | |
| | | | | | | | | | | EDFAVY | | | | |
| | | | | | | | | | | YC | | | | |
| ADI-81846 | IGKV3-11 | EIVLTQ | 1945 | RASQSV | 2168 | WYQQKP | 3906 | DASNRA | 2448 | GIPARF | 2607 | QQRSNW | 4580 | FGQGTK |
| | | SPATLS | | SSYLA | | GQAPRV | | T | | SGSGSG | | RYT | | VEIK |
| | | LSPGER | | | | LIY | | | | TDFTLT | | | | |
| | | ATLSC | | | | | | | | ISSLEP | | | | |
| | | | | | | | | | | EDFAVY | | | | |
| | | | | | | | | | | YC | | | | |
| ADI-81894 | IGKV1D-39 | EIPMTQ | 1912 | RASQSI | 2050 | WYQQKP | 2257 | AASGLQ | 4152 | GVPSRF | 2534 | QQSYTN | 4581 | FGQGTK |
| | | SPSSLS | | SSYLN | | GKAPKL | | S | | SGSGSG | | PMYT | | VEIK |
| | | ASVGDR | | | | LIY | | | | TDFTLT | | | | |
| | | VTITC | | | | | | | | ISSLQP | | | | |
| | | | | | | | | | | EDFATY | | | | |
| | | | | | | | | | | YC | | | | |
| ADI-81912 | IGKV2D-28 | EMTLTQ | 3703 | RSSQSL | 3887 | WYLQKP | 2260 | LGSNRA | 2387 | GVPDRF | 4324 | MQALQT | 4582 | FGQGTK |
| | | SPLSLP | | LHSNGY | | GQSPQL | | S | | SGSGSG | | PPYG | | VDIK |
| | | VTPGEP | | NYLD | | LIY | | | | TDFTLK | | | | |
| | | ASISC | | | | | | | | ISRVEA | | | | |
| | | | | | | | | | | GDVGVY | | | | |
| | | | | | | | | | | YC | | | | |
| ADI-81848 | IGLV2-23 | QSVLTQ | 1918 | TGTSSD | 3903 | WYQQHP | 2265 | EVTKRP | 2449 | GVSNRF | 4325 | CSYAGI | 4583 | FGTGTK |
| | | PASVSG | | VGSYNL | | GKAPKL | | S | | SGSKSG | | YV | | LTVL |
| | | SPGQSI | | VS | | MIY | | | | NTASLT | | | | |
| | | TISC | | | | | | | | ISGLQA | | | | |
| | | | | | | | | | | EDEADY | | | | |
| | | | | | | | | | | YC | | | | |

| | | | | | | VL | VL Amino |
|---|---|---|---|---|---|---|---|
| | SEQ | | SEQ | | SEQ | Nucleotide | Acid |
| | ID | | ID | | ID | Sub- | Sub- |
| Clone ID | NO: | VL DNA | NO: | VL Protein | NO: | stitutions | stitutions |
| ADI-81867 | 2940 | GACATCCGGATGACCCAGTCTCCACTCTCCCTGCCCGTCACCC | 4941 | DIRMTQSPLSLPVTP | 5294 | 1 | 1 |
| | | CTGGAGAGCCGGCCTCCATCTCCTGCAGGTCTAGTCAGAGCCT | | GEPASISCRSSQSLL | | | |
| | | CCTGCATAGTAATGGACACAACTATTTGGATTGGTACCTGCAG | | HSNGHNYLDWYLQKP | | | |
| | | AAGCCAGGGCAGTCTCCACAGCTCCTGATCTATTTGGGTTCTA | | GQSPQLLIYLGSNRA | | | |
| | | ATCGGGCCTCCGGGGTCCCTGACAGGTTCAGTGGCAGTGGATC | | SGVPDRFSGSGSGTD | | | |
| | | AGGCACAGATTTTACACTGAAAATCAGCAGAGTGGAGGCTGAG | | FTLKISRVEAEDVGV | | | |
| | | GATGTTGGGGTTTATTACTGCATGCAAGCTCTACAAAGTCCTC | | YYCMQALQSPPAFGQ | | | |
| | | CGGCCTTCGGCCAAGGGACACGACTGGAGATTAAA | | GTRLEIK | | | |
| ADI-81655 | 2939 | AATCTTATGCTGACTCAGCCCCACTCTGTGTCGGAGTCTCCGG | 4942 | NLMLTQPHSVSESPG | 5295 | 1 | 1 |
| | | GGAAGACGGTAACCATCTCCTGCACCGGCAGCAGTGGCAGCAT | | KTVTISCTGSSGSIA | | | |
| | | TGCCAGCAACTATGTGCAGTGGTACCAGCAGCGCCCGGGCAGT | | SNYVQWYQQRPGSAP | | | |
| | | GCCCCCACCACTGTGATCTATGAGGATGACCAAAGACCCTCTG | | TTVIYEDDQRPSGVP | | | |
| | | GGGTCCCTGATCGGTTCTCTGGCTCCATCGACAGCTCCTCCAA | | DRFSGSIDSSSNSAS | | | |
| | | CTCTGCCTCCCTCACCATCTCTGGACTGAAGACTGAGGACGAG | | LTISGLKTEDEADYY | | | |
| | | GCTGACTACTACTGTCAGTCTTATGATAGCAGCCGGGTGGTAT | | CQSYDSSRVVFGGGT | | | |
| | | TCGGCGGAGGGACCAAGCTCACCGTCCTA | | KLTVL | | | |
| ADI-81791 | 2938 | GAAATTGTATTGACGCAGTCTCCAGCCACCCTGTCTGTGTCTC | 4943 | EIVLTQSPATLSVSP | 5296 | 1 | 1 |
| | | CAGGGGAAAGAGCCACCCTCTCCTGCAGGGCCAGTCAGAGTGT | | GERATLSCRASQSVS | | | |
| | | TAGCAGCAACTTAGCCTGGTACCAGCAGAAACCTGGCCAGGCT | | SNLAWYQQKPGQAPR | | | |
| | | CCCAGGCTCCTCATCTATGGTGCATCCACCAGGGCCACTGGTA | | LLIYGASTRATGIPA | | | |
| | | TCCCAGCCAGGTTCAGTGGCAGTGGGTCTGGGACAGAGTTCAC | | RFSGSGSGTEFTLTI | | | |
| | | TCTCACCATCAGCAGCCTGCAGTCTGAAGATTTTGCACTTTAT | | SSLQSEDFALYYCQQ | | | |
| | | TACTGTCAGCAGTATAATAACTGGCCTCCGCTCACTTTCGGCG | | YNNWPPLTFGGGTKV | | | |
| | | GAGGGACCAAAGTGGATATCAAA | | DIK | | | |
| ADI-81842 | 2942 | GAAATTGTGCTGACACAGTCTCCAGCCACCCTGTCTTTGTCTC | 4944 | EIVLTQSPATLSLSP | 5297 | 1 | 1 |
| | | CAGGGGAAAGAGCCACCCTCTCCTGCAGGGCCAGTCAGAGTGT | | GERATLSCRASQSVS | | | |
| | | TAGCAGCTACTTAGCCTGGTACCAACAGAAACCTGGCCAGGCT | | SYLAWYQQKPGQAPR | | | |
| | | CCCAGGCTCCTCATCTATGATGCATCCAACAGGGCCACTGGCA | | LLIYDASNRATGIPA | | | |
| | | TCCCAGCCAGGTTCAGTGGCAGTGGGTCTGGGACAGACTTCAA | | RFSGSGSGTDFNLTI | | | |
| | | TCTCACCATCAGCAGCCTAGAGCCTGAGGATTTTGCAGTTTAT | | SSLEPEDFAVYYCQQ | | | |
| | | TACTGTCAGCAGCGTAGCATCTGGCCTCCGCCATTCACTTTCG | | RSIWPPPFTFGPGTK | | | |
| | | GCCCTGGGACCAAGGTGGAAATCAAA | | VEIK | | | |
| ADI-81846 | 2937 | GAAATTGTGTTGACGCAGTCTCCAGCCACCCTGTCTTTGTCTC | 4945 | EIVLTQSPATLSLSP | 5298 | 1 | 1 |
| | | CAGGGGAAAGAGCCACCCTCTCCTGCAGGGCCAGTCAGAGTGT | | GERATLSCRASQSVS | | | |
| | | TAGCAGCTACTTAGCCTGGTACCAACAGAAACCTGGCCAGGCT | | SYLAWYQQKPGQAPR | | | |
| | | CCCAGGGTCCTCATCTATGATGCATCCAACAGGGCCACTGGCA | | VLIYDASNRATGIPA | | | |
| | | TCCCAGCCAGGTTCAGTGGCAGTGGGTCTGGGACAGACTTCAC | | RFSGSGSGTDFTLTI | | | |
| | | TCTCACCATCAGCAGCCTAGAGCCTGAAGATTTTGCAGTTTAT | | SSLEPEDFAVYYCQQ | | | |
| | | TACTGTCAGCAGCGTAGCAACTGGCGGTACACTTTTGGCCAGG | | RSNWRYTFGQGTKVE | | | |
| | | GGACCAAGGTGGAAATCAAA | | IK | | | |
| ADI-81894 | 2937 | GAAATCCCGATGACCCAGTCTCCATCCTCCCTGTCTGCATCTG | 4946 | EIPMTQSPSSLSASV | 5299 | 1 | 1 |
| | | TAGGAGACAGAGTCACCATCACTTGCCGGGCAAGTCAGAGCAT | | GDRVTITCRASQSIS | | | |
| | | TAGCAGCTATTTAAATTGGTATCAGCAGAAACCAGGGAAAGCC | | SYLNWYQQKPGKAPK | | | |
| | | CCTAAGCTCCTGATCTATGCTGCATCCGGTTTGCAAAGTGGGG | | LLIYAASGLQSGVPS | | | |
| | | TCCCATCAAGGTTCAGTGGCAGTGGATCTGGGACAGATTTCAC | | RFSGSGSGTDFTLTI | | | |
| | | TCTCACCATCAGCAGTCTGCAACCTGAAGATTTTGCAACTTAC | | SSLQPEDFATYYCQQ | | | |
| | | TACTGTCAACAGAGTTACACTAACCCCATGTACACTTTTGGCC | | SYTNPMYTFGQGTKV | | | |
| | | AGGGGACCAAGGTGGAAATCAAA | | EIK | | | |
| ADI-81912 | 2944 | GAAATGACACTGACGCAGTCTCCACTCTCCCTGCCCGTCACCC | 4947 | EMTLTQSPLSLPVTP | 5300 | 1 | 1 |
| | | CTGGAGAGCCGGCCTCCATCTCCTGCAGGTCTAGTCAGAGCCT | | GEPASISCRSSQSLL | | | |
| | | CCTGCATAGTAATGGATACAACTATTTGGATTGGTACCTGCAG | | HSNGYNYLDWYLQKP | | | |
| | | AAGCCAGGGCAGTCTCCACAGCTCCTGATCTATTTGGGTTCTA | | GQSPQLLIYLGSNRA | | | |
| | | ATCGGGCCTCCGGGGTCCCTGACAGGTTCAGTGGCAGTGGATC | | SGVPDRFSGSGSGTD | | | |
| | | AGGCACAGATTTTACACTGAAAATCAGCAGAGTGGAGGCTGGG | | FTLKISRVEAGDVGV | | | |
| | | GATGTTGGGGTTTATTACTGCATGCAAGCTCTACAAACTCCTC | | YYCMQALQTPPYGFG | | | |
| | | CGTACGGTTTTGGCCAGGGGACCAAGGTGGATATCAAA | | QGTKVDIK | | | |
| ADI-81848 | 2949 | CAGTCTGTCCTGACTCAGCCTGCCTCCGTGTCTGGGTCTCCTG | 4948 | QSVLTQPASVSGSPG | 5301 | 1 | 1 |
| | | GACAGTCGATCACCATCTCCTGCACTGGAACCAGCAGTGATGT | | QSITISCTGTSSDVG | | | |
| | | TGGGAGTTATAACCTTGTCTCCTGGTACCAACAGCACCCAGGC | | SYNLVSWYQQHPGKA | | | |
| | | AAAGCCCCCAAACTCATGATTTATGAGGTCACTAAGCGGCCCT | | PKLMIYEVTKRPSGV | | | |
| | | CAGGGGTTTCTAATCGCTTCTCTGGCTCCAAGTCTGGCAACAC | | SNRFSGSKSGNTASL | | | |
| | | GGCCTCCCTGACAATCTCTGGGCTCCAGGCTGAGGACGAGGCT | | TISGLQAEDEADYYC | | | |
| | | GATTATTACTGCTGCTCATATGCAGGTATTTATGTCTTCGGAA | | CSYAGIYVFGTGTKL | | | |
| | | CTGGGACCAAGCTCACCGTCCTA | | TVL | | | |

| | | | SEQ | | SEQ | | SEQ | | SEQ | | SEQ | | SEQ | |
|---|---|---|---|---|---|---|---|---|---|---|---|---|---|---|
| | VL | VL | ID | VL | ID | VL | ID | VL | ID | VL | ID | VL | ID | VL |
| Clone ID | Germline | FR1 | NO: | CDR1 | NO: | FR2 | NO: | CDR2 | NO: | FR3 | NO: | CDR3 | NO: | FR4 |
| ADI-81915 | IGKV4-1 | EIVMTQ | 3704 | KSSQSV | 3904 | WYQQKP | 2290 | WASTRE | 2422 | GVPDRF | 2619 | QQYYST | 4584 | FGGGTK |
| | | SPDSLA | | LYSSNN | | GQPPKL | | S | | SGSGSG | | WALT | | VEIK |
| | | VSLGER | | KNNLA | | LIY | | | | TDFTLT | | | | |
| | | ATINC | | | | | | | | ISSLQA | | | | |
| | | | | | | | | | | EDVAVY | | | | |
| | | | | | | | | | | YC | | | | |
| ADI-81605 | IGKV4-1 | DIQMTQ | 1927 | KSSQSV | 2254 | WYQQKP | 4023 | WASTRE | 2422 | GVPDRF | 2619 | QQYYST | 4518 | FGGGTK |
| | | SPDSLA | | LYSSNN | | GQPPQL | | S | | SGSGSG | | PLT | | VEIK |
| | | VSLGER | | KNYLA | | LIY | | | | TDFTLT | | | | |
| | | ATINC | | | | | | | | ISSLQA | | | | |
| | | | | | | | | | | EDVAVY | | | | |
| | | | | | | | | | | YC | | | | |
| ADI-81870 | IGKV3-20 | ETTLTQ | 3628 | RASLSV | 3905 | WYQQKP | 2258 | GASSRA | 2464 | GIPDRF | 2616 | QQYGSS | 4585 | FGGGTK |
| | | SPGTLS | | SSSYLA | | GQAPRL | | T | | SGSGSG | | PLT | | VEIK |
| | | LSPGER | | | | LIY | | | | TDFTLT | | | | |
| | | ATLSC | | | | | | | | ISRLEP | | | | |
| | | | | | | | | | | EDFAVY | | | | |
| | | | | | | | | | | YC | | | | |
| ADI-81902 | IGKV3D-15 | EIVLTQ | 2033 | RASQSV | 2227 | WYQQKP | 2258 | GASTRA | 2383 | GIPARF | 2569 | QQYHNW | 4586 | FGGGTN |
| | | SPATLS | | SSNLA | | GQAPRL | | T | | SGSGSG | | PPLT | | VDIK |
| | | VSPGER | | | | LIY | | | | TEFTLT | | | | |
| | | ATLSC | | | | | | | | ISSLQS | | | | |
| | | | | | | | | | | EDFAVY | | | | |
| | | | | | | | | | | YC | | | | |
| ADI-81617 | IGLV3-21 | QHVLTQ | 3705 | GGNNIG | 2208 | WYQQKP | 2304 | YDSDRP | 2498 | GIPERF | 2545 | QVWDSS | 4587 | FGGGTK |
| | | PPSVSV | | SKSVH | | GQAPVL | | S | | SGSNSG | | WV | | VTVL |
| | | APGKTA | | | | VIY | | | | NTATLT | | | | |
| | | RITC | | | | | | | | ISRVEA | | | | |
| | | | | | | | | | | GDEADY | | | | |
| | | | | | | | | | | YC | | | | |
| ADI-81570 | IGKV3D-15 | EITMTQ | 3706 | RASQSV | 2227 | WYQQKP | 2258 | GASTRA | 2383 | GIPARF | 2569 | QQYNNW | 2897 | FGQGTK |
| | | SPATLS | | SSNLA | | GQAPRL | | T | | SGSGSG | | PRT | | VEIK |
| | | VSPGER | | | | LIY | | | | TEFTLT | | | | |
| | | ATLSC | | | | | | | | ISSLQS | | | | |
| | | | | | | | | | | EDFAVY | | | | |
| | | | | | | | | | | YC | | | | |
| ADI-81664 | IGKV3D-15 | EMTLTQ | 1916 | RASQSV | 2227 | WYQQKP | 2258 | GASTRA | 2383 | GIPARF | 2569 | QQYNNW | 4588 | FGQGTK |
| | | SPATLS | | SSNLA | | GQAPRL | | T | | SGSGSG | | PWT | | VDIK |
| | | VSPGER | | | | LIY | | | | TEFTLT | | | | |
| | | ATLSC | | | | | | | | ISSLQS | | | | |
| | | | | | | | | | | EDFAVY | | | | |
| | | | | | | | | | | YC | | | | |
| ADI-81666 | IGKV3-11 | EMTLTQ | 3534 | RASQSV | 2168 | WYQQKP | 2258 | DASNRA | 2448 | GIPARF | 2607 | QQRSNW | 4589 | FGGGTK |
| | | SPATLS | | SSYLA | | GQAPRL | | T | | SGSGSG | | PGT | | VEIK |
| | | LSPGER | | | | LIY | | | | TDFTLT | | | | |
| | | ATLSC | | | | | | | | ISSLEP | | | | |
| | | | | | | | | | | EDFAVY | | | | |
| | | | | | | | | | | YC | | | | |

| | | | | | | VL | VL Amino |
|---|---|---|---|---|---|---|---|
| | SEQ | | SEQ | | SEQ | Nucleotide | Acid |
| | ID | | ID | | ID | Sub- | Sub- |
| Clone ID | NO: | VL DNA | NO: | VL Protein | NO: | stitutions | stitutions |
| ADI-81915 | 2936 | GAAATTGTGATGACGCAGTCTCCAGACTCCCTGGCTGTGTCTC | 4949 | EIVMTQSPDSLAVSL | 5302 | 1 | 1 |
| | | TGGGCGAGAGGGCCACCATCAACTGCAAGTCCAGCCAGAGTGT | | GERATINCKSSQSVL | | | |
| | | TTTATACAGCTCCAACAATAAGAACAACTTAGCTTGGTACCAG | | YSSNNKNNLAWYQQK | | | |
| | | CAGAAACCAGGACAGCCTCCTAAGCTGCTCATTTACTGGGCAT | | PGQPPKLLIYWASTR | | | |
| | | CTACCCGGGAATCCGGGGTCCCTGACCGATTCAGTGGCAGCGG | | ESGVPDRFSGSGSGT | | | |
| | | GTCTGGGACAGATTTCACTCTCACCATCAGCAGCCTGCAGGCT | | DFTLTISSLQAEDVA | | | |
| | | GAAGATGTGGCAGTTTATTACTGTCAGCAATATTATAGTACTT | | VYYCQQYYSTWALTF | | | |
| | | GGGCGCTCACTTTCGGCGGAGGGACCAAGGTGGAAATCAAA | | GGGTKVEIK | | | |
| ADI-81605 | 2936 | GACATCCAGATGACCCAGTCTCCAGACTCCCTGGCTGTGTCTC | 4950 | DIQMTQSPDSLAVSL | 5303 | 1 | 1 |
| | | TGGGCGAGAGGGCCACCATCAACTGCAAGTCCAGCCAGAGTGT | | GERATINCKSSQSVL | | | |
| | | TTTATACAGCTCCAACAATAAGAACTACTTAGCTTGGTACCAG | | YSSNNKNYLAWYQQK | | | |
| | | CAGAAACCAGGACAGCCTCCTCAGCTACTCATTTACTGGGCAT | | PGQPPQLLIYWASTR | | | |
| | | CTACCCGGGAATCCGGGGTCCCTGACCGATTCAGTGGCAGCGG | | ESGVPDRFSGSGSGT | | | |
| | | GTCTGGGACAGATTTCACTCTCACCATCAGCAGCCTGCAGGCT | | DFTLTISSLQAEDVA | | | |
| | | GAAGATGTGGCAGTTTATTACTGTCAGCAATATTATAGTACTC | | VYYCQQYYSTPLTFG | | | |
| | | CTCTCACTTTCGGCGGAGGGACCAAGGTGGAAATCAAA | | GGTKVEIK | | | |
| ADI-81870 | 2936 | GAAACGACACTCACGCAGTCTCCAGGCACCCTGTCTTTGTCTC | 4951 | ETTLTQSPGTLSLSP | 5304 | 1 | 1 |
| | | CAGGGGAAAGAGCCACCCTCTCCTGCAGGGCCAGTCTGAGTGT | | GERATLSCRASLSVS | | | |
| | | TAGCAGCAGCTACTTAGCCTGGTACCAGCAGAAACCTGGCCAG | | SSYLAWYQQKPGQAP | | | |
| | | GCTCCCAGGCTCCTCATCTATGGTGCATCCAGCAGGGCCACTG | | RLLIYGASSRATGIP | | | |
| | | GCATCCCAGACAGGTTCAGTGGCAGTGGGTCTGGGACAGACTT | | DRFSGSGSGTDFTLT | | | |
| | | CACTCTCACCATCAGCAGACTGGAGCCTGAAGATTTTGCAGTG | | ISRLEPEDFAVYYCQ | | | |
| | | TATTACTGTCAGCAGTATGGTAGCTCACCGCTCACTTTCGGCG | | QYGSSPLTFGGGTKV | | | |
| | | GAGGGACCAAGGTGGAGATCAAA | | EIK | | | |
| ADI-81902 | 4605 | GAAATTGTATTGACACAGTCTCCAGCCACCCTGTCTGTGTCTC | 4952 | EIVLTQSPATLSVSP | 5305 | 0 | 0 |
| | | CAGGGGAAAGAGCCACCCTCTCCTGCAGGGCCAGTCAGAGTGT | | GERATLSCRASQSVS | | | |
| | | TAGCAGCAATTTAGCCTGGTACCAGCAGAAACCTGGCCAGGCT | | SNLAWYQQKPGQAPR | | | |
| | | CCCAGGCTCCTCATCTATGGTGCATCCACCAGGGCCACTGGTA | | LLIYGASTRATGIPA | | | |
| | | TCCCAGCCAGGTTCAGTGGCAGTGGGTCTGGGACAGAGTTCAC | | RFSGSGSGTEFTLTI | | | |
| | | TCTCACCATCAGCAGCCTGCAGTCTGAAGATTTTGCAGTTTAT | | SSLQSEDFAVYYCQQ | | | |
| | | TACTGTCAGCAGTATCATAATTGGCCTCCGCTCACTTTCGGCG | | YHNWPPLTFGGGTNV | | | |
| | | GAGGGACCAACGTGGATATCAAA | | DIK | | | |
| ADI-81617 | 2947 | CAGCATGTGCTGACTCAGCCACCCTCAGTGTCAGTGGCCCCAG | 4953 | QHVLTQPPSVSVAPG | 5306 | 0 | 0 |
| | | GAAAGACGGCCAGGATTACCTGTGGGGGAAACAACATTGGAAG | | KTARITCGGNNIGSK | | | |
| | | TAAAAGTGTGCACTGGTACCAGCAGAAGCCAGGCCAGGCCCCT | | SVHWYQQKPGQAPVL | | | |
| | | GTGCTGGTCATCTATTATGATAGCGACCGGCCCTCAGGGATCC | | VIYYDSDRPSGIPER | | | |
| | | CTGAGCGATTCTCTGGCTCCAACTCTGGGAACACGGCCACCCT | | FSGSNSGNTATLTIS | | | |
| | | GACCATCAGCAGGGTCGAAGCCGGGGATGAGGCCGACTATTAC | | RVEAGDEADYYCQVW | | | |
| | | TGTCAGGTGTGGGATAGTAGTTGGGTGTTCGGCGGAGGGACCA | | DSSWVFGGGTKVTVL | | | |
| | | AGGTCACCGTCCTA | | | | | |
| ADI-81570 | 2937 | GAAATCACAATGACGCAGTCTCCAGCCACCCTGTCTGTGTCTC | 4954 | EITMTQSPATLSVSP | 5307 | 0 | 0 |
| | | CAGGGGAAAGAGCCACCCTCTCCTGCAGGGCCAGTCAGAGTGT | | GERATLSCRASQSVS | | | |
| | | CAGCAGCAACTTAGCCTGGTACCAGCAGAAACCTGGCCAGGCT | | SNLAWYQQKPGQAPR | | | |
| | | CCCAGGCTCCTCATCTATGGTGCATCCACCAGGGCCACTGGTA | | LLIYGASTRATGIPA | | | |
| | | TCCCAGCCAGGTTCAGTGGCAGTGGGTCTGGGACAGAGTTCAC | | RFSGSGSGTEFTLTI | | | |
| | | TCTCACCATCAGCAGCCTGCAGTCTGAAGATTTTGCAGTTTAT | | SSLQSEDFAVYYCQQ | | | |
| | | TACTGTCAGCAGTATAATAACTGGCCTCGAACGTTCGGCCAAG | | YNNWPRTFGQGTKVE | | | |
| | | GGACCAAGGTGGAGATCAAA | | IK | | | |
| ADI-81664 | 2944 | GAAATGACACTCACGCAGTCTCCAGCCACCCTGTCTGTGTCTC | 4955 | EMTLTQSPATLSVSP | 5308 | 0 | 0 |
| | | CAGGGGAAAGAGCCACCCTCTCCTGCAGGGCCAGTCAGAGTGT | | GERATLSCRASQSVS | | | |
| | | TAGCAGCAACTTAGCCTGGTACCAGCAGAAACCTGGCCAGGCT | | SNLAWYQQKPGQAPR | | | |
| | | CCCAGGCTCCTCATCTATGGTGCATCCACCAGGGCCACTGGTA | | LLIYGASTRATGIPA | | | |
| | | TCCCAGCCAGGTTCAGTGGCAGTGGGTCTGGGACAGAGTTCAC | | RFSGSGSGTEFTLTI | | | |
| | | TCTCACCATCAGCAGCCTGCAGTCTGAAGATTTTGCAGTTTAT | | SSLQSEDFAVYYCQQ | | | |
| | | TACTGTCAGCAGTATAATAACTGGCCTTGGACGTTCGGCCAAG | | YNNWPWTFGQGTKVD | | | |
| | | GGACCAAGGTGGATATCAAA | | IK | | | |
| ADI-81666 | 2936 | GAAATGACACTGACGCAGTCTCCAGCCACCCTGTCTTTGTCTC | 4956 | EMTLTQSPATLSLSP | 5309 | 0 | 0 |
| | | CAGGGGAAAGAGCCACCCTCTCCTGCAGGGCCAGTCAGAGTGT | | GERATLSCRASQSVS | | | |
| | | TAGCAGCTACTTAGCCTGGTACCAACAGAAACCTGGCCAGGCT | | SYLAWYQQKPGQAPR | | | |
| | | CCCAGGCTCCTCATCTATGATGCATCCAACAGGGCCACTGGCA | | LLIYDASNRATGIPA | | | |
| | | TCCCAGCCAGGTTCAGTGGCAGTGGGTCTGGGACAGACTTCAC | | RFSGSGSGTDFTLTI | | | |
| | | TCTCACCATCAGCAGCCTAGAGCCTGAAGATTTTGCAGTTTAT | | SSLEPEDFAVYYCQQ | | | |
| | | TACTGTCAGCAGCGTAGCAACTGGCCGGGGACTTTCGGGGAG | | RSNWPGTFGGGTKVE | | | |
| | | GGACCAAGGTGGAAATCAAA | | IK | | | |

| | | | SEQ | | SEQ | | SEQ | | SEQ | | SEQ | | SEQ | |
|---|---|---|---|---|---|---|---|---|---|---|---|---|---|---|
| | VL | VL | ID | VL | ID | VL | ID | VL | ID | VL | ID | VL | ID | VL |
| Clone ID | Germline | FR1 | NO: | CDR1 | NO: | FR2 | NO: | CDR2 | NO: | FR3 | NO: | CDR3 | NO: | FR4 |
| ADI-81809 | IGKV1D-39 | EIVMTQ | 1891 | RASQSI | 2050 | WYQQKP | 2257 | AASSLQ | 2391 | GVPSRF | 2534 | QQSYSN | 4590 | FGQGTR |
| | | SPSSLS | | SSYLN | | GKAPKL | | S | | SGSGSG | | PPVT | | LEIK |
| | | ASVGDR | | | | LIY | | | | TDFTLT | | | | |
| | | VTITC | | | | | | | | ISSLQP | | | | |
| | | | | | | | | | | EDFATY | | | | |
| | | | | | | | | | | YC | | | | |
| ADI-81539 | IGLV3-21 | QYVLTQ | 3707 | GGNNIG | 2208 | WYQQKP | 2283 | DDSDRP | 2399 | GIPERF | 2545 | QLWDGS | 4591 | FGGGTK |
| | | PPSVSV | | SKSVH | | GQAPVL | | S | | SGSNSG | | SDHPEV | | LTVL |
| | | APGQTA | | | | VVY | | | | NTATLT | | V | | |
| | | RITC | | | | | | | | ISRVEA | | | | |
| | | | | | | | | | | GDEADY | | | | |
| | | | | | | | | | | YC | | | | |
| ADI-81648 | IGKV1-12 | EITLTQ | 3708 | RASQGI | 2244 | WYQQKP | 2257 | AASSLQ | 2391 | GVPSRF | 2534 | QQANSF | 2710 | FGGGTK |
| | | SPSSVS | | SSWLA | | GKAPKL | | S | | SGSGSG | | PLT | | VDIK |
| | | ASVGDR | | | | LIY | | | | TDFTLT | | | | |
| | | VTITC | | | | | | | | ISSLQP | | | | |
| | | | | | | | | | | EDFATY | | | | |
| | | | | | | | | | | YC | | | | |

| | | | | | | VL | VL Amino |
|---|---|---|---|---|---|---|---|
| | SEQ | | SEQ | | SEQ | Nucleotide | Acid |
| | ID | | ID | | ID | Sub- | Sub- |
| Clone ID | NO: | VL DNA | NO: | VL Protein | NO: | stitutions | stitutions |
| ADI-81809 | 2940 | GAAATTGTGATGACGCAGTCTCCATCCTCCCTGTCTGCATCTG | 4957 | EIVMTQSPSSLSASV | 5310 | 0 | 0 |
| | | TAGGAGACAGAGTCACCATCACTTGCCGGGCAAGTCAGAGCAT | | GDRVTITCRASQSIS | | | |
| | | TAGCAGCTATTTAAATTGGTATCAGCAGAAACCAGGGAAAGCC | | SYLNWYQQKPGKAPK | | | |
| | | CCTAAGCTCCTGATCTATGCTGCATCCAGTTTGCAAAGTGGGG | | LLIYAASSLQSGVPS | | | |
| | | TCCCATCAAGGTTCAGTGGCAGTGGATCTGGGACAGATTTCAC | | RFSGSGSGTDFTLTI | | | |
| | | TCTCACCATCAGCAGTCTGCAACCTGAAGATTTCGCAACTTAC | | SSLQPEDFATYYCQQ | | | |
| | | TACTGTCAACAGAGTTACAGTAACCCTCCAGTAACCTTCGGCC | | SYSNPPVTFGQGTRL | | | |
| | | AAGGGACACGACTGGAGATTAAA | | EIK | | | |
| ADI-81539 | 2939 | CAGTATGTGCTGACTCAGCCACCCTCGGTGTCAGTGGCCCCAG | 4958 | QYVLTQPPSVSVAPG | 5311 | 0 | 0 |
| | | GACAGACGGCCAGGATTACCTGTGGGGGAAACAACATTGGAAG | | QTARITCGGNNIGSK | | | |
| | | TAAAAGTGTGCACTGGTACCAGCAGAAGCCAGGCCAGGCCCCT | | SVHWYQQKPGQAPVL | | | |
| | | GTGCTGGTCGTCTATGATGATAGCGACCGGCCCTCAGGGATCC | | VVYDDSDRPSGIPER | | | |
| | | CTGAGCGATTCTCTGGCTCCAACTCTGGGAACACGGCCACCCT | | FSGSNSGNTATLTIS | | | |
| | | GACCATCAGCAGGGTCGAAGCCGGGGATGAGGCCGACTATTAC | | RVEAGDEADYYCQLW | | | |
| | | TGTCAGCTGTGGGATGGTAGTAGTGATCATCCGGAGGTGGTAT | | DGSSDHPEVVFGGGT | | | |
| | | TCGGCGGAGGGACCAAGCTCACCGTCCTA | | KLTVL | | | |
| ADI-81648 | 2938 | GAAATCACACTGACCCAGTCTCCATCTTCCGTGTCTGCATCTG | 4959 | EITLTQSPSSVSASV | 5312 | 0 | 0 |
| | | TAGGAGACAGAGTCACCATCACTTGTCGGGCGAGTCAGGGTAT | | GDRVTITCRASQGIS | | | |
| | | TAGCAGCTGGTTAGCCTGGTATCAGCAGAAACCAGGGAAAGCC | | SWLAWYQQKPGKAPK | | | |
| | | CCTAAGCTCCTGATCTATGCTGCATCCAGTTTGCAAAGTGGGG | | LLIYAASSLQSGVPS | | | |
| | | TCCCATCAAGGTTCAGCGGCAGTGGATCTGGGACAGATTTCAC | | RFSGSGSGTDFTLTI | | | |
| | | TCTCACCATCAGCAGCCTGCAGCCTGAAGATTTTGCAACTTAC | | SSLQPEDFATYYCQQ | | | |
| | | TATTGTCAACAGGCTAACAGTTTCCCTCTCACTTTCGGCGGAG | | ANSFPLTFGGGTKVD | | | |
| | | GGACCAAAGTGGATATCAAA | | IK | | | |

The application's sequence listing, which the Patent Office published only in electronic form, follows.

SEQUENCE LISTING (7535 sequences)

SEQ ID NO: 1 - protein, 1288 aa, Severe acute respiratory syndrome-related coronavirus
MFVFLVLLPLVSSQCVNLTTRTQLPPAYTNSFTRGVYYPDKVFRSSVLHSTQDLFLPFFSNVTWFHAIHVSGTNGTKRFDNPVLPFNDGVYFASTEKSNIIRGWIFGTTLDSKTQSLLIVNNATNVVIKVCEFQFCNDPFLGVYYHKNNKSWMESEFRVYSSANNCTFEYVSQPFLMDLEGKQGNFKNLREFVFKNIDGYFKIYSKHTPINLVRDLPQGFSALEPLVDLPIGINITRFQTLLALHRSYLTPGDSSSGWTAGAAAYYVGYLQPRTFLLKYNENGTITDAVDCALDPLSETKCTLKSFTVEKGIYQTSNFRVQPTESIVRFPNITNLCPFGEVFNATRFASVYAWNRKRISNCVADYSVLYNSASFSTFKCYGVSPTKLNDLCFTNVYADSFVIRGDEVRQIAPGQTGKIADYNYKLPDDFTGCVIAWNSNNLDSKVGGNYNYLYRLFRKSNLKPFERDISTEIYQAGSTPCNGVEGFNCYFPLQSYGFQPTNGVGYQPYRVVVLSFELLHAPATVCGPKKSTNLVKNKCVNFNFNGLTGTGVLTESNKKFLPFQQFGRDIADTTDAVRDPQTLEILDITPCSFGGVSVITPGTNTSNQVAVLYQDVNCTEVPVAIHADQLTPTWRVYSTGSNVFQTRAGCLIGAEHVNNSYECDIPIGAGICASYQTQTNSPGSASSVASQSIIAYTMSLGAENSVAYSNNSIAIPTNFTISVTTEILPVSMTKTSVDCTMYICGDSTECSNLLLQYGSFCTQLNRALTGIAVEQDKNTQEVFAQVKQIYKTPPIKDFGGFNFSQILPDPSKPSKRSFIEDLLFNKVTLADAGFIKQYGDCLGDIAARDLICAQKFNGLTVLPPLLTDEMIAQYTSALLAGTITSGWTFGAGAALQIPFAMQMAYRFNGIGVTQNVLYENQKLIANQFNSAIGKIQDSLSSTASALGKLQDVVNQNAQALNTLVKQLSSNFGAISSVLNDILSRLDPPEAEVQIDRLITGRLQSLQTYVTQQLIRAAEIRASANLAATKMSECVLGQSKRVDFCGKGYHLMSFPQSAPHGVVFLHVTYVPAQEKNFTTAPAICHDGKAHFPREGVFVSNGTHWFVTQRNFYEPQIITTDNTFVSGNCDVVIGIVNNTVYDPLQPELDSFKEELDKYFKNHTSPDVDLGDISGINASVVNIQKEIDRLNEVAKNLNESLIDLQELGKYEQGSGYIPEAPRDGQAYVRKDGEWVLLSTFLGRSLEVLFQGPGHHHHHHHHSAWSHPQFEKGGGSGGGGSGGSAWSHPQFEK

SEQ ID NO: 2 - DNA, 3864 bp, Severe acute respiratory syndrome coronavirus 2
  source 1..3864: mol_type = genomic DNA
atgttcgtgttcctggtgctcctgcctctggtgagcagccagtgcgtgaacctgaccacccgaacccagctcccaccagcctacaccaacagctttacacggggcgtgtactaccctgacaaggtgttcagatctagcgtcctgcacagcactcaggacctcttcctgccgttcttcagcaacgtgacatggttccacgccatccacgtgagcggcacaaacggaaccaagcggtttgataaccccgtcctgccattcaatgatggagtttacttcgccagtaccgagaagagtaacatcatccggggctggatcttcggcaccaccctggatagcaaaacacagagcctcctgatcgtgaacaatgccacgaacgtcgtgatcaaggtgtgcgagttccagttttgcaatgatcctttcctgggtgtgtactaccacaagaacaacaagagctggatggaaagcgagttcagagtctacagcagcgccaacaactgcacattcgagtacgtctctcagccttttctgatggaccttgaggggaaacaaggcaacttcaagaacctgagagaattcgtgttcaagaacatcgacggctacttcaaaatctactccaagcacacacccatcaacctggtccgggacctccctcagggcttcagcgccctggaacccctggtcgacctgcccataggcatcaacataacgcggttccaaaccctgctggccctgcatagatcctacctgactcctggcgacagcagcagcggatggaccgccggagctgcagcctactatgtgggctacctgcaacctagaaccttcctgctgaagtacaacgagaacggcacaatcacagacgccgtcgactgcgccctggaccctctctctgagacaaagtgcaccctgaagtccttcaccgtggaaaagggcatctaccagaccagcaacttccgggtgcagcctacagagagcatcgtgcgatttccaaacattaccaacctctgccccttcggcgaggtgtttaacgccacaagatttgcctccgtttacgcctggaatagaaagagaatcagcaattgtgtggccgactactccgtgctgtataacagcgcctctttcagcaccttcaagtgctacggcgtttccccaacaaagctgaatgacctgtgcttcaccaacgtgtacgccgactccttcgtaattagaggcgatgaggtgcggcagatcgcaccaggccagaccggtaagatcgctgactacaactataagctgcctgatgattttacaggctgcgtgatcgcctggaactctaacaacctggatagcaaggtgggcggcaactacaactacctgtaccggctgtttcgcaagtctaacctgaaacctttcgagagagacatctccacagagatctaccaggccggttctacaccttgtaacggggtggaaggcttcaactgttacttccctctgcaaagctacggcttccagcctaccaatggagtcggctaccagccataccgggtggtcgtgctgtccttcgagttactccacgcccccgccaccgtctgcggtcctaagaagtccaccaatctggttaagaacaaatgcgtgaacttcaacttcaacggcctgaccgggaccggcgtgctgaccgaaagcaacaaaaagttcctccccttccagcagttcggccgtgatatcgctgacaccacagatgccgtcagagatccacagaccctggaaatcctggatattacaccctgctccttcggaggagtttctgtgatcacccccgggaccaataccagcaaccaggtggctgtgctgtaccaagatgttaactgcaccgaggttcctgtggccatccacgccgatcagctgacacctacttggagagtgtactccactggctccaatgtgttccagaccagggccggatgtctgatcggcgccgagcacgtgaataacagttacgagtgcgacatccctatcggcgccggcatctgtgccagctaccagacccagacaaacagccctgggtctgcttcctctgtagctagccagagcatcatcgcctacaccatgagcctgggcgcagagaacagcgtggcctattccaacaactctatcgccattcccaccaactttacaattagcgtcacaacagagatcctgcccgtgagcatgaccaagaccagcgtggactgtacaatgtacatctgtggcgacagcactgaatgcagcaacctgctgctgcaatacggctccttttgcacccaactgaaccgggcgctgaccggaatcgccgtggaacaggacaaaaatacccaggaggtgttcgcccaagtgaagcagatctacaagaccccacctatcaaggacttcggcggctttaactttagccagattctccctgatccttctaagcctagcaagcggagctttatcgaggatctgctgttcaacaaggtcaccctggccgatgccggctttatcaaacagtatggcgattgcctgggcgacatagccgccagagatctgatctgcgcccagaaattcaacggcctgacagttctcccacctctgctgaccgacgagatgatcgctcagtacacctctgccctgctggctggcaccatcacatctgggtggacatttggcgccggcgccgccctgcagatcccctttgccatgcagatggcctatagattcaacggaatcggcgtgacccagaacgtgctgtatgaaaaccagaagctgatcgctaaccagttcaattctgccatcggcaagatccaggactccctctcctctaccgccagcgccctgggcaaactgcaggacgtggtgaatcagaacgcccaagccctgaacaccctggtgaagcagctcagcagcaattttggcgccatcagctctgtgctgaacgatatcctgtctagactggaccctccagaagccgaagtccagatcgatagactgatcacaggcagactgcagtccctgcaaacctacgtgacccaacagctgatcagggccgctgaaataagagccagcgccaatctcgccgctaccaagatgtccgagtgtgtgctgggacagtctaaacgcgttgacttctgcggcaaaggctatcacctgatgagcttcccccagagcgcgccgcacggcgtggtgttcctgcatgtgacatacgtgcctgcccaagagaagaatttcacaaccgcccctgccatctgccacgacggcaaggcccacttcccaagagagggcgttttcgtttccaatggcacacactggttcgtgacacaaagaaacttctacgaaccccagattatcaccaccgacaacaccttcgtgagtggcaattgtgacgtggtcatcggaatcgtgaacaacacagtgtacgaccctctgcaacctgagctggactcttttaaggaagagctggacaagtactttaaaaaccacaccagccccgatgtggacctgggcgacatcagtggcattaacgccagcgtggtgaacatccaaaaggaaatcgacagactgaacgaggtggccaagaacctgaacgagtccctgatcgacctgcaggagctcggcaaatacgagcagggatccggatacatccccgaggcccccagagatggccaggcctacgtgcggaaggacggcgagtgggtactgctgagcacattcctgggcagatccctggaggtgctgttccagggcccaggccatcaccaccatcaccaccatcatagcgcctggtcccacccccagttcgagaagggcggcggtagtggagggggcggatctggcggctcagcttggagccacccccagttcgaaaag

SEQ ID NO: 3-4 - skipped (2 entries)

SEQ ID NO: 5 - protein, 1273 aa, Severe acute respiratory syndrome-related coronavirus
MFVFLVLLPLVSSQCVNLTTRTQLPPAYTNSFTRGVYYPDKVFRSSVLHSTQDLFLPFFSNVTWFHAIHVSGTNGTKRFDNPVLPFNDGVYFASTEKSNIIRGWIFGTTLDSKTQSLLIVNNATNVVIKVCEFQFCNDPFLGVYYHKNNKSWMESEFRVYSSANNCTFEYVSQPFLMDLEGKQGNFKNLREFVFKNIDGYFKIYSKHTPINLVRDLPQGFSALEPLVDLPIGINITRFQTLLALHRSYLTPGDSSSGWTAGAAAYYVGYLQPRTFLLKYNENGTITDAVDCALDPLSETKCTLKSFTVEKGIYQTSNFRVQPTESIVRFPNITNLCPFGEVFNATRFASVYAWNRKRISNCVADYSVLYNSASFSTFKCYGVSPTKLNDLCFTNVYADSFVIRGDEVRQIAPGQTGKIADYNYKLPDDFTGCVIAWNSNNLDSKVGGNYNYLYRLFRKSNLKPFERDISTEIYQAGSTPCNGVEGFNCYFPLQSYGFQPTNGVGYQPYRVVVLSFELLHAPATVCGPKKSTNLVKNKCVNFNFNGLTGTGVLTESNKKFLPFQQFGRDIADTTDAVRDPQTLEILDITPCSFGGVSVITPGTNTSNQVAVLYQDVNCTEVPVAIHADQLTPTWRVYSTGSNVFQTRAGCLIGAEHVNNSYECDIPIGAGICASYQTQTNSPRRARSVASQSIIAYTMSLGAENSVAYSNNSIAIPTNFTISVTTEILPVSMTKTSVDCTMYICGDSTECSNLLLQYGSFCTQLNRALTGIAVEQDKNTQEVFAQVKQIYKTPPIKDFGGFNFSQILPDPSKPSKRSFIEDLLFNKVTLADAGFIKQYGDCLGDIAARDLICAQKFNGLTVLPPLLTDEMIAQYTSALLAGTITSGWTFGAGAALQIPFAMQMAYRFNGIGVTQNVLYENQKLIANQFNSAIGKIQDSLSSTASALGKLQDVVNQNAQALNTLVKQLSSNFGAISSVLNDILSRLDKVEAEVQIDRLITGRLQSLQTYVTQQLIRAAEIRASANLAATKMSECVLGQSKRVDFCGKGYHLMSFPQSAPHGVVFLHVTYVPAQEKNFTTAPAICHDGKAHFPREGVFVSNGTHWFVTQRNFYEPQIITTDNTFVSGNCDVVIGIVNNTVYDPLQPELDSFKEELDKYFKNHTSPDVDLGDISGINASVVNIQKEIDRLNEVAKNLNESLIDLQELGKYEQYIKWPWYIWLGFIAGLIAIVMVTIMLCCMTSCCSCLKGCCSCGSCCKFDEDDSEPVLKGVKLHYT

SEQ ID NO: 6 - DNA, 3822 bp, Severe acute respiratory syndrome coronavirus 2
  source 1..3822: mol_type = genomic DNA
atgtttgtttttcttgttttattgccactagtctctagtcagtgtgttaatcttacaaccagaactcaattaccccctgcatacactaattctttcacacgtggtgtttattaccctgacaaagttttcagatcctcagttttacattcaactcaggacttgttcttacctttcttttccaatgttacttggttccatgctatacatgtctctgggaccaatggtactaagaggtttgataaccctgtcctaccatttaatgatggtgtttattttgcttccactgagaagtctaacataataagaggctggatttttggtactactttagattcgaagacccagtccctacttattgttaataacgctactaatgttgttattaaagtctgtgaatttcaattttgtaatgatccatttttgggtgtttattaccacaaaaacaacaaaagttggatggaaagtgagttcagagtttattctagtgcgaataattgcacttttgaatatgtctctcagccttttcttatggaccttgaaggaaaacagggtaatttcaaaaatcttagggaatttgtgtttaagaatattgatggttattttaaaatatattctaagcacacgcctattaatttagtgcgtgatctccctcagggtttttcggctttagaaccattggtagatttgccaataggtattaacatcactaggtttcaaactttacttgctttacatagaagttatttgactcctggtgattcttcttcaggttggacagctggtgctgcagcttattatgtgggttatcttcaacctaggacttttctattaaaatataatgaaaatggaaccattacagatgctgtagactgtgcacttgaccctctctcagaaacaaagtgtacgttgaaatccttcactgtagaaaaaggaatctatcaaacttctaactttagagtccaaccaacagaatctattgttagatttcctaatattacaaacttgtgcccttttggtgaagtttttaacgccaccagatttgcatctgtttatgcttggaacaggaagagaatcagcaactgtgttgctgattattctgtcctatataattccgcatcattttccacttttaagtgttatggagtgtctcctactaaattaaatgatctctgctttactaatgtctatgcagattcatttgtaattagaggtgatgaagtcagacaaatcgctccagggcaaactggaaagattgctgattataattataaattaccagatgattttacaggctgcgttatagcttggaattctaacaatcttgattctaaggttggtggtaattataattacctgtatagattgtttaggaagtctaatctcaaaccttttgagagagatatttcaactgaaatctatcaggccggtagcacaccttgtaatggtgttgaaggttttaattgttactttcctttacaatcatatggtttccaacccactaatggtgttggttaccaaccatacagagtagtagtactttcttttgaacttctacatgcaccagcaactgtttgtggacctaaaaagtctactaatttggttaaaaacaaatgtgtcaatttcaacttcaatggtttaacaggcacaggtgttcttactgagtctaacaaaaagtttctgcctttccaacaatttggcagagacattgctgacactactgatgctgtccgtgatccacagacacttgagattcttgacattacaccatgttcttttggtggtgtcagtgttataacaccaggaacaaatacttctaaccaggttgctgttctttatcaggatgttaactgcacagaagtccctgttgctattcatgcagatcaacttactcctacttggcgtgtttattctacaggttctaatgtttttcaaacacgtgcaggctgtttaataggggctgaacatgtcaacaactcatatgagtgtgacatacccattggtgcaggtatatgcgctagttatcagactcagactaattctcctcggcgggcacgtagtgtagctagtcaatccatcattgcctacactatgtcacttggtgcagaaaattcagttgcttactctaataactctattgccatacccacaaattttactattagtgttaccacagaaattctaccagtgtctatgaccaagacatcagtagattgtacaatgtacatttgtggtgattcaactgaatgcagcaatcttttgttgcaatatggcagtttttgtacacaattaaaccgtgctttaactggaatagctgttgaacaagacaaaaacacccaagaagtttttgcacaagtcaaacaaatttacaaaacaccaccaattaaagattttggtggttttaatttttcacaaatattaccagatccatcaaaaccaagcaagaggtcatttattgaagatctacttttcaacaaagtgacacttgcagatgctggcttcatcaaacaatatggtgattgccttggtgatattgctgctagagacctcatttgtgcacaaaagtttaacggccttactgttttgccacctttgctcacagatgaaatgattgctcaatacacttctgcactgttagcgggtacaatcacttctggttggacctttggtgcaggtgctgcattacaaataccatttgctatgcaaatggcttataggtttaatggtattggagttacacagaatgttctctatgagaaccaaaaattgattgccaaccaatttaatagtgctattggcaaaattcaagactcactttcttccacagcaagtgcacttggaaaacttcaagatgtggtcaaccaaaatgcacaagctttaaacacgcttgttaaacaacttagctccaattttggtgcaatttcaagtgttttaaatgatatcctttcacgtcttgacaaagttgaggctgaagtgcaaattgataggttgatcacaggcagacttcaaagtttgcagacatatgtgactcaacaattaattagagctgcagaaatcagagcttctgctaatcttgctgctactaaaatgtcagagtgtgtacttggacaatcaaaaagagttgatttttgtggaaagggctatcatcttatgtccttccctcagtcagcacctcatggtgtagtcttcttgcatgtgacttatgtccctgcacaagaaaagaacttcacaactgctcctgccatttgtcatgatggaaaagcacactttcctcgtgaaggtgtctttgtttcaaatggcacacactggtttgtaacacaaaggaatttttatgaaccacaaatcattactacagacaacacatttgtgtctggtaactgtgatgttgtaataggaattgtcaacaacacagtttatgatcctttgcaacctgaattagactcattcaaggaggagttagataaatattttaagaatcatacatcaccagatgttgatttaggtgacatctctggcattaatgcttcagttgtaaacattcaaaaagaaattgaccgcctcaatgaggttgccaagaatttaaatgaatctctcatcgatctccaagaacttggaaagtatgagcagtatataaaatggccatggtacatttggctaggttttatagctggcttgattgccatagtaatggtgacaattatgctttgctgtatgaccagttgctgtagttgtctcaagggctgttgttcttgtggatcctgctgcaaatttgatgaagacgactctgagccagtgctcaaaggagtcaaattacattacacataa

SEQ ID NO: 7 - protein, 4 aa, synthetic construct
GSAS

SEQ ID NO: 8 - protein, 8 aa, synthetic construct
HHHHHHHH

SEQ ID NO: 9 - protein, 26 aa, synthetic construct
QVQLVQSGGAVVQPGRSLRLSCAASG

SEQ ID NO: 10 - protein, 26 aa, synthetic construct
QVQLVQSGGGVVQPGRSLRLSCAASG

SEQ ID NO: 11 - protein, 26 aa, synthetic construct
QVQLVESGGGVVQPGRSLRLSCAASG

SEQ ID NO: 12 - protein, 26 aa, synthetic construct
QVQLVQSGGGLVQPGGSLRLSCAASG

SEQ ID NO: 13 - protein, 26 aa, synthetic construct
QVQLVQSGGGLVKPGGSLRLSCAASG

SEQ ID NO: 14 - protein, 26 aa, synthetic construct
QVQLQQSGTEVKKPGASVKVSCKASG

SEQ ID NO: 15 - protein, 26 aa, synthetic construct
EVQLEQSGGGVVQPGRSLRLSCAASG

SEQ ID NO: 16 - protein, 26 aa, synthetic construct
QVQLQQWGAGLLKPSDTLSRTCAVYG

SEQ ID NO: 17 - protein, 26 aa, synthetic construct
QVQLVQSGGGLVQPGRSLRLSCAASG

SEQ ID NO: 18 - protein, 26 aa, synthetic construct
QVQLVQSGGGLVQPGGSLRLSCAVSG

SEQ ID NO: 19 - protein, 26 aa, synthetic construct
QVQLEQSGGGVVQPGRSLRLSCAASG

SEQ ID NO: 20 - protein, 26 aa, synthetic construct
QVQLQQSGGGVVQPGRSLRLSCAASG

SEQ ID NO: 21 - protein, 26 aa, synthetic construct
QVQLQESGPGLVKPSGTLSLTCAVSG

SEQ ID NO: 22 - protein, 26 aa, synthetic construct
QVQLQQSGGGVVQPGRSLRLSCEASG

SEQ ID NO: 23 - protein, 26 aa, synthetic construct
QVQLVQSGGGLVQPGRSLRLSCEASG

SEQ ID NO: 24 - protein, 26 aa, synthetic construct
QVQLVESGGGLVQPGGSLRLSCAASG

SEQ ID NO: 25 - protein, 26 aa, synthetic construct
EVQLQQSGPGLVKPSGTLSLTCAVSG

SEQ ID NO: 26 - protein, 26 aa, synthetic construct
QVQLQESGAEVKKPGESLRISCKGSG

SEQ ID NO: 27 - protein, 26 aa, synthetic construct
QVQLQQSGPRLVKPSGTLSLTCAVSG

SEQ ID NO: 28 - protein, 26 aa, synthetic construct
QVPLVQSGPTLVKPTQTLTLTCTFSG

SEQ ID NO: 29 - protein, 26 aa, synthetic construct
RCTLVQSGGGVVQPGRSLRLSCAASG

SEQ ID NO: 30 - protein, 26 aa, synthetic construct
QVQLVESGGGLIQPGGSLRLSCAASG

SEQ ID NO: 31 - protein, 26 aa, synthetic construct
QVQLVESGGGVVQPGGSLRLSCAASG

SEQ ID NO: 32 - protein, 26 aa, synthetic construct
QVQLVQSGGGLVQPGGSLRLSCSASG

SEQ ID NO: 33 - protein, 26 aa, synthetic construct
QVQLQESGPRLVNPSGTLSLTCAVSG

SEQ ID NO: 34 - protein, 26 aa, synthetic construct
QVQLQQWGAGLLKPSETLSLTCAVSG

SEQ ID NO: 35 - protein, 26 aa, synthetic construct
QVQLVQSGAEVKKPGASVKVSCKASG

SEQ ID NO: 36 - protein, 26 aa, synthetic construct
QVQLVQSGGGLVQPGGSLSLSCLVSG

SEQ ID NO: 37 - protein, 26 aa, synthetic construct
QVQLVQSRAEVKKPGDSLQISCQTSG

SEQ ID NO: 38 - protein, 26 aa, synthetic construct
QVQLVQSGGGVVQPGRSLRLSCEASG

SEQ ID NO: 39 - protein, 26 aa, synthetic construct
QVQLQESGPGLVKPSQTLSLTCTVSG

SEQ ID NO: 40 - protein, 26 aa, synthetic construct
QVQLVQSGSESKKPGASVRVSCKASG

SEQ ID NO: 41 - protein, 26 aa, synthetic construct
QVQLVQSGGGVGQPGRSLRLSCAASG

SEQ ID NO: 42 - protein, 26 aa, synthetic construct
QVQLQESGPGLVKPSETLSLTCTVSS

SEQ ID NO: 43 - protein, 26 aa, synthetic construct
QVQLQQWGAGLLKPSETLSLTCAVYG

SEQ ID NO: 44 - protein, 26 aa, synthetic construct
QVQLQQSGPGLVKPSGTLSLTCAVSG

SEQ ID NO: 45 - protein, 26 aa, synthetic construct
QVQLVQSGGGVVQPGRSLRLSCVASG

SEQ ID NO: 46 - protein, 26 aa, synthetic construct
QVQLVQSGGGLVQPGGPLRLSCAASG

SEQ ID NO: 47 - protein, 26 aa, synthetic construct
QVQLVESGPVLVKPTETLTLTCAVSG

SEQ ID NO: 48 - protein, 26 aa, synthetic construct
PGAAGAVWGRRGPAGRSLRLSCAASK

SEQ ID NO: 49 - protein, 26 aa, synthetic construct
QVQLQQRGAGLLKPSETLSLTCAVSG

SEQ ID NO: 50 - protein, 26 aa, synthetic construct
QVQLVQSGAEVKKPGSSVKVSCKASG

SEQ ID NO: 51 - protein, 26 aa, synthetic construct
EVQLVESGGGLVQPGGSLRLSCSASG

SEQ ID NO: 52 - protein, 26 aa, synthetic construct
QVQLVQSGAEVKKPGSSMKVSCKASG

SEQ ID NO: 53 - protein, 26 aa, synthetic construct
QVQLVQSGAEVKKPGASVKVPCKASG

SEQ ID NO: 54 - protein, 26 aa, synthetic construct
QVQLVQSGAEVKKPGASVNVSCKASG

SEQ ID NO: 55 - protein, 26 aa, synthetic construct
QVQLVQSGGDLVQPGGSLRLSCTASG

SEQ ID NO: 56 - protein, 26 aa, synthetic construct
QVQLQQSGPGLVKPSQTLSLTCTVSG

SEQ ID NO: 57 - protein, 26 aa, synthetic construct
QVQLVQSGGGVVQPGGSLRLSCAASG

SEQ ID NO: 58 - protein, 26 aa, synthetic construct
RCPLKESGPTVVKPTQTLTLTCTFSG

SEQ ID NO: 59 - protein, 26 aa, synthetic construct
QVQLVQSGAEVRKPGASVKVSCEASG

SEQ ID NO: 60 - protein, 26 aa, synthetic construct
QVQLVQSGGALVQPGGSLSLSCLVSG

SEQ ID NO: 61 - protein, 26 aa, synthetic construct
QVQLQESGPGLVKPSGTLSLTCDVSG

SEQ ID NO: 62 - protein, 26 aa, synthetic construct
RCTLQQSGGGVVQPGKSLRLSCAASG

SEQ ID NO: 63 - protein, 26 aa, synthetic construct
RCTLRAVWGRLGTAWQVLTLSCTASG

SEQ ID NO: 64 - protein, 26 aa, synthetic construct
QVQLQESGGGLVQPGRSLRLSCTGSG

SEQ ID NO: 65 - protein, 26 aa, synthetic construct
EVQLVQSGGGLVQPGGSLRLSCSASG

SEQ ID NO: 66 - protein, 26 aa, synthetic construct
RSTLVQSGGGLVQPGGSLRLSCAASG

SEQ ID NO: 67 - protein, 26 aa, synthetic construct
QVQLQESGPGLVKPSETLSLTCTVSG

SEQ ID NO: 68 - protein, 26 aa, synthetic construct
QVQLVESGGGLVQPGGSLSLSCVVSG

SEQ ID NO: 69 - protein, 26 aa, synthetic construct
QVQLVQSGGGLVQPGGSVRLSCGASG

SEQ ID NO: 70 - protein, 26 aa, synthetic construct
QVQLVQSGGGVVQPGRSLRLSCTASG

SEQ ID NO: 71 - protein, 26 aa, synthetic construct
QVTLKESGPTLVKPTQTLTLTCTFSG

SEQ ID NO: 72 - protein, 26 aa, synthetic construct
QVQLQQSGPGLVKPSQTLSLTCSVSG

SEQ ID NO: 73 - protein, 26 aa, synthetic construct
QVQLQQWGAGLLKPSETLSLTCGVYD

SEQ ID NO: 74 - protein, 26 aa, synthetic construct
QVQLLESGGGLVQPGGSLRLSCAASG

SEQ ID NO: 75 - protein, 26 aa, synthetic construct
QVHAGGVWGRRGPAGRSLRLSCAASG

SEQ ID NO: 76 - protein, 26 aa, synthetic construct
QVQLVQSGGGLVQPGGSLRLSCGASG

SEQ ID NO: 77 - protein, 26 aa, synthetic construct
EVQLVQSGPTLVKPTQTVTLTCTFSG

SEQ ID NO: 78 - protein, 26 aa, synthetic construct
QVQLVESGGGLVQPGGSLRLSCEASG

SEQ ID NO: 79 - protein, 26 aa, synthetic construct
QVQLVQSGGGLIQPGGSLRLSCAASG

SEQ ID NO: 80 - protein, 26 aa, synthetic construct
EVQLVETGGGLIQPGGSLRLSCAASE

SEQ ID NO: 81 - protein, 26 aa, synthetic construct
EVQLVETGGGLIQPGGSLRLSCAASG

SEQ ID NO: 82 - protein, 26 aa, synthetic construct
QVQLVQSGGGLVQPGRSLTLSCTASG

SEQ ID NO: 83 - protein, 26 aa, synthetic construct
RSTLQQSGPTLVKPTQTLTLTCTFSG

SEQ ID NO: 84 - protein, 26 aa, synthetic construct
QVTLMESGRTLVKPTQTLTLTCTFSG

SEQ ID NO: 85 - protein, 26 aa, synthetic construct
EVQLVQSGGGLAQPGGSLRLSCAASG

SEQ ID NO: 86 - protein, 26 aa, synthetic construct
QVQLQQSGAEVKKPGSSVKVSCKASG

SEQ ID NO: 87 - protein, 26 aa, synthetic construct
QVQLVQSGGGLVRPGGSLRLSCAASE

SEQ ID NO: 88 - protein, 26 aa, synthetic construct
QVQLVQTGGGLIQPGGSLRLSCAASG

SEQ ID NO: 89 - protein, 26 aa, synthetic construct
QVQLVESGGGLVQPGGSLRLSCAASE

SEQ ID NO: 90 - protein, 26 aa, synthetic construct
QVQLVQSGGGLVQPGGSLRLSCATSG

SEQ ID NO: 91 - protein, 26 aa, synthetic construct
QVQLVETGGGLIQPGGSLRLSCAASE

SEQ ID NO: 92 - protein, 26 aa, synthetic construct
QVQLQQSGPGLVKPSGTLSLTCAVSS

SEQ ID NO: 93 - protein, 26 aa, synthetic construct
QVQLQQWGAGLLKPSETLSLTCGVHD

SEQ ID NO: 94 - protein, 26 aa, synthetic construct
QVQLQQSGPTLVKPTQTLTLTCTFSG

SEQ ID NO: 95 - protein, 26 aa, synthetic construct
QVQLVQSGAEVKKLGSSVKVSCKASG

SEQ ID NO: 96 - protein, 26 aa, synthetic construct
QVQLVQSGGDVVQPGRSLRLSCATSG

SEQ ID NO: 97 - protein, 26 aa, synthetic construct
QVQLVQSGAEVKKPGASMKVSCKAYG

SEQ ID NO: 98 - protein, 26 aa, synthetic construct
QVQLQQSGGGLIQPGGSLRLSCVASE

SEQ ID NO: 99 - protein, 26 aa, synthetic construct
EVQLVQTGGGLIQPGGSLRLSCAASE

SEQ ID NO: 100 - protein, 26 aa, synthetic construct
QVQLVESGGGLVQPGRSLRLSCAASG

SEQ ID NO: 101 - protein, 26 aa, synthetic construct
QVQLVESGGGLVQPGGSLRVSCAGSG

SEQ ID NO: 102 - protein, 26 aa, synthetic construct
QVQLVQSGAEVKKAGESLKISCKGSG

SEQ ID NO: 103 - protein, 26 aa, synthetic construct
QVQLQQSGAEVKKPGASVKVSCKASG

SEQ ID NO: 104 - protein, 26 aa, synthetic construct
QVQLVESGGGLVQPGGSLRLYCAASG

SEQ ID NO: 105 - protein, 26 aa, synthetic construct
EVQLVQSGGVLVQPGGSLRLSCAASG

SEQ ID NO: 106 - protein, 26 aa, synthetic construct
QVTLKESGGGVVQPGRSLRLSCAASG

SEQ ID NO: 107 - protein, 26 aa, synthetic construct
QVTLKQSGPTLVRPTRTLTVTCTFFG

SEQ ID NO: 108 - protein, 26 aa, synthetic construct
QVQLVQSGGGLVQPGGSMRLSCAASG

SEQ ID NO: 109 - protein, 26 aa, synthetic construct
QVQLEQSGGGLVQPGGSLRLSCAASG

SEQ ID NO: 110 - protein, 26 aa, synthetic construct
QVQLQQSGGGLVQPGGSLRLSCAASG

SEQ ID NO: 111 - protein, 26 aa, synthetic construct
QVQLQQSGGGLIQPGGSLRLSCAASE

SEQ ID NO: 112 - protein, 26 aa, synthetic construct
QVQLVQSGGGLVQPGGSLRLSCAASE

SEQ ID NO: 113 - protein, 26 aa, synthetic construct
QITLKESGPTLVKPTQTLTLTCTFSG

SEQ ID NO: 114 - protein, 26 aa, synthetic construct
QVQLVQSGGALVQPGGSLRLACAASE

SEQ ID NO: 115 - protein, 26 aa, synthetic construct
QVQLVQSGAEVKKPGASVKISCKASG

SEQ ID NO: 116 - protein, 26 aa, synthetic construct
QVTLKESGAGLLKPSETLSLTCAVSG

SEQ ID NO: 117 - protein, 26 aa, synthetic construct
QVQLQQSGPGLVKPSETLSLTCIVSG

SEQ ID NO: 118 - protein, 23 aa, synthetic construct
QVQLVQSGAEVKKPGSSVKVSCK

SEQ ID NO: 119 - protein, 26 aa, synthetic construct
QVQLQESGGDLVQPGGSLRLSCAASR

SEQ ID NO: 120 - protein, 26 aa, synthetic construct
QVQLVQTGGGLIQPGGSLRLSCVASG

SEQ ID NO: 121 - protein, 26 aa, synthetic construct
RYTLQQSGAEVKKPGSSVKVSCKASG

SEQ ID NO: 122 - protein, 26 aa, synthetic construct
QVTLKESGGGLVQPGRSLRLSCAASG

SEQ ID NO: 123 - protein, 26 aa, synthetic construct
RSTLEQSGPALVKPTQTLRLTCTFSG

SEQ ID NO: 124 - protein, 26 aa, synthetic construct
QVQLVQSGAEVKKPGESLKISCEGSG

SEQ ID NO: 125 - protein, 26 aa, synthetic construct
RCPLVQSGGGLVQPGGSLRLSCAASG

SEQ ID NO: 126 - protein, 26 aa, synthetic construct
RCPLVQSGGDLVQPGGSLRLSCEASG

SEQ ID NO: 127 - protein, 26 aa, synthetic construct
QVQLQQWGAGLLKPSETLSLTCGVYG

SEQ ID NO: 128 - protein, 26 aa, synthetic construct
QVQLQQSGAEVKKPGASVRVSCKASG

SEQ ID NO: 129 - protein, 26 aa, synthetic construct
QVQLVESGGALVQPGRSLRLSCAASG

SEQ ID NO: 130 - protein, 26 aa, synthetic construct
QVQLQESGPGLVKASETLSLACTVSG

SEQ ID NO: 131 - protein, 26 aa, synthetic construct
RCTLVQSGGGLVQPGGSLRLSCSASG

SEQ ID NO: 132 - protein, 26 aa, synthetic construct
QVQLVQSGGGVVQPGKSLRLSCATSG

SEQ ID NO: 133 - protein, 26 aa, synthetic construct
RYPLVQSGAEVKKPGSSVKVSCKASG

SEQ ID NO: 134 - protein, 26 aa, synthetic construct
QVQLQQSGGGLVQPGGSLRLSCVASG

SEQ ID NO: 135 - protein, 26 aa, synthetic construct
QVQLVQSGAEVKKPGASVRVSCKASG

SEQ ID NO: 136 - protein, 26 aa, synthetic construct
QVQLVQSGGDLVQPGGSLRLSCVASG

SEQ ID NO: 137 - protein, 26 aa, synthetic construct
QVQLVQSGPEVKKPGTSVKVSCKASG

SEQ ID NO: 138 - protein, 26 aa, synthetic construct
QVQLVQCGGGLVQHGGSLRLSCAASG

SEQ ID NO: 139 - protein, 26 aa, synthetic construct
RCPLVQSGGGLIQPGGSLRLSCAASG

SEQ ID NO: 140 - protein, 26 aa, synthetic construct
QVQLVQSGGGLVQPGGSLRLSCEASG

SEQ ID NO: 141 - protein, 26 aa, synthetic construct
QVQLVQSGGGVVQPGKSLRLSCAASG

SEQ ID NO: 142 - protein, 26 aa, synthetic construct
EVQLVQSGGGVVQPGGSLRLSCAASG

SEQ ID NO: 143 - protein, 26 aa, synthetic construct
QVQLVQSGTEVKKPGESLTISCKTSG

SEQ ID NO: 144 - protein, 26 aa, synthetic construct
QVQLVQSGGGVVQPGGSLRLSCEGSG

SEQ ID NO: 145 - protein, 26 aa, synthetic construct
QVQLVQSGAEVKKPGESLRISCKGSG

SEQ ID NO: 146 - protein, 26 aa, synthetic construct
QVQLVQSGGGLVQPGRSLRLSCTTSG

SEQ ID NO: 147 - protein, 26 aa, synthetic construct
QVQLLQSGAEVKKPGSSVKVSCKASG

SEQ ID NO: 148 - protein, 26 aa, synthetic construct
QVQLVQSGGGVVQPGMSLRLSCAASR

SEQ ID NO: 149 - protein, 26 aa, synthetic construct
QVQLVQSGGGLIQPGGSLRLSCRASG

SEQ ID NO: 150 - protein, 26 aa, synthetic construct
QVQLVQSGAEVKKPGASVRVSCKASE

SEQ ID NO: 151 - protein, 26 aa, synthetic construct
RSTLKESGPTLVKPTQTLTLTCTFSG

SEQ ID NO: 152 - protein, 26 aa, synthetic construct
RCSCRQSGGGLVQPGGSLRLSCAASG

SEQ ID NO: 153 - protein, 26 aa, synthetic construct
QVQLVQSGAEVKKPGQSLKISCKGSG

SEQ ID NO: 154 - protein, 26 aa, synthetic construct
QVQLQESGGGLVQPGGSLRLSCAASG

SEQ ID NO: 155 - protein, 26 aa, synthetic construct
RSSWRQSGAEVKKPGSSVKVSCRASG

SEQ ID NO: 156 - protein, 26 aa, synthetic construct
QVQLQESGPTLVKPTQTLTLTCTFSG

SEQ ID NO: 157 - protein, 26 aa, synthetic construct
QVQLQQSGAEVKKPGESLRISCKGSG

SEQ ID NO: 158 - protein, 26 aa, synthetic construct
QVQLVESGGGLIQPGGSLRLSCEASG

SEQ ID NO: 159 - protein, 26 aa, synthetic construct
QVQLVQSGSELKKPGASVKVSCKASG

SEQ ID NO: 160 - protein, 26 aa, synthetic construct
QVTLKESGGGVVQPGTSQRVSCTVSG

SEQ ID NO: 161 - protein, 26 aa, synthetic construct
QVQLVQSGAEVKKSGESLKISCKGSG

SEQ ID NO: 162 - protein, 26 aa, synthetic construct
QVQLQQSGGGLVQPGRSLRLSCAASG

SEQ ID NO: 163 - protein, 26 aa, synthetic construct
RCTLEESGGGVVQPGRSLRLSCEASG

SEQ ID NO: 164 - protein, 26 aa, synthetic construct
QVTLKESGGGVVQPGRSLRLSCAVSG

SEQ ID NO: 165 - protein, 26 aa, synthetic construct
QVQLVQSGGGVVQPGRSLRLSCAASE

SEQ ID NO: 166 - protein, 26 aa, synthetic construct
QVQLVQSGGGLVQPGGSLRLSCAASR

SEQ ID NO: 167 - protein, 26 aa, synthetic construct
QVQLVQSGPEVKKSGESLKISCKASG

SEQ ID NO: 168 - protein, 26 aa, synthetic construct
QVTLKQSGPTVVKPTQTLTLTCNFSG

SEQ ID NO: 169 - protein, 26 aa, synthetic construct
PGHIEGVWSALVKPTETLTLTCTLYG

SEQ ID NO: 170 - protein, 26 aa, synthetic construct
QVQLLQSGAEVKEPGASVKVSCKASG

SEQ ID NO: 171 - protein, 26 aa, synthetic construct
QVQLVESGGGLVQPGRSLRVSCAASG

SEQ ID NO: 172 - protein, 26 aa, synthetic construct
QVPLKQSGAEVKKPGASVKISCKASG

SEQ ID NO: 173 - protein, 26 aa, synthetic construct
QVQLQESGTEVKKPGSSVKVSCKASG

SEQ ID NO: 174 - protein, 26 aa, synthetic construct
QVQLVQSGAEVKKPGESLKISCKGSG

SEQ ID NO: 175 - protein, 26 aa, synthetic construct
QVQLVESGGGLVQPGRSLTLSCAASG

SEQ ID NO: 176 - protein, 26 aa, synthetic construct
QVHAGAVWGRRGPAWEVLRLSCEGSG

SEQ ID NO: 177 - protein, 26 aa, synthetic construct
QVQLVQSGAEVRVPGSSVKVSCKASG

SEQ ID NO: 178 - protein, 26 aa, synthetic construct
QVQLQQSGPGLLKPSQTLSLTCTVSG

SEQ ID NO: 179 - protein, 26 aa, synthetic construct
QVQLVQSGGGVVQPGRSLRLSCVGSG

SEQ ID NO: 180 - protein, 26 aa, synthetic construct
QVTLQQSGGGLVQPGRSLRLSCAASG

SEQ ID NO: 181 - protein, 26 aa, synthetic construct
QVQLVQSGGGLVQPGGSLRLSCVVSG

SEQ ID NO: 182 - protein, 26 aa, synthetic construct
RCTLQQSGAEVKKPGSSVKVSCKASG

SEQ ID NO: 183 - protein, 26 aa, synthetic construct
QVQLQESGGGLVQPGRSLRLSCVASG

SEQ ID NO: 184 - protein, 26 aa, synthetic construct
QVQLVQSGAEVKKPGSSVKVSCKPVG

SEQ ID NO: 185 - protein, 26 aa, synthetic construct
QVQLVQSGGGLVQPGRSLRLSCTASG

SEQ ID NO: 186 - protein, 26 aa, synthetic construct
EVQLVQSGSELKKPGASVKVSCKASG

SEQ ID NO: 187 - protein, 26 aa, synthetic construct
QITLKESGPVLVKPTETLTLTCSVSG

SEQ ID NO: 188 - protein, 26 aa, synthetic construct
QVQLQQSGAEVKKSGSSVKVSCKASG

SEQ ID NO: 189 - protein, 26 aa, synthetic construct
QVQLQQSGPGLVKPSETLSLICTVSG

SEQ ID NO: 190 - protein, 26 aa, synthetic construct
QVPLVQSGAEVKKPGSSVKVSCKASG

SEQ ID NO: 191 - protein, 26 aa, synthetic construct
QVQLVQSGAEVKKPGESLRISCQGSG

SEQ ID NO: 192 - protein, 26 aa, synthetic construct
RCPLVQSGAEVKKPGSSVKVSCKASG

SEQ ID NO: 193 - protein, 26 aa, synthetic construct
RCTLQQSGGGLVKPGESLRLSCAASG

SEQ ID NO: 194 - protein, 25 aa, synthetic construct
RSSCMQSGEAWSSWGVPETLCAASN

SEQ ID NO: 195 - protein, 26 aa, synthetic construct
QVQLQQSGPGLVKPSETLSLTCTVSG

SEQ ID NO: 196 - protein, 26 aa, synthetic construct
QITLKESGGGVVQPGRSLRLSCVASR

SEQ ID NO: 197 - protein, 26 aa, synthetic construct
QVPLKQSGGGVVQPGRSQRVSCTVSG

SEQ ID NO: 198 - protein, 9 aa, synthetic construct
FTFRSYGMH

SEQ ID NO: 199 - protein, 9 aa, synthetic construct
FTFSSYAMH

SEQ ID NO: 200 - protein, 9 aa, synthetic construct
FTFTSYGFH

SEQ ID NO: 201 - protein, 9 aa, synthetic construct
FTFTTYWMS

SEQ ID NO: 202 - protein, 9 aa, synthetic construct
FSFSDAWMS

SEQ ID NO: 203 - protein, 9 aa, synthetic construct
YIFINYYIS

SEQ ID NO: 204 - protein, 9 aa, synthetic construct
FTFRRYGMH

SEQ ID NO: 205 - protein, 9 aa, synthetic construct
FTFSNYAIH

SEQ ID NO: 206 - protein, 9 aa, synthetic construct
GSFSGYYWS

SEQ ID NO: 207 - protein, 9 aa, synthetic construct
FTFSSYDMH

SEQ ID NO: 208 - protein, 9 aa, synthetic construct
FTFEDYAMH

SEQ ID NO: 209 - protein, 9 aa, synthetic construct
LPFSSNAMS

SEQ ID NO: 210 - protein, 9 aa, synthetic construct
FTFKNYGMH

SEQ ID NO: 211 - protein, 9 aa, synthetic construct
FTFNNHAMH

SEQ ID NO: 212 - protein, 10 aa, synthetic construct
AALSSSNWWS

SEQ ID NO: 213 - protein, 9 aa, synthetic construct
FTFRTYGMH

SEQ ID NO: 214 - protein, 9 aa, synthetic construct
FTFDDYAMH

SEQ ID NO: 215 - protein, 9 aa, synthetic construct
FTFSTYGMH

SEQ ID NO: 216 - protein, 10 aa, synthetic construct
ASISNHDWWT

SEQ ID NO: 217 - protein, 9 aa, synthetic construct
YTFTNYWIS

SEQ ID NO: 218 - protein, 10 aa, synthetic construct
GSITGSDWWT

SEQ ID NO: 219 - protein, 11 aa, synthetic construct
FSLSTSGVGVG

SEQ ID NO: 220 - protein, 9 aa, synthetic construct
FTFRHYGMH

SEQ ID NO: 221 - protein, 9 aa, synthetic construct
FPFSTYDMG

SEQ ID NO: 222 - protein, 9 aa, synthetic construct
FTFDDYGMQ

SEQ ID NO: 223 - protein, 9 aa, synthetic construct
FTFRNYAMH

SEQ ID NO: 224 - protein, 10 aa, synthetic construct
GSISGISWWS

SEQ ID NO: 225 - protein, 9 aa, synthetic construct
GSLSGYYCN

SEQ ID NO: 226 - protein, 9 aa, synthetic construct
YTFTSYTIH

SEQ ID NO: 227 - protein, 9 aa, synthetic construct
FIFSDYSMH

SEQ ID NO: 228 - protein, 9 aa, synthetic construct
FTFSTYSMH

SEQ ID NO: 229 - protein, 9 aa, synthetic construct
FSFISYGMH

SEQ ID NO: 230 - protein, 9 aa, synthetic construct
FTFSDHAMH

SEQ ID NO: 231 - protein, 9 aa, synthetic construct
FTFNSYGMH

SEQ ID NO: 232 - protein, 9 aa, synthetic construct
YSFKYFWIG

SEQ ID NO: 233 - protein, 9 aa, synthetic construct
FTFSNYGMH

SEQ ID NO: 234 - protein, 9 aa, synthetic construct
FSFSNYAMS

SEQ ID NO: 235 - protein, 11 aa, synthetic construct
GSISTNGYYWS

SEQ ID NO: 236 - protein, 9 aa, synthetic construct
YTFTSNAIN

SEQ ID NO: 237 - protein, 9 aa, synthetic construct
FTFGHYGMH

SEQ ID NO: 238 - protein, 11 aa, synthetic construct
GSISRSGHYWG

SEQ ID NO: 239 - protein, 9 aa, synthetic construct
GSLSGYYWS

SEQ ID NO: 240 - protein, 10 aa, synthetic construct
GSISSFNWWT

SEQ ID NO: 241 - protein, 9 aa, synthetic construct
FSFSSYAMH

SEQ ID NO: 242 - protein, 9 aa, synthetic construct
ITFSTFGMH

SEQ ID NO: 243 - protein, 9 aa, synthetic construct
FTFSSNAMS

SEQ ID NO: 244 - protein, 9 aa, synthetic construct
FTFSTYDMH

SEQ ID NO: 245 - protein, 10 aa, synthetic construct
APISSSNWWS

SEQ ID NO: 246 - protein, 11 aa, synthetic construct
FSLSSPRMGVS

SEQ ID NO: 247 - protein, 10 aa, synthetic construct
GSITNSAWWS

SEQ ID NO: 248 - protein, 9 aa, synthetic construct
FTFSRFAMH

SEQ ID NO: 249 - protein, 9 aa, synthetic construct
DFLRGSYWA

SEQ ID NO: 250 - protein, 9 aa, synthetic construct
FSFSTYVMH

SEQ ID NO: 251 - protein, 9 aa, synthetic construct
GTFSTYAFN

SEQ ID NO: 252 - protein, 9 aa, synthetic construct
GTFSSYTIT

SEQ ID NO: 253 - protein, 9 aa, synthetic construct
YTFTKYYIH

SEQ ID NO: 254 - protein, 9 aa, synthetic construct
YTFTGYYIH

SEQ ID NO: 255 - protein, 11 aa, synthetic construct
GSVSSGSNYWS

SEQ ID NO: 256 - protein, 9 aa, synthetic construct
FAFDAYDMH

SEQ ID NO: 257 - protein, 10 aa, synthetic construct
GSISGINWWS

SEQ ID NO: 258 - protein, 11 aa, synthetic construct
FSLNTGGVGVG

SEQ ID NO: 259 - protein, 9 aa, synthetic construct
YSFTSYSMH

SEQ ID NO: 260 - protein, 9 aa, synthetic construct
FIVSSNYMS

SEQ ID NO: 261 - protein, 10 aa, synthetic construct
GSISTSYWWS

SEQ ID NO: 262 - protein, 9 aa, synthetic construct
FTFSSYGMH

SEQ ID NO: 263 - protein, 9 aa, synthetic construct
GSISSYYWS

SEQ ID NO: 264 - protein, 9 aa, synthetic construct
FTFEDYAIH

SEQ ID NO: 265 - protein, 9 aa, synthetic construct
FNFGNYVMS

SEQ ID NO: 266 - protein, 9 aa, synthetic construct
FTFSSYAVY

SEQ ID NO: 267 - protein, 9 aa, synthetic construct
FIFSRQWMS

SEQ ID NO: 268 - protein, 9 aa, synthetic construct
GSIRSYYWS

SEQ ID NO: 269 - protein, 9 aa, synthetic construct
VTVSKYAMS

SEQ ID NO: 270 - protein, 9 aa, synthetic construct
FSFSTYGMH

SEQ ID NO: 271 - protein, 11 aa, synthetic construct
FSLSTTGVGVG

SEQ ID NO: 272 - protein, 9 aa, synthetic construct
FTFSRYWMS

SEQ ID NO: 273 - protein, 11 aa, synthetic construct
GFINSGGNYWS

SEQ ID NO: 274 - protein, 9 aa, synthetic construct
GSFSDYFWN

SEQ ID NO: 275 - protein, 9 aa, synthetic construct
FTLSNDDMH

SEQ ID NO: 276 - protein, 9 aa, synthetic construct
ITFRSNGMH

SEQ ID NO: 277 - protein, 9 aa, synthetic construct
FIFSNYDMH

SEQ ID NO: 278 - protein, 11 aa, synthetic construct
FSFSTSGMGVG

SEQ ID NO: 279 - protein, 9 aa, synthetic construct
FIFTTYWMS

SEQ ID NO: 280 - protein, 9 aa, synthetic construct
FIVSANYMS

SEQ ID NO: 281 - protein, 9 aa, synthetic construct
FTVSSNYMS

SEQ ID NO: 282 - protein, 9 aa, synthetic construct
FTFSSFPMH

SEQ ID NO: 283 - protein, 9 aa, synthetic construct
IIVSYNYMS

SEQ ID NO: 284 - protein, 11 aa, synthetic construct
GSISSGNYYWS

SEQ ID NO: 285 - protein, 11 aa, synthetic construct
FSLATTGVGVG

SEQ ID NO: 286 - protein, 11 aa, synthetic construct
FSLSTSGVSVG

SEQ ID NO: 287 - protein, 9 aa, synthetic construct
FTLSSDDMH

SEQ ID NO: 288 - protein, 9 aa, synthetic construct
GTFISDAVS

SEQ ID NO: 289 - protein, 9 aa, synthetic construct
ITVSSNYMN

SEQ ID NO: 290 - protein, 9 aa, synthetic construct
FTFSNYDMH

SEQ ID NO: 291 - protein, 9 aa, synthetic construct
IIVSRNYMT

SEQ ID NO: 292 - protein, 9 aa, synthetic construct
ITVSSNYMK

SEQ ID NO: 293 - protein, 9 aa, synthetic construct
FTFRNYEMN

SEQ ID NO: 294 - protein, 10 aa, synthetic construct
GSITSISWWS

SEQ ID NO: 295 - protein, 9 aa, synthetic construct
GAFSGYFWN

SEQ ID NO: 296 - protein, 11 aa, synthetic construct
FSLNTGGVAVG

SEQ ID NO: 297 - protein, 9 aa, synthetic construct
FAFTTYVMH

SEQ ID NO: 298 - protein, 9 aa, synthetic construct
GTFSNYFIS

SEQ ID NO: 299 - protein, 9 aa, synthetic construct
YTFTSYYMH

SEQ ID NO: 300 - protein, 9 aa, synthetic construct
ITVSSNYMS

SEQ ID NO: 301 - protein, 9 aa, synthetic construct
HTFANYYMH

SEQ ID NO: 302 - protein, 9 aa, synthetic construct
FIVSRNYMS

SEQ ID NO: 303 - protein, 9 aa, synthetic construct
FTFRDHAMS

SEQ ID NO: 304 - protein, 9 aa, synthetic construct
YYFARYWIG

SEQ ID NO: 305 - protein, 9 aa, synthetic construct
YTFSNYAIH

SEQ ID NO: 306 - protein, 9 aa, synthetic construct
GTFIRNTIS

SEQ ID NO: 307 - protein, 9 aa, synthetic construct
FTFSSYEMN

SEQ ID NO: 308 - protein, 9 aa, synthetic construct
FTFSGFGMH

SEQ ID NO: 309 - protein, 11 aa, synthetic construct
FSIRFNGVGVG

SEQ ID NO: 310 - protein, 9 aa, synthetic construct
FIVTRNYMS

SEQ ID NO: 311 - protein, 9 aa, synthetic construct
IIVTSNYMN

SEQ ID NO: 312 - protein, 9 aa, synthetic construct
FTFSRYWMT

SEQ ID NO: 313 - protein, 9 aa, synthetic construct
YSFTSYYIQ

SEQ ID NO: 314 - protein, 9 aa, synthetic construct
FTFTSYDMH

SEQ ID NO: 315 - protein, 11 aa, synthetic construct
GSISSDHFYWG

SEQ ID NO: 316 - protein, 11 aa, synthetic construct
FSFSTGGVGVG

SEQ ID NO: 317 - protein, 9 aa, synthetic construct
IIVVRNYMS

SEQ ID NO: 318 - protein, 9 aa, synthetic construct
YTFSDYYIH

SEQ ID NO: 319 - protein, 10 aa, synthetic construct
GSFSSGYYWN

SEQ ID NO: 320 - protein, 9 aa, synthetic construct
DSISSYYWS

SEQ ID NO: 321 - protein, 9 aa, synthetic construct
GTFSSYNVN

SEQ ID NO: 322 - protein, 9 aa, synthetic construct
FTDISNYMS

SEQ ID NO: 323 - protein, 9 aa, synthetic construct
VTVTNNYMN

SEQ ID NO: 324 - protein, 9 aa, synthetic construct
GTFSSYSVS

SEQ ID NO: 325 - protein, 9 aa, synthetic construct
FTFNTYWMS

SEQ ID NO: 326 - protein, 9 aa, synthetic construct
GTFNSYSIS

SEQ ID NO: 327 - protein, 9 aa, synthetic construct
FTFDEYAIH

SEQ ID NO: 328 - protein, 11 aa, synthetic construct
FSLSTSGTCVN

SEQ ID NO: 329 - protein, 9 aa, synthetic construct
YSFTTYWIA

SEQ ID NO: 330 - protein, 9 aa, synthetic construct
FIFSNYGMH

SEQ ID NO: 331 - protein, 9 aa, synthetic construct
FTFSRYDMH

SEQ ID NO: 332 - protein, 9 aa, synthetic construct
FTFSSYWMS

SEQ ID NO: 333 - protein, 9 aa, synthetic construct
FTFSNYWMH

SEQ ID NO: 334 - protein, 9 aa, synthetic construct
GSFSEYYWT

SEQ ID NO: 335 - protein, 9 aa, synthetic construct
YTFSDYYMH

SEQ ID NO: 336 - protein, 9 aa, synthetic construct
FTFDDYAIH

SEQ ID NO: 337 - protein, 9 aa, synthetic construct
FTFSTYWMS

SEQ ID NO: 338 - protein, 10 aa, synthetic construct
YSISSGYSWG

SEQ ID NO: 339 - protein, 9 aa, synthetic construct
ITVSSNYMT

SEQ ID NO: 340 - protein, 11 aa, synthetic construct
GSISSDGYYWS

SEQ ID NO: 341 - protein, 9 aa, synthetic construct
FSFSSFAMN

SEQ ID NO: 342 - protein, 9 aa, synthetic construct
GTFNNHFIN

SEQ ID NO: 343 - protein, 9 aa, synthetic construct
LIVSSNYMS

SEQ ID NO: 344 - protein, 9 aa, synthetic construct
FTFNNYGMH

SEQ ID NO: 345 - protein, 9 aa, synthetic construct
LIVSSNYMN

SEQ ID NO: 346 - protein, 9 aa, synthetic construct
GTFSSYTVI

SEQ ID NO: 347 - protein, 9 aa, synthetic construct
ITVSANYMN

SEQ ID NO: 348 - protein, 9 aa, synthetic construct
YTFTTFDIN

SEQ ID NO: 349 - protein, 9 aa, synthetic construct
YSFTGYYMY

SEQ ID NO: 350 - protein, 9 aa, synthetic construct
YTFSSYYIH

SEQ ID NO: 351 - protein, 9 aa, synthetic construct
FTFSNYEMN

SEQ ID NO: 352 - protein, 9 aa, synthetic construct
FTFSTSAVQ

SEQ ID NO: 353 - protein, 9 aa, synthetic construct
FSFGSYVMS

SEQ ID NO: 354 - protein, 9 aa, synthetic construct
VIVSSNYMN

SEQ ID NO: 355 - protein, 9 aa, synthetic construct
FTFSNYGMS

SEQ ID NO: 356 - protein, 9 aa, synthetic construct
GTFSSYSIS

SEQ ID NO: 357 - protein, 9 aa, synthetic construct
FTFSSYSVH

SEQ ID NO: 358 - protein, 9 aa, synthetic construct
YYFTTYWIT

SEQ ID NO: 359 - protein, 9 aa, synthetic construct
FTLRNYAMH

SEQ ID NO: 360 - protein, 9 aa, synthetic construct
YRFTTYWIS

SEQ ID NO: 361 - protein, 9 aa, synthetic construct
FNFGDYSMS

SEQ ID NO: 362 - protein, 9 aa, synthetic construct
FTFSSYSMN

SEQ ID NO: 363 - protein, 9 aa, synthetic construct
GTFSSYTIS

SEQ ID NO: 364 - protein, 8 aa, synthetic construct
GTFSYNIN

SEQ ID NO: 365 - protein, 9 aa, synthetic construct
HTFTGYFIY

SEQ ID NO: 366 - protein, 10 aa, synthetic construct
GSIGSSHWWS

SEQ ID NO: 367 - protein, 9 aa, synthetic construct
YTFTSYGIS

SEQ ID NO: 368 - protein, 9 aa, synthetic construct
FTFRNFGMH

SEQ ID NO: 369 - protein, 9 aa, synthetic construct
FTVSSNYMN

SEQ ID NO: 370 - protein, 9 aa, synthetic construct
YTFTGYQMH

SEQ ID NO: 371 - protein, 11 aa, synthetic construct
FSLSTSAVGVG

SEQ ID NO: 372 - protein, 9 aa, synthetic construct
YSFTSYWIG

SEQ ID NO: 373 - protein, 9 aa, synthetic construct
FPLSYFWIH

SEQ ID NO: 374 - protein, 9 aa, synthetic construct
GTFRSHSIS

SEQ ID NO: 375 - protein, 9 aa, synthetic construct
GTFSNHFIS

SEQ ID NO: 376 - protein, 11 aa, synthetic construct
FSLNSAGVGVG

SEQ ID NO: 377 - protein, 9 aa, synthetic construct
YAFSNYNLH

SEQ ID NO: 378 - protein, 9 aa, synthetic construct
YSFTNYWIT

SEQ ID NO: 379 - protein, 9 aa, synthetic construct
GTFSSYPIS

SEQ ID NO: 380 - protein, 9 aa, synthetic construct
LTVSSNYMS

SEQ ID NO: 381 - protein, 11 aa, synthetic construct
GSISRGSYYWS

SEQ ID NO: 382 - protein, 9 aa, synthetic construct
YTFNTYAMN

SEQ ID NO: 383 - protein, 9 aa, synthetic construct
ADFSTYGMH

SEQ ID NO: 384 - protein, 9 aa, synthetic construct
YSFSNYWIG

SEQ ID NO: 385 - protein, 9 aa, synthetic construct
GTFSSYTFS

SEQ ID NO: 386 - protein, 9 aa, synthetic construct
FTFSNFGMH

SEQ ID NO: 387 - protein, 9 aa, synthetic construct
FTVSRFAMH

SEQ ID NO: 388 - protein, 9 aa, synthetic construct
FTFSSYTLH

SEQ ID NO: 389 - protein, 9 aa, synthetic construct
FTFNSYWMS

SEQ ID NO: 390 - protein, 9 aa, synthetic construct
YRFGNHWIG

SEQ ID NO: 391 - protein, 9 aa, synthetic construct
FTLSSHSMH

SEQ ID NO: 392 - protein, 11 aa, synthetic construct
FSLSSNGEGVA

SEQ ID NO: 393 - protein, 11 aa, synthetic construct
FSLSTSGMSVS

SEQ ID NO: 394 - protein, 9 aa, synthetic construct
GTFSSSAIN

SEQ ID NO: 395 - protein, 9 aa, synthetic construct
FIFDDYAMH

SEQ ID NO: 396 - protein, 9 aa, synthetic construct
FTFSNYAMH

SEQ ID NO: 397 - protein, 9 aa, synthetic construct
YTFTSYYVH

SEQ ID NO: 398 - protein, 9 aa, synthetic construct
GTFSTYHVS

SEQ ID NO: 399 - protein, 9 aa, synthetic construct
YSFTSYWIA

SEQ ID NO: 400 - protein, 9 aa, synthetic construct
FTFEDFALH

SEQ ID NO: 401 - protein, 9 aa, synthetic construct
FTFSNFWMH

SEQ ID NO: 402 - protein, 9 aa, synthetic construct
GTFSSFPIS

SEQ ID NO: 403 - protein, 9 aa, synthetic construct
VPLSNYAIS

SEQ ID NO: 404 - protein, 9 aa, synthetic construct
FIFSNYAMH

SEQ ID NO: 405 - protein, 18 aa, synthetic construct
GSFGVTFSGGSFTGHYWN

SEQ ID NO: 406 - protein, 9 aa, synthetic construct
YTFTNYYML

SEQ ID NO: 407 - protein, 9 aa, synthetic construct
GTFSSYSIT

SEQ ID NO: 408 - protein, 9 aa, synthetic construct
GSINNYYWN

SEQ ID NO: 409 - protein, 11 aa, synthetic construct
GSVNTWSYYWG

SEQ ID NO: 410 - protein, 9 aa, synthetic construct
FTFSRYAMH

SEQ ID NO: 411 - protein, 9 aa, synthetic construct
YTFTTYGIT

SEQ ID NO: 412 - protein, 9 aa, synthetic construct
GTFSGFPIS

SEQ ID NO: 413 - protein, 9 aa, synthetic construct
GTFSTYTFS

SEQ ID NO: 414 - protein, 9 aa, synthetic construct
GTFSTYTFN

SEQ ID NO: 415 - protein, 9 aa, synthetic construct
FTFGDYAMN

SEQ ID NO: 416 - protein, 9 aa, synthetic construct
GTFNSYAVS

SEQ ID NO: 417 - protein, 9 aa, synthetic construct
YSFTSKSIN

SEQ ID NO: 418 - protein, 11 aa, synthetic construct
DSISSGGYYWS

SEQ ID NO: 419 - protein, 11 aa, synthetic construct
FSLNTPRMGVS

SEQ ID NO: 420 - protein, 9 aa, synthetic construct
YTFTGYCIH

SEQ ID NO: 421 - protein, 9 aa, synthetic construct
GDFSSYVMT

SEQ ID NO: 422 - protein, 9 aa, synthetic construct
YSFFHYWIS

SEQ ID NO: 423 - protein, 9 aa, synthetic construct
YIFTTYWIT

SEQ ID NO: 424 - protein, 9 aa, synthetic construct
GTFNSYTIS

SEQ ID NO: 425 - protein, 9 aa, synthetic construct
FTFNNAWMS

SEQ ID NO: 426 - protein, 9 aa, synthetic construct
FTFNIAWMS

SEQ ID NO: 427 - protein, 9 aa, synthetic construct
FTFRTFAMH

SEQ ID NO: 428 - protein, 9 aa, synthetic construct
SDFSTYGMH

SEQ ID NO: 429 - protein, 9 aa, synthetic construct
GPFSTYAIS

SEQ ID NO: 430 - protein, 10 aa, synthetic construct
ASISQHDWWT

SEQ ID NO: 431 - protein, 14 aa, synthetic construct
WVRQAPGKGLEWVA

SEQ ID NO: 432 - protein, 14 aa, synthetic construct
WVRQAPGKGLEWVG

SEQ ID NO: 433 - protein, 14 aa, synthetic construct
WVRQAPGQGLEWMG

SEQ ID NO: 434 - protein, 14 aa, synthetic construct
WIRQSPGKGLEWIG

SEQ ID NO: 435 - protein, 14 aa, synthetic construct
WVRQGTGNRLEWVS

SEQ ID NO: 436 - protein, 14 aa, synthetic construct
WVRQVPGKGLEWVS

SEQ ID NO: 437 - protein, 14 aa, synthetic construct
WVRQAPGKGLEWVS

SEQ ID NO: 438 - protein, 14 aa, synthetic construct
WVRQSPGKGLEWIG

SEQ ID NO: 439 - protein, 14 aa, synthetic construct
WVRQGIGKGLEWVS

SEQ ID NO: 440 - protein, 14 aa, synthetic construct
WVRQIPGKGLEWMG

SEQ ID NO: 441 - protein, 14 aa, synthetic construct
WIRQPPGKALEWLA

SEQ ID NO: 442 - protein, 14 aa, synthetic construct
WVRQTPGKDLEWVA

SEQ ID NO: 443 - protein, 14 aa, synthetic construct
WVRQAPGKGLEYVS

SEQ ID NO: 444 - protein, 14 aa, synthetic construct
WVRQPPGKGLEWIG

SEQ ID NO: 445 - protein, 14 aa, synthetic construct
WIRQPPGKGLEWIG

SEQ ID NO: 446 - protein, 14 aa, synthetic construct
WVRQAPGQRLEWMA

SEQ ID NO: 447 - protein, 14 aa, synthetic construct
WVRQAPGKGLDYVS

SEQ ID NO: 448 - protein, 14 aa, synthetic construct
WVRQTPGKGLEWVS

SEQ ID NO: 449 - protein, 14 aa, synthetic construct
WVRQMPGKGLEWVA

SEQ ID NO: 450 - protein, 14 aa, synthetic construct
WIRQHPGKGLEWIG

SEQ ID NO: 451 - protein, 14 aa, synthetic construct
WVRQTTGKSLEWVS

SEQ ID NO: 452 - protein, 14 aa, synthetic construct
WVRQSPEKGLEWIG

SEQ ID NO: 453 - protein, 14 aa, synthetic construct
WVRQAPGQGLDWMG

SEQ ID NO: 454 - protein, 14 aa, synthetic construct
WVRQVPEKGLEWIS

SEQ ID NO: 455 - protein, 14 aa, synthetic construct
WVRQSPRQGLEWIG

SEQ ID NO: 456 - protein, 14 aa, synthetic construct
WVRQAPGQGLEWVA

SEQ ID NO: 457 - protein, 14 aa, synthetic construct
WIRQPPGKGLQWIG

SEQ ID NO: 458 - protein, 14 aa, synthetic construct
WVRLLPGKGLEWVS

SEQ ID NO: 459 - protein, 14 aa, synthetic construct
WVRQAPGKGPEYVS

SEQ ID NO: 460 - protein, 14 aa, synthetic construct
WVRQAPGKGLEYLS

SEQ ID NO: 461 - protein, 14 aa, synthetic construct
WIRQAPGKGLEWVA

SEQ ID NO: 462 - protein, 14 aa, synthetic construct
WIRQHPGTGLEWIG

SEQ ID NO: 463 - protein, 14 aa, synthetic construct
WVRQPIGKGLEWVS

SEQ ID NO: 464 - protein, 14 aa, synthetic construct
WVRQTTGKGLEWVS

SEQ ID NO: 465 - protein, 14 aa, synthetic construct
WVRQAPGKRLEWVS

SEQ ID NO: 466 - protein, 14 aa, synthetic construct
WIRQAPGKGLQWVA

SEQ ID NO: 467 - protein, 14 aa, synthetic construct
WVRQATGKGLEWVS

SEQ ID NO: 468 - protein, 14 aa, synthetic construct
WVRQVTGKGLEWVS

SEQ ID NO: 469 - protein, 14 aa, synthetic construct
WVRQAPGEGLEWVG

SEQ ID NO: 470 - protein, 14 aa, synthetic construct
WVRQAPGKGLEWIS

SEQ ID NO: 471 - protein, 14 aa, synthetic construct
WIRQSPVKGLEWIG

SEQ ID NO: 472 - protein, 14 aa, synthetic construct
WVRQAPGKGLEWVT

SEQ ID NO: 473 - protein, 14 aa, synthetic construct
WVRQAPGQGLECMG

SEQ ID NO: 474 - protein, 14 aa, synthetic construct
WVRQTPGKGPEWVS

SEQ ID NO: 475 - protein, 14 aa, synthetic construct
WVRQAPGKGLDWAS

SEQ ID NO: 476 - protein, 14 aa, synthetic construct
WVRQMPGKGLEWMG

SEQ ID NO: 477 - protein, 14 aa, synthetic construct
WVRQAPGQGPEWMG

SEQ ID NO: 478 - protein, 14 aa, synthetic construct
WLRQAPGQGLEWMG

SEQ ID NO: 479 - protein, 14 aa, synthetic construct
WVRQAPGKGLESIS

SEQ ID NO: 480 - protein, 14 aa, synthetic construct
WVRQPPGKRLEWVS

SEQ ID NO: 481 - protein, 14 aa, synthetic construct
WIRQPPGKALEWLG

SEQ ID NO: 482 - protein, 14 aa, synthetic construct
WVRQAPEQGLEWMG

SEQ ID NO: 483 - protein, 14 aa, synthetic construct
WIRQSPGKALEWLA

SEQ ID NO: 484 - protein, 14 aa, synthetic construct
WVRQVTGRGLEWVS

SEQ ID NO: 485 - protein, 14 aa, synthetic construct
WVRQAPGKGLQWVS

SEQ ID NO: 486 - protein, 14 aa, synthetic construct
WVRQAPGKGLVWVS

SEQ ID NO: 487 - protein, 14 aa, synthetic construct
WIRQPLGKGLEWIG

SEQ ID NO: 488 - protein, 14 aa, synthetic construct
WVRRAPGQGLEWMG

SEQ ID NO: 489 - protein, 14 aa, synthetic construct
WVRQAPGNRLEWVS

SEQ ID NO: 490 - protein, 14 aa, synthetic construct
WVRQAPGQGLECLG

SEQ ID NO: 491 - protein, 14 aa, synthetic construct
WVRQATGQGLEWMG

SEQ ID NO: 492 - protein, 14 aa, synthetic construct
WIRQAPGQGLEWMG

SEQ ID NO: 493 - protein, 14 aa, synthetic construct
WVRQGPGKGLEWIS

SEQ ID NO: 494 - protein, 14 aa, synthetic construct
WVRQARGQPLEWIG

SEQ ID NO: 495 - protein, 14 aa, synthetic construct
WVRQAPGQGPEWLG

SEQ ID NO: 496 - protein, 14 aa, synthetic construct
WVRQMPGKGLEWLG

SEQ ID NO: 497 - protein, 14 aa, synthetic construct
WVRQAPGKGLECVA

SEQ ID NO: 498 - protein, 14 aa, synthetic construct
WMRQAPGQGPEWLG

SEQ ID NO: 499 - protein, 14 aa, synthetic construct
WVRQTPGKGLEWIG

SEQ ID NO: 500 - protein, 14 aa, synthetic construct
WVRQTPGKGLVWVS

SEQ ID NO: 501 - protein, 14 aa, synthetic construct
WVRQPPGKALEWLA

SEQ ID NO: 502 - protein, 14 aa, synthetic construct
WVRQKPGQGLEWMG

SEQ ID NO: 503 - protein, 14 aa, synthetic construct
WVRQAPGEGLEWVS

SEQ ID NO: 504 - protein, 14 aa, synthetic construct
WVRQAPGKGLEWMG

SEQ ID NO: 505 - protein, 14 aa, synthetic construct
WIRQPPGKALEWFA

SEQ ID NO: 506 - protein, 14 aa, synthetic construct
WIRQPPGGALEWLA

SEQ ID NO: 507 - protein, 14 aa, synthetic construct
WVRQAPAQGLEWMG

SEQ ID NO: 508 - protein, 14 aa, synthetic construct
WVRQAPGRGLEWMG

SEQ ID NO: 509 - protein, 14 aa, synthetic construct
WVRQAPGQGLDWLG

SEQ ID NO: 510 - protein, 14 aa, synthetic construct
WIRQTPGKGLEWLG

SEQ ID NO: 511 - protein, 14 aa, synthetic construct
WVRQVPGQGLEWMG

SEQ ID NO: 512 - protein, 14 aa, synthetic construct
WIRQRPGKGLEWIG

SEQ ID NO: 513 - protein, 14 aa, synthetic construct
WIRQSPGKGLEWVS

SEQ ID NO: 514 - protein, 14 aa, synthetic construct
WVRQASGQGLEWMG

SEQ ID NO: 515 - protein, 14 aa, synthetic construct
WLRQAPRQGLEWMG

SEQ ID NO: 516 - protein, 14 aa, synthetic construct
WVRQMPGKGLEWMA

SEQ ID NO: 517 - protein, 14 aa, synthetic construct
WVRQAPGQGVEWMG

SEQ ID NO: 518 - protein, 14 aa, synthetic construct
WVRQAPGKGLEFVS

SEQ ID NO: 519 - protein, 17 aa, synthetic construct
DILYDGSNKYYADSVKG

SEQ ID NO: 520 - protein, 17 aa, synthetic construct
VISDDGNNKEYPDSVKG

SEQ ID NO: 521 - protein, 17 aa, synthetic construct
VISNDGSYKDYVDSVKG

SEQ ID NO: 522 - protein, 17 aa, synthetic construct
SIKQDGSEAYYVDSVRG

SEQ ID NO: 523 - protein, 19 aa, synthetic construct
RISSETDGGTTEYAAPVKG

SEQ ID NO: 524 - protein, 17 aa, synthetic construct
IISPRSGSASYAQKFQG

SEQ ID NO: 525 - protein, 17 aa, synthetic construct
VISYDGENKDYPDSVKG

SEQ ID NO: 526 - protein, 17 aa, synthetic construct
VILKDGSGKFYADSVKG

SEQ ID NO: 527 - protein, 16 aa, synthetic construct
EINHSGSTNYNPSLKS

SEQ ID NO: 528 - protein, 16 aa, synthetic construct
TIGTAGDTYYADSVKG

SEQ ID NO: 529 - protein, 17 aa, synthetic construct
GISYNSGSVDYADSVKG

SEQ ID NO: 530 - protein, 17 aa, synthetic construct
GISGRGETTYYVDSVKG

SEQ ID NO: 531 - protein, 17 aa, synthetic construct
VILYDRSGKHYADSVKG

SEQ ID NO: 532 - protein, 17 aa, synthetic construct
VVSYDGSNKYYANSVKG

SEQ ID NO: 533 - protein, 16 aa, synthetic construct
EIFHSGSTYYNPSLKS

SEQ ID NO: 534 - protein, 17 aa, synthetic construct
VVLYDGSNEDYADSVKG

SEQ ID NO: 535 - protein, 17 aa, synthetic construct
GISWNGGVLDYADSVKG

SEQ ID NO: 536 - protein, 17 aa, synthetic construct
VIAFDGSKKYYGDSVKG

SEQ ID NO: 537 - protein, 16 aa, synthetic construct
VIGTGGDTYYPDSVKG

SEQ ID NO: 538 - protein, 16 aa, synthetic construct
AIFHSGTTNYNPSLRS

SEQ ID NO: 539 - protein, 17 aa, synthetic construct
KIDPSDSYTDYNPSFEG

SEQ ID NO: 540 - protein, 16 aa, synthetic construct
EIFHSGSAVYNPSLES

SEQ ID NO: 541 - protein, 16 aa, synthetic construct
LIYWDDDERYNPSLKS

SEQ ID NO: 542 - protein, 17 aa, synthetic construct
VILYDGSNKDYADSVKG

SEQ ID NO: 543 - protein, 17 aa, synthetic construct
GISDSGGSPYYAVSVRG

SEQ ID NO: 544 - protein, 17 aa, synthetic construct
VISYDGDYKYYADSVKG

SEQ ID NO: 545 - protein, 17 aa, synthetic construct
LISGDGGGTFYADSVKG

SEQ ID NO: 546 - protein, 17 aa, synthetic construct
GVSRNGDIADYTDSVKG

SEQ ID NO: 547 - protein, 16 aa, synthetic construct
EIFHSGSAHYNPSLKS

SEQ ID NO: 548 - protein, 16 aa, synthetic construct
EINHSGNTYYNPSLKS

SEQ ID NO: 549 - protein, 17 aa, synthetic construct
WIDAGNGDTQYSQNFQG

SEQ ID NO: 550 - protein, 17 aa, synthetic construct
GISSTGDITDYADSVKD

SEQ ID NO: 551 - protein, 17 aa, synthetic construct
VILYDGTYKDYADSVKG

SEQ ID NO: 552 - protein, 17 aa, synthetic construct
VISDDGSFKYSADSVKG

SEQ ID NO: 553 - protein, 17 aa, synthetic construct
VMSYDGSNEYYADSVKG

SEQ ID NO: 554 - protein, 17 aa, synthetic construct
AISWNSASIGYADSVKG

SEQ ID NO: 555 - protein, 17 aa, synthetic construct
VIIHDGSNKYHADSVKG

SEQ ID NO: 556 - protein, 17 aa, synthetic construct
TIYPGDSDTRYSLSFQG

SEQ ID NO: 557 - protein, 17 aa, synthetic construct
VIWDDGSGKHYADSVKG

SEQ ID NO: 558 - protein, 17 aa, synthetic construct
GIGGRGKNTYYADSVKG

SEQ ID NO: 559 - protein, 16 aa, synthetic construct
YIYYSGSAYYNPSLKS

SEQ ID NO: 560 - protein, 17 aa, synthetic construct
WINTNTGNPTYAQGFTG

SEQ ID NO: 561 - protein, 17 aa, synthetic construct
AIIYDGSDKQYADSVKG

SEQ ID NO: 562 - protein, 16 aa, synthetic construct
SIYNSGATYFNPSLKS

SEQ ID NO: 563 - protein, 16 aa, synthetic construct
EISHSGGTYYNPSLKS

SEQ ID NO: 564 - protein, 16 aa, synthetic construct
EINHSDTTNYNPSLKS

SEQ ID NO: 565 - protein, 17 aa, synthetic construct
VILDDGNNKLYADSVKG

SEQ ID NO: 566 - protein, 17 aa, synthetic construct
VISNDGGSKHYKDSVKG

SEQ ID NO: 567 - protein, 17 aa, synthetic construct
GISGRGDTTYYADSVKG

SEQ ID NO: 568 - protein, 16 aa, synthetic construct
AIGTAGDRYYADSVKG

SEQ ID NO: 569 - protein, 16 aa, synthetic construct
EIYHTGSTAYNPSLES

SEQ ID NO: 570 - protein, 16 aa, synthetic construct
HIFSNDEELFSTSLKS

SEQ ID NO: 571 - protein, 16 aa, synthetic construct
EISHSGSTNYNPSLKS

SEQ ID NO: 572 - protein, 17 aa, synthetic construct
GISYDGENRYYADSVRG

SEQ ID NO: 573 - protein, 16 aa, synthetic construct
EISQSGGVNSNPSLKS

SEQ ID NO: 574 - protein, 17 aa, synthetic construct
VISSDGTAKFHADSVKG

SEQ ID NO: 575 - protein, 17 aa, synthetic construct
RIIPVVNIVNYAQKFQG

SEQ ID NO: 576 - protein, 17 aa, synthetic construct
RIIPILGLANYAQKFQG

SEQ ID NO: 577 - protein, 17 aa, synthetic construct
GINPSGGSTDYAQKFQG

SEQ ID NO: 578 - protein, 17 aa, synthetic construct
RINPNSGGTNYAQKFQG

SEQ ID NO: 579 - protein, 17 aa, synthetic construct
GISGRGDRTYYADSVKG

SEQ ID NO: 580 - protein, 16 aa, synthetic construct
NIFYNGKTYYNPSLKS

SEQ ID NO: 581 - protein, 17 aa, synthetic construct
LISRDGGGTFYADSMKG

SEQ ID NO: 582 - protein, 16 aa, synthetic construct
EISQSGSTYYNPSLKS

SEQ ID NO: 583 - protein, 16 aa, synthetic construct
LIYWDGDQRYSPSLNT

SEQ ID NO: 584 - protein, 17 aa, synthetic construct
IINPGGGSTGYAQKFQG

SEQ ID NO: 585 - protein, 16 aa, synthetic construct
TIFSGGSTFYADSVKG

SEQ ID NO: 586 - protein, 16 aa, synthetic construct
EIYQSGSTNYNPSLKS

SEQ ID NO: 587 - protein, 17 aa, synthetic construct
VVWYDGSNKYYVDSVKG

SEQ ID NO: 588 - protein, 16 aa, synthetic construct
YIYYSGNTNYSPSLRS

SEQ ID NO: 589 - protein, 17 aa, synthetic construct
GVSWNSGVIDYVDSVKG

SEQ ID NO: 590 - protein, 19 aa, synthetic construct
LIRSNSFGGTTQYAASVRG

SEQ ID NO: 591 - protein, 17 aa, synthetic construct
SISSDGGITYYADSVKG

SEQ ID NO: 592 - protein, 17 aa, synthetic construct
SIKQDGSEKYYVDSVKG

SEQ ID NO: 593 - protein, 16 aa, synthetic construct
YVHDSGSTNYNPSLKS

SEQ ID NO: 594 - protein, 17 aa, synthetic construct
GISSNGDITDYADSVKD

SEQ ID NO: 595 - protein, 17 aa, synthetic construct
GISGYGDTTYYADSVKG

SEQ ID NO: 596 - protein, 17 aa, synthetic construct
VIWSGGSGKHYADSVKG

SEQ ID NO: 597 - protein, 16 aa, synthetic construct
LIYWDDDQRYSPSLKS

SEQ ID NO: 598 - protein, 17 aa, synthetic construct
NIKQDGSEKNYVDSVKG

SEQ ID NO: 599 - protein, 16 aa, synthetic construct
SIFDSGTTYYNPSLKS

SEQ ID NO: 600 - protein, 16 aa, synthetic construct
ELTHTGSTNYNPSLKS

SEQ ID NO: 601 - protein, 16 aa, synthetic construct
GTGTSGDTYYLDSVKG

SEQ ID NO: 602 - protein, 17 aa, synthetic construct
VISYDGSNKYYRDSVKG

SEQ ID NO: 603 - protein, 17 aa, synthetic construct
FIWFDGSKKYYGDSVKG

SEQ ID NO: 604 - protein, 16 aa, synthetic construct
AIGTAGDTYYADSVKG

SEQ ID NO: 605 - protein, 16 aa, synthetic construct
LIYWDGDERYSPSLQS

SEQ ID NO: 606 - protein, 17 aa, synthetic construct
NIKQDGSEKYYVDSVKG

SEQ ID NO: 607 - protein, 16 aa, synthetic construct
VLYSGGTTFYADSVKG

SEQ ID NO: 608 - protein, 16 aa, synthetic construct
IIYPGGSSFYAESVKG

SEQ ID NO: 609 - protein, 17 aa, synthetic construct
VVSYDGSSKHYTDSVKG

SEQ ID NO: 610 - protein, 16 aa, synthetic construct
LIYAGGSTYYADSVKG

SEQ ID NO: 611 - protein, 16 aa, synthetic construct
YIYYSGSTYYNPSLKS

SEQ ID NO: 612 - protein, 16 aa, synthetic construct
LIYWDDDKRYSPSLKS

SEQ ID NO: 613 - protein, 16 aa, synthetic construct
LIYWDDDTRYSPSLKR

SEQ ID NO: 614 - protein, 16 aa, synthetic construct
GIGTAGDTYYADSVKG

SEQ ID NO: 615 - protein, 16 aa, synthetic construct
GIGTSGDTYYPDSVKG

SEQ ID NO: 616 - protein, 17 aa, synthetic construct
RIIPILGTATYAQKFQG

SEQ ID NO: 617 - protein, 16 aa, synthetic construct
VIYAGGSTFYADSVKG

SEQ ID NO: 618 - protein, 16 aa, synthetic construct
TIGTAGDTYYPDSVKG

SEQ ID NO: 619 - protein, 16 aa, synthetic construct
VLYAGGSTFYADSVKG

SEQ ID NO: 620 - protein, 16 aa, synthetic construct
TIYAGGSTFYADSVRG

SEQ ID NO: 621 - protein, 17 aa, synthetic construct
YISPSGVTIHYADSVKG

SEQ ID NO: 622 - protein, 16 aa, synthetic construct
VIYPGGSTFYADSVRG

SEQ ID NO: 623 - protein, 16 aa, synthetic construct
EIHHSGSTTYNPTLRS

SEQ ID NO: 624 - protein, 16 aa, synthetic construct
EVTHSGNTNYNPSLKS

SEQ ID NO: 625 - protein, 16 aa, synthetic construct
LIYWDDDKRYSPSLKN

SEQ ID NO: 626 - protein, 17 aa, synthetic construct
VISSDGSAKFYADSVKG

SEQ ID NO: 627 - protein, 17 aa, synthetic construct
RIIPILGIAYYAQKFQG

SEQ ID NO: 628 - protein, 17 aa, synthetic construct
VIWYNGSNKYYIDSVKG

SEQ ID NO: 629 - protein, 17 aa, synthetic construct
IINPSDAGASYVQKFQG

SEQ ID NO: 630 - protein, 17 aa, synthetic construct
IINPSGGSTAYAQHFQD

SEQ ID NO: 631 - protein, 17 aa, synthetic construct
VISYDGSNKHYADSVKG

SEQ ID NO: 632 - protein, 16 aa, synthetic construct
LIYAGGSTFYADSVKG

SEQ ID NO: 633 - protein, 17 aa, synthetic construct
GISWNGGIMGYAASVEG

SEQ ID NO: 634 - protein, 17 aa, synthetic construct
TISGSGDTFSHADSVKG

SEQ ID NO: 635 - protein, 17 aa, synthetic construct
IIYPGDSDTRYSPSFQG

SEQ ID NO: 636 - protein, 17 aa, synthetic construct
WINPANNNIKYSEKFQG

SEQ ID NO: 637 - protein, 17 aa, synthetic construct
RVIPLLNVVDYAQKFQG

SEQ ID NO: 638 - protein, 16 aa, synthetic construct
LLYAGGSTFYADSVKG

SEQ ID NO: 639 - protein, 17 aa, synthetic construct
SISSRGSSKFYADSVKG

SEQ ID NO: 640 - protein, 16 aa, synthetic construct
AIGTAGDTYYSDSVKG

SEQ ID NO: 641 - protein, 17 aa, synthetic construct
VISYDGSNKYYEDSVKG

SEQ ID NO: 642 - protein, 16 aa, synthetic construct
LIFWDDDKRYSPSLKS

SEQ ID NO: 643 - protein, 16 aa, synthetic construct
LIYPGGSTYYADSVKG

SEQ ID NO: 644 - protein, 16 aa, synthetic construct
VIYPGGTTYYADSVKG

SEQ ID NO: 645 - protein, 17 aa, synthetic construct
NIKQDGSEKNYVDSVNG

SEQ ID NO: 646 - protein, 17 aa, synthetic construct
IINPSGGSTSYAQKFQG

SEQ ID NO: 647 - protein, 16 aa, synthetic construct
TIGTTGDSYYPGSVKG

SEQ ID NO: 648 - protein, 16 aa, synthetic construct
TTYYTARTNYNPSLKS

SEQ ID NO: 649 - protein, 16 aa, synthetic construct
VIYPGGSTFYADSVKG

SEQ ID NO: 650 - protein, 16 aa, synthetic construct
LMYPGGSTYYADSVKG

SEQ ID NO: 651 - protein, 16 aa, synthetic construct
LIYWDGDKRYSPSLKN

SEQ ID NO: 652 - protein, 16 aa, synthetic construct
LIYWDDDQRYSPSLQS

SEQ ID NO: 653 - protein, 16 aa, synthetic construct
VIYSGGTTFYADSVKG

SEQ ID NO: 654 - protein, 17 aa, synthetic construct
MINPDAASIAYAQKFQG

SEQ ID NO: 655 - protein, 16 aa, synthetic construct
EISQSGGANSNPSLKG

SEQ ID NO: 656 - protein, 16 aa, synthetic construct
DIYHSGSTNYNPSLKS

SEQ ID NO: 657 - protein, 17 aa, synthetic construct
RIIPILGIANYAEKFQD

SEQ ID NO: 658 - protein, 16 aa, synthetic construct
VIYSGGTAYYADSVKG

SEQ ID NO: 659 - protein, 16 aa, synthetic construct
VIYSGGSTYYADSVKG

SEQ ID NO: 660 - protein, 17 aa, synthetic construct
RIFPILGVADFAQKFQD

SEQ ID NO: 661 - protein, 17 aa, synthetic construct
SIKQDGGEKYYVDSVKG

SEQ ID NO: 662 - protein, 17 aa, synthetic construct
RIIPILGVTDYPQKFQG

SEQ ID NO: 663 - protein, 17 aa, synthetic construct
GSSWNSGIIGYADSVKG

SEQ ID NO: 664 - protein, 16 aa, synthetic construct
LIDWDDDKYYSTSLKT

SEQ ID NO: 665 - protein, 17 aa, synthetic construct
TIYPGDSDTRYSPSFQG

SEQ ID NO: 666 - protein, 17 aa, synthetic construct
VISYDGSHKYYVDSVEG

SEQ ID NO: 667 - protein, 16 aa, synthetic construct
AIGTAGDTYYPDSVKG

SEQ ID NO: 668 - protein, 17 aa, synthetic construct
SIKQDGSEQYYVDSVKG

SEQ ID NO: 669 - protein, 17 aa, synthetic construct
RINRDGSSPTYADSVKG

SEQ ID NO: 670 - protein, 16 aa, synthetic construct
KITHSGNTDYNPSLKS

SEQ ID NO: 671 - protein, 17 aa, synthetic construct
ILNPSAGSTSYAQKFQG

SEQ ID NO: 672 - protein, 17 aa, synthetic construct
GVSWNSGIIGYADSVKG

SEQ ID NO: 673 - protein, 16 aa, synthetic construct
SIYHSGSTYYKASLKS

SEQ ID NO: 674 - protein, 16 aa, synthetic construct
VLYAGGSTFYTDSVKG

SEQ ID NO: 675 - protein, 16 aa, synthetic construct
YIYYSGITYYNPSLKS

SEQ ID NO: 676 - protein, 17 aa, synthetic construct
IISGSGVNTYYADSVKG

SEQ ID NO: 677 - protein, 17 aa, synthetic construct
KIIPIIDIANSAQKFQG

SEQ ID NO: 678 - protein, 16 aa, synthetic construct
TIYPGGSTFYTDSVKG

SEQ ID NO: 679 - protein, 17 aa, synthetic construct
VIWYDGSNKYYADSVKG

SEQ ID NO: 680 - protein, 16 aa, synthetic construct
VLFAGGTTFYADSVKG

SEQ ID NO: 681 - protein, 17 aa, synthetic construct
RIFPILGVTDYAQKFQD

SEQ ID NO: 682 - protein, 16 aa, synthetic construct
VLYSGGTTYYADSVKG

SEQ ID NO: 683 - protein, 17 aa, synthetic construct
WMNPNSGYTGYAQKFQG

SEQ ID NO: 684 - protein, 17 aa, synthetic construct
QINPNNGGTNYAQKFQG

SEQ ID NO: 685 - protein, 17 aa, synthetic construct
IINPSAGSTTYAQKFQG

SEQ ID NO: 686 - protein, 17 aa, synthetic construct
YISTSGSTYYYADSVKG

SEQ ID NO: 687 - protein, 17 aa, synthetic construct
WIAVGRGITDHAQKFQE

SEQ ID NO: 688 - protein, 17 aa, synthetic construct
GISGSGGSTYYAEAVRG

SEQ ID NO: 689 - protein, 16 aa, synthetic construct
VIYSGGSTFYADSVKG

SEQ ID NO: 690 - protein, 17 aa, synthetic construct
GLSRSGDITYYADSVKG

SEQ ID NO: 691 - protein, 17 aa, synthetic construct
KILPILGATDYAQKFQG

SEQ ID NO: 692 - protein, 17 aa, synthetic construct
VMWFDGTNKYYADSVKG

SEQ ID NO: 693 - protein, 17 aa, synthetic construct
FISNSATARYYADSVKG

SEQ ID NO: 694 - protein, 17 aa, synthetic construct
VISYDGNNKYYAASVKG

SEQ ID NO: 695 - protein, 17 aa, synthetic construct
RIDPSDSYTTYSPSFQG

SEQ ID NO: 696 - protein, 17 aa, synthetic construct
FVAYGRSSEDYADSVKG

SEQ ID NO: 697 - protein, 17 aa, synthetic construct
KIDPSDSYTNYNPSFQG

SEQ ID NO: 698 - protein, 19 aa, synthetic construct
FIRSKTYGGTTHYAASVKG

SEQ ID NO: 699 - protein, 17 aa, synthetic construct
YISSRSSTISYADSVKG

SEQ ID NO: 700 - protein, 16 aa, synthetic construct
LIYAGGTTYYADSVKG

SEQ ID NO: 701 - protein, 17 aa, synthetic construct
KIFPILGATDYAQKFQG

SEQ ID NO: 702 - protein, 17 aa, synthetic construct
RIIPILGIPHYAQRFQG

SEQ ID NO: 703 - protein, 17 aa, synthetic construct
RINPNSGDTDYAQKFQG

SEQ ID NO: 704 - protein, 16 aa, synthetic construct
EIYQSVSTNYNPSLES

SEQ ID NO: 705 - protein, 17 aa, synthetic construct
WISTYNGNTNYAQKLQG

SEQ ID NO: 706 - protein, 17 aa, synthetic construct
TTFYDGSDKFYADSVKG

SEQ ID NO: 707 - protein, 17 aa, synthetic construct
RINPKSGSTNYAQKFQG

SEQ ID NO: 708 - protein, 17 aa, synthetic construct
RINGDGSSPTYADSVKG

SEQ ID NO: 709 - protein, 17 aa, synthetic construct
RSSSDGSATSYADSVKG

SEQ ID NO: 710 - protein, 17 aa, synthetic construct
RIIPILGIATYPQKFQD

SEQ ID NO: 711 - protein, 17 aa, synthetic construct
RIIPVLGIADYAQKFQG

SEQ ID NO: 712 - protein, 16 aa, synthetic construct
LIYWDDEKRYSPPLKT

SEQ ID NO: 713 - protein, 17 aa, synthetic construct
IIYPTGGGTRSAQSVQG

SEQ ID NO: 714 - protein, 17 aa, synthetic construct
RIDPSDSYSNYSPSFHG

SEQ ID NO: 715 - protein, 17 aa, synthetic construct
VISWNSDSIGYADSVKG

SEQ ID NO: 716 - protein, 17 aa, synthetic construct
SIIPILGVAKYAQKFQG

SEQ ID NO: 717 - protein, 16 aa, synthetic construct
YIYSSGSTYYNPSLES

SEQ ID NO: 718 - protein, 17 aa, synthetic construct
WINTNTGATTYAQGFTG

SEQ ID NO: 719 - protein, 17 aa, synthetic construct
ALSHDGAYKFYADSVKG

SEQ ID NO: 720 - protein, 17 aa, synthetic construct
RIFPILGVANYAQKFQG

SEQ ID NO: 721 - protein, 17 aa, synthetic construct
GVTWNSGTIGYADSVKG

SEQ ID NO: 722 - protein, 17 aa, synthetic construct
AISFDGDITYYADSVKG

SEQ ID NO: 723 - protein, 17 aa, synthetic construct
MISFDGSEKYYADSVKG

SEQ ID NO: 724 - protein, 17 aa, synthetic construct
FISHDGGRIDYADSVKG

SEQ ID NO: 725 - protein, 17 aa, synthetic construct
SIKQDGSEKYYVDSLKG

SEQ ID NO: 726 - protein, 17 aa, synthetic construct
IIYPDDSDTRYGPSFEG

SEQ ID NO: 727 - protein, 17 aa, synthetic construct
LISLGANNKYYADSVKG

SEQ ID NO: 728 - protein, 16 aa, synthetic construct
VIYWDEEERYSPSLKS

SEQ ID NO: 729 - protein, 16 aa, synthetic construct
RIDWDGYKYYSTTLET

SEQ ID NO: 730 - protein, 17 aa, synthetic construct
IVNPGGGDTSYAQKFQG

SEQ ID NO: 731 - protein, 17 aa, synthetic construct
GIIPIFGTTNYAQKFQG

SEQ ID NO: 732 - protein, 17 aa, synthetic construct
GISGNSGTIGYADSVKG

SEQ ID NO: 733 - protein, 17 aa, synthetic construct
GINWNSGTIAYADSVKG

SEQ ID NO: 734 - protein, 17 aa, synthetic construct
VIWYDGSFKFYADSVKG

SEQ ID NO: 735 - protein, 17 aa, synthetic construct
MINPTGGSTGYAQKFQG

SEQ ID NO: 736 - protein, 17 aa, synthetic construct
GIIPLFGSANYTQRFQG

SEQ ID NO: 737 - protein, 17 aa, synthetic construct
GISWNGGVIGYADSVKG

SEQ ID NO: 738 - protein, 17 aa, synthetic construct
RINSDGGSTSYADSVKG

SEQ ID NO: 739 - protein, 17 aa, synthetic construct
RIIPILGVADYAQKFQG

SEQ ID NO: 740 - protein, 17 aa, synthetic construct
GITPFSGTAKHAQKFQD

SEQ ID NO: 741 - protein, 17 aa, synthetic construct
VISFDGDNIYYADSVKG

SEQ ID NO: 742 - protein, 16 aa, synthetic construct
EISQSGTTNSNPSLKS

SEQ ID NO: 743 - protein, 17 aa, synthetic construct
LINPSGGSTSYAQKFQG

SEQ ID NO: 744 - protein, 17 aa, synthetic construct
TIIPILGVANYAPKFQG

SEQ ID NO: 745 - protein, 16 aa, synthetic construct
YVYFSGSTNYNPSLKS

SEQ ID NO: 746 - protein, 16 aa, synthetic construct
HISYSGSTYYNPSLKS

SEQ ID NO: 747 - protein, 17 aa, synthetic construct
VIWNDGSNKYYTDSVKG

SEQ ID NO: 748 - protein, 17 aa, synthetic construct
VISFRESDKNYADSVKG

SEQ ID NO: 749 - protein, 17 aa, synthetic construct
GITWNSGIIGYADSVKG

SEQ ID NO: 750 - protein, 17 aa, synthetic construct
RIIPILGIPNYTQKFQG

SEQ ID NO: 751 - protein, 17 aa, synthetic construct
WISAFNDNTNYAQNFQG

SEQ ID NO: 752 - protein, 17 aa, synthetic construct
GISWNGGIIGYADSVKG

SEQ ID NO: 753 - protein, 17 aa, synthetic construct
GATWNSGTIGYADSVEG

SEQ ID NO: 754 - protein, 17 aa, synthetic construct
GIIPLIGRANYAQKFQG

SEQ ID NO: 755 - protein, 19 aa, synthetic construct
FIRSKAYGGTTEYAASVKG

SEQ ID NO: 756 - protein, 17 aa, synthetic construct
GIITVLRTTKYAQRFQG

SEQ ID NO: 757 - protein, 17 aa, synthetic construct
WINTNTGDPTYAQGFIG

SEQ ID NO: 758 - protein, 16 aa, synthetic construct
YIYFTGSTDYNPSLKS

SEQ ID NO: 759 - protein, 16 aa, synthetic construct
HIFSNDEELYSTSLKS

SEQ ID NO: 760 - protein, 17 aa, synthetic construct
SIIPILGVANYAQKFQG

SEQ ID NO: 761 - protein, 17 aa, synthetic construct
RINPNNGGANYAQKFQG

SEQ ID NO: 762 - protein, 17 aa, synthetic construct
GIIPIFGTPNYAQKFQG

SEQ ID NO: 763 - protein, 16 aa, synthetic construct
NMFYSGITNYNPSLES

SEQ ID NO: 764 - protein, 17 aa, synthetic construct
TINPVNSYTNYNPSFQG

SEQ ID NO: 765 - protein, 17 aa, synthetic construct
RIIPLLGIPNYAQKMQG

SEQ ID NO: 766 - protein, 17 aa, synthetic construct
RIDPSDSYTNYSPSFQG

SEQ ID NO: 767 - protein, 17 aa, synthetic construct
RVIPLRNIADYAQKFQG

SEQ ID NO: 768 - protein, 19 aa, synthetic construct
RIKSYVNGGTTDYVAPVKG

SEQ ID NO: 769 - protein, 17 aa, synthetic construct
VINSDGGSPYYANAVKG

SEQ ID NO: 770 - protein, 17 aa, synthetic construct
VVSFDGSNKYYADSMKG

SEQ ID NO: 771 - protein, 16 aa, synthetic construct
YIYYSGSTNYNPSLKS

SEQ ID NO: 772 - protein, 19 aa, synthetic construct
RIQSKNVGGTTDYAAPVKG

SEQ ID NO: 773 - protein, 17 aa, synthetic construct
VISFDGNNKYYVDSVKG

SEQ ID NO: 774 - protein, 17 aa, synthetic construct
ALSHDGGYKYYADSVKG

SEQ ID NO: 775 - protein, 17 aa, synthetic construct
IIYPGDSDIRYSPSFQG

SEQ ID NO: 776 - protein, 17 aa, synthetic construct
EIIPISGTANYAQKFQG

SEQ ID NO: 777 - protein, 30 aa, synthetic construct
RFTISRDNSKNTLYLQMNSLRAEDTAVYYC

SEQ ID NO: 778 - protein, 30 aa, synthetic construct
RFTISRDNSKNTLYLQVNSLTAEDTAVYYC

SEQ ID NO: 779 - protein, 30 aa, synthetic construct
RFTISRDNSKNTVYLQMNSLRAEDTAVYYC

SEQ ID NO: 780 - protein, 30 aa, synthetic construct
RFTISRDNARNSLHLQMISLRAEDTAVYYC

SEQ ID NO: 781 - protein, 30 aa, synthetic construct
RFTISRDNSKGTLYLQMNSLKTEDTAVYYC

SEQ ID NO: 782 - protein, 30 aa, synthetic construct
RVTMSRDTSTSTVYMEVTSLQSEDTAVYYC

SEQ ID NO: 783 - protein, 30 aa, synthetic construct
RFTSSRDNSKNTLYLEMNSLRAEDTAVYYC

SEQ ID NO: 784 - protein, 30 aa, synthetic construct
RFTISRDNSKNTVFLQTNSLRPEDTAMYYC

SEQ ID NO: 785 - protein, 30 aa, synthetic construct
RVIISVDTSKKQFSLNLTSVTAADTAIYYC

SEQ ID NO: 786 - protein, 30 aa, synthetic construct
RFTISRENAKNSLYLQMSSLTAGDTAVYYC

SEQ ID NO: 787 - protein, 30 aa, synthetic construct
RFTISRDNAKNSLYLQMNSLKNEDTALYYC

SEQ ID NO: 788 - protein, 30 aa, synthetic construct
RFTVSRDNSKNTLFLQMDSLRAEDTAVYYC

SEQ ID NO: 789 - protein, 30 aa, synthetic construct
RFTISRDNSKNTLYLQMNSLRTEDTAVYYC

SEQ ID NO: 790 - protein, 30 aa, synthetic construct
RFTISRDNSKKMVYLQMNSLRPEDSAVFYC

SEQ ID NO: 791 - protein, 30 aa, synthetic construct
RVTISVDKSKSQFSLKLTSVTAADTAVYYC

SEQ ID NO: 792 - protein, 30 aa, synthetic construct
RFTISRDNSKNTLYLQMNSLRPEDTAVYFC

SEQ ID NO: 793 - protein, 35 aa, synthetic construct
RFIISRDNVSRDNVKNSLYLQMNSLRAEDTALYYC

SEQ ID NO: 794 - protein, 30 aa, synthetic construct
RFTISRDSSKNTLYLQMNSLRPEDTAVYYC

SEQ ID NO: 795 - protein, 30 aa, synthetic construct
RFTISRDNGKNSLYLQMNSLRAGDTAVYYC

SEQ ID NO: 796 - protein, 30 aa, synthetic construct
RLTISVDKSKSHFSLKLTSVTAADTAVYYC

SEQ ID NO: 797 - protein, 30 aa, synthetic construct
HVTISADKSSSTAYLQRTNLEASDSAIYYC

SEQ ID NO: 798 - protein, 30 aa, synthetic construct
RVSFSVDKSKNHFSLNLRSVTAADTAVYYC

SEQ ID NO: 799 - protein, 30 aa, synthetic construct
RLTITKDTSKSQVVLTMTNMGPVDTGTYYC

SEQ ID NO: 800 - protein, 30 aa, synthetic construct
RFTISRDNSNNILHLQMNSLRAEDTAVYYC

SEQ ID NO: 801 - protein, 30 aa, synthetic construct
RFTISRDNSRSTLFLQMNTLRAEDTAMYFC

SEQ ID NO: 802 - protein, 30 aa, synthetic construct
RFTISRDNSKNSLYLQMNSLRPEDTALYYC

SEQ ID NO: 803 - protein, 30 aa, synthetic construct
RFTISRDNSKNTLYLQMRSLGSEDTALYYC

SEQ ID NO: 804 - protein, 30 aa, synthetic construct
RVTISVDNSKNQFSLKLTSVTAADTAIYYC

SEQ ID NO: 805 - protein, 30 aa, synthetic construct
RVTISVDTSKDQFSLKLNSVTAADTAVYYC

SEQ ID NO: 806 - protein, 30 aa, synthetic construct
RVTITSDPSASTAYMELSGLRSEDTAVYYC

SEQ ID NO: 807 - protein, 30 aa, synthetic construct
RFTISRDNSKNTLYLQMSSLRVEDTAVYYC

SEQ ID NO: 808 - protein, 30 aa, synthetic construct
RFTISRDNSKKTLFLQMNSLRAEDTAVYYC

SEQ ID NO: 809 - protein, 30 aa, synthetic construct
RATISRDNSKNTLYLQMNSLRAEDTAIYYC

SEQ ID NO: 810 - protein, 30 aa, synthetic construct
RFTISRDNAKNSLYLQMNSLRVEDTALYYC

SEQ ID NO: 811 - protein, 30 aa, synthetic construct
RFTISRDNSKNTLYLQMNNLRAEDTAVYYC

SEQ ID NO: 812 - protein, 30 aa, synthetic construct
QVTISADRSTDTAYLQWNSLKASDTAIYYC

SEQ ID NO: 813 - protein, 30 aa, synthetic construct
RFTISRDNSKNTLFLQMNSLRAEDTALYYC

SEQ ID NO: 814 - protein, 30 aa, synthetic construct
RVTMSVDTSKNQFSLKLSSVTVADTAVYYC

SEQ ID NO: 815 - protein, 30 aa, synthetic construct
RFVFSLDTAVSTAYLHINNLKPEDTAVFYC

SEQ ID NO: 816 - protein, 30 aa, synthetic construct
RFTISRDNSKNTVYLQMNSLRPEDTAIYFC

SEQ ID NO: 817 - protein, 30 aa, synthetic construct
RVTISVDTSKNQFSLRLSSVTAADTAVYYC

SEQ ID NO: 818 - protein, 30 aa, synthetic construct
RVTILVDTSKNQFSLKLTSVTAADTAVYYC

SEQ ID NO: 819 - protein, 30 aa, synthetic construct
RVSISVDKSKNQFSLKLSSVTAADTAVYYC

SEQ ID NO: 820 - protein, 30 aa, synthetic construct
RFTISRDNSKNTLYLQVNSLRTEDTAVYYC

SEQ ID NO: 821 - protein, 30 aa, synthetic construct
RFTISRDNAKNTLYLQMNSLRAEDTAVYYC

SEQ ID NO: 822 - protein, 30 aa, synthetic construct
RFTISRDNSRNTLSLQMNSLRAEDTAIYYC

SEQ ID NO: 823 - protein, 30 aa, synthetic construct
RFTISRENAKNSLYLQMNNLRAGDTAVYHC

SEQ ID NO: 824 - protein, 30 aa, synthetic construct
RLTISLDKSNKQFSLMLSSVTAADTAVYYC

SEQ ID NO: 825 - protein, 30 aa, synthetic construct
RLTISKDTSKSQVVLTMTNMGPVDTATYYC

SEQ ID NO: 826 - protein, 30 aa, synthetic construct
RVTMSVDKSKNQFSLKLRSVTAADTAVYYC

SEQ ID NO: 827 - protein, 30 aa, synthetic construct
RFTISRDNSKNTLYMQMNSLRAEDTAVYYC

SEQ ID NO: 828 - protein, 30 aa, synthetic construct
RLSISIDTSKSHFSLKLKSVTAADTAIYYC

SEQ ID NO: 829 - protein, 30 aa, synthetic construct
RFTISRDNSKNTLYLEMNSLRAEDTAVFYC

SEQ ID NO: 830 - protein, 30 aa, synthetic construct
RVTITADKSTSTAYMELSSLRSDDTAVYYC

SEQ ID NO: 831 - protein, 30 aa, synthetic construct
RFTISRDNSKNMVYLQMSSLRSEDTALYYC

SEQ ID NO: 832 - protein, 30 aa, synthetic construct
RVTITADKSTSTAYMELSSLRSEDTAVYYC

SEQ ID NO: 833 - protein, 30 aa, synthetic construct
RVTMTSDTSTSTVYMELSSLRSEDTAVYFC

SEQ ID NO: 834 - protein, 30 aa, synthetic construct
RVTMTRDTSVSTAYMELRRLTSDDTAVYYC

SEQ ID NO: 835 - protein, 30 aa, synthetic construct
RFTVSRDNSKNRLYLQMNSLTDEDTAIYYC

SEQ ID NO: 836 - protein, 30 aa, synthetic construct
RVIISLNTSKNHFSLELNSVTAADTAVYYC

SEQ ID NO: 837 - protein, 30 aa, synthetic construct
RFTISRDNSKNSLYLQMNSLRTEDTALYYC

SEQ ID NO: 838 - protein, 30 aa, synthetic construct
RVTISVDKSKNQFSLKLTSVTAADTAIYYC

SEQ ID NO: 839 - protein, 30 aa, synthetic construct
RLTITKDTSKNQVVLTMTNMDPVDTATYFC

SEQ ID NO: 840 - protein, 30 aa, synthetic construct
RVTVTRDTSTSTVYMELSSLRSEDTAMYYC

SEQ ID NO: 841 - protein, 30 aa, synthetic construct
RFIISRDNSKNTLYLQMTSLRAGDTAVYYC

SEQ ID NO: 842 - protein, 30 aa, synthetic construct
RFTISRDNSKNMLYLQMSSLRVEDTAVYYC

SEQ ID NO: 843 - protein, 30 aa, synthetic construct
RVTISVDRSKNQFSLKLSSVTAADTGVYYC

SEQ ID NO: 844 - protein, 30 aa, synthetic construct
RVTMSVDTSKNQFSLKLSSVTAADTAVYYC

SEQ ID NO: 845 - protein, 30 aa, synthetic construct
RFIISRDNAKNSLYLHMRSLRPEDTALYYC

SEQ ID NO: 846 - protein, 30 aa, synthetic construct
RFTISRDDSTSIAYLQMNSLKTEDTAVYYC

SEQ ID NO: 847 - protein, 30 aa, synthetic construct
RFTISRDNSKNTLYLQMSTLRAEDTAVYYC

SEQ ID NO: 848 - protein, 30 aa, synthetic construct
RFTISRDNAKNSLYLQLNSLRVEDTAVYYC

SEQ ID NO: 849 - protein, 30 aa, synthetic construct
RVTMSLDTSKNQFSLKLRSVTAADTAVYYC

SEQ ID NO: 850 - protein, 30 aa, synthetic construct
RFTISRDNSKNTLYLQMSSMRIEEWAVYHC

SEQ ID NO: 851 - protein, 30 aa, synthetic construct
RYTISRDNSKNTLYLQMNSLRDEDTAVYYC

SEQ ID NO: 852 - protein, 30 aa, synthetic construct
RFTISRDNSKNTLNLQMNSLRVEDTATYYC

SEQ ID NO: 853 - protein, 30 aa, synthetic construct
RLSITKDTSKNQVVLTMTNMDPVDTATYYC

SEQ ID NO: 854 - protein, 30 aa, synthetic construct
RFTISRDNAKNSLYLQMNSLRAEDTAVYYC

SEQ ID NO: 855 - protein, 30 aa, synthetic construct
RLTISVDTSKNQFSLKLSSVTAADTAVYFC

SEQ ID NO: 856 - protein, 30 aa, synthetic construct
RVTILADTSKSQFSLNLSSVTAADTAVYYC

SEQ ID NO: 857 - protein, 30 aa, synthetic construct
RFTISRENARNSVYLQMNSLGAGDTAIYYC

SEQ ID NO: 858 - protein, 30 aa, synthetic construct
RFTISRETSKNTLYLQMTSLRAEDTAVYYC

SEQ ID NO: 859 - protein, 30 aa, synthetic construct
RFIISRDNSNNTLYLQMNSLRAEDTAVYYC

SEQ ID NO: 860 - protein, 30 aa, synthetic construct
RFTISRENAKNSLYLQMNSLRAGDTAVYYC

SEQ ID NO: 861 - protein, 30 aa, synthetic construct
RLTIARDTSKNQVVLTMTNMDPVDTATYYC

SEQ ID NO: 862 - protein, 30 aa, synthetic construct
RFTISRDNAKNSLYLQMDSLRAEDTAVYYC

SEQ ID NO: 863 - protein, 30 aa, synthetic construct
RFTISRDNSKNTLYLQMNSLRADDTAVYFC

SEQ ID NO: 864 - protein, 30 aa, synthetic construct
RFTISRDSSKNTLYLQMDSLRAEDTAVYYC

SEQ ID NO: 865 - protein, 30 aa, synthetic construct
RFTISRDNSMNIVYLQMNSLRAEDTAVYYC

SEQ ID NO: 866 - protein, 30 aa, synthetic construct
RVTISVDTSKDQFSLKLSSVTAADTAVYHC

SEQ ID NO: 867 - protein, 30 aa, synthetic construct
RVTITKDTFKNQVVLTMTNMDPVDTGTYYC

SEQ ID NO: 868 - protein, 30 aa, synthetic construct
RLTVTKDTSKNQVVLTLTNLGAVDTGTYYC

SEQ ID NO: 869 - protein, 30 aa, synthetic construct
RFTISRENAKNSFYLQMNSLRAGDTAVYYC

SEQ ID NO: 870 - protein, 30 aa, synthetic construct
RFSISRENAKNSLYLQMNSLRAGDTAVYYC

SEQ ID NO: 871 - protein, 30 aa, synthetic construct
RVTLTADKSTSTAYMELRSLRSDDTAVYYC

SEQ ID NO: 872 - protein, 30 aa, synthetic construct
RFSISRDNSKNTLYLQMNSLRADDTAVYYC

SEQ ID NO: 873 - protein, 30 aa, synthetic construct
RFTISRDNAKNSLYLQMNSLRAGDTAVYFC

SEQ ID NO: 874 - protein, 30 aa, synthetic construct
RFTISRDNSKNTLYLQMNSLRAGDTAVYYC

SEQ ID NO: 875 - protein, 30 aa, synthetic construct
RFTISRDNDKNSLYLQMNSLRGEDTAVYFC

SEQ ID NO: 876 - protein, 30 aa, synthetic construct
RFTISRDDSKNTLYLQMNSLRAEDTAVYYC

SEQ ID NO: 877 - protein, 30 aa, synthetic construct
RLTMSVGKSNNQFSLQLTSVTAADTAIYYC

SEQ ID NO: 878 - protein, 30 aa, synthetic construct
RVTMSVDASKNEFSLNLTSVTAADTAVYYC

SEQ ID NO: 879 - protein, 30 aa, synthetic construct
RLAITKDTSKNQVVLTMTDMDPVDTATYYC

SEQ ID NO: 880 - protein, 30 aa, synthetic construct
RFTISRDSSQNTLYLQMNSLRAEDTAVYYC

SEQ ID NO: 881 - protein, 30 aa, synthetic construct
RVTMTRDTSTSTVYMELSSLRSEDTAVYYC

SEQ ID NO: 882 - protein, 30 aa, synthetic construct
RFSISRDSSKNTLYLQMDSLTVEDTAIYYC

SEQ ID NO: 883 - protein, 30 aa, synthetic construct
RFTISRDNSKKTLYLQMNSLRTEDAAVYYC

SEQ ID NO: 884 - protein, 30 aa, synthetic construct
RFIISRDNAKNSLYLQMMRLRAEDTAFYYC

SEQ ID NO: 885 - protein, 30 aa, synthetic construct
RFTISRDNSKDTLYLQMTSLRGEDTAVYFC

SEQ ID NO: 886 - protein, 30 aa, synthetic construct
QVTMSADKSISTAFLQWSSLKASDTAMYYC

SEQ ID NO: 887 - protein, 30 aa, synthetic construct
RVTFTRDTSASTGYMEMGSLTSEDTAVYYC

SEQ ID NO: 888 - protein, 30 aa, synthetic construct
RVTIIADKSSSTVYMELSSLRSEDTAVYYC

SEQ ID NO: 889 - protein, 30 aa, synthetic construct
RFTISRDNSKNTLFLQMNSLRADDTAVYYC

SEQ ID NO: 890 - protein, 30 aa, synthetic construct
RFTISRDNAKNSVFLQMNSLRVEDTALYYC

SEQ ID NO: 891 - protein, 30 aa, synthetic construct
RLTISRENARKSLYLQMNSLRDGDTAVYYC

SEQ ID NO: 892 - protein, 30 aa, synthetic construct
RFTISRDNSKNTLYLQMNSLRAEDTAVYFC

SEQ ID NO: 893 - protein, 30 aa, synthetic construct
RVSITKDTSRNQVVLTMTNMDPVDTATYYC

SEQ ID NO: 894 - protein, 30 aa, synthetic construct
RFTVSRDNSKNTLYLQMNSLRAEDTAVYYC

SEQ ID NO: 895 - protein, 30 aa, synthetic construct
RFTISRDNAKNSLFLQMISLRAEDSAVYFC

SEQ ID NO: 896 - protein, 30 aa, synthetic construct
RFTISRDNAKNSLFMQMNSLRAEDTAVYYC

SEQ ID NO: 897 - protein, 30 aa, synthetic construct
RVTMTRDESTRTVYMELSSLRSEDTAMYYC

SEQ ID NO: 898 - protein, 30 aa, synthetic construct
RVTISVDTSKNQFSLKLTSVTATDTAIYYC

SEQ ID NO: 899 - protein, 30 aa, synthetic construct
RFTISRDTSKNTLYLQMNSLRAEDTAVYYC

SEQ ID NO: 900 - protein, 30 aa, synthetic construct
RFTISRDKSKNTLYLQMNSLRAEDTAVYYC

SEQ ID NO: 901 - protein, 30 aa, synthetic construct
RLTITKDTSKNQVVLTVTNMDPVDTATYYC

SEQ ID NO: 902 - protein, 30 aa, synthetic construct
RFTISRDKSKNTLYLQMSSLRGEDTAVYYC

SEQ ID NO: 903 - protein, 30 aa, synthetic construct
RVTMTSDTSTSTIYMELSSLRSEDTAVYYC

SEQ ID NO: 904 - protein, 30 aa, synthetic construct
RLSISIETAKKQFSLKLRSVTAADTALYYC

SEQ ID NO: 905 - protein, 30 aa, synthetic construct
RVTISVDTSKSQFSLKLRSVTAADTAVYYC

SEQ ID NO: 906 - protein, 30 aa, synthetic construct
RVTITADRSTSTAYMELSSLRYDDTAVYYC

SEQ ID NO: 907 - protein, 30 aa, synthetic construct
RFTISRHNSKNTLYLQMNSLRTEDTAVYYC

SEQ ID NO: 908 - protein, 30 aa, synthetic construct
RFTISRDNSKNTLYLQMNSLRADDTAVYYC

SEQ ID NO: 909 - protein, 30 aa, synthetic construct
RVTITADRSTSTAYMEMSRLRPEDTAVYYC

SEQ ID NO: 910 - protein, 30 aa, synthetic construct
RFNISRDNAKNSLFLQMSSLRAEDTAVYYC

SEQ ID NO: 911 - protein, 30 aa, synthetic construct
RVNIIADKSTGTAYMELSSLRSEDTAVYYC

SEQ ID NO: 912 - protein, 30 aa, synthetic construct
RFTISRDNAKNSLYLQMNSLRPEDTALYYC

SEQ ID NO: 913 - protein, 30 aa, synthetic construct
RLTISKDTSKNQVVLTMTNMDPVDTATYYC

SEQ ID NO: 914 - protein, 30 aa, synthetic construct
QVTISADKSISTAYLQWSSLKASDTAIYYC

SEQ ID NO: 915 - protein, 30 aa, synthetic construct
RFTISRDNSKNTLYLQMDTLRAEDTAVYYC

SEQ ID NO: 916 - protein, 30 aa, synthetic construct
RFTISRENAKNSLYLQMNSLRAGDTAIYYC

SEQ ID NO: 917 - protein, 30 aa, synthetic construct
RFNISRDNAKNSLFLQMNSLRAEDTAVYYC

SEQ ID NO: 918 - protein, 30 aa, synthetic construct
RFTISRDNAKNTLFLQMNSLRAEDTAVYYC

SEQ ID NO: 919 - protein, 30 aa, synthetic construct
RVTISVDTSKNQFSLRLSSVTAADSAVYYC

SEQ ID NO: 920 - protein, 30 aa, synthetic construct
RFTISRDDSKNTLYLQMTSLRAEDTAVYYC

SEQ ID NO: 921 - protein, 30 aa, synthetic construct
RVTMTSDTSTNTVYMELTSLRSEDTAVYYC

SEQ ID NO: 922 - protein, 30 aa, synthetic construct
RFIISRDNAKNSLYLHMNSLRPEDTALYYC

SEQ ID NO: 923 - protein, 30 aa, synthetic construct
RVTISLDTSKNQFSLKLSSVTAADTAVYYC

SEQ ID NO: 924 - protein, 30 aa, synthetic construct
RFTISRHNSNNTLYLQMNSLRPEDTAVYYC

SEQ ID NO: 925 - protein, 30 aa, synthetic construct
SFTISVDTSKNQFSLKLSSVTAADTAMYYC

SEQ ID NO: 926 - protein, 30 aa, synthetic construct
RVTITADKSTSTVYMELSSLRSDDTAMYYC

SEQ ID NO: 927 - protein, 30 aa, synthetic construct
RFTISRDGSKNTLYLEMKSPRAEDTALYYC

SEQ ID NO: 928 - protein, 30 aa, synthetic construct
RVTITADKSTGTAYMELTSLRSEDTAVYYC

SEQ ID NO: 929 - protein, 30 aa, synthetic construct
RVTMTRNTSTSTAYVELNSLRSEDTAVYYC

SEQ ID NO: 930 - protein, 30 aa, synthetic construct
RVTMTRDTSINTAYMELRRLRSDDTAVYYC

SEQ ID NO: 931 - protein, 30 aa, synthetic construct
RVTMTSDTSTRTIYIELSSLKSEDTAVYYC

SEQ ID NO: 932 - protein, 30 aa, synthetic construct
RFTISRDNARNSLYLQMDSLRVEDTAIYYC

SEQ ID NO: 933 - protein, 30 aa, synthetic construct
RVKITRDESTSTAYMELSSLRFDDTAVYYC

SEQ ID NO: 934 - protein, 30 aa, synthetic construct
RFTLSRDVSKDTLFLQLNSLKAADTAIYYC

SEQ ID NO: 935 - protein, 30 aa, synthetic construct
RFTISRDNSKNTLYLQMNSLRAEDTAIYYC

SEQ ID NO: 936 - protein, 30 aa, synthetic construct
RVTIIADKSTSTAYMELSSLRSEDTAVYYC

SEQ ID NO: 937 - protein, 30 aa, synthetic construct
RFTISRDNAKNSMYLQMNSLRAEDTAIYYC

SEQ ID NO: 938 - protein, 30 aa, synthetic construct
RFTISRDNSKDTLYLEMNSLRDEDTAVYYC

SEQ ID NO: 939 - protein, 30 aa, synthetic construct
HVTMSIDKSITTAYLQWTSLKASDTAMYYC

SEQ ID NO: 940 - protein, 30 aa, synthetic construct
RFTISRDNAKNTVYLEMNSLRVEDAAIYYC

SEQ ID NO: 941 - protein, 30 aa, synthetic construct
HVSISADKSISTAYLQWSSLRASDTAMYYC

SEQ ID NO: 942 - protein, 30 aa, synthetic construct
RFTISRDDSKRIAYLQMNSLKTEDTAEYYC

SEQ ID NO: 943 - protein, 30 aa, synthetic construct
RITIIADKSTNTAYLELSSLRSEDTAVYYC

SEQ ID NO: 944 - protein, 30 aa, synthetic construct
RVTITADKSTTTLFMELSSLRSEDTAIYYC

SEQ ID NO: 945 - protein, 30 aa, synthetic construct
RVTMTRDTSISTAYMELSRLTSDDTAMYYC

SEQ ID NO: 946 - protein, 30 aa, synthetic construct
RVTMSVDKSKNQFSLKLTSVTAADTALYYC

SEQ ID NO: 947 - protein, 30 aa, synthetic construct
RVTMTTDTSTGTAYMELRSLRSDDTAVYYC

SEQ ID NO: 948 - protein, 30 aa, synthetic construct
RFTVSRDNFDNILYLQMNNLRPEDTAMYYC

SEQ ID NO: 949 - protein, 30 aa, synthetic construct
RFTISRDNSKNTLYVQLNSLRAEDTAVYYC

SEQ ID NO: 950 - protein, 30 aa, synthetic construct
RVTLTRDTSITTAYMELRRLRSDDTAVYYC

SEQ ID NO: 951 - protein, 30 aa, synthetic construct
RLSITKDTSKNQVVLRMTNMDPVDTATYYC

SEQ ID NO: 952 - protein, 30 aa, synthetic construct
RFTVSRDNAKNTLYLQMNSLRVEDTAVYYC

SEQ ID NO: 953 - protein, 30 aa, synthetic construct
QVTISADKFISTAYLQWSSLKASDTATYYC

SEQ ID NO: 954 - protein, 30 aa, synthetic construct
RFTVSRDNAKNTMYLQMNSLRVEDTAVYFC

SEQ ID NO: 955 - protein, 30 aa, synthetic construct
RVTITADKSTSTAYMELSSLISEDTAVYFC

SEQ ID NO: 956 - protein, 30 aa, synthetic construct
RVTITADKSTSTAYLELSSLKSEDTAIYFC

SEQ ID NO: 957 - protein, 30 aa, synthetic construct
RLAITKDTSKNQVVLRMTNMDPVDTATYYC

SEQ ID NO: 958 - protein, 30 aa, synthetic construct
RVTMTRDTSTSTIYLDLSSLRSEDTAMYYC

SEQ ID NO: 959 - protein, 30 aa, synthetic construct
HVTISADKSISTAYLQWSSLQASDTAIYYC

SEQ ID NO: 960 - protein, 30 aa, synthetic construct
RFTISRDNAKNSFYLQMNSLRPEDTALYYC

SEQ ID NO: 961 - protein, 30 aa, synthetic construct
RVTINADKSTSTAYMELSSLRFEDTAVYYC

SEQ ID NO: 962 - protein, 30 aa, synthetic construct
RLTISLDTSKNQFSLRLTSVTAADTAVYFC

SEQ ID NO: 963 - protein, 30 aa, synthetic construct
RFVFSFDTSLTTAYLQISSLRAEDTAVYFC

SEQ ID NO: 964 - protein, 30 aa, synthetic construct
RFTISRDNSKKTAFLQMNSVRPEDTAVYYC

SEQ ID NO: 965 - protein, 30 aa, synthetic construct
HMTISADKSISTAYLQWNSLKASDTAMYYC

SEQ ID NO: 966 - protein, 30 aa, synthetic construct
RVTISADKSTTTAYMELSSLTSEDTAVYYC

SEQ ID NO: 967 - protein, 30 aa, synthetic construct
RFTISRDNAKNSLYLHMRSLTPEDTALYYC

SEQ ID NO: 968 - protein, 30 aa, synthetic construct
RFTISRDDSKNTLHLQIHSLRLEDTATYYC

SEQ ID NO: 969 - protein, 30 aa, synthetic construct
RFTISRDNSKITLYLQMNSLRAEDTAMYYC

SEQ ID NO: 970 - protein, 30 aa, synthetic construct
RFTISRDNAKNLLYLQMNILRVEDTAVYYC

SEQ ID NO: 971 - protein, 30 aa, synthetic construct
QVTISVDKSISTAYLQWSSLKASDTAMYYC

SEQ ID NO: 972 - protein, 30 aa, synthetic construct
RLTITKDTSKNQVVLTMTDMDPVDTGTYYC

SEQ ID NO: 973 - protein, 30 aa, synthetic construct
RLTISKDTSKNQVVLSLTNMDPVDTATYYC

SEQ ID NO: 974 - protein, 30 aa, synthetic construct
RVSMTRDTSASTVYLELSSLRSEDTAIYYC

SEQ ID NO: 975 - protein, 30 aa, synthetic construct
RVTITADELTNTAYMELSSLRSEDTAVYYC

SEQ ID NO: 976 - protein, 30 aa, synthetic construct
RFTISRDNAKNSLYLQMNRLRAEDTALYYC

SEQ ID NO: 977 - protein, 30 aa, synthetic construct
RFTISRDNAKNSLYLEMHSLKPDDTALYYC

SEQ ID NO: 978 - protein, 30 aa, synthetic construct
RVTMSRDTSTSTVYMELTSLRSEDTAVYYC

SEQ ID NO: 979 - protein, 30 aa, synthetic construct
RVTITADKSTRTVYMELRSLRSDDTAVYYC

SEQ ID NO: 980 - protein, 30 aa, synthetic construct
QVTFSADKSISTAYLQWTSLKASDTAIYYC

SEQ ID NO: 981 - protein, 30 aa, synthetic construct
RFILSRDNDKNSLYLHMRGLRAEDTALYYC

SEQ ID NO: 982 - protein, 30 aa, synthetic construct
RVTITADKSTGTAYMELSSLRSEDTAVYYC

SEQ ID NO: 983 - protein, 30 aa, synthetic construct
RVTITADESTNTVFMELSSLRSEDSAVYYC

SEQ ID NO: 984 - protein, 30 aa, synthetic construct
RFTISRDNSKKTMYLQMNSLRADDTAVYYC

SEQ ID NO: 985 - protein, 30 aa, synthetic construct
RLSISIDTSKSHFSLKLRSVNAADTAIYYC

SEQ ID NO: 986 - protein, 30 aa, synthetic construct
RVTMTRDTSTSTVYMELSSLRSEDTAMYYC

SEQ ID NO: 987 - protein, 30 aa, synthetic construct
RVTITADKSTSTAYMEVTSLTSEDTAIYYC

SEQ ID NO: 988 - protein, 30 aa, synthetic construct
RVAISLDRSKKQFSLKLTSVTAADTAVYYC

SEQ ID NO: 989 - protein, 30 aa, synthetic construct
RIAMSVDTSKNQFSLKLRSVTVADTAVYYC

SEQ ID NO: 990 - protein, 30 aa, synthetic construct
RFSISRDDSKNTLDLQMNSLRAEDTAVYYC

SEQ ID NO: 991 - protein, 30 aa, synthetic construct
RFTVSRDNSKNMLYLQMNSLRAEDTAVYYC

SEQ ID NO: 992 - protein, 30 aa, synthetic construct
RFIISRDNAKNSLFLQMYSLRAEDTALYFC

SEQ ID NO: 993 - protein, 30 aa, synthetic construct
RVTMTTDTSTSTAYMELRSLRSDDTAVYYC

SEQ ID NO: 994 - protein, 30 aa, synthetic construct
RFTISRDNDKNSLYLHIRSLKAEDTALYYC

SEQ ID NO: 995 - protein, 30 aa, synthetic construct
RVTLTADKSTGTAYMELSSLRSEDTAVYYC

SEQ ID NO: 996 - protein, 30 aa, synthetic construct
RFIISRDNAKNSLYLQMNSLRVEDTALYYC

SEQ ID NO: 997 - protein, 30 aa, synthetic construct
RVSITADEPTSTVYLELSRLKSEDTAVYYC

SEQ ID NO: 998 - protein, 30 aa, synthetic construct
RVSITADEPTSTVYIELSRLKSEDTAVYYC

SEQ ID NO: 999 - protein, 30 aa, synthetic construct
RFTISRDDSKSIAYLQMNSLKTEDTAVYYC

SEQ ID NO: 1000 - protein, 30 aa, synthetic construct
RVTIVADESTGTAYMELSSLRFEDTAVYYC

SEQ ID NO: 1001 - protein, 30 aa, synthetic construct
RFVFSLDTSVSTAYLQINSLKAEDTAVYFC

SEQ ID NO: 1002 - protein, 30 aa, synthetic construct
RVIISVDRFKNQFSLKLSSVSAADTAVYYC

SEQ ID NO: 1003 - protein, 30 aa, synthetic construct
RLTISRDTSKSQVLLTMTNMGPADTATYYC

SEQ ID NO: 1004 - protein, 30 aa, synthetic construct
RVTINADKSTSTAYMELSSLRSEDTAVYYC

SEQ ID NO: 1005 - protein, 30 aa, synthetic construct
RVTMTSDTSISTAYMDLSRLTSDDTAIYYC

SEQ ID NO: 1006 - protein, 30 aa, synthetic construct
RVTITADESTSTAYMELSSLRSEDTAVYYC

SEQ ID NO: 1007 - protein, 30 aa, synthetic construct
RVTISIDTSKNQLSLKLSSVTAADTAVYYC

SEQ ID NO: 1008 - protein, 30 aa, synthetic construct
QVTISVDRSINTVYLQWSSLRASDSAMYYC

SEQ ID NO: 1009 - protein, 30 aa, synthetic construct
RVTISVDTSKNQFSLKLSSVTAADTAVYYC

SEQ ID NO: 1010 - protein, 30 aa, synthetic construct
QVTISADKSISTAYLQWSSLKASDTAMYYC

SEQ ID NO: 1011 - protein, 30 aa, synthetic construct
HVTFSSDKSISTAYLQWSSLKASDTAIYYC

SEQ ID NO: 1012 - protein, 30 aa, synthetic construct
RVTITADKSTSTVYMELSSLRSEDTAVYYC

SEQ ID NO: 1013 - protein, 30 aa, synthetic construct
RFTISRDDSKNTLFLQMKSLKTEDTAVYYC

SEQ ID NO: 1014 - protein, 30 aa, synthetic construct
RFTISRDNSKNKVFLQMGSLRAEDMAVYYC

SEQ ID NO: 1015 - protein, 30 aa, synthetic construct
RFTISRDDSKKMLYLQMNSLKTEDTAVYFC

SEQ ID NO: 1016 - protein, 30 aa, synthetic construct
RFTISRDNSKNTVYLQMNSLRSEDTAVYYC

SEQ ID NO: 1017 - protein, 30 aa, synthetic construct
RFTISRDNSKKTVYLQMNSVRPEDTAVYYC

SEQ ID NO: 1018 - protein, 30 aa, synthetic construct
RVTISADESTSTAYMELSSLRSEDTAVYYC

SEQ ID NO: 1019 - protein, 30 aa, synthetic construct
RVTMSVDASKNEFSLQLTSVTAADTAVYYC

SEQ ID NO: 1020 - protein, 30 aa, synthetic construct
RLTISVDTSKSHFSLKLTSVTAADTAVYYC

SEQ ID NO: 1021 - protein, 20 aa, synthetic construct
AKQSGPYCSGRSCYSGLFDY

SEQ ID NO: 1022 - protein, 16 aa, synthetic construct
ARDLNGDFFDFAIFDY

SEQ ID NO: 1023 - protein, 13 aa, synthetic construct
ARDYGDFVTWFDP

SEQ ID NO: 1024 - protein, 11 aa, synthetic construct
AREMGLFWFDP

SEQ ID NO: 1025 - protein, 15 aa, synthetic construct
STDDVLTGYDYAMDV

SEQ ID NO: 1026 - protein, 16 aa, synthetic construct
ARDRRSGGDDGGWFDP

SEQ ID NO: 1027 - protein, 20 aa, synthetic construct
AKQSGQYCSGGTCYEGSLDY

SEQ ID NO: 1028 - protein, 13 aa, synthetic construct
ARDYGGYVTYFDY

SEQ ID NO: 1029 - protein, 14 aa, synthetic construct
ARARLGESYWHFDL

SEQ ID NO: 1030 - protein, 16 aa, synthetic construct
ARQGNGYTYGNWYFDL

SEQ ID NO: 1031 - protein, 16 aa, synthetic construct
AKSLREFHSYYYGMDV

SEQ ID NO: 1032 - protein, 18 aa, synthetic construct
ATDQVGGFTMVQPEYFHH

SEQ ID NO: 1033 - protein, 20 aa, synthetic construct
AKGGAPYCGGSNCYLGYFDY

SEQ ID NO: 1034 - protein, 14 aa, synthetic construct
AREDYHDSSGSFDY

SEQ ID NO: 1035 - protein, 9 aa, synthetic construct
ARVAGMFDY

SEQ ID NO: 1036 - protein, 22 aa, synthetic construct
AKGFGGIGADRLTGSEEYYFDY

SEQ ID NO: 1037 - protein, 20 aa, synthetic construct
AKNQAPYCGGGNCLNGYFDY

SEQ ID NO: 1038 - protein, 18 aa, synthetic construct
ARVTHITMGLKMYWYLDL

SEQ ID NO: 1039 - protein, 9 aa, synthetic construct
ARARGILDF

SEQ ID NO: 1040 - protein, 13 aa, synthetic construct
ARQKKYSSSPFDP

SEQ ID NO: 1041 - protein, 9 aa, synthetic construct
ARTRGLIDF

SEQ ID NO: 1042 - protein, 16 aa, synthetic construct
AQRRGTMIVAEGSFDS

SEQ ID NO: 1043 - protein, 20 aa, synthetic construct
AKQSGQYCSGGSCYEGSLDY

SEQ ID NO: 1044 - protein, 13 aa, synthetic construct
AKLAGTPPDYFDY

SEQ ID NO: 1045 - protein, 20 aa, synthetic construct
AKQSGQYCSGGDCYVGSFDY

SEQ ID NO: 1046 - protein, 21 aa, synthetic construct
TRETTGFRYQSLNSYYNYMDV

SEQ ID NO: 1047 - protein, 14 aa, synthetic construct
VKDLGQQWYDAFDI

SEQ ID NO: 1048 - protein, 9 aa, synthetic construct
ARVSGFFDY

SEQ ID NO: 1049 - protein, 9 aa, synthetic construct
ARGLGLLDI

SEQ ID NO: 1050 - protein, 16 aa, synthetic construct
ARDDSSSYSLTSYFDY

SEQ ID NO: 1051 - protein, 15 aa, synthetic construct
VKDIGSWKYFDVFDV

SEQ ID NO: 1052 - protein, 15 aa, synthetic construct
ARDWSGKLPVSWFDP

SEQ ID NO: 1053 - protein, 13 aa, synthetic construct
ARDDGSPTTYFGL

SEQ ID NO: 1054 - protein, 14 aa, synthetic construct
AREDYYDSSGAFDM

SEQ ID NO: 1055 - protein, 17 aa, synthetic construct
AKDKSSNYGDYAGGMEV

SEQ ID NO: 1056 - protein, 18 aa, synthetic construct
AKQSCSGGSCYHEFYFES

SEQ ID NO: 1057 - protein, 11 aa, synthetic construct
VKRQSGTSFDY

SEQ ID NO: 1058 - protein, 15 aa, synthetic construct
ARDGPGDKMVTLFDY

SEQ ID NO: 1059 - protein, 16 aa, synthetic construct
ATDEVVTAIQPEYFHH

SEQ ID NO: 1060 - protein, 13 aa, synthetic construct
ARDYVTGRGMLPD

SEQ ID NO: 1061 - protein, 15 aa, synthetic construct
ARRSGYTSGSDWLDP

SEQ ID NO: 1062 - protein, 20 aa, synthetic construct
AKLGGLYCSGGNCFSGYFDY

SEQ ID NO: 1063 - protein, 9 aa, synthetic construct
ARAPGIIDC

SEQ ID NO: 1064 - protein, 9 aa, synthetic construct
ARGLGMYDV

SEQ ID NO: 1065 - protein, 21 aa, synthetic construct
ARADRSDYYDSTPYRVPYFDY

SEQ ID NO: 1066 - protein, 13 aa, synthetic construct
ARDMGAVVTHFDY

SEQ ID NO: 1067 - protein, 15 aa, synthetic construct
AKEGPGASGFNYFDS

SEQ ID NO: 1068 - protein, 18 aa, synthetic construct
ATDEVGGFTMVQPEYFHH

SEQ ID NO: 1069 - protein, 14 aa, synthetic construct
ARAVESYNLWAFDI

SEQ ID NO: 1070 - protein, 9 aa, synthetic construct
ARVAGLFDS

SEQ ID NO: 1071 - protein, 19 aa, synthetic construct
ARNMGLLEVAGIQEGWFDS

SEQ ID NO: 1072 - protein, 9 aa, synthetic construct
ARVAGMIDY

SEQ ID NO: 1073 - protein, 15 aa, synthetic construct
AKEGPGASGFNYFDY

SEQ ID NO: 1074 - protein, 15 aa, synthetic construct
ARGRGYGSGSDSFDD

SEQ ID NO: 1075 - protein, 18 aa, synthetic construct
ARDGGFHSGRLPVDAFDI

SEQ ID NO: 1076 - protein, 19 aa, synthetic construct
ARAPLEVGEYGDLMGWFDP

SEQ ID NO: 1077 - protein, 17 aa, synthetic construct
AREAGYSSSSSSWYFDL

SEQ ID NO: 1078 - protein, 19 aa, synthetic construct
ARADFSDSVVWAVSYFFDS

SEQ ID NO: 1079 - protein, 17 aa, synthetic construct
ARALGCSDDNCYGRRDY

SEQ ID NO: 1080 - protein, 18 aa, synthetic construct
AKDQEGGFTMVQPEYFHY

SEQ ID NO: 1081 - protein, 10 aa, synthetic construct
ARSPGGLFDF

SEQ ID NO: 1082 - protein, 16 aa, synthetic construct
VKDISADTSMVPVFAH

SEQ ID NO: 1083 - protein, 9 aa, synthetic construct
ARVSGFFDS

SEQ ID NO: 1084 - protein, 11 aa, synthetic construct
ARHGIPTIFDY

SEQ ID NO: 1085 - protein, 14 aa, synthetic construct
ARTRISPATDYFDK

SEQ ID NO: 1086 - protein, 11 aa, synthetic construct
VRDGLYVGVAD

SEQ ID NO: 1087 - protein, 18 aa, synthetic construct
VRDRSLYCSNGNCPHMDV

SEQ ID NO: 1088 - protein, 21 aa, synthetic construct
ARDTWEVPAADPPYYYYYMDV

SEQ ID NO: 1089 - protein, 19 aa, synthetic construct
ARHAPIHSALYEPNTYFDY

SEQ ID NO: 1090 - protein, 26 aa, synthetic construct
VKLYSGGRDYDFRSGSQNGNGNGMDV

SEQ ID NO: 1091 - protein, 13 aa, synthetic construct
STSRGGSTNWFFY

SEQ ID NO: 1092 - protein, 14 aa, synthetic construct
VKDLGTMIVDVLEM

SEQ ID NO: 1093 - protein, 11 aa, synthetic construct
ARETGAFWFDP

SEQ ID NO: 1094 - protein, 14 aa, synthetic construct
ASLLVRYRGYEIDY

SEQ ID NO: 1095 - protein, 15 aa, synthetic construct
VKDMGSSKYWDVFDV

SEQ ID NO: 1096 - protein, 13 aa, synthetic construct
AKGPRSNHDYFDD

SEQ ID NO: 1097 - protein, 14 aa, synthetic construct
ARDGDGGLVTFPDY

SEQ ID NO: 1098 - protein, 23 aa, synthetic construct
AHTPDGRYFDWLTPLFGNYYFDF

SEQ ID NO: 1099 - protein, 21 aa, synthetic construct
AKDSTPATYSNDWTNAEYFQH

SEQ ID NO: 1100 - protein, 14 aa, synthetic construct
ARGDFYSTRLAFDL

SEQ ID NO: 1101 - protein, 14 aa, synthetic construct
VRGTATGYYYYMDV

SEQ ID NO: 1102 - protein, 21 aa, synthetic construct
VRDPQDCGGSRCSNALGYFDY

SEQ ID NO: 1103 - protein, 16 aa, synthetic construct
AREPHCTGGVCDALDI

SEQ ID NO: 1104 - protein, 14 aa, synthetic construct
ARAEHSGFVVYFDL

SEQ ID NO: 1105 - protein, 11 aa, synthetic construct
ARHTVATIFDY

SEQ ID NO: 1106 - protein, 9 aa, synthetic construct
ARELGISDY

SEQ ID NO: 1107 - protein, 11 aa, synthetic construct
VRDWGEFFFDF

SEQ ID NO: 1108 - protein, 10 aa, synthetic construct
ARDRGGYPDY

SEQ ID NO: 1109 - protein, 21 aa, synthetic construct
AREMHYYDSSGYFKGNNYFDP

SEQ ID NO: 1110 - protein, 11 aa, synthetic construct
TRDRGPLLHDL

SEQ ID NO: 1111 - protein, 22 aa, synthetic construct
VRERISMDILSGNSPHYYGVDV

SEQ ID NO: 1112 - protein, 26 aa, synthetic construct
VKLYSGGRDYDFRSGSQNGGGDAMDV

SEQ ID NO: 1113 - protein, 25 aa, synthetic construct
AHMVGRSYYDVLTGFSSYYSYYMDV

SEQ ID NO: 1114 - protein, 16 aa, synthetic construct
AHRPRSQSGYDSSFDV

SEQ ID NO: 1115 - protein, 16 aa, synthetic construct
ARVEYSSGWSYWFFDL

SEQ ID NO: 1116 - protein, 22 aa, synthetic construct
ARGRSTMIQGDKKYYHYYYMDV

SEQ ID NO: 1117 - protein, 18 aa, synthetic construct
AIDRDYPGDYYYHYYTDV

SEQ ID NO: 1118 - protein, 11 aa, synthetic construct
ARDLGPYGFDI

SEQ ID NO: 1119 - protein, 19 aa, synthetic construct
ARVQYSSGRHQYSYYYMDV

SEQ ID NO: 1120 - protein, 11 aa, synthetic construct
ARDGVYYGMDI

SEQ ID NO: 1121 - protein, 12 aa, synthetic construct
ARDLEIAGALDI

SEQ ID NO: 1122 - protein, 12 aa, synthetic construct
ARARELVEVFDY

SEQ ID NO: 1123 - protein, 11 aa, synthetic construct
AREDNNNAFDI

SEQ ID NO: 1124 - protein, 14 aa, synthetic construct
ARGDFYSTRLAFDV

SEQ ID NO: 1125 - protein, 11 aa, synthetic construct
ARLKIAPIVDA

SEQ ID NO: 1126 - protein, 15 aa, synthetic construct
ARDGGYSGYFDAFDI

SEQ ID NO: 1127 - protein, 13 aa, synthetic construct
AREGGTTTEYFQH

SEQ ID NO: 1128 - protein, 21 aa, synthetic construct
ARDTWEVPVADPPYYYYYMDV

SEQ ID NO: 1129 - protein, 22 aa, synthetic construct
ARNSFGYYYDNSAYLPALDFDY

SEQ ID NO: 1130 - protein, 15 aa, synthetic construct
ARGGIVPDAKQYFDY

SEQ ID NO: 1131 - protein, 11 aa, synthetic construct
TRDRGPLLHDY

SEQ ID NO: 1132 - protein, 18 aa, synthetic construct
TKAQAPLDSGDYGGGFHI

SEQ ID NO: 1133 - protein, 13 aa, synthetic construct
ARGTTIFGGALDP

SEQ ID NO: 1134 - protein, 12 aa, synthetic construct
ARQGTTVGHFDY

SEQ ID NO: 1135 - protein, 20 aa, synthetic construct
ARGVSPNTVVGLGYYYYMDV

SEQ ID NO: 1136 - protein, 19 aa, synthetic construct
AREGTGYCDGGVCHDAFEI

SEQ ID NO: 1137 - protein, 11 aa, synthetic construct
ARDLVDYGMDV

SEQ ID NO: 1138 - protein, 14 aa, synthetic construct
ARDLGGSYSGTFDH

SEQ ID NO: 1139 - protein, 18 aa, synthetic construct
TRALFCGDDCYTNWYFDL

SEQ ID NO: 1140 - protein, 11 aa, synthetic construct
AKDSHDYAMDV

SEQ ID NO: 1141 - protein, 23 aa, synthetic construct
AHSTDRRNFEWLSLSGWGGNFEY

SEQ ID NO: 1142 - protein, 11 aa, synthetic construct
ARDRGPSLHDY

SEQ ID NO: 1143 - protein, 10 aa, synthetic construct
ARERTSGRLD

SEQ ID NO: 1144 - protein, 21 aa, synthetic construct
ARDSTPATYNNDWTYPEYFDL

SEQ ID NO: 1145 - protein, 21 aa, synthetic construct
ARDCTPATYNNDWTYAEYFDH

SEQ ID NO: 1146 - protein, 18 aa, synthetic construct
ARDAGVVDPLDPYPLPRF

SEQ ID NO: 1147 - protein, 22 aa, synthetic construct
ARGVQEERRGLVRKFYYYYMDV

SEQ ID NO: 1148 - protein, 22 aa, synthetic construct
ARVEVSGGFSGYDFLTPYYFDY

SEQ ID NO: 1149 - protein, 11 aa, synthetic construct
ARDYGDYYFDY

SEQ ID NO: 1150 - protein, 13 aa, synthetic construct
ARVLPLHGDFFDY

SEQ ID NO: 1151 - protein, 11 aa, synthetic construct
AHHQINTIFGV

SEQ ID NO: 1152 - protein, 23 aa, synthetic construct
AHTPDGRYFEWLTPLFGNYYFDY

SEQ ID NO: 1153 - protein, 11 aa, synthetic construct
ARGRPSGLYDY

SEQ ID NO: 1154 - protein, 15 aa, synthetic construct
ARDIAGIPATLGLDP

SEQ ID NO: 1155 - protein, 15 aa, synthetic construct
ARGRGYGSGSDSFDY

SEQ ID NO: 1156 - protein, 15 aa, synthetic construct
ARGPKERWFNNWFDP

SEQ ID NO: 1157 - protein, 13 aa, synthetic construct
AREGGSTTEYFPH

SEQ ID NO: 1158 - protein, 18 aa, synthetic construct
ARGQVPNDDYVMSGAFDI

SEQ ID NO: 1159 - protein, 12 aa, synthetic construct
ARDLMEAGGMDV

SEQ ID NO: 1160 - protein, 13 aa, synthetic construct
AREGGKTTEFFPL

SEQ ID NO: 1161 - protein, 11 aa, synthetic construct
AREMGIFWFDP

SEQ ID NO: 1162 - protein, 17 aa, synthetic construct
ARDVGYSGSGSTYYFDL

SEQ ID NO: 1163 - protein, 25 aa, synthetic construct
VKLRTVTAFDFWSGSRPSPKQDFDY

SEQ ID NO: 1164 - protein, 19 aa, synthetic construct
TRTGAIIAARPWYNYGMDV

SEQ ID NO: 1165 - protein, 14 aa, synthetic construct
ASQRQRGFYYYMDV

SEQ ID NO: 1166 - protein, 18 aa, synthetic construct
AKMTSSSPILYYYHGMDV

SEQ ID NO: 1167 - protein, 14 aa, synthetic construct
ARAEFSGYVLHFDL

SEQ ID NO: 1168 - protein, 18 aa, synthetic construct
AREIYGCTTCSHDIPRDS

SEQ ID NO: 1169 - protein, 17 aa, synthetic construct
ARDLESGSFHPGLVRVP

SEQ ID NO: 1170 - protein, 20 aa, synthetic construct
ARHVPEDVVVEPPAPWGLDY

SEQ ID NO: 1171 - protein, 15 aa, synthetic construct
ARDWRFLPGFDAFDI

SEQ ID NO: 1172 - protein, 22 aa, synthetic construct
AKFGGGPTNYDFRSASPYHFDS

SEQ ID NO: 1173 - protein, 16 aa, synthetic construct
ARDGQGYVPPRDNFDH

SEQ ID NO: 1174 - protein, 11 aa, synthetic construct
ARDIQRYGIDV

SEQ ID NO: 1175 - protein, 17 aa, synthetic construct
ARVVRYCSSTSCYTLDF

SEQ ID NO: 1176 - protein, 25 aa, synthetic construct
AKGPWCSTSNCYTSMVYPVADFFHH

SEQ ID NO: 1177 - protein, 13 aa, synthetic construct
ARRTSSSSEYFDS

SEQ ID NO: 1178 - protein, 13 aa, synthetic construct
VRPIYGGNPGMDV

SEQ ID NO: 1179 - protein, 16 aa, synthetic construct
ARFGYSLEATTDAFHY

SEQ ID NO: 1180 - protein, 11 aa, synthetic construct
ARDLVTYGMDV

SEQ ID NO: 1181 - protein, 17 aa, synthetic construct
ARETGYSSSGSVPYFHV

SEQ ID NO: 1182 - protein, 11 aa, synthetic construct
ARDLVVYGMDV

SEQ ID NO: 1183 - protein, 12 aa, synthetic construct
ARGGELTGLLRH

SEQ ID NO: 1184 - protein, 9 aa, synthetic construct
SAHGTDFDV

SEQ ID NO: 1185 - protein, 15 aa, synthetic construct
ARGGIVPDAKEPFHY

SEQ ID NO: 1186 - protein, 19 aa, synthetic construct
LTHPQPQYVRPTQVVWFDP

SEQ ID NO: 1187 - protein, 16 aa, synthetic construct
AAPHCNRTSCHDAFDL

SEQ ID NO: 1188 - protein, 13 aa, synthetic construct
ARGRNGWYLGADS

SEQ ID NO: 1189 - protein, 11 aa, synthetic construct
ARGYGDYYFDY

SEQ ID NO: 1190 - protein, 15 aa, synthetic construct
AKDLGLVVTTEVADF

SEQ ID NO: 1191 - protein, 17 aa, synthetic construct
ARESGYSGSGSVTYFHL

SEQ ID NO: 1192 - protein, 20 aa, synthetic construct
ARESHYGEDSEYYFQYYMDV

SEQ ID NO: 1193 - protein, 14 aa, synthetic construct
ARDLGGSYSGTFDF

SEQ ID NO: 1194 - protein, 15 aa, synthetic construct
ARGPHFDWVPHTFDY

SEQ ID NO: 1195 - protein, 21 aa, synthetic construct
ARECGGDCYFPEPLSHTAFDI

SEQ ID NO: 1196 - protein, 16 aa, synthetic construct
AREPHCTGGVCDAFDV

SEQ ID NO: 1197 - protein, 21 aa, synthetic construct
ARLSADDYIWGNYGGGDAFDI

SEQ ID NO: 1198 - protein, 20 aa, synthetic construct
CREIEGTYNYGSNYFYYIDV

SEQ ID NO: 1199 - protein, 17 aa, synthetic construct
ARDDRRLGDYYYYYMDV

SEQ ID NO: 1200 - protein, 11 aa, synthetic construct
ARDRGPLLHDY

SEQ ID NO: 1201 - protein, 13 aa, synthetic construct
AREGGTTTAYFPH

SEQ ID NO: 1202 - protein, 16 aa, synthetic construct
AREPGRDILTGDYWDS

SEQ ID NO: 1203 - protein, 23 aa, synthetic construct
ARRGSGYCSGGTCYQIPADAFAI

SEQ ID NO: 1204 - protein, 23 aa, synthetic construct
ARVFSFYDSRAFTIGGTAYYFDY

SEQ ID NO: 1205 - protein, 13 aa, synthetic construct
AKDGGYGDYEIES

SEQ ID NO: 1206 - protein, 16 aa, synthetic construct
ARFHDISTRYSDAFDI

SEQ ID NO: 1207 - protein, 7 aa, synthetic construct
ARGDLNI

SEQ ID NO: 1208 - protein, 16 aa, synthetic construct
AHGQYTSSWIHWYFDL

SEQ ID NO: 1209 - protein, 13 aa, synthetic construct
ARFDGGSYYDFDY

SEQ ID NO: 1210 - protein, 13 aa, synthetic construct
AREVSGSGWPFDS

SEQ ID NO: 1211 - protein, 16 aa, synthetic construct
ARVGEMSTAGNDAFDI

SEQ ID NO: 1212 - protein, 17 aa, synthetic construct
ARGSGYSGSGSNYYFDP

SEQ ID NO: 1213 - protein, 11 aa, synthetic construct
ARHSITTIFDY

SEQ ID NO: 1214 - protein, 13 aa, synthetic construct
AREGVTGTGYFDY

SEQ ID NO: 1215 - protein, 15 aa, synthetic construct
ARHLRVVPGYYLFDN

SEQ ID NO: 1216 - protein, 13 aa, synthetic construct
AREGCRSTTCYDY

SEQ ID NO: 1217 - protein, 17 aa, synthetic construct
ARDLGYSSGGANYYFDY

SEQ ID NO: 1218 - protein, 9 aa, synthetic construct
ARMPYGTDV

SEQ ID NO: 1219 - protein, 11 aa, synthetic construct
ARHSVPYYFDY

SEQ ID NO: 1220 - protein, 19 aa, synthetic construct
ARDEESLYEAVTGTGWFDP

SEQ ID NO: 1221 - protein, 15 aa, synthetic construct
AKDLINYDPWSGFFT

SEQ ID NO: 1222 - protein, 12 aa, synthetic construct
ARQGTTVGHFDN

SEQ ID NO: 1223 - protein, 17 aa, synthetic construct
ARDIGYSDYGATYWFDP

SEQ ID NO: 1224 - protein, 17 aa, synthetic construct
VKDRYNWKREYYYGMDV

SEQ ID NO: 1225 - protein, 22 aa, synthetic construct
GKDLDIVVAVVGTPYYYYGLDV

SEQ ID NO: 1226 - protein, 20 aa, synthetic construct
ARGDYYGSGSSYNPLPTFDY

SEQ ID NO: 1227 - protein, 18 aa, synthetic construct
ARGDILTGYPISKDALDL

SEQ ID NO: 1228 - protein, 12 aa, synthetic construct
ARMPTVYSGYDK

SEQ ID NO: 1229 - protein, 18 aa, synthetic construct
VRRPRVQGILVASDPFDI

SEQ ID NO: 1230 - protein, 24 aa, synthetic construct
TREISGGTKGMYSGSYFLFSGFDY

SEQ ID NO: 1231 - protein, 12 aa, synthetic construct
AHTTRYSNRFDP

SEQ ID NO: 1232 - protein, 10 aa, synthetic construct
ARCQVGMENN

SEQ ID NO: 1233 - protein, 14 aa, synthetic construct
ARTRIAAATDYFDY

SEQ ID NO: 1234 - protein, 14 aa, synthetic construct
ATDHVTSPLYGLDV

SEQ ID NO: 1235 - protein, 20 aa, synthetic construct
AKTLAPDRAHYDTANDAFDI

SEQ ID NO: 1236 - protein, 15 aa, synthetic construct
AKYRVAELTNDVFDV

SEQ ID NO: 1237 - protein, 16 aa, synthetic construct
ARDENGHEVMVTHFDY

SEQ ID NO: 1238 - protein, 14 aa, synthetic construct
ARSQVVPATSHLDY

SEQ ID NO: 1239 - protein, 14 aa, synthetic construct
ARAGYSSYYYYMDV

SEQ ID NO: 1240 - protein, 24 aa, synthetic construct
ASEDCSGGSCYFGVGSPYARGFET

SEQ ID NO: 1241 - protein, 12 aa, synthetic construct
ARRDSSWNDMDV

SEQ ID NO: 1242 - protein, 15 aa, synthetic construct
AKDEGSEGDQQPLDY

SEQ ID NO: 1243 - protein, 17 aa, synthetic construct
ARDVGYSGSGSSYYFDS

SEQ ID NO: 1244 - protein, 24 aa, synthetic construct
ALLNRGYRSSWFERGGYYYYGMDV

SEQ ID NO: 1245 - protein, 24 aa, synthetic construct
AKRGLGYCSAGTCFGEGEGGEFDY

SEQ ID NO: 1246 - protein, 15 aa, synthetic construct
ARGRGSGSGSDSFDS

SEQ ID NO: 1247 - protein, 18 aa, synthetic construct
ARDPGVVDPQYPHPLPRF

SEQ ID NO: 1248 - protein, 18 aa, synthetic construct
AREYCSGDSCRTVNWFDP

SEQ ID NO: 1249 - protein, 16 aa, synthetic construct
ARGLTYNGYDVEAFDI

SEQ ID NO: 1250 - protein, 17 aa, synthetic construct
ARLVRGGLSYGSDAFDL

SEQ ID NO: 1251 - protein, 15 aa, synthetic construct
LREYQLAPPYYFMDV

SEQ ID NO: 1252 - protein, 18 aa, synthetic construct
ARGDILTGYPTSKDAFDI

SEQ ID NO: 1253 - protein, 21 aa, synthetic construct
AKDILSERHYFDSSGSYGMDV

SEQ ID NO: 1254 - protein, 17 aa, synthetic construct
ARDIGYSGYQSAEYFDL

SEQ ID NO: 1255 - protein, 16 aa, synthetic construct
ARDFYGSGSPNDSHDY

SEQ ID NO: 1256 - protein, 17 aa, synthetic construct
ARGNCGPNCAYYHYMDV

SEQ ID NO: 1257 - protein, 15 aa, synthetic construct
AKDEGSEGDQLPLDY

SEQ ID NO: 1258 - protein, 17 aa, synthetic construct
ARDAGYSGSGSSYYFDY

SEQ ID NO: 1259 - protein, 21 aa, synthetic construct
AKDYYGSGSNSPRDHYYGMDV

SEQ ID NO: 1260 - protein, 15 aa, synthetic construct
GGSSDPPLRFWTLDN

SEQ ID NO: 1261 - protein, 15 aa, synthetic construct
TREGGVGVYRDWFDP

SEQ ID NO: 1262 - protein, 22 aa, synthetic construct
ARVGENLVSLGGGDFHYYGMDV

SEQ ID NO: 1263 - protein, 17 aa, synthetic construct
ARLVRSTRYYDVGGFDI

SEQ ID NO: 1264 - protein, 12 aa, synthetic construct
ARAGTMYGDFDY

SEQ ID NO: 1265 - protein, 19 aa, synthetic construct
ARNMGLLAVAGIQEGWFDT

SEQ ID NO: 1266 - protein, 17 aa, synthetic construct
ARDYSGVYPMKPIWFDP

SEQ ID NO: 1267 - protein, 14 aa, synthetic construct
ARGTQDGATIDLDY

SEQ ID NO: 1268 - protein, 18 aa, synthetic construct
ARPYYDILTGIRDDAFDI

SEQ ID NO: 1269 - protein, 6 aa, synthetic construct
ATADRG

SEQ ID NO: 1270 - protein, 19 aa, synthetic construct
ARENCFGTSCSTPWGAFDI

SEQ ID NO: 1271 - protein, 28 aa, synthetic construct
ARDSTIYSSGWWSVVGSSLVGPAYYFDY

SEQ ID NO: 1272 - protein, 10 aa, synthetic construct
ARGMLDTFDI

SEQ ID NO: 1273 - protein, 17 aa, synthetic construct
ARVFTEPITVAHDAFDI

SEQ ID NO: 1274 - protein, 18 aa, synthetic construct
AREGTYGYEWHFHYYMDV

SEQ ID NO: 1275 - protein, 20 aa, synthetic construct
VTERRVEVGATEVSYYYMDV

SEQ ID NO: 1276 - protein, 13 aa, synthetic construct
ARESMDQTAYFDY

SEQ ID NO: 1277 - protein, 20 aa, synthetic construct
ARGAYYGSGSYYNPLPTFDY

SEQ ID NO: 1278 - protein, 11 aa, synthetic construct
ARTMLDDAFDI

SEQ ID NO: 1279 - protein, 12 aa, synthetic construct
ARGENYGDYFDF

SEQ ID NO: 1280 - protein, 27 aa, synthetic construct
VGPGYCSSTSCYASHHDILTGYYLPDY

SEQ ID NO: 1281 - protein, 20 aa, synthetic construct
ARGDYYGSGKYFNPLPTFDY

SEQ ID NO: 1282 - protein, 15 aa, synthetic construct
AKDLITYDFWSGFFT

SEQ ID NO: 1283 - protein, 15 aa, synthetic construct
ASSYCSSTSCYAAKY

SEQ ID NO: 1284 - protein, 20 aa, synthetic construct
ARVGRYYYDTSGYYYTYFDY

SEQ ID NO: 1285 - protein, 11 aa, synthetic construct
WGQGALVTVSS

SEQ ID NO: 1286 - protein, 11 aa, synthetic construct
WGQGTLVTVSS

SEQ ID NO: 1287 - protein, 11 aa, synthetic construct
WGQGTTVTVSS

SEQ ID NO: 1288 - protein, 11 aa, synthetic construct
WGRGTLVTVSS

SEQ ID NO: 1289 - protein, 11 aa, synthetic construct
WGQGSLVTVSS

SEQ ID NO: 1290 - protein, 11 aa, synthetic construct
WGEGTTVTVSS

SEQ ID NO: 1291 - protein, 11 aa, synthetic construct
WGKGTTVTVSS

SEQ ID NO: 1292 - protein, 11 aa, synthetic construct
RGQGTLVTVSS

SEQ ID NO: 1293 - protein, 11 aa, synthetic construct
WGQGSMVTVSS

SEQ ID NO: 1294 - protein, 11 aa, synthetic construct
WGRGTTVTVSS

SEQ ID NO: 1295 - protein, 11 aa, synthetic construct
WGPGTTVTVSS

SEQ ID NO: 1296 - protein, 11 aa, synthetic construct
WGQGTQVTVSS

SEQ ID NO: 1297 - protein, 11 aa, synthetic construct
ISQGTLVTVSS

SEQ ID NO: 1298 - protein, 11 aa, synthetic construct
RGQGSLVTVSS

SEQ ID NO: 1299 - protein, 11 aa, synthetic construct
WGQGTMVTVSS

SEQ ID NO: 1300 - protein, 11 aa, synthetic construct
WGIGTTVTVSS

SEQ ID NO: 1301 - protein, 11 aa, synthetic construct
LGRGTLVTVSS

SEQ ID NO: 1302 - protein, 11 aa, synthetic construct
WGPGTLVTVSS

SEQ ID NO: 1303 - protein, 11 aa, synthetic construct
WGQGNLVTVSS

SEQ ID NO: 1304 - protein, 11 aa, synthetic construct
WGHGTTVTVSS

SEQ ID NO: 1305 - protein, 11 aa, synthetic construct
RGRGTLVTVSS

SEQ ID NO: 1306 - DNA, 381 bp, synthetic construct
  source 1..381: mol_type = other DNA
caggtccagctggtgcagtctgggggagccgtggtccagcctgggaggtccctgagactctcctgtgcagcctctggattcaccttccgaagttatggcatgcactgggtccgccaggctccaggcaaggggctggagtgggtggcagatatattatatgatggaagtaataaatactatgcagactccgtgaagggccgattcaccatctccagagacaattccaagaacacgctgtatctgcaaatgaacagcctgagagctgaggacacggctgtatattactgtgcgaaacagtccggcccttattgtagtggtcgtagctgctactcgggtctctttgactactggggccagggagccctggtcaccgtctcctca

SEQ ID NO: 1307 - DNA, 369 bp, synthetic construct
  source 1..369: mol_type = other DNA
caggtccagctggtgcagtctgggggaggcgtggtccagcctgggaggtccctgagactctcctgtgcagcctctggattcaccttcagcagttatgctatgcactgggtccgccaggccccaggcaaggggctggagtgggtggcagttatatcagatgatggaaacaataaagagtacccagactccgtgaagggccgcttcaccatctccagagacaattccaagaacacactatatctgcaagtgaacagcctgacagctgaggacacggctgtttattactgtgcgagagatcttaacggtgacttctttgacttcgcgatttttgactactggggccagggaaccctggtcaccgtctcctca

SEQ ID NO: 1308 - DNA, 360 bp, synthetic construct
  source 1..360: mol_type = other DNA
caggtccagctggtggagtctgggggaggcgtggtccagccagggaggtccctgagactctcctgtgcagcctctggattcaccttcactagttatggtttccactgggtccgccaggctccaggcaagggtctagagtgggtggcagttatatcaaatgatggaagttacaaagactacgtagactccgtgaagggccgattcaccatctccagagacaattccaagaacacggtgtatctccaaatgaacagcctgagagctgaggacacggctgtgtattactgtgcgagagactacggtgacttcgtcacctggttcgacccctggggccagggaaccctggtcaccgtctcctca

SEQ ID NO: 1309 - DNA, 354 bp, synthetic construct
  source 1..354: mol_type = other DNA
caggtgcagctggtgcagtctgggggaggcttggtccagcctggggggtccctgagactctcctgtgcagcctctggattcacctttactacctattggatgagctgggtccgccaggctccagggaaggggctggagtgggtggccagtataaagcaagatggaagtgaggcatattatgtggactctgtgaggggccgattcaccatctccagagacaacgccaggaactcactgcatctgcaaatgatcagcctgagagccgaggacacggctgtgtattattgtgcgagagaaatgggtttattctggttcgacccctggggccagggaaccctggtcaccgtctcctca

SEQ ID NO: 1310 - DNA, 372 bp, synthetic construct
  source 1..372: mol_type = other DNA
caggtgcagctggtgcagtctgggggaggcttggtaaagcctggggggtcccttagactctcctgtgcagcctctggattcagtttcagtgacgcctggatgagctgggtccgccaggctccagggaaggggctggagtgggttggccgtatcagcagcgaaactgatggtgggacaacagagtacgctgcacccgtgaaaggcagattcaccatctcaagagataattcaaaaggcacgctgtatctgcaaatgaacagcctgaaaaccgaggacacagccgtgtattactgttccactgacgatgttttgactggctatgactacgctatggacgtctggggccaagggaccacggtcaccgtctcctca

SEQ ID NO: 1311 - DNA, 369 bp, synthetic construct
  source 1..369: mol_type = other DNA
caggtgcagctgcagcagtctgggactgaggtgaagaagcctggggcctcagtgaaagtttcctgcaaggcatctggatacatcttcatcaactactatataagctgggtgcgacaggcccctggacaagggcttgagtggatgggaataatcagccctagaagtggtagcgcgagctacgcacagaagttccagggcagagtcaccatgagtagggacacgtccacgagtacagtctacatggaggtgaccagcctgcaatctgaggacacggccgtttattactgtgcgagagatcggcgatccggtggtgacgatgggggctggttcgacccctggggccagggaaccctggtcaccgtctcctca

SEQ ID NO: 1312 - DNA, 381 bp, synthetic construct
  source 1..381: mol_type = other DNA
gaggtgcagctggagcagtctgggggaggcgtagtccagcctgggaggtccctgagactctcctgtgcagcctctggattcactttcagaaggtatggcatgcactgggtccgccaggctccaggcaagggtctggagtgggtggcagttatatcatatgatggagaaaacaaagactatccggactccgtgaagggccgattcaccagctccagagacaattccaagaacacgctgtatctggaaatgaacagcctgagagctgaggacacggctgtctattactgtgcgaaacagtccggtcaatattgtagtggtggtacctgctacgaagggtcccttgactactggggccagggagccctggtcaccgtctcctca

SEQ ID NO: 1313 - DNA, 360 bp, synthetic construct
  source 1..360: mol_type = other DNA
caggtgcagctggtggagtctgggggaggcgtggtccagcctgggaggtccctgagactctcctgtgcagcctctggattcaccttcagtaattatgctatacattgggtccgccaggctccaggcaaggggctggagtgggtggcagttatattaaaagatggaagcgggaaattctacgcagactccgtgaagggccgattcaccatctccagagacaattccaagaacacggtgtttctgcaaacgaacagcctgagacctgaggacacggctatgtattactgtgcgagagactacggtggctacgtgacttactttgactactggggccagggaaccctggtcaccgtctcctca

SEQ ID NO: 1314 - DNA, 360 bp, synthetic construct
  source 1..360: mol_type = other DNA
caggtgcagctacagcagtggggcgcaggactgttgaagccttcggataccctgtcccgcacctgcgctgtctatggtgggtccttcagtggttactactggagttggatccgccagtccccagggaaggggctggagtggattggagaaatcaatcatagtggaagcaccaactacaacccgtccctcaagagtcgagtcatcatatcagtggacacgtccaagaagcagttctccctgaacctgacctctgtgaccgccgcggacacggctatatattactgtgcgagagcgcggttgggcgaaagttactggcacttcgatctctggggccgtggcaccctggtcaccgtctcctca

SEQ ID NO: 1315 - DNA, 366 bp, synthetic construct
  source 1..366: mol_type = other DNA
caggtccagctggtgcagtctgggggaggcttggtacagcctggggggtccctgagactctcctgtgcagcctctggattcaccttcagttcctacgacatgcactgggtccgccaaggtacagggaaccgtctggagtgggtctcaacaattggtactgctggcgacacatactatgcagactccgtgaagggccgattcaccatctccagagaaaatgccaagaactccttgtatcttcaaatgagcagcctgacagccggagacacggctgtctattactgtgcaagacaaggcaatggatacacctatggcaactggtacttcgatctctggggccgtggcaccctggtcaccgtctcctca

SEQ ID NO: 1316 - DNA, 369 bp, synthetic construct
  source 1..369: mol_type = other DNA
caggtgcagctggtgcagtctgggggaggcttggtacagcctggcaggtccctgagactctcttgtgcagcctctggattcacctttgaggattatgccatgcactgggtccgccaagttccagggaagggcctggagtgggtctcaggtatcagttacaatagtggtagcgtagactatgcggactctgtgaagggccgattcaccatctccagagacaacgccaagaactccctgtatctgcaaatgaacagtctgaaaaatgaggacacggccttgtattattgtgcaaaaagtcttagggagttccactcctactactacggcatggacgtctggggccaagggaccacggtcaccgtctcctca

SEQ ID NO: 1317 - DNA, 375 bp, synthetic construct
  source 1..375: mol_type = other DNA
caggtgcagctggtgcagtctgggggaggcttggtacagccgggggggtccctgagactctcctgtgcagtctctggactcccctttagtagcaatgccatgagctgggtccgccaggctccagggaaggggctggagtgggtctcaggtattagtggtagaggtgagaccacatactacgtagactccgtgaagggccggttcaccgtctccagagacaattcgaagaacacgctgtttttgcaaatggacagcctgagagccgaggacacggctgtatactactgtgcgacagatcaagtagggggatttactatggttcagccagagtacttccaccactggggccagggcaccctggtcaccgtctcctca

SEQ ID NO: 1318 - DNA, 381 bp, synthetic construct
  source 1..381: mol_type = other DNA
caggtccagctggagcagtctgggggaggcgtggtccagcctgggaggtccctgagactctcctgtgcagcctctggattcactttcaagaactatggcatgcactgggtccgccaggctccaggcaaggggctggagtgggtggcagttatattatatgaccgaagtggtaaacactacgcagactctgtgaagggccgattcaccatctccagagacaattccaagaacactctctatctgcaaatgaacagcctgagaactgaagacacggctgtgtactactgtgcgaaaggtggggccccatattgtggtggtagtaactgctacctgggctactttgactactggggccagggatccctggtcaccgtctcctca

SEQ ID NO: 1319 - DNA, 363 bp, synthetic construct
  source 1..363: mol_type = other DNA
caggtgcagctgcagcagtctgggggaggcgtggtccagcctgggaggtccctgagactctcctgtgcagcctctggattcaccttcaataaccatgctatgcactgggtccgccaggctccaggcaaggggctggagtgggtggcagttgtttcatatgatggaagtaacaaatactacgcaaactccgtgaagggccgattcaccatctccagagacaattccaagaaaatggtgtatttgcaaatgaacagcctgagacctgaggactcggctgtgttttactgtgcgagagaggattaccatgatagtagtggatcctttgactactggggccagggaaccctggtcaccgtctcctca

SEQ ID NO: 1320 - DNA, 348 bp, synthetic construct
  source 1..348: mol_type = other DNA
caggtgcagctgcaggagtcggggccaggactggtgaagccttcggggaccctgtccctcacctgcgctgtctctggtgccgccctcagcagtagtaactggtggagttgggtccgccagtccccagggaaggggctggagtggattggggaaatctttcatagtgggagcacctactacaatccgtccctcaagagtcgagtcaccatatcagtagacaagtcgaagagccaattctccctgaagctgacctctgtgaccgccgcggacacggccgtgtattactgtgcgagagtcgctgggatgtttgactactggggccagggaaccctggtcaccgtctcctca

SEQ ID NO: 1321 - DNA, 381 bp, synthetic construct
  source 1..381: mol_type = other DNA
caggtgcagctgcagcagtctgggggaggcgtggtccagcctgggaggtccctgagactctcctgtgaagcctctggattcaccttcaggacctatggcatgcattgggtccgccaggctccaggcaaggggctggagtgggtggcagttgtattatatgatggaagtaatgaagactacgcagattccgtgaagggccgattcaccatctccagagacaattccaagaacacgctgtatctgcagatgaacagcctgagacctgaggacacggctgtgtatttctgtgcgaagcagtccggtcaatattgtagtggtggtacttgctacgaagggtcccttgactactggggccagggagccctggtcaccgtctcctca

SEQ ID NO: 1322 - DNA, 402 bp, synthetic construct
  source 1..402: mol_type = other DNA
caggtgcagctggtgcagtctgggggaggcttggtacagcctggcaggtccctgagactctcctgtgaagcctctggattcacctttgatgattatgccatgcactgggtccggcaagctccagggaagggcctggagtgggtctcaggtattagttggaatggtggtgtattagactatgcggactctgtgaagggccgattcatcatctccagagacaatgtctccagagacaacgtcaagaactctctgtatctgcaaatgaacagtctgagagctgaggacacggccttatattactgtgcaaaaggttttggaggcataggagcagatcggcttacggggagtgaggagtactactttgactactggggccagggagccctggtcaccgtctcctca

SEQ ID NO: 1323 - DNA, 381 bp, synthetic construct
  source 1..381: mol_type = other DNA
caggtgcagctgcagcagtctgggggaggcgtggtccagcctgggaggtccctgagactctcctgtgcagcgtctggattcaccttcagtacctatggcatgcactgggtccgccaggctccaggcaaggggctggagtgggtggcagttatagcatttgatggaagtaagaaatattatggagactccgtgaagggccgattcaccatctccagagacagctccaagaacacgctgtatctgcaaatgaacagcctgagacctgaggacacggctgtctattactgtgcgaagaaccaagccccgtattgtggtggtgggaactgcctcaacggctactttgactactggggccagggaaccctggtcaccgtctcctca

SEQ ID NO: 1324 - DNA, 372 bp, synthetic construct
  source 1..372: mol_type = other DNA
caggtgcagctggtggagtctgggggaggcttggtacagcctggggggtccctgagactctcctgtgcagcctctggattcaccttcagtagctacgacatgcactgggtccgccaaggtataggaaaaggtctggagtgggtctcagttatcggtactggtggtgacacatactatccagactccgtgaagggccgcttcacaatctccagagacaatggcaagaactccttgtatcttcaaatgaacagcctgagagccggggacacggctgtgtattactgtgcaagagtcacgcatataacaatggggctgaagatgtactggtacctcgatctctggggccgtggcaccctggtcaccgtctcctca

SEQ ID NO: 1325 - DNA, 348 bp, synthetic construct
  source 1..348: mol_type = other DNA
gaggtgcagctgcagcagtcaggcccaggactggtgaagccttcggggaccctgtccctcacctgcgctgtgtctggtgcctccatcagcaatcatgactggtggacttgggtccgccagtccccagggaaggggctggaatggattggcgcaatatttcatagtgggaccaccaactacaacccgtccctcaggagtcgactcaccatatcagtagacaagtccaagagccacttctccctgaaactgacctctgtgaccgccgcggacacggccgtctattactgtgcgagagcccgaggaatccttgacttttggggccagggaaccctggtcaccgtctcctca

SEQ ID NO: 1326 - DNA, 360 bp, synthetic construct
  source 1..360: mol_type = other DNA
caggtgcagctgcaggagtccggagcagaggtgaaaaagcccggggagtctctgaggatctcctgtaagggttctggatacacttttaccaactactggatcagctgggtgcgccagatacccgggaaaggcctggagtggatggggaaaattgatcctagtgactcttataccgactacaacccgtccttcgaaggccacgtcaccatctcagctgacaagtcctccagcactgcctacctgcagaggaccaacctggaggcctcggacagcgccatttattactgtgcgagacagaagaaatatagcagtagtccgttcgacccctggggccaaggaaccctggtcaccgtctcctca

SEQ ID NO: 1327 - DNA, 348 bp, synthetic construct
  source 1..348: mol_type = other DNA
caggtgcagctgcagcagtcgggcccaagactggtgaagccttcggggaccctgtccctcacctgcgctgtctctggtggctccatcaccggtagtgactggtggacttgggtccgccagtccccagggaagggactggagtggattggggaaatctttcatagtgggagcgccgtctacaacccgtccctcgagagtcgagtcagcttttcagtagacaagtccaaaaaccacttctccctgaacctgaggtctgtgaccgccgcggacacggccgtgtattactgtgcccgtacacggggccttattgacttctggggccagggaaccctggtcaccgtctcctca

SEQ ID NO: 1328 - DNA, 372 bp, synthetic construct
  source 1..372: mol_type = other DNA
caggtcccgctggtgcagtctggtcctacgctggtgaaacccacacagaccctcacgctgacctgcaccttctctgggttctcactcagcactagtggagtgggtgtgggctggatccgtcagcccccaggaaaggccctggagtggcttgcactcatttattgggatgatgatgagcgctacaacccatctctgaagagcaggctcaccatcaccaaggacacctccaaaagccaggtggtccttacaatgaccaacatgggccctgtggacacaggcacatattactgtgcacagagacgggggactatgatagtggcggagggctcctttgactcctggggccagggaaccctggtcaccgtctcctca

SEQ ID NO: 1329 - DNA, 381 bp, synthetic construct
  source 1..381: mol_type = other DNA
aggtgcacgctggtgcagtctgggggaggcgtggtccagcctgggaggtccctgagactctcctgtgcagcctctggattcaccttcaggcactacggcatgcactgggtccgccaggcaccaggcaaggggctggagtgggtggcagttatattatatgatggaagtaataaagactacgcagactccgtgaagggccgattcaccatctccagagacaactccaagaacaccctgtatctgcaaatgaacagcctgagagcagaggacacggctgtgtattactgtgcgaaacagtccggtcaatattgtagtggtggtagttgctacgaagggtccttagactactggggccagggaaccctggtcaccgtctcctca

SEQ ID NO: 1330 - DNA, 360 bp, synthetic construct
  source 1..360: mol_type = other DNA
caggtgcagctggtggagtctgggggaggcttgatacagccgggggggtccctgagactctcctgtgcagcctctggatttccctttagcacctatgacatgggctgggtccgccaggctccagggaaggggctggagtgggtctcaggaattagtgatagtggtggtagcccatactacgcagtctccgtgaggggccgattcaccatctccagagacaattccaacaacattctacatctgcaaatgaacagcctgagagccgaggacacggccgtttattactgtgcgaaactagctggtacaccccccgactactttgactactggggccagggaaccctggtcaccgtctcctca

SEQ ID NO: 1331 - DNA, 381 bp, synthetic construct
  source 1..381: mol_type = other DNA
caggtgcagctggtgcagtctgggggaggcgtggtccagcctgggaggtccctgagactctcctgtgcagcctctggattcaccttcagacactatggcatgcactgggtccgccaggctccaggcaaggggctggagtgggtggcagttatatcatatgatggagattataaatattatgcagactccgtgaagggccgattcaccatctccagagacaattccaggagtacactgtttctgcaaatgaacaccttgagagctgaagacacggctatgtatttctgtgcgaaacagtccggtcaatattgtagtggtggagactgctacgtagggtcctttgactactggggccagggaaccctggtcaccgtctcctca

SEQ ID NO: 1332 - DNA, 384 bp, synthetic construct
  source 1..384: mol_type = other DNA
caggtgcagctggtggagtctgggggaggcgtggtacagcctggggggtccctgagactctcctgtgcagcctctggattcacctttgatgattatggcatgcagtgggtccgacaaactccagggaaggatctggagtgggtcgctcttattagtggggatggtggtggcaccttctatgcagactctgtgaagggccgattcaccatctccagagacaacagcaaaaattccctgtatctgcaaatgaatagtctgagacctgaggacaccgccttatattactgcacgagagaaacaactggattcagatatcaatcccttaattcctactacaactacatggacgtctggggcgaagggaccacggtcaccgtctcctca

SEQ ID NO: 1333 - DNA, 363 bp, synthetic construct
  source 1..363: mol_type = other DNA
caggtgcagctggtgcagtctgggggaggcttggtccagcctggggggtccctgagactctcctgttcagcctctggattcaccttcaggaactatgctatgcactgggtccgccaggctccagggaagggactggagtatgtttcaggtgttagtcgtaatggggatatcgcagactacacagactcagtgaagggcagattcaccatctccagagacaattccaagaatacgctgtatcttcaaatgcgcagtctgggaagtgaggacacggctctgtattactgtgtgaaagatcttggccagcagtggtatgatgcttttgatatctggggccaagggaccacggtcaccgtctcctca

SEQ ID NO: 1334 - DNA, 348 bp, synthetic construct
  source 1..348: mol_type = other DNA
caggtgcagctgcaggagtcgggcccaagactggtgaacccttcggggaccctgtccctcacctgcgctgtctctgggggctccatcagcggtattagctggtggagttgggtccgccagccccccgggaaggggctggagtggattggggagatatttcatagtgggagcgcccactacaacccgtccctcaagagtcgagtcaccatatcagtagacaactccaagaaccagttctccctgaagctgacctctgtgaccgccgcggacacggccatatattactgtgcaagagtcagcgggttttttgactactggggccagggaaccctggtcaccgtctcctca

SEQ ID NO: 1335 - DNA, 345 bp, synthetic construct
  source 1..345: mol_type = other DNA
caggtgcagctacagcagtggggcgcaggactgttgaagccttcggagaccctgtccctcacctgcgctgtctctggtgggtccctcagtggttactactgcaactggatccgccagcccccagggaaggggctggagtggattggggaaatcaatcacagtggaaacacctactacaacccgtccctcaagagtcgagtcaccatatcagtagacacgtccaaagaccagttctccctgaagctgaactctgtgaccgccgcggacacggctgtatattattgtgcgagaggcttgggactcctagatatctggggccaagggaccacggtcaccgtctcctca

SEQ ID NO: 1336 - DNA, 369 bp, synthetic construct
  source 1..369: mol_type = other DNA
caggtccagctggtgcagtctggggctgaggtgaagaagcctggggcctcagtgaaggtttcctgcaaggcttctggatacaccttcactagctatactattcattgggtgcgccaggcccccggacaaaggcttgagtggatggcatggatcgacgctggcaatggtgacacacaatattcacagaactttcagggcagagtcaccattaccagtgacccatccgcgagcacagcctacatggagctgagcggcctgagatctgaagacacggctgtctattactgtgcgagagacgatagcagcagctattccctaacctcttactttgactactggggccagggaaccctggtcaccgtctcctca

SEQ ID NO: 1337 - DNA, 366 bp, synthetic construct
  source 1..366: mol_type = other DNA
caggtgcagctggtgcagtctgggggaggcttggtccagcctggggggtccctgagcctctcctgtttagtctctggattcatcttcagtgactattctatgcactgggtccgccaggctccagggaagggactggattatgtttcaggtattagtagtactggggatatcacagactacgcagactcagtgaaggacagattcaccatctccagagacaattccaagaacacgctgtatcttcaaatgagcagtctgagagttgaggacacggctgtgtattattgtgtgaaagatattgggagctggaagtattttgatgtttttgatgtctggggccaagggaccacggtcaccgtctcctca

SEQ ID NO: 1338 - DNA, 366 bp, synthetic construct
  source 1..366: mol_type = other DNA
caggtgcagctggtggagtctgggggaggcgtggtccagcctgggaggtccctgagactctcctgtgcagcctctggattcaccttcagtacctattctatgcactgggtccgccaggctccaggcaaggggctggagtgggtggcagttattttatatgatggaacctataaagactacgcagactccgtgaagggccgattcaccatctccagagacaattccaagaacacgctgtatctgcaaatgaacagcctgagacctgaggacacggctgtctatttctgtgccagagattggagtggcaaacttcctgtatcctggttcgacccctggggccagggaaccctggtcaccgtctcctca

SEQ ID NO: 1339 - DNA, 360 bp, synthetic construct
  source 1..360: mol_type = other DNA
caggtgcagctgcagcagtctgggggaggcgtggtccagcctgggaggtccctgagactctcctgtgcagcgtctggattctccttcattagttatggcatgcactgggtccgccaggctccaggcaaggggctggagtgggtggcagttatttcggatgatgggtcttttaaatactctgcagactccgtgaagggccggttcaccatctccagagacaattccaagaagacactgtttctgcaaatgaacagcctgagagccgaggacacggctgtgtattactgtgcgagagatgacggatcacccaccacttactttggcctctggggccagggaaccctggtcaccgtctcctca

SEQ ID NO: 1340 - DNA, 363 bp, synthetic construct
  source 1..363: mol_type = other DNA
caggtccagctggtgcagtctgggggaggcgtggtccagcctgggaggtccctgagactctcctgtgcagcctctggattcaccttcagtgaccatgctatgcactgggtccgccaggctccaggcaagggactggagtgggtggcagtcatgtcatatgatggaagtaatgaatactacgcagattccgtgaagggccgagccaccatctccagagacaattccaagaacaccctgtatctgcaaatgaacagcctgagagctgaggacacggctatatattattgtgcgagagaggattactatgatagtagtggtgcttttgatatgtggggccaagggaccacggtcaccgtctcctca

SEQ ID NO: 1341 - DNA, 372 bp, synthetic construct
  source 1..372: mol_type = other DNA
caggtccagctggtgcagtctgggggaggcttggtacagcctggcaggtccctgagactctcctgtgcagcctctggattcacctttgatgattatgccatgcactgggtccggcaaactccagggaagggcctggagtgggtctcagccattagttggaatagtgctagtataggctatgcggactctgtgaagggccgattcaccatctccagagacaacgccaagaactccctgtatctccaaatgaacagtctgagagttgaggacacggccttgtattactgtgcaaaagataaatcgtcaaactacggtgactacgcagggggtatggaggtctggggccaagggaccacggtcaccgtctcctca

SEQ ID NO: 1342 - DNA, 375 bp, synthetic construct
  source 1..375: mol_type = other DNA
caggtgcagctggtgcagtctgggggagccgtggtccagcctgggaggtccctgagactctcctgtgcagcctctggattcacctttaatagctatggcatgcactgggtccgccaggctccgggcaaggggctggagtgggtggcagttataatacatgatggaagtaataaataccatgcagactccgtgaagggccgattcaccatctccagagacaattccaagaacacgttgtatctgcaaatgaacaacctgagagctgaggacacggctgtgtattactgtgcgaaacaatcatgcagtggtggtagctgttaccacgaattttactttgagtcatggggccagggaaccctggtcaccgtctcctca

SEQ ID NO: 1343 - DNA, 354 bp, synthetic construct
  source 1..354: mol_type = other DNA
caggtccagctggtgcagtctcgagcagaggtgaaaaagcccggggactctctgcagatctcctgtcagacatctggatacagttttaagtacttctggatcggctgggtgcgccagatgcccgggaaaggcctggagtgggtggccaccatctatcctggtgactctgataccagatacagtctgtccttccaaggccaggtcaccatctcagccgacaggtccaccgataccgcctacctacagtggaacagcctcaaggcctcggacaccgccatctactattgtgtgaagcgccaaagtggaacttcgtttgactactggggccaggggaccacggtcaccgtctcctca

SEQ ID NO: 1344 - DNA, 366 bp, synthetic construct
  source 1..366: mol_type = other DNA
caggtgcagctgcagcagtctgggggcggcgtggtccagcctgggaggtccctgagactctcctgtgaagcgtctggattcaccttcagtaattatggcatgcactgggtccgccaggctccaggcaaggggctggagtgggtggcagttatatgggatgatggaagtggtaaacactatgcagactccgtgaagggccgattcaccatctccagagacaactccaagaacacactttatctgcaaatgaacagcctgagagccgaggacacggctgtgtattactgtgcgagagatggccccggggacaagatggttaccctctttgactactggggccagggaaccctggtcaccgtctcctca

SEQ ID NO: 1345 - DNA, 369 bp, synthetic construct
  source 1..369: mol_type = other DNA
caggtgcagctggtgcagtctgggggaggcttggtacagccgggggggtccctgagactctcctgtgcagcctctggattcagctttagcaattacgccatgagctgggtccgccaggctccagggaaggggctggagtgggtctccggtattggtggtcgtggtaaaaacacatactacgcagactccgtgaagggccggttcaccatctccagagacaattccaagaacacgctgtttctgcaaatgaacagcctgagagccgaggacacggccctatattactgtgcgacagatgaggtggtgactgctatccaacctgaatatttccaccactggggccagggcaccctggtcaccgtctcctca

SEQ ID NO: 1346 - DNA, 366 bp, synthetic construct
  source 1..366: mol_type = other DNA
caggtccagctggtgcagtctgggggcggcgtggtccagcctgggaggtccctgagactctcctgtgaagcgtctggattcaccttcagtaattatggcatgcactgggtccgccaggctccaggcaaggggctggagtgggtggcagttatatgggatgatggaagtggtaaacactatgcagactccgtgaagggccgattcaccatctccagagacaactccaagaacacactttatctgcaaatgaacagcctgagagccgaggacacggctgtgtattactgtgcgagagatggccccggggacaagatggttaccctctttgactactggggccagggaaccctggtcaccgtctcctca

SEQ ID NO: 1347 - DNA, 363 bp, synthetic construct
  source 1..363: mol_type = other DNA
caggtgcagctgcaggagtcgggcccaggactggtgaagccctcacagaccctgtccctcacctgcactgtctctggtggctccatcagcactaatggttactactggagctggatccgccagcacccagggaagggcctggagtggattgggtacatctattacagtgggagcgcctactacaacccgtccctcaagagtcgagtgaccatgtcagtagacacgtctaagaaccagttctccctgaagctgagctctgtgactgtcgcggacacggccgtgtactactgtgcgagagactacgttacggggcggggaatgctccccgactggggccagggaaccctggtcaccgtctcctca

SEQ ID NO: 1348 - DNA, 366 bp, synthetic construct
  source 1..366: mol_type = other DNA
caggtgcagctggtgcagtctgggtctgagtcgaaaaagcctggggcctcagtgagggtttcctgcaaggcttctggatacaccttcactagcaatgctatcaattgggtgcgacaggcccctggacaagggcttgagtggatgggatggatcaacaccaacaccgggaacccaacgtatgcccagggcttcacaggacggtttgtcttctccttggacaccgctgtcagcacggcctatctgcacatcaacaatctaaagcctgaggacactgccgttttctactgtgcgaggagatccgggtatacaagtggctcagactggctcgacccctggggccagggaaccctggtcaccgtctcctca

SEQ ID NO: 1349 - DNA, 381 bp, synthetic construct
  source 1..381: mol_type = other DNA
caggtgcagctggtgcagtctgggggaggcgtgggccagcctgggaggtccctgagactctcctgtgcagcctctggattcaccttcggtcactatggcatgcactgggtccgccaggctccaggcaaggggctggagtgggtggcagcaataatatatgatggcagtgacaaacaatatgcagactccgtgaagggccgattcaccatctccagagacaattccaagaacacagtgtatttgcaaatgaacagcctgagacctgaggacacggctatatatttttgtgcgaaactggggggcttgtattgtagtggtggcaactgcttctccggctactttgactactggggccagggaaccctggtcaccgtctcctca

SEQ ID NO: 1350 - DNA, 351 bp, synthetic construct
  source 1..351: mol_type = other DNA
caggtgcagctgcaggagtccggcccaggactggtgaagccttcggagaccctgtccctcacctgcactgtgtctagtggctctatcagtcgcagtggtcactattggggctggatccgccagcccccagggaaggggctggagtggattgggagtatctataatagtggggccacctacttcaacccgtccctcaagagtcgagtcaccatatccgttgacacgtccaagaaccagttctccctgaggctgagctctgtgaccgccgcagacacggctgtctattactgtgcaagagccccgggcattattgactgctggggccagggaaccctggtcaccgtctcttca

SEQ ID NO: 1351 - DNA, 345 bp, synthetic construct
  source 1..345: mol_type = other DNA
caggtgcagctgcagcagtggggcgcaggactgttgaagccttcggagaccctttccctcacctgcgctgtctatggtgggtccctcagtggttactactggagctggatccgccagcccccagggaaggggctggagtggattggggaaatcagtcatagtggaggcacctactacaacccgtccctcaagagtcgagtcaccatattagtagacacgtccaagaaccagttctccctgaagctgacctctgtgaccgccgcggacacggctgtgtattactgtgcgagaggccttggaatgtacgacgtctggggccaagggaccacggtcaccgtctcctca

SEQ ID NO: 1352 - DNA, 384 bp, synthetic construct
  source 1..384: mol_type = other DNA
caggtgcagctgcagcagtcgggcccaggactggtgaagccttcggggaccctgtccctcacctgcgctgtctctggtggctccatcagcagttttaactggtggacttgggtccgccagtccccaggaaaggggctggaatggattggagaaatcaatcatagtgacaccaccaactacaacccgtccctcaagagtcgagtctccatttcagtggacaagtccaaaaaccagttctccctgaagttgagttctgtgaccgccgcggacacggccgtgtattactgtgcgagagctgatcgtagcgattactatgatagtactccttatcgagtcccctactttgactattggggccggggaaccctggtcaccgtctcctca

SEQ ID NO: 1353 - DNA, 360 bp, synthetic construct
  source 1..360: mol_type = other DNA
caggtgcagctggtgcagtctgggggaggcgtggtccagcctgggaggtccctgagactctcctgtgtagcctctggattcagcttcagtagttatgctatgcactgggtccgccaggctccaggcaaggggctagaatgggtggcagttatattagatgatggaaataataaattgtacgcagactccgtgaagggccgattcaccatctccagagacaattccaagaacacgctgtatctgcaagtgaacagcctgagaactgaggacacggctgtgtattactgtgcgagagatatgggtgcggtggtaactcattttgactactggggccagggaaccctggtcaccgtctcctca

SEQ ID NO: 1354 - DNA, 366 bp, synthetic construct
  source 1..366: mol_type = other DNA
caggtgcagctgcagcagtctgggggaggcgtggtccagcctgggaggtccctgagactctcctgtgcagcctctggaatcaccttcagcacatttggaatgcactgggtccgccaggctccaggcaaggggctggagtgggtggcagttatatcaaatgatggaggtagcaaacactacaaagactccgtgaagggccgattcaccatctccagagacaatgccaagaacacactgtatctgcaaatgaacagcctgagagctgaggacacggctgtgtattactgtgcgaaagaggggcccggggcttcgggatttaactactttgactcctggggccagggaaccctggtcaccgtctcctca

SEQ ID NO: 1355 - DNA, 375 bp, synthetic construct
  source 1..375: mol_type = other DNA
caggtgcagctggtgcagtctgggggaggcttggtacagcctggggggcccctgagactctcctgtgcagcctctggattcacctttagtagcaatgccatgagctgggtccgccaggctccagggaaggggctggagtgggtctcaggtattagtggtagaggtgataccacatactacgcagactccgtgaagggccggttcaccatctccagagacaattccaggaacacgctgtctctgcagatgaacagcctgagagccgaggacacggctatatattactgtgcgacagatgaagtagggggatttacaatggttcagccagaatacttccaccactggggccagggcaccctggtcaccgtctcctca

SEQ ID NO: 1356 - DNA, 360 bp, synthetic construct
  source 1..360: mol_type = other DNA
caggtccagctggtgcagtctgggggaggcttggtacagcctggggggtccctgagactctcctgtgcagcctctggattcaccttcagtacctacgacatgcactgggtccgccaaactacaggaaaaagtctggagtgggtctcagctattggtactgctggtgacagatactatgcagactccgtgaagggccgattcaccatctccagagaaaatgccaagaactccttgtatcttcaaatgaacaacctgagagccggggacacggctgtgtatcactgtgcaagagcggtcgagtcttataatttgtgggcttttgatatctggggccaagggaccacggtcaccgtctcctca

SEQ ID NO: 1357 - DNA, 348 bp, synthetic construct
  source 1..348: mol_type = other DNA
caggtgcagctgcaggagtcgggcccaggactggtgaagccttcggggaccctgtccctcacctgcgctgtctctggtgcccccatcagcagtagtaattggtggagttgggtccgccagcccccagggaagggcctggagtggattggggaaatctatcatactgggagcaccgcctacaacccgtccctcgagagtcgactgaccatatcactagacaagtccaacaagcaattctccctgatgctgagctctgtgaccgccgcggacacggccgtgtattactgtgcgagagtagctggcctctttgactcctggggtcagggaaccctggtcaccgtctcctca

SEQ ID NO: 1358 - DNA, 381 bp, synthetic construct
  source 1..381: mol_type = other DNA
caggtgcagctggtggagtctggtcctgtgctggtgaaacccacagagaccctcacgctgacctgcgccgtctctgggttctcactcagtagtcctagaatgggtgtgagttggatccgtcagcccccagggaaggccctggagtggcttgcacacattttttcgaatgacgaagaattgttcagtacatctctgaagagcaggctcaccatctccaaggacacctccaaaagccaggtggtccttaccatgaccaacatgggccctgtggacacagccacatattactgtgcacggaatatgggtcttctggaagtggctggaattcaagaaggttggttcgactcctggggccagggaaccctggtcaccgtctcctca

SEQ ID NO: 1359 - DNA, 348 bp, synthetic construct
  source 1..348: mol_type = other DNA
caggtgcagctgcagcagtcgggcccaggactggtgaagccttcggggaccctgtccctcacctgcgctgtgtctggtggttccatcactaatagtgcctggtggagttgggtccgccagtccccagaaaaggggctggagtggattggtgaaatctctcatagtgggagcaccaactacaacccgtccctcaagagtcgagtcaccatgtcagtagacaagtccaagaaccagttctccctcaagttgaggtctgtgaccgccgcggacacggccgtgtattactgtgcgcgagttgcggggatgattgactactggggccagggaaccctggtcaccgtctcctca

SEQ ID NO: 1360 - DNA, 366 bp, synthetic construct
  source 1..366: mol_type = other DNA
ccaggtgcagctggtgcagtctgggggaggcgtggtccagctgggaggtccctgagactctcctgtgcagcctctaaattcaccttcagtaggtttgccatgcactgggtccgccaggctccaggcaagggcctggagtgggtggcaggtatctcatatgatggagaaaatagatactatgcagactccgtgaggggccgattcaccatctccagagacaattccaagaacacgctgtacatgcaaatgaacagcctgagagctgaggacacggctgtctattactgtgcgaaagaggggcccggggcttcgggctttaactactttgactactggggccagggaaccctggtcaccgtctcctca

SEQ ID NO: 1361 - DNA, 363 bp, synthetic construct
  source 1..363: mol_type = other DNA
caggtgcagctgcagcaacggggcgcgggactgttgaagccctcggagaccctgtccctcacctgcgctgtctctggtgatttcttaagaggttcttactgggcctggatccgccagccccccgggaaggggctggagtggattggagaaatcagtcagagtggtggagtcaattccaacccgtccctcaagagtcgactctccatatcaatagacacgtccaagagtcacttctccctgaagttgaagtctgtgaccgccgcggacacggctatctattactgtgcgagaggccgcggttacggatcagggagtgactcctttgacgactggggccagggagccctggtcaccgtctcctca

SEQ ID NO: 1362 - DNA, 375 bp, synthetic construct
  source 1..375: mol_type = other DNA
caggtgcagctggtgcagtctgggggaggcgtggtccagcctgggaggtccctgagactctcctgtgcagcctctggattcagcttcagtacctatgttatgcactgggtccgccaggctccaggcaaggggctggagtgggtggcagttatctcatctgatggaaccgctaaattccacgcagactccgtgaagggccgattcaccatctccagagacaattccaagaacacgctctatctagaaatgaacagcctgagagctgaggacacggctgtgttttactgtgcgagagatggaggtttccactctgggaggctccctgtcgatgcttttgatatctggggccaagggaccacggtcaccgtctcctca

SEQ ID NO: 1363 - DNA, 378 bp, synthetic construct
  source 1..378: mol_type = other DNA
caggtccagcttgtacagtctggggctgaggtgaagaagcctgggtcctcggtgaaggtctcctgcaaggcttctggaggcaccttcagcacctatgctttcaactgggtgcgacaggcccctggacaagggcttgactggatgggaaggatcatccctgtcgtgaatatagtaaactacgcacagaagttccagggcagagtcacgattaccgcggacaaatccacgagcactgcctacatggagctgagcagcctgagatctgacgacacggccgtttattactgtgcgagagcgcccctggaagtcggtgaatatggtgacttaatgggctggttcgacccctggggccagggaaccctggtcaccgtctcctca

SEQ ID NO: 1364 - DNA, 363 bp, synthetic construct
  source 1..363: mol_type = other DNA
gaggtgcagctggtggagtctgggggaggcttggtccagcctggggggtccctgagactctcctgttcagcctctggattcaccttcagaaactatgctatgcactgggtccgccaggctccagggaagggactggagtatgtttcaggtgttagtcgtaatggggatatcgcagactatacagactcagtgaagggcagattcaccatctccagagacaattccaagaatatggtgtatcttcaaatgagcagtctgagaagtgaggacacggctctgtattactgtgtgaaagatctcgggcagcagtggtatgatgcttttgatatctggggccaagggacaacggtcaccgtctcctca

SEQ ID NO: 1365 - DNA, 372 bp, synthetic construct
  source 1..372: mol_type = other DNA
caggtccagctggtgcagtctggggctgaggtgaagaagcctgggtcctcgatgaaggtctcctgtaaggcttctggaggcaccttcagcagctatactatcacctgggtgcgacaggcccctggacaagggcttgagtggatgggaaggatcatccctatccttggtctagcaaactacgcacagaagttccagggcagagtcacgattaccgcggacaaatccacgagcacagcctacatggagctgagcagcctgagatctgaggacacggccgtgtattactgtgcgagagaggcggggtatagtagctcgtcgagtagctggtacttcgatctctggggccgtggcaccctggtcaccgtctcctca

SEQ ID NO: 1366 - DNA, 378 bp, synthetic construct
  source 1..378: mol_type = other DNA
caggtccagctggtgcagtctggggctgaggtgaagaagcctggggcctcagtgaaggttccctgcaaggcatctggatacaccttcaccaaatactatatacactgggtgcgacaggcccctggacaagggcttgagtggatgggaggaatcaaccccagtggtggtagcacagactacgcacagaagttccagggcagagtcaccatgaccagcgacacgtccacgagcacagtctacatggaactgagcagcctgagatctgaggacacggccgtatatttctgtgcgagagccgactttagcgattccgtcgtctgggcagtctcctacttctttgactcctggggccagggaaccctggtcaccgtctcctca

SEQ ID NO: 1367 - DNA, 372 bp, synthetic construct
  source 1..372: mol_type = other DNA
caggtgcagctggtgcagtctggggctgaggtgaagaagcctggggcctcagtgaacgtctcctgcaaggcttctggatacaccttcaccggctactatatccactgggtgcgacaggcccctggacaagggcttgagtggatgggacggatcaaccctaacagtggtggcacaaactatgcacagaagtttcagggcagggtcaccatgaccagggacacgtccgtcagcacagcctacatggagctgcgcaggctgacatctgacgacacggccgtatattactgtgcgagagccctaggttgtagtgatgataactgctacggacgaagggactactggggccagggaaccctggtcaccgtctcctca

SEQ ID NO: 1368 - DNA, 375 bp, synthetic construct
  source 1..375: mol_type = other DNA
caggtgcagctggtgcagtctgggggagacttggtacagcctggggggtccctgagactctcctgtacagcctctggattcagttttagcaactatgccatgagctgggtccgccaggctccagggaaggggctggagtgggtctcaggtattagtggtcgtggtgataggacatactacgcagactccgtgaagggccggttcaccgtctccagagacaattccaagaacaggctgtatctgcaaatgaatagcctgacagacgaagacacggccatatattactgtgcaaaagatcaagaaggggggtttactatggttcagccagaatacttccactactggggccagggcaccctggtcaccgtctcctca

SEQ ID NO: 1369 - DNA, 354 bp, synthetic construct
  source 1..354: mol_type = other DNA
caggtgcagctgcagcagtcgggcccaggactggtgaagccttcacagaccctgtccctcacctgcactgtctctggtggctccgtcagcagtggtagtaactactggagctggatccgccagcacccagggaagggcctggagtggattgggaacatcttttacaatgggaaaacctactacaacccgtccctaaagagtcgagttatcatatcactaaatacgtctaagaaccacttctccctggagctgaactctgtgactgccgcggacacggccgtttattactgtgcgaggtcccctgggggattatttgacttctggggccagggaaccctggtcaccgtctcctca

SEQ ID NO: 1370 - DNA, 369 bp, synthetic construct
  source 1..369: mol_type = other DNA
caggtgcagctggtacagtctgggggaggcgtggtacagcctggggggtccctgagactctcctgtgcagcctctggattcgcctttgatgcttatgacatgcactgggtccgtcaagttccagagaagggtctggagtggatctctcttattagtagggatggtggtggcacattctatgcagactctatgaagggccgattcaccatctccagagacaacagcaaaaactccctgtatttgcaaatgaacagtctgagaactgaggacaccgccttgtattactgtgtaaaagatatttccgcggatacttctatggtaccggtctttgctcactggggccagggaaccctggtcaccgtctcctca

SEQ ID NO: 1371 - DNA, 348 bp, synthetic construct
  source 1..348: mol_type = other DNA
caggtgcagctgcagcagtcgggcccaggactggtgaagccttcggggaccctgtccctcacctgcgctgtctctggtggctccatcagtggtataaactggtggagttgggtccgccagtccccacggcaggggctggagtggattggggaaatctctcagagtgggagcacctactacaacccgtctctcaaaagtcgagtcaccatatcagtagacaagtctaagaaccagttctccctgaagctgacctctgtgaccgccgcggacacggccatatattactgtgcgagagtcagcgggttttttgactcctggggccagggaaccctggtcaccgtctcctca

SEQ ID NO: 1372 - DNA, 357 bp, synthetic construct
  source 1..357: mol_type = other DNA
aggtgcccgttgaaggagtctggtcctacggtggttaaacccacacagaccctcacgctgacctgcaccttctctgggttctcactcaacactggtggagtgggtgtgggctggatccgtcagcccccaggaaaggccctggagtggcttgcgctcatttattgggatggtgatcagcgctacagcccatctctgaataccagactcaccatcaccaaggacacctccaaaaaccaggtagtccttacaatgaccaacatggaccctgtggacacagccacatatttctgtgcacgccatggcattcctacaatttttgattactggggccagggaaccctggtcaccgtctcctca

SEQ ID NO: 1373 - DNA, 363 bp, synthetic construct
  source 1..363: mol_type = other DNA
caggtgcagctggtgcagtctggggctgaggtgaggaagcctggggcctcagtgaaagtttcctgcgaggcatctggatacagcttcaccagctattctatgcactgggtgcgccaggcccctggacaaggacttgagtggatgggtataatcaaccctggtggtggtagcacaggctacgcacagaagttccagggcagagtcaccgtgaccagggacacgtccacgagcacagtctacatggaactgagcagcctgagatctgaggacacggccatgtattactgtgcgagaacccgcatatcaccagccacggactactttgacaagtggggccagggaaccctggtcaccgtctcctca

SEQ ID NO: 1374 - DNA, 351 bp, synthetic construct
  source 1..351: mol_type = other DNA
caggtccagctggtggagtctggaggaggcttgatccagcctggggggtccctgagactctcctgtgcagcctctggattcatcgtcagtagcaactacatgagctgggtccgccaggctccagggaaggggctggagtgggtctcaaccatttttagcggtggaagcacgttctacgcagactccgtgaagggccgattcatcatctccagagacaattccaagaacacgctgtatcttcaaatgaccagcctgagagccggggacacggccgtatattattgtgtgagagatggactatatgtgggggtggcggactggggccagggaaccctggtcaccgtctcctca

SEQ ID NO: 1375 - DNA, 366 bp, synthetic construct
  source 1..366: mol_type = other DNA
caggtgcagctggtgcagtctgggggagccttggtccagcctggggggtccctgagcctctcctgtttagtctctggattcatcttcagtgactattctatgcactgggtccgccaggctccagggaagggactggattatgtttcaggtattagtagtacaggggatatcacagactacgcagactcagtgaaggacagattcaccatctccagagacaattccaagaacatgctgtatcttcaaatgagcagtttgagagttgaggacacggctgtgtattattgtgtgaaagatattgggagctggaagtactttgatgtttttgatgtctggggccaagggaccacggtcaccgtctcctca

SEQ ID NO: 1376 - DNA, 375 bp, synthetic construct
  source 1..375: mol_type = other DNA
caggtgcagctgcaggagtcgggcccaggactggtgaagccttcggggaccctgtccctcacctgcgatgtctctggtggctccatcagcactagttactggtggagctgggtccgccagcccccaggaaaggggctggagtggattggggaaatctatcaaagtgggagcaccaactacaacccgtccctcaagagtcgagtcaccatatcagtagacaggtccaagaaccagttctccctgaagctgagctctgtgaccgccgcggacacgggcgtgtactactgtgtgagagatcggtccttatattgtagtaatggtaactgcccacacatggacgtctggggcaaagggaccacggtcaccgtctcctca

SEQ ID NO: 1377 - DNA, 384 bp, synthetic construct
  source 1..384: mol_type = other DNA
aggtgcacgctgcagcagtctgggggaggcgtggtccagcctgggaagtccctgagactctcctgtgcagcgtctggattcaccttcagtagctatggcatgcactgggtccgccaggctccaggccaggggctggagtgggtggcagttgtatggtatgatggaagtaataaatattatgtagactccgtgaagggccgattcaccatctccagagataattccaagaacacgctgtatctgcaaatgaatagcctgagagccgaggacacggctgtgtattactgtgcgagagatacttgggaagtaccagctgccgaccctccctactactactactatatggacgtctggggcaaagggaccacggtcaccgtctcctca

SEQ ID NO: 1378 - DNA, 375 bp, synthetic construct
  source 1..375: mol_type = other DNA
caggtgcagctgcagcagtcgggcccaggactggtgaagccttcgcagaccctgtccctcacctgcactgtctctggtggctccatcagtagttactactggagctggatccggcagcccccagggaagggactgcagtggattgggtatatctattacagtgggaacaccaactacagcccctccctcaggagtcgagtcaccatgtcagtagacacgtccaagaatcagttctccctgaaactgagctctgtgaccgccgcagacacggccgtgtattactgtgcgagacatgctccgatacattcggcactttacgaaccgaatacgtactttgactactggggccagggaaccctggtcaccgtctcctca

SEQ ID NO: 1379 - DNA, 399 bp, synthetic construct
  source 1..399: mol_type = other DNA
aggtgcacgctgcgtgcagtctgggggaggcttggtacagcctggcaggtcctgacactctcctgtacagcctctggattcacgtttgaagattatgccatacactgggtccggctacttccagggaagggcctggagtgggtctcgggtgttagttggaatagtggtgtcatagactacgtggactctgtgaagggccgattcatcatctccagagacaacgccaagaactccttatatctgcatatgagaagtctgagacctgaggacacggccttatattactgtgtaaaattatactcgggggggagggactacgattttcggagtggttcgcaaaatgggaatggaaacggtatggacgtctggggccaagggaccacggtcaccgtctcctca

SEQ ID NO: 1380 - DNA, 366 bp, synthetic construct
  source 1..366: mol_type = other DNA
caggtgcagctgcaggagtctgggggaggcttggtacagccagggcggtccctgagactctcctgtacaggttctggattcaactttggtaattatgttatgagctgggtccgccaggctccagggaaggggctggagtgggttggtctcattagaagcaattcttttggtgggacaacacaatacgccgcgtctgtgagaggcagattcaccatctcaagagatgattccacaagcatcgcctatctgcaaatgaacagcctgaaaaccgaagacacagccgtatattactgttccactagtcgtgggggtagcaccaactggtttttttactggggccagggaaccctggtcaccgtctcctca

SEQ ID NO: 1381 - DNA, 363 bp, synthetic construct
  source 1..363: mol_type = other DNA
gaggtgcagctggtgcagtctgggggaggcttggtccagccgggggggtccctgagactctcctgttcagcctctggattcaccttcagtagttatgctgtgtactgggtccgccaggctccagggaagggaccggaatatgtttcatctattagtagtgatgggggtatcacatactacgcagactcagtgaagggcagattcaccatctccagagacaattccaagaacacgctgtatcttcaaatgagcactctgagagctgaggacacggctgtgtattattgtgtgaaagatctaggaactatgatagtagatgttttggaaatgtggggccaagggaccacggtcaccgtctcctca

SEQ ID NO: 1382 - DNA, 354 bp, synthetic construct
  source 1..354: mol_type = other DNA
aggtccacgctggtgcagtctgggggaggcctggtccagcctggggggtccctgagactctcctgtgcagcctctggattcatctttagtagacaatggatgagctgggtccgccaggctccagggaagggactggagtgggtggccagcataaagcaagatgggagtgagaaatactatgtggactctgtgaagggccgattcaccatctccagagacaacgccaagaactccctgtatctgcaattgaacagcctgagagtcgaagacacggctgtgtattactgtgcgagagaaacgggtgcattctggttcgaccccaggggccagggaaccctggtcaccgtctcctca

SEQ ID NO: 1383 - DNA, 360 bp, synthetic construct
  source 1..360: mol_type = other DNA
caggtgcagctgcaggagtcgggcccaggactggtgaagccttcggagaccctgtccctcacctgcactgtttctggtggctccatcaggagttactactggagctggatccggcagcccccagggaagggactggagtggattggatatgtccacgacagtgggagcaccaactacaacccctcccttaagagtcgagtcaccatgtcactagacacgtccaagaatcagttctccctgaagctcaggtctgtgaccgctgcggacacggccgtgtattattgtgcgagtctgttagtccgatatagaggatacgaaattgactattggggccagggaaccctggtcaccgtctcctca

SEQ ID NO: 1384 - DNA, 366 bp, synthetic construct
  source 1..366: mol_type = other DNA
caggtgcagctggtggagtctgggggaggcttggtccagcctggggggtccctgagcctctcctgtgtagtctctggattcatcttcagtgactattctatgcactgggtccgccaggctccagggaagggactggaatatctttcaggaattagtagtaatggggatatcacagactacgcagactcagtgaaggacagattcaccatctccagagacaattccaagaacacactgtatcttcaaatgagcagtatgagaattgaagaatgggctgtttatcattgtgtgaaagatatggggagctcgaagtactgggatgtttttgatgtttggggccaagggaccacggtcaccgtctcctca

SEQ ID NO: 1385 - DNA, 360 bp, synthetic construct
  source 1..360: mol_type = other DNA
caggtgcagctggtgcagtctgggggaggcttggtacagcctggggggtccgtgagactctcctgtggagcctctggagtcacagttagcaaatatgccatgagctgggtccgccaggctccagggaaggggctggagtgggtctcaggtattagtggttatggtgataccacatactacgcagactccgtgaagggccggtacaccatctccagagacaattccaagaacacgctgtatctgcaaatgaacagcctgagagacgaggacacggccgtatattactgtgcgaaaggaccccgcagtaaccacgactactttgacgattggggccggggaaccctggtcaccgtctcctca

SEQ ID NO: 1386 - DNA, 363 bp, synthetic construct
  source 1..363: mol_type = other DNA
caggtgcagctggtgcagtctgggggaggcgtggtccagcctgggaggtccctgagactctcctgtacagcgtctggattcagcttcagtacctatggcatgcactggattcgccaggctccaggcaaggggctggagtgggtggcagttatctggtctggtggaagtggtaaacactatgcagactccgtgaagggccggttcaccatctccagagataattcgaagaacacactgaatctgcaaatgaacagcctgagagtcgaggacacggctacatattactgtgcgagagatggcgacggggggctggttaccttcccggactactggggccagggaaccctggtcaccgtctcctca

SEQ ID NO: 1387 - DNA, 393 bp, synthetic construct
  source 1..393: mol_type = other DNA
caggtcacgctgaaggagtctggtcctaccctggtgaaacccacacagaccctcacgctgacctgcaccttctctggtttctcactcagcactactggagtgggtgtgggctggatccgtcagcccccaggaaaggccctggagtggcttgcgctcatttattgggatgatgatcagcgctacagcccatctctgaagagcaggctcagcatcaccaaggacacctccaaaaaccaggtggtccttacaatgaccaacatggaccctgtggacacagccacatactactgtgcacacaccccggacgggcgatattttgactggttaacccctctttttggaaactactactttgacttctggggccagggaaccctggtcaccgtctcctca

SEQ ID NO: 1388 - DNA, 384 bp, synthetic construct
  source 1..384: mol_type = other DNA
caggtgcagctggtgcagtctgggggaggcttggtccagccgggggggtccctgagactctcctgtgcagcctctggattcacctttagtcgttattggatgagctgggtccgccaggctccagggaaggggctggagtgggtggccaacattaagcaagatggaagtgagaagaactatgtggactctgtgaagggccgattcaccatctccagagacaacgccaagaactcactgtatctgcaaatgaatagtctgagagccgaggacacggctgtgtattactgtgcgaaagattctacgccggctacttatagcaatgactggacaaacgctgagtacttccagcactggggccagggcaccctggtcaccgtctcctca

SEQ ID NO: 1389 - DNA, 354 bp, synthetic construct
  source 1..354: mol_type = other DNA
caggtgcagctgcagcagtcgggcccaggactggtgaagccttcacagaccctgtccctaacctgcagtgtctctggtggcttcatcaacagcggtgggaactactggagctggatccgccagcacccagggacgggcctggagtggattgggtccatctttgacagtgggaccacctactacaacccgtccctcaagagtcgactcactatatcagtagacacgtctaagaaccagttctccctgaagctgagctctgtgactgccgcggacacggccgtgtatttctgtgcgaggtcccctgggggattatttgacttctggggccagggaaccctggtcaccgtctcctca

SEQ ID NO: 1390 - DNA, 360 bp, synthetic construct
  source 1..360: mol_type = other DNA
caggtgcagctacagcagtggggcgcaggactgttgaagccctcggagaccctgtccctcacctgcggtgtctatgatgggtccttcagtgattacttctggaactggatccgccagcccccagggaaggggctggagtggattggggagctcacgcatactggaagtaccaactacaacccgtccctcaagagtcgagtcaccatattagcagacacgtccaagagccagttctccctgaacctgagctctgtgaccgccgcggacacggctgtgtattactgtgcgagaggcgatttttatagcaccaggctcgcttttgatctctggggccaagggaccacggtcaccgtctcctca

SEQ ID NO: 1391 - DNA, 360 bp, synthetic construct
  source 1..360: mol_type = other DNA
caggtgcagctgctggagtctgggggaggcttggtacagcctggggggtccctgagactctcctgtgcagcctctggattcaccctcagtaacgacgacatgcactgggtccgccaacctataggaaaaggtctggagtgggtctcaggtactggtacttctggtgacacatattatctagactccgtgaagggccgattcaccatctccagagaaaatgccaggaactccgtgtatcttcaaatgaacagtctgggagccggggacacggctatatattattgtgtaagagggactgcaacgggctactactactacatggacgtctggggcaaagggaccacggtcaccgtctcctca

SEQ ID NO: 1392 - DNA, 384 bp, synthetic construct
  source 1..384: mol_type = other DNA
caggtgcacgctggtggagtctgggggaggcgtggtccagctgggaggtccctgagactctcctgtgcagcctctggattcaccttcagtagctatggaatgcactgggtccgccaggctccaggcaagggcctagagtgggtggcagttatatcatatgatggaagtaataaatactacagagactccgtgaagggccgattcaccatctccagagaaacttccaagaacacgctgtatctgcaaatgaccagcctgagagctgaggacacggctgtatattactgtgtgagagatccccaagattgtggtggttccaggtgttcaaacgcgcttggttactttgactactggggccagggaaccctggtcaccgtctcctca

SEQ ID NO: 1393 - DNA, 369 bp, synthetic construct
  source 1..369: mol_type = other DNA
caggtgcagctggtgcagtctgggggaggcgtggtccagcctgggaggtccctgagactctcctgtgcagcgtctggaatcaccttcaggagcaatggcatgcactgggtccgccaggctccaggcaaggggctggagtgggtggcgtttatatggtttgatggaagtaagaaatattatggagactccgtgaagggccgattcatcatctccagagacaattccaacaacacgctgtatctgcaaatgaacagcctgagagccgaggacacggctgtctattactgtgcgagagaaccccactgcactggtggtgtatgcgatgctcttgatatctggggccaagggaccacggtcaccgtctcctca

SEQ ID NO: 1394 - DNA, 360 bp, synthetic construct
  source 1..360: mol_type = other DNA
caggtgcagctggtgcagtctgggggaggcctggtgcagccgggggggtccctgagactctcctgtggagcctctggattcatcttcagtaactacgacatgcactgggtccgccaaactacaggaaaaggtctggagtgggtctcagctattggaactgctggtgacacatactatgcagactccgtgaagggccgtttcaccatctccagagaaaatgccaagaactccttgtatcttcaaatgaacagcctgagagccggggacacggctgtgtattactgtgcaagagctgaacatagtggcttcgttgtctacttcgatctctggggccgtggcaccctggtcaccgtctcctca

SEQ ID NO: 1395 - DNA, 357 bp, synthetic construct
  source 1..357: mol_type = other DNA
gaggtgcagctggtgcagtctggtcctacgctggtgaaacccacacagaccgtcacgctgacctgcaccttctctgggttctcgttcagtactagtggaatgggtgtgggctggatccgtcagcccccaggaaaggccctggagtggcttgcactcatttattgggatggtgatgagcgctacagcccatctctgcagagcaggctcaccatcgccagggacacctccaaaaaccaggtggtccttacaatgaccaacatggaccctgtggacacagccacatattactgtgcacgccatacagtggcgaccatttttgactactggggccagggaaccctggtcaccgtctcctca

SEQ ID NO: 1396 - DNA, 348 bp, synthetic construct
  source 1..348: mol_type = other DNA
caggtgcagctggtggagtctgggggaggcttggtccagcctggggggtccctgagactctcctgtgaagcctctggattcatctttacaacctattggatgagttgggtccgccaggctccagggaaggggctggagtgggtggccaacataaagcaagatggaagtgagaaatactatgtggactctgtgaagggccgattcaccatctccagagacaacgccaagaactcactgtatctgcaaatggacagcctgagagccgaggacacggccgtttattactgtgcgagagagctggggatctcggactactggggccagggaaccctggtcaccgtctcctca

SEQ ID NO: 1397 - DNA, 351 bp, synthetic construct
  source 1..351: mol_type = other DNA
caggtgcagctggtgcagtctggaggaggcttgatccagccgggggggtccctgagactctcctgtgcagcctctgggttcatcgtcagtgccaactacatgagctgggtccgccaggctccagggaagcggctggagtgggtctcagttctttatagcggcggtaccacattctacgccgactccgtgaagggccgattcaccatctccagagacaattccaagaacacgctgtatcttcaaatgaacagcctgagagccgacgacacggccgtgtatttttgtgtgagagattggggggagttcttctttgacttctggggccagggtaccctggtcaccgtctcctca

SEQ ID NO: 1398 - DNA, 348 bp, synthetic construct
  source 1..348: mol_type = other DNA
gaggtgcagctggtggagactggaggaggcttgatccagcctggggggtccctgagactctcctgtgcagcctctgagttcaccgtcagtagcaactacatgagctgggtccgccaggctccagggaagggactggagtgggtctcaattatttatcccggtggtagctcattctacgcagagtccgtgaagggccgattcaccatctccagagacagttccaagaacacgctctatcttcaaatggacagcctgagagccgaggacacggccgtgtattactgtgcgagagatcggggtgggtaccctgactactggggccagggaaccctggtcaccgtctcctca

SEQ ID NO: 1399 - DNA, 384 bp, synthetic construct
  source 1..384: mol_type = other DNA
caggtccagctggtgcagtctgggggaggcgtggtccagcctgggaggtccctgagactctcctgtgcagcctctggattcaccttcagtagttttcctatgcactggatccgccaggctccaggcaaggggctacagtgggtggcagttgtgtcatatgatggaagtagtaaacactatacagactccgtgaagggccgattcaccatctccagagacaactccatgaacatcgtgtatctgcaaatgaacagcctgagagctgaggacacggctgtgtattactgtgcgagagaaatgcattactatgatagtagtggttattttaaaggcaataactacttcgacccctggggccagggaaccctggtcaccgtctcctca

SEQ ID NO: 1400 - DNA, 351 bp, synthetic construct
  source 1..351: mol_type = other DNA
gaggtgcagctggtggagactggaggaggattgatccagccgggggggtccctgagactctcctgtgcagcctctgggatcatcgtcagttacaactacatgagttgggtccgccaggctccagggaaggggctggagtgggtctcactcatttatgccggtggtagcacctactacgcagactccgtgaagggccgtttcaccatctccagagacaattccaagaacacactatatcttcaaatgaacagcctgagagccgaggacacggccgtgtattactgtacgagagatagggggcctttactacacgacctctggggccagggaaccctggtcaccgtctcctca

SEQ ID NO: 1401 - DNA, 390 bp, synthetic construct
  source 1..390: mol_type = other DNA
caggtgcagctgcaggagtctggcccaggactggtgaagccttcacagaccctgtccctcacctgcactgtctctggtggctccatcagcagtggtaattactactggagttggatccgccagtccccagggaagggcctggagtggattgggtacatctattacagtgggagcacctactacaatccgtccctcaagagtcgagttaccatatcagtagacacgtccaaggaccagttctccctgaagctgagctctgtgactgccgcagacacggccgtgtatcactgtgtcagagaaaggatttctatggatattttgagtggtaattccccccactactacggagtggacgtctggggccaagggaccacggtcaccgtctcctca

SEQ ID NO: 1402 - DNA, 399 bp, synthetic construct
  source 1..399: mol_type = other DNA
caggtgcagctggtgcagtctgggggaggcttggtgcagcctggcaggtccctgacactctcctgtacagcctctggattcacgtttgaagattatgccatacactgggtccggctacttccagggaagggcctggagtgggtctcgggtgttagttggaatagtggtgtcatagactacgtggactctgtgaagggccgattcatcatctccagagacaacgccaagaactccttgtatctgcatatgagaagtctgagacctgaggacacggccttatattactgtgtaaaattatactcgggggggagggactacgattttcggagtggttcgcaaaatgggggtggagacgctatggacgtctggggccaagggaccacggtcaccgtctcctca

SEQ ID NO: 1403 - DNA, 399 bp, synthetic construct
  source 1..399: mol_type = other DNA
aggtccacgctgcagcagtctggtcctacgctggtgaaacccacacagaccctcacgctgacctgcaccttctctgggttctcactcgcaactactggagtgggtgtgggctggatccgtcagcccccaggaaaggccctggaatggcttgcactcatttattgggatgatgataagcgctacagcccatctctgaagagcagggtcaccatcaccaaggacaccttcaaaaaccaggtggtccttacaatgaccaacatggacccggtggacacaggcacatattactgtgcacacatggttggtcgttcgtattacgatgttttgactggtttttcttcctactactcctactacatggacgtttggggcaaagggaccacggtcaccgtctcctca

SEQ ID NO: 1404 - DNA, 372 bp, synthetic construct
  source 1..372: mol_type = other DNA
caggtcacgctgatggagtctggtcgtacgctggtgaaacccacacagaccctcacgctgacctgcaccttctctgggttctcactcagtactagtggagtgagtgtgggctggatccgtcagcccccaggaaaggccctggagtggcttgcactcatttattgggatgatgatacgcgctacagcccatctctgaagaggaggctcaccgtcaccaaggacacctccaaaaaccaggtggtccttacactgaccaacttgggcgctgtggacacaggcacatattactgtgcacacagaccgaggtcacaaagtggctacgactcgtcctttgacgtctggggccagggaaccctggtcaccgtctcctca

SEQ ID NO: 1405 - DNA, 366 bp, synthetic construct
  source 1..366: mol_type = other DNA
caggtgcagctggtgcagtctgggggaggcttggtacagcctggggggtccctgagactctcctgtgcagcctccggattcaccttcagtagctacgacatgcactgggtccgccaggctccaggaaaaggtctggaatgggtctcaggtattggtactgctggtgacacatactatgcagactccgtgaagggccgattcaccatctccagagaaaatgccaagaactccttctatcttcaaatgaacagcctgagagccggggacacggctgtgtattactgtgcaagagtggagtatagtagcggctggtcgtactggttcttcgatctctggggccgtggcaccctggtcaccgtctcctca

SEQ ID NO: 1406 - DNA, 384 bp, synthetic construct
  source 1..384: mol_type = other DNA
gaggtgcagctggtgcagtctgggggaggcttggcacagcctggggggtccctgagactctcctgtgcagcctctggattcaccctcagtagcgacgacatgcactgggtccgccaagctacaggaaaaggtctggagtgggtctcaggtattggtacgtctggtgacacatactatccagactccgtgaagggccgattcagcatctccagagaaaatgccaagaactcactgtatcttcaaatgaacagcctgagagccggggacacggctgtgtattactgtgcaagaggacgttctactatgattcagggagacaaaaaatactaccactactactacatggacgtctggggcaaagggaccacggtcaccgtctcctca

SEQ ID NO: 1407 - DNA, 375 bp, synthetic construct
  source 1..375: mol_type = other DNA
caggtgcagctgcagcagtctggggctgaggtgaagaagcctgggtcctcggtgaaggtctcctgcaaggcttctggaggcaccttcatcagcgatgctgtcagctgggtgcgacaggcccctggacaagggcttgagtggatgggaaggatcatccctatactgggaacagctacctacgcacagaagttccagggcagagtcacgcttaccgcggacaaatccacgagcacagcctacatggaactgcgcagcctgagatctgacgacacggccgtctattactgtgcgatagacagggactacccgggcgattactactatcactactacacggacgtctggggcaaagggaccacggtcaccgtctcctca

SEQ ID NO: 1408 - DNA, 351 bp, synthetic construct
  source 1..351: mol_type = other DNA
caggtgcagctggtgcagtctgggggaggcttggtccggccgggggggtctctgagactctcctgtgcagcctctgaaatcaccgtcagtagtaactacatgaactgggtccgccaggctccagggaaggggctggagtgggtctcagttatatatgccggtggtagcacattctacgcagactccgtgaagggcagattcagcatctccagagacaattccaaaaacacgctgtatcttcaaatgaacagcctgagagccgacgacacggctgtgtattactgtgcgagagacttgggcccctacggatttgatatctggggccaagggaccacggtcaccgtctcctca

SEQ ID NO: 1409 - DNA, 375 bp, synthetic construct
  source 1..375: mol_type = other DNA
caggtgcagctggtgcagtctgggggaggcttggtacagcctggggggtccctgagactctcctgtgcagcctctggattcaccttcagtaactacgacatgcactgggtccgccaagtcacaggaaaaggtctggagtgggtttcaactattggtactgctggtgacacatactatccagactccgtgaagggccgattcaccatctccagagacaatgccaagaactccttgtatcttcaaatgaacagcctgagagccggggacacggctgtgtatttctgtgcaagagtccagtatagcagtggccggcaccaatactcctactactacatggacgtctggggcaaagggaccacggtcaccgtctcctca

SEQ ID NO: 1410 - DNA, 351 bp, synthetic construct
  source 1..351: mol_type = other DNA
caggtgcagctggtgcagactggaggaggcttgatccagccgggggggtccctgagactctcttgtgcagcctctgggatcatcgtcagtcgcaactacatgacctgggtccgccaggctccaggggaggggctggagtgggtcggagttctttatgccggtggtagtacattctacgcagactccgtgaagggccgattcaccatctccagagacaattcgaagaacacactgtatcttcaaatgaacagcctgagagccgaggacacggccgtgtattactgtgcgagagatggggtgtactatgggatggacatctggggccaggggaccacggtcaccgtctcctca

SEQ ID NO: 1411 - DNA, 354 bp, synthetic construct
  source 1..354: mol_type = other DNA
caggtgcagctggtggagtctgggggaggcttggtccagcctggggggtccctgagactctcctgtgcagcctctgaaatcaccgtcagtagcaactacatgaagtgggtccgccaggctccagggaaggggctggagtgggtctcaactatttatgccggtggtagcacattctacgcagactccgtgaggggcagattcaccatctccagagacaattccaagaatacactatatcttcaaatgaacagcctgagagccggagacacggctgtttattactgtgcgagagatttggagattgcaggcgctttggatatctggggccaagggaccacggtcaccgtctcctca

SEQ ID NO: 1412 - DNA, 357 bp, synthetic construct
  source 1..357: mol_type = other DNA
caggtccagctggtgcagtctgggggaggcttggtacagcctggagggtccctgagactctcctgtgcaacctctggattcaccttcagaaattatgaaatgaattgggtccgccaggctccagggaaggggctggagtggatttcatacattagccctagtggtgttaccatacactacgcagactctgtgaagggccgattcaccatctccagagacaacgataagaattcactgtatctgcaaatgaacagcctgagaggcgaggacacggctgtttatttctgtgcgagagcaagagagctggtcgaggtctttgactactggggccagggaaccctggtcaccgtctcctca

SEQ ID NO: 1413 - DNA, 351 bp, synthetic construct
  source 1..351: mol_type = other DNA
caggtgcagctggtggagactggaggaggcttgatccagccgggggggtccctgagactctcctgtgcagcctctgagatcatcgtcagtaggaactacatgacctgggtccgccaggtcccagggaaagggctggagtgggtctcagttatttatcccggtgggagcactttctacgcagactccgtgaggggccgattcaccatctccagagacgattccaagaacactctgtatcttcaaatgaacagcctgagagccgaggacacggccgtgtattactgtgcgagagaagacaataataatgcttttgatatttgggggcaagggacaacggtcaccgtctcctca

SEQ ID NO: 1414 - DNA, 348 bp, synthetic construct
  source 1..348: mol_type = other DNA
caggtgcagctgcagcagtcgggcccaggactggtgaagccttcggggacactgtccctcacctgcgctgtctctagtggctccatcaccagtattagctggtggagttgggtccgccagcccccagggaaggggctggagtggattggggaaatccatcatagtgggagtaccacctacaacccgaccctcaggagtcgactcaccatgtcagtcggcaagtccaacaaccagttctccctgcagctgacctctgtgaccgccgcggacacggccatatattactgtgcgagagtcagtggattttttgactattggggccaggggaccacggtcaccgtctcctca

SEQ ID NO: 1415 - DNA, 360 bp, synthetic construct
  source 1..360: mol_type = other DNA
caggtgcagctacagcagtggggcgcaggactgctgaagccttcggagaccctgtccctcacctgcggtgtccacgatggggccttcagtggttacttctggaactggatccgccagtccccagtgaaggggctggagtggattggggaagtcactcatagtggcaacaccaactacaacccgtccctcaagagtcgagtcaccatgtcagtagacgcgtccaagaacgaattctccctgaacctgacctctgtgaccgccgcggacacggctgtgtattactgtgcgaggggcgacttttatagcaccaggctcgcttttgatgtctggggccaagggtcaatggtcaccgtctcctca

SEQ ID NO: 1416 - DNA, 357 bp, synthetic construct
  source 1..357: mol_type = other DNA
caggtccagctgcagcagtctggtcctacgctggtgaaacccacacagaccctcacgctgacctgcaccttctctgggttctccctcaacactggtggagtggctgtgggctggatccgtcagcccccaggaaaggccctggagtggcttgcactcatttattgggatgatgataagcgctacagcccatctctgaagaacaggctcgccatcaccaaggacacctccaaaaaccaggtggtccttacaatgaccgacatggaccctgtggacacagccacatattactgtgcacgccttaagatagctccaatagttgacgcctggggccagggaaccctggtcaccgtctcctca

SEQ ID NO: 1417 - DNA, 366 bp, synthetic construct
  source 1..366: mol_type = other DNA
caggtgcagctggtgcagtctgggggaggcgtggtccagcctgggaggtccctgagactctcctgtgcagcctctggattcgccttcactacctatgttatgcactgggtccgccaggctccaggcaaggggctggagtgggtaaccgttatctcatctgatggaagtgctaaattttacgcagactccgtgaagggccgattcaccatctccagagacagttcccagaatacgctctatcttcaaatgaacagcctgagagctgaggacacggctgtctattactgtgcgagagatgggggatatagtggctactttgatgcctttgatatctggggccaagggaccacggtcaccgtctcctca

SEQ ID NO: 1418 - DNA, 360 bp, synthetic construct
  source 1..360: mol_type = other DNA
caggtgcagctggtgcagtctggggctgaagtgaagaagcttgggtcctcggtgaaggtctcctgcaaggcctctggaggcacgttcagcaactattttatcagctgggtgcgacaggcccctggacaagggcttgagtgcatggggaggatcatccctatccttggtatagcatactacgctcagaagttccagggcagagtcacgattaccgcggacaaatccacgagcacagcctacatggagctgagcagcctgagatctgaggacacggccgtgtattattgtgcgagagaaggtggtaccaccactgaatacttccagcattggggccagggcaccctggtcaccgtctcctca

SEQ ID NO: 1419 - DNA, 384 bp, synthetic construct
  source 1..384: mol_type = other DNA
caggtgcagctggtgcagtctgggggagacgtggtccagcctgggaggtccctgagactctcctgtgcaacgtctggattcaccttcagtagctatggcatgcactgggtccgccaggctccaggcaaggggctggagtgggtggcagttatttggtataatggaagtaataaatactatatagactccgtgaagggccgattcaccatctccagagacaattccaagaacacgctctatctgcaaatgaacagcctgagagccgaggacacggctgtgtattactgtgcgagagatacttgggaagtaccagttgccgaccctccttattattattactacatggacgtgtggggcagagggaccacggtcaccgtctcctca

SEQ ID NO: 1420 - DNA, 387 bp, synthetic construct
  source 1..387: mol_type = other DNA
caggtccagctggtgcagtctggggctgaagtgaagaagcctggggcctcaatgaaggtttcatgcaaggcatatggatacactttcaccagctactatatgcattgggtgcgacaggcccctggacaagggcttgagtggatgggaataatcaaccctagtgatgctggcgcaagctacgtacagaagttccagggcagagtcaccatgaccagggacacgtccacgagcacagtctacatggagctgagcagcctgagatctgaggacacggccgtgtactactgtgcgagaaattcttttggatattactatgataatagtgcttatttgcccgccttggactttgactactggggccagggaaccctggtcaccgtctcctca

SEQ ID NO: 1421 - DNA, 348 bp, synthetic construct
  source 1..348: mol_type = other DNA
caggtgcagctgcagcagtctggaggaggcttgatccagcctggggggtccctgagactctcctgtgtagcctctgagatcaccgtcagtagcaactacatgagctgggtccgccaggctccagggaagggactggagtgggtctcaataatttatcccggtggtagttcattctacgcagagtccgtgaagggccgattcagcatctccagggacagttccaagaacaccctctatcttcaaatggacagcctgacagtcgaggacacggccatttactattgtgcgagagatcggggtgggtaccctgactactggggccagggaaccctggtcaccgtctcctca

SEQ ID NO: 1422 - DNA, 366 bp, synthetic construct
  source 1..366: mol_type = other DNA
caggtgcagctggtgcagtctggggctgaggtgaagaaacctggggcctcagtgaaggtttcctgcaaggcatccggacacaccttcgccaactactatatgcactgggtgcgacaggcccctggacaagggcttgagtggatgggcataatcaaccctagtggtggtagcacagcctacgcacagcacttccaggacagagtcaccatgaccagggacacgtccacgagcacagtctacatggagctgagcagcctgagatctgaggacacggccgtgtattactgtgcgagagggggtatagtcccagatgctaagcaatactttgactactggggccagggaaccctggtcaccgtctcctca

SEQ ID NO: 1423 - DNA, 366 bp, synthetic construct
  source 1..366: mol_type = other DNA
caggtgcagctggtggagtctgggggaggcgtagtccagcctgggaggtccctgagactctcctgtgcagcctctggattcaccttcagtacctatggcatgcactgggtccgccaggctccaggcaaggggctggagtgggtggcagttatatcatatgatggaagtaataaacactatgcagactccgtgaagggccgattcaccatctccagagacaattccaagaagacgctgtatctgcaaatgaacagcctgagaactgaggacgcggctgtgtattactgtgcgaaagaggggcccggggcttcgggatttaactactttgactactggggccagggaaccctggtcaccgtctcctca

SEQ ID NO: 1424 - DNA, 351 bp, synthetic construct
  source 1..351: mol_type = other DNA
gaggtgcagctggtgcagactggaggaggcttgatccagcctggggggtccctgagactctcctgtgcagcctctgaattcatcgtcagtcgcaactacatgagttgggtccgccaggctccagggaaggggctggagtgggtctcacttatctatgccggtggtagtacattctacgcagactccgtgaagggccgattcaccatctccagagacaattccaagaacacactttatctacaaatgaacagcctcagaaccgaggacacggccgtgtattactgtacgagagatagagggcctttactacacgactactggggccagggaaccctggtcaccgtctcctca

SEQ ID NO: 1425 - DNA, 375 bp, synthetic construct
  source 1..375: mol_type = other DNA
caggtgcagctggtggagtctgggggaggcttggtacagcctggcaggtccctgagactctcctgtgcagcctctggattcacctttgaagattatgccatgcactgggtccggcaaactccagggaagggcccggagtgggtctcaggtattagttggaatgggggtatcatgggctatgcggcctctgtagagggccgattcatcatctccagagacaacgccaagaactccctgtatctgcaaatgatgcgtctgagagcagaggacacggccttctattactgtacaaaagcccaagccccacttgactccggtgactacggcggtggttttcatatctggggcccagggacaacggtcaccgtctcttca

SEQ ID NO: 1426 - DNA, 360 bp, synthetic construct
  source 1..360: mol_type = other DNA
caggtgcagctggtggagtctgggggaggcttggtacagcctggggggtccctgagagtctcctgtgcaggctctggattcacctttagagaccacgccatgagctgggtccgccaggctccagggaagggactggactgggcctcaactatcagtggcagtggtgatacttttagccacgcagattccgtgaagggccggttcaccatctccagagacaactccaaggacactctctacttacaaatgaccagcctgagaggcgaggacacggccgtgtatttctgtgcgagagggaccacgatttttgggggggctttagacccctggggccagggaaccctggtcaccgtctcttca

SEQ ID NO: 1427 - DNA, 357 bp, synthetic construct
  source 1..357: mol_type = other DNA
caggtccagctggtgcagtctggagcagaggtgaaaaaggccggggagtctctgaagatctcctgtaagggttctggatactactttgccagatactggatcggctgggtgcgccagatgcccgggaaaggcctggaatggatggggatcatctatcctggtgactcggataccagatacagcccgtccttccaaggccaggtcaccatgtcagccgacaagtccatcagcaccgccttcctgcagtggagcagcctgaaggcctcggacaccgccatgtattactgtgcgagacagggcacgacagtaggacactttgactactggggccagggaaccctggtcaccgtctcctca

SEQ ID NO: 1428 - DNA, 381 bp, synthetic construct
  source 1..381: mol_type = other DNA
caggtacagctgcagcagtctggggctgaggtgaagaagcctggggcctcagtgaaagtttcctgcaaggcttctggatacaccttctctaactatgcaatacattgggtgcgccaggcccccggacaagggcctgagtggatggggtggatcaaccctgccaataataacataaagtattcagagaagttccagggcagagtcacctttaccagggacacatccgcgagcacaggctacatggagatgggaagcctgacatctgaagacacggctgtctattactgtgcgagaggtgtctcccctaatacggttgttggattgggttactactactacatggacgtctggggcagagggaccacggtcaccgtctcctca

SEQ ID NO: 1429 - DNA, 378 bp, synthetic construct
  source 1..378: mol_type = other DNA
caggtgcagctggtgcagtctggggctgaggtgaagaagcctgggtcctcggtgaaggtctcctgcaaggcttctggaggcaccttcatcaggaacactataagttggctgcgacaggcccctggacaggggcttgagtggatgggaagggtcatccctttacttaatgtagttgactacgcgcagaagttccagggcagagtcacgataatcgcggacaaatcttcgagcacagtctacatggagttgagtagcctgagatctgaggacacggccgtgtattactgtgcgagagaggggaccgggtattgtgatggtggtgtatgccatgatgcatttgagatctggggccaagggacaacggtcaccgtctcctca

SEQ ID NO: 1430 - DNA, 351 bp, synthetic construct
  source 1..351: mol_type = other DNA
caggtgcagctggtgcagtctggaggaggcttgatccagccgggggggtccctgagactctcctgcgcagcctctgggatcaccgtcagtagcaactacatgagctgggtccgccaggctccagggaaggggctggagtgggtctcacttctttatgccggtggaagcaccttctacgcagactccgtgaagggccgattcaccatctccagagacaattccaagaacacactgtttcttcaaatgaacagcctgagagccgacgacacggccgtgtattactgtgcgagagatctggtggattacggtatggacgtctggggccaagggaccacggtcaccgtctcctca

SEQ ID NO: 1431 - DNA, 363 bp, synthetic construct
  source 1..363: mol_type = other DNA
caggtgcagctggtggagtctgggggaggcttggtacagcctggagggtccctgagactctattgtgcagcctctggattcaccttcagtagttatgaaatgaattgggtccgccaggctcctgggaaggggctggaatcgatctcatccattagtagtcgtgggagttccaaattctacgcagactctgtgaagggccgattcaccatctccagagacaacgccaagaactcggtgtttctgcaaatgaacagcctgagagtcgaggacacggctctttactattgtgcgagagatttgggaggcagctactcggggacctttgaccactggggccagggaaccctggtcaccgtctcctca

SEQ ID NO: 1432 - DNA, 372 bp, synthetic construct
  source 1..372: mol_type = other DNA
gaggtgcagctggtgcagtctgggggagtcttggtacagccgggggggtccctgagactctcctgtgcagcctctggattcaccttcagtaactacgacatgcactgggtccgccaacctccaggaaaacgtctggaatgggtctcagctattggaactgctggtgacacatactattcagactccgtgaagggccgactcaccatctccagagaaaatgccaggaagtccttgtatcttcaaatgaacagcctgagagacggcgacacggcagtgtattactgtacaagagctctgttttgtggtgatgattgctacacaaactggtacttcgatctctggggccgcggcaccctggtcaccgtctcctca

SEQ ID NO: 1433 - DNA, 354 bp, synthetic construct
  source 1..354: mol_type = other DNA
caggtcacgttgaaggagtctgggggaggcgtggtccagcctgggaggtccctgagactctcctgtgcagcctctggtttcacttttagtggttttggcatgcactggatccgccaggctccaggcaaggggctggagtgggtggcagttatatcatatgatggaagtaataaatattatgaagactccgtgaagggccgattcaccatttccagagacaattccaagaacacgctgtatctgcaaatgaacagcctgagagctgaggacacggctgtctatttttgtgcgaaagatagtcacgattacgctatggacgtctggggccaagggaccacggtcaccgtctcctca

SEQ ID NO: 1434 - DNA, 393 bp, synthetic construct
  source 1..393: mol_type = other DNA
caggtcacgctgaagcagtctggtcctacgctggtgagacccacacggaccctcacggtgacgtgcaccttctttgggttttcaatcagatttaatggagtgggtgtgggctggatccggcagcccccaggaaaggccctggagtggcttggattaattttttgggatgatgataagcggtacagcccatctttgaagagcagggtcagcatcaccaaggacacctccagaaaccaggtggtccttacaatgaccaacatggaccctgtggacacagccacatattactgtgcacactccacagatagacgcaattttgaatggttatcattgtccgggtggggcgggaactttgaatactggggccagggaaccctggtcaccgtttcctca

SEQ ID NO: 1435 - DNA, 351 bp, synthetic construct
  source 1..351: mol_type = other DNA
gaggtgcagctggtgcagactggaggaggcttgatccagccgggggggtccctgagactctcctgtgcagcctctgaattcatcgtcactagaaactacatgagttgggtccgccaggctccagggaaggggctggagtgggtctcactcatatatcccggtggcagcacatactacgcagactccgtgaagggccgattcacaatctccagagacaattccaagaacaccctctatcttcaaatgaacagcctgagagccgaggacacggccgtctattactgtgcgagagatagggggccttcactacacgactattggggccagggaaccctggtcaccgtctcctca

SEQ ID NO: 1436 - DNA, 348 bp, synthetic construct
  source 1..348: mol_type = other DNA
gaggtgcagctggtggagactggaggaggcttgatccagcctggggggtccctgagactctcctgtgcagcctctgagatcatcgtcactagcaactacatgaactgggtccgccaggctccagggaaggggctggagtgggtctcagtcatttatcccggtggtaccacatactacgcagactccgtgaagggccgattcaccgtctccagagacaattccaagaacaccctgtatcttcaaatgaacagtctgagagccgaggacacggccgtttattactgtgcgagggaacggaccagtggccggctcgactggggccagggaaccctggtcaccgtctcctca

SEQ ID NO: 1437 - DNA, 384 bp, synthetic construct
  source 1..384: mol_type = other DNA
caggtgcagctggtgcagtctgggggaggcttggtccagcctggggggtccatgagactctcctgtgcagcctctggattcacctttagtcgatattggatgacctgggtccgccaggctccagggaaggggctggagtgggtggccaacataaagcaagatggaagtgagaaaaactatgtggactctgtcaacggccgattcaccatctccagagacaacgccaagaactcactgtttctgcaaatgatcagcctgagagccgaggactcggctgtgtatttctgtgcgagagattctacgccggctacttataacaatgactggacttaccctgaatacttcgacctctggggccagggcacccaggtcaccgtctcctca

SEQ ID NO: 1438 - DNA, 384 bp, synthetic construct
  source 1..384: mol_type = other DNA
caggtgcagctggagcagtctgggggaggcttggtccagcctggggggtccttgagactctcctgtgcagcctctggattcacctttagtcggtattggatgacctgggtccgccaggctccagggaaggggctggagtgggtggccaacataaagcaagatggaagtgagaaaaactatgtggactctgtgaagggccgattcaccatctccagagacaacgccaagaactcactgtttatgcaaatgaacagcctgagagccgaggacacggctgtgtattactgtgcgagagattgtacgccggctacttataacaatgactggacatacgctgaatacttcgaccactggggccagggcaccctggtcaccgtctcctca

SEQ ID NO: 1439 - DNA, 375 bp, synthetic construct
  source 1..375: mol_type = other DNA
caggtccagctggtgcagtctggggctgaggtgaagaagcctggggcctcagtgaaggtttcctgcaaggcatctggatactccttcaccagctactatatacagtgggtgcgacaggcccctggacaagggcttgagtggatgggaataatcaaccctagtggtggaagcacaagctacgcacagaagtttcagggcagagtcaccatgactagggacgagtccacgagaacagtgtacatggagctgagcagcctgagatctgaggacacggccatgtattactgtgcgagagatgcgggtgtggtggacccgctggacccctaccccctgcctcgtttctggggccagggaaccctggtcaccgtctcctca

SEQ ID NO: 1440 - DNA, 384 bp, synthetic construct
  source 1..384: mol_type = other DNA
caggtgcagctgcagcagtctgggggaggcttggtacagcctggggggtccctgagactctcctgtgcagcctctggattcacctttactagctacgacatgcactgggtccgccaagctccaggaaagggtctggagtgggtctcaactattggaactactggtgactcatattatccaggctccgtgaagggccgattcaccatctccagagaaaatgccaagaactccttgtatcttcaaatgaacagcctgagagccggggacacggctgtttattactgtgcaaggggggtacaagaggagcgacgggggctggtgagaaagttctactactactacatggacgtctggggcaaagggaccacggtcaccgtctcctca

SEQ ID NO: 1441 - DNA, 390 bp, synthetic construct
  source 1..390: mol_type = other DNA
caggtgcagctgcaggagtcgggcccgggactggtgaagccttcggagaccctgtccctcacctgcactgtctctggcggctccatcagcagtgatcatttctactggggctggatccgccagcccccagggaaggggctggagtggattgggaccacctattatactgcccgcaccaactacaacccgtccctcaagagtcgggtcaccatatccgttgacacgtccaagaaccagttctccctgaagctgacctctgtgaccgccacagacacggctatttattactgtgcgcgagtcgaggtttcgggtggatttagtggctacgatttcctcacaccgtactactttgactactggggccagggagccctggtcaccgtctcctca

SEQ ID NO: 1442 - DNA, 351 bp, synthetic construct
  source 1..351: mol_type = other DNA
caggtccagctgcagcagtctggaggaggcttgatccagcctggggggtccctgagactctcctgtgcagcctctgagttcatcgtcagtagcaactacatgagctgggtccgccaggctccagggaaggggctggagtgggtctcagttatttatcccggcggtagcacattctacgcagactccgtgaagggccgattcaccatctccagagacacttccaagaacacgctgtatcttcaaatgaacagcctgagagccgaggacacggccgtgtattactgtgcgagagactacggtgactactactttgactactggggccagggaaccctggtcaccgtctcctca

SEQ ID NO: 1443 - DNA, 357 bp, synthetic construct
  source 1..357: mol_type = other DNA
caggtgcagctggtgcagtctgggggaggcttggtccagcctggggggtccctgagactctcctgtgcagcctctgaattcatcgtcagtagtaattacatgagctgggtccgccaggctccagggaaggggctggagtgggtctcacttatgtatcccggtggtagcacatactacgcagactccgtgaagggcagattcaccatctccagagacaaatccaagaacacgctgtatcttcaaatgaacagcctgagagccgaggacacggctgtctattactgtgcgagagtcctccctctccacggtgacttctttgactactggggccagggaaccctggtcaccgtctcctca

SEQ ID NO: 1444 - DNA, 357 bp, synthetic construct
  source 1..357: mol_type = other DNA
caggtcacgttgaaggagtctggtcctacgctggtgaaacccacacagaccctcacgctgacctgcaccttctctgggttctcattcagcactggtggagtgggtgtgggctggatccgtcagccccccggaaaggccctagagtggcttgcactcatttattgggatggtgataagcgctacagcccatctctgaagaacaggctcaccatcaccaaggacacctccaaaaaccaggtggtccttacagtgaccaacatggaccctgtggacacagccacatattactgtgcacaccaccaaatcaatacgatttttggagtaattagccagggaaccctggtcaccgtctcctca

SEQ ID NO: 1445 - DNA, 393 bp, synthetic construct
  source 1..393: mol_type = other DNA
cagatcacgttgaaggagtctggtcctaccctggtgaaacccacacagaccctcacgctgacctgcaccttctctggtttctcactcagcactactggagtgggtgtgggctggatccgtcagcccccaggaaaggccctggagtggcttgcactcatttattgggatgatgatcagcgctacagcccatctctgcagagcaggctcagcatcaccaaggacacctccaaaaaccaggtggtccttacaatgaccaacatggaccctgtggacacagccacatattactgtgcacacaccccggacgggcgatattttgagtggttaacgcctctttttggtaactactactttgactactggggccagggaaccctggtcaccgtctcctca

SEQ ID NO: 1446 - DNA, 351 bp, synthetic construct
  source 1..351: mol_type = other DNA
caggtgcagctggtgcagtctgggggagccttggtccagccgggggggtccctgagactcgcctgtgcagcctctgaaatcatcgtcgttaggaactacatgagctgggtccgccaggctccagggaaggggctggagtgggtctcagttatttacagcggaggtaccacattctacgcagactccgtgaagggccggttcaccatctccagagacaaatccaagaacacgctgtatcttcaaatgagcagcctgagaggtgaggacacggctgtgtattactgtgcgagagggcgaccatccggattatatgactactggggccagggaaccctggtcaccgtctcctca

SEQ ID NO: 1447 - DNA, 366 bp, synthetic construct
  source 1..366: mol_type = other DNA
caggtgcagctggtacagtctggggctgaggtgaagaagcctggggcctcagtgaagatttcctgcaaggcatctggatacactttcagcgactactatattcactgggtgcgacaggcccctggacaagggcttgagtggatgggaatgatcaaccctgatgctgctagcattgcttacgcacagaagttccagggcagagttaccatgacgagtgacacgtccacgagcacaatttatatggaactgagtagcctgagatctgaggacacggccgtgtattattgtgcgagagatatcgcaggaataccagctactttaggcctcgacccctggggccagggaaccctggtcaccgtctcctca

SEQ ID NO: 1448 - DNA, 366 bp, synthetic construct
  source 1..366: mol_type = other DNA
caggtcaccttgaaggagtcgggcgcgggactgttgaagccctcggagaccctgtccctcacctgcgctgtctctggtgggtccttcagcagtggttattactggaactggatccgccagcccccaggcaaggggctggagtggattggagaaatcagtcagagtggtggagccaactccaacccgtccctcaagggtcgactctccatatcaatagagacggccaagaagcagttctccctgaagctgaggtctgtgaccgccgcggacacggctctctattactgtgcgagaggccgcggttacggatcagggagtgactcctttgactattggggccagggagccctggtcaccgtctcctca

SEQ ID NO: 1449 - DNA, 363 bp, synthetic construct
  source 1..363: mol_type = other DNA
caggtgcagctgcagcagtcgggcccaggactggtgaagccttcggagaccctgtccctcacctgcattgtctctggtgactccatcagtagttactattggagctggatccggcagcccccagggaagggactggagtggattggggacatctatcacagtgggagcaccaactacaatccctccctcaagagtcgagtcaccatatcagtagacacgtccaagagtcagttctccttgaagctgaggtctgtgaccgctgcggacacggccgtctattactgtgcgagaggccctaaagagcgctggttcaacaattggttcgacccctggggccaaggaaccctggtcaccgtctcctca

SEQ ID NO: 1450 - DNA, 351 bp, synthetic construct
  source 1..351: mol_type = other DNA
caggtgcagctggtgcagtctggggctgaggtgaagaagcctgggtcctcggtgaaggtctcctgcaagggcaccttcagcagttataatgtcaactgggtgcgacaggcccctggacaagggcttgagtggatgggaaggatcatccctatccttggtattgcaaactacgcagagaagttccaggacagagtcaccattaccgcggacagatccacgagcacagcctacatggagctgagcagcctgagatatgacgacacggccgtatattactgtgcgagagaaggtggtagcaccactgaatacttcccacactggggccagggcaccctggtcaccgtctcctca

SEQ ID NO: 1451 - DNA, 372 bp, synthetic construct
  source 1..372: mol_type = other DNA
caggtgcagctgcaggagtccggaggagacttggtccagcctggggggtccctgagactctcttgtgcagcctctaggttcaccgacattagcaactacatgagctgggtccgccaggctccagggaaggggctggagtgggtctcagttatttatagtggtggaaccgcatattacgcagactccgtgaagggccgattcaccatctccagacacaactccaagaacacactgtatcttcaaatgaacagcctgagaactgaggacacggccgtgtattactgtgcgagaggccaagtccccaacgatgactacgttatgagtggtgcttttgatatctggggccaagggaccacggtcaccgtctcctca

SEQ ID NO: 1452 - DNA, 354 bp, synthetic construct
  source 1..354: mol_type = other DNA
caggtgcagctggtgcagactggaggaggcttgatccagcctggggggtccctgagactctcctgtgtagcctctggggtcaccgtcactaacaactacatgaactgggtccgccaggctccagggaaggggctggagtgggtctcagttatttatagtggtggcagcacatactacgcagactccgtgaagggccgattcaccatctccagagacaattccaagaacacgctctatcttcaaatgaacagcctgagagccgacgacacggccgtatattactgtgcgagagatttgatggaggcgggcggtatggacgtctggggccaagggaccacggtcaccgtctcctca

SEQ ID NO: 1453 - DNA, 360 bp, synthetic construct
  source 1..360: mol_type = other DNA
caggtacagctgcagcagtctggggctgaggtgaagaagcctgggtcctcggtgaaggtctcctgcaaggcctctggaggcaccttcagcagttatagtgtcagctgggtgcgtcaggcccctggacaagggcttgagtggatgggaaggatcttccctatccttggtgttgcagacttcgcacagaagttccaggacagagtcacgattaccgcggacagatccacgagcacagcctacatggagatgagtaggttaaggcctgaggacacggccgtctattactgtgcgagggaaggtggtaagaccactgaattcttccccctctggggccagggcaccctggtcaccgtctcctca

SEQ ID NO: 1454 - DNA, 354 bp, synthetic construct
  source 1..354: mol_type = other DNA
caggtgcagctggtggagtctgggggaggcttggtccagcctggggggtccctgagactctcctgtgcagcctctggattcacctttaatacgtattggatgagttgggtccgccaggctccagggaaggggctggagtgggtggccagcataaaacaagatggaggtgagaaatactatgtggactctgtgaagggccgatttaacatctccagagacaacgccaagaactcactgtttctgcaaatgagcagcctgagagccgaggacacggctgtctattactgtgcgagagaaatgggtatattctggttcgacccccggggccaaggatccctggtcaccgtctcctca

SEQ ID NO: 1455 - DNA, 372 bp, synthetic construct
  source 1..372: mol_type = other DNA
aggtacacgctgcagcagtctggggctgaggtgaagaagcctgggtcttcggtgaaggtctcttgcaaggcctctggaggcaccttcaacagctatagtatcagttgggtgcgacaggcccctgagcaagggcttgagtggatgggaaggatcatccctatccttggtgtaacagactacccacagaagttccagggcagagtcaacattatcgcggacaagtccacgggcacagcttacatggagctgagcagcctgagatctgaagacacggccgtgtattactgcgcgagagatgtgggttattctggctcggggagtacttactactttgacctctggggccagggagccctggtcaccgtctcctca

SEQ ID NO: 1456 - DNA, 396 bp, synthetic construct
  source 1..396: mol_type = other DNA
caggtcacgctgaaggagtctgggggaggcttggtacagcctggcaggtccctgagactctcctgtgcagcctctggattcacctttgatgaatatgccattcactgggtccggcaagttccggggaagggcctggagtgggtctcaggttccagttggaatagtggtatcataggctatgcggactctgtgaagggccgattcaccatctccagagacaacgccaagaactccctgtatctgcaaatgaacagtctgagacctgaggacacggccttgtattactgtgtaaaactcagaacggtcacggctttcgatttttggagtggttcccgcccgagccccaagcaagactttgactactggggccagggaaccctggtcaccgtctcctca

SEQ ID NO: 1457 - DNA, 381 bp, synthetic construct
  source 1..381: mol_type = other DNA
aggtccacgctggagcagtctggtcctgcgctggtgaaacccacacagaccctcagactgacctgcaccttctctgggttctcactcagcactagtggaacgtgtgtgaactggatccgtcagtccccagggaaggccctggagtggcttgcactcattgattgggacgatgataaatactacagcacatctctgaagaccaggctcaccatctccaaggacacctccaaaaaccaggtggtccttacaatgaccaacatggaccctgttgacacagccacgtattattgtacacggacgggggcgattatagcagctcgtccttggtacaactacggtatggacgtctggggccaagggaccacggtcaccgtctcctca

SEQ ID NO: 1458 - DNA, 363 bp, synthetic construct
  source 1..363: mol_type = other DNA
caggtccagctggtgcagtctggagcagaggtgaaaaagcccggggagtctctgaagatctcctgtgagggttctggatacagctttaccacctactggatcgcctgggtgcgccagatgcccgggaaaggcctggagtggatggggaccatctatcctggtgactctgataccagatacagcccgtccttccaaggccaggtcaccatctcagccgacaagtccatcagtaccgcctacttgcagtggagcagcctgaaggcctcagacaccgccatttattactgtgcgagtcagcgtcagcgtggcttctactactacatggacgtctggggcaaagggaccacggtcaccgtctcctca

SEQ ID NO: 1459 - DNA, 375 bp, synthetic construct
  source 1..375: mol_type = other DNA
caggtgcagctggtgcagtctgggggaggcgtggtccagcctgggaggtccctgagactctcctgtgcagcctctggattcatcttcagtaattatggcatgcactgggtccgccaggctccaggcaaggggctggagtgggtggcagttatatcatatgatggaagtcataaatactatgtagactccgttgagggccgattcaccatctccagagacaattccaagaacacgctgtatctgcaaatggacaccttgagagctgaggacacggctgtgtattactgtgcgaaaatgactagcagctcgcccattctctactactaccacggtatggacgtctggggccaagggaccacggtcaccgtctcctca

SEQ ID NO: 1460 - DNA, 360 bp, synthetic construct
  source 1..360: mol_type = other DNA
aggtgcccgctggtgcagtctgggggaggcttggtacagcctggggggtccctgagactctcctgtgcagcctctggattcaccttcagtaggtacgacatgcactgggtccgccaagttacgggaagaggtctggagtgggtctcagcgattggtactgctggtgacacatattatccagactccgtgaagggccgattcaccatctccagagaaaatgccaagaactcattgtatcttcaaatgaacagcctgagagccggggacacggctatttattactgtgcaagagctgaatttagtggctacgttctccacttcgatctctggggccgtggcaccctggtcaccgtctcctca

SEQ ID NO: 1461 - DNA, 354 bp, synthetic construct
  source 1..354: mol_type = other DNA
caggtgcagctggtgcagtctgggggaggcttggtccagcctggggggtccctgagactctcctgtgcagcctctggattcacctttagtagctattggatgagctgggtccgccaggctccagggaaggggctggagtgggtggccagcataaagcaagatggaagtgagcaatactatgtggactctgtgaagggccgatttaacatctccagagacaacgccaagaactcactgtttctgcaaatgaacagcctgagagccgaggacacggctgtctattactgtgcgagagaaatgggtatattttggttcgacccctggggccagggatccctggtcaccgtctcctca

SEQ ID NO: 1462 - DNA, 372 bp, synthetic construct
  source 1..372: mol_type = other DNA
aggtgcccgctggtgcagtctgggggagacttggtccagcctggggggtccctcagactctcctgtgaagcctctggattcaccgtcagtagcaactacatgagctgggtccgccaggctccagggaaggggctgcagtgggtttcactcatttatcccggtggtagcacatactacgcagactccgtgaagggccgattcaccgtctccagagacaattccaagaacacgctgtatcttcaaatgaacagcctgagagctgaggacacggctgtctattactgtgcgagagaaatctacggctgtaccacctgctctcacgacatcccacgggactcctggggccagggaaccctggtcaccgtctcctca

SEQ ID NO: 1463 - DNA, 372 bp, synthetic construct
  source 1..372: mol_type = other DNA
caggtgcagctgcagcagtctgggggaggcttagttcagcctggggggtccctgagactctcctgtgcagcctctggattcaccttcagtaactactggatgcactgggtccgccaagctccagggaaggggctggtgtgggtctcacgtattaatagagatgggagtagtccaacttacgcggactccgtgaagggccgattcaccatctccagagacaacgccaagaacacgctgtttctgcaaatgaacagtctgagagccgaagacacggctgtgtattactgtgcaagagacctggaaagtgggagctttcatcccggcctggttcgggtcccctggggccagggaaccctggtcaccgtctcctca

SEQ ID NO: 1464 - DNA, 378 bp, synthetic construct
  source 1..378: mol_type = other DNA
caggtgcagctacagcagtggggcgcaggactgttgaagccttcggagaccctgtccctcacctgcggtgtctatggtgggtccttcagtgaatactactggacctgggtccgccagtccccagggaaggggcttgagtggattggtaaaatcactcatagtggaaacaccgactacaacccgtccctcaagagtcgagtcaccatatcagtggacacgtccaagaaccagttctccctgaggttgagctctgtgaccgccgcggactcggctgtgtattactgtgcgagacatgttccggaggatgttgtagtagaaccacctgccccgtggggacttgactactggggccagggatccctggtcaccgtctcctca

SEQ ID NO: 1465 - DNA, 372 bp, synthetic construct
  source 1..372: mol_type = other DNA
caggtgcagctggtgcagtctgggggaggcttagttcagcctggggggtccctgagactctcctgtgcagcctctggattcaccttcagtaactactggatgcactgggtccgccaagctccagggaaggggctggtgtgggtctcacgtattaatagagatgggagtagtccaacttacgcggactccgtgaagggccgattcaccatctccagagacaacgccaagaacacgctgtttctgcaaatgaacagtctgagagccgaagacacggctgtgtattactgtgcaagagacctggaaagtgggagctttcatcccggcctggttcgggtcccctggggccagggaaccctggtcaccgtctcctca

SEQ ID NO: 1466 - DNA, 351 bp, synthetic construct
  source 1..351: mol_type = other DNA
gaggtgcagctggtgcagactggaggaggcttgatccagccgggggggtccctgagactctcctgtgcagcctctgagatcatcgtcagtaggaactacatgacctgggtccgccaggctccagggaaagggctggagtgggtctcagttatttatcccggtgggagcactttctacgcagactccgtgaggggccgattcaccatctccagagacgattccaagaacactctgtatcttcaaatgaccagcctgagagccgaggacacggccgtgtattactgtgcgagagaagacaataataatgcttttgatatttgggggcaagggacaacggtcaccgtctcctca

SEQ ID NO: 1467 - DNA, 366 bp, synthetic construct
  source 1..366: mol_type = other DNA
caggtgcagctacagcagtctggggctgaggtgaagaagcctggggcctcagtgagggtttcctgcaaggcatctggatacaccttcagtgactactatatgcactgggtgcgacaggcccctggacaagggcttgagtggatgggaatactcaaccctagtgctggtagcacaagctacgcacagaagttccagggcagagtcaccatgaccagtgacacgtccacgaacacagtctacatggagctgaccagcctgagatctgaggacacggccgtgtattactgtgctagagattggcggtttctacccggatttgatgcttttgatatctggggccaagggaccacggtcaccgtctcctca

SEQ ID NO: 1468 - DNA, 387 bp, synthetic construct
  source 1..387: mol_type = other DNA
caggtgcagctggtggagtctgggggagccttggtacagcctggcaggtccctgagactctcctgtgcagcctctggattcacctttgatgattatgccatccactgggtccggcaagctccagggaagggcctggagtgggtctcaggtgttagttggaatagtggtattataggctatgcggactctgtgaagggccgattcatcatctccagagacaacgccaagaactccctgtatctgcatatgaacagtctgagacctgaggacacggccttgtattactgtgcaaaatttgggggcgggcccacaaattacgattttcggagtgcttccccgtatcactttgactcctggggccagggaaccctggtcaccgtctcctca

SEQ ID NO: 1469 - DNA, 354 bp, synthetic construct
  source 1..354: mol_type = other DNA
caggtgcagctggtgcagtctggggggggcttggtccagcctggggggtccctgagactctcctgtgcagcctctggattcacctttagtacctattggatgagttgggtccgccaggctccagggaaggggctggagtgggtggccagcataaagcaagatggaggtgaaaaatactatgtggactctgtgaagggccgatttaacatctccagagacaacgccaagaactcactgtttctgcaaatgaacagcctgagagccgaggacacggctgtctattattgtgcgagagaaatgggtatattctggttcgacccccggggccagggatccctggtcaccgtctcctca

SEQ ID NO: 1470 - DNA, 369 bp, synthetic construct
  source 1..369: mol_type = other DNA
caggtgcagctgcaggagtcgggcccaggactggtgaaggcttcggagaccctgtccctcgcctgcactgtctctggttactccatcagcagtggttattcctggggctggatccggcagcccctagggaaggggctggagtggattgggagtatctatcatagtgggagcacctattacaaagcgtccctcaagagtcgagtcaccatatcactagacacgtccaagaaccagttctccctgaagctgagctctgtgacggccgcagacacggccgtctattactgtgcgagagatggtcaagggtacgtaccaccgagagacaactttgaccactggggccagggagccctggtcaccgtctcctca

SEQ ID NO: 1471 - DNA, 351 bp, synthetic construct
  source 1..351: mol_type = other DNA
caggtgcagctggtgcagtctggaggaggcttggtccagccgggggggtccctgagactctcctgtgcagcctctggaatcaccgtcagtagcaactacatgacctgggtccgccaggctccagggaaggggctggagtgggtctcagttctttatgccggtggtagcaccttctacacagactccgtgaagggccggttcaccatctccagacacaattccaacaacacactgtatcttcaaatgaacagcctgagacctgaagacacggccgtttattattgtgcgagagacattcagcgatacggtatagacgtctggggccaagggaccacggtcaccgtctcctca

SEQ ID NO: 1472 - DNA, 375 bp, synthetic construct
  source 1..375: mol_type = other DNA
caggtgcagctgcaggagtcgggcccaggactggtgaagccttcacagaccctgtccctcacctgcactgtctctggtggctccatcagcagtgatggttactactggagctggatccgccagcacccggggaagggcctggagtggattgggtacatctattacagtgggatcacctactacaacccgtccctcaagagttcatttaccatatcagtagacacgtctaagaaccagttctccctgaagctgagctctgtgactgccgcggacacggccatgtattactgtgcgagagtagtgagatactgtagtagtaccagctgctatacgcttgacttctggggccagggaaccctggtcaccgtctcctca

SEQ ID NO: 1473 - DNA, 396 bp, synthetic construct
  source 1..396: mol_type = other DNA
aggtgcacgctggtgcagtctgggggaggcttggtacagccgggggggtccctgagactctcctgttcagcctctggattcagctttagcagctttgccatgaactgggtccgccaggctccagggaaggggctggagtgggtctcaataattagcggtagtggtgttaacacctactacgcagactccgtgaagggccggttcaccatctccagagacaattccaagaacacgctgtatctgcaaatgaacagcctgagagccgaggacacggccgtatattactgtgcgaaaggtccctggtgtagtactagcaactgctatacttcaatggtctatcccgtcgctgatttcttccaccactggggccagggcaccctggtcaccgtctcctca

SEQ ID NO: 1474 - DNA, 360 bp, synthetic construct
  source 1..360: mol_type = other DNA
caggtgcagctggtgcagtctggggctgaggtgaagaagcctgggtcctcggtgaaggtctcctgcaaggcttctggaggcaccttcaacaaccattttatcaactgggtgcgacgggcccctggacaagggcttgagtggatgggaaagatcatccctatcattgatatagcaaactccgcacagaagttccagggcagagtcacgattaccgcggacaaatccacgagcacagtctacatggagctgagcagcctgagatctgatgacacggccatgtattactgtgcgcgtcgaactagcagttcgtctgagtattttgactcctggggccagggaaccctggtcaccgtctcctca

SEQ ID NO: 1475 - DNA, 357 bp, synthetic construct
  source 1..357: mol_type = other DNA
caggtgcagctggtgcagtctgggggaggcttggtccagcctggggggtccctgagactctcctgtgcagcctctggactcatcgtcagtagtaactacatgagctgggtccgccaggctccagggaaggggctggagtgggtctcaacaatttatcccggtggtagcacattctacacagactccgtgaagggcagattcaccatctccagagacggttccaagaacacgctgtatctggaaatgaagagcccgagagccgaggacacggctctttactactgtgtgagacccatatacggtggtaacccgggcatggacgtctggggcaaagggaccacggtcaccgtctcctca

SEQ ID NO: 1476 - DNA, 369 bp, synthetic construct
  source 1..369: mol_type = other DNA
caggtccagctggtgcagtctgggggaggcgtggtccagcctgggaagtccctgagactctcctgtgcaacgtctggattcaccttcaataactatggcatgcactgggtccgccaggctccaggcaaggggctggagtgggtggcagttatatggtatgatggaagtaataaatattacgcagactccgtgaagggccgattcaccatctccagagacaattccaagaacacgctgtatctgcaaatgaacagcctgagagccgaggacacggctgtgtattattgtgcgaggttcggatatagtctagaggccacgaccgacgcctttcactactggggccagggaaccctggtcaccgtctcctca

SEQ ID NO: 1477 - DNA, 351 bp, synthetic construct
  source 1..351: mol_type = other DNA
caggtgcagctggtgcagtctggcggaggcttgatccagccgggggggtccctgcgactctcatgtgcagcctctgggctcatcgtcagtagcaactacatgaactgggtccgccaggctccagggaaccggctggagtgggtctcagttctttttgccggtggaaccacattctacgcagactccgtgaagggccgattcaccatctccagagacaattccaagaacactctgtatctccaaatgaacagcctgcgcgccgaggacacggccgtgtattactgtgcgagagatctggtaacctacggtatggatgtctggggccaagggaccacggtcaccgtctcctca

SEQ ID NO: 1478 - DNA, 372 bp, synthetic construct
  source 1..372: mol_type = other DNA
aggtacccgctggtgcagtctggggctgaggtgaagaagcctgggtcctcggtgaaggtctcctgcaaggcttctggaggcaccttcagcagctatactgtcatctgggtgcggcaggcccctggacaagggcttgaatgcctgggaaggatcttccctatccttggtgtaacagactacgcacagaagttccaggacagagtcacgattaccgcggacaaatccacgggcacagcctacatggaactgaccagcctgagatctgaggacacggccgtgtattactgtgcgagagagacgggttactctagttcggggagtgttccgtacttccatgtctggggccgtggcaccctggtcaccgtctcctca

SEQ ID NO: 1479 - DNA, 351 bp, synthetic construct
  source 1..351: mol_type = other DNA
caggtgcagctgcagcagtctggaggaggcttggtccagcctggggggtccctgagactctcctgtgtagcctctgggatcactgtcagtgccaactacatgaactgggtccgccaggctccaggaaaggggctggagtgggtctcagttctttatagcggtggtaccacatactacgcagactccgtgaagggccgattcaccatctccagagacaattccaagaacaccctatatcttcaaatgaacagtctgagagctgaggacacggccgtgtattactgtgcgagagatctggtcgtctacggtatggacgtctggggccaagggaccacggtcaccgtctcctca

SEQ ID NO: 1480 - DNA, 357 bp, synthetic construct
  source 1..357: mol_type = other DNA
caggtccagctggtgcagtctggggctgaggtgaagaagcctggggcctcagttagggtctcctgcaaggcttctggatacaccttcaccacttttgatatcaactgggtgcgacaggccactggacaagggcttgagtggatgggatggatgaaccctaacagtggttacacaggctatgcacagaagttccagggcagagtcaccatgaccaggaacacctccacaagcacagcctacgtggagctgaacagcctgcgatctgaggacacggccgtgtattactgtgcgagagggggggaacttaccgggcttttacgccactggggccagggaaccctggtcaccgtctcctca

SEQ ID NO: 1481 - DNA, 348 bp, synthetic construct
  source 1..348: mol_type = other DNA
caggtccagctggtgcagtctggggctgaggtgaagaagcctggggcctcagtgaaggtctcctgcaaggcttctggatacagtttcaccggctactatatgtactggatacgacaggcccctggacaagggcttgagtggatgggacagatcaaccctaacaatggtggcacaaactatgcacagaagtttcagggcagggtcaccatgaccagggacacgtccatcaacacagcctacatggagctgcgcaggctgagatctgacgacacggccgtgtattactgttcggcacatggaactgattttgatgtctggggccaagggaccacggtcaccgtctcctca

SEQ ID NO: 1482 - DNA, 366 bp, synthetic construct
  source 1..366: mol_type = other DNA
caggtgcagctgcagcagtctggggctgaggtgaagaagcctggggcctcagtgaaggtttcctgcaaggcatctggatacaccttcagcagctactatatacattgggtgcgacaggcccctggacaagggcttgagtggatgggaataatcaaccctagcgctggtagcacaacctacgcacagaagttccagggcagagtcaccatgaccagcgacacgtccacgcgcacaatctatattgaactgagcagcctgaaatctgaggacacggccgtctattactgtgcgagagggggtatagtgccagatgctaaggaaccctttcactactggggccagggaaccctggtcaccgtctcctca

SEQ ID NO: 1483 - DNA, 378 bp, synthetic construct
  source 1..378: mol_type = other DNA
caggtgcagctggtgcagtctgggggagacttggtacagcctggagggtccctgagactctcctgtgtcgcctctggattcaccttcagtaattatgagatgaactgggtccgccagggtccagggaagggactggagtggatttcatacattagtactagtggtagtacctattactacgcagactctgtgaagggccgattcaccatatccagagacaacgccaggaactcactgtatctgcaaatggacagcctgagagtcgaggacactgctatttattactgtctgacacaccctcagcctcaatatgtacgacccacgcaggtggtctggttcgacccctggggccagggaaccctggtcaccgtctcctca

SEQ ID NO: 1484 - DNA, 369 bp, synthetic construct
  source 1..369: mol_type = other DNA
caggtccagctggtgcagtctgggcctgaggtgaagaagcctgggacctcagtgaaggtctcctgcaaggcttctggattcacctttagtacttctgctgtgcagtgggtgcgacaggctcgtgggcagccccttgagtggataggatggatcgccgttggcagaggtatcacagaccacgcacagaagttccaggaaagagtcaaaattaccagggacgagtccacaagtacagcctacatggaactgagcagcttgagattcgacgacacggccgtgtattactgtgcggcaccccattgcaatagaaccagctgccacgatgcttttgatctttggggccaagggacaatggtcaccgtctcttca

SEQ ID NO: 1485 - DNA, 360 bp, synthetic construct
  source 1..360: mol_type = other DNA
caggtccagctggtgcagtgtgggggaggcttggtacagcatggggggtccctaagactgtcttgtgcagcatctggattctcctttggcagctatgtcatgagctgggtccgccagactccagggaaggggctggagtgggtctcaggtattagtggtagtggcggtagcacatactacgcagaggctgtgaggggccggttcaccttgtccagagacgtttccaaggacacactgtttttgcaactgaacagcctgaaagcggcggacacggccatatactactgtgcgagagggcgcaacggctggtacttgggggcggactcctggggccagggaaccctggtcaccgtctcctca

SEQ ID NO: 1486 - DNA, 351 bp, synthetic construct
  source 1..351: mol_type = other DNA
aggtgcccgctggtgcagtctggaggaggcttgatccagcctggggggtccctgagactctcctgtgcagcctctggagtcatcgtcagtagcaactacatgaactgggtccgccaggctccagggaaggggctggagtgggtctcagttatttatagcggtggtagcacattctacgcagactccgtgaagggccgattcaccatctccagagacaattccaagaacacgctgtatcttcaaatgaacagcctgagagccgaggacacggccgtgtattactgtgcgagaggctacggtgactactactttgactactggggccagggaaccctggtcaccgtctcctca

SEQ ID NO: 1487 - DNA, 366 bp, synthetic construct
  source 1..366: mol_type = other DNA
caggtgcagctggtgcagtctgggggaggcttggtacagcctggggggtccctgagactctcctgtgaagcctctggattcacctttagcaactatggcatgagttgggtccgccaggctccagggaaggggctggagtgggtctcaggtctaagtcgtagtggtgatatcacatactacgcagactccgtgaagggccggttcaccatctccagagacaattccaagaacaccctatatctgcaaatgaacagcctgagagccgaggacacggccatatattactgtgcgaaagatctaggactggtagtgactacggaggttgctgacttctggggccagggaaccctggtcaccgtctcctca

SEQ ID NO: 1488 - DNA, 372 bp, synthetic construct
  source 1..372: mol_type = other DNA
caggtccagctggtgcagtctggggctgaggtgaagaagcctgggtcgtcggtgaaggtctcctgcaaggcctctggaggcaccttcagcagctatagtatctcctgggtgcgacaggcccctggacaggggcctgagtggttggggaagatcctccctatccttggagcaacagactacgcacagaagttccagggcagagtcaccattatcgcggacaaatccacgagcacggcctatatggagctgagtagtctgagatctgaggacacggccgtgtattattgtgcgagagagtcggggtactctggttcggggagtgttacgtacttccatctctggggccgtggcaccctggtcaccgtctcctca

SEQ ID NO: 1489 - DNA, 381 bp, synthetic construct
  source 1..381: mol_type = other DNA
caggtgcagctggtgcagtctgggggaggcgtggtccagcctgggaagtccctgagactctcctgtgcagcgtctggattcaccttcagtacctatggcatgcactgggtccgccaggctccaggcaaggggctggagtgggtggcagttatgtggtttgatggaactaataaatactatgcagactccgtgaagggccgattcaccatctccagagacaattccaagaacacgctgtatctgcaaatgaacagccttagagccgaggacacggctgtgtatttctgtgcgagagagtcccactacggtgaagattccgaatactacttccagtactacatggacgtctggggcagggggaccacggtcaccgtctcctca

SEQ ID NO: 1490 - DNA, 363 bp, synthetic construct
  source 1..363: mol_type = other DNA
caggtgcagctggtgcagtctgggggaggcttggtacagcctggagggtccctgagactctcctgtgcagcctctggattcaccttcagtagttatgaaatgaactgggtccgccaggctccagggaaggggctggagtgggtttcattcattagcaatagtgctactgccagatactacgcagactctgtgaagggccgattcaccatctccagagacaacgccaagaactccatgtatctgcaaatgaacagcctgagagccgaggacacggctatttattactgtgcgagagatttgggagggagctactcggggacctttgacttctggggccagggaaccctggtcaccgtctcctca

SEQ ID NO: 1491 - DNA, 366 bp, synthetic construct
  source 1..366: mol_type = other DNA
gaggtgcagctggtgcagtctgggggaggcgtggtccagcctggggggtccctgagactctcctgtgcagcctctggattcaccttcagtagctattctgtacactgggtccgccaggctccaggcaaggggctagagtgggtggcagttatatcatatgatggaaataacaagtactacgcagcctccgtgaagggccgattcaccatctccagagacaattccaaggacacgctgtatcttgaaatgaacagcctgagagatgaggacacggctgtatattactgtgcgagaggtccacattttgactgggtcccgcatacctttgactactggggccagggaaccctggtcaccgtctcctca

SEQ ID NO: 1492 - DNA, 384 bp, synthetic construct
  source 1..384: mol_type = other DNA
caggtgcagctggtgcagtctggaacagaagtgaaaaagcccggggagtctctgacgatctcctgtaagacttctgggtactactttaccacctactggatcacctgggtgcgccagatgcccgggaaaggcctggagtggctggggaggattgatcctagtgactcctataccacctacagcccgtccttccaaggccacgtcaccatgtcaattgacaagtccatcaccactgcctacctgcagtggaccagcctgaaggcctcggacaccgccatgtattactgtgcgagagaatgtggtggtgactgctattttccggagcccctctcccatactgcttttgatatctggggccaagggaccacggtcaccgtctcctca

SEQ ID NO: 1493 - DNA, 369 bp, synthetic construct
  source 1..369: mol_type = other DNA
caggtgcagctggtgcagtctgggggaggcgtggtccagcctggggggtccctgagactctcctgtgaaggctctggattcaccctcagaaactacgctatgcactgggtccgccaggctccaggcaaggggctggagtgcgtggcttttgttgcatatggcagaagtagtgaggactacgcagactccgtgaagggccgattcaccatctccagagacaatgccaagaacacggtctatctagaaatgaacagtctgagagttgaggacgcggcgatctattactgtgcgagagagccccattgtactggaggtgtttgtgatgcttttgatgtctggggccaagggaccacggtcaccgtctcctca

SEQ ID NO: 1494 - DNA, 384 bp, synthetic construct
  source 1..384: mol_type = other DNA
caggtgcagctggtgcagtctggagcagaggtgaaaaagcccggggagtctctgaggatctcctgtaagggttctggatacagatttaccacctactggatcagctgggtgcgccagatgcccggaaaaggcctggagtggatggggaagattgatcctagtgactcttataccaactacaacccgtccttccaaggccacgtcagcatctcagctgacaagtccatcagcactgcctacctgcagtggagcagcctgagggcctcggacaccgccatgtattactgtgcgagacttagcgcagatgattacatttgggggaattatggcggaggggatgcatttgatatctggggccaagggacaacggtcaccgtctcctca

SEQ ID NO: 1495 - DNA, 387 bp, synthetic construct
  source 1..387: mol_type = other DNA
caggtccagctggtgcagtctgggggaggcttggtacagccagggcggtccctgagactctcctgtacaacttctggattcaactttggtgattattctatgagctgggtccgccaggctccagggaaggggctggagtgggtaagtttcattagaagcaagacttatggagggacaacacattacgccgcgtctgtgaaaggcagattcaccatctcaagagatgattccaaacgcatcgcctatctgcaaatgaacagcctgaagaccgaggacacagccgagtattattgttgtagagagattgaagggacatataactatggttcgaactacttctactacatcgacgtctggggcaaagggaccacggtcaccgtctcctca

SEQ ID NO: 1496 - DNA, 372 bp, synthetic construct
  source 1..372: mol_type = other DNA
caggtgcagctggtgcagtctgggggaggcttggtacagcctggggggtccctgagactctcctgtgcagcctctggattcaccttcagtagttatagcatgaactgggtccgccaggctccagggaaggggctggaatgggtttcatacattagtagtaggagtagcaccatatcctatgcagactctgtgaagggccgcttcaccatctccagagacaatgccaagaactcactgtatctgcaaatgaacagcctgagagccgaggacacggctgtgtattactgtgcgagagatgatcggagactaggagactactactactattacatggacgtctggggcatagggaccacggtcaccgtctcctca

SEQ ID NO: 1497 - DNA, 351 bp, synthetic construct
  source 1..351: mol_type = other DNA
caggtgcagctggtgcagtctggaggaggcttgatccagcctggggggtccctgagactctcctgtgcagcctctggattcatcgtcagtagaaactacatgagctgggtccgccaggctccagggaaggggctggagtgggtctcacttatttatgccggcggtaccacatactacgcagactccgtgaagggccgattcaccatctccagagacaattccaagaacacgctgtatcttcaaatgaacagcctgagagccgaggacacggccgtttattactgtgcaagagatagggggcctttactacacgactactggggccagggcaccctggtcaccgtctcctca

SEQ ID NO: 1498 - DNA, 372 bp, synthetic construct
  source 1..372: mol_type = other DNA
caggtgcagctgctgcagtctggggctgaggtgaagaagcctgggtcctcggtgaaggtctcctgcaaggcttctggaggcaccttcagcagctatactatctcctggatgcgacaggcccctggacaggggcctgagtggttgggaaagatcttccctatccttggagcaacagactacgcacagaagttccagggcagaatcaccattatcgcggacaagtccacgaacacggcctatttggagctgagcagcctgagatctgaggacacggccgtgtattattgtgcgagagagtcggggtactctggttcggggagtgttacgtacttccatctctggggccgtggcaccctggtcaccgtctcctca

SEQ ID NO: 1499 - DNA, 357 bp, synthetic construct
  source 1..357: mol_type = other DNA
caggtgcagctggtgcagtctggggctgaggtgaagaagcctgggtcctcggtgaaggtctcctgcaaggcttctggaggcactttcagttataatataaactgggtgcgacaggcccctggacaagggcttgagtggatgggaaggatcatccctatccttggtataccacactacgcacagaggttccagggcagagtcacgattaccgcggacaaatccacgactaccctgttcatggagctgagcagcctgagatctgaggacacggccatatattactgtgcgagagagggtggtaccaccactgcatacttcccgcactggggccagggcaccctggtcaccgtctcctca

SEQ ID NO: 1500 - DNA, 369 bp, synthetic construct
  source 1..369: mol_type = other DNA
caggtgcagctgcagcagtctggggctgaggtgaagaagcctggggcctcggtgaaggtctcctgcaaggcttctggacacaccttcaccggctactttatctactgggtgcgacaggcccctggacaagggcttgagtggatgggacggatcaatcctaatagtggtgacacagactatgcacagaagttccagggcagggtcaccatgaccagggacacgtccatcagcacagcctacatggagctgagcaggctgacctctgacgacacggccatgtattactgtgcgagagagccggggagggatattttgactggtgattattgggactcgtggggccagggaaccctggtcaccgtctcctca

SEQ ID NO: 1501 - DNA, 390 bp, synthetic construct
  source 1..390: mol_type = other DNA
caggtgcagctgcagcagtcgggcccaggactggtgaagccttcggggaccctgtccctcacctgcgctgtctctggtggctccatcgggagtagtcactggtggagttgggtccgccagaccccagggaaggggctggagtggattggggaaatctatcaaagtgtgagcaccaactacaacccgtccctcgagagtcgggtcaccatgtcagtagacaagtccaagaaccagttctccctgaagctgacctctgtgaccgccgcggacacggccctctattactgtgcgagaagggggagtggatattgtagtggtggcacctgctaccaaatccccgccgatgcttttgctatctggggccaagggaccacggtcaccgtctcctca

SEQ ID NO: 1502 - DNA, 390 bp, synthetic construct
  source 1..390: mol_type = other DNA
caggtccagctggtgcagtctggagctgaggtgaagaagcctggggcctcagtgaaggtctcctgcaaggcttctggttacacctttaccagctacggtatcagctgggtgcgacaggcccctggacaggggcttgagtggatgggatggatcagcacttacaatggtaacacaaactatgcacagaagctccagggcagagtcaccatgaccacagacacatccacgggcacagcctacatggagttgaggagcctgagatctgacgacacggccgtatattactgtgcgagagttttcagtttctatgatagtcgtgcttttaccatcggggggactgcgtactactttgactactggggccagggaaccctggtcaccgtctcctca

SEQ ID NO: 1503 - DNA, 360 bp, synthetic construct
  source 1..360: mol_type = other DNA
caggtccagctggtgcagtctgggggaggcgttgtccagcctgggatgtccctgagactctcctgtgcagcctctagattcacttttcgtaactttggcatgcactgggtccgccaggctcccggcaagggactggagtgggtggcaactacattttatgacggcagtgataaattctatgcagactccgtgaagggccgattcaccgtctccagagacaatttcgacaatatcctgtatctgcaaatgaacaacctgagacctgaggacacggctatgtattactgtgcgaaagatgggggctacggtgactacgaaattgagtcctggggccagggaaccctggtcaccgtctcctca

SEQ ID NO: 1504 - DNA, 366 bp, synthetic construct
  source 1..366: mol_type = other DNA
caggtgcagctggtgcagtctggaggaggcttgatccagcctggggggtccctgagactctcctgtagagcctctgggtttaccgtcagtagcaactacatgaactgggtccgccagactccagggaaggggctagagtgggtctcagttatttatcccggaggtagcacattctacgcagactccgtgaagggccgattcaccatctccagagacaattccaagaacacgctgtatgttcaactgaacagcctgagagccgaggacacggccgtgtattactgtgcgagatttcacgatatttcgactcgttactccgatgcttttgatatctggggccaagggaccacggtcaccgtctcctca

SEQ ID NO: 1505 - DNA, 342 bp, synthetic construct
  source 1..342: mol_type = other DNA
caggtgcagctggtgcagtctggggctgaggtgaagaagcctggggcctcagtgagggtctcctgcaaggcttctgaatacaccttcaccggctaccaaatgcactgggtgcgacaggcccctggacaagggcttgagtggatgggacggatcaaccctaagagtggtagcacaaactatgcacagaagtttcagggcagggtcaccttgaccagggacacgtccatcaccacagcctacatggagttgaggaggctgagatctgacgacacggccgtctattactgtgcgagaggggacctgaacatctggggccaagggacaacggtcaccgtctcctca

SEQ ID NO: 1506 - DNA, 372 bp, synthetic construct
  source 1..372: mol_type = other DNA
aggtcaacgctgaaggagtctggtcctacgttggtaaaacccacacagaccctcacgctgacctgcaccttctctgggttctcactcagcactagtgcagtgggtgtgggctggatccgtcagccccctggaaaggccctggagtggcttgcactcatttattgggatgacgataagcgctacagcccatctctgaagagcaggctcagcatcaccaaggacacctccaaaaaccaggtggtccttagaatgaccaacatggaccctgtggacacagccacatattactgtgcacacggccaatataccagcagctggatccattggtacttcgatctcttgggccgtggcaccctggtcaccgtctcctca

SEQ ID NO: 1507 - DNA, 372 bp, synthetic construct
  source 1..372: mol_type = other DNA
aggtgcagctgcaggcagtctgggggaggcttagttcagcctggggggtccctgagactctcctgtgcagcctctggattcaccttcagtaactactggatgcactgggtccgccaaactccagggaaggggctggtctgggtctcacgtattaatggagatgggagtagtccgacttacgcggactccgtgaagggccgattcaccgtctccagagacaacgccaagaacacgctgtatctgcaaatgaacagtctgagagtcgaagacacggctgtgtactactgtgcaagagacctggaaagtgggagctttcatcccggcctggttcgggtcccctggggccagggaaccctggtcaccgtctcctca

SEQ ID NO: 1508 - DNA, 360 bp, synthetic construct
  source 1..360: mol_type = other DNA
caggtccagctggtgcagtctggagcagaggtgaagaagcccgggcagtctctgaagatctcctgtaagggttctggatacagctttaccagctactggatcggctgggtgcgccagatgcccgggaaaggcctggagtggatggggatcatctatcctggtgactctgataccagatacagcccgtccttccaaggccaggtcaccatctcagccgacaagttcatcagcaccgcctacctgcagtggagcagcctgaaggcctcggacaccgccacgtattactgtgcgagatttgatggtgggagctactacgactttgactactggggccagggagccctggtcaccgtctcctca

SEQ ID NO: 1509 - DNA, 360 bp, synthetic construct
  source 1..360: mol_type = other DNA
caggtgcagctgcaggagtccgggggaggcttagttcagccgggggggtccctgagactctcctgtgcagcctctggattccccctcagttacttctggattcactgggtccgccaaactccagggaaggggctggtgtgggtctcacgtagtagtagtgatgggagcgccacaagctacgcggactccgtgaagggccgattcaccgtctccagagacaacgccaagaacacgatgtatctgcaaatgaacagtctgagagtcgaggacacggctgtatacttttgtgcaagagaggtgtctggtagtggctggccatttgactcctggggccagggaaccctggtcaccgtctcctca

SEQ ID NO: 1510 - DNA, 369 bp, synthetic construct
  source 1..369: mol_type = other DNA
caggtccagctggtgcagtctggggctgaggtgaagaagcctgggtcctcggtgaaggtctcctgcaaggcttctggaggcaccttcagaagtcatagtatcagttgggtgcgacaggcccctggacaaggacttgagtggatgggaaggatcatccctatccttggtatagcaacctacccacagaagttccaggacagagtcacgattaccgcggacaaatccacgagcacagcctacatggagctgagcagcctgatatctgaggacacggccgtgtatttctgtgcgagagtgggggagatgtctacagccgggaatgatgcttttgatatctggggccaagggaccacggtcaccgtctcctca

SEQ ID NO: 1511 - DNA, 372 bp, synthetic construct
  source 1..372: mol_type = other DNA
aggtccagctggaggcagtctggggctgaggtgaagaagcctgggtcctcggtgaaggtctcctgcagggcttctggaggcaccttcagcaatcattttatcagctgggtgcgacaggcccctggacaaggccttgagtggatgggaaggatcatccctgtccttggtatagcagactacgcacagaagttccagggcagagtcacgattaccgcggacaaatccacgagcacagcctacctggagctgagcagcctgaaatctgaagacacggccatttatttctgtgcgcgtggttcggggtactctggttcagggagtaactactacttcgacccctggggcccgggaaccctggtcaccgtctcctca

SEQ ID NO: 1512 - DNA, 357 bp, synthetic construct
  source 1..357: mol_type = other DNA
caggtgcagctgcaggagtccggtcctacgctggtgaaacccacacagaccctcacgctgacctgcaccttctctgggttctcgctcaactctgctggagtgggtgtgggctgggtccgccagcccccaggaaaggccctggagtggcttgctctcatttattgggatgatgagaagcgctacagcccacctctgaagaccagactcgccatcaccaaggacacctccaaaaaccaggtggtccttagaatgaccaacatggaccctgtggacacagccacatattattgtgcacgtcactcgattacgacgatctttgactactggggcccgggaaccctggtcaccgtctcctca

SEQ ID NO: 1513 - DNA, 360 bp, synthetic construct
  source 1..360: mol_type = other DNA
caggtgcagctggtgcagtctggggctgaggtgaaaaagcctggggcctcagtgagggtttcctgcaaggcctctggatatgccttcagcaactacaatctgcactgggtgcgacaggcccctggacaggggcttgagtggatgggaataatctaccctactggaggtggcacacggtccgcacagagtgtccagggcagagtcaccatgaccagggacacgtccacgagcacaatttacctggacttgagcagcctgagatctgaggacacggccatgtattattgtgctagagagggagtgactgggacgggctactttgactactggggccagggagccctggtcaccgtctcctca

SEQ ID NO: 1514 - DNA, 366 bp, synthetic construct
  source 1..366: mol_type = other DNA
caggtccagctgcagcagtccggagcagaggtgaaaaagcccggggagtctctgaggatctcctgtaagggctctggatacagctttaccaattactggatcacctgggtgcgccagaagcccgggcaaggcctggagtggatggggaggattgatcctagtgactcttacagcaactacagcccgtccttccacggccacgtcaccatctcagctgacaagtccatcagcactgcctacctgcagtggagcagcctgcaggcctcggacaccgccatctattattgtgcgagacatctacgggtagtaccaggctactacctctttgacaactggggccagggaaccctggtcaccgtctcctca

SEQ ID NO: 1515 - DNA, 360 bp, synthetic construct
  source 1..360: mol_type = other DNA
caggtgcagctggtggagtctgggggaggcttggtacagcctggcaggtccctgagactctcctgtgcagcctctggattcacctttgatgattacgccatgcactgggtccggcaagctccagggaagggcctggagtgggtctccgttattagttggaatagtgatagcataggctatgcggactctgtgaagggccgattcaccatctccagagacaacgccaagaactccttctatctgcaaatgaacagtctgagacctgaggacacggccttgtattactgtgcaagggagggttgtagaagtaccacctgctatgactactggggccagggaaccctggtcaccgtctcctca

SEQ ID NO: 1516 - DNA, 372 bp, synthetic construct
  source 1..372: mol_type = other DNA
caggtacagctgcagcagtctggggctgaggtgaagaagcctgggtcctcggtgaaggtctcctgcaaggcttctggaggcaccttcagcagctatcctatcagctgggtgcgacaggcccctggacaagggcttgagtggatgggaagtatcatccctatccttggtgtcgcaaaatacgcacagaagttccagggcagagtcacgattaacgcggacaaatccacgagcacagcctacatggagctgagcagcctgagatttgaggacacggccgtgtattactgtgcgagagatttggggtatagcagtggcggggccaattactactttgactactggggccagggaaccctggtcaccgtctcctca

SEQ ID NO: 1517 - DNA, 345 bp, synthetic construct
  source 1..345: mol_type = other DNA
caggtgcagctggtggagtctggaggaggcttgatccagcctggggggtccctgagactctcctgtgaagcctctgggctcaccgtcagtagcaactacatgagctgggtccgccaggctccagggaaggggctggagtgggtctcagttatttatagcggtggtagcacatactacgcagactccgtgaagggccgattcaccatctccagagacaattccaagaacacgctgtatcttcaaatgaacagcctgagagccgaggacacggccgtgtattactgtgcgagaatgccttacggtacggacgtctggggccaagggaccacggtcaccgtctcctca

SEQ ID NO: 1518 - DNA, 357 bp, synthetic construct
  source 1..357: mol_type = other DNA
caggtgcagctgcagcagtcgggcccaggactggtgaagccttcacagaccctgtccctcacctgcactgtctctggtggctccatcagcaggggttcttactactggagctggatccgccagcacccagggaagggcctggagtggattggttacatctattccagtgggagcacctactacaacccgtccctcgagagtcgacttaccatatcattagacacgtctaagaaccagttctccctgaggctgacctctgtgactgccgcggacacggccgtctatttctgtgcgaggcattctgtgccgtactactttgactactggggccagggaaacctggtcaccgtctcctca

SEQ ID NO: 1519 - DNA, 378 bp, synthetic construct
  source 1..378: mol_type = other DNA
caggtccagctggtgcagtctgggtctgagttgaagaagcctggggcctcagtgaaggtttcctgcaaggcttctggatataccttcaatacctacgctatgaattgggtgcgacaggcccctggacaagggcttgagtggatgggatggatcaacaccaacactggggccacaacgtatgcccagggcttcacagggcgttttgtcttctccttcgacacctctctcactacggcatatctgcagatcagcagcctaagggctgaggacactgccgtgtatttctgtgcgagagatgaggagtcgctctatgaagcagtgactggtacaggctggttcgacccctggggccagggaaccctggtcaccgtctcctca

SEQ ID NO: 1520 - DNA, 366 bp, synthetic construct
  source 1..366: mol_type = other DNA
caggtcacgctgaaggagtctgggggaggcgtggtccagcctgggacgtcccagagagtctcctgcacagtctctggagccgacttcagtacttacggcatgcactgggtccgccaggctccaggcaaggggctggagtgggtggcagctctctcacatgatggagcttataaattctatgcagactcagtgaagggccgattcaccatctccagagacaattccaagaaaacggcgtttctgcaaatgaacagtgtgagaccggaggacacggctgtctattactgtgcgaaggacctgattaactacgatccctggagtggctttttcacttggggccagggaaccctggtcaccgtctcctca

SEQ ID NO: 1521 - DNA, 357 bp, synthetic construct
  source 1..357: mol_type = other DNA
caggtccagcttgtgcagtctggagcagaggtgaaaaagtccggggagtctctgaagatctcctgcaagggttctggatacagctttagcaactactggatcggctgggtgcgccagatgcccgggaaaggcctggagtggatggggatcatctatcctggtgactctgacaccagatacagcccgtccttccaaggccacatgaccatctcagccgacaagtccatcagtaccgcctacctgcagtggaacagcctgaaggcctcggacaccgccatgtattactgtgcgagacagggaacgacagtagggcactttgacaactggggccagggaaccctggtcaccgtctcctca

SEQ ID NO: 1522 - DNA, 372 bp, synthetic construct
  source 1..372: mol_type = other DNA
caggtgcagctggtgcagtctggggctgaagtgaagaagcctgggtcctcggtgaaggtctcctgcaaggcttctggaggcaccttcagcagctacactttcagctgggtgcgacaggcccctggacaagggcttgagtggatgggaaggatcttccctatccttggtgtagcaaactacgcacagaagttccagggcagagtcaccatttccgcggacaaatcaacgaccacggcctacatggaactgagcagcttgacatctgaggacacggccgtctattattgtgcgagagatatcggatacagtgactacggggcaacatactggttcgacccctggggccagggaaccctggtcaccgtctcctca

SEQ ID NO: 1523 - DNA, 372 bp, synthetic construct
  source 1..372: mol_type = other DNA
caggtgcagctgcagcagtccgggggaggcttggtacagcctggcaggtccctgagactctcctgtgcagcctccggattcacctttgatgattatgccatgcactgggtccggcaagctccagggaagggcctggagtgggtctcaggtgttacttggaatagtggtaccataggttacgcggactctgtgaagggccgattcaccatctccagagacaacgccaagaactccctatatctgcacatgcgcagtttgacacctgaggacacggccctttattactgtgtaaaagatcgctataactggaaaagggagtactactacggtatggacgtctggggccaagggaccacggtcaccgtctcctca

SEQ ID NO: 1524 - DNA, 387 bp, synthetic construct
  source 1..387: mol_type = other DNA
agatgcacgctggaggagtctgggggaggcgtggtccagcctgggaggtccctgagactctcttgtgaagcctctggattcacctttagtaattttggcatgcactgggtccgccaggctccaggcaaggggctggagtgggtggcagctatatcatttgatggagatatcacatactatgcagactccgtgaagggccgattcaccatctccagagacgattccaagaacactctgcatctccaaatacacagcctgagacttgaggacacggctacttattactgtgggaaagatctcgatattgtggtggcggtagttggcaccccttattactattacggtctggacgtctggggccaagggaccacggtcaccgtctcctca

SEQ ID NO: 1525 - DNA, 381 bp, synthetic construct
  source 1..381: mol_type = other DNA
caggtcacgttgaaggagtctgggggaggcgtggtccagcctgggaggtccctgagactctcctgtgcagtctctggattcactgtcagtagatttgctatgcactgggtccgccaggctccaggcaaggggctggagtgggtggcaatgatatcatttgatggaagtgaaaaatactacgcagactccgtgaagggccgattcaccatctccagagacaactccaagatcacactgtatctacaaatgaacagcctgagagctgaggacacggctatgtattactgtgcgagaggagattactatggttcagggagttcctataatccactgcccacctttgactactggggccagggaaccctggtcaccgtctcctca

SEQ ID NO: 1526 - DNA, 375 bp, synthetic construct
  source 1..375: mol_type = other DNA
caggtgcagctggtgcagtctgggggaggcgtggtccagcctgggaggtccctgagactctcctgtgcagcgtctgaattcaccttcagtagttatactctgcactgggtccgccaggctccaggcgagggactggagtgggtgtcatttatatcacatgatggaggtagaatagactacgcagactccgtgaagggccgattcaccatctccagagacaattccaagaacacgctgtatctgcaaatgaacagcctgagagctgaggacacggctgtgtattactgtgcgagaggcgacattttgactgggtacccgatatcaaaggatgctcttgatctctggggccacgggaccacggtcaccgtctcctca

SEQ ID NO: 1527 - DNA, 357 bp, synthetic construct
  source 1..357: mol_type = other DNA
caggtgcagctggtgcagtctgggggaggcttggtccagccgggggggtccctgagactctcctgtgcagcctctagattcacctttaatagttattggatgagttgggtccgccaggctccagggaagggactggagtgggtggccagcataaagcaagatggaagtgagaaatactatgtggactctttgaagggccgattcaccatttccagagacaacgccaagaatttattgtatctgcaaatgaacatcctgagagtcgaggacacggctgtatattactgtgcgaggatgccgacggtttatagtggctacgataagtggggccagggaaccctggtcaccgtctcctca

SEQ ID NO: 1528 - DNA, 375 bp, synthetic construct
  source 1..375: mol_type = other DNA
caggtgcagctggtgcagtctggaccagaggtgaaaaagtccggggagtctctgaagatctcctgtaaggcttctggatataggtttggcaaccattggatcggctgggtgcgccaggcgcccgggaaaggcctggagtggatggggatcatctatcctgatgactctgataccagatacggcccgtccttcgaaggccaggtcaccatctcagtcgacaagtccatcagcaccgcctacttgcagtggagcagcctgaaggcctcggacaccgccatgtattactgtgtgagacgacctagggttcagggaattcttgtcgcgagtgatccttttgatatctggggccaagggacaacggtcaccgtctcctca

SEQ ID NO: 1529 - DNA, 393 bp, synthetic construct
  source 1..393: mol_type = other DNA
caggtccagctggagcagtctgggggaggcgtggtccagcctgggaggtccctgagactctcctgtgcagcctctggattcaccctcagtagtcattctatgcactgggtccgccaggctccaggcaaggggctggagtgggtggcacttatatcacttggtgcaaataataaatactacgcagactccgtgaagggccgattcaccatctccagagacaattccaagaacacgctgtatctgcaaatgaacagcctgagagctgaggacacggctatatattactgtacaagagaaatatccgggggtactaagggcatgtatagtgggagctacttcctcttttccggctttgactactggggccagggaaccctggtcaccgtctcctca

SEQ ID NO: 1530 - DNA, 360 bp, synthetic construct
  source 1..360: mol_type = other DNA
caggtcacgctgaagcagtctggtcctaccgtggtgaaacccacacagaccctcacgctgacctgcaacttctctgggttctcactcagcagtaatggagagggtgtggcctggatccgtcagcccccaggaaaggccctggagtggtttgcagtcatttattgggatgaagaggagcgctacagcccatctctcaagagcaggctaaccatcaccaaggacacctctaaaaaccaggtggtccttacaatgaccgacatggaccctgtggacacaggcacatattactgtgcacacactactcgatatagcaacaggttcgacccctggggccagggaaccctggtcaccgtctcctca

SEQ ID NO: 1531 - DNA, 354 bp, synthetic construct
  source 1..354: mol_type = other DNA
ccaggtcacattgaaggagtctggtctgcgctggtgaagcccacagagaccctcacactgacctgcaccttgtatgggttctcactcagcactagtggaatgtctgtgagctggatccgtcagccccccgggggggccctggagtggcttgcacgcattgattgggatggttataaatattacagcacaactctggagaccaggctcaccatctccaaggacacctccaaaaaccaggtggtcctttcactgaccaacatggaccctgtggacacagccacgtattactgtgcacggtgccaggtggggatggagaacaactggggccagggaaccctggtcaccgtctcctca

SEQ ID NO: 1532 - DNA, 363 bp, synthetic construct
  source 1..363: mol_type = other DNA
caggtgcagctgctgcagtctggggctgaggtgaaggagcctggggcctcagtgaaggtttcctgcaaggcatctgggtacaccttcaccagctactatatgcactgggtgcgacaggcccctgcacaagggcttgagtggatgggaatagtcaaccctggtggtggtgacacaagctacgcacagaagttccagggcagagtctccatgaccagggacacgtccgcgagcacagtctacttggagctgagcagcctgagatctgaggacacggccatttattactgtgcgagaacccgcatagcagcagccacggactactttgactactggggccagggaaccctggtcaccgtctcctca

SEQ ID NO: 1533 - DNA, 363 bp, synthetic construct
  source 1..363: mol_type = other DNA
caggtgcagctggtgcagtctggggctgaggtgaagaagcctgggtcctcggtgaaggtctcctgcaaggcttctggaggcaccttcagcagtagtgctatcaactgggtgcgacaggcccctggacaagggcttgagtggatgggaggaatcatccctatttttggtacaacaaactacgcacagaagttccagggcagagtcacgattaccgcggacgaattaacgaacacagcctacatggagctgagcagcctgagatctgaggacacggccgtgtattactgtgcgacagatcacgttacttcgcccctctacggtttggacgtctggggccaagggaccacggtcaccgtctcctca

SEQ ID NO: 1534 - DNA, 381 bp, synthetic construct
  source 1..381: mol_type = other DNA
caggtgcagctggtgcagtctgggggagggttggtacagcctggcaggtccctgagactctcctgtgcagcctctggattcacctttgatgattatgccatgcactgggtccggcaagctccagggaagggcctggagtgggtctcaggtattagtgggaatagtggtaccataggctatgcggactctgtgaagggccgattcaccatctccagagacaacgccaagaactccctctatctgcaaatgaacagactgagagctgaggacacggccttgtattactgtgcaaaaactttggccccagacagggcccattacgataccgcgaacgatgcttttgatatctggggccaagggaccacggtcaccgtctcctca

SEQ ID NO: 1535 - DNA, 366 bp, synthetic construct
  source 1..366: mol_type = other DNA
caggtccagctggtggagtctgggggaggcttggtacagcctggcaggtcactgagagtctcctgtgcagcctctggattcatctttgatgattatgccatgcactgggtccggcaagctccagggaagggcctggagtgggtctcaggaattaattggaatagtggtaccatagcctatgcggactctgtgaagggccggttcaccatctccagagacaacgccaagaactccctgtatctggaaatgcacagtctgaaacctgacgacacggccttatattactgtgcaaaatacagggtggcggaattaacgaatgatgtttttgatgtctggggccaagggaccacggtcaccgtctcctca

SEQ ID NO: 1536 - DNA, 369 bp, synthetic construct
  source 1..369: mol_type = other DNA
caggtgcagctggtgcagtctgggggcggcgtggtccagcctgggaggtccctgagactctcctgtgcagcgtctggattcaccttcagtaactatgccatgcactgggtccgccaggctccaggcaaggggctggaatgggtggcagttatttggtatgatggcagttttaaattctatgcagactccgtgaagggccgattcaccatctccagagacaattccaagaacacggtgtatctgcaaatgaacagcctgagagccgaggacacggctgtgtattactgtgcgagagatgagaacggacatgaagtcatggttactcactttgactactggggccagggaaccctggtcaccgtctcctca

SEQ ID NO: 1537 - DNA, 363 bp, synthetic construct
  source 1..363: mol_type = other DNA
caggtgccgctgaagcagtctggggctgaggtgaagaagcctggggcctcagtgaagatttcctgcaaggcatctggatacaccttcaccagctactatgtacactgggtgcgacaggcccctggacaagggcttgagtggatgggaatgatcaaccctactggtggtagcacaggttacgcacagaagttccagggcagagtcaccatgtccagggacacgtccacgagcacagtctacatggaactgaccagcctgagatctgaggacacggccgtttattactgtgcgagaagccaagtagtgccagctactagtcaccttgactactggggccagggaaccctggtcaccgtctcctca

SEQ ID NO: 1538 - DNA, 363 bp, synthetic construct
  source 1..363: mol_type = other DNA
caggtccagctggtgcagtctgggggaggcgtggtccagcctgggaggtccctgagactctcctgtgcagcgtctggattcaccttcagtagctatggcatgcactgggtccgccaggctccaggcaaggggctggagtgggtggcagttatatggtatgatggaagtaataaatactatgcagactccgtgaagggccgattcaccatctccagagacaattccaagaacacgctgtatctgcaaatgaacagcctgagagccgaggacacggctgtgtattactgtgcgagagcggggtacagtagctactactactacatggacgtctggggcaaagggaccacggtcaccgtctcctca

SEQ ID NO: 1539 - DNA, 393 bp, synthetic construct
  source 1..393: mol_type = other DNA
caggtgcagctgcaggagtccgggactgaggtgaagaagcctgggtcctcggtgaaggtctcctgcaaggcctctggaggcaccttcagcacctatcatgtcagctgggtgcgacaggcccctggacgaggccttgagtggatgggagggatcatccctctctttggttcagcaaactacacacagaggttccagggcagagtcacgattaccgcggacaaatccacgcgcacagtctacatggagttgaggagtctgagatctgacgacacggccgtatattattgtgcgagcgaggattgtagtggtggtagctgctacttcggggttgggagtccttatgcacgaggattcgaaacctggggccagggaaccctggtcaccgtctcctca

SEQ ID NO: 1540 - DNA, 357 bp, synthetic construct
  source 1..357: mol_type = other DNA
caggtccagctggtgcagtctggagcagaggtgaaaaagcccggggagtctctgaagatctcctgtaagggatctggatacagctttaccagctactggatcgcctgggtgcgccagatgcccgggaaaggcctggagtggatggggatcatctatcctggtgactctgataccagatacagcccgtctttccaaggccaggtcaccttctcagccgacaagtccatcagcaccgcctacctgcagtggaccagcctgaaggcctcggacaccgccatttattactgtgcgagacgtgacagcagctggaacgacatggacgtctggggcaaagggaccacggtcaccgtctcctca

SEQ ID NO: 1541 - DNA, 366 bp, synthetic construct
  source 1..366: mol_type = other DNA
caggtgcagctggtggagtctgggggaggcttggtacagcctggcaggtccctgacactctcctgtgcagcctctggattcacctttgaagattttgccttgcactgggtccggcaagctccagggaagggcctggagtgggtctcaggtattagttggaatggtggtgtcataggctatgcggactctgtgaagggccgattcatcctctccagagacaacgacaagaattccctgtatctacatatgcggggtctgagagctgaggacacggccttgtattactgtgcaaaagatgaaggatctgagggggaccagcagccccttgactactggggccagggaaccctggtcaccgtctcctca

SEQ ID NO: 1542 - DNA, 372 bp, synthetic construct
  source 1..372: mol_type = other DNA
caggtgcagctgcagcagtctgggggaggcttagttcagcctggggggtccctgagactctcctgtgcagcctctggattcaccttcagtaacttctggatgcactgggtccgccaagctccagggaaggggctggtgtgggtctcacgtattaatagtgatgggggtagcacaagctacgcggactccgtgaagggccgattcaccatctccagagacaacgccaagaacacgctgtatctgcaaatgaacagtctgagagccgaggacacggctgtatattactgtgcaagagacctggaaagtgggagctttcatcccggcctggttcgggtcccctggggccagggaaccctggtcaccgtctcttca

SEQ ID NO: 1543 - DNA, 372 bp, synthetic construct
  source 1..372: mol_type = other DNA
caggtgcagctggtgcagtctggggctgaggtgaagaagcctgggtcctcggtgaaggtctcctgcaaggcttctggaggcaccttcagcagctttcctattagttgggtgcgacaggcccctggacaagggcttgagtggatgggaaggatcatccctatccttggtgtagcagactacgcacaaaagttccagggcagagtcacgattaccgcggacaaatccacgggcaccgcgtatatggagttgagcagcctgagatctgaggacacggccgtatattactgtgcgagagatgtgggttactctggctcggggagttcttactactttgactcctggggccagggaaccctggtcaccgtctcctca

SEQ ID NO: 1544 - DNA, 393 bp, synthetic construct
  source 1..393: mol_type = other DNA
caggtgcagctgcagcagtctggggctgaggtgaagaagcctgggtcctcggtgaaggtctcctgcaaggcttctggagtccccctcagcaactatgctatcagctgggtgcggcaggcccctggacaagggcttgactggttgggaggaattactccgttttctggcacagccaagcacgcacagaagttccaggacagagtcacgattaccgcggacgaatccacgaacacagtcttcatggagttgagcagcctgagatctgaggactcggccgtctattactgtgccctcctaaatcggggatatcgcagcagctggtttgaaagggggggttactattactacggcatggacgtctggggccaagggaccacggtcaccgtctcctca

SEQ ID NO: 1545 - DNA, 393 bp, synthetic construct
  source 1..393: mol_type = other DNA
caggtacacgctggtgcagtctgggggaggcgtggtccagcctgggaggtcctgcgactctcctgtgaagggtctggattcatcttcagcaattatgccatgcactgggtccgccaggctccaggcaaggggctggagtgggtggctgtcatatcatttgatggagataatatatactatgcagactccgtgaagggccgattcaccatctccagagacaattccaagaagacgatgtatctgcaaatgaacagcctgagagctgatgacacggctgtgtattactgtgcgaaacggggactaggatattgcagtgctggtacgtgcttcggcgagggtgagggaggcgaattcgactactggggccagggaaccctggtcaccgtctcctca

SEQ ID NO: 1546 - DNA, 390 bp, synthetic construct
  source 1..390: mol_type = other DNA
caggtacagctgcagcagtggggcgcgggactattgaagccctcggagaccctgtccctcacctgcgctgtctctggtggctccttcggtgtgactttctctggtgggtccttcactggtcattactggaactggatccgccagaccccagggaaggggctggagtggcttggagaaatcagtcagagtggtacaaccaattccaacccgtccctcaagagtcggctctccatatcaatagacacgtccaagagccatttctccctgaagctgaggtctgtgaacgccgcggacacggctatctattactgtgcgagaggccgcggttccggttcagggagtgactcttttgactcctggggccagggggccctggtcaccgtctcctca

SEQ ID NO: 1547 - DNA, 375 bp, synthetic construct
  source 1..375: mol_type = other DNA
caggtccagctggtgcagtctggggctgaggtgaagaagcctggggcctcagtgaaggtttcctgcaaggcatctggatacaccttcaccaactactatatgctctgggtgcgccaggtccctggacaagggcttgagtggatgggattaatcaaccctagtggtggtagcacaagctacgcacagaagttccagggcagagtcaccatgaccagggacacgtccacgagcacagtctacatggagctgagcagcctgagatctgaggacacggccatgtattactgtgcgagagatccgggtgtggtggacccacaatacccccaccccctgcctcggttctggggccagggaaccctggtcaccgtctcctca

SEQ ID NO: 1548 - DNA, 375 bp, synthetic construct
  source 1..375: mol_type = other DNA
caggtgcagctggtgcagtctggggctgaggtgagggtgcctgggtcctcggtgaaggtctcctgcaaggcttctggaggcaccttcagtagttatagtatcacctgggtgcgacaggcccctggacaagggcttgagtggatgggaacgatcatccctatccttggcgtagcaaactacgcaccgaagttccagggcagagtcaccattaccgcggacaaatccacgagcacagcctacatggaggtgaccagcctgacatctgaggacacggccatatattactgtgcgagagaatattgtagtggtgacagctgccgaaccgttaactggttcgacccctggggccagggaaccctggtcaccgtctcctca

SEQ ID NO: 1549 - DNA, 366 bp, synthetic construct
  source 1..366: mol_type = other DNA
caggtgcagctgcaggagtcgggcccaggactggtgaagccttcggagaccctgtccctcacctgcactgtctctggtggctccatcaataattactactggaactggatccggcagcccccagggaagggactggagtggattgggtatgtctatttcagtgggagcaccaattacaacccctccctcaagagtcgagtcgccatatcactagacaggtccaagaagcagttctccctgaagctgacctctgtgaccgctgcggacacggccgtgtattactgtgcaaggggccttacatataatggctacgatgtagaagcttttgatatttggggccaagggaccacggtcaccgtctcctca

SEQ ID NO: 1550 - DNA, 375 bp, synthetic construct
  source 1..375: mol_type = other DNA
caggtgcagctgcagcagtctggcccaggactgctgaagccttcacagaccctgtccctcacctgcactgtctctggtggctccgtcaatacttggagttactactggggctggatccgccagcgcccagggaagggcctggagtggattgggcacatctcttacagtgggagcacctactacaacccgtccctcaagagtcgaattgccatgtcagtagacacgtctaagaaccagttctccctgaaactgaggtctgtgacggtcgcggacacggccgtgtattactgtgcgagacttgtgaggggtggactcagctatggctctgacgcttttgatctctggggccaagggaccacggtcaccgtctcctca

SEQ ID NO: 1551 - DNA, 366 bp, synthetic construct
  source 1..366: mol_type = other DNA
caggtgcagctggtgcagtctgggggaggcgtggtccagcctgggaggtccctgagactctcctgtgtagggtctggattcaccttcagtagctatgccatgcactgggtccgccaggctccaggcaaggggctggagtgggtggcagttatttggaatgatggaagtaataaatattatacagactccgtgaagggccgattcagtatctccagagacgattccaagaacacgctggatctgcaaatgaacagcctgagggccgaggacacggctgtctattattgtttgagagaatatcagcttgcccccccctactacttcatggacgtctggggcaaagggaccacggtcaccgtctcctca

SEQ ID NO: 1552 - DNA, 375 bp, synthetic construct
  source 1..375: mol_type = other DNA
caggtgcagctggtgcagtctgggggaggcgtggtccagcctgggaggtccctgagactctcctgtgcagcctctgaattcaccttcagtcgctatgctatgcactgggtccgccaggctccaggcaagggactggagtgggtggctgttatatcttttcgtgaaagtgataaaaattacgcagactccgtgaagggccgattcaccgtctccagagacaattccaagaatatgctgtatctgcaaatgaacagcctgagagctgaggacacggctgtatattactgtgcgcgaggcgatattttgactggctacccgacatcaaaggatgcttttgatatctggggccaagggaccacggtcaccgtctcctca

SEQ ID NO: 1553 - DNA, 384 bp, synthetic construct
  source 1..384: mol_type = other DNA
caggtcacgttgcagcagtctgggggaggcttggtacagcctggcaggtccctgagactctcctgtgcagcctctggattcacctttgatgattatgccatgcactgggtccggcaagctccagggaagggcctggagtgggtctcaggtattacttggaatagtggtatcataggctatgcggactctgtgaagggccgattcatcatctccagagacaacgccaagaactccctgtttcttcaaatgtacagtctgagagctgaggacacggccttgtatttctgtgcaaaagatattttaagcgagcgtcattattttgatagtagtggttcctacggtatggacgtctggggccaagggaccacggtcaccgtctcctca

SEQ ID NO: 1554 - DNA, 372 bp, synthetic construct
  source 1..372: mol_type = other DNA
caggtccagcttgtgcagtctggggctgaggtgaagaagcctgggtcctcggtgaaggtctcctgcaaggcttctggaggcaccttcagcagctatcctatcagctgggtgcgacaggcccctggacaagggcttgagtggatgggaaggatcatccctatccttggtataccaaactacacacagaagttccagggcagagtcaccattaccgcggacaaatccacgagcacagcctacatggagctgagcagcctgagatctgaggacacggccgtgtattactgtgcgagagatattggatatagtggctaccaatcggctgaatacttcgatctctggggccgtggcaccctggtcaccgtctcctca

SEQ ID NO: 1555 - DNA, 366 bp, synthetic construct
  source 1..366: mol_type = other DNA
caggtccagctggtgcagtctgggggaggcttggtccagcctggggggtccctgagactctcctgtgtagtctctggattcaccgtcagtagcaactacatgaactgggtccgccaggctccagggaaggggctggagtgggtctcagttatttatagcggtggtagcacatactacgcagactccgtgaagggcagattcaccatctccagagacaattccaagaacacgctgtatcttcaaatgaacagcctgagagccgaggacacggctgtgtattattgtgcgagagatttttatggttcggggagtcctaatgactcgcatgactactggggccagggaaccctggtcaccgtctcctca

SEQ ID NO: 1556 - DNA, 372 bp, synthetic construct
  source 1..372: mol_type = other DNA
caggtgcagctggtgcagtctggagctgaggtgaagaagcctggggcctcagtgaaggtctcctgcaaggcttctggttacacctttaccacttatggaatcacctgggtgcgacaggcccctggacaagggcttgagtggatgggatggatcagcgctttcaacgataacacaaactatgcacagaatttccagggcagagtcaccatgaccacagacacatccacgagcacagcctacatggagttgaggagcctgagatctgacgacacggccgtgtattactgtgcgaggggaaattgtggtcctaattgcgcctattatcactacatggacgtctggggcaaagggaccacggtcaccgtctcctca

SEQ ID NO: 1557 - DNA, 366 bp, synthetic construct
  source 1..366: mol_type = other DNA
caggtgcagctggtgcagtctgggggaggcttggtacagcctggcaggtccctgagactctcctgtgcagcctctggattcacctttgaggattatgccatgcactggatccggcaatctccagggaagggcctggagtgggtctcaggtattagttggaatggtggtatcataggctatgcggactctgtgaagggccgattcaccatctccagagacaacgacaagaactccctgtatctgcatattaggagtctgaaagctgaggacacggccttgtattactgtgcaaaagatgaaggatctgagggggaccagctgccccttgactactggggccagggaaccctggtcaccgtctcctca

SEQ ID NO: 1558 - DNA, 372 bp, synthetic construct
  source 1..372: mol_type = other DNA
aggtgcacgctgcagcagtctggggctgaggtgaagaagcctgggtcctcggtgaaggtctcctgcaaggcttctggaggcaccttcagcggttttcccatcagctgggtgcgacaggcccctgaacaagggcttgagtggatgggaaggatcatccctatccttggtgtagcagactacgcacagaaattccagggcagagtcacgcttaccgcggacaaatccacgggcacagcgtacatggagctgagcagcctgaggtctgaagacacggccgtgtattactgtgcgagagatgcgggttactctggttcggggagttcttactactttgactactggggccagggagccctggtcaccgtctcctca

SEQ ID NO: 1559 - DNA, 384 bp, synthetic construct
  source 1..384: mol_type = other DNA
caggtccagctgcaggagtctgggggaggcttggtacagcctggcaggtccctgagactctcctgtgtagcctctggattcacctttgatgattatgccatacactgggtccggcaagctccagggaagggcctggagtgggtctcaggtgctacttggaatagtggtaccataggctatgcggactctgtcgagggccgattcatcatctccagagacaacgccaagaactccctgtatctgcagatgaacagtctgagagttgaggacacggccttgtattattgtgcaaaagattactatggttcagggagcaacagtcccagggaccactattacggtatggacgtctggggcccagggaccacggtcaccgtctcctca

SEQ ID NO: 1560 - DNA, 366 bp, synthetic construct
  source 1..366: mol_type = other DNA
caggtgcagctggtgcagtctggggctgaggtgaagaagcctgggtcctcggtgaaggtctcctgcaagcctgttggaggcaccttcagcacctatactttcagttgggtgcgacaggcctctggacaagggcttgagtggatgggagggattatccctttgattggtagagccaactacgcacagaagttccagggcagagtctcgattaccgcggacgaacccacgagcacagtctatctggaactgagcagactgaaatctgaagacacggccgtctattattgtgggggatcctccgaccctccactacgattttggactcttgacaactggggccagggaaccctggtcaccgtctcctca

SEQ ID NO: 1561 - DNA, 366 bp, synthetic construct
  source 1..366: mol_type = other DNA
caggtgcagctggtgcagtctggggctgaggtgaagaagcctgggtcctcggtgaaggtctcctgcaagcctgttggaggcaccttcagcacctatactttcaactgggtgcgacaggcctctggacaagggcttgagtggatgggagggatcatccctttaattggtagagccaactacgcacagaagttccagggcagagtctcgattaccgcggacgaacccaccagcacagtctacatagaactgagcagactgaaatctgaagacacggccgtgtattactgtgggggatcctccgaccctccactacgattttggactcttgacaactggggccagggaaccctggtcaccgtctcctca

SEQ ID NO: 1562 - DNA, 372 bp, synthetic construct
  source 1..372: mol_type = other DNA
caggtgcagctggtgcagtctgggggaggcttggtacagccagggcggtccctgagactctcctgtacagcttctggattcacctttggtgattatgctatgaactgggtccgccaggctccagggaaggggctggagtgggtaggtttcattagaagcaaagcttatggtgggacaacagaatacgccgcgtctgtgaaaggcagattcaccatctcaagagatgattccaaaagcatcgcctatctgcaaatgaacagcctgaaaaccgaggacacagccgtgtattactgtactagagaggggggggtgggggtatatcgggactggttcgacccctggggccagggaaccctggtcaccgtctcctca

SEQ ID NO: 1563 - DNA, 387 bp, synthetic construct
  source 1..387: mol_type = other DNA
caggtccagctgcagcagtctggggctgaggtgaagaagcccgggtcctcggtgaaggtctcctgcaaggcttctggaggcaccttcaacagctatgctgtcagttgggtgcgacaggcccctggacaagggcttgagtggatgggaggcatcatcactgtccttcgtacaacaaagtatgcacagaggttccagggcagagtcacgattgttgcggacgaatccacgggcaccgcctacatggagctgagcagcctgagatttgaggacacggccgtgtactactgtgcgagagtgggggagaacctcgttagtctcggagggggggatttccactactacggtatggacgtctggggccaagggaccacggtcaccgtctcttca

SEQ ID NO: 1564 - DNA, 372 bp, synthetic construct
  source 1..372: mol_type = other DNA
gaggtccagctggtgcagtctgggtctgagttgaagaagcctggggcctcagtgaaggtttcctgcaaggcttctggatacagcttcactagtaaaagtattaattgggtgcgacaggcccctggacaagggcttgagtggatgggatggatcaacaccaacactggggacccaacgtatgcccagggcttcataggacggtttgtcttctccttggacacctctgtcagcacggcatatctgcagatcaacagcctaaaggctgaggacactgccgtttatttctgtgcgagactcgtgcgtagtaccaggtactacgacgtgggcggttttgatatctggggccaagggaccacggtcaccgtctcctca

SEQ ID NO: 1565 - DNA, 360 bp, synthetic construct
  source 1..360: mol_type = other DNA
caggtgcagctgcagcagtcgggcccaggactggtgaagccttcacagaccctgtccctcacctgcactgtgtctggtgactccatcagcagtggtggttactactggagctggatccgccagcacccagggaagggcctggagtggattgggtacatctatttcactgggagcaccgactacaacccgtccctcaagagtcgagttatcatatcagtagacaggttcaagaaccagttttcactgaaactgagttctgtgtctgccgcggacacggccgtgtattactgtgcgagagccgggactatgtatggggattttgactactggggccagggaaccctggtcaccgtctcctca

SEQ ID NO: 1566 - DNA, 381 bp, synthetic construct
  source 1..381: mol_type = other DNA
cagatcacgttgaaggagtctggtcctgtgctggtgaaacccacagagaccctcacgctgacctgctccgtctctggcttctctctcaacactcctagaatgggtgtgagttggatccgtcagccccccgggaaggccctggagtggcttgcacacattttttcgaatgacgaagaattgtacagcacatctctgaagagcaggctcaccatctccagggacacctccaaaagccaagtgctccttaccatgaccaacatgggccctgcggacacagccacttattactgtgcacggaatatgggtcttctggcagtggctggtattcaagaaggttggttcgacacctggggccagggaaccctggtcaccgtctcctca

SEQ ID NO: 1567 - DNA, 372 bp, synthetic construct
  source 1..372: mol_type = other DNA
caggtacagctgcagcagtctggggctgaggtgaagaagcctgggtcctcggtgaaggtctcctgcaaggcttctggaggcaccttcagcagctatcctatcagctgggtgcgacaggcccctggacaagggcttgagtggatgggaagtatcatccctatccttggtgtcgcaaactacgcacagaagttccagggcagagtcacgattaacgcggacaaatccacgagcacagcctacatggagctgagcagcctgagatctgaggacacggccgtgtattactgtgcgagagatctggggtatagcagtggcggggccaattactactttgactactggggccagggaaccctggtcaccgtctcctca

SEQ ID NO: 1568 - DNA, 372 bp, synthetic construct
  source 1..372: mol_type = other DNA
caggtccagctggtgcagtctggggctgaggtgaagaagcctggggcctcagtgaaggtctcctgcaaggcttctggatacaccttcaccggctactgtatacactggctgcgacaggcccctagacaagggcttgagtggatgggacggatcaaccccaacaatggtggcgcaaactacgcacagaagtttcagggcagggtcaccatgaccagcgacacatccatcagcacagcctacatggacctgagcaggctgacttctgacgacacggccatatattactgtgcgagagattactcgggggtgtatcctatgaagccgatctggttcgaccccaggggccggggaaccctggtcaccgtctcctca

SEQ ID NO: 1569 - DNA, 363 bp, synthetic construct
  source 1..363: mol_type = other DNA
caggtacagctgcagcagtctggggctgaggtgaagaagtctgggtcctcggtgaaggtctcctgcaaggcctctggaggcgacttcagcagctatgttatgacttgggtgcgacaggcccctggacaggggcttgagtggatgggagggatcatccctatctttgggacaccaaactacgcacagaaattccagggcagagtcacgattaccgcggacgaatccacgagtacagcctacatggagctgagcagcctaagatctgaagacacggccgtgtattactgtgcgagagggactcaagatggggctacaattgatcttgactattggggccagggaaccctggtcaccgtctcctca

SEQ ID NO: 1570 - DNA, 372 bp, synthetic construct
  source 1..372: mol_type = other DNA
caggtgcagctgcagcagtcgggcccaggactggtgaagccttcggagaccctgtccctcatctgcactgtctctggcggctccatcagtagctactactggagctggatccggcagtccccagggaagggactggagtggattgggaatatgttttacagtgggatcaccaactacaacccctccctcgagagtcgagtcaccatatcaatagacacgtccaagaaccagctctccctgaagctgagctctgtgaccgctgcggacacggccgtgtattactgtgcgaggccgtattacgatattttgactggtatccgagatgatgcttttgatatctggggccaagggaccacggtcaccgtctcctca

SEQ ID NO: 1571 - DNA, 339 bp, synthetic construct
  source 1..339: mol_type = other DNA
caggtgcagctgcagcagtccggagcagaggtgaagaaacccggggagtctctgaggatctcctgtaagggttctggatacagctttttccattactggatcagctgggtgcgccagatgcccgggaaaggcctggaatggatggcgaccattaatcctgttaactcttataccaactacaacccgtccttccaaggccaagtcaccatctcagttgacaggtccatcaacactgtctacctgcaatggagcagtctgagggcctcggacagcgccatgtattactgtgcgaccgcggataggggttggggccagggaaccctggtcaccgtctcctca

SEQ ID NO: 1572 - DNA, 378 bp, synthetic construct
  source 1..378: mol_type = other DNA
caggtcccgctggtgcagtctggggctgaggtgaagaagcctgggtcctcggtgaaggtctcctgcaaggcttctggaggcaccttcagcagctattctatcagctgggtgcgacaggcccctggacaaggacttgagtggatgggaaggatcatccctctccttggtataccaaactacgcacagaagatgcagggcagagtcacgattaccgcggacaaatcaacgagcacagcctacatggagctgagcagcctgagatctgaggacacggccgtgtattactgtgcgagagaaaattgttttggtacctcctgctctaccccgtggggtgcttttgatatctggggccaagggaccacggtcaccgtctcctca

SEQ ID NO: 1573 - DNA, 402 bp, synthetic construct
  source 1..402: mol_type = other DNA
caggtgcagctgcagcagtggggcgcaggactgttgaagccttcggagaccctgtccctcacctgcgctgtctatggtgggtccttcagtggttactactggagctggatccgccagcccccagggaaggggctggagtggattggggaaatcaatcatagtggaagcaccaactacaacccgtccctcaagagtcgagtcaccatatcagtagacacgtccaagaaccagttctccctgaagctgagctctgtgaccgccgcggacacggctgtgtattactgtgcgagagactcgaccatatatagcagtggctggtggtccgtagttggttcgagtttagtcgggcccgcttactactttgactactggggccagggaaccctggtcaccgtctcctca

SEQ ID NO: 1574 - DNA, 351 bp, synthetic construct
  source 1..351: mol_type = other DNA
caggtgcagctggtgcagtctggagcagaggtgaaaaagccgggggagtctctgaagatctcctgtaagggttctggatacagctttaccagctactggatcggctgggtgcgccagatgcccgggaaaggcctggagtggctggggatcatctatcctggtgactctgataccagatacagcccgtccttccaaggccaggtcaccatctcagccgacaagtccatcagcaccgcctacctgcagtggagcagcctgaaggcctcggacaccgccatgtattactgtgcgaggggaatgttagacacttttgatatctggggccacgggaccacggtcaccgtctcctca

SEQ ID NO: 1575 - DNA, 372 bp, synthetic construct
  source 1..372: mol_type = other DNA
caggtccagcttgtgcagtctggagcagaagtgaaaaagcccggggagtctctgaggatctcctgtcagggttctggatacatctttaccacctattggatcacttgggtgcgccagatgcccgggaaaggcctggagtggatgggacgcattgatcctagtgactcttataccaactacagcccgtccttccaaggccacgtcaccttctcatctgacaagtcaatcagcactgcctacctgcagtggagcagcctgaaggcctcggacaccgccatttattactgtgcgagagtgtttacggagccgataacagtggcccatgatgcttttgatatctggggccaagggacaacggtcaccgtctcctca

SEQ ID NO: 1576 - DNA, 375 bp, synthetic construct
  source 1..375: mol_type = other DNA
aggtgcccgctggtgcagtctggggctgaggtgaagaagcctgggtcctcggtgaaggtctcctgcaaggcttctggaggcaccttcaacagttacactatcagttgggtgcgacaggcccccggacaaggggttgagtggatgggaagggtcatccctctccgcaatatagcagactacgcacagaagttccagggcagagtcacgattaccgcggacaaatccacgagcacagtctacatggagctgagcagcctgagatctgaggacacggccgtgtattattgtgcgagagaggggacgtatggttacgagtggcacttccactactacatggacgtctggggcaaagggaccacggtcaccgtctcctca

SEQ ID NO: 1577 - DNA, 387 bp, synthetic construct
  source 1..387: mol_type = other DNA
aggtgcacgctgcagcagtctgggggaggcttggtaaagccgggggagtcccttagactctcctgtgcagcctctggattcactttcaataacgcctggatgagttgggtccgccaggctccagggaaggggctggagtgggttgcccgtattaaaagttatgttaacggtgggacaacagactacgttgcacccgtgaaaggcagattcaccatctcaagagatgattctaaaaacactctgtttctgcaaatgaagagcctgaaaaccgaggacacagccgtctattactgtgtcactgagcgacgtgtagaagtgggagctactgaggtctcctactactacatggacgtctggggcaaagggaccacggtcaccgtctcctca

SEQ ID NO: 1578 - DNA, 360 bp, synthetic construct
  source 1..360: mol_type = other DNA
caggtgcagctggtgcagtctgggggaggcttggtcaaacctggggggtccctgagactctcctgtgcagcctctgggttcaccttcagttcctatgctatgcactgggtccgccaggctccagggaagggactggaatttgtttcagttattaatagtgatgggggtagcccatattatgcaaacgctgtgaagggcagattcaccatctccagagacaattccaagaacaaggtgtttctgcaaatgggcagcctgagagctgaggacatggctgtatattactgtgcgagagagtctatggaccagacggcttactttgactactggggccggggaaccctggtcaccgtctcctca

SEQ ID NO: 1579 - DNA, 378 bp, synthetic construct
  source 1..378: mol_type = other DNA
aggtccagctgcatgcagtctggggaggcgtggtccagctggggggtccctgagactctctgtgcagcctctaacttcactttcagtaggtttgctatgcactgggtccgccaggctccaggcaaggggctggagtgggtggcagttgtatcatttgatggaagtaataaatactacgcagactccatgaagggccgcttcaccatctccagagacaattccaagaacacggtgtatctgcaaatgaacagcctgagagctgaggacacggctgtgtattactgtgcgagaggagcttactatggttcagggagttattataacccactgcccacgtttgactactggggccagggagccctggtcaccgtctcctca

SEQ ID NO: 1580 - DNA, 354 bp, synthetic construct
  source 1..354: mol_type = other DNA
caggtccagctggtgcagtctggagcagaggtgaaaaagcccggggagtctctgaagatctcctgtaagggttctggatacagctttaccagctactggatcggctgggtgcgccagatgcccgggaaaggcctggagtggatggggatcatctatcctggtgactctgataccagatacagcccgtccttccaaggccaggtcaccatctcagccgacaagtccatcagcaccgcctacctgcagtggagcagcctgaaggcctcggacaccgccatgtattactgtgcgaggactatgcttgatgatgcttttgatatctggggccaagggacaacggtcaccgtctcctca

SEQ ID NO: 1581 - DNA, 354 bp, synthetic construct
  source 1..354: mol_type = other DNA
caggtgcagctgcagcagtcgggcccaggactggtgaagccttcggagaccctgtccctcacctgcactgtctctggtgactccatcagtagttactactggagctggatccggcagcccccagggaagggactggagtggattgggtatatctattacagtgggagcaccaactacaacccctccctcaagagtcgagtcaccatatcagtagacacgtccaagaaccagttctccctgaagctgagctctgtgaccgctgcggacacggccgtgtattactgtgcgagaggggaaaactacggtgactactttgacttctggggccagggaaccctggtcaccgtctcctca

SEQ ID NO: 1582 - DNA, 408 bp, synthetic construct
  source 1..408: mol_type = other DNA
caggtgcagctggtgcagtctgggggaggcttggtaaagcctggggggtcccttagactctcctgtgcagcctctggattcactttcaatatcgcctggatgagctgggtccgccaggctccagggaaggggctggagtgggttggtcgtattcaaagtaaaaatgttggtgggacaacagattacgctgcacccgtgaaaggcagattcaccatctcaagagatgattcaaaaaaaatgctgtatctgcaaatgaacagcctgaaaaccgaggacacagccgtgtatttttgtgttggacccggatattgtagtagtaccagctgctatgcgagtcatcacgatattttgactggttattacctccctgactactggggccagggaaccctggtcaccgtctcctca

SEQ ID NO: 1583 - DNA, 381 bp, synthetic construct
  source 1..381: mol_type = other DNA
cagatcacgttgaaggagtctgggggaggcgtggtccagcctgggaggtccctgagactctcctgtgtagcctctagattcaccttcaggacttttgctatgcactgggtccgccaggctccgggcaaggggctggagtgggtggcagttatatcatttgatggaaataataaatattatgtagactccgtgaagggccgattcaccatctccagagacaattccaagaacacggtgtatctgcaaatgaacagcctgagaagtgaggacacggctgtgtattactgtgcgagaggagattactatggttcagggaaatattttaatccactgcccacctttgactactggggccagggatccctggtcaccgtctcctca

SEQ ID NO: 1584 - DNA, 366 bp, synthetic construct
  source 1..366: mol_type = other DNA
caggtcccgctgaagcagtctgggggaggcgtggtccagcctgggaggtcccagagagtctcctgcacagtctctggatccgacttcagtacttacggcatgcactgggtccgccaggctccaggcaaggggctggagtgggtggcagctctatcacatgatggaggttataaatactatgcagactcagtgaagggccgattcaccatctccagagacaattccaagaaaacggtgtatctgcaaatgaacagtgtgagacctgaggacacggctgtctattactgtgcgaaggacctgattacgtacgatttctggagtggctttttcacttggggccagggaaccctggtcaccgtctcctca

SEQ ID NO: 1585 - DNA, 366 bp, synthetic construct
  source 1..366: mol_type = other DNA
caggtccagcttgtgcagtctggagcagaggtgaaaaagcccggggagtctctgaagatctcctgtaagggttctggatacagctttaccagctactggatcggctgggtgcgccagatgcccgggaaaggcctggagtggatggggatcatctatcctggtgactctgatatcagatacagcccgtccttccaaggccaggtcaccatctcagccgacaagtccatcagcaccgcctacctgcagtggagcagcctgaaggcctcggacaccgccatgtattactgtgcgagctcatattgtagtagtaccagctgctatgctgccaagtactggggccagggaaccctggtcaccgtctcctca

SEQ ID NO: 1586 - DNA, 381 bp, synthetic construct
  source 1..381: mol_type = other DNA
caggtgcagctggtgcagtctggggctgaggtgaagaagcctgggtcctcggtgaaggtctcctgcaaggcttctggaggccccttcagcacctatgctatcagctgggtgcgacaggcccctggacaagggcttgagtggatgggagagatcatccctatctctggtacagcaaactacgcacagaagttccagggcagagtcacgattagcgcggacgaatctacgagcacagcctacatggagctgagcagcctgagatctgaggacacggccgtgtattattgtgcgagagtcggtcgctattactatgatactagtggttattactacacatactttgactactggggccagggaaccctggtcaccgtctcctca

SEQ ID NO: 1587 - DNA, 360 bp, synthetic construct
  source 1..360: mol_type = other DNA
caggtgcagctacaacagtggggcgcaggactgctgaagccttcggagaccctgtccctcacctgcggtgtccacgatggggccttcagtggttacttctggaactggatccgccagtccccagtgaaggggctggagtggattggggaagtcactcatagtggcaacaccaactacaacccgtccctcaagagtcgagtcaccatgtcagtagacgcgtccaagaacgaattctccctgcaactgacctctgtgaccgccgcggacacggctgtgtattactgtgcgaggggcgacttttatagcaccaggctcgcttttgatgtctggggccaagggacactggtcaccgtctcttca

SEQ ID NO: 1588 - DNA, 348 bp, synthetic construct
  source 1..348: mol_type = other DNA
caggtccaactgcaagaatctggccccgggctcgtcaagccttctggaactttgtccctgacatgcgccgtgtctggcgcgtcaatatcacagcatgactggtggacctgggttaggcagagccccggcaaggggctcgagtggattggagccatatttcattctggcacaaccaactacaacccttctttgcggagccggttgaccattagcgtggacacctccaaatcacatttttcgctgaagctcacctccgtcactgccgctgacaccgctgtgtattactgtgcacgggctcgtggaatcctggatttctggggccaggggacacttgtcacggtatccagc

SEQ ID NO: 1589 - protein, 127 aa, synthetic construct
QVQLVQSGGAVVQPGRSLRLSCAASGFTFRSYGMHWVRQAPGKGLEWVADILYDGSNKYYADSVKGRFTISRDNSKNTLYLQMNSLRAEDTAVYYCAKQSGPYCSGRSCYSGLFDYWGQGALVTVSS

SEQ ID NO: 1590 - protein, 123 aa, synthetic construct
QVQLVQSGGGVVQPGRSLRLSCAASGFTFSSYAMHWVRQAPGKGLEWVAVISDDGNNKEYPDSVKGRFTISRDNSKNTLYLQVNSLTAEDTAVYYCARDLNGDFFDFAIFDYWGQGTLVTVSS

SEQ ID NO: 1591 - protein, 120 aa, synthetic construct
QVQLVESGGGVVQPGRSLRLSCAASGFTFTSYGFHWVRQAPGKGLEWVAVISNDGSYKDYVDSVKGRFTISRDNSKNTVYLQMNSLRAEDTAVYYCARDYGDFVTWFDPWGQGTLVTVSS

SEQ ID NO: 1592 - protein, 118 aa, synthetic construct
QVQLVQSGGGLVQPGGSLRLSCAASGFTFTTYWMSWVRQAPGKGLEWVASIKQDGSEAYYVDSVRGRFTISRDNARNSLHLQMISLRAEDTAVYYCAREMGLFWFDPWGQGTLVTVSS

SEQ ID NO: 1593 - protein, 124 aa, synthetic construct
QVQLVQSGGGLVKPGGSLRLSCAASGFSFSDAWMSWVRQAPGKGLEWVGRISSETDGGTTEYAAPVKGRFTISRDNSKGTLYLQMNSLKTEDTAVYYCSTDDVLTGYDYAMDVWGQGTTVTVSS

SEQ ID NO: 1594 - protein, 123 aa, synthetic construct
QVQLQQSGTEVKKPGASVKVSCKASGYIFINYYISWVRQAPGQGLEWMGIISPRSGSASYAQKFQGRVTMSRDTSTSTVYMEVTSLQSEDTAVYYCARDRRSGGDDGGWFDPWGQGTLVTVSS

SEQ ID NO: 1595 - protein, 127 aa, synthetic construct
EVQLEQSGGGVVQPGRSLRLSCAASGFTFRRYGMHWVRQAPGKGLEWVAVISYDGENKDYPDSVKGRFTSSRDNSKNTLYLEMNSLRAEDTAVYYCAKQSGQYCSGGTCYEGSLDYWGQGALVTVSS

SEQ ID NO: 1596 - protein, 120 aa, synthetic construct
QVQLVESGGGVVQPGRSLRLSCAASGFTFSNYAIHWVRQAPGKGLEWVAVILKDGSGKFYADSVKGRFTISRDNSKNTVFLQTNSLRPEDTAMYYCARDYGGYVTYFDYWGQGTLVTVSS

SEQ ID NO: 1597 - protein, 120 aa, synthetic construct
QVQLQQWGAGLLKPSDTLSRTCAVYGGSFSGYYWSWIRQSPGKGLEWIGEINHSGSTNYNPSLKSRVIISVDTSKKQFSLNLTSVTAADTAIYYCARARLGESYWHFDLWGRGTLVTVSS

SEQ ID NO: 1598 - protein, 122 aa, synthetic construct
QVQLVQSGGGLVQPGGSLRLSCAASGFTFSSYDMHWVRQGTGNRLEWVSTIGTAGDTYYADSVKGRFTISRENAKNSLYLQMSSLTAGDTAVYYCARQGNGYTYGNWYFDLWGRGTLVTVSS

SEQ ID NO: 1599 - protein, 123 aa, synthetic construct
QVQLVQSGGGLVQPGRSLRLSCAASGFTFEDYAMHWVRQVPGKGLEWVSGISYNSGSVDYADSVKGRFTISRDNAKNSLYLQMNSLKNEDTALYYCAKSLREFHSYYYGMDVWGQGTTVTVSS

SEQ ID NO: 1600 - protein, 125 aa, synthetic construct
QVQLVQSGGGLVQPGGSLRLSCAVSGLPFSSNAMSWVRQAPGKGLEWVSGISGRGETTYYVDSVKGRFTVSRDNSKNTLFLQMDSLRAEDTAVYYCATDQVGGFTMVQPEYFHHWGQGTLVTVSS

SEQ ID NO: 1601 - protein, 127 aa, synthetic construct
QVQLEQSGGGVVQPGRSLRLSCAASGFTFKNYGMHWVRQAPGKGLEWVAVILYDRSGKHYADSVKGRFTISRDNSKNTLYLQMNSLRTEDTAVYYCAKGGAPYCGGSNCYLGYFDYWGQGSLVTVSS

SEQ ID NO: 1602 - protein, 121 aa, synthetic construct
QVQLQQSGGGVVQPGRSLRLSCAASGFTFNNHAMHWVRQAPGKGLEWVAVVSYDGSNKYYANSVKGRFTISRDNSKKMVYLQMNSLRPEDSAVFYCAREDYHDSSGSFDYWGQGTLVTVSS

SEQ ID NO: 1603 - protein, 116 aa, synthetic construct
QVQLQESGPGLVKPSGTLSLTCAVSGAALSSSNWWSWVRQSPGKGLEWIGEIFHSGSTYYNPSLKSRVTISVDKSKSQFSLKLTSVTAADTAVYYCARVAGMFDYWGQGTLVTVSS

SEQ ID NO: 1604 - protein, 127 aa, synthetic construct
QVQLQQSGGGVVQPGRSLRLSCEASGFTFRTYGMHWVRQAPGKGLEWVAVVLYDGSNEDYADSVKGRFTISRDNSKNTLYLQMNSLRPEDTAVYFCAKQSGQYCSGGTCYEGSLDYWGQGALVTVSS

SEQ ID NO: 1605 - protein, 134 aa, synthetic construct
QVQLVQSGGGLVQPGRSLRLSCEASGFTFDDYAMHWVRQAPGKGLEWVSGISWNGGVLDYADSVKGRFIISRDNVSRDNVKNSLYLQMNSLRAEDTALYYCAKGFGGIGADRLTGSEEYYFDYWGQGALVTVSS

SEQ ID NO: 1606 - protein, 127 aa, synthetic construct
QVQLQQSGGGVVQPGRSLRLSCAASGFTFSTYGMHWVRQAPGKGLEWVAVIAFDGSKKYYGDSVKGRFTISRDSSKNTLYLQMNSLRPEDTAVYYCAKNQAPYCGGGNCLNGYFDYWGQGTLVTVSS

SEQ ID NO: 1607 - protein, 124 aa, synthetic construct
QVQLVESGGGLVQPGGSLRLSCAASGFTFSSYDMHWVRQGIGKGLEWVSVIGTGGDTYYPDSVKGRFTISRDNGKNSLYLQMNSLRAGDTAVYYCARVTHITMGLKMYWYLDLWGRGTLVTVSS

SEQ ID NO: 1608 - protein, 116 aa, synthetic construct
EVQLQQSGPGLVKPSGTLSLTCAVSGASISNHDWWTWVRQSPGKGLEWIGAIFHSGTTNYNPSLRSRLTISVDKSKSHFSLKLTSVTAADTAVYYCARARGILDFWGQGTLVTVSS

SEQ ID NO: 1609 - protein, 120 aa, synthetic construct
QVQLQESGAEVKKPGESLRISCKGSGYTFTNYWISWVRQIPGKGLEWMGKIDPSDSYTDYNPSFEGHVTISADKSSSTAYLQRTNLEASDSAIYYCARQKKYSSSPFDPWGQGTLVTVSS

SEQ ID NO: 1610 - protein, 116 aa, synthetic construct
QVQLQQSGPRLVKPSGTLSLTCAVSGGSITGSDWWTWVRQSPGKGLEWIGEIFHSGSAVYNPSLESRVSFSVDKSKNHFSLNLRSVTAADTAVYYCARTRGLIDFWGQGTLVTVSS

SEQ ID NO: 1611 - protein, 124 aa, synthetic construct
QVPLVQSGPTLVKPTQTLTLTCTFSGFSLSTSGVGVGWIRQPPGKALEWLALIYWDDDERYNPSLKSRLTITKDTSKSQVVLTMTNMGPVDTGTYYCAQRRGTMIVAEGSFDSWGQGTLVTVSS

SEQ ID NO: 1612 - protein, 127 aa, synthetic construct
RCTLVQSGGGVVQPGRSLRLSCAASGFTFRHYGMHWVRQAPGKGLEWVAVILYDGSNKDYADSVKGRFTISRDNSKNTLYLQMNSLRAEDTAVYYCAKQSGQYCSGGSCYEGSLDYWGQGTLVTVSS

SEQ ID NO: 1613 - protein, 120 aa, synthetic construct
QVQLVESGGGLIQPGGSLRLSCAASGFPFSTYDMGWVRQAPGKGLEWVSGISDSGGSPYYAVSVRGRFTISRDNSNNILHLQMNSLRAEDTAVYYCAKLAGTPPDYFDYWGQGTLVTVSS

SEQ ID NO: 1614 - protein, 127 aa, synthetic construct
QVQLVQSGGGVVQPGRSLRLSCAASGFTFRHYGMHWVRQAPGKGLEWVAVISYDGDYKYYADSVKGRFTISRDNSRSTLFLQMNTLRAEDTAMYFCAKQSGQYCSGGDCYVGSFDYWGQGTLVTVSS

SEQ ID NO: 1615 - protein, 128 aa, synthetic construct
QVQLVESGGGVVQPGGSLRLSCAASGFTFDDYGMQWVRQTPGKDLEWVALISGDGGGTFYADSVKGRFTISRDNSKNSLYLQMNSLRPEDTALYYCTRETTGFRYQSLNSYYNYMDVWGEGTTVTVSS

SEQ ID NO: 1616 - protein, 121 aa, synthetic construct
QVQLVQSGGGLVQPGGSLRLSCSASGFTFRNYAMHWVRQAPGKGLEYVSGVSRNGDIADYTDSVKGRFTISRDNSKNTLYLQMRSLGSEDTALYYCVKDLGQQWYDAFDIWGQGTTVTVSS

SEQ ID NO: 1617 - protein, 116 aa, synthetic construct
QVQLQESGPRLVNPSGTLSLTCAVSGGSISGISWWSWVRQPPGKGLEWIGEIFHSGSAHYNPSLKSRVTISVDNSKNQFSLKLTSVTAADTAIYYCARVSGFFDYWGQGTLVTVSS

SEQ ID NO: 1618 - protein, 115 aa, synthetic construct
QVQLQQWGAGLLKPSETLSLTCAVSGGSLSGYYCNWIRQPPGKGLEWIGEINHSGNTYYNPSLKSRVTISVDTSKDQFSLKLNSVTAADTAVYYCARGLGLLDIWGQGTTVTVSS

SEQ ID NO: 1619 - protein, 123 aa, synthetic construct
QVQLVQSGAEVKKPGASVKVSCKASGYTFTSYTIHWVRQAPGQRLEWMAWIDAGNGDTQYSQNFQGRVTITSDPSASTAYMELSGLRSEDTAVYYCARDDSSSYSLTSYFDYWGQGTLVTVSS

SEQ ID NO: 1620 - protein, 122 aa, synthetic construct
QVQLVQSGGGLVQPGGSLSLSCLVSGFIFSDYSMHWVRQAPGKGLDYVSGISSTGDITDYADSVKDRFTISRDNSKNTLYLQMSSLRVEDTAVYYCVKDIGSWKYFDVFDVWGQGTTVTVSS

SEQ ID NO: 1621 - protein, 122 aa, synthetic construct
QVQLVESGGGVVQPGRSLRLSCAASGFTFSTYSMHWVRQAPGKGLEWVAVILYDGTYKDYADSVKGRFTISRDNSKNTLYLQMNSLRPEDTAVYFCARDWSGKLPVSWFDPWGQGTLVTVSS

SEQ ID NO: 1622 - protein, 120 aa, synthetic construct
QVQLQQSGGGVVQPGRSLRLSCAASGFSFISYGMHWVRQAPGKGLEWVAVISDDGSFKYSADSVKGRFTISRDNSKKTLFLQMNSLRAEDTAVYYCARDDGSPTTYFGLWGQGTLVTVSS

SEQ ID NO: 1623 - protein, 121 aa, synthetic construct
QVQLVQSGGGVVQPGRSLRLSCAASGFTFSDHAMHWVRQAPGKGLEWVAVMSYDGSNEYYADSVKGRATISRDNSKNTLYLQMNSLRAEDTAIYYCAREDYYDSSGAFDMWGQGTTVTVSS

SEQ ID NO: 1624 - protein, 124 aa, synthetic construct
QVQLVQSGGGLVQPGRSLRLSCAASGFTFDDYAMHWVRQTPGKGLEWVSAISWNSASIGYADSVKGRFTISRDNAKNSLYLQMNSLRVEDTALYYCAKDKSSNYGDYAGGMEVWGQGTTVTVSS

SEQ ID NO: 1625 - protein, 125 aa, synthetic construct
QVQLVQSGGAVVQPGRSLRLSCAASGFTFNSYGMHWVRQAPGKGLEWVAVIIHDGSNKYHADSVKGRFTISRDNSKNTLYLQMNNLRAEDTAVYYCAKQSCSGGSCYHEFYFESWGQGTLVTVSS

SEQ ID NO: 1626 - protein, 118 aa, synthetic construct
QVQLVQSRAEVKKPGDSLQISCQTSGYSFKYFWIGWVRQMPGKGLEWVATIYPGDSDTRYSLSFQGQVTISADRSTDTAYLQWNSLKASDTAIYYCVKRQSGTSFDYWGQGTTVTVSS

SEQ ID NO: 1627 - protein, 122 aa, synthetic construct
QVQLQQSGGGVVQPGRSLRLSCEASGFTFSNYGMHWVRQAPGKGLEWVAVIWDDGSGKHYADSVKGRFTISRDNSKNTLYLQMNSLRAEDTAVYYCARDGPGDKMVTLFDYWGQGTLVTVSS

SEQ ID NO: 1628 - protein, 123 aa, synthetic construct
QVQLVQSGGGLVQPGGSLRLSCAASGFSFSNYAMSWVRQAPGKGLEWVSGIGGRGKNTYYADSVKGRFTISRDNSKNTLFLQMNSLRAEDTALYYCATDEVVTAIQPEYFHHWGQGTLVTVSS

SEQ ID NO: 1629 - protein, 122 aa, synthetic construct
QVQLVQSGGGVVQPGRSLRLSCEASGFTFSNYGMHWVRQAPGKGLEWVAVIWDDGSGKHYADSVKGRFTISRDNSKNTLYLQMNSLRAEDTAVYYCARDGPGDKMVTLFDYWGQGTLVTVSS

SEQ ID NO: 1630 - protein, 121 aa, synthetic construct
QVQLQESGPGLVKPSQTLSLTCTVSGGSISTNGYYWSWIRQHPGKGLEWIGYIYYSGSAYYNPSLKSRVTMSVDTSKNQFSLKLSSVTVADTAVYYCARDYVTGRGMLPDWGQGTLVTVSS

SEQ ID NO: 1631 - protein, 122 aa, synthetic construct
QVQLVQSGSESKKPGASVRVSCKASGYTFTSNAINWVRQAPGQGLEWMGWINTNTGNPTYAQGFTGRFVFSLDTAVSTAYLHINNLKPEDTAVFYCARRSGYTSGSDWLDPWGQGTLVTVSS

SEQ ID NO: 1632 - protein, 127 aa, synthetic construct
QVQLVQSGGGVGQPGRSLRLSCAASGFTFGHYGMHWVRQAPGKGLEWVAAIIYDGSDKQYADSVKGRFTISRDNSKNTVYLQMNSLRPEDTAIYFCAKLGGLYCSGGNCFSGYFDYWGQGTLVTVSS

SEQ ID NO: 1633 - protein, 117 aa, synthetic construct
QVQLQESGPGLVKPSETLSLTCTVSSGSISRSGHYWGWIRQPPGKGLEWIGSIYNSGATYFNPSLKSRVTISVDTSKNQFSLRLSSVTAADTAVYYCARAPGIIDCWGQGTLVTVSS

SEQ ID NO: 1634 - protein, 115 aa, synthetic construct
QVQLQQWGAGLLKPSETLSLTCAVYGGSLSGYYWSWIRQPPGKGLEWIGEISHSGGTYYNPSLKSRVTILVDTSKNQFSLKLTSVTAADTAVYYCARGLGMYDVWGQGTTVTVSS

SEQ ID NO: 1635 - protein, 128 aa, synthetic construct
QVQLQQSGPGLVKPSGTLSLTCAVSGGSISSFNWWTWVRQSPGKGLEWIGEINHSDTTNYNPSLKSRVSISVDKSKNQFSLKLSSVTAADTAVYYCARADRSDYYDSTPYRVPYFDYWGRGTLVTVSS

SEQ ID NO: 1636 - protein, 120 aa, synthetic construct
QVQLVQSGGGVVQPGRSLRLSCVASGFSFSSYAMHWVRQAPGKGLEWVAVILDDGNNKLYADSVKGRFTISRDNSKNTLYLQVNSLRTEDTAVYYCARDMGAVVTHFDYWGQGTLVTVSS

SEQ ID NO: 1637 - protein, 122 aa, synthetic construct
QVQLQQSGGGVVQPGRSLRLSCAASGITFSTFGMHWVRQAPGKGLEWVAVISNDGGSKHYKDSVKGRFTISRDNAKNTLYLQMNSLRAEDTAVYYCAKEGPGASGFNYFDSWGQGTLVTVSS

SEQ ID NO: 1638 - protein, 125 aa, synthetic construct
QVQLVQSGGGLVQPGGPLRLSCAASGFTFSSNAMSWVRQAPGKGLEWVSGISGRGDTTYYADSVKGRFTISRDNSRNTLSLQMNSLRAEDTAIYYCATDEVGGFTMVQPEYFHHWGQGTLVTVSS

SEQ ID NO: 1639 - protein, 120 aa, synthetic construct
QVQLVQSGGGLVQPGGSLRLSCAASGFTFSTYDMHWVRQTTGKSLEWVSAIGTAGDRYYADSVKGRFTISRENAKNSLYLQMNNLRAGDTAVYHCARAVESYNLWAFDIWGQGTTVTVSS

SEQ ID NO: 1640 - protein, 116 aa, synthetic construct
QVQLQESGPGLVKPSGTLSLTCAVSGAPISSSNWWSWVRQPPGKGLEWIGEIYHTGSTAYNPSLESRLTISLDKSNKQFSLMLSSVTAADTAVYYCARVAGLFDSWGQGTLVTVSS

SEQ ID NO: 1641 - protein, 127 aa, synthetic construct
QVQLVESGPVLVKPTETLTLTCAVSGFSLSSPRMGVSWIRQPPGKALEWLAHIFSNDEELFSTSLKSRLTISKDTSKSQVVLTMTNMGPVDTATYYCARNMGLLEVAGIQEGWFDSWGQGTLVTVSS

SEQ ID NO: 1642 - protein, 116 aa, synthetic construct
QVQLQQSGPGLVKPSGTLSLTCAVSGGSITNSAWWSWVRQSPEKGLEWIGEISHSGSTNYNPSLKSRVTMSVDKSKNQFSLKLRSVTAADTAVYYCARVAGMIDYWGQGTLVTVSS

SEQ ID NO: 1643 - protein, 122 aa, synthetic construct
PGAAGAVWGRRGPAGRSLRLSCAASKFTFSRFAMHWVRQAPGKGLEWVAGISYDGENRYYADSVRGRFTISRDNSKNTLYMQMNSLRAEDTAVYYCAKEGPGASGFNYFDYWGQGTLVTVSS

SEQ ID NO: 1644 - protein, 121 aa, synthetic construct
QVQLQQRGAGLLKPSETLSLTCAVSGDFLRGSYWAWIRQPPGKGLEWIGEISQSGGVNSNPSLKSRLSISIDTSKSHFSLKLKSVTAADTAIYYCARGRGYGSGSDSFDDWGQGALVTVSS

SEQ ID NO: 1645 - protein, 125 aa, synthetic construct
QVQLVQSGGGVVQPGRSLRLSCAASGFSFSTYVMHWVRQAPGKGLEWVAVISSDGTAKFHADSVKGRFTISRDNSKNTLYLEMNSLRAEDTAVFYCARDGGFHSGRLPVDAFDIWGQGTTVTVSS

SEQ ID NO: 1646 - protein, 126 aa, synthetic construct
QVQLVQSGAEVKKPGSSVKVSCKASGGTFSTYAFNWVRQAPGQGLDWMGRIIPVVNIVNYAQKFQGRVTITADKSTSTAYMELSSLRSDDTAVYYCARAPLEVGEYGDLMGWFDPWGQGTLVTVSS

SEQ ID NO: 1647 - protein, 121 aa, synthetic construct
EVQLVESGGGLVQPGGSLRLSCSASGFTFRNYAMHWVRQAPGKGLEYVSGVSRNGDIADYTDSVKGRFTISRDNSKNMVYLQMSSLRSEDTALYYCVKDLGQQWYDAFDIWGQGTTVTVSS

SEQ ID NO: 1648 - protein, 124 aa, synthetic construct
QVQLVQSGAEVKKPGSSMKVSCKASGGTFSSYTITWVRQAPGQGLEWMGRIIPILGLANYAQKFQGRVTITADKSTSTAYMELSSLRSEDTAVYYCAREAGYSSSSSSWYFDLWGRGTLVTVSS

SEQ ID NO: 1649 - protein, 126 aa, synthetic construct
QVQLVQSGAEVKKPGASVKVPCKASGYTFTKYYIHWVRQAPGQGLEWMGGINPSGGSTDYAQKFQGRVTMTSDTSTSTVYMELSSLRSEDTAVYFCARADFSDSVVWAVSYFFDSWGQGTLVTVSS

SEQ ID NO: 1650 - protein, 124 aa, synthetic construct
QVQLVQSGAEVKKPGASVNVSCKASGYTFTGYYIHWVRQAPGQGLEWMGRINPNSGGTNYAQKFQGRVTMTRDTSVSTAYMELRRLTSDDTAVYYCARALGCSDDNCYGRRDYWGQGTLVTVSS

SEQ ID NO: 1651 - protein, 125 aa, synthetic construct
QVQLVQSGGDLVQPGGSLRLSCTASGFSFSNYAMSWVRQAPGKGLEWVSGISGRGDRTYYADSVKGRFTVSRDNSKNRLYLQMNSLTDEDTAIYYCAKDQEGGFTMVQPEYFHYWGQGTLVTVSS

SEQ ID NO: 1652 - protein, 118 aa, synthetic construct
QVQLQQSGPGLVKPSQTLSLTCTVSGGSVSSGSNYWSWIRQHPGKGLEWIGNIFYNGKTYYNPSLKSRVIISLNTSKNHFSLELNSVTAADTAVYYCARSPGGLFDFWGQGTLVTVSS

SEQ ID NO: 1653 - protein, 123 aa, synthetic construct
QVQLVQSGGGVVQPGGSLRLSCAASGFAFDAYDMHWVRQVPEKGLEWISLISRDGGGTFYADSMKGRFTISRDNSKNSLYLQMNSLRTEDTALYYCVKDISADTSMVPVFAHWGQGTLVTVSS

SEQ ID NO: 1654 - protein, 116 aa, synthetic construct
QVQLQQSGPGLVKPSGTLSLTCAVSGGSISGINWWSWVRQSPRQGLEWIGEISQSGSTYYNPSLKSRVTISVDKSKNQFSLKLTSVTAADTAIYYCARVSGFFDSWGQGTLVTVSS

SEQ ID NO: 1655 - protein, 119 aa, synthetic construct
RCPLKESGPTVVKPTQTLTLTCTFSGFSLNTGGVGVGWIRQPPGKALEWLALIYWDGDQRYSPSLNTRLTITKDTSKNQVVLTMTNMDPVDTATYFCARHGIPTIFDYWGQGTLVTVSS

SEQ ID NO: 1656 - protein, 121 aa, synthetic construct
QVQLVQSGAEVRKPGASVKVSCEASGYSFTSYSMHWVRQAPGQGLEWMGIINPGGGSTGYAQKFQGRVTVTRDTSTSTVYMELSSLRSEDTAMYYCARTRISPATDYFDKWGQGTLVTVSS

SEQ ID NO: 1657 - protein, 117 aa, synthetic construct
QVQLVESGGGLIQPGGSLRLSCAASGFIVSSNYMSWVRQAPGKGLEWVSTIFSGGSTFYADSVKGRFIISRDNSKNTLYLQMTSLRAGDTAVYYCVRDGLYVGVADWGQGTLVTVSS

SEQ ID NO: 1658 - protein, 122 aa, synthetic construct
QVQLVQSGGALVQPGGSLSLSCLVSGFIFSDYSMHWVRQAPGKGLDYVSGISSTGDITDYADSVKDRFTISRDNSKNMLYLQMSSLRVEDTAVYYCVKDIGSWKYFDVFDVWGQGTTVTVSS

SEQ ID NO: 1659 - protein, 125 aa, synthetic construct
QVQLQESGPGLVKPSGTLSLTCDVSGGSISTSYWWSWVRQPPGKGLEWIGEIYQSGSTNYNPSLKSRVTISVDRSKNQFSLKLSSVTAADTGVYYCVRDRSLYCSNGNCPHMDVWGKGTTVTVSS

SEQ ID NO: 1660 - protein, 128 aa, synthetic construct
RCTLQQSGGGVVQPGKSLRLSCAASGFTFSSYGMHWVRQAPGQGLEWVAVVWYDGSNKYYVDSVKGRFTISRDNSKNTLYLQMNSLRAEDTAVYYCARDTWEVPAADPPYYYYYMDVWGKGTTVTVSS

SEQ ID NO: 1661 - protein, 125 aa, synthetic construct
QVQLQQSGPGLVKPSQTLSLTCTVSGGSISSYYWSWIRQPPGKGLQWIGYIYYSGNTNYSPSLRSRVTMSVDTSKNQFSLKLSSVTAADTAVYYCARHAPIHSALYEPNTYFDYWGQGTLVTVSS

SEQ ID NO: 1662 - protein, 133 aa, synthetic construct
RCTLRAVWGRLGTAWQVLTLSCTASGFTFEDYAIHWVRLLPGKGLEWVSGVSWNSGVIDYVDSVKGRFIISRDNAKNSLYLHMRSLRPEDTALYYCVKLYSGGRDYDFRSGSQNGNGNGMDVWGQGTTVTVSS

SEQ ID NO: 1663 - protein, 122 aa, synthetic construct
QVQLQESGGGLVQPGRSLRLSCTGSGFNFGNYVMSWVRQAPGKGLEWVGLIRSNSFGGTTQYAASVRGRFTISRDDSTSIAYLQMNSLKTEDTAVYYCSTSRGGSTNWFFYWGQGTLVTVSS

SEQ ID NO: 1664 - protein, 121 aa, synthetic construct
EVQLVQSGGGLVQPGGSLRLSCSASGFTFSSYAVYWVRQAPGKGPEYVSSISSDGGITYYADSVKGRFTISRDNSKNTLYLQMSTLRAEDTAVYYCVKDLGTMIVDVLEMWGQGTTVTVSS

SEQ ID NO: 1665 - protein, 118 aa, synthetic construct
RSTLVQSGGGLVQPGGSLRLSCAASGFIFSRQWMSWVRQAPGKGLEWVASIKQDGSEKYYVDSVKGRFTISRDNAKNSLYLQLNSLRVEDTAVYYCARETGAFWFDPRGQGTLVTVSS

SEQ ID NO: 1666 - protein, 120 aa, synthetic construct
QVQLQESGPGLVKPSETLSLTCTVSGGSIRSYYWSWIRQPPGKGLEWIGYVHDSGSTNYNPSLKSRVTMSLDTSKNQFSLKLRSVTAADTAVYYCASLLVRYRGYEIDYWGQGTLVTVSS

SEQ ID NO: 1667 - protein, 122 aa, synthetic construct
QVQLVESGGGLVQPGGSLSLSCVVSGFIFSDYSMHWVRQAPGKGLEYLSGISSNGDITDYADSVKDRFTISRDNSKNTLYLQMSSMRIEEWAVYHCVKDMGSSKYWDVFDVWGQGTTVTVSS

SEQ ID NO: 1668 - protein, 120 aa, synthetic construct
QVQLVQSGGGLVQPGGSVRLSCGASGVTVSKYAMSWVRQAPGKGLEWVSGISGYGDTTYYADSVKGRYTISRDNSKNTLYLQMNSLRDEDTAVYYCAKGPRSNHDYFDDWGRGTLVTVSS

SEQ ID NO: 1669 - protein, 121 aa, synthetic construct
QVQLVQSGGGVVQPGRSLRLSCTASGFSFSTYGMHWIRQAPGKGLEWVAVIWSGGSGKHYADSVKGRFTISRDNSKNTLNLQMNSLRVEDTATYYCARDGDGGLVTFPDYWGQGTLVTVSS

SEQ ID NO: 1670 - protein, 131 aa, synthetic construct
QVTLKESGPTLVKPTQTLTLTCTFSGFSLSTTGVGVGWIRQPPGKALEWLALIYWDDDQRYSPSLKSRLSITKDTSKNQVVLTMTNMDPVDTATYYCAHTPDGRYFDWLTPLFGNYYFDFWGQGTLVTVSS

SEQ ID NO: 1671 - protein, 128 aa, synthetic construct
QVQLVQSGGGLVQPGGSLRLSCAASGFTFSRYWMSWVRQAPGKGLEWVANIKQDGSEKNYVDSVKGRFTISRDNAKNSLYLQMNSLRAEDTAVYYCAKDSTPATYSNDWTNAEYFQHWGQGTLVTVSS

SEQ ID NO: 1672 - protein, 118 aa, synthetic construct
QVQLQQSGPGLVKPSQTLSLTCSVSGGFINSGGNYWSWIRQHPGTGLEWIGSIFDSGTTYYNPSLKSRLTISVDTSKNQFSLKLSSVTAADTAVYFCARSPGGLFDFWGQGTLVTVSS

SEQ ID NO: 1673 - protein, 120 aa, synthetic construct
QVQLQQWGAGLLKPSETLSLTCGVYDGSFSDYFWNWIRQPPGKGLEWIGELTHTGSTNYNPSLKSRVTILADTSKSQFSLNLSSVTAADTAVYYCARGDFYSTRLAFDLWGQGTTVTVSS

SEQ ID NO: 1674 - protein, 120 aa, synthetic construct
QVQLLESGGGLVQPGGSLRLSCAASGFTLSNDDMHWVRQPIGKGLEWVSGTGTSGDTYYLDSVKGRFTISRENARNSVYLQMNSLGAGDTAIYYCVRGTATGYYYYMDVWGKGTTVTVSS

SEQ ID NO: 1675 - protein, 128 aa, synthetic construct
QVHAGGVWGRRGPAGRSLRLSCAASGFTFSSYGMHWVRQAPGKGLEWVAVISYDGSNKYYRDSVKGRFTISRETSKNTLYLQMTSLRAEDTAVYYCVRDPQDCGGSRCSNALGYFDYWGQGTLVTVSS

SEQ ID NO: 1676 - protein, 123 aa, synthetic construct
QVQLVQSGGGVVQPGRSLRLSCAASGITFRSNGMHWVRQAPGKGLEWVAFIWFDGSKKYYGDSVKGRFIISRDNSNNTLYLQMNSLRAEDTAVYYCAREPHCTGGVCDALDIWGQGTTVTVSS

SEQ ID NO: 1677 - protein, 120 aa, synthetic construct
QVQLVQSGGGLVQPGGSLRLSCGASGFIFSNYDMHWVRQTTGKGLEWVSAIGTAGDTYYADSVKGRFTISRENAKNSLYLQMNSLRAGDTAVYYCARAEHSGFVVYFDLWGRGTLVTVSS

SEQ ID NO: 1678 - protein, 119 aa, synthetic construct
EVQLVQSGPTLVKPTQTVTLTCTFSGFSFSTSGMGVGWIRQPPGKALEWLALIYWDGDERYSPSLQSRLTIARDTSKNQVVLTMTNMDPVDTATYYCARHTVATIFDYWGQGTLVTVSS

SEQ ID NO: 1679 - protein, 116 aa, synthetic construct
QVQLVESGGGLVQPGGSLRLSCEASGFIFTTYWMSWVRQAPGKGLEWVANIKQDGSEKYYVDSVKGRFTISRDNAKNSLYLQMDSLRAEDTAVYYCARELGISDYWGQGTLVTVSS

SEQ ID NO: 1680 - protein, 117 aa, synthetic construct
QVQLVQSGGGLIQPGGSLRLSCAASGFIVSANYMSWVRQAPGKRLEWVSVLYSGGTTFYADSVKGRFTISRDNSKNTLYLQMNSLRADDTAVYFCVRDWGEFFFDFWGQGTLVTVSS

SEQ ID NO: 1681 - protein, 116 aa, synthetic construct
EVQLVETGGGLIQPGGSLRLSCAASEFTVSSNYMSWVRQAPGKGLEWVSIIYPGGSSFYAESVKGRFTISRDSSKNTLYLQMDSLRAEDTAVYYCARDRGGYPDYWGQGTLVTVSS

SEQ ID NO: 1682 - protein, 128 aa, synthetic construct
QVQLVQSGGGVVQPGRSLRLSCAASGFTFSSFPMHWIRQAPGKGLQWVAVVSYDGSSKHYTDSVKGRFTISRDNSMNIVYLQMNSLRAEDTAVYYCAREMHYYDSSGYFKGNNYFDPWGQGTLVTVSS

SEQ ID NO: 1683 - protein, 117 aa, synthetic construct
EVQLVETGGGLIQPGGSLRLSCAASGIIVSYNYMSWVRQAPGKGLEWVSLIYAGGSTYYADSVKGRFTISRDNSKNTLYLQMNSLRAEDTAVYYCTRDRGPLLHDLWGQGTLVTVSS

SEQ ID NO: 1684 - protein, 130 aa, synthetic construct
QVQLQESGPGLVKPSQTLSLTCTVSGGSISSGNYYWSWIRQSPGKGLEWIGYIYYSGSTYYNPSLKSRVTISVDTSKDQFSLKLSSVTAADTAVYHCVRERISMDILSGNSPHYYGVDVWGQGTTVTVSS

SEQ ID NO: 1685 - protein, 133 aa, synthetic construct
QVQLVQSGGGLVQPGRSLTLSCTASGFTFEDYAIHWVRLLPGKGLEWVSGVSWNSGVIDYVDSVKGRFIISRDNAKNSLYLHMRSLRPEDTALYYCVKLYSGGRDYDFRSGSQNGGGDAMDVWGQGTTVTVSS

SEQ ID NO: 1686 - protein, 133 aa, synthetic construct
RSTLQQSGPTLVKPTQTLTLTCTFSGFSLATTGVGVGWIRQPPGKALEWLALIYWDDDKRYSPSLKSRVTITKDTFKNQVVLTMTNMDPVDTGTYYCAHMVGRSYYDVLTGFSSYYSYYMDVWGKGTTVTVSS

SEQ ID NO: 1687 - protein, 124 aa, synthetic construct
QVTLMESGRTLVKPTQTLTLTCTFSGFSLSTSGVSVGWIRQPPGKALEWLALIYWDDDTRYSPSLKRRLTVTKDTSKNQVVLTLTNLGAVDTGTYYCAHRPRSQSGYDSSFDVWGQGTLVTVSS

SEQ ID NO: 1688 - protein, 122 aa, synthetic construct
QVQLVQSGGGLVQPGGSLRLSCAASGFTFSSYDMHWVRQAPGKGLEWVSGIGTAGDTYYADSVKGRFTISRENAKNSFYLQMNSLRAGDTAVYYCARVEYSSGWSYWFFDLWGRGTLVTVSS

SEQ ID NO: 1689 - protein, 128 aa, synthetic construct
EVQLVQSGGGLAQPGGSLRLSCAASGFTLSSDDMHWVRQATGKGLEWVSGIGTSGDTYYPDSVKGRFSISRENAKNSLYLQMNSLRAGDTAVYYCARGRSTMIQGDKKYYHYYYMDVWGKGTTVTVSS

SEQ ID NO: 1690 - protein, 125 aa, synthetic construct
QVQLQQSGAEVKKPGSSVKVSCKASGGTFISDAVSWVRQAPGQGLEWMGRIIPILGTATYAQKFQGRVTLTADKSTSTAYMELRSLRSDDTAVYYCAIDRDYPGDYYYHYYTDVWGKGTTVTVSS

SEQ ID NO: 1691 - protein, 117 aa, synthetic construct
QVQLVQSGGGLVRPGGSLRLSCAASEITVSSNYMNWVRQAPGKGLEWVSVIYAGGSTFYADSVKGRFSISRDNSKNTLYLQMNSLRADDTAVYYCARDLGPYGFDIWGQGTTVTVSS

SEQ ID NO: 1692 - protein, 125 aa, synthetic construct
QVQLVQSGGGLVQPGGSLRLSCAASGFTFSNYDMHWVRQVTGKGLEWVSTIGTAGDTYYPDSVKGRFTISRDNAKNSLYLQMNSLRAGDTAVYFCARVQYSSGRHQYSYYYMDVWGKGTTVTVSS

SEQ ID NO: 1693 - protein, 117 aa, synthetic construct
QVQLVQTGGGLIQPGGSLRLSCAASGIIVSRNYMTWVRQAPGEGLEWVGVLYAGGSTFYADSVKGRFTISRDNSKNTLYLQMNSLRAEDTAVYYCARDGVYYGMDIWGQGTTVTVSS

SEQ ID NO: 1694 - protein, 118 aa, synthetic construct
QVQLVESGGGLVQPGGSLRLSCAASEITVSSNYMKWVRQAPGKGLEWVSTIYAGGSTFYADSVRGRFTISRDNSKNTLYLQMNSLRAGDTAVYYCARDLEIAGALDIWGQGTTVTVSS

SEQ ID NO: 1695 - protein, 119 aa, synthetic construct
QVQLVQSGGGLVQPGGSLRLSCATSGFTFRNYEMNWVRQAPGKGLEWISYISPSGVTIHYADSVKGRFTISRDNDKNSLYLQMNSLRGEDTAVYFCARARELVEVFDYWGQGTLVTVSS

SEQ ID NO: 1696 - protein, 117 aa, synthetic construct
QVQLVETGGGLIQPGGSLRLSCAASEIIVSRNYMTWVRQVPGKGLEWVSVIYPGGSTFYADSVRGRFTISRDDSKNTLYLQMNSLRAEDTAVYYCAREDNNNAFDIWGQGTTVTVSS

SEQ ID NO: 1697 - protein, 116 aa, synthetic construct
QVQLQQSGPGLVKPSGTLSLTCAVSSGSITSISWWSWVRQPPGKGLEWIGEIHHSGSTTYNPTLRSRLTMSVGKSNNQFSLQLTSVTAADTAIYYCARVSGFFDYWGQGTTVTVSS

SEQ ID NO: 1698 - protein, 120 aa, synthetic construct
QVQLQQWGAGLLKPSETLSLTCGVHDGAFSGYFWNWIRQSPVKGLEWIGEVTHSGNTNYNPSLKSRVTMSVDASKNEFSLNLTSVTAADTAVYYCARGDFYSTRLAFDVWGQGSMVTVSS

SEQ ID NO: 1699 - protein, 119 aa, synthetic construct
QVQLQQSGPTLVKPTQTLTLTCTFSGFSLNTGGVAVGWIRQPPGKALEWLALIYWDDDKRYSPSLKNRLAITKDTSKNQVVLTMTDMDPVDTATYYCARLKIAPIVDAWGQGTLVTVSS

SEQ ID NO: 1700 - protein, 122 aa, synthetic construct
QVQLVQSGGGVVQPGRSLRLSCAASGFAFTTYVMHWVRQAPGKGLEWVTVISSDGSAKFYADSVKGRFTISRDSSQNTLYLQMNSLRAEDTAVYYCARDGGYSGYFDAFDIWGQGTTVTVSS

SEQ ID NO: 1701 - protein, 120 aa, synthetic construct
QVQLVQSGAEVKKLGSSVKVSCKASGGTFSNYFISWVRQAPGQGLECMGRIIPILGIAYYAQKFQGRVTITADKSTSTAYMELSSLRSEDTAVYYCAREGGTTTEYFQHWGQGTLVTVSS

SEQ ID NO: 1702 - protein, 128 aa, synthetic construct
QVQLVQSGGDVVQPGRSLRLSCATSGFTFSSYGMHWVRQAPGKGLEWVAVIWYNGSNKYYIDSVKGRFTISRDNSKNTLYLQMNSLRAEDTAVYYCARDTWEVPVADPPYYYYYMDVWGRGTTVTVSS

SEQ ID NO: 1703 - protein, 129 aa, synthetic construct
QVQLVQSGAEVKKPGASMKVSCKAYGYTFTSYYMHWVRQAPGQGLEWMGIINPSDAGASYVQKFQGRVTMTRDTSTSTVYMELSSLRSEDTAVYYCARNSFGYYYDNSAYLPALDFDYWGQGTLVTVSS

SEQ ID NO: 1704 - protein, 116 aa, synthetic construct
QVQLQQSGGGLIQPGGSLRLSCVASEITVSSNYMSWVRQAPGKGLEWVSIIYPGGSSFYAESVKGRFSISRDSSKNTLYLQMDSLTVEDTAIYYCARDRGGYPDYWGQGTLVTVSS

SEQ ID NO: 1705 - protein, 122 aa, synthetic construct
QVQLVQSGAEVKKPGASVKVSCKASGHTFANYYMHWVRQAPGQGLEWMGIINPSGGSTAYAQHFQDRVTMTRDTSTSTVYMELSSLRSEDTAVYYCARGGIVPDAKQYFDYWGQGTLVTVSS

SEQ ID NO: 1706 - protein, 122 aa, synthetic construct
QVQLVESGGGVVQPGRSLRLSCAASGFTFSTYGMHWVRQAPGKGLEWVAVISYDGSNKHYADSVKGRFTISRDNSKKTLYLQMNSLRTEDAAVYYCAKEGPGASGFNYFDYWGQGTLVTVSS

SEQ ID NO: 1707 - protein, 117 aa, synthetic construct
EVQLVQTGGGLIQPGGSLRLSCAASEFIVSRNYMSWVRQAPGKGLEWVSLIYAGGSTFYADSVKGRFTISRDNSKNTLYLQMNSLRTEDTAVYYCTRDRGPLLHDYWGQGTLVTVSS

SEQ ID NO: 1708 - protein, 125 aa, synthetic construct
QVQLVESGGGLVQPGRSLRLSCAASGFTFEDYAMHWVRQTPGKGPEWVSGISWNGGIMGYAASVEGRFIISRDNAKNSLYLQMMRLRAEDTAFYYCTKAQAPLDSGDYGGGFHIWGPGTTVTVSS

SEQ ID NO: 1709 - protein, 120 aa, synthetic construct
QVQLVESGGGLVQPGGSLRVSCAGSGFTFRDHAMSWVRQAPGKGLDWASTISGSGDTFSHADSVKGRFTISRDNSKDTLYLQMTSLRGEDTAVYFCARGTTIFGGALDPWGQGTLVTVSS

SEQ ID NO: 1710 - protein, 119 aa, synthetic construct
QVQLVQSGAEVKKAGESLKISCKGSGYYFARYWIGWVRQMPGKGLEWMGIIYPGDSDTRYSPSFQGQVTMSADKSISTAFLQWSSLKASDTAMYYCARQGTTVGHFDYWGQGTLVTVSS

SEQ ID NO: 1711 - protein, 127 aa, synthetic construct
QVQLQQSGAEVKKPGASVKVSCKASGYTFSNYAIHWVRQAPGQGPEWMGWINPANNNIKYSEKFQGRVTFTRDTSASTGYMEMGSLTSEDTAVYYCARGVSPNTVVGLGYYYYMDVWGRGTTVTVSS

SEQ ID NO: 1712 - protein, 126 aa, synthetic construct
QVQLVQSGAEVKKPGSSVKVSCKASGGTFIRNTISWLRQAPGQGLEWMGRVIPLLNVVDYAQKFQGRVTIIADKSSSTVYMELSSLRSEDTAVYYCAREGTGYCDGGVCHDAFEIWGQGTTVTVSS

SEQ ID NO: 1713 - protein, 117 aa, synthetic construct
QVQLVQSGGGLIQPGGSLRLSCAASGITVSSNYMSWVRQAPGKGLEWVSLLYAGGSTFYADSVKGRFTISRDNSKNTLFLQMNSLRADDTAVYYCARDLVDYGMDVWGQGTTVTVSS

SEQ ID NO: 1714 - protein, 121 aa, synthetic construct
QVQLVESGGGLVQPGGSLRLYCAASGFTFSSYEMNWVRQAPGKGLESISSISSRGSSKFYADSVKGRFTISRDNAKNSVFLQMNSLRVEDTALYYCARDLGGSYSGTFDHWGQGTLVTVSS

SEQ ID NO: 1715 - protein, 124 aa, synthetic construct
EVQLVQSGGVLVQPGGSLRLSCAASGFTFSNYDMHWVRQPPGKRLEWVSAIGTAGDTYYSDSVKGRLTISRENARKSLYLQMNSLRDGDTAVYYCTRALFCGDDCYTNWYFDLWGRGTLVTVSS

SEQ ID NO: 1716 - protein, 118 aa, synthetic construct
QVTLKESGGGVVQPGRSLRLSCAASGFTFSGFGMHWIRQAPGKGLEWVAVISYDGSNKYYEDSVKGRFTISRDNSKNTLYLQMNSLRAEDTAVYFCAKDSHDYAMDVWGQGTTVTVSS

SEQ ID NO: 1717 - protein, 131 aa, synthetic construct
QVTLKQSGPTLVRPTRTLTVTCTFFGFSIRFNGVGVGWIRQPPGKALEWLGLIFWDDDKRYSPSLKSRVSITKDTSRNQVVLTMTNMDPVDTATYYCAHSTDRRNFEWLSLSGWGGNFEYWGQGTLVTVSS

SEQ ID NO: 1718 - protein, 117 aa, synthetic construct
EVQLVQTGGGLIQPGGSLRLSCAASEFIVTRNYMSWVRQAPGKGLEWVSLIYPGGSTYYADSVKGRFTISRDNSKNTLYLQMNSLRAEDTAVYYCARDRGPSLHDYWGQGTLVTVSS

SEQ ID NO: 1719 - protein, 116 aa, synthetic construct
EVQLVETGGGLIQPGGSLRLSCAASEIIVTSNYMNWVRQAPGKGLEWVSVIYPGGTTYYADSVKGRFTVSRDNSKNTLYLQMNSLRAEDTAVYYCARERTSGRLDWGQGTLVTVSS

SEQ ID NO: 1720 - protein, 128 aa, synthetic construct
QVQLVQSGGGLVQPGGSMRLSCAASGFTFSRYWMTWVRQAPGKGLEWVANIKQDGSEKNYVDSVNGRFTISRDNAKNSLFLQMISLRAEDSAVYFCARDSTPATYNNDWTYPEYFDLWGQGTQVTVSS

SEQ ID NO: 1721 - protein, 128 aa, synthetic construct
QVQLEQSGGGLVQPGGSLRLSCAASGFTFSRYWMTWVRQAPGKGLEWVANIKQDGSEKNYVDSVKGRFTISRDNAKNSLFMQMNSLRAEDTAVYYCARDCTPATYNNDWTYAEYFDHWGQGTLVTVSS

SEQ ID NO: 1722 - protein, 125 aa, synthetic construct
QVQLVQSGAEVKKPGASVKVSCKASGYSFTSYYIQWVRQAPGQGLEWMGIINPSGGSTSYAQKFQGRVTMTRDESTRTVYMELSSLRSEDTAMYYCARDAGVVDPLDPYPLPRFWGQGTLVTVSS

SEQ ID NO: 1723 - protein, 128 aa, synthetic construct
QVQLQQSGGGLVQPGGSLRLSCAASGFTFTSYDMHWVRQAPGKGLEWVSTIGTTGDSYYPGSVKGRFTISRENAKNSLYLQMNSLRAGDTAVYYCARGVQEERRGLVRKFYYYYMDVWGKGTTVTVSS

SEQ ID NO: 1724 - protein, 130 aa, synthetic construct
QVQLQESGPGLVKPSETLSLTCTVSGGSISSDHFYWGWIRQPPGKGLEWIGTTYYTARTNYNPSLKSRVTISVDTSKNQFSLKLTSVTATDTAIYYCARVEVSGGFSGYDFLTPYYFDYWGQGALVTVSS

SEQ ID NO: 1725 - protein, 117 aa, synthetic construct
QVQLQQSGGGLIQPGGSLRLSCAASEFIVSSNYMSWVRQAPGKGLEWVSVIYPGGSTFYADSVKGRFTISRDTSKNTLYLQMNSLRAEDTAVYYCARDYGDYYFDYWGQGTLVTVSS

SEQ ID NO: 1726 - protein, 119 aa, synthetic construct
QVQLVQSGGGLVQPGGSLRLSCAASEFIVSSNYMSWVRQAPGKGLEWVSLMYPGGSTYYADSVKGRFTISRDKSKNTLYLQMNSLRAEDTAVYYCARVLPLHGDFFDYWGQGTLVTVSS

SEQ ID NO: 1727 - protein, 119 aa, synthetic construct
QVTLKESGPTLVKPTQTLTLTCTFSGFSFSTGGVGVGWIRQPPGKALEWLALIYWDGDKRYSPSLKNRLTITKDTSKNQVVLTVTNMDPVDTATYYCAHHQINTIFGVISQGTLVTVSS

SEQ ID NO: 1728 - protein, 131 aa, synthetic construct
QITLKESGPTLVKPTQTLTLTCTFSGFSLSTTGVGVGWIRQPPGKALEWLALIYWDDDQRYSPSLQSRLSITKDTSKNQVVLTMTNMDPVDTATYYCAHTPDGRYFEWLTPLFGNYYFDYWGQGTLVTVSS

SEQ ID NO: 1729 - protein, 117 aa, synthetic construct
QVQLVQSGGALVQPGGSLRLACAASEIIVVRNYMSWVRQAPGKGLEWVSVIYSGGTTFYADSVKGRFTISRDKSKNTLYLQMSSLRGEDTAVYYCARGRPSGLYDYWGQGTLVTVSS

SEQ ID NO: 1730 - protein, 122 aa, synthetic construct
QVQLVQSGAEVKKPGASVKISCKASGYTFSDYYIHWVRQAPGQGLEWMGMINPDAASIAYAQKFQGRVTMTSDTSTSTIYMELSSLRSEDTAVYYCARDIAGIPATLGLDPWGQGTLVTVSS

SEQ ID NO: 1731 - protein, 122 aa, synthetic construct
QVTLKESGAGLLKPSETLSLTCAVSGGSFSSGYYWNWIRQPPGKGLEWIGEISQSGGANSNPSLKGRLSISIETAKKQFSLKLRSVTAADTALYYCARGRGYGSGSDSFDYWGQGALVTVSS

SEQ ID NO: 1732 - protein, 121 aa, synthetic construct
QVQLQQSGPGLVKPSETLSLTCIVSGDSISSYYWSWIRQPPGKGLEWIGDIYHSGSTNYNPSLKSRVTISVDTSKSQFSLKLRSVTAADTAVYYCARGPKERWFNNWFDPWGQGTLVTVSS

SEQ ID NO: 1733 - protein, 117 aa, synthetic construct
QVQLVQSGAEVKKPGSSVKVSCKGTFSSYNVNWVRQAPGQGLEWMGRIIPILGIANYAEKFQDRVTITADRSTSTAYMELSSLRYDDTAVYYCAREGGSTTEYFPHWGQGTLVTVSS

SEQ ID NO: 1734 - protein, 124 aa, synthetic construct
QVQLQESGGDLVQPGGSLRLSCAASRFTDISNYMSWVRQAPGKGLEWVSVIYSGGTAYYADSVKGRFTISRHNSKNTLYLQMNSLRTEDTAVYYCARGQVPNDDYVMSGAFDIWGQGTTVTVSS

SEQ ID NO: 1735 - protein, 118 aa, synthetic construct
QVQLVQTGGGLIQPGGSLRLSCVASGVTVTNNYMNWVRQAPGKGLEWVSVIYSGGSTYYADSVKGRFTISRDNSKNTLYLQMNSLRADDTAVYYCARDLMEAGGMDVWGQGTTVTVSS

SEQ ID NO: 1736 - protein, 120 aa, synthetic construct
QVQLQQSGAEVKKPGSSVKVSCKASGGTFSSYSVSWVRQAPGQGLEWMGRIFPILGVADFAQKFQDRVTITADRSTSTAYMEMSRLRPEDTAVYYCAREGGKTTEFFPLWGQGTLVTVSS

SEQ ID NO: 1737 - protein, 118 aa, synthetic construct
QVQLVESGGGLVQPGGSLRLSCAASGFTFNTYWMSWVRQAPGKGLEWVASIKQDGGEKYYVDSVKGRFNISRDNAKNSLFLQMSSLRAEDTAVYYCAREMGIFWFDPRGQGSLVTVSS

SEQ ID NO: 1738 - protein, 124 aa, synthetic construct
RYTLQQSGAEVKKPGSSVKVSCKASGGTFNSYSISWVRQAPEQGLEWMGRIIPILGVTDYPQKFQGRVNIIADKSTGTAYMELSSLRSEDTAVYYCARDVGYSGSGSTYYFDLWGQGALVTVSS

SEQ ID NO: 1739 - protein, 132 aa, synthetic construct
QVTLKESGGGLVQPGRSLRLSCAASGFTFDEYAIHWVRQVPGKGLEWVSGSSWNSGIIGYADSVKGRFTISRDNAKNSLYLQMNSLRPEDTALYYCVKLRTVTAFDFWSGSRPSPKQDFDYWGQGTLVTVSS

SEQ ID NO: 1740 - protein, 127 aa, synthetic construct
RSTLEQSGPALVKPTQTLRLTCTFSGFSLSTSGTCVNWIRQSPGKALEWLALIDWDDDKYYSTSLKTRLTISKDTSKNQVVLTMTNMDPVDTATYYCTRTGAIIAARPWYNYGMDVWGQGTTVTVSS

SEQ ID NO: 1741 - protein, 121 aa, synthetic construct
QVQLVQSGAEVKKPGESLKISCEGSGYSFTTYWIAWVRQMPGKGLEWMGTIYPGDSDTRYSPSFQGQVTISADKSISTAYLQWSSLKASDTAIYYCASQRQRGFYYYMDVWGKGTTVTVSS

SEQ ID NO: 1742 - protein, 125 aa, synthetic construct
QVQLVQSGGGVVQPGRSLRLSCAASGFIFSNYGMHWVRQAPGKGLEWVAVISYDGSHKYYVDSVEGRFTISRDNSKNTLYLQMDTLRAEDTAVYYCAKMTSSSPILYYYHGMDVWGQGTTVTVSS

SEQ ID NO: 1743 - protein, 120 aa, synthetic construct
RCPLVQSGGGLVQPGGSLRLSCAASGFTFSRYDMHWVRQVTGRGLEWVSAIGTAGDTYYPDSVKGRFTISRENAKNSLYLQMNSLRAGDTAIYYCARAEFSGYVLHFDLWGRGTLVTVSS

SEQ ID NO: 1744 - protein, 118 aa, synthetic construct
QVQLVQSGGGLVQPGGSLRLSCAASGFTFSSYWMSWVRQAPGKGLEWVASIKQDGSEQYYVDSVKGRFNISRDNAKNSLFLQMNSLRAEDTAVYYCAREMGIFWFDPWGQGSLVTVSS

SEQ ID NO: 1745 - protein, 124 aa, synthetic construct
RCPLVQSGGDLVQPGGSLRLSCEASGFTVSSNYMSWVRQAPGKGLQWVSLIYPGGSTYYADSVKGRFTVSRDNSKNTLYLQMNSLRAEDTAVYYCAREIYGCTTCSHDIPRDSWGQGTLVTVSS

SEQ ID NO: 1746 - protein, 124 aa, synthetic construct
QVQLQQSGGGLVQPGGSLRLSCAASGFTFSNYWMHWVRQAPGKGLVWVSRINRDGSSPTYADSVKGRFTISRDNAKNTLFLQMNSLRAEDTAVYYCARDLESGSFHPGLVRVPWGQGTLVTVSS

SEQ ID NO: 1747 - protein, 126 aa, synthetic construct
QVQLQQWGAGLLKPSETLSLTCGVYGGSFSEYYWTWVRQSPGKGLEWIGKITHSGNTDYNPSLKSRVTISVDTSKNQFSLRLSSVTAADSAVYYCARHVPEDVVVEPPAPWGLDYWGQGSLVTVSS

SEQ ID NO: 1748 - protein, 124 aa, synthetic construct
QVQLVQSGGGLVQPGGSLRLSCAASGFTFSNYWMHWVRQAPGKGLVWVSRINRDGSSPTYADSVKGRFTISRDNAKNTLFLQMNSLRAEDTAVYYCARDLESGSFHPGLVRVPWGQGTLVTVSS

SEQ ID NO: 1749 - protein, 117 aa, synthetic construct
EVQLVQTGGGLIQPGGSLRLSCAASEIIVSRNYMTWVRQAPGKGLEWVSVIYPGGSTFYADSVRGRFTISRDDSKNTLYLQMTSLRAEDTAVYYCAREDNNNAFDIWGQGTTVTVSS

SEQ ID NO: 1750 - protein, 122 aa, synthetic construct
QVQLQQSGAEVKKPGASVRVSCKASGYTFSDYYMHWVRQAPGQGLEWMGILNPSAGSTSYAQKFQGRVTMTSDTSTNTVYMELTSLRSEDTAVYYCARDWRFLPGFDAFDIWGQGTTVTVSS

SEQ ID NO: 1751 - protein, 129 aa, synthetic construct
QVQLVESGGALVQPGRSLRLSCAASGFTFDDYAIHWVRQAPGKGLEWVSGVSWNSGIIGYADSVKGRFIISRDNAKNSLYLHMNSLRPEDTALYYCAKFGGGPTNYDFRSASPYHFDSWGQGTLVTVSS

SEQ ID NO: 1752 - protein, 118 aa, synthetic construct
QVQLVQSGGGLVQPGGSLRLSCAASGFTFSTYWMSWVRQAPGKGLEWVASIKQDGGEKYYVDSVKGRFNISRDNAKNSLFLQMNSLRAEDTAVYYCAREMGIFWFDPRGQGSLVTVSS

SEQ ID NO: 1753 - protein, 123 aa, synthetic construct
QVQLQESGPGLVKASETLSLACTVSGYSISSGYSWGWIRQPLGKGLEWIGSIYHSGSTYYKASLKSRVTISLDTSKNQFSLKLSSVTAADTAVYYCARDGQGYVPPRDNFDHWGQGALVTVSS

SEQ ID NO: 1754 - protein, 117 aa, synthetic construct
QVQLVQSGGGLVQPGGSLRLSCAASGITVSSNYMTWVRQAPGKGLEWVSVLYAGGSTFYTDSVKGRFTISRHNSNNTLYLQMNSLRPEDTAVYYCARDIQRYGIDVWGQGTTVTVSS

SEQ ID NO: 1755 - protein, 125 aa, synthetic construct
QVQLQESGPGLVKPSQTLSLTCTVSGGSISSDGYYWSWIRQHPGKGLEWIGYIYYSGITYYNPSLKSSFTISVDTSKNQFSLKLSSVTAADTAMYYCARVVRYCSSTSCYTLDFWGQGTLVTVSS

SEQ ID NO: 1756 - protein, 132 aa, synthetic construct
RCTLVQSGGGLVQPGGSLRLSCSASGFSFSSFAMNWVRQAPGKGLEWVSIISGSGVNTYYADSVKGRFTISRDNSKNTLYLQMNSLRAEDTAVYYCAKGPWCSTSNCYTSMVYPVADFFHHWGQGTLVTVSS

SEQ ID NO: 1757 - protein, 120 aa, synthetic construct
QVQLVQSGAEVKKPGSSVKVSCKASGGTFNNHFINWVRRAPGQGLEWMGKIIPIIDIANSAQKFQGRVTITADKSTSTVYMELSSLRSDDTAMYYCARRTSSSSEYFDSWGQGTLVTVSS

SEQ ID NO: 1758 - protein, 119 aa, synthetic construct
QVQLVQSGGGLVQPGGSLRLSCAASGLIVSSNYMSWVRQAPGKGLEWVSTIYPGGSTFYTDSVKGRFTISRDGSKNTLYLEMKSPRAEDTALYYCVRPIYGGNPGMDVWGKGTTVTVSS

SEQ ID NO: 1759 - protein, 123 aa, synthetic construct
QVQLVQSGGGVVQPGKSLRLSCATSGFTFNNYGMHWVRQAPGKGLEWVAVIWYDGSNKYYADSVKGRFTISRDNSKNTLYLQMNSLRAEDTAVYYCARFGYSLEATTDAFHYWGQGTLVTVSS

SEQ ID NO: 1760 - protein, 117 aa, synthetic construct
QVQLVQSGGGLIQPGGSLRLSCAASGLIVSSNYMNWVRQAPGNRLEWVSVLFAGGTTFYADSVKGRFTISRDNSKNTLYLQMNSLRAEDTAVYYCARDLVTYGMDVWGQGTTVTVSS

SEQ ID NO: 1761 - protein, 124 aa, synthetic construct
RYPLVQSGAEVKKPGSSVKVSCKASGGTFSSYTVIWVRQAPGQGLECLGRIFPILGVTDYAQKFQDRVTITADKSTGTAYMELTSLRSEDTAVYYCARETGYSSSGSVPYFHVWGRGTLVTVSS

SEQ ID NO: 1762 - protein, 117 aa, synthetic construct
QVQLQQSGGGLVQPGGSLRLSCVASGITVSANYMNWVRQAPGKGLEWVSVLYSGGTTYYADSVKGRFTISRDNSKNTLYLQMNSLRAEDTAVYYCARDLVVYGMDVWGQGTTVTVSS

SEQ ID NO: 1763 - protein, 119 aa, synthetic construct
QVQLVQSGAEVKKPGASVRVSCKASGYTFTTFDINWVRQATGQGLEWMGWMNPNSGYTGYAQKFQGRVTMTRNTSTSTAYVELNSLRSEDTAVYYCARGGELTGLLRHWGQGTLVTVSS

SEQ ID NO: 1764 - protein, 116 aa, synthetic construct
QVQLVQSGAEVKKPGASVKVSCKASGYSFTGYYMYWIRQAPGQGLEWMGQINPNNGGTNYAQKFQGRVTMTRDTSINTAYMELRRLRSDDTAVYYCSAHGTDFDVWGQGTTVTVSS

SEQ ID NO: 1765 - protein, 122 aa, synthetic construct
QVQLQQSGAEVKKPGASVKVSCKASGYTFSSYYIHWVRQAPGQGLEWMGIINPSAGSTTYAQKFQGRVTMTSDTSTRTIYIELSSLKSEDTAVYYCARGGIVPDAKEPFHYWGQGTLVTVSS

SEQ ID NO: 1766 - protein, 126 aa, synthetic construct
QVQLVQSGGDLVQPGGSLRLSCVASGFTFSNYEMNWVRQGPGKGLEWISYISTSGSTYYYADSVKGRFTISRDNARNSLYLQMDSLRVEDTAIYYCLTHPQPQYVRPTQVVWFDPWGQGTLVTVSS

SEQ ID NO: 1767 - protein, 123 aa, synthetic construct
QVQLVQSGPEVKKPGTSVKVSCKASGFTFSTSAVQWVRQARGQPLEWIGWIAVGRGITDHAQKFQERVKITRDESTSTAYMELSSLRFDDTAVYYCAAPHCNRTSCHDAFDLWGQGTMVTVSS

SEQ ID NO: 1768 - protein, 120 aa, synthetic construct
QVQLVQCGGGLVQHGGSLRLSCAASGFSFGSYVMSWVRQTPGKGLEWVSGISGSGGSTYYAEAVRGRFTLSRDVSKDTLFLQLNSLKAADTAIYYCARGRNGWYLGADSWGQGTLVTVSS

SEQ ID NO: 1769 - protein, 117 aa, synthetic construct
RCPLVQSGGGLIQPGGSLRLSCAASGVIVSSNYMNWVRQAPGKGLEWVSVIYSGGSTFYADSVKGRFTISRDNSKNTLYLQMNSLRAEDTAVYYCARGYGDYYFDYWGQGTLVTVSS

SEQ ID NO: 1770 - protein, 122 aa, synthetic construct
QVQLVQSGGGLVQPGGSLRLSCEASGFTFSNYGMSWVRQAPGKGLEWVSGLSRSGDITYYADSVKGRFTISRDNSKNTLYLQMNSLRAEDTAIYYCAKDLGLVVTTEVADFWGQGTLVTVSS

SEQ ID NO: 1771 - protein, 124 aa, synthetic construct
QVQLVQSGAEVKKPGSSVKVSCKASGGTFSSYSISWVRQAPGQGPEWLGKILPILGATDYAQKFQGRVTIIADKSTSTAYMELSSLRSEDTAVYYCARESGYSGSGSVTYFHLWGRGTLVTVSS

SEQ ID NO: 1772 - protein, 127 aa, synthetic construct
QVQLVQSGGGVVQPGKSLRLSCAASGFTFSTYGMHWVRQAPGKGLEWVAVMWFDGTNKYYADSVKGRFTISRDNSKNTLYLQMNSLRAEDTAVYFCARESHYGEDSEYYFQYYMDVWGRGTTVTVSS

SEQ ID NO: 1773 - protein, 121 aa, synthetic construct
QVQLVQSGGGLVQPGGSLRLSCAASGFTFSSYEMNWVRQAPGKGLEWVSFISNSATARYYADSVKGRFTISRDNAKNSMYLQMNSLRAEDTAIYYCARDLGGSYSGTFDFWGQGTLVTVSS

SEQ ID NO: 1774 - protein, 122 aa, synthetic construct
EVQLVQSGGGVVQPGGSLRLSCAASGFTFSSYSVHWVRQAPGKGLEWVAVISYDGNNKYYAASVKGRFTISRDNSKDTLYLEMNSLRDEDTAVYYCARGPHFDWVPHTFDYWGQGTLVTVSS

SEQ ID NO: 1775 - protein, 128 aa, synthetic construct
QVQLVQSGTEVKKPGESLTISCKTSGYYFTTYWITWVRQMPGKGLEWLGRIDPSDSYTTYSPSFQGHVTMSIDKSITTAYLQWTSLKASDTAMYYCARECGGDCYFPEPLSHTAFDIWGQGTTVTVSS

SEQ ID NO: 1776 - protein, 123 aa, synthetic construct
QVQLVQSGGGVVQPGGSLRLSCEGSGFTLRNYAMHWVRQAPGKGLECVAFVAYGRSSEDYADSVKGRFTISRDNAKNTVYLEMNSLRVEDAAIYYCAREPHCTGGVCDAFDVWGQGTTVTVSS

SEQ ID NO: 1777 - protein, 128 aa, synthetic construct
QVQLVQSGAEVKKPGESLRISCKGSGYRFTTYWISWVRQMPGKGLEWMGKIDPSDSYTNYNPSFQGHVSISADKSISTAYLQWSSLRASDTAMYYCARLSADDYIWGNYGGGDAFDIWGQGTTVTVSS

SEQ ID NO: 1778 - protein, 129 aa, synthetic construct
QVQLVQSGGGLVQPGRSLRLSCTTSGFNFGDYSMSWVRQAPGKGLEWVSFIRSKTYGGTTHYAASVKGRFTISRDDSKRIAYLQMNSLKTEDTAEYYCCREIEGTYNYGSNYFYYIDVWGKGTTVTVSS

SEQ ID NO: 1779 - protein, 124 aa, synthetic construct
QVQLVQSGGGLVQPGGSLRLSCAASGFTFSSYSMNWVRQAPGKGLEWVSYISSRSSTISYADSVKGRFTISRDNAKNSLYLQMNSLRAEDTAVYYCARDDRRLGDYYYYYMDVWGIGTTVTVSS

SEQ ID NO: 1780 - protein, 117 aa, synthetic construct
QVQLVQSGGGLIQPGGSLRLSCAASGFIVSRNYMSWVRQAPGKGLEWVSLIYAGGTTYYADSVKGRFTISRDNSKNTLYLQMNSLRAEDTAVYYCARDRGPLLHDYWGQGTLVTVSS

SEQ ID NO: 1781 - protein, 124 aa, synthetic construct
QVQLLQSGAEVKKPGSSVKVSCKASGGTFSSYTISWMRQAPGQGPEWLGKIFPILGATDYAQKFQGRITIIADKSTNTAYLELSSLRSEDTAVYYCARESGYSGSGSVTYFHLWGRGTLVTVSS

SEQ ID NO: 1782 - protein, 119 aa, synthetic construct
QVQLVQSGAEVKKPGSSVKVSCKASGGTFSYNINWVRQAPGQGLEWMGRIIPILGIPHYAQRFQGRVTITADKSTTTLFMELSSLRSEDTAIYYCAREGGTTTAYFPHWGQGTLVTVSS

SEQ ID NO: 1783 - protein, 123 aa, synthetic construct
QVQLQQSGAEVKKPGASVKVSCKASGHTFTGYFIYWVRQAPGQGLEWMGRINPNSGDTDYAQKFQGRVTMTRDTSISTAYMELSRLTSDDTAMYYCAREPGRDILTGDYWDSWGQGTLVTVSS

SEQ ID NO: 1784 - protein, 130 aa, synthetic construct
QVQLQQSGPGLVKPSGTLSLTCAVSGGSIGSSHWWSWVRQTPGKGLEWIGEIYQSVSTNYNPSLESRVTMSVDKSKNQFSLKLTSVTAADTALYYCARRGSGYCSGGTCYQIPADAFAIWGQGTTVTVSS

SEQ ID NO: 1785 - protein, 130 aa, synthetic construct
QVQLVQSGAEVKKPGASVKVSCKASGYTFTSYGISWVRQAPGQGLEWMGWISTYNGNTNYAQKLQGRVTMTTDTSTGTAYMELRSLRSDDTAVYYCARVFSFYDSRAFTIGGTAYYFDYWGQGTLVTVSS

SEQ ID NO: 1786 - protein, 120 aa, synthetic construct
QVQLVQSGGGVVQPGMSLRLSCAASRFTFRNFGMHWVRQAPGKGLEWVATTFYDGSDKFYADSVKGRFTVSRDNFDNILYLQMNNLRPEDTAMYYCAKDGGYGDYEIESWGQGTLVTVSS

SEQ ID NO: 1787 - protein, 122 aa, synthetic construct
QVQLVQSGGGLIQPGGSLRLSCRASGFTVSSNYMNWVRQTPGKGLEWVSVIYPGGSTFYADSVKGRFTISRDNSKNTLYVQLNSLRAEDTAVYYCARFHDISTRYSDAFDIWGQGTTVTVSS

SEQ ID NO: 1788 - protein, 114 aa, synthetic construct
QVQLVQSGAEVKKPGASVRVSCKASEYTFTGYQMHWVRQAPGQGLEWMGRINPKSGSTNYAQKFQGRVTLTRDTSITTAYMELRRLRSDDTAVYYCARGDLNIWGQGTTVTVSS

SEQ ID NO: 1789 - protein, 124 aa, synthetic construct
RSTLKESGPTLVKPTQTLTLTCTFSGFSLSTSAVGVGWIRQPPGKALEWLALIYWDDDKRYSPSLKSRLSITKDTSKNQVVLRMTNMDPVDTATYYCAHGQYTSSWIHWYFDLLGRGTLVTVSS

SEQ ID NO: 1790 - protein, 124 aa, synthetic construct
RCSCRQSGGGLVQPGGSLRLSCAASGFTFSNYWMHWVRQTPGKGLVWVSRINGDGSSPTYADSVKGRFTVSRDNAKNTLYLQMNSLRVEDTAVYYCARDLESGSFHPGLVRVPWGQGTLVTVSS

SEQ ID NO: 1791 - protein, 120 aa, synthetic construct
QVQLVQSGAEVKKPGQSLKISCKGSGYSFTSYWIGWVRQMPGKGLEWMGIIYPGDSDTRYSPSFQGQVTISADKFISTAYLQWSSLKASDTATYYCARFDGGSYYDFDYWGQGALVTVSS

SEQ ID NO: 1792 - protein, 120 aa, synthetic construct
QVQLQESGGGLVQPGGSLRLSCAASGFPLSYFWIHWVRQTPGKGLVWVSRSSSDGSATSYADSVKGRFTVSRDNAKNTMYLQMNSLRVEDTAVYFCAREVSGSGWPFDSWGQGTLVTVSS

SEQ ID NO: 1793 - protein, 123 aa, synthetic construct
QVQLVQSGAEVKKPGSSVKVSCKASGGTFRSHSISWVRQAPGQGLEWMGRIIPILGIATYPQKFQDRVTITADKSTSTAYMELSSLISEDTAVYFCARVGEMSTAGNDAFDIWGQGTTVTVSS

SEQ ID NO: 1794 - protein, 124 aa, synthetic construct
RSSWRQSGAEVKKPGSSVKVSCRASGGTFSNHFISWVRQAPGQGLEWMGRIIPVLGIADYAQKFQGRVTITADKSTSTAYLELSSLKSEDTAIYFCARGSGYSGSGSNYYFDPWGPGTLVTVSS

SEQ ID NO: 1795 - protein, 119 aa, synthetic construct
QVQLQESGPTLVKPTQTLTLTCTFSGFSLNSAGVGVGWVRQPPGKALEWLALIYWDDEKRYSPPLKTRLAITKDTSKNQVVLRMTNMDPVDTATYYCARHSITTIFDYWGPGTLVTVSS

SEQ ID NO: 1796 - protein, 120 aa, synthetic construct
QVQLVQSGAEVKKPGASVRVSCKASGYAFSNYNLHWVRQAPGQGLEWMGIIYPTGGGTRSAQSVQGRVTMTRDTSTSTIYLDLSSLRSEDTAMYYCAREGVTGTGYFDYWGQGALVTVSS

SEQ ID NO: 1797 - protein, 122 aa, synthetic construct
QVQLQQSGAEVKKPGESLRISCKGSGYSFTNYWITWVRQKPGQGLEWMGRIDPSDSYSNYSPSFHGHVTISADKSISTAYLQWSSLQASDTAIYYCARHLRVVPGYYLFDNWGQGTLVTVSS

SEQ ID NO: 1798 - protein, 120 aa, synthetic construct
QVQLVESGGGLVQPGRSLRLSCAASGFTFDDYAMHWVRQAPGKGLEWVSVISWNSDSIGYADSVKGRFTISRDNAKNSFYLQMNSLRPEDTALYYCAREGCRSTTCYDYWGQGTLVTVSS

SEQ ID NO: 1799 - protein, 124 aa, synthetic construct
QVQLQQSGAEVKKPGSSVKVSCKASGGTFSSYPISWVRQAPGQGLEWMGSIIPILGVAKYAQKFQGRVTINADKSTSTAYMELSSLRFEDTAVYYCARDLGYSSGGANYYFDYWGQGTLVTVSS

SEQ ID NO: 1800 - protein, 115 aa, synthetic construct
QVQLVESGGGLIQPGGSLRLSCEASGLTVSSNYMSWVRQAPGKGLEWVSVIYSGGSTYYADSVKGRFTISRDNSKNTLYLQMNSLRAEDTAVYYCARMPYGTDVWGQGTTVTVSS

SEQ ID NO: 1801 - protein, 119 aa, synthetic construct
QVQLQQSGPGLVKPSQTLSLTCTVSGGSISRGSYYWSWIRQHPGKGLEWIGYIYSSGSTYYNPSLESRLTISLDTSKNQFSLRLTSVTAADTAVYFCARHSVPYYFDYWGQGNLVTVSS

SEQ ID NO: 1802 - protein, 126 aa, synthetic construct
QVQLVQSGSELKKPGASVKVSCKASGYTFNTYAMNWVRQAPGQGLEWMGWINTNTGATTYAQGFTGRFVFSFDTSLTTAYLQISSLRAEDTAVYFCARDEESLYEAVTGTGWFDPWGQGTLVTVSS

SEQ ID NO: 1803 - protein, 122 aa, synthetic construct
QVTLKESGGGVVQPGTSQRVSCTVSGADFSTYGMHWVRQAPGKGLEWVAALSHDGAYKFYADSVKGRFTISRDNSKKTAFLQMNSVRPEDTAVYYCAKDLINYDPWSGFFTWGQGTLVTVSS

SEQ ID NO: 1804 - protein, 119 aa, synthetic construct
QVQLVQSGAEVKKSGESLKISCKGSGYSFSNYWIGWVRQMPGKGLEWMGIIYPGDSDTRYSPSFQGHMTISADKSISTAYLQWNSLKASDTAMYYCARQGTTVGHFDNWGQGTLVTVSS

SEQ ID NO: 1805 - protein, 124 aa, synthetic construct
QVQLVQSGAEVKKPGSSVKVSCKASGGTFSSYTFSWVRQAPGQGLEWMGRIFPILGVANYAQKFQGRVTISADKSTTTAYMELSSLTSEDTAVYYCARDIGYSDYGATYWFDPWGQGTLVTVSS

SEQ ID NO: 1806 - protein, 124 aa, synthetic construct
QVQLQQSGGGLVQPGRSLRLSCAASGFTFDDYAMHWVRQAPGKGLEWVSGVTWNSGTIGYADSVKGRFTISRDNAKNSLYLHMRSLTPEDTALYYCVKDRYNWKREYYYGMDVWGQGTTVTVSS

SEQ ID NO: 1807 - protein, 129 aa, synthetic construct
RCTLEESGGGVVQPGRSLRLSCEASGFTFSNFGMHWVRQAPGKGLEWVAAISFDGDITYYADSVKGRFTISRDDSKNTLHLQIHSLRLEDTATYYCGKDLDIVVAVVGTPYYYYGLDVWGQGTTVTVSS

SEQ ID NO: 1808 - protein, 127 aa, synthetic construct
QVTLKESGGGVVQPGRSLRLSCAVSGFTVSRFAMHWVRQAPGKGLEWVAMISFDGSEKYYADSVKGRFTISRDNSKITLYLQMNSLRAEDTAMYYCARGDYYGSGSSYNPLPTFDYWGQGTLVTVSS

SEQ ID NO: 1809 - protein, 125 aa, synthetic construct
QVQLVQSGGGVVQPGRSLRLSCAASEFTFSSYTLHWVRQAPGEGLEWVSFISHDGGRIDYADSVKGRFTISRDNSKNTLYLQMNSLRAEDTAVYYCARGDILTGYPISKDALDLWGHGTTVTVSS

SEQ ID NO: 1810 - protein, 119 aa, synthetic construct
QVQLVQSGGGLVQPGGSLRLSCAASRFTFNSYWMSWVRQAPGKGLEWVASIKQDGSEKYYVDSLKGRFTISRDNAKNLLYLQMNILRVEDTAVYYCARMPTVYSGYDKWGQGTLVTVSS

SEQ ID NO: 1811 - protein, 125 aa, synthetic construct
QVQLVQSGPEVKKSGESLKISCKASGYRFGNHWIGWVRQAPGKGLEWMGIIYPDDSDTRYGPSFEGQVTISVDKSISTAYLQWSSLKASDTAMYYCVRRPRVQGILVASDPFDIWGQGTTVTVSS

SEQ ID NO: 1812 - protein, 131 aa, synthetic construct
QVQLEQSGGGVVQPGRSLRLSCAASGFTLSSHSMHWVRQAPGKGLEWVALISLGANNKYYADSVKGRFTISRDNSKNTLYLQMNSLRAEDTAIYYCTREISGGTKGMYSGSYFLFSGFDYWGQGTLVTVSS

SEQ ID NO: 1813 - protein, 120 aa, synthetic construct
QVTLKQSGPTVVKPTQTLTLTCNFSGFSLSSNGEGVAWIRQPPGKALEWFAVIYWDEEERYSPSLKSRLTITKDTSKNQVVLTMTDMDPVDTGTYYCAHTTRYSNRFDPWGQGTLVTVSS

SEQ ID NO: 1814 - protein, 118 aa, synthetic construct
PGHIEGVWSALVKPTETLTLTCTLYGFSLSTSGMSVSWIRQPPGGALEWLARIDWDGYKYYSTTLETRLTISKDTSKNQVVLSLTNMDPVDTATYYCARCQVGMENNWGQGTLVTVSS

SEQ ID NO: 1815 - protein, 121 aa, synthetic construct
QVQLLQSGAEVKEPGASVKVSCKASGYTFTSYYMHWVRQAPAQGLEWMGIVNPGGGDTSYAQKFQGRVSMTRDTSASTVYLELSSLRSEDTAIYYCARTRIAAATDYFDYWGQGTLVTVSS

SEQ ID NO: 1816 - protein, 121 aa, synthetic construct
QVQLVQSGAEVKKPGSSVKVSCKASGGTFSSSAINWVRQAPGQGLEWMGGIIPIFGTTNYAQKFQGRVTITADELTNTAYMELSSLRSEDTAVYYCATDHVTSPLYGLDVWGQGTTVTVSS

SEQ ID NO: 1817 - protein, 127 aa, synthetic construct
QVQLVQSGGGLVQPGRSLRLSCAASGFTFDDYAMHWVRQAPGKGLEWVSGISGNSGTIGYADSVKGRFTISRDNAKNSLYLQMNRLRAEDTALYYCAKTLAPDRAHYDTANDAFDIWGQGTTVTVSS

SEQ ID NO: 1818 - protein, 122 aa, synthetic construct
QVQLVESGGGLVQPGRSLRVSCAASGFIFDDYAMHWVRQAPGKGLEWVSGINWNSGTIAYADSVKGRFTISRDNAKNSLYLEMHSLKPDDTALYYCAKYRVAELTNDVFDVWGQGTTVTVSS

SEQ ID NO: 1819 - protein, 123 aa, synthetic construct
QVQLVQSGGGVVQPGRSLRLSCAASGFTFSNYAMHWVRQAPGKGLEWVAVIWYDGSFKFYADSVKGRFTISRDNSKNTVYLQMNSLRAEDTAVYYCARDENGHEVMVTHFDYWGQGTLVTVSS

SEQ ID NO: 1820 - protein, 121 aa, synthetic construct
QVPLKQSGAEVKKPGASVKISCKASGYTFTSYYVHWVRQAPGQGLEWMGMINPTGGSTGYAQKFQGRVTMSRDTSTSTVYMELTSLRSEDTAVYYCARSQVVPATSHLDYWGQGTLVTVSS

SEQ ID NO: 1821 - protein, 121 aa, synthetic construct
QVQLVQSGGGVVQPGRSLRLSCAASGFTFSSYGMHWVRQAPGKGLEWVAVIWYDGSNKYYADSVKGRFTISRDNSKNTLYLQMNSLRAEDTAVYYCARAGYSSYYYYMDVWGKGTTVTVSS

SEQ ID NO: 1822 - protein, 131 aa, synthetic construct
QVQLQESGTEVKKPGSSVKVSCKASGGTFSTYHVSWVRQAPGRGLEWMGGIIPLFGSANYTQRFQGRVTITADKSTRTVYMELRSLRSDDTAVYYCASEDCSGGSCYFGVGSPYARGFETWGQGTLVTVSS

SEQ ID NO: 1823 - protein, 119 aa, synthetic construct
QVQLVQSGAEVKKPGESLKISCKGSGYSFTSYWIAWVRQMPGKGLEWMGIIYPGDSDTRYSPSFQGQVTFSADKSISTAYLQWTSLKASDTAIYYCARRDSSWNDMDVWGKGTTVTVSS

SEQ ID NO: 1824 - protein, 122 aa, synthetic construct
QVQLVESGGGLVQPGRSLTLSCAASGFTFEDFALHWVRQAPGKGLEWVSGISWNGGVIGYADSVKGRFILSRDNDKNSLYLHMRGLRAEDTALYYCAKDEGSEGDQQPLDYWGQGTLVTVSS

SEQ ID NO: 1825 - protein, 124 aa, synthetic construct
QVQLQQSGGGLVQPGGSLRLSCAASGFTFSNFWMHWVRQAPGKGLVWVSRINSDGGSTSYADSVKGRFTISRDNAKNTLYLQMNSLRAEDTAVYYCARDLESGSFHPGLVRVPWGQGTLVTVSS

SEQ ID NO: 1826 - protein, 124 aa, synthetic construct
QVQLVQSGAEVKKPGSSVKVSCKASGGTFSSFPISWVRQAPGQGLEWMGRIIPILGVADYAQKFQGRVTITADKSTGTAYMELSSLRSEDTAVYYCARDVGYSGSGSSYYFDSWGQGTLVTVSS

SEQ ID NO: 1827 - protein, 131 aa, synthetic construct
QVQLQQSGAEVKKPGSSVKVSCKASGVPLSNYAISWVRQAPGQGLDWLGGITPFSGTAKHAQKFQDRVTITADESTNTVFMELSSLRSEDSAVYYCALLNRGYRSSWFERGGYYYYGMDVWGQGTTVTVSS

SEQ ID NO: 1828 - protein, 131 aa, synthetic construct
QVHAGAVWGRRGPAWEVLRLSCEGSGFIFSNYAMHWVRQAPGKGLEWVAVISFDGDNIYYADSVKGRFTISRDNSKKTMYLQMNSLRADDTAVYYCAKRGLGYCSAGTCFGEGEGGEFDYWGQGTLVTVSS

SEQ ID NO: 1829 - protein, 130 aa, synthetic construct
QVQLQQWGAGLLKPSETLSLTCAVSGGSFGVTFSGGSFTGHYWNWIRQTPGKGLEWLGEISQSGTTNSNPSLKSRLSISIDTSKSHFSLKLRSVNAADTAIYYCARGRGSGSGSDSFDSWGQGALVTVSS

SEQ ID NO: 1830 - protein, 125 aa, synthetic construct
QVQLVQSGAEVKKPGASVKVSCKASGYTFTNYYMLWVRQVPGQGLEWMGLINPSGGSTSYAQKFQGRVTMTRDTSTSTVYMELSSLRSEDTAMYYCARDPGVVDPQYPHPLPRFWGQGTLVTVSS

SEQ ID NO: 1831 - protein, 125 aa, synthetic construct
QVQLVQSGAEVRVPGSSVKVSCKASGGTFSSYSITWVRQAPGQGLEWMGTIIPILGVANYAPKFQGRVTITADKSTSTAYMEVTSLTSEDTAIYYCAREYCSGDSCRTVNWFDPWGQGTLVTVSS

SEQ ID NO: 1832 - protein, 122 aa, synthetic construct
QVQLQESGPGLVKPSETLSLTCTVSGGSINNYYWNWIRQPPGKGLEWIGYVYFSGSTNYNPSLKSRVAISLDRSKKQFSLKLTSVTAADTAVYYCARGLTYNGYDVEAFDIWGQGTTVTVSS

SEQ ID NO: 1833 - protein, 125 aa, synthetic construct
QVQLQQSGPGLLKPSQTLSLTCTVSGGSVNTWSYYWGWIRQRPGKGLEWIGHISYSGSTYYNPSLKSRIAMSVDTSKNQFSLKLRSVTVADTAVYYCARLVRGGLSYGSDAFDLWGQGTTVTVSS

SEQ ID NO: 1834 - protein, 122 aa, synthetic construct
QVQLVQSGGGVVQPGRSLRLSCVGSGFTFSSYAMHWVRQAPGKGLEWVAVIWNDGSNKYYTDSVKGRFSISRDDSKNTLDLQMNSLRAEDTAVYYCLREYQLAPPYYFMDVWGKGTTVTVSS

SEQ ID NO: 1835 - protein, 125 aa, synthetic construct
QVQLVQSGGGVVQPGRSLRLSCAASEFTFSRYAMHWVRQAPGKGLEWVAVISFRESDKNYADSVKGRFTVSRDNSKNMLYLQMNSLRAEDTAVYYCARGDILTGYPTSKDAFDIWGQGTTVTVSS

SEQ ID NO: 1836 - protein, 128 aa, synthetic construct
QVTLQQSGGGLVQPGRSLRLSCAASGFTFDDYAMHWVRQAPGKGLEWVSGITWNSGIIGYADSVKGRFIISRDNAKNSLFLQMYSLRAEDTALYFCAKDILSERHYFDSSGSYGMDVWGQGTTVTVSS

SEQ ID NO: 1837 - protein, 124 aa, synthetic construct
QVQLVQSGAEVKKPGSSVKVSCKASGGTFSSYPISWVRQAPGQGLEWMGRIIPILGIPNYTQKFQGRVTITADKSTSTAYMELSSLRSEDTAVYYCARDIGYSGYQSAEYFDLWGRGTLVTVSS

SEQ ID NO: 1838 - protein, 122 aa, synthetic construct
QVQLVQSGGGLVQPGGSLRLSCVVSGFTVSSNYMNWVRQAPGKGLEWVSVIYSGGSTYYADSVKGRFTISRDNSKNTLYLQMNSLRAEDTAVYYCARDFYGSGSPNDSHDYWGQGTLVTVSS

SEQ ID NO: 1839 - protein, 124 aa, synthetic construct
QVQLVQSGAEVKKPGASVKVSCKASGYTFTTYGITWVRQAPGQGLEWMGWISAFNDNTNYAQNFQGRVTMTTDTSTSTAYMELRSLRSDDTAVYYCARGNCGPNCAYYHYMDVWGKGTTVTVSS

SEQ ID NO: 1840 - protein, 122 aa, synthetic construct
QVQLVQSGGGLVQPGRSLRLSCAASGFTFEDYAMHWIRQSPGKGLEWVSGISWNGGIIGYADSVKGRFTISRDNDKNSLYLHIRSLKAEDTALYYCAKDEGSEGDQLPLDYWGQGTLVTVSS

SEQ ID NO: 1841 - protein, 124 aa, synthetic construct
RCTLQQSGAEVKKPGSSVKVSCKASGGTFSGFPISWVRQAPEQGLEWMGRIIPILGVADYAQKFQGRVTLTADKSTGTAYMELSSLRSEDTAVYYCARDAGYSGSGSSYYFDYWGQGALVTVSS

SEQ ID NO: 1842 - protein, 128 aa, synthetic construct
QVQLQESGGGLVQPGRSLRLSCVASGFTFDDYAIHWVRQAPGKGLEWVSGATWNSGTIGYADSVEGRFIISRDNAKNSLYLQMNSLRVEDTALYYCAKDYYGSGSNSPRDHYYGMDVWGPGTTVTVSS

SEQ ID NO: 1843 - protein, 122 aa, synthetic construct
QVQLVQSGAEVKKPGSSVKVSCKPVGGTFSTYTFSWVRQASGQGLEWMGGIIPLIGRANYAQKFQGRVSITADEPTSTVYLELSRLKSEDTAVYYCGGSSDPPLRFWTLDNWGQGTLVTVSS

SEQ ID NO: 1844 - protein, 122 aa, synthetic construct
QVQLVQSGAEVKKPGSSVKVSCKPVGGTFSTYTFNWVRQASGQGLEWMGGIIPLIGRANYAQKFQGRVSITADEPTSTVYIELSRLKSEDTAVYYCGGSSDPPLRFWTLDNWGQGTLVTVSS

SEQ ID NO: 1845 - protein, 124 aa, synthetic construct
QVQLVQSGGGLVQPGRSLRLSCTASGFTFGDYAMNWVRQAPGKGLEWVGFIRSKAYGGTTEYAASVKGRFTISRDDSKSIAYLQMNSLKTEDTAVYYCTREGGVGVYRDWFDPWGQGTLVTVSS

SEQ ID NO: 1846 - protein, 129 aa, synthetic construct
QVQLQQSGAEVKKPGSSVKVSCKASGGTFNSYAVSWVRQAPGQGLEWMGGIITVLRTTKYAQRFQGRVTIVADESTGTAYMELSSLRFEDTAVYYCARVGENLVSLGGGDFHYYGMDVWGQGTTVTVSS

SEQ ID NO: 1847 - protein, 124 aa, synthetic construct
EVQLVQSGSELKKPGASVKVSCKASGYSFTSKSINWVRQAPGQGLEWMGWINTNTGDPTYAQGFIGRFVFSLDTSVSTAYLQINSLKAEDTAVYFCARLVRSTRYYDVGGFDIWGQGTTVTVSS

SEQ ID NO: 1848 - protein, 120 aa, synthetic construct
QVQLQQSGPGLVKPSQTLSLTCTVSGDSISSGGYYWSWIRQHPGKGLEWIGYIYFTGSTDYNPSLKSRVIISVDRFKNQFSLKLSSVSAADTAVYYCARAGTMYGDFDYWGQGTLVTVSS

SEQ ID NO: 1849 - protein, 127 aa, synthetic construct
QITLKESGPVLVKPTETLTLTCSVSGFSLNTPRMGVSWIRQPPGKALEWLAHIFSNDEELYSTSLKSRLTISRDTSKSQVLLTMTNMGPADTATYYCARNMGLLAVAGIQEGWFDTWGQGTLVTVSS

SEQ ID NO: 1850 - protein, 124 aa, synthetic construct
QVQLQQSGAEVKKPGSSVKVSCKASGGTFSSYPISWVRQAPGQGLEWMGSIIPILGVANYAQKFQGRVTINADKSTSTAYMELSSLRSEDTAVYYCARDLGYSSGGANYYFDYWGQGTLVTVSS

SEQ ID NO: 1851 - protein, 124 aa, synthetic construct
QVQLVQSGAEVKKPGASVKVSCKASGYTFTGYCIHWLRQAPRQGLEWMGRINPNNGGANYAQKFQGRVTMTSDTSISTAYMDLSRLTSDDTAIYYCARDYSGVYPMKPIWFDPRGRGTLVTVSS

SEQ ID NO: 1852 - protein, 121 aa, synthetic construct
QVQLQQSGAEVKKSGSSVKVSCKASGGDFSSYVMTWVRQAPGQGLEWMGGIIPIFGTPNYAQKFQGRVTITADESTSTAYMELSSLRSEDTAVYYCARGTQDGATIDLDYWGQGTLVTVSS

SEQ ID NO: 1853 - protein, 124 aa, synthetic construct
QVQLQQSGPGLVKPSETLSLICTVSGGSISSYYWSWIRQSPGKGLEWIGNMFYSGITNYNPSLESRVTISIDTSKNQLSLKLSSVTAADTAVYYCARPYYDILTGIRDDAFDIWGQGTTVTVSS

SEQ ID NO: 1854 - protein, 113 aa, synthetic construct
QVQLQQSGAEVKKPGESLRISCKGSGYSFFHYWISWVRQMPGKGLEWMATINPVNSYTNYNPSFQGQVTISVDRSINTVYLQWSSLRASDSAMYYCATADRGWGQGTLVTVSS

SEQ ID NO: 1855 - protein, 126 aa, synthetic construct
QVPLVQSGAEVKKPGSSVKVSCKASGGTFSSYSISWVRQAPGQGLEWMGRIIPLLGIPNYAQKMQGRVTITADKSTSTAYMELSSLRSEDTAVYYCARENCFGTSCSTPWGAFDIWGQGTTVTVSS

SEQ ID NO: 1856 - protein, 134 aa, synthetic construct
QVQLQQWGAGLLKPSETLSLTCAVYGGSFSGYYWSWIRQPPGKGLEWIGEINHSGSTNYNPSLKSRVTISVDTSKNQFSLKLSSVTAADTAVYYCARDSTIYSSGWWSVVGSSLVGPAYYFDYWGQGTLVTVSS

SEQ ID NO: 1857 - protein, 117 aa, synthetic construct
QVQLVQSGAEVKKPGESLKISCKGSGYSFTSYWIGWVRQMPGKGLEWLGIIYPGDSDTRYSPSFQGQVTISADKSISTAYLQWSSLKASDTAMYYCARGMLDTFDIWGHGTTVTVSS

SEQ ID NO: 1858 - protein, 124 aa, synthetic construct
QVQLVQSGAEVKKPGESLRISCQGSGYIFTTYWITWVRQMPGKGLEWMGRIDPSDSYTNYSPSFQGHVTFSSDKSISTAYLQWSSLKASDTAIYYCARVFTEPITVAHDAFDIWGQGTTVTVSS

SEQ ID NO: 1859 - protein, 125 aa, synthetic construct
RCPLVQSGAEVKKPGSSVKVSCKASGGTFNSYTISWVRQAPGQGVEWMGRVIPLRNIADYAQKFQGRVTITADKSTSTVYMELSSLRSEDTAVYYCAREGTYGYEWHFHYYMDVWGKGTTVTVSS

SEQ ID NO: 1860 - protein, 129 aa, synthetic construct
RCTLQQSGGGLVKPGESLRLSCAASGFTFNNAWMSWVRQAPGKGLEWVARIKSYVNGGTTDYVAPVKGRFTISRDDSKNTLFLQMKSLKTEDTAVYYCVTERRVEVGATEVSYYYMDVWGKGTTVTVSS

SEQ ID NO: 1861 - protein, 120 aa, synthetic construct
QVQLVQSGGGLVKPGGSLRLSCAASGFTFSSYAMHWVRQAPGKGLEFVSVINSDGGSPYYANAVKGRFTISRDNSKNKVFLQMGSLRAEDMAVYYCARESMDQTAYFDYWGRGTLVTVSS

SEQ ID NO: 1862 - protein, 126 aa, synthetic construct
RSSCMQSGEAWSSWGVPETLCAASNFTFSRFAMHWVRQAPGKGLEWVAVVSFDGSNKYYADSMKGRFTISRDNSKNTVYLQMNSLRAEDTAVYYCARGAYYGSGSYYNPLPTFDYWGQGALVTVSS

SEQ ID NO: 1863 - protein, 118 aa, synthetic construct
QVQLVQSGAEVKKPGESLKISCKGSGYSFTSYWIGWVRQMPGKGLEWMGIIYPGDSDTRYSPSFQGQVTISADKSISTAYLQWSSLKASDTAMYYCARTMLDDAFDIWGQGTTVTVSS

SEQ ID NO: 1864 - protein, 118 aa, synthetic construct
QVQLQQSGPGLVKPSETLSLTCTVSGDSISSYYWSWIRQPPGKGLEWIGYIYYSGSTNYNPSLKSRVTISVDTSKNQFSLKLSSVTAADTAVYYCARGENYGDYFDFWGQGTLVTVSS

SEQ ID NO: 1865 - protein, 136 aa, synthetic construct
QVQLVQSGGGLVKPGGSLRLSCAASGFTFNIAWMSWVRQAPGKGLEWVGRIQSKNVGGTTDYAAPVKGRFTISRDDSKKMLYLQMNSLKTEDTAVYFCVGPGYCSSTSCYASHHDILTGYYLPDYWGQGTLVTVSS

SEQ ID NO: 1866 - protein, 127 aa, synthetic construct
QITLKESGGGVVQPGRSLRLSCVASRFTFRTFAMHWVRQAPGKGLEWVAVISFDGNNKYYVDSVKGRFTISRDNSKNTVYLQMNSLRSEDTAVYYCARGDYYGSGKYFNPLPTFDYWGQGSLVTVSS

SEQ ID NO: 1867 - protein, 122 aa, synthetic construct
QVPLKQSGGGVVQPGRSQRVSCTVSGSDFSTYGMHWVRQAPGKGLEWVAALSHDGGYKYYADSVKGRFTISRDNSKKTVYLQMNSVRPEDTAVYYCAKDLITYDFWSGFFTWGQGTLVTVSS

SEQ ID NO: 1868 - protein, 122 aa, synthetic construct
QVQLVQSGAEVKKPGESLKISCKGSGYSFTSYWIGWVRQMPGKGLEWMGIIYPGDSDIRYSPSFQGQVTISADKSISTAYLQWSSLKASDTAMYYCASSYCSSTSCYAAKYWGQGTLVTVSS

SEQ ID NO: 1869 - protein, 127 aa, synthetic construct
QVQLVQSGAEVKKPGSSVKVSCKASGGPFSTYAISWVRQAPGQGLEWMGEIIPISGTANYAQKFQGRVTISADESTSTAYMELSSLRSEDTAVYYCARVGRYYYDTSGYYYTYFDYWGQGTLVTVSS

SEQ ID NO: 1870 - protein, 120 aa, synthetic construct
QVQLQQWGAGLLKPSETLSLTCGVHDGAFSGYFWNWIRQSPVKGLEWIGEVTHSGNTNYNPSLKSRVTMSVDASKNEFSLQLTSVTAADTAVYYCARGDFYSTRLAFDVWGQGTLVTVSS

SEQ ID NO: 1871 - protein, 116 aa, synthetic construct
QVQLQESGPGLVKPSGTLSLTCAVSGASISQHDWWTWVRQSPGKGLEWIGAIFHSGTTNYNPSLRSRLTISVDTSKSHFSLKLTSVTAADTAVYYCARARGILDFWGQGTLVTVSS

SEQ ID NO: 1872 - protein, 116 aa, synthetic construct
QVQLQESGPGLVKPSGTLSLTCAVSGASISNHDWWTWVRQSPGKGLEWIGAIFHSGTTNYNPSLRSRLTISVDKSKSHFSLKLTSVTAADTAVYYCARARGILDFWGQGTLVTVSS

SEQ ID NO: 1873 - protein, 125 aa, synthetic construct
EVQLVESGGDLVQPGGSLRLSCTASGFSFSNYAMSWVRQAPGKGLEWVSGISGRGDRTYYADSVKGRFTVSRDNSKNRLYLQMNSLTDEDTAIYYCAKDQEGGFTMVQPEYFHYWGQGTLVTVSS

SEQ ID NO: 1874 - protein, 119 aa, synthetic construct
QITLKESGPTVVKPTQTLTLTCTFSGFSLNTGGVGVGWIRQPPGKALEWLALIYWDGDQRYSPSLNTRLTITKDTSKNQVVLTMTNMDPVDTATYFCARHGIPTIFDYWGQGTLVTVSS

SEQ ID NO: 1875 - protein, 124 aa, synthetic construct
QITLKESGPTLVKPTQTLTLTCTFSGFSLSTSAVGVGWIRQPPGKALEWLALIYWDDDKRYSPSLKSRLSITKDTSKNQVVLRMTNMDPVDTATYYCAHGQYTSSWIHWYFDLWGRGTLVTVSS

SEQ ID NO: 1876 - protein, 23 aa, synthetic construct
DIQLTQSPSSLSASVGDRVTITC

SEQ ID NO: 1877 - protein, 23 aa, synthetic construct
EIAMTQSPATLSVSPGERATLSC

SEQ ID NO: 1878 - protein, 23 aa, synthetic construct
DIQMTQSPSSLSASVGDRVTITC

SEQ ID NO: 1879 - protein, 23 aa, synthetic construct
DIQMTQSPSTLSASVGDRVTITC

SEQ ID NO: 1880 - protein, 23 aa, synthetic construct
DIQMTQSPNSLPVTPGEPASISC

SEQ ID NO: 1881 - protein, 23 aa, synthetic construct
EIQMTQSPSSLSASVGDRVTITC

SEQ ID NO: 1882 - protein, 23 aa, synthetic construct
DITMTQSPSSLSASVGDRVTITC

SEQ ID NO: 1883 - protein, 22 aa, synthetic construct
SYVLTQPPSVSVAPGQTARITC

SEQ ID NO: 1884 - protein, 23 aa, synthetic construct
DMTMTQSPSSLSASVGDRVTITC

SEQ ID NO: 1885 - protein, 23 aa, synthetic construct
DIQMTQSPSSVSASVGDRVTITC

SEQ ID NO: 1886 - protein, 23 aa, synthetic construct
DIKLTQSPSSLSASVGDRVTITC

SEQ ID NO: 1887 - protein, 22 aa, synthetic construct
ELVLTQSPSASGSPGQSVTISC

SEQ ID NO: 1888 - protein, 23 aa, synthetic construct
EIVLTQSPSSLSASVGDRVTITC

SEQ ID NO: 1889 - protein, 23 aa, synthetic construct
EIVMTQSPSSLSASVGDTVTITC

SEQ ID NO: 1890 - protein, 22 aa, synthetic construct
EIVLTQSPSVSVAPGQTARITC

SEQ ID NO: 1891 - protein, 23 aa, synthetic construct
EIVMTQSPSSLSASVGDRVTITC

SEQ ID NO: 1892 - protein, 22 aa, synthetic construct
TYELTQPPSVSVSPGQTARITC

SEQ ID NO: 1893 - protein, 22 aa, synthetic construct
SHVLTQPPSVSVAPGKTAKITC

SEQ ID NO: 1894 - protein, 23 aa, synthetic construct
DIVMTQSPSSLSASVGDSITITC

SEQ ID NO: 1895 - protein, 23 aa, synthetic construct
DIQMTQSPSSLSASVGDRVTISC

SEQ ID NO: 1896 - protein, 23 aa, synthetic construct
DIQMTQSPSSLSASVGDRVTIAC

SEQ ID NO: 1897 - protein, 23 aa, synthetic construct
DIQMTQSPSSLSASVGDRITITC

SEQ ID NO: 1898 - protein, 23 aa, synthetic construct
EIPLTQSPSSLSASVGDRVTITC

SEQ ID NO: 1899 - protein, 23 aa, synthetic construct
DIQMTQSPSSLPASVGDRVTITC

SEQ ID NO: 1900 - protein, 23 aa, synthetic construct
DITLTQSPSSLSASVGDRVTITC

SEQ ID NO: 1901 - protein, 22 aa, synthetic construct
QPVLIQPASVSGSPGQSITISC

SEQ ID NO: 1902 - protein, 23 aa, synthetic construct
DIVMTQSPSSLSASVGDRVTITC

SEQ ID NO: 1903 - protein, 22 aa, synthetic construct
SYELTQPPSVSVAPGQTAKITC

SEQ ID NO: 1904 - protein, 22 aa, synthetic construct
QPVLTQPPSHSASSGTSVRLTC

SEQ ID NO: 1905 - protein, 23 aa, synthetic construct
ETTLTQSPSSLSASVGDRVTITC

SEQ ID NO: 1906 - protein, 23 aa, synthetic construct
DIPMTQSPSTLSASVGDRVTITC

SEQ ID NO: 1907 - protein, 23 aa, synthetic construct
DIQMTQSPSSLSASIGDRVTITC

SEQ ID NO: 1908 - protein, 23 aa, synthetic construct
DIQMTQSPSSLSTSVGDRVTITC

SEQ ID NO: 1909 - protein, 22 aa, synthetic construct
TYMLTQPPSVSVSPGQTARITC

SEQ ID NO: 1910 - protein, 23 aa, synthetic construct
EIPMTQSPSYLSASVGDRVTITC

SEQ ID NO: 1911 - protein, 22 aa, synthetic construct
SYELTQPPSVSVAPGQTARLTC

SEQ ID NO: 1912 - protein, 23 aa, synthetic construct
EIPMTQSPSSLSASVGDRVTITC

SEQ ID NO: 1913 - protein, 23 aa, synthetic construct
DIQLTQSPDSLAVSLGERATITC

SEQ ID NO: 1914 - protein, 23 aa, synthetic construct
EMTLTQSPSSLSASVGDRVTITC

SEQ ID NO: 1915 - protein, 22 aa, synthetic construct
SYELTQPPSVSVSPGQTARITC

SEQ ID NO: 1916 - protein, 23 aa, synthetic construct
EMTLTQSPATLSVSPGERATLSC

SEQ ID NO: 1917 - protein, 23 aa, synthetic construct
EIQLTQSPSSLSASVGDRVTITC

SEQ ID NO: 1918 - protein, 22 aa, synthetic construct
QSVLTQPASVSGSPGQSITISC

SEQ ID NO: 1919 - protein, 22 aa, synthetic construct
SYELTQPPSVSVAPGQTARITC

SEQ ID NO: 1920 - protein, 23 aa, synthetic construct
EIQMTQSPSSLPASVGDRVTITC

SEQ ID NO: 1921 - protein, 23 aa, synthetic construct
DITMTQSPSSVSASVGDRVSITC

SEQ ID NO: 1922 - protein, 22 aa, synthetic construct
NLMLTQPHSVSESPGKTVTISC

SEQ ID NO: 1923 - protein, 23 aa, synthetic construct
EIVMTQSPLSLPVTPGEPASISC

SEQ ID NO: 1924 - protein, 23 aa, synthetic construct
DIPLTQSPSSLSASVGDRVTITC

SEQ ID NO: 1925 - protein, 22 aa, synthetic construct
QSVLTQPPSVSAAPRQRVTISC

SEQ ID NO: 1926 - protein, 23 aa, synthetic construct
EIKMTQSPSSLPASVGDRVTITC

SEQ ID NO: 1927 - protein, 23 aa, synthetic construct
DIQMTQSPDSLAVSLGERATINC

SEQ ID NO: 1928 - protein, 23 aa, synthetic construct
DIQMTQSPSTLSASVGDRVTISC

SEQ ID NO: 1929 - protein, 23 aa, synthetic construct
DIQMTQSPSSLSASVGDGVTITC

SEQ ID NO: 1930 - protein, 23 aa, synthetic construct
EIALTQSPATLSLSPGERATLSC

SEQ ID NO: 1931 - protein, 22 aa, synthetic construct
QSVLTQPPSVSVAPGKTARITC

SEQ ID NO: 1932 - protein, 23 aa, synthetic construct
DIPMTQSPSSLSASVGDRVTISC

SEQ ID NO: 1933 - protein, 22 aa, synthetic construct
QPVLTQPASVSGSPGQSITISC

SEQ ID NO: 1934 - protein, 23 aa, synthetic construct
EIVMTQSPSSLSASVGDRITITC

SEQ ID NO: 1935 - protein, 23 aa, synthetic construct
EIVMTQSPGTLSLSPGERATLSC

SEQ ID NO: 1936 - protein, 22 aa, synthetic construct
QPVLTQPPSVSVAPGQTAGITC

SEQ ID NO: 1937 - protein, 23 aa, synthetic construct
DIRMTQSPSSLSASVGDRVTITC

SEQ ID NO: 1938 - protein, 23 aa, synthetic construct
DMTMTQSPATLSVSLGERVTLSC

SEQ ID NO: 1939 - protein, 23 aa, synthetic construct
DIVMTQSPLTLPVTPGEPASISC

SEQ ID NO: 1940 - protein, 22 aa, synthetic construct
QSVVTQPPSVSAAPGQRVTISC

SEQ ID NO: 1941 - protein, 22 aa, synthetic construct
QPVLTQPPSVSEAPRQRVTISC

SEQ ID NO: 1942 - protein, 23 aa, synthetic construct
DIKMTQSPSFLSASVGDRVTITC

SEQ ID NO: 1943 - protein, 23 aa, synthetic construct
DIQMTQSPSFLSAFVGDRVTITC

SEQ ID NO: 1944 - protein, 23 aa, synthetic construct
DIKMTQTPSFLSASVGDRVTITC

SEQ ID NO: 1945 - protein, 23 aa, synthetic construct
EIVLTQSPATLSLSPGERATLSC

SEQ ID NO: 1946 - protein, 22 aa, synthetic construct
QSALIQPASVSGSPGQSITISC

SEQ ID NO: 1947 - protein, 23 aa, synthetic construct
DIPMTQSPSSLSASVGDRVTITC

SEQ ID NO: 1948 - protein, 22 aa, synthetic construct
QSVLTQPPSVSGAPGQRVTISC

SEQ ID NO: 1949 - protein, 23 aa, synthetic construct
EIPMTQSPSSVSASVGDRVTIAC

SEQ ID NO: 1950 - protein, 23 aa, synthetic construct
EIVLTQSPLSLPVTLGQPASISC

SEQ ID NO: 1951 - protein, 23 aa, synthetic construct
DIQMTQSPSTLSASVGDRVTVTC

SEQ ID NO: 1952 - protein, 22 aa, synthetic construct
QPVLTQPPSVSGAPGRGVTISC

SEQ ID NO: 1953 - protein, 22 aa, synthetic construct
QSVLTQPLSVSVALGQTARIPC

SEQ ID NO: 1954 - protein, 22 aa, synthetic construct
QYVLTQPPSVSVAPGETARITC

SEQ ID NO: 1955 - protein, 22 aa, synthetic construct
DIRMTQSPSVSVSPGQTARITC

SEQ ID NO: 1956 - protein, 23 aa, synthetic construct
DIQLTQSPSSLSASVGDRVTVTC

SEQ ID NO: 1957 - protein, 23 aa, synthetic construct
DIVLTQSPSSLSASVGDRVTITC

SEQ ID NO: 1958 - protein, 22 aa, synthetic construct
SYVLTQPPSVSVSPGQTARITC

SEQ ID NO: 1959 - protein, 23 aa, synthetic construct
TCVMTQSPSTLSASVGDRVTITC

SEQ ID NO: 1960 - protein, 23 aa, synthetic construct
DIVMTQTPPTLSASVGDRVTITC

SEQ ID NO: 1961 - protein, 22 aa, synthetic construct
QSVLTQPPSASGTPGQRVVISC

SEQ ID NO: 1962 - protein, 22 aa, synthetic construct
SYELTQPPSASGTPGQRVTISC

SEQ ID NO: 1963 - protein, 23 aa, synthetic construct
EMTLTQSPGTLSLSPGERATLSC

SEQ ID NO: 1964 - protein, 22 aa, synthetic construct
SLLLTQPASVSGSPGQSITISC

SEQ ID NO: 1965 - protein, 23 aa, synthetic construct
DIQMTQSPDSLAVSLGERATIKC

SEQ ID NO: 1966 - protein, 23 aa, synthetic construct
DIQMTQSPSSLSASVGDRVAITC

SEQ ID NO: 1967 - protein, 23 aa, synthetic construct
DIQVTQSPATLSLSPGERATLSC

SEQ ID NO: 1968 - protein, 23 aa, synthetic construct
DIVMTQSPSSLSASVGDRVSITC

SEQ ID NO: 1969 - protein, 22 aa, synthetic construct
QSVVTQPPSVSGALGQRVTISC

SEQ ID NO: 1970 - protein, 22 aa, synthetic construct
QPVLTQPPSASGSPGQSVTISC

SEQ ID NO: 1971 - protein, 23 aa, synthetic construct
EIALTQSPGTLSLSPGERATLSC

SEQ ID NO: 1972 - protein, 22 aa, synthetic construct
QSVVTQPPSVSGAPGQRVTISC

SEQ ID NO: 1973 - protein, 22 aa, synthetic construct
QPVLTQPASVSGSPGQSITIPC

SEQ ID NO: 1974 - protein, 23 aa, synthetic construct
DIRMTQSPSSLSASVGDSVTITC

SEQ ID NO: 1975 - protein, 23 aa, synthetic construct
DILMTQSPSSLSASVGDRVTITC

SEQ ID NO: 1976 - protein, 23 aa, synthetic construct
EIVLTQSPSSLSATVGDRVTITC

SEQ ID NO: 1977 - protein, 23 aa, synthetic construct
DIQMTQSPSSLSASVGDSVTITC

SEQ ID NO: 1978 - protein, 23 aa, synthetic construct
DIPMTQSPDSLAVSLGERATINC

SEQ ID NO: 1979 - protein, 23 aa, synthetic construct
EIQMTQSPSSLSAYVGDRVTITC

SEQ ID NO: 1980 - protein, 23 aa, synthetic construct
DIQLTQTPDSLAVSLGERATINC

SEQ ID NO: 1981 - protein, 23 aa, synthetic construct
EIEMTQSPSFLSASVGDRVTITC

SEQ ID NO: 1982 - protein, 22 aa, synthetic construct
QPVLTQPPSVSVAPGQTARITC

SEQ ID NO: 1983 - protein, 22 aa, synthetic construct
QSELTQPPSVSVAPRQTARITC

SEQ ID NO: 1984 - protein, 23 aa, synthetic construct
DIVMTQSPLSLPVTPGEPASISC

SEQ ID NO: 1985 - protein, 23 aa, synthetic construct
EIQMTQTPSSLSASVGDRVTITC

SEQ ID NO: 1986 - protein, 23 aa, synthetic construct
DIVMTQSPSSLSASVGARVTITC

SEQ ID NO: 1987 - protein, 23 aa, synthetic construct
DIQMTQSPSFLSASVGDRVTITC

SEQ ID NO: 1988 - protein, 22 aa, synthetic construct
SHVLTQPPSVSVAPGQTARITC

SEQ ID NO: 1989 - protein, 22 aa, synthetic construct
QSVLTQPPSVSEAPRQRVTISC

SEQ ID NO: 1990 - protein, 23 aa, synthetic construct
EMTMTQSPGTLSLSPGERATLSC

SEQ ID NO: 1991 - protein, 23 aa, synthetic construct
ETTLTQSPGTLVLSPGERATLSC

SEQ ID NO: 1992 - protein, 22 aa, synthetic construct
NFMLTQPHSVSESPGKTVTISC

SEQ ID NO: 1993 - protein, 23 aa, synthetic construct
EIAMTQSPGTLSLSPGQRATLSC

SEQ ID NO: 1994 - protein, 23 aa, synthetic construct
DIPMTQSPSSLSASVGDSVTITC

SEQ ID NO: 1995 - protein, 22 aa, synthetic construct
QSALTQPRSVSGSPGQSVTISC

SEQ ID NO: 1996 - protein, 23 aa, synthetic construct
EIVMTQSPATLSLSPGERATLSC

SEQ ID NO: 1997 - protein, 23 aa, synthetic construct
EMQLTQTPGTLSLSPGEGATVSC

SEQ ID NO: 1998 - protein, 23 aa, synthetic construct
EIPMTQSPSSLSASVGDTVTITC

SEQ ID NO: 1999 - protein, 22 aa, synthetic construct
NLMLTQPHSVSASPGKTVTISC

SEQ ID NO: 2000 - protein, 22 aa, synthetic construct
QPVLTQPRSVSGSPGQSVTISC

SEQ ID NO: 2001 - protein, 22 aa, synthetic construct
QPVLTQPPSVSAAPGQRVTISC

SEQ ID NO: 2002 - protein, 23 aa, synthetic construct
EIVLTQSPATLSVSPGERASLSC

SEQ ID NO: 2003 - protein, 23 aa, synthetic construct
EMTMTQSPATLSVSPGERATLSC

SEQ ID NO: 2004 - protein, 23 aa, synthetic construct
EMTLTQSPATLSVSPGETVTLSC

SEQ ID NO: 2005 - protein, 14 aa, synthetic construct
QCLGPQGRGSPSPA

SEQ ID NO: 2006 - protein, 22 aa, synthetic construct
QHELTQPPSVSEAPRQRVTISC

SEQ ID NO: 2007 - protein, 23 aa, synthetic construct
TIVMTQSPDSVAVSLGERATINC

SEQ ID NO: 2008 - protein, 22 aa, synthetic construct
QSVLTQPRSVSGSPGQSVTISC

SEQ ID NO: 2009 - protein, 22 aa, synthetic construct
EPVLTQPPSASGSPGQSVTISC

SEQ ID NO: 2010 - protein, 22 aa, synthetic construct
QSVLTQPPSVSVAPGQTARITC

SEQ ID NO: 2011 - protein, 22 aa, synthetic construct
SAVLTQPPSVSGAPGQRITISC

SEQ ID NO: 2012 - protein, 22 aa, synthetic construct
QYVVTQPPSVFGARGQRVTISC

SEQ ID NO: 2013 - protein, 22 aa, synthetic construct
SYVLTQPPSVSVAPGKTASLTC

SEQ ID NO: 2014 - protein, 22 aa, synthetic construct
QSVVTQPPSVSGAPGQRVTIPC

SEQ ID NO: 2015 - protein, 22 aa, synthetic construct
ETTLTQSPSVSVAPGQTARITC

SEQ ID NO: 2016 - protein, 22 aa, synthetic construct
KFMLTQPHSVSEAPGKTVTISC

SEQ ID NO: 2017 - protein, 22 aa, synthetic construct
QSVLTQPPSVSVAPGQTARIAC

SEQ ID NO: 2018 - protein, 22 aa, synthetic construct
QPVLTQPPSVSVSPGQTATITC

SEQ ID NO: 2019 - protein, 23 aa, synthetic construct
DIQVTQSPSSLSASVGDRVTITC

SEQ ID NO: 2020 - protein, 23 aa, synthetic construct
DIEMTQSPSSLSASVGDRVTISC

SEQ ID NO: 2021 - protein, 22 aa, synthetic construct
SYVLTQPPSVSVAPGQTARIPC

SEQ ID NO: 2022 - protein, 23 aa, synthetic construct
ETTLTQSPATLSVSPGERATLSC

SEQ ID NO: 2023 - protein, 22 aa, synthetic construct
SHVLTQPPSVSAAPGQTARITC

SEQ ID NO: 2024 - protein, 22 aa, synthetic construct
SYELTQPPSVSVAPGQTAMITC

SEQ ID NO: 2025 - protein, 23 aa, synthetic construct
TMTLTQSPGTLSLSPGERATLSC

SEQ ID NO: 2026 - protein, 23 aa, synthetic construct
DIQLTQSPSSLSASVGDRVSITC

SEQ ID NO: 2027 - protein, 22 aa, synthetic construct
QSVLTQPPSVSGAPGQRVIISC

SEQ ID NO: 2028 - protein, 22 aa, synthetic construct
QTVVTQEPSLTVSPGGTVTLTC

SEQ ID NO: 2029 - protein, 22 aa, synthetic construct
QPELTQPPSVSVAPGQTARITC

SEQ ID NO: 2030 - protein, 23 aa, synthetic construct
EITLTQSPSTLSASVGDSVTITC

SEQ ID NO: 2031 - protein, 22 aa, synthetic construct
TYVLTQPPSVSVAPGQPARITC

SEQ ID NO: 2032 - protein, 22 aa, synthetic construct
QHVLTQPPSVSVAPGQTARITC

SEQ ID NO: 2033 - protein, 23 aa, synthetic construct
EIVLTQSPATLSVSPGERATLSC

SEQ ID NO: 2034 - protein, 23 aa, synthetic construct
EIVMTQSPATLSVSPGERATLSC

SEQ ID NO: 2035 - protein, 22 aa, synthetic construct
YYMLTQPPSVSVAPGQTARLTC

SEQ ID NO: 2036 - protein, 23 aa, synthetic construct
DIRMTQSPSSLSASIGDRVTITC

SEQ ID NO: 2037 - protein, 22 aa, synthetic construct
PSELTQPPSVSVSPGQTASITC

SEQ ID NO: 2038 - protein, 22 aa, synthetic construct
KPVLTQPHSVSESPGKTVTISC

SEQ ID NO: 2039 - protein, 23 aa, synthetic construct
DITMTQSPSSLSASVGDRVTIAC

SEQ ID NO: 2040 - protein, 22 aa, synthetic construct
SPVLTQPPSVSVAPGQTARITC

SEQ ID NO: 2041 - protein, 22 aa, synthetic construct
PSELTQPPSASGTPGQGVTISC

SEQ ID NO: 2042 - protein, 23 aa, synthetic construct
EIAMTQSPGTLSLSPGERATLSC

SEQ ID NO: 2043 - protein, 22 aa, synthetic construct
TFMLTQPHSVSESPGKTVTISC

SEQ ID NO: 2044 - protein, 22 aa, synthetic construct
QSVLTQPPSASGTPGQRVTITC

SEQ ID NO: 2045 - protein, 22 aa, synthetic construct
SHELTQPPSASGTPGQRVTISC

SEQ ID NO: 2046 - protein, 23 aa, synthetic construct
DIVMTQSPDSLAVSLGERATINC

SEQ ID NO: 2047 - protein, 23 aa, synthetic construct
DIQMTQSPSSLSASVGDTVTITC

SEQ ID NO: 2048 - protein, 11 aa, synthetic construct
QASQDITNYLS

SEQ ID NO: 2049 - protein, 11 aa, synthetic construct
RASQSVNSNLA

SEQ ID NO: 2050 - protein, 11 aa, synthetic construct
RASQSISSYLN

SEQ ID NO: 2051 - protein, 11 aa, synthetic construct
RASQAISNSLA

SEQ ID NO: 2052 - protein, 11 aa, synthetic construct
RASQSISRWLA

SEQ ID NO: 2053 - protein, 16 aa, synthetic construct
RSSQSLLHTNGYNYLD

SEQ ID NO: 2054 - protein, 11 aa, synthetic construct
RASQGIGSALA

SEQ ID NO: 2055 - protein, 11 aa, synthetic construct
RASQSIRRFLN

SEQ ID NO: 2056 - protein, 11 aa, synthetic construct
EGNYIGGQSVN

SEQ ID NO: 2057 - protein, 11 aa, synthetic construct
RASQSISKFLN

SEQ ID NO: 2058 - protein, 11 aa, synthetic construct
RASQSISDFLS

SEQ ID NO: 2059 - protein, 11 aa, synthetic construct
RASQGLSRWLA

SEQ ID NO: 2060 - protein, 11 aa, synthetic construct
QASHDINNYLN

SEQ ID NO: 2061 - protein, 14 aa, synthetic construct
TGTSSDVGGYNYVS

SEQ ID NO: 2062 - protein, 11 aa, synthetic construct
RASQGISNSLA

SEQ ID NO: 2063 - protein, 11 aa, synthetic construct
RASQGINSALA

SEQ ID NO: 2064 - protein, 11 aa, synthetic construct
RAGQSIATYLN

SEQ ID NO: 2065 - protein, 11 aa, synthetic construct
QASQDINNYLI

SEQ ID NO: 2066 - protein, 11 aa, synthetic construct
RASQSISTYLN

SEQ ID NO: 2067 - protein, 11 aa, synthetic construct
RASQGITNSLA

SEQ ID NO: 2068 - protein, 11 aa, synthetic construct
GGNNIGSRSVH

SEQ ID NO: 2069 - protein, 11 aa, synthetic construct
SGDSLPRQYAY

SEQ ID NO: 2070 - protein, 11 aa, synthetic construct
RAGQGIGTALA

SEQ ID NO: 2071 - protein, 11 aa, synthetic construct
GEDDIGSKSVH

SEQ ID NO: 2072 - protein, 11 aa, synthetic construct
RASQDIGSALA

SEQ ID NO: 2073 - protein, 11 aa, synthetic construct
RASQTINTYLN

SEQ ID NO: 2074 - protein, 11 aa, synthetic construct
RASQSMTNSLN

SEQ ID NO: 2075 - protein, 11 aa, synthetic construct
RASQDITNSLA

SEQ ID NO: 2076 - protein, 11 aa, synthetic construct
RASQGIRNSLA

SEQ ID NO: 2077 - protein, 11 aa, synthetic construct
RASQSISNYLN

SEQ ID NO: 2078 - protein, 11 aa, synthetic construct
RASQSISRHLS

SEQ ID NO: 2079 - protein, 11 aa, synthetic construct
RAGQSISDFLN

SEQ ID NO: 2080 - protein, 11 aa, synthetic construct
RASQDIKYSLA

SEQ ID NO: 2081 - protein, 11 aa, synthetic construct
GGNNVGSKTVH

SEQ ID NO: 2082 - protein, 11 aa, synthetic construct
RASQSIRNYLN

SEQ ID NO: 2083 - protein, 11 aa, synthetic construct
RASQGISRWLA

SEQ ID NO: 2084 - protein, 11 aa, synthetic construct
QASQDITKNLN

SEQ ID NO: 2085 - protein, 14 aa, synthetic construct
MLSSGFSVGDFWIR

SEQ ID NO: 2086 - protein, 11 aa, synthetic construct
QASQHISNYLN

SEQ ID NO: 2087 - protein, 11 aa, synthetic construct
RASQTINSFVN

SEQ ID NO: 2088 - protein, 11 aa, synthetic construct
RASQSINSYLN

SEQ ID NO: 2089 - protein, 11 aa, synthetic construct
KGDDIGSKNVH

SEQ ID NO: 2090 - protein, 11 aa, synthetic construct
RASQSISSFLN

SEQ ID NO: 2091 - protein, 11 aa, synthetic construct
PASQGISNSLA

SEQ ID NO: 2092 - protein, 11 aa, synthetic construct
SGDAFPNQYAY

SEQ ID NO: 2093 - protein, 11 aa, synthetic construct
GGDSLGSKNVH

SEQ ID NO: 2094 - protein, 11 aa, synthetic construct
RASQTVGAFLN

SEQ ID NO: 2095 - protein, 11 aa, synthetic construct
RASQSIGSFLN

SEQ ID NO: 2096 - protein, 17 aa, synthetic construct
KSSQSVVYSSNNKNYLA

SEQ ID NO: 2097 - protein, 11 aa, synthetic construct
RASQSMTSSLN

SEQ ID NO: 2098 - protein, 11 aa, synthetic construct
RASHRIDRYLN

SEQ ID NO: 2099 - protein, 11 aa, synthetic construct
CGDALPNQYTY

SEQ ID NO: 2100 - protein, 11 aa, synthetic construct
RASQSVSSSLA

SEQ ID NO: 2101 - protein, 11 aa, synthetic construct
RASQDIGSWLA

SEQ ID NO: 2102 - protein, 11 aa, synthetic construct
RASQAISSYLN

SEQ ID NO: 2103 - protein, 11 aa, synthetic construct
RASQGIGNSLA

SEQ ID NO: 2104 - protein, 14 aa, synthetic construct
TATTSDVGVFNYVS

SEQ ID NO: 2105 - protein, 11 aa, synthetic construct
GGNNIGSESVH

SEQ ID NO: 2106 - protein, 11 aa, synthetic construct
RASESVSSNLA

SEQ ID NO: 2107 - protein, 11 aa, synthetic construct
RASQRVSSYLN

SEQ ID NO: 2108 - protein, 11 aa, synthetic construct
RASQSIGSWLG

SEQ ID NO: 2109 - protein, 13 aa, synthetic construct
TRSSGSIASNYVQ

SEQ ID NO: 2110 - protein, 16 aa, synthetic construct
KSSQSLLHSNGYKYLD

SEQ ID NO: 2111 - protein, 11 aa, synthetic construct
QASQDIGNYLS

SEQ ID NO: 2112 - protein, 11 aa, synthetic construct
RASQSVNNYLN

SEQ ID NO: 2113 - protein, 11 aa, synthetic construct
RASQDISNSLA

SEQ ID NO: 2114 - protein, 13 aa, synthetic construct
SGSSSNIEINAVN

SEQ ID NO: 2115 - protein, 11 aa, synthetic construct
RASQSITSYLN

SEQ ID NO: 2116 - protein, 11 aa, synthetic construct
RASQGISFALA

SEQ ID NO: 2117 - protein, 11 aa, synthetic construct
RASQSIRSYLN

SEQ ID NO: 2118 - protein, 17 aa, synthetic construct
MSSQSVLDSSNNKNFLA

SEQ ID NO: 2119 - protein, 11 aa, synthetic construct
RASQSVSTYLA

SEQ ID NO: 2120 - protein, 11 aa, synthetic construct
RASQSIGSYLN

SEQ ID NO: 2121 - protein, 11 aa, synthetic construct
GGNNIGSQSVH

SEQ ID NO: 2122 - protein, 11 aa, synthetic construct
RASQSVSTFLN

SEQ ID NO: 2123 - protein, 11 aa, synthetic construct
RASQTITRYLN

SEQ ID NO: 2124 - protein, 14 aa, synthetic construct
TGTSSDLGAFNHVS

SEQ ID NO: 2125 - protein, 11 aa, synthetic construct
RASQSVSGYLA

SEQ ID NO: 2126 - protein, 11 aa, synthetic construct
RASQSIDDWLA

SEQ ID NO: 2127 - protein, 11 aa, synthetic construct
GAHDIGSKSVH

SEQ ID NO: 2128 - protein, 11 aa, synthetic construct
QASQDINTYLN

SEQ ID NO: 2129 - protein, 11 aa, synthetic construct
RASQSISSNLA

SEQ ID NO: 2130 - protein, 16 aa, synthetic construct
KSSQSLLHSNGHKYLD

SEQ ID NO: 2131 - protein, 13 aa, synthetic construct
SGTSSNIGNNYVS

SEQ ID NO: 2132 - protein, 13 aa, synthetic construct
FGSSSNIGHNAVN

SEQ ID NO: 2133 - protein, 11 aa, synthetic construct
RASQTISRFLN

SEQ ID NO: 2134 - protein, 11 aa, synthetic construct
RASQSISRYLN

SEQ ID NO: 2135 - protein, 11 aa, synthetic construct
RASQRISSYLN

SEQ ID NO: 2136 - protein, 11 aa, synthetic construct
RASQGISSYLA

SEQ ID NO: 2137 - protein, 11 aa, synthetic construct
RASQGISTDLA

SEQ ID NO: 2138 - protein, 11 aa, synthetic construct
RASQGISRYLA

SEQ ID NO: 2139 - protein, 15 aa, synthetic construct
KSNQSVLYSSKNFLG

SEQ ID NO: 2140 - protein, 11 aa, synthetic construct
RASQGISSFLA

SEQ ID NO: 2141 - protein, 14 aa, synthetic construct
TATSSDVGAYIYVS

SEQ ID NO: 2142 - protein, 11 aa, synthetic construct
RASQSITTYLN

SEQ ID NO: 2143 - protein, 14 aa, synthetic construct
TGSNSNIGAGYDVH

SEQ ID NO: 2144 - protein, 11 aa, synthetic construct
RASQGIGSWLG

SEQ ID NO: 2145 - protein, 16 aa, synthetic construct
RSSESLSYSDGNTYLN

SEQ ID NO: 2146 - protein, 11 aa, synthetic construct
RASQSISTWLA

SEQ ID NO: 2147 - protein, 11 aa, synthetic construct
GGNDLGSKNVH

SEQ ID NO: 2148 - protein, 11 aa, synthetic construct
QASQDINNYLN

SEQ ID NO: 2149 - protein, 14 aa, synthetic construct
TGSTSNIGGGYDVH

SEQ ID NO: 2150 - protein, 11 aa, synthetic construct
GLNIIPGKNVH

SEQ ID NO: 2151 - protein, 11 aa, synthetic construct
GGNNIGSKHVH

SEQ ID NO: 2152 - protein, 11 aa, synthetic construct
SGDALPNQYTY

SEQ ID NO: 2153 - protein, 11 aa, synthetic construct
RASQSISTFLN

SEQ ID NO: 2154 - protein, 11 aa, synthetic construct
RASQGISSHLA

SEQ ID NO: 2155 - protein, 11 aa, synthetic construct
RASQSVNSYLA

SEQ ID NO: 2156 - protein, 11 aa, synthetic construct
RASQSISRFLS

SEQ ID NO: 2157 - protein, 11 aa, synthetic construct
SGDVLSKQYAY

SEQ ID NO: 2158 - protein, 14 aa, synthetic construct
TGSSSNIGAGHDVN

SEQ ID NO: 2159 - protein, 11 aa, synthetic construct
QASQDINKFLN

SEQ ID NO: 2160 - protein, 11 aa, synthetic construct
QASQDINKYLN

SEQ ID NO: 2161 - protein, 11 aa, synthetic construct
RTSQSISTWLA

SEQ ID NO: 2162 - protein, 13 aa, synthetic construct
SGSSSNIGSNSVN

SEQ ID NO: 2163 - protein, 11 aa, synthetic construct
RASQSVSSYLA

SEQ ID NO: 2164 - protein, 11 aa, synthetic construct
RANQTISNYLN

SEQ ID NO: 2165 - protein, 14 aa, synthetic construct
TGASSDVGAYIYVS

SEQ ID NO: 2166 - protein, 17 aa, synthetic construct
MSSQSVLDSSNDKNFLA

SEQ ID NO: 2167 - protein, 11 aa, synthetic construct
QASQDINKYLA

SEQ ID NO: 2168 - protein, 11 aa, synthetic construct
RASQSVSSYLA

SEQ ID NO: 2169 - protein, 11 aa, synthetic construct
RASQTVRSFLN

SEQ ID NO: 2170 - protein, 11 aa, synthetic construct
QASQDISDYLN

SEQ ID NO: 2171 - protein, 14 aa, synthetic construct
TGTNSNIGAGYDVH

SEQ ID NO: 2172 - protein, 14 aa, synthetic construct
TGTSSDVGAHNYVS

SEQ ID NO: 2173 - protein, 12 aa, synthetic construct
RASQSVSSNYLA

SEQ ID NO: 2174 - protein, 11 aa, synthetic construct
GGSNIGSKSVH

SEQ ID NO: 2175 - protein, 11 aa, synthetic construct
RASQSITSYLH

SEQ ID NO: 2176 - protein, 11 aa, synthetic construct
RASQSINHYLN

SEQ ID NO: 2177 - protein, 11 aa, synthetic construct
RASQSVGRYLN

SEQ ID NO: 2178 - protein, 17 aa, synthetic construct
RSSQSVLYSSNDQNYLA

SEQ ID NO: 2179 - protein, 14 aa, synthetic construct
TGTSSDIGDYNYVS

SEQ ID NO: 2180 - protein, 11 aa, synthetic construct
GGDNIGSKGVH

SEQ ID NO: 2181 - protein, 11 aa, synthetic construct
GGNNIGSNSVH

SEQ ID NO: 2182 - protein, 14 aa, synthetic construct
TGTSSDVGSYDYVS

SEQ ID NO: 2183 - protein, 16 aa, synthetic construct
RSNQSLLHSHGYIYLD

SEQ ID NO: 2184 - protein, 11 aa, synthetic construct
QASQDISKFLN

SEQ ID NO: 2185 - protein, 14 aa, synthetic construct
TGSRSNIGAGYDVH

SEQ ID NO: 2186 - protein, 14 aa, synthetic construct
TGSSSSIGAGYDVH

SEQ ID NO: 2187 - protein, 11 aa, synthetic construct
RASQGISNYLA

SEQ ID NO: 2188 - protein, 11 aa, synthetic construct
GGNNIGSKNVH

SEQ ID NO: 2189 - protein, 13 aa, synthetic construct
SGSSSNIGNNAVN

SEQ ID NO: 2190 - protein, 11 aa, synthetic construct
RASQSISSWLA

SEQ ID NO: 2191 - protein, 12 aa, synthetic construct
RASESVSSEYLA

SEQ ID NO: 2192 - protein, 12 aa, synthetic construct
RASESVRSSYLA

SEQ ID NO: 2193 - protein, 13 aa, synthetic construct
TRSSGSLATNYVQ

SEQ ID NO: 2194 - protein, 12 aa, synthetic construct
RASESVSSSYLA

SEQ ID NO: 2195 - protein, 11 aa, synthetic construct
RASQSISNFLN

SEQ ID NO: 2196 - protein, 14 aa, synthetic construct
TGSNSNIGAGYDIH

SEQ ID NO: 2197 - protein, 12 aa, synthetic construct
RASQSLNSKYFA

SEQ ID NO: 2198 - protein, 13 aa, synthetic construct
TRSGGSIASYYVQ

SEQ ID NO: 2199 - protein, 14 aa, synthetic construct
TGTTSDVGSYNYVS

SEQ ID NO: 2200 - protein, 11 aa, synthetic construct
RASQSINSDLA

SEQ ID NO: 2201 - protein, 14 aa, synthetic construct
TGSSSNIGAGYDVH

SEQ ID NO: 2202 - protein, 11 aa, synthetic construct
RASQSVSTNLA

SEQ ID NO: 2203 - protein, 11 aa, synthetic construct
RASQSLSNKLA

SEQ ID NO: 2204 - protein, 14 aa, synthetic construct
LGAAPTSGQVMMYT

SEQ ID NO: 2205 - protein, 13 aa, synthetic construct
SGSSSNIGKNAVN

SEQ ID NO: 2206 - protein, 13 aa, synthetic construct
SGSSANIGHNAVN

SEQ ID NO: 2207 - protein, 17 aa, synthetic construct
RSSQSVLYSSNNKNYLT

SEQ ID NO: 2208 - protein, 11 aa, synthetic construct
GGNNIGSKSVH

SEQ ID NO: 2209 - protein, 14 aa, synthetic construct
AGSNSNIGAGYDVH

SEQ ID NO: 2210 - protein, 14 aa, synthetic construct
TGNSSDVGDYNYVS

SEQ ID NO: 2211 - protein, 14 aa, synthetic construct
TRTSNDVGNYNYVS

SEQ ID NO: 2212 - protein, 11 aa, synthetic construct
QASQDISNYLN

SEQ ID NO: 2213 - protein, 14 aa, synthetic construct
TESRSNIGAGFDVQ

SEQ ID NO: 2214 - protein, 13 aa, synthetic construct
SGSTSNIGSNTVK

SEQ ID NO: 2215 - protein, 11 aa, synthetic construct
GGNNIGTKSVH

SEQ ID NO: 2216 - protein, 11 aa, synthetic construct
EGDNIGRKSVH

SEQ ID NO: 2217 - protein, 13 aa, synthetic construct
SGSSSNIGSNTVN

SEQ ID NO: 2218 - protein, 13 aa, synthetic construct
SGSSSNIGSNYVC

SEQ ID NO: 2219 - protein, 11 aa, synthetic construct
RASQSTSIYLN

SEQ ID NO: 2220 - protein, 13 aa, synthetic construct
TGSSGSIANNYVQ

SEQ ID NO: 2221 - protein, 11 aa, synthetic construct
GGNSIGSKSVH

SEQ ID NO: 2222 - protein, 11 aa, synthetic construct
SGDKLGDKYAC

SEQ ID NO: 2223 - protein, 11 aa, synthetic construct
RASQNIVSYLN

SEQ ID NO: 2224 - protein, 13 aa, synthetic construct
TASSNIGAGYDVH

SEQ ID NO: 2225 - protein, 11 aa, synthetic construct
RASQSISRHLN

SEQ ID NO: 2226 - protein, 11 aa, synthetic construct
RASQSIGSWLA

SEQ ID NO: 2227 - protein, 11 aa, synthetic construct
RASQSVSSNLA

SEQ ID NO: 2228 - protein, 11 aa, synthetic construct
GGTNIGGRSVH

SEQ ID NO: 2229 - protein, 17 aa, synthetic construct
KSSQNVLYSSNNKNYLA

SEQ ID NO: 2230 - protein, 12 aa, synthetic construct
RASQSVSSSYLA

SEQ ID NO: 2231 - protein, 11 aa, synthetic construct
RASQTVRTFLN

SEQ ID NO: 2232 - protein, 13 aa, synthetic construct
SGSSSNIGSNAVN

SEQ ID NO: 2233 - protein, 16 aa, synthetic construct
RSSQSLLHSNGYKYLD

SEQ ID NO: 2234 - protein, 11 aa, synthetic construct
RASQSVSNYLN

SEQ ID NO: 2235 - protein, 14 aa, synthetic construct
ASSTGTVTNGYYPT

SEQ ID NO: 2236 - protein, 11 aa, synthetic construct
RASQGISNYLN

SEQ ID NO: 2237 - protein, 11 aa, synthetic construct
GGDNIGTKSVH

SEQ ID NO: 2238 - protein, 11 aa, synthetic construct
RASQSIRSWLA

SEQ ID NO: 2239 - protein, 11 aa, synthetic construct
GGHNIGGKSVH

SEQ ID NO: 2240 - protein, 11 aa, synthetic construct
RASQSVSSDLA

SEQ ID NO: 2241 - protein, 16 aa, synthetic construct
RSSQSLLHSNGYTYLD

SEQ ID NO: 2242 - protein, 11 aa, synthetic construct
GGNDIGGKAVH

SEQ ID NO: 2243 - protein, 11 aa, synthetic construct
RASQSISTILN

SEQ ID NO: 2244 - protein, 11 aa, synthetic construct
RASQGISSWLA

SEQ ID NO: 2245 - protein, 17 aa, synthetic construct
RSSQSLLDSDDVYTYLD

SEQ ID NO: 2246 - protein, 11 aa, synthetic construct
SGENLGRKYVC

SEQ ID NO: 2247 - protein, 11 aa, synthetic construct
RASQTINNYLT

SEQ ID NO: 2248 - protein, 11 aa, synthetic construct
RASQGISTSLN

SEQ ID NO: 2249 - protein, 11 aa, synthetic construct
RASQSIGTYLN

SEQ ID NO: 2250 - protein, 14 aa, synthetic construct
TGSSSNIGTGYDVH

SEQ ID NO: 2251 - protein, 13 aa, synthetic construct
TRSSGYIASNYVL

SEQ ID NO: 2252 - protein, 11 aa, synthetic construct
GGDNIGSKNVH

SEQ ID NO: 2253 - protein, 13 aa, synthetic construct
SGSSSNIGSNSVY

SEQ ID NO: 2254 - protein, 17 aa, synthetic construct
KSSQSVLYSSNNKNYLA

SEQ ID NO: 2255 - protein, 13 aa, synthetic construct
SGRSSNIGSNSVN

SEQ ID NO: 2256 - protein, 17 aa, synthetic construct
KSSQSVLYRSKNKNYLA

SEQ ID NO: 2257 - protein, 15 aa, synthetic construct
WYQQKPGKAPKLLIY

SEQ ID NO: 2258 - protein, 15 aa, synthetic construct
WYQQKPGQAPRLLIY

SEQ ID NO: 2259 - protein, 15 aa, synthetic construct
WYQQKPGKAPKLLLY

SEQ ID NO: 2260 - protein, 15 aa, synthetic construct
WYLQKPGQSPQLLIY

SEQ ID NO: 2261 - protein, 15 aa, synthetic construct
WYRQRPGKPPKLLIS

SEQ ID NO: 2262 - protein, 15 aa, synthetic construct
WYQQRPGQAPVVVLY

SEQ ID NO: 2263 - protein, 15 aa, synthetic construct
WYQQKPGKAPNLLIY

SEQ ID NO: 2264 - protein, 15 aa, synthetic construct
WFQQRPGKAPKLLIY

SEQ ID NO: 2265 - protein, 15 aa, synthetic construct
WYQQHPGKAPKLMIY

SEQ ID NO: 2266 - protein, 15 aa, synthetic construct
WYQQKPGKAPRVLIY

SEQ ID NO: 2267 - protein, 15 aa, synthetic construct
WYQQKPGKAPNLLLY

SEQ ID NO: 2268 - protein, 15 aa, synthetic construct
WLQQKPGQAPVLVVY

SEQ ID NO: 2269 - protein, 15 aa, synthetic construct
WYQQKPGQAPVMVIH

SEQ ID NO: 2270 - protein, 15 aa, synthetic construct
WYQQKPGQAPMLIIY

SEQ ID NO: 2271 - protein, 15 aa, synthetic construct
WYQQKPGNAPRFLIS

SEQ ID NO: 2272 - protein, 15 aa, synthetic construct
WYQQKPGKAPKLLIH

SEQ ID NO: 2273 - protein, 15 aa, synthetic construct
WYQQQPGKAPKLLLY

SEQ ID NO: 2274 - protein, 15 aa, synthetic construct
WYQQRPGKAPKLLLY

SEQ ID NO: 2275 - protein, 15 aa, synthetic construct
WYQQKPGRAPKLLIY

SEQ ID NO: 2276 - protein, 15 aa, synthetic construct
WYQQHPGKAPKVLTY

SEQ ID NO: 2277 - protein, 15 aa, synthetic construct
WYQQRPGQAPVLVVY

SEQ ID NO: 2278 - protein, 15 aa, synthetic construct
WYQQRPGKAPKLLIF

SEQ ID NO: 2279 - protein, 15 aa, synthetic construct
WYQQKPGNPPRYLLY

SEQ ID NO: 2280 - protein, 15 aa, synthetic construct
WYQHRPGKAPKLLIY

SEQ ID NO: 2281 - protein, 15 aa, synthetic construct
WYQQKPGRAPKLLLY

SEQ ID NO: 2282 - protein, 15 aa, synthetic construct
WYQHKPGKAPELLIY

SEQ ID NO: 2283 - protein, 15 aa, synthetic construct
WYQQKPGQAPVLVVY

SEQ ID NO: 2284 - protein, 15 aa, synthetic construct
WYRQKPGKAPELLIY

SEQ ID NO: 2285 - protein, 15 aa, synthetic construct
WYQLKPGQAPVAVIY

SEQ ID NO: 2286 - protein, 15 aa, synthetic construct
WYQQKLGKAPKLLLY

SEQ ID NO: 2287 - protein, 15 aa, synthetic construct
WYQQKPGQAPVLVVF

SEQ ID NO: 2288 - protein, 15 aa, synthetic construct
WYQQKPGKAPKLLVF

SEQ ID NO: 2289 - protein, 15 aa, synthetic construct
WYRQKPGKAPNLLIY

SEQ ID NO: 2290 - protein, 15 aa, synthetic construct
WYQQKPGQPPKLLIY

SEQ ID NO: 2291 - protein, 15 aa, synthetic construct
WYQQKPGQAPKLLIY

SEQ ID NO: 2292 - protein, 15 aa, synthetic construct
WYQQKPGQAPVVIIY

SEQ ID NO: 2293 - protein, 15 aa, synthetic construct
WYQQKPGQPPRLLIY

SEQ ID NO: 2294 - protein, 15 aa, synthetic construct
WYQQKPGKAPRLLIY

SEQ ID NO: 2295 - protein, 15 aa, synthetic construct
WYQQRRGKAPKLLLY

SEQ ID NO: 2296 - protein, 15 aa, synthetic construct
WYQQKPGKAPKFLLY

SEQ ID NO: 2297 - protein, 15 aa, synthetic construct
WFQQKPGKAPRLLIF

SEQ ID NO: 2298 - protein, 15 aa, synthetic construct
WYQQRPGSAPTTVIY

SEQ ID NO: 2299 - protein, 15 aa, synthetic construct
WFQQKAGKAPRLLMY

SEQ ID NO: 2300 - protein, 15 aa, synthetic construct
WFQQKPGKAPKLLIY

SEQ ID NO: 2301 - protein, 15 aa, synthetic construct
WYQQLPGKAPKLLIY

SEQ ID NO: 2302 - protein, 15 aa, synthetic construct
WYQQRPGQPPKLIIY

SEQ ID NO: 2303 - protein, 15 aa, synthetic construct
WYQQKPGKAPKLLVY

SEQ ID NO: 2304 - protein, 15 aa, synthetic construct
WYQQKPGQAPVLVIY

SEQ ID NO: 2305 - protein, 15 aa, synthetic construct
WYQHFPGKAPKLLIY

SEQ ID NO: 2306 - protein, 15 aa, synthetic construct
WYQQRPGQAPRLLIY

SEQ ID NO: 2307 - protein, 15 aa, synthetic construct
WYQHLPGTAPKLLIY

SEQ ID NO: 2308 - protein, 15 aa, synthetic construct
WYQQLPGKAPKLIIY

SEQ ID NO: 2309 - protein, 15 aa, synthetic construct
WYQQRPGKAPKLLIY

SEQ ID NO: 2310 - protein, 15 aa, synthetic construct
WYQQRPGKAPNFLIY

SEQ ID NO: 2311 - protein, 15 aa, synthetic construct
WYQQKPEKAPKLLIY

SEQ ID NO: 2312 - protein, 15 aa, synthetic construct
WYQQKSGKAPKLLIY

SEQ ID NO: 2313 - protein, 15 aa, synthetic construct
WYQQHPGKAPKLTIY

SEQ ID NO: 2314 - protein, 15 aa, synthetic construct
WYQQLPGTAPKLLIY

SEQ ID NO: 2315 - protein, 15 aa, synthetic construct
WFQQRPGQSPRRLIY

SEQ ID NO: 2316 - protein, 15 aa, synthetic construct
WYQQKPGKAPKVLIY

SEQ ID NO: 2317 - protein, 15 aa, synthetic construct
WYQQLPGEAPKLLIY

SEQ ID NO: 2318 - protein, 15 aa, synthetic construct
WYQQKPGQAPILVIY

SEQ ID NO: 2319 - protein, 15 aa, synthetic construct
WYLQRPGQAPVLVIS

SEQ ID NO: 2320 - protein, 15 aa, synthetic construct
WYQQKSGQAPVLVIY

SEQ ID NO: 2321 - protein, 15 aa, synthetic construct
WYQQKPGKVPNLLIY

SEQ ID NO: 2322 - protein, 15 aa, synthetic construct
WYQQIPGTAPKLLIS

SEQ ID NO: 2323 - protein, 15 aa, synthetic construct
WYQQKPGKAPTLLIY

SEQ ID NO: 2324 - protein, 15 aa, synthetic construct
WYQQFPGTAPKLLIY

SEQ ID NO: 2325 - protein, 15 aa, synthetic construct
WYQQKPGKAPKLLMY

SEQ ID NO: 2326 - protein, 15 aa, synthetic construct
WYQQKPGQPPKLFIY

SEQ ID NO: 2327 - protein, 15 aa, synthetic construct
WYQQKAGRAPKLLIY

SEQ ID NO: 2328 - protein, 15 aa, synthetic construct
WYQHKPGQAPRLLIY

SEQ ID NO: 2329 - protein, 15 aa, synthetic construct
WYQQYPDKAPKLMIY

SEQ ID NO: 2330 - protein, 15 aa, synthetic construct
WYQQIPGKAPKLLLY

SEQ ID NO: 2331 - protein, 15 aa, synthetic construct
WYQQLPGRAPKLLIY

SEQ ID NO: 2332 - protein, 15 aa, synthetic construct
WYQQHPGKVPKLMIY

SEQ ID NO: 2333 - protein, 15 aa, synthetic construct
WYQQKPGKAPKLLIS

SEQ ID NO: 2334 - protein, 15 aa, synthetic construct
WYQQLPGKAPKLLLY

SEQ ID NO: 2335 - protein, 15 aa, synthetic construct
WYQQHPGKAPKLMVY

SEQ ID NO: 2336 - protein, 15 aa, synthetic construct
WYQHIPGKAPKLLLY

SEQ ID NO: 2337 - protein, 15 aa, synthetic construct
WYQLHPGKAPKLMIY

SEQ ID NO: 2338 - protein, 15 aa, synthetic construct
WYLHKPGQSPQLLIY

SEQ ID NO: 2339 - protein, 15 aa, synthetic construct
WYQQLPGTVPKLLIY

SEQ ID NO: 2340 - protein, 15 aa, synthetic construct
WYQQKPGQAPELVVY

SEQ ID NO: 2341 - protein, 15 aa, synthetic construct
WYQQFPGKAPKLLIY

SEQ ID NO: 2342 - protein, 15 aa, synthetic construct
WHQQRPGQAPRLLIY

SEQ ID NO: 2343 - protein, 15 aa, synthetic construct
WYQQSPGQTPRLLIY

SEQ ID NO: 2344 - protein, 15 aa, synthetic construct
WYQLRPGSSPSTVIY

SEQ ID NO: 2345 - protein, 15 aa, synthetic construct
WYQQKPGRAPNLLIY

SEQ ID NO: 2346 - protein, 15 aa, synthetic construct
WFQQKPGKAPKSLIY

SEQ ID NO: 2347 - protein, 15 aa, synthetic construct
WYQQKPGKAPNLLVY

SEQ ID NO: 2348 - protein, 15 aa, synthetic construct
WYQHRPGSAPTIVIY

SEQ ID NO: 2349 - protein, 15 aa, synthetic construct
WYPPHPGKAPKLMIY

SEQ ID NO: 2350 - protein, 15 aa, synthetic construct
WFQQKPGQAPRLLMF

SEQ ID NO: 2351 - protein, 15 aa, synthetic construct
WYQQRPGQAPTLLIH

SEQ ID NO: 2352 - protein, 15 aa, synthetic construct
GTSSFQPLAPKLLIY

SEQ ID NO: 2353 - protein, 15 aa, synthetic construct
WYQQLPAQAPKLLIY

SEQ ID NO: 2354 - protein, 15 aa, synthetic construct
WYQQKPGKAPKLLIN

SEQ ID NO: 2355 - protein, 15 aa, synthetic construct
WYQQLPGTAPQLLIY

SEQ ID NO: 2356 - protein, 15 aa, synthetic construct
WYQQHPGTAPKLMIY

SEQ ID NO: 2357 - protein, 15 aa, synthetic construct
WYQLHPGKAPKALIY

SEQ ID NO: 2358 - protein, 15 aa, synthetic construct
WYQQKPGQAPVLVVN

SEQ ID NO: 2359 - protein, 15 aa, synthetic construct
WYQQLPRTAPKLLIY

SEQ ID NO: 2360 - protein, 15 aa, synthetic construct
GYQQFPGTAPKLIIY

SEQ ID NO: 2361 - protein, 15 aa, synthetic construct
WYQQVPGKAPTLLIY

SEQ ID NO: 2362 - protein, 15 aa, synthetic construct
WYQQKPAQAPVLVVY

SEQ ID NO: 2363 - protein, 15 aa, synthetic construct
WYQQRPGRAPTTIIY

SEQ ID NO: 2364 - protein, 15 aa, synthetic construct
WYQQKPGQAPVLVVS

SEQ ID NO: 2365 - protein, 15 aa, synthetic construct
WYQKKPGQSPVLVIY

SEQ ID NO: 2366 - protein, 15 aa, synthetic construct
WYQQRPGSAPTTVIF

SEQ ID NO: 2367 - protein, 15 aa, synthetic construct
WYQQKPGKAPKLLMF

SEQ ID NO: 2368 - protein, 15 aa, synthetic construct
WYQQFPGRAPKLLIY

SEQ ID NO: 2369 - protein, 15 aa, synthetic construct
WYQQKPGKAPKLVIY

SEQ ID NO: 2370 - protein, 15 aa, synthetic construct
WYQQLPGTAPKLLMY

SEQ ID NO: 2371 - protein, 15 aa, synthetic construct
WYQQKPGKAPELLIY

SEQ ID NO: 2372 - protein, 15 aa, synthetic construct
WFQQKPGQAPRALIY

SEQ ID NO: 2373 - protein, 15 aa, synthetic construct
WYQQRPGQAPVLVVF

SEQ ID NO: 2374 - protein, 15 aa, synthetic construct
WYQQQPGQAPRLLIY

SEQ ID NO: 2375 - protein, 15 aa, synthetic construct
WYQQKPGKAPKLQIY

SEQ ID NO: 2376 - protein, 15 aa, synthetic construct
WYLQKPGQSPQLLMY

SEQ ID NO: 2377 - protein, 15 aa, synthetic construct
WYQQRSGQSPVLVIY

SEQ ID NO: 2378 - protein, 15 aa, synthetic construct
WYQQRPGSSPSTVIY

SEQ ID NO: 2379 - protein, 15 aa, synthetic construct
WCQQKPGKAPKLLIS

SEQ ID NO: 2380 - protein, 15 aa, synthetic construct
WYQQRPGSAPTIVIS

SEQ ID NO: 2381 - protein, 15 aa, synthetic construct
WYQQRPGQPPKLLIY

SEQ ID NO: 2382 - protein, 7 aa, synthetic construct
DAVNLET

SEQ ID NO: 2383 - protein, 7 aa, synthetic construct
GASTRAT

SEQ ID NO: 2384 - protein, 7 aa, synthetic construct
SASSLQS

SEQ ID NO: 2385 - protein, 7 aa, synthetic construct
AASILES

SEQ ID NO: 2386 - protein, 7 aa, synthetic construct
KASSLES

SEQ ID NO: 2387 - protein, 7 aa, synthetic construct
LGSNRAS

SEQ ID NO: 2388 - protein, 7 aa, synthetic construct
DASSLEG

SEQ ID NO: 2389 - protein, 7 aa, synthetic construct
DASSLQS

SEQ ID NO: 2390 - protein, 7 aa, synthetic construct
DDFGRPS

SEQ ID NO: 2391 - protein, 7 aa, synthetic construct
AASSLQS

SEQ ID NO: 2392 - protein, 7 aa, synthetic construct
AASTLQS

SEQ ID NO: 2393 - protein, 7 aa, synthetic construct
EASNLET

SEQ ID NO: 2394 - protein, 7 aa, synthetic construct
EVNKRPS

SEQ ID NO: 2395 - protein, 7 aa, synthetic construct
SASTLES

SEQ ID NO: 2396 - protein, 7 aa, synthetic construct
DASSLEN

SEQ ID NO: 2397 - protein, 7 aa, synthetic construct
DASNLEA

SEQ ID NO: 2398 - protein, 7 aa, synthetic construct
AASTLES

SEQ ID NO: 2399 - protein, 7 aa, synthetic construct
DDSDRPS

SEQ ID NO: 2400 - protein, 7 aa, synthetic construct
KDSERPS

SEQ ID NO: 2401 - protein, 7 aa, synthetic construct
YDRDRPS

SEQ ID NO: 2402 - protein, 7 aa, synthetic construct
DASSLGS

SEQ ID NO: 2403 - protein, 7 aa, synthetic construct
GASSLQS

SEQ ID NO: 2404 - protein, 7 aa, synthetic construct
GASSLHS

SEQ ID NO: 2405 - protein, 7 aa, synthetic construct
AVSTLES

SEQ ID NO: 2406 - protein, 7 aa, synthetic construct
AASRLQS

SEQ ID NO: 2407 - protein, 7 aa, synthetic construct
GASSLHT

SEQ ID NO: 2408 - protein, 7 aa, synthetic construct
AASNLQS

SEQ ID NO: 2409 - protein, 7 aa, synthetic construct
DVSKRPS

SEQ ID NO: 2410 - protein, 7 aa, synthetic construct
AVSTLQS

SEQ ID NO: 2411 - protein, 7 aa, synthetic construct
VASRLES

SEQ ID NO: 2412 - protein, 7 aa, synthetic construct
DNDARPS

SEQ ID NO: 2413 - protein, 7 aa, synthetic construct
DASSLQR

SEQ ID NO: 2414 - protein, 7 aa, synthetic construct
DASYLET

SEQ ID NO: 2415 - protein, 11 aa, synthetic construct
YHSDSNKGQGS

SEQ ID NO: 2416 - protein, 7 aa, synthetic construct
DASNLET

SEQ ID NO: 2417 - protein, 7 aa, synthetic construct
AASTLQR

SEQ ID NO: 2418 - protein, 7 aa, synthetic construct
VASSLQS

SEQ ID NO: 2419 - protein, 7 aa, synthetic construct
DDTDRPS

SEQ ID NO: 2420 - protein, 7 aa, synthetic construct
ATSTLES

SEQ ID NO: 2421 - protein, 7 aa, synthetic construct
TAPEMEG

SEQ ID NO: 2422 - protein, 7 aa, synthetic construct
WASTRES

SEQ ID NO: 2423 - protein, 7 aa, synthetic construct
VASTLQS

SEQ ID NO: 2424 - protein, 7 aa, synthetic construct
DASTRAT

SEQ ID NO: 2425 - protein, 7 aa, synthetic construct
AAASLQS

SEQ ID NO: 2426 - protein, 7 aa, synthetic construct
AASSLHS

SEQ ID NO: 2427 - protein, 7 aa, synthetic construct
EVSNRPS

SEQ ID NO: 2428 - protein, 7 aa, synthetic construct
EDSDRPS

SEQ ID NO: 2429 - protein, 7 aa, synthetic construct
GASSLHA

SEQ ID NO: 2430 - protein, 7 aa, synthetic construct
AASILQS

SEQ ID NO: 2431 - protein, 7 aa, synthetic construct
EDNQRPS

SEQ ID NO: 2432 - protein, 7 aa, synthetic construct
TASTLES

SEQ ID NO: 2433 - protein, 7 aa, synthetic construct
YDDLLPS

SEQ ID NO: 2434 - protein, 7 aa, synthetic construct
DASSLES

SEQ ID NO: 2435 - protein, 7 aa, synthetic construct
SASTLQS

SEQ ID NO: 2436 - protein, 7 aa, synthetic construct
WASTRKS

SEQ ID NO: 2437 - protein, 7 aa, synthetic construct
MASSLES

SEQ ID NO: 2438 - protein, 7 aa, synthetic construct
VASTWES

SEQ ID NO: 2439 - protein, 7 aa, synthetic construct
DASKRAT

SEQ ID NO: 2440 - protein, 7 aa, synthetic construct
YDNDRPS

SEQ ID NO: 2441 - protein, 7 aa, synthetic construct
SASGLQS

SEQ ID NO: 2442 - protein, 7 aa, synthetic construct
EFTNRPS

SEQ ID NO: 2443 - protein, 7 aa, synthetic construct
DASSRAT

SEQ ID NO: 2444 - protein, 7 aa, synthetic construct
KTSSLES

SEQ ID NO: 2445 - protein, 7 aa, synthetic construct
DNDKRPS

SEQ ID NO: 2446 - protein, 7 aa, synthetic construct
NASSFES

SEQ ID NO: 2447 - protein, 7 aa, synthetic construct
GASTLQS

SEQ ID NO: 2448 - protein, 7 aa, synthetic construct
DASNRAT

SEQ ID NO: 2449 - protein, 7 aa, synthetic construct
EVTKRPS

SEQ ID NO: 2450 - protein, 7 aa, synthetic construct
DNTNRPS

SEQ ID NO: 2451 - protein, 7 aa, synthetic construct
KVSNRDS

SEQ ID NO: 2452 - protein, 7 aa, synthetic construct
KTSTLES

SEQ ID NO: 2453 - protein, 7 aa, synthetic construct
KATHLET

SEQ ID NO: 2454 - protein, 7 aa, synthetic construct
LNNNRPS

SEQ ID NO: 2455 - protein, 7 aa, synthetic construct
RDNIRPS

SEQ ID NO: 2456 - protein, 7 aa, synthetic construct
FNSDRPS

SEQ ID NO: 2457 - protein, 7 aa, synthetic construct
RDTERPS

SEQ ID NO: 2458 - protein, 7 aa, synthetic construct
DAYNRAT

SEQ ID NO: 2459 - protein, 7 aa, synthetic construct
KDTERPS

SEQ ID NO: 2460 - protein, 7 aa, synthetic construct
ANDNRPS

SEQ ID NO: 2461 - protein, 7 aa, synthetic construct
DASNLEP

SEQ ID NO: 2462 - protein, 8 aa, synthetic construct
TNNQRRPS

SEQ ID NO: 2463 - protein, 7 aa, synthetic construct
SNNQRPS

SEQ ID NO: 2464 - protein, 7 aa, synthetic construct
GASSRAT

SEQ ID NO: 2465 - protein, 7 aa, synthetic construct
EVTNRPS

SEQ ID NO: 2466 - protein, 7 aa, synthetic construct
DASILET

SEQ ID NO: 2467 - protein, 7 aa, synthetic construct
TAPTVEG

SEQ ID NO: 2468 - protein, 7 aa, synthetic construct
DALNLKS

SEQ ID NO: 2469 - protein, 7 aa, synthetic construct
DNSNRPS

SEQ ID NO: 2470 - protein, 7 aa, synthetic construct
DINNRPS

SEQ ID NO: 2471 - protein, 7 aa, synthetic construct
VNNNRPS

SEQ ID NO: 2472 - protein, 7 aa, synthetic construct
HALSLQS

SEQ ID NO: 2473 - protein, 7 aa, synthetic construct
DVTNRPS

SEQ ID NO: 2474 - protein, 7 aa, synthetic construct
DDSGRPS

SEQ ID NO: 2475 - protein, 7 aa, synthetic construct
EVNNRPS

SEQ ID NO: 2476 - protein, 7 aa, synthetic construct
DNNNRPS

SEQ ID NO: 2477 - protein, 7 aa, synthetic construct
GNSNRPS

SEQ ID NO: 2478 - protein, 7 aa, synthetic construct
TASTLQT

SEQ ID NO: 2479 - protein, 7 aa, synthetic construct
ANSNRPS

SEQ ID NO: 2480 - protein, 7 aa, synthetic construct
KSSSLES

SEQ ID NO: 2481 - protein, 7 aa, synthetic construct
GASSRPT

SEQ ID NO: 2482 - protein, 6 aa, synthetic construct
GASRAT

SEQ ID NO: 2483 - protein, 7 aa, synthetic construct
IASNLQR

SEQ ID NO: 2484 - protein, 7 aa, synthetic construct
GNTNRPS

SEQ ID NO: 2485 - protein, 7 aa, synthetic construct
DASTLQN

SEQ ID NO: 2486 - protein, 7 aa, synthetic construct
AASSRAT

SEQ ID NO: 2487 - protein, 7 aa, synthetic construct
GATNLET

SEQ ID NO: 2488 - protein, 7 aa, synthetic construct
ANTNRPS

SEQ ID NO: 2489 - protein, 7 aa, synthetic construct
GASARAA

SEQ ID NO: 2490 - protein, 7 aa, synthetic construct
GNTHRPS

SEQ ID NO: 2491 - protein, 7 aa, synthetic construct
GASGRAT

SEQ ID NO: 2492 - protein, 7 aa, synthetic construct
GNNNRPS

SEQ ID NO: 2493 - protein, 7 aa, synthetic construct
YDHLLPS

SEQ ID NO: 2494 - protein, 7 aa, synthetic construct
DNSDRPS

SEQ ID NO: 2495 - protein, 7 aa, synthetic construct
DVTKRPS

SEQ ID NO: 2496 - protein, 7 aa, synthetic construct
GNNIRPS

SEQ ID NO: 2497 - protein, 7 aa, synthetic construct
SDDLRPS

SEQ ID NO: 2498 - protein, 7 aa, synthetic construct
YDSDRPS

SEQ ID NO: 2499 - protein, 7 aa, synthetic construct
RNTHRPS

SEQ ID NO: 2500 - protein, 7 aa, synthetic construct
GDGDRPS

SEQ ID NO: 2501 - protein, 7 aa, synthetic construct
GDIQRPS

SEQ ID NO: 2502 - protein, 7 aa, synthetic construct
EDDQRPS

SEQ ID NO: 2503 - protein, 7 aa, synthetic construct
DARDRPS

SEQ ID NO: 2504 - protein, 7 aa, synthetic construct
QDSERPS

SEQ ID NO: 2505 - protein, 7 aa, synthetic construct
EDNERPS

SEQ ID NO: 2506 - protein, 7 aa, synthetic construct
TASSLQS

SEQ ID NO: 2507 - protein, 7 aa, synthetic construct
DASSLET

SEQ ID NO: 2508 - protein, 7 aa, synthetic construct
AASVLQS

SEQ ID NO: 2509 - protein, 7 aa, synthetic construct
AASSLPS

SEQ ID NO: 2510 - protein, 7 aa, synthetic construct
DDGDRPS

SEQ ID NO: 2511 - protein, 7 aa, synthetic construct
WASSRES

SEQ ID NO: 2512 - protein, 7 aa, synthetic construct
ANINRPS

SEQ ID NO: 2513 - protein, 7 aa, synthetic construct
GASSRAA

SEQ ID NO: 2514 - protein, 4 aa, synthetic construct
AAPG

SEQ ID NO: 2515 - protein, 7 aa, synthetic construct
NYNQRPS

SEQ ID NO: 2516 - protein, 7 aa, synthetic construct
STNNKHS

SEQ ID NO: 2517 - protein, 7 aa, synthetic construct
ANANRPS

SEQ ID NO: 2518 - protein, 7 aa, synthetic construct
KASTLES

SEQ ID NO: 2519 - protein, 7 aa, synthetic construct
GNINRPS

SEQ ID NO: 2520 - protein, 7 aa, synthetic construct
LGTNRAS

SEQ ID NO: 2521 - protein, 7 aa, synthetic construct
TLSYRAS

SEQ ID NO: 2522 - protein, 7 aa, synthetic construct
RDDKRPS

SEQ ID NO: 2523 - protein, 7 aa, synthetic construct
ATSSLHS

SEQ ID NO: 2524 - protein, 7 aa, synthetic construct
GDNNRPS

SEQ ID NO: 2525 - protein, 7 aa, synthetic construct
QDNERPS

SEQ ID NO: 2526 - protein, 7 aa, synthetic construct
GDDQRPS

SEQ ID NO: 2527 - protein, 7 aa, synthetic construct
SDDQRPS

SEQ ID NO: 2528 - protein, 32 aa, synthetic construct
GVPSRFSGSGSGTDFTFTISSLQPEDFATYYC

SEQ ID NO: 2529 - protein, 32 aa, synthetic construct
GIPARFSGSGSGTEFTLTISSLQSEDFAVYFC

SEQ ID NO: 2530 - protein, 32 aa, synthetic construct
GVPSRFSGSGSGTDFSLTISSLQPEDFATYYC

SEQ ID NO: 2531 - protein, 32 aa, synthetic construct
GVPSRFSGSGSGTDYTLTISSLQPEDFATYYC

SEQ ID NO: 2532 - protein, 32 aa, synthetic construct
GVPSRFSGSGSGTEFTLTISSLQPDDFATYYC

SEQ ID NO: 2533 - protein, 32 aa, synthetic construct
GVPDRFSGSGSGTDFTLKISRVEAEDVGVYYC

SEQ ID NO: 2534 - protein, 32 aa, synthetic construct
GVPSRFSGSGSGTDFTLTISSLQPEDFATYYC

SEQ ID NO: 2535 - protein, 32 aa, synthetic construct
GIPERFSGSNSGNTATLTINWVEAGDEADYYC

SEQ ID NO: 2536 - protein, 32 aa, synthetic construct
GVPSRFSGSGSGTDFTLTINSLQPEDFATYYC

SEQ ID NO: 2537 - protein, 32 aa, synthetic construct
GVPSRFSGSGSGTDFTFTISSLQPEDIATYYC

SEQ ID NO: 2538 - protein, 32 aa, synthetic construct
GVPDRFSGSKSGNTASLTVSGLQAEDEADYYC

SEQ ID NO: 2539 - protein, 32 aa, synthetic construct
GVPSRFSGSGSGTDFTLTITSLQPEDFATYYC

SEQ ID NO: 2540 - protein, 32 aa, synthetic construct
GVPSRFSGGGSGTDFTLTITSLQPEDFATYYC

SEQ ID NO: 2541 - protein, 32 aa, synthetic construct
GVPSRFSGSGSGADFTLTISSLQPEDFATYYC

SEQ ID NO: 2542 - protein, 32 aa, synthetic construct
GVPSRFSGSGSGTDFTFTISSLQPEDIATYFC

SEQ ID NO: 2543 - protein, 32 aa, synthetic construct
GVPSRFSGSGSGTDFTLTVSSLQPEDFATYFC

SEQ ID NO: 2544 - protein, 32 aa, synthetic construct
GVPPRFRGSGSGTDFTLTISSLQPEDFATFYC

SEQ ID NO: 2545 - protein, 32 aa, synthetic construct
GIPERFSGSNSGNTATLTISRVEAGDEADYYC

SEQ ID NO: 2546 - protein, 32 aa, synthetic construct
GIPERFSGSTSGTTVTLTISGVQAEDEADYYC

SEQ ID NO: 2547 - protein, 32 aa, synthetic construct
GIPERFSGSNSGNTATLTISSVEAGDEADYYC

SEQ ID NO: 2548 - protein, 32 aa, synthetic construct
GVPSRFSGSGSGTDFTLTIRGLQPADFATYYC

SEQ ID NO: 2549 - protein, 32 aa, synthetic construct
GVPSRFSGSGSGTDFTLSISGVQPEDFATYYC

SEQ ID NO: 2550 - protein, 32 aa, synthetic construct
GVPSRFSGSGSGTDYTLTINSLQPEDFATYYC

SEQ ID NO: 2551 - protein, 32 aa, synthetic construct
GVPSRFTGSGSGTDFTLTISSLQPEDFATYYC

SEQ ID NO: 2552 - protein, 32 aa, synthetic construct
GVPSRFSGSGSGTDFTLTISSLQPEDLATYYC

SEQ ID NO: 2553 - protein, 32 aa, synthetic construct
GASDRFSGSKSGNTASLTISGLQAEDEADYYC

SEQ ID NO: 2554 - protein, 32 aa, synthetic construct
GVPSRFSASGSGTDFALTISSLQPEDFATYYC

SEQ ID NO: 2555 - protein, 32 aa, synthetic construct
GVPSRFSGSGSGTDYSLTISSLQPEDFATYYC

SEQ ID NO: 2556 - protein, 32 aa, synthetic construct
GIPERFSAYDSGNTATLTITRVEAGDEADYYC

SEQ ID NO: 2557 - protein, 32 aa, synthetic construct
GVPSRFSGSGSGTDFTITISSLQPEDFATYFC

SEQ ID NO: 2558 - protein, 34 aa, synthetic construct
GVPSRFSGSNDASANAGILRISGLQPEDEADYYC

SEQ ID NO: 2559 - protein, 32 aa, synthetic construct
GVPSRFSGSGSGTDFTLTIASLQPEDFATYYC

SEQ ID NO: 2560 - protein, 32 aa, synthetic construct
GVPSRFSGSGTGTDFTLTISSLQPEDFATYFC

SEQ ID NO: 2561 - protein, 32 aa, synthetic construct
GIPERFSGSNSGNPATLTISRVEAGDEADYYC

SEQ ID NO: 2562 - protein, 32 aa, synthetic construct
GVPSRFSGGGSGTDYTLTISGLQPEDFATYYC

SEQ ID NO: 2563 - protein, 32 aa, synthetic construct
GIPERFSGSSSGTTATLTINEVQAEDEADYYC

SEQ ID NO: 2564 - protein, 32 aa, synthetic construct
GVPSRFSGSGSGTDYTLTISSLQPEDFATYFC

SEQ ID NO: 2565 - protein, 32 aa, synthetic construct
GIPERFSGSNSGNTATLTISRVEAGDEADYWC

SEQ ID NO: 2566 - protein, 32 aa, synthetic construct
GVPPRFSGTGSGTDFTLTISSLQPEDFATYFC

SEQ ID NO: 2567 - protein, 32 aa, synthetic construct
GVPSRFSGSGSGTDFTLTISSLQPEDFATYFC

SEQ ID NO: 2568 - protein, 32 aa, synthetic construct
GVPARFSGSGSGTDFTLTISSLQAEDVAVYYC

SEQ ID NO: 2569 - protein, 32 aa, synthetic construct
GIPARFSGSGSGTEFTLTISSLQSEDFAVYYC

SEQ ID NO: 2570 - protein, 32 aa, synthetic construct
GVPSRFSGSGSGTEFTLTISRLQPEDFATYYC

SEQ ID NO: 2571 - protein, 32 aa, synthetic construct
GVSNRFSGSKSGNTASLTISGLQAEDEADYFC

SEQ ID NO: 2572 - protein, 32 aa, synthetic construct
GIPERFSGSTSGNTATLTISRVEAGDEADYYC

SEQ ID NO: 2573 - protein, 32 aa, synthetic construct
GVPSRFSGSGSGTDFTLTISSLEPEDFATYYC

SEQ ID NO: 2574 - protein, 34 aa, synthetic construct
GVPDRFSGSIDSSSNSASLTISGLKTEDEADYYC

SEQ ID NO: 2575 - protein, 32 aa, synthetic construct
GVPDRFSGSGSGTDFTLKISRVEAEDVGIYYC

SEQ ID NO: 2576 - protein, 32 aa, synthetic construct
GVPSRFSGSGSGTDFALTISSLQPEDIATYYC

SEQ ID NO: 2577 - protein, 32 aa, synthetic construct
GVPSRFSGSGSGTDYTLAISSLQPEDFATYYC

SEQ ID NO: 2578 - protein, 32 aa, synthetic construct
GVSDRFSGSKSGTSASLAISGLQSEDEADYYC

SEQ ID NO: 2579 - protein, 32 aa, synthetic construct
GVPSRFSGSGSGTHFTLTISSLQPEDFATYFC

SEQ ID NO: 2580 - protein, 32 aa, synthetic construct
GVPSRFSGSASGTDFTLTISSLQPEDFATYYC

SEQ ID NO: 2581 - protein, 32 aa, synthetic construct
GVPDRFSGSGSGTDFTLTISSLQPEDVAVYYC

SEQ ID NO: 2582 - protein, 32 aa, synthetic construct
GVPTRFSGSGYGTDFTLTISSLQPEDFATYYC

SEQ ID NO: 2583 - protein, 32 aa, synthetic construct
GIPARFNGSGSGTDFTLTISSLEPEDFAVYYC

SEQ ID NO: 2584 - protein, 32 aa, synthetic construct
GIPERFSGSNSGNTATLTISRVEAGDEADFYC

SEQ ID NO: 2585 - protein, 32 aa, synthetic construct
GVSNRFSGSKSDKTASLTIFGLQAEDEADYYC

SEQ ID NO: 2586 - protein, 32 aa, synthetic construct
GIPDRFSGSGSGTDFTLTISRLEPEDFAVYFC

SEQ ID NO: 2587 - protein, 32 aa, synthetic construct
GIPERVSGSNSGNTATLTISRVEAGDEADYYC

SEQ ID NO: 2588 - protein, 32 aa, synthetic construct
GVPSRFSGSGSGTHFTFTITSLQPEDIATYYC

SEQ ID NO: 2589 - protein, 32 aa, synthetic construct
GISARFSGSGSGTKFTLTISSLQSEDFAVYYC

SEQ ID NO: 2590 - protein, 32 aa, synthetic construct
GIPDRFSGSKSGTSATLGITGLQSGDEADYYC

SEQ ID NO: 2591 - protein, 32 aa, synthetic construct
GVPSRFSGSGSGTDFTLTISSLQPEDFATYIC

SEQ ID NO: 2592 - protein, 32 aa, synthetic construct
GVPSRFSGSGSGTEFTLTISSLQPEDFATYYC

SEQ ID NO: 2593 - protein, 32 aa, synthetic construct
GVPSRFSGSGSGTEFTLTISSLQTEDFATYYC

SEQ ID NO: 2594 - protein, 32 aa, synthetic construct
GIPDRFSGSGSGTDFTLTISSLQAEDVAVYYC

SEQ ID NO: 2595 - protein, 32 aa, synthetic construct
GVPLRFSGSGSGTEFTLTISSLQPEDFATYYC

SEQ ID NO: 2596 - protein, 32 aa, synthetic construct
GIPARFSGSGSETDFTLTISSLEPEDFAVYYC

SEQ ID NO: 2597 - protein, 32 aa, synthetic construct
GISNRFSGSKSGNTASLTISGLQAEDEAHYYC

SEQ ID NO: 2598 - protein, 32 aa, synthetic construct
GVPSRFSGSGSGTDFTLTITSLQPEDFAIYYC

SEQ ID NO: 2599 - protein, 32 aa, synthetic construct
GVPDRFSGSKSGTSASLAITGLQAEDEADYYC

SEQ ID NO: 2600 - protein, 32 aa, synthetic construct
GIPERFSGSNSGNTATLTISRVETGDEADYYC

SEQ ID NO: 2601 - protein, 32 aa, synthetic construct
GVPDRFSGSKSGTSASLAITGLQPVDEADYYC

SEQ ID NO: 2602 - protein, 32 aa, synthetic construct
GISERFSVSHSGNMATLTISRAQAGDEADYYC

SEQ ID NO: 2603 - protein, 32 aa, synthetic construct
GIPGRFSGSNSGNTATLTISRVEAGDEADYYC

SEQ ID NO: 2604 - protein, 32 aa, synthetic construct
GIPERFSGSSSGTAVTLTISGVQAEDEADYYC

SEQ ID NO: 2605 - protein, 32 aa, synthetic construct
GVPSRFSGSGSGTDFTLTINGLQPEDFATYYC

SEQ ID NO: 2606 - protein, 32 aa, synthetic construct
GVPSRFSGSGSGTDFTLTISSLQPEDFASYYC

SEQ ID NO: 2607 - protein, 32 aa, synthetic construct
GIPARFSGSGSGTDFTLTISSLEPEDFAVYYC

SEQ ID NO: 2608 - protein, 32 aa, synthetic construct
GVPSRFSGSGSGTDFTLIISSLQPEDFATYFC

SEQ ID NO: 2609 - protein, 32 aa, synthetic construct
GIPERLSGSSSGTTVTLTISGVQAEDEADYYC

SEQ ID NO: 2610 - protein, 32 aa, synthetic construct
GVPSRFSGSGSGTDFTFTITSLQPEDIATYYC

SEQ ID NO: 2611 - protein, 32 aa, synthetic construct
GVPSRFSGSGSGTDFTFTISGLQPEDIATYYC

SEQ ID NO: 2612 - protein, 32 aa, synthetic construct
GVPPRFSGSGSGTEFTLTISSLQPDDFATYYC

SEQ ID NO: 2613 - protein, 32 aa, synthetic construct
GVPDRFSGSKSGTSASLAISDLQSEDEADYHC

SEQ ID NO: 2614 - protein, 32 aa, synthetic construct
GVPSRFSGSGSGTDFTLTISNLQPEDFATYYC

SEQ ID NO: 2615 - protein, 32 aa, synthetic construct
GVPDRFSGSKSGTSASLAISGLQSEDEADYYC

SEQ ID NO: 2616 - protein, 32 aa, synthetic construct
GIPDRFSGSGSGTDFTLTISRLEPEDFAVYYC

SEQ ID NO: 2617 - protein, 32 aa, synthetic construct
GVPSRFSGSGSGTDFTLTISSLQPEDFAIYFC

SEQ ID NO: 2618 - protein, 32 aa, synthetic construct
GVSDRFSGSKSGNTASLTISGLQAEDEADYYC

SEQ ID NO: 2619 - protein, 32 aa, synthetic construct
GVPDRFSGSGSGTDFTLTISSLQAEDVAVYYC

SEQ ID NO: 2620 - protein, 32 aa, synthetic construct
GVPSRFSGSGSGTHFTLTINSLQTEDIATYYC

SEQ ID NO: 2621 - protein, 32 aa, synthetic construct
GVPPRFSATGSGTDFTLSISGLQPEDFATYFC

SEQ ID NO: 2622 - protein, 32 aa, synthetic construct
GVPDRFSGSKSDTSASLAITGLQAEDEADYYC

SEQ ID NO: 2623 - protein, 32 aa, synthetic construct
GVPDRFSGSKSGDTASLTVSGLQAEDEADYYC

SEQ ID NO: 2624 - protein, 32 aa, synthetic construct
GIPDRFSGGGSGTDFTLTISRLEPEDFAVYYC

SEQ ID NO: 2625 - protein, 32 aa, synthetic construct
GVPDRFSGSKSDTSASLAITGLQAEDEADYFC

SEQ ID NO: 2626 - protein, 32 aa, synthetic construct
GVPSRFRGSGSGTDFTLTISSLQPEDFATYYC

SEQ ID NO: 2627 - protein, 32 aa, synthetic construct
GVSNRFSGSKSGSTASLTISGLQSEDEADYYC

SEQ ID NO: 2628 - protein, 32 aa, synthetic construct
GIPERFSGSNSGDTATLTISRVEAGDEADYYC

SEQ ID NO: 2629 - protein, 32 aa, synthetic construct
GVPSRFSGSGSGTDFTLTITSLKPEDFATYYC

SEQ ID NO: 2630 - protein, 32 aa, synthetic construct
GVPSRFGGSGSETDFTLTISSLEPEDFATYYC

SEQ ID NO: 2631 - protein, 32 aa, synthetic construct
GVPSRFSGSGSGRHFTFTISSLQPEDIGTYYC

SEQ ID NO: 2632 - protein, 32 aa, synthetic construct
GVPDRFSGSGSGTHFTLTISSLQAEDVAVYYC

SEQ ID NO: 2633 - protein, 32 aa, synthetic construct
GVSYRFSGFKSGNTASLTISGLQAEDEADYYC

SEQ ID NO: 2634 - protein, 32 aa, synthetic construct
GVPSRFRGSGSGTDFTLTISSLQPEDFASYYC

SEQ ID NO: 2635 - protein, 32 aa, synthetic construct
GIPERFFGSNSGNTATLTISRVEAGDEADYFC

SEQ ID NO: 2636 - protein, 32 aa, synthetic construct
GIPERFSGSKSGNTATLTISRVEAGDEADYYC

SEQ ID NO: 2637 - protein, 32 aa, synthetic construct
GISTRFSGSKSGNTASLTISGLQAEDEADYYC

SEQ ID NO: 2638 - protein, 32 aa, synthetic construct
GVPDRFSGSGSGTDFTLSISRVEPEDVGVYYC

SEQ ID NO: 2639 - protein, 32 aa, synthetic construct
GVPSRFSGSGSGTGFTFTISSLQPEDIATYYC

SEQ ID NO: 2640 - protein, 32 aa, synthetic construct
GVPDRFSGSKSGSSASLAITGLQAEDEAVYYC

SEQ ID NO: 2641 - protein, 32 aa, synthetic construct
GVPDRFSGSKSGTSASLAITGFQAEDEDDYYC

SEQ ID NO: 2642 - protein, 32 aa, synthetic construct
GVPSRFSGGGSGTEFTLTISSLQPEDFATYYC

SEQ ID NO: 2643 - protein, 32 aa, synthetic construct
GIPERFSGSNSGNTATLTISRVEAGDEADYFC

SEQ ID NO: 2644 - protein, 32 aa, synthetic construct
GIPDRFSGSGSGTDFTLTITRLEPEDFAVYYC

SEQ ID NO: 2645 - protein, 32 aa, synthetic construct
GIPDRFSGSGSGTDFTLTISRLEPEDYAVYYC

SEQ ID NO: 2646 - protein, 32 aa, synthetic construct
GVPDRFSGSKSGNTASLTMSGLQAEDEADYYC

SEQ ID NO: 2647 - protein, 32 aa, synthetic construct
GIPARFTGSGSGTDFTLTISSLEPEDFAVYYC

SEQ ID NO: 2648 - protein, 32 aa, synthetic construct
GVPSKFSGSGSGTHFTLTISSLQPEDFATYYC

SEQ ID NO: 2649 - protein, 32 aa, synthetic construct
GIPDRFSGSGYGTDFTLTITRLEPEDFAVYFC

SEQ ID NO: 2650 - protein, 32 aa, synthetic construct
GVPSRVSGSGSGTEFTLTISSLQPDDFATYYC

SEQ ID NO: 2651 - protein, 32 aa, synthetic construct
GVPDRFSGSKSGNTASLTISGLQAEDEADYYC

SEQ ID NO: 2652 - protein, 32 aa, synthetic construct
GVPSRFSGSGSGTDFSFTINSLQPEDIATYYC

SEQ ID NO: 2653 - protein, 32 aa, synthetic construct
GIPARFGGSGSGTEFTLTISGLQSEDFAVYYC

SEQ ID NO: 2654 - protein, 32 aa, synthetic construct
GLPDRFSGSGYGTEFTLTIRRLQSEDFAVYYC

SEQ ID NO: 2655 - protein, 32 aa, synthetic construct
GVPDRFSGSKSGTSASLAVTGLQAEDEADYYC

SEQ ID NO: 2656 - protein, 32 aa, synthetic construct
GVSDRFSGSRSGTSASLAISGLQSEDEADYYC

SEQ ID NO: 2657 - protein, 32 aa, synthetic construct
GVPSRFSGSGSGTDFTLTISSLQPEDFATYHC

SEQ ID NO: 2658 - protein, 32 aa, synthetic construct
GIPARFSGSNSGNTATLTISRVEVGDEADYHC

SEQ ID NO: 2659 - protein, 32 aa, synthetic construct
GVPNRFSGSKSGNTASLTISGLQAEDEADYSC

SEQ ID NO: 2660 - protein, 32 aa, synthetic construct
GIPERFSGSNSGNTATLTISRVEVGDEADYYC

SEQ ID NO: 2661 - protein, 32 aa, synthetic construct
GVPDRFSGSKSGTSASLAITGVQGEDEGDYYC

SEQ ID NO: 2662 - protein, 32 aa, synthetic construct
GVPSRFSGSGSGTEFTFTINSLQPEDIATYYC

SEQ ID NO: 2663 - protein, 32 aa, synthetic construct
RVHDRLFGSKCDTSASMAITGIQGEDEAYYYC

SEQ ID NO: 2664 - protein, 32 aa, synthetic construct
GVPDRFSGSKSGTSASLAISALQSEDESHYYC

SEQ ID NO: 2665 - protein, 32 aa, synthetic construct
GTPERFSGSNSGNTATLTISRVEAGDEADYYC

SEQ ID NO: 2666 - protein, 32 aa, synthetic construct
GVPDRFSGSRSGTSASLAITGLQAEDEADYYC

SEQ ID NO: 2667 - protein, 32 aa, synthetic construct
GIPERLSGSTSGNTATLTISRVEAGDEADYYC

SEQ ID NO: 2668 - protein, 32 aa, synthetic construct
GIPDRFSGSKSGTSASLVISGLQSEDEAGYYC

SEQ ID NO: 2669 - protein, 32 aa, synthetic construct
GVPDRFSGSKSGTSASLAISGLRSEDEADYYC

SEQ ID NO: 2670 - protein, 32 aa, synthetic construct
GIPERFSGSNSVNTATLTISRVEAGDEADYYC

SEQ ID NO: 2671 - protein, 32 aa, synthetic construct
GIPERFSGSNSGNTATLTISGTQAMDEADYYC

SEQ ID NO: 2672 - protein, 34 aa, synthetic construct
GVPDRFSGSIDRSSNSASLTISALKTEDEADYYC

SEQ ID NO: 2673 - protein, 32 aa, synthetic construct
GIPERFSGSNSGNTATLTISRVEVGDEADYFC

SEQ ID NO: 2674 - protein, 32 aa, synthetic construct
GIPERFSGSSSGNTATLTLSRVEAGDEADYYC

SEQ ID NO: 2675 - protein, 32 aa, synthetic construct
GVPSRFSGSGSGTEFTLTISSLQPDDFASYYC

SEQ ID NO: 2676 - protein, 32 aa, synthetic construct
GVPSRFSGSGSETDFTLTISSLQPEDFATYYC

SEQ ID NO: 2677 - protein, 32 aa, synthetic construct
GIPARFSGSGSGTEFTLTISSLQSEDFAVYHC

SEQ ID NO: 2678 - protein, 32 aa, synthetic construct
GVPSRFSGSGFGTDFTLTISSLQPEDFATYYC

SEQ ID NO: 2679 - protein, 32 aa, synthetic construct
GIPGRISGSNSGNTATLTISRVVAGDEADYYC

SEQ ID NO: 2680 - protein, 32 aa, synthetic construct
GVPDRFSGSGSGTDFTLTITRLQAEDVAVYYC

SEQ ID NO: 2681 - protein, 32 aa, synthetic construct
GIPDRFIGSGSGTDFTLTISRLEPEDFAVYYC

SEQ ID NO: 2682 - protein, 32 aa, synthetic construct
GDPPRFSATGSGTDFTLTISSLQPEDFAIYFC

SEQ ID NO: 2683 - protein, 32 aa, synthetic construct
GVPLRFSVSGSGTAFNLTISSLQPGDFATYYC

SEQ ID NO: 2684 - protein, 32 aa, synthetic construct
WTPARFSGSLLGGKAALTLSGVQPEDEADYYC

SEQ ID NO: 2685 - protein, 32 aa, synthetic construct
GVPSRFSGSGFGTDFTLTISSLQPDDFATYYC

SEQ ID NO: 2686 - protein, 32 aa, synthetic construct
GVPSRFSGSGSETEFTLTIRSLQPEDFATYYC

SEQ ID NO: 2687 - protein, 32 aa, synthetic construct
GIPERISGSNSGNTATLTISRVEAGDEADYYC

SEQ ID NO: 2688 - protein, 32 aa, synthetic construct
GVPDRFSGSKSGSSASLAITGLQAEDEADYYC

SEQ ID NO: 2689 - protein, 32 aa, synthetic construct
GIPERFSGSNSGTTATLTISRVEAGDEADYFC

SEQ ID NO: 2690 - protein, 32 aa, synthetic construct
GIPARFSGSGSGTEFTLTISSLQSEDFVVYYC

SEQ ID NO: 2691 - protein, 32 aa, synthetic construct
GVPSRFSGSGSGTDFTLTISSLQVEDFATYYC

SEQ ID NO: 2692 - protein, 32 aa, synthetic construct
GVPSRFSGGGSGTDFTLTISSLQPEDFATYYC

SEQ ID NO: 2693 - protein, 32 aa, synthetic construct
GVPDRFSGSGSGTNFTLKINRVKTEDVGVYYC

SEQ ID NO: 2694 - protein, 34 aa, synthetic construct
GVPDRFSGSIDSSSNSASLTISGLQTDDEADYYC

SEQ ID NO: 2695 - protein, 32 aa, synthetic construct
GVPDRFSGSKSVTSASLAITGLQAEDEADYYC

SEQ ID NO: 2696 - protein, 32 aa, synthetic construct
GVPSRFSGSGYGTDFTLTIDSVQPEDFATYYC

SEQ ID NO: 2697 - protein, 32 aa, synthetic construct
GVPDRFSGSKSGTSASLAITGLQPDDEAAYYC

SEQ ID NO: 2698 - protein, 34 aa, synthetic construct
GVPERFSASVDSSSNSASLTISGLKTEDEADYYC

SEQ ID NO: 2699 - protein, 32 aa, synthetic construct
GVPDRFSGSKSGTSASLAISGLQSEDESDYYC

SEQ ID NO: 2700 - protein, 9 aa, synthetic construct
QQYDNLPLT

SEQ ID NO: 2701 - protein, 10 aa, synthetic construct
QQYNIWPLYT

SEQ ID NO: 2702 - protein, 10 aa, synthetic construct
QQSYNTPPWT

SEQ ID NO: 2703 - protein, 10 aa, synthetic construct
QQYYSSLGRT

SEQ ID NO: 2704 - protein, 9 aa, synthetic construct
QQYDSYPWT

SEQ ID NO: 2705 - protein, 9 aa, synthetic construct
MQGLQTPPT

SEQ ID NO: 2706 - protein, 8 aa, synthetic construct
QQFNNRIT

SEQ ID NO: 2707 - protein, 11 aa, synthetic construct
QVWDTSSDRIL

SEQ ID NO: 2708 - protein, 10 aa, synthetic construct
QQSYTMPPVT

SEQ ID NO: 2709 - protein, 9 aa, synthetic construct
QQSFVTPYT

SEQ ID NO: 2710 - protein, 9 aa, synthetic construct
QQANSFPLT

SEQ ID NO: 2711 - protein, 9 aa, synthetic construct
QQYDNLPIT

SEQ ID NO: 2712 - protein, 9 aa, synthetic construct
SSYAGPFWV

SEQ ID NO: 2713 - protein, 8 aa, synthetic construct
QEYYSTRT

SEQ ID NO: 2714 - protein, 8 aa, synthetic construct
QQFNNLIT

SEQ ID NO: 2715 - protein, 9 aa, synthetic construct
QQSYSTPIT

SEQ ID NO: 2716 - protein, 9 aa, synthetic construct
QQYDNVPLI

SEQ ID NO: 2717 - protein, 10 aa, synthetic construct
QQSYTAPGYT

SEQ ID NO: 2718 - protein, 9 aa, synthetic construct
QQYFDSPHT

SEQ ID NO: 2719 - protein, 11 aa, synthetic construct
QVWDSYSNNDV

SEQ ID NO: 2720 - protein, 8 aa, synthetic construct
QQYYSTRS

SEQ ID NO: 2721 - protein, 11 aa, synthetic construct
QSADSGSYHVI

SEQ ID NO: 2722 - protein, 8 aa, synthetic construct
QQFNKLVT

SEQ ID NO: 2723 - protein, 8 aa, synthetic construct
QVWDNSWV

SEQ ID NO: 2724 - protein, 8 aa, synthetic construct
QQFNSLVT

SEQ ID NO: 2725 - protein, 10 aa, synthetic construct
QQTYSTPGVT

SEQ ID NO: 2726 - protein, 9 aa, synthetic construct
QQSYSNPWT

SEQ ID NO: 2727 - protein, 10 aa, synthetic construct
QQYYSALRRT

SEQ ID NO: 2728 - protein, 10 aa, synthetic construct
QQYYNTPPWT

SEQ ID NO: 2729 - protein, 9 aa, synthetic construct
QQSYSTPRT

SEQ ID NO: 2730 - protein, 10 aa, synthetic construct
CSYAGSRGWL

SEQ ID NO: 2731 - protein, 9 aa, synthetic construct
QQSYSSPLT

SEQ ID NO: 2732 - protein, 9 aa, synthetic construct
QQYYNTPVT

SEQ ID NO: 2733 - protein, 11 aa, synthetic construct
QVWDSGSDHYV

SEQ ID NO: 2734 - protein, 9 aa, synthetic construct
QQADSFPLT

SEQ ID NO: 2735 - protein, 9 aa, synthetic construct
QQYESLPPT

SEQ ID NO: 2736 - protein, 11 aa, synthetic construct
GTWHSNSKTQV

SEQ ID NO: 2737 - protein, 9 aa, synthetic construct
QQYGSLPIT

SEQ ID NO: 2738 - protein, 10 aa, synthetic construct
QQYYSSVRFT

SEQ ID NO: 2739 - protein, 10 aa, synthetic construct
QQYYSTPPRT

SEQ ID NO: 2740 - protein, 9 aa, synthetic construct
QQSYNSPRT

SEQ ID NO: 2741 - protein, 10 aa, synthetic construct
QQSYSTPPWT

SEQ ID NO: 2742 - protein, 12 aa, synthetic construct
QVWDSNIDHPWV

SEQ ID NO: 2743 - protein, 10 aa, synthetic construct
QQSYSMPPIT

SEQ ID NO: 2744 - protein, 8 aa, synthetic construct
QQYYSFRT

SEQ ID NO: 2745 - protein, 9 aa, synthetic construct
QSADSRGTV

SEQ ID NO: 2746 - protein, 8 aa, synthetic construct
QQYYDIRT

SEQ ID NO: 2747 - protein, 12 aa, synthetic construct
QVWDSNIGHPWV

SEQ ID NO: 2748 - protein, 9 aa, synthetic construct
QQSHTIPYT

SEQ ID NO: 2749 - protein, 10 aa, synthetic construct
QQSYTTHMYT

SEQ ID NO: 2750 - protein, 9 aa, synthetic construct
QQYYITPLT

SEQ ID NO: 2751 - protein, 9 aa, synthetic construct
QQSYSTPWT

SEQ ID NO: 2752 - protein, 9 aa, synthetic construct
QQSYTTPRT

SEQ ID NO: 2753 - protein, 9 aa, synthetic construct
QSADSSGVV

SEQ ID NO: 2754 - protein, 10 aa, synthetic construct
QQYNNWPTWT

SEQ ID NO: 2755 - protein, 9 aa, synthetic construct
QQATSFPLT

SEQ ID NO: 2756 - protein, 10 aa, synthetic construct
QQYYSPPPLT

SEQ ID NO: 2757 - protein, 10 aa, synthetic construct
QQSYTIPTLT

SEQ ID NO: 2758 - protein, 8 aa, synthetic construct
QQYYTTRT

SEQ ID NO: 2759 - protein, 9 aa, synthetic construct
SSYTTSSTV

SEQ ID NO: 2760 - protein, 11 aa, synthetic construct
QVWDGISVHYV

SEQ ID NO: 2761 - protein, 11 aa, synthetic construct
QQYIDWPPGYT

SEQ ID NO: 2762 - protein, 8 aa, synthetic construct
QQSYDAIT

SEQ ID NO: 2763 - protein, 9 aa, synthetic construct
QQADSFPPA

SEQ ID NO: 2764 - protein, 10 aa, synthetic construct
QSYDTRLRGV

SEQ ID NO: 2765 - protein, 9 aa, synthetic construct
MQALQTPIT

SEQ ID NO: 2766 - protein, 8 aa, synthetic construct
QQYDSLLT

SEQ ID NO: 2767 - protein, 9 aa, synthetic construct
QQSYATPLT

SEQ ID NO: 2768 - protein, 10 aa, synthetic construct
QQYYSALGRT

SEQ ID NO: 2769 - protein, 11 aa, synthetic construct
VTFDDRLDGWV

SEQ ID NO: 2770 - protein, 9 aa, synthetic construct
QQFNHYPIT

SEQ ID NO: 2771 - protein, 9 aa, synthetic construct
QQYYRTPLT

SEQ ID NO: 2772 - protein, 8 aa, synthetic construct
QQYNSYWT

SEQ ID NO: 2773 - protein, 10 aa, synthetic construct
QQYYSPPPPT

SEQ ID NO: 2774 - protein, 8 aa, synthetic construct
QQRSTWPT

SEQ ID NO: 2775 - protein, 10 aa, synthetic construct
QQSYSAPPWT

SEQ ID NO: 2776 - protein, 11 aa, synthetic construct
QVWDTSGDHWV

SEQ ID NO: 2777 - protein, 8 aa, synthetic construct
QQSYNMFT

SEQ ID NO: 2778 - protein, 9 aa, synthetic construct
SAYTSTSTV

SEQ ID NO: 2779 - protein, 10 aa, synthetic construct
QQYYSPPPRT

SEQ ID NO: 2780 - protein, 9 aa, synthetic construct
QQYGSSPRT

SEQ ID NO: 2781 - protein, 10 aa, synthetic construct
QHFNSYLMYT

SEQ ID NO: 2782 - protein, 9 aa, synthetic construct
QSYDNPPPT

SEQ ID NO: 2783 - protein, 10 aa, synthetic construct [sequence omitted]

SEQ ID NO: 2784 - protein, 11 aa, synthetic construct
ATWDDSLSVGI

SEQ ID NO: 2785 - protein, 11 aa, synthetic construct
AAWDDRLNGYV

SEQ ID NO: 2786 - protein, 10 aa, synthetic construct
QQSYVSPPWT

SEQ ID NO: 2787 - protein, 9 aa, synthetic construct
QQSYSDPYT

SEQ ID NO: 2788 - protein, 9 aa, synthetic construct
QQLNTHPPP

SEQ ID NO: 2789 - protein, 10 aa, synthetic construct
QQSYTSPAYT

SEQ ID NO: 2790 - protein, 9 aa, synthetic construct
QHLNSDAIT

SEQ ID NO: 2791 - protein, 9 aa, synthetic construct
QHLDTDSGT

SEQ ID NO: 2792 - protein, 10 aa, synthetic construct
QHLDSYPRYT

SEQ ID NO: 2793 - protein, 8 aa, synthetic construct
QEYYDTRT

SEQ ID NO: 2794 - protein, 8 aa, synthetic construct
QQRSNWLT

SEQ ID NO: 2795 - protein, 9 aa, synthetic construct
SSYTTSGVV

SEQ ID NO: 2796 - protein, 11 aa, synthetic construct
QSYDSSLTGSV

SEQ ID NO: 2797 - protein, 9 aa, synthetic construct
MQGTHWPPT

SEQ ID NO: 2798 - protein, 8 aa, synthetic construct
QQYNSYYT

SEQ ID NO: 2799 - protein, 9 aa, synthetic construct
QYYDNPPPT

SEQ ID NO: 2800 - protein, 11 aa, synthetic construct
QSYDSSLSVWV

SEQ ID NO: 2801 - protein, 9 aa, synthetic construct
QIWDINTVI

SEQ ID NO: 2802 - protein, 11 aa, synthetic construct
QVWDSNTDHRV

SEQ ID NO: 2803 - protein, 10 aa, synthetic construct
QSADYSGTCV

SEQ ID NO: 2804 - protein, 8 aa, synthetic construct
QQSYSTPS

SEQ ID NO: 2805 - protein, 9 aa, synthetic construct
QQLNSDSPT

SEQ ID NO: 2806 - protein, 9 aa, synthetic construct
QQRLHPPFT

SEQ ID NO: 2807 - protein, 10 aa, synthetic construct
QQSYSTPPVT

SEQ ID NO: 2808 - protein, 10 aa, synthetic construct
VSADSSGVYV

SEQ ID NO: 2809 - protein, 12 aa, synthetic construct
QSYDSGLSGSVL

SEQ ID NO: 2810 - protein, 9 aa, synthetic construct
QQYDNVPPT

SEQ ID NO: 2811 - protein, 9 aa, synthetic construct
QQYDNLPQT

SEQ ID NO: 2812 - protein, 8 aa, synthetic construct
QQYKSFWT

SEQ ID NO: 2813 - protein, 11 aa, synthetic construct
AAWDDSLNGVV

SEQ ID NO: 2814 - protein, 10 aa, synthetic construct
QQSYSLPEYT

SEQ ID NO: 2815 - protein, 11 aa, synthetic construct
ATWDDSLTGPV

SEQ ID NO: 2816 - protein, 9 aa, synthetic construct
QQSYSSPPT

SEQ ID NO: 2817 - protein, 9 aa, synthetic construct
SSYTSSSAV

SEQ ID NO: 2818 - protein, 9 aa, synthetic construct
QQFDNVPYT

SEQ ID NO: 2819 - protein, 10 aa, synthetic construct
QLRSNWPPFT

SEQ ID NO: 2820 - protein, 9 aa, synthetic construct
QQSYSIPYT

SEQ ID NO: 2821 - protein, 9 aa, synthetic construct
QQYNNFPYT

SEQ ID NO: 2822 - protein, 11 aa, synthetic construct
QSYDSSLIGSI

SEQ ID NO: 2823 - protein, 10 aa, synthetic construct
SSYAGSNNWV

SEQ ID NO: 2824 - protein, 10 aa, synthetic construct
QHYGSSPPYT

SEQ ID NO: 2825 - protein, 11 aa, synthetic construct
QSYDSGLTSPV

SEQ ID NO: 2826 - protein, 11 aa, synthetic construct
QSYDSSLSASV

SEQ ID NO: 2827 - protein, 10 aa, synthetic construct
SSYTSSDSWV

SEQ ID NO: 2828 - protein, 11 aa, synthetic construct
QVWDSSSDHWV

SEQ ID NO: 2829 - protein, 10 aa, synthetic construct
LQTYSTHSWT

SEQ ID NO: 2830 - protein, 10 aa, synthetic construct
QQSYSTPHGS

SEQ ID NO: 2831 - protein, 9 aa, synthetic construct
HQYDNLPRT

SEQ ID NO: 2832 - protein, 9 aa, synthetic construct
QQYYSSPPT

SEQ ID NO: 2833 - protein, 9 aa, synthetic construct
QQSYTTPYT

SEQ ID NO: 2834 - protein, 11 aa, synthetic construct
QQRSNWPPGLT

SEQ ID NO: 2835 - protein, 10 aa, synthetic construct
SSYTSSDTYV

SEQ ID NO: 2836 - protein, 13 aa, synthetic construct
QVWDSTSDHPAYV

SEQ ID NO: 2837 - protein, 11 aa, synthetic construct
QVWDSSSDPVV

SEQ ID NO: 2838 - protein, 8 aa, synthetic construct
SSYTSNIV

SEQ ID NO: 2839 - protein, 11 aa, synthetic construct
VQALQTPFMYT

SEQ ID NO: 2840 - protein, 11 aa, synthetic construct
QSYDSSLSDSV

SEQ ID NO: 2841 - protein, 9 aa, synthetic construct
QQYDNLPVT

SEQ ID NO: 2842 - protein, 14 aa, synthetic construct
QSYDSSLTFSAFYV

SEQ ID NO: 2843 - protein, 11 aa, synthetic construct
QQSYTTPPLWT

SEQ ID NO: 2844 - protein, 11 aa, synthetic construct
QSYASSVSGVI

SEQ ID NO: 2845 - protein, 10 aa, synthetic construct
QQLNSNPPIT

SEQ ID NO: 2846 - protein, 12 aa, synthetic construct
QVWDSTTDLLYV

SEQ ID NO: 2847 - protein, 11 aa, synthetic construct
AAWDDRLNGVI

SEQ ID NO: 2848 - protein, 9 aa, synthetic construct
HQFASAPIT

SEQ ID NO: 2849 - protein, 9 aa, synthetic construct
QQYARSPWT

SEQ ID NO: 2850 - protein, 10 aa, synthetic construct
QSWDSSALWV

SEQ ID NO: 2851 - protein, 8 aa, synthetic construct
QQYGSSPV

SEQ ID NO: 2852 - protein, 9 aa, synthetic construct
QQSYTTPPT

SEQ ID NO: 2853 - protein, 11 aa, synthetic construct
QSYDSSLSGVV

SEQ ID NO: 2854 - protein, 10 aa, synthetic construct
CSYVGSYSYV

SEQ ID NO: 2855 - protein, 9 aa, synthetic construct
QQRIHPPFT

SEQ ID NO: 2856 - protein, 9 aa, synthetic construct
QQYDSYPLT

SEQ ID NO: 2857 - protein, 9 aa, synthetic construct
QQYGYSPAT

SEQ ID NO: 2858 - protein, 10 aa, synthetic construct
QQSYSSPMYT

SEQ ID NO: 2859 - protein, 9 aa, synthetic construct
QQSYSSPCS

SEQ ID NO: 2860 - protein, 10 aa, synthetic construct
HSYDSSNPVV

SEQ ID NO: 2861 - protein, 8 aa, synthetic construct
CSYAGTYI

SEQ ID NO: 2862 - protein, 11 aa, synthetic construct
QSYDSSLSGVL

SEQ ID NO: 2863 - protein, 10 aa, synthetic construct
LQYHNRPPWT

SEQ ID NO: 2864 - protein, 11 aa, synthetic construct
QSYDSSLIGSV

SEQ ID NO: 2865 - protein, 11 aa, synthetic construct
QQYDNWPPTWT

SEQ ID NO: 2866 - protein, 9 aa, synthetic construct
QQYDSWPRT

SEQ ID NO: 2867 - protein, 11 aa, synthetic construct
QSYDSRLSGVV

SEQ ID NO: 2868 - protein, 11 aa, synthetic construct
AAWDDSLNGLV

SEQ ID NO: 2869 - protein, 11 aa, synthetic construct
ASWDDRLNGPV

SEQ ID NO: 2870 - protein, 9 aa, synthetic construct
QQGYSTPYT

SEQ ID NO: 2871 - protein, 11 aa, synthetic construct
HVWDSSSDLHV

SEQ ID NO: 2872 - protein, 11 aa, synthetic construct
QSYDSSLIGSL

SEQ ID NO: 2873 - protein, 11 aa, synthetic construct
CSYSGTYIPLI

SEQ ID NO: 2874 - protein, 12 aa, synthetic construct
QVWDGSSDHFYV

SEQ ID NO: 2875 - protein, 10 aa, synthetic construct
SSHTVNNNFV

SEQ ID NO: 2876 - protein, 12 aa, synthetic construct
QVWDSSSDLHVV

SEQ ID NO: 2877 - protein, 11 aa, synthetic construct
QSYDSSASGSV

SEQ ID NO: 2878 - protein, 9 aa, synthetic construct
QQYDNLPII

SEQ ID NO: 2879 - protein, 12 aa, synthetic construct
QSYDSMLSDPYV

SEQ ID NO: 2880 - protein, 11 aa, synthetic construct
ATWDDTLAGPV

SEQ ID NO: 2881 - protein, 11 aa, synthetic construct
QVWDSNSDHRV

SEQ ID NO: 2882 - protein, 11 aa, synthetic construct
QVWDSSSDLVL

SEQ ID NO: 2883 - protein, 12 aa, synthetic construct
AAWDDSLNGRLL

SEQ ID NO: 2884 - protein, 9 aa, synthetic construct
ATRDDGRWV

SEQ ID NO: 2885 - protein, 9 aa, synthetic construct
QQSYTTRWT

SEQ ID NO: 2886 - protein, 10 aa, synthetic construct
QSYHSRNLWV

SEQ ID NO: 2887 - protein, 11 aa, synthetic construct
QVWDSSSDHYV

SEQ ID NO: 2888 - protein, 11 aa, synthetic construct
QAWDSSTAHWV

SEQ ID NO: 2889 - protein, 11 aa, synthetic construct
QSYASSPFYWV

SEQ ID NO: 2890 - protein, 11 aa, synthetic construct
QVWDSSSVHYV

SEQ ID NO: 2891 - protein, 10 aa, synthetic construct
QQSYRTPPLT

SEQ ID NO: 2892 - protein, 11 aa, synthetic construct
QVWDSSSDLVI

SEQ ID NO: 2893 - protein, 11 aa, synthetic construct
QSSDTSLSDWV

SEQ ID NO: 2894 - protein, 10 aa, synthetic construct
QQSYETPPWT

SEQ ID NO: 2895 - protein, 11 aa, synthetic construct
QQYNGYSPGLT

SEQ ID NO: 2896 - protein, 9 aa, synthetic construct
QQSYSNFRT

SEQ ID NO: 2897 - protein, 9 aa, synthetic construct
QQYNNWPRT

SEQ ID NO: 2898 - protein, 10 aa, synthetic construct
QQSYSAPPNT

SEQ ID NO: 2899 - protein, 11 aa, synthetic construct
QVWHSSSDSWV

SEQ ID NO: 2900 - protein, 11 aa, synthetic construct
QSYDSSLTAPL

SEQ ID NO: 2901 - protein, 11 aa, synthetic construct
QVWDTSSDHQV

SEQ ID NO: 2902 - protein, 10 aa, synthetic construct
QQYGSSPPFT

SEQ ID NO: 2903 - protein, 11 aa, synthetic construct
QSYDSGLTGSL

SEQ ID NO: 2904 - protein, 9 aa, synthetic construct
MQALQAPPT

SEQ ID NO: 2905 - protein, 9 aa, synthetic construct
QQSYSTPLT

SEQ ID NO: 2906 - protein, 9 aa, synthetic construct
LLYYGGVRV

SEQ ID NO: 2907 - protein, 11 aa, synthetic construct
QVWDSVTDHVL

SEQ ID NO: 2908 - protein, 11 aa, synthetic construct
QSYDSSLSGSV

SEQ ID NO: 2909 - protein, 9 aa, synthetic construct
QQYDNLPRT

SEQ ID NO: 2910 - protein, 9 aa, synthetic construct
QQYNTDRYT

SEQ ID NO: 2911 - protein, 11 aa, synthetic construct
QSYDSSLSGSL

SEQ ID NO: 2912 - protein, 11 aa, synthetic construct
QVWDSNNDHVV

SEQ ID NO: 2913 - protein, 8 aa, synthetic construct
QQYNDWLT

SEQ ID NO: 2914 - protein, 9 aa, synthetic construct
QQSYSTPVT

SEQ ID NO: 2915 - protein, 9 aa, synthetic construct
MQALQTPLT

SEQ ID NO: 2916 - protein, 11 aa, synthetic construct
QMWDSRSDHPV

SEQ ID NO: 2917 - protein, 9 aa, synthetic construct
QQGSTTPQT

SEQ ID NO: 2918 - protein, 9 aa, synthetic construct
QQANSFPIT

SEQ ID NO: 2919 - protein, 9 aa, synthetic construct
MQRIEFPYT

SEQ ID NO: 2920 - protein, 10 aa, synthetic construct
QAWDSRTAQV

SEQ ID NO: 2921 - protein, 9 aa, synthetic construct
QQSYSSPIT

SEQ ID NO: 2922 - protein, 9 aa, synthetic construct
QSYDSSLWV

SEQ ID NO: 2923 - protein, 9 aa, synthetic construct
QQYGSSPGT

SEQ ID NO: 2924 - protein, 10 aa, synthetic construct
QQSYNSPGFS

SEQ ID NO: 2925 - protein, 11 aa, synthetic construct
QSYDSTLIGPV

SEQ ID NO: 2926 - protein, 9 aa, synthetic construct
QSYESDTVI

SEQ ID NO: 2927 - protein, 11 aa, synthetic construct
QVWDTSGDHYV

SEQ ID NO: 2928 - protein, 9 aa, synthetic construct
AAWDDSRWV

SEQ ID NO: 2929 - protein, 9 aa, synthetic construct
QQYGSSPYT

SEQ ID NO: 2930 - protein, 9 aa, synthetic construct
QQYYTPPLT

SEQ ID NO: 2931 - protein, 9 aa, synthetic construct
QSYDTSNEV

SEQ ID NO: 2932 - protein, 9 aa, synthetic construct
ATWDDSGWV

SEQ ID NO: 2933 - protein, 11 aa, synthetic construct
AAWDDTLAGPV

SEQ ID NO: 2934 - protein, 8 aa, synthetic construct
QQYYSSPS

SEQ ID NO: 2935 - protein, 9 aa, synthetic construct
QQSYNAPRT

SEQ ID NO: 2936 - protein, 10 aa, synthetic construct
FGGGTKVEIK

SEQ ID NO: 2937 - protein, 10 aa, synthetic construct
FGQGTKVEIK

SEQ ID NO: 2938 - protein, 10 aa, synthetic construct
FGGGTKVDIK

SEQ ID NO: 2939 - protein, 10 aa, synthetic construct
FGGGTKLTVL

SEQ ID NO: 2940 - protein, 10 aa, synthetic construct
FGQGTRLEIK

SEQ ID NO: 2941 - protein, 10 aa, synthetic construct
FGRGTKVEIK

SEQ ID NO: 2942 - protein, 10 aa, synthetic construct
FGPGTKVEIK

SEQ ID NO: 2943 - protein, 10 aa, synthetic construct
FGTGTQLTVL

SEQ ID NO: 2944 - protein, 10 aa, synthetic construct
FGQGTKVDIK

SEQ ID NO: 2945 - protein, 10 aa, synthetic construct
FGTGTKVTVL

SEQ ID NO: 2946 - protein, 10 aa, synthetic construct
FGQGTILDLN

SEQ ID NO: 2947 - protein, 10 aa, synthetic construct
FGGGTKVTVL

SEQ ID NO: 2948 - protein, 10 aa, synthetic construct
FGGGTQLTVL

SEQ ID NO: 2949 - protein, 10 aa, synthetic construct
FGTGTKLTVL

SEQ ID NO: 2950 - protein, 10 aa, synthetic construct
FGPGTKVDIK

SEQ ID NO: 2951 - protein, 10 aa, synthetic construct
FGPGTKVTVL

SEQ ID NO: 2952 - protein, 10 aa, synthetic construct
FAQGTKVDIK

SEQ ID NO: 2953 - protein, 10 aa, synthetic construct
FGGGTQVTVL

SEQ ID NO: 2954 - protein, 10 aa, synthetic construct
FGLGTKVEIK

SEQ ID NO: 2955 - protein, 10 aa, synthetic construct
FGQGTKLEIK

SEQ ID NO: 2956 - protein, 10 aa, synthetic construct
FGYGTKLTVL

SEQ ID NO: 2957 - protein, 10 aa, synthetic construct
FGPGTQLTVL

SEQ ID NO: 2958 - protein, 10 aa, synthetic construct
FGAGTKLTVL

SEQ ID NO: 2959 - protein, 10 aa, synthetic construct
FGIGTKVTVL

SEQ ID NO: 2960 - protein, 10 aa, synthetic construct
FGEGTKVTVL

SEQ ID NO: 2961 - protein, 10 aa, synthetic construct
FGGRTKLTVL

SEQ ID NO: 2962 - DNA, 321 bp, synthetic construct
  source 1..321: mol_type = other DNA
gacatccagttgacccagtctccatcctccctgtctgcatctgtaggagacagagtcaccatcacttgccaggcgagtcaggacattaccaactatttatcttggtatcaacagaaaccagggaaagcccctaagctcctgatctacgatgcagtcaatttggaaacaggggtcccatcaaggttcagtggcagtggatctgggacagattttactttcaccatcagcagcctgcagcctgaagattttgcaacatattattgtcaacaatatgataatctcccgctcactttcggcggagggaccaaggtggaaatcaaa

SEQ ID NO: 2963 - DNA, 324 bp, synthetic construct
  source 1..324: mol_type = other DNA
gaaattgcaatgacgcagtctccagccaccctgtctgtgtctccaggggaaagagccaccctctcctgcagggccagccagagtgttaacagcaacttagcctggtaccagcagaaacctggccaggctcccaggctcctcatctatggtgcatccaccagggccactggtatcccagccaggttcagtggcagtgggtctgggacagagttcactctcaccatcagcagcctgcagtctgaagattttgcagtttatttctgtcagcagtataatatctggcctctatacacttttggccaggggaccaaggtggaaatcaaa

SEQ ID NO: 2964 - DNA, 324 bp, synthetic construct
  source 1..324: mol_type = other DNA
gacatccagatgacccagtctccatcctccctgtctgcatctgtaggagacagagtcaccatcacttgccgggcaagtcagagcataagcagctatttaaattggtatcagcagaaaccagggaaagcccctaagctcctgatctattctgcatccagtttgcaaagtggggtcccatcaaggttcagtggcagtggatctgggacagatttcagtctcaccatcagcagtctgcaacctgaagattttgcaacttactactgtcaacagagttacaatacccctccgtggacgttcggccaagggaccaaggtggagatcaaa

SEQ ID NO: 2965 - DNA, 324 bp, synthetic construct
  source 1..324: mol_type = other DNA
gacatccagttgacccagtctccatcctccctgtctgcatctgtaggagacagagtcaccatcacttgccgggcgagtcaggccattagcaattctttagcctggtatcagcagaaaccagggaaagcccctaagctcctgctctatgctgcatccatattggagagtggggtcccatccaggttcagtggcagtggatctgggacggattacactctcactatcagcagcctgcagcctgaagattttgcaacttattactgtcaacagtattatagtagtctcgggcgcactttcggcggagggaccaaagtggatatcaaa

SEQ ID NO: 2966 - DNA, 321 bp, synthetic construct
  source 1..321: mol_type = other DNA
gacatccagatgacccagtctccttccaccctgtctgcatctgtaggagacagagtcaccatcacttgccgggccagtcagagtattagtaggtggttggcctggtatcagcagaaaccagggaaagcccctaagctcctgatctataaggcgtctagtttagaaagtggggtcccatcaaggttcagcggcagtggatctgggacagaattcactctcaccatcagcagcctgcagcctgatgattttgcaacttattactgccaacagtatgatagttatccgtggaccttcggccaagggaccaaggtggaaatcaaa

SEQ ID NO: 2967 - DNA, 336 bp, synthetic construct
  source 1..336: mol_type = other DNA
gacatccagatgacccagtctccaaactccctgcccgtcacccctggagagccggcctccatctcctgcaggtctagtcagagcctcctgcacactaatggatacaactatttggattggtacctgcagaagccagggcagtctccacagctcctgatctatttgggttctaatcgggcctccggggtccctgacaggttcagtggcagtggatcaggcacagattttacactgaaaatcagcagagtggaggctgaggatgttggggtttattactgcatgcaaggtctacaaactcctcccactttcggcggagggaccaaggtggagatcaaa

SEQ ID NO: 2968 - DNA, 318 bp, synthetic construct
  source 1..318: mol_type = other DNA
gaaatccaaatgacccagtctccttcctccctgtctgcttctgtaggagacagagtcaccatcacttgccgggcaagtcagggcattggcagtgctttagcctggtatcggcagaggccagggaaacctcctaagctcctaatctctgatgcctccagtttggaaggtggggtcccatcaaggttcagcggcagtggatctgggacagatttcacgctcaccatcagcagcctgcagcctgaagattttgcaacttattactgtcagcagtttaacaaccggataactttcggcggagggaccaaggtggaaatcaaa

SEQ ID NO: 2969 - DNA, 324 bp, synthetic construct
  source 1..324: mol_type = other DNA
gacatcacgatgacccagtctccatcctccctgtctgcatctgtaggagacagagtcaccatcacttgccgggcaagtcagagcattagaagatttttaaattggtatcagcagaaaccagggaaagcccctaagctcctgatctatgatgcatccagtttgcaaagtggggtcccatcaaggttcagtggcagtggatctgggacagatttcactctcaccatcagcagtctgcaacctgaagattttgcaacttactactgtcagcagagttacaatacccccccgtggacgttcggccaagggaccaaggtggaaatcaaa

SEQ ID NO: 2970 - DNA, 324 bp, synthetic construct
  source 1..324: mol_type = other DNA
tcgtatgtgctgactcagccaccctcggtgtcagtggccccaggacagacggccaggattacctgtgagggaaactacattggaggtcaaagtgtaaactggtaccagcagaggccaggccaggcccctgtggtggtcctctatgatgatttcggccggccctcagggatccctgagcgattctctggctccaactctgggaacacggccaccctgaccatcaactgggtcgaagccggggatgaggccgactattattgtcaggtgtgggatactagtagtgaccgaatactgttcggcggagggaccaagctgaccgtccta

SEQ ID NO: 2971 - DNA, 324 bp, synthetic construct
  source 1..324: mol_type = other DNA
gacatgacaatgacgcagtctccatcctccctgtctgcatctgtaggagacagagtcaccatcacttgccgggcaagtcagagcattagcaagtttttaaattggtatcagcagaaaccagggaaagcccctaatctcctgatctatgctgcatccagtttgcaaagtggggtcccatcaaggttcagtggcagtggatctgggacagatttcactctcaccatcaacagtctgcaacctgaagattttgcaacttactactgtcaacagagttacactatgcctccggtcaccttcggccaagggacacgactggagattaaa

SEQ ID NO: 2972 - DNA, 321 bp, synthetic construct
  source 1..321: mol_type = other DNA
gacatccagatgacccagtctccatcctccctgtctgcgtctgtcggagacagagtcaccatcacttgccgggcaagtcagagcattagcgactttttaagttggttccagcagagaccagggaaagcccctaagctcctgatctatgctgcatcaactttacaaagtggggtcccatcgaggttcagtggcagtggatctgggacagatttcactctcaccatcagcagtctgcaacctgaagattttgcaacttactactgtcaacagagtttcgtaaccccgtacacttttggccgggggaccaaggtggaaatcaaa

SEQ ID NO: 2973 - DNA, 321 bp, synthetic construct
  source 1..321: mol_type = other DNA
gacatccagatgacccagtctccatcttccgtgtctgcatctgtgggagacagagtcacaatcacttgtcgggcgagtcagggtcttagtagatggttagcctggtatcagcagaaaccagggaaagcccctaagctcctgatctatgctgcatctagtttgcaaagtggggtcccgtcaaggttcagcggcagtggatctgggacagatttcactctcaccatcagcagcctgcagcctgaagactttgcaacttactattgtcaacaggctaacagtttccccctcactttcggcggtgggaccaaggtggaaatcaaa

SEQ ID NO: 2974 - DNA, 321 bp, synthetic construct
  source 1..321: mol_type = other DNA
gacatcaaattgacccagtctccatcctccctgtctgcctctgtaggagacagagtcaccatcacttgccaggcgagtcacgacattaacaactatttaaattggtatcagcaaaaaccagggaaagcccctaaactcctgatctacgaagcatccaacttggagacaggggtcccatcaagattcagtggaagtggatctgggacagactttactttcaccatcagcagcctgcagcctgaagatattgcaacatattactgtcaacaatatgataatctccccatcaccttcggccaagggacacgactggagattaaa

SEQ ID NO: 2975 - DNA, 327 bp, synthetic construct
  source 1..327: mol_type = other DNA
gagcttgtgctgactcagtccccctccgcgtccgggtctcctggacagtcagtcaccatctcctgcactggaaccagtagtgacgttggtggttataactatgtctcctggtaccaacaacaccccggcaaagcccccaaactcatgatttatgaggtcaataagcggccctcaggggtccctgatcgtttctctggctccaagtctggcaacacggcctccctgaccgtctctgggctccaggctgaggatgaggctgattattattgtagctcatatgcaggccccttttgggtgttcggcggaggcaccaagctcaccgtccta

SEQ ID NO: 2976 - DNA, 318 bp, synthetic construct
  source 1..318: mol_type = other DNA
gacatccagatgacccagtctccatcctccctgtctgcatctgtgggagacagagtcaccatcacttgccgggcgagtcagggcattagtaattctttagcctggtatcagcagaaaccagggaaagcccctaagctcctgctctattctgcatccacattggaaagtggggtcccatccaggttcagtggcagtggatctgggacggatttcactctcaccatcaccagcctgcagcctgaagattttgcaacttattactgtcaagagtattatagtacccggactttcggccctgggaccaaggtggagatcaaa

SEQ ID NO: 2977 - DNA, 318 bp, synthetic construct
  source 1..318: mol_type = other DNA
gacatccagatgacccagtctccatcctccctgtctgcatctgtaggagacagagtcaccatcacttgccgggcaagtcagggcattaacagtgctttagcctggtatcagcagaaaccagggaaagctcctaaactcctgctctatgatgcctccagtttggaaaatggggtcccatcaaggttcagcggcggtggatctgggacagatttcactctcaccatcaccagcctgcagcctgaagattttgcaacttattattgtcaacaatttaataatctgatcactttcggcggagggaccaaagtggatatcaaa

SEQ ID NO: 2978 - DNA, 321 bp, synthetic construct
  source 1..321: mol_type = other DNA
gaaatccagatgacccagtctccatcctccctgtctgcatctgtaggagacagagtcaccatcacttgccgggcaggtcagagcattgccacctatttaaattggtatcagcagaaaccagggaaagcccctaagctcctgatctatgctgcatccagtttgcaaagtggggtcccatcaaggttcagtggcagtggatctggggcagatttcactctcaccatcagcagtctgcaacctgaagattttgcaacttactactgtcaacagagttacagtacccctatcaccttcggccaagggacacgactggagattaaa

SEQ ID NO: 2979 - DNA, 321 bp, synthetic construct
  source 1..321: mol_type = other DNA
gacatccaattgacccagtctccatcctccctgtctgcatctgtaggagacagagtcaccatcacttgccaggcgagtcaggacattaacaactatttaatttggtatcagcaaaaaccaggcaaagcccctagggtcctgatctacgatgcatccaatttggaagcaggggtcccatcaaggttcagtggaagtggatctgggacagattttactttcaccatcagcagcctgcagcctgaagatattgctacatatttctgtcaacaatatgataatgtccccctcattttcggcggagggaccaaggtggaaatcaaa

SEQ ID NO: 2980 - DNA, 324 bp, synthetic construct
  source 1..324: mol_type = other DNA
gaaatcgtgttgacccagtctccatcctccctgtctgcatctgttggagacagagtcaccatcacttgccgggcaagtcagagcattagcacctatttaaattggtatcagcagaaaccagggaaagcccctaagctcctgatctatgctgcatccagtttgcaaagtggggtcccatcaaggttcagtggcagtgggtctgggacagatttcactctcaccgtcagcagtctgcaacctgaagattttgcaacttacttctgtcaacagagttacactgcccctgggtacacttttggccaggggaccaaggtggagatcaaa

SEQ ID NO: 2981 - DNA, 321 bp, synthetic construct
  source 1..321: mol_type = other DNA
gaaattgtgatgacccagtctccatcctccctgtctgcatctgtaggagacacagtcaccatcacttgccgggcgagtcagggcattaccaattccttagcctggtatcagcagaaaccagggaaagcccctaacctcctgctctatgccgcatccacattggaaagtggggtcccacccaggttccgtggcagcggatctgggacggatttcactctcaccatcagcagcctgcagcctgaagattttgcaactttttactgtcaacagtattttgatagccctcacacttttggccaggggaccaaggtggaaatcaaa

SEQ ID NO: 2982 - DNA, 324 bp, synthetic construct
  source 1..324: mol_type = other DNA
gaaattgtgttgacgcagtctccctcggtgtcagtggccccaggacagacggccaggattacctgtgggggaaacaacattggaagtagaagtgtgcactggctccagcagaagccaggccaggcccctgtgctggtcgtctatgatgatagcgaccggccctcagggatccctgagcgattctcaggctccaactctgggaacacggccaccctgaccatcagcagggtcgaagccggggatgaggccgactattactgtcaggtgtgggatagttatagtaataacgatgtcttcggaactgggacccagctgaccgtcctc

SEQ ID NO: 2983 - DNA, 318 bp, synthetic construct
  source 1..318: mol_type = other DNA
gaaattgtgatgacccagtctccatcctccctgtctgcatctgtaggagacagagtcaccatcacttgccgggcgagtcagggcattagcaattctttggcctggtatcagcagaaaccagggaaagcccctaagctcctgctctatgctgcatccacgttggaaagtggggtcccatccaggttcagtggcagtggatctgggacggattacactctcaccatcagcagcctgcagcctgaagattttgcaacttattactgtcaacagtattatagtaccaggtcgttcggccaagggaccaaggtggatatcaaa

SEQ ID NO: 2984 - DNA, 324 bp, synthetic construct
  source 1..324: mol_type = other DNA
acctatgagctgactcagccaccctcggtgtcagtgtccccaggacagacggccaggatcacctgctctggagattcattgccaaggcaatatgcttattggtaccaacagaagccaggccaggcccctgtgatggtaatacataaagacagtgagaggccctcagggatccctgagcgattctctggctccacctcagggacaacagtcacgttgaccatcagtggagtccaggcagaagacgaggctgactattactgtcaatcagcagacagtggtagttatcatgtgatattcggcggagggaccaagctgaccgtccta

SEQ ID NO: 2985 - DNA, 318 bp, synthetic construct
  source 1..318: mol_type = other DNA
gacatccagatgacccagtctccatcctccctgtctgcatctgtaggagacagagtcaccatcacttgccgggcaggtcagggcattggcacagctttagcctggtatcagcagaaaccagggaaagctcctaagctcctgctctatgatgcctccagtttggaaaatggggtcccatccaggttcagcggcagtggatctgggacagatttcactctcaccatcagcagcctgcagcctgaagattttgcaacttactactgtcaacagtttaataaattggtcacttttggcggagggaccaaggtggatatcaaa

SEQ ID NO: 2986 - DNA, 315 bp, synthetic construct
  source 1..315: mol_type = other DNA
tcgcatgtgctgactcagccaccctccgtgtcagtggccccaggaaagacggccaagattacctgtggggaagacgacattggaagtaaaagtgtgcactggtaccagcagaagccaggccaggcccctatgctgatcatctattatgatagggaccggccctcagggatccctgagcgattctctggctccaactctgggaacacggccaccctgaccatcagcagcgtcgaagccggggatgaggccgactattactgtcaggtgtgggataatagttgggtgttcggcggagggaccaagctcaccgtccta

SEQ ID NO: 2987 - DNA, 318 bp, synthetic construct
  source 1..318: mol_type = other DNA
gacatcgtgatgacccagtctccgtcctccctgtctgcttctgtgggggacagcatcaccatcacttgccgggcaagtcaggacattggcagtgctttagcctggtatcagcagaaaccggggaatgctcctaggttcctgatctctgatgcctccagtttgggaagtggggtcccatcacggttcagcggcagtggatctgggacagatttcactctcaccatcagaggcctgcagcctgcagattttgcaacttattactgtcaacagtttaatagcctggtcactttcggcggagggaccaaggtggaaatcaaa

SEQ ID NO: 2988 - DNA, 324 bp, synthetic construct
  source 1..324: mol_type = other DNA
gacatccagatgacccagtctccatcctccctgtctgcatctgtaggcgacagagtcaccatctcttgccgggcaagtcagaccattaacacctatttaaattggtatcagcagaaaccagggaaagcccctaagctcctgatctatggtgcatcgagtttgcaaagtggggtcccgtcaagattcagtggcagtggatcggggacagatttcactctcagcatcagcggtgtccaacctgaagactttgcaacttactattgtcaacagacttacagtacccctggggtcactttcggccctgggaccaaggtggaaatcaaa

SEQ ID NO: 2989 - DNA, 321 bp, synthetic construct
  source 1..321: mol_type = other DNA
gacatccagatgacccagtctccatcgtccctgtctgcatctgtaggagacagagtcaccatcgcttgccgggcaagtcagagcatgacaaactctttaaattggtatcagcagaaaccaggaaaagcccctaagctcctgatccatggtgcatccagtttgcatagtggggtcccatcaaggttcagtggcagtggatctgggacagatttcactctcaccatcagcagtctgcaacctgaagattttgcaacttactactgtcaacagagttacagtaatccgtggacattcggccaagggaccaaggtggagatcaaa

SEQ ID NO: 2990 - DNA, 318 bp, synthetic construct
  source 1..318: mol_type = other DNA
gacatccagatgacccagtctccatcttccctgtctgcatctgtaggagacagagtcaccatcacttgccgggcgagtcagggcattagcaattctttagcctggtatcagcagcaaccagggaaagcccctaagctcctgctttatgctgtatccacattggaaagtggggtcccatccaggttcagtggcagtggatctgggacggattacactctcaccatcaacagcctgcagcctgaagattttgcaacttattactgtcaagagtattatagtacccggacgttcggtcaagggaccaaggtggagatcaaa

SEQ ID NO: 2991 - DNA, 324 bp, synthetic construct
  source 1..324: mol_type = other DNA
gacatccagatgacccagtctccatcctccctgtctgcatctgtcggagacagaatcaccatcacttgccgggcgagtcaggacattaccaattctttagcctggtatcagcagagaccagggaaagcccctaagctcctgctctatgctgcatccacattggaaagtggggtcccatcccggttcactggcagtggatctgggacggatttcactctcaccatcagcagcctgcagcctgaagattttgcgacttattactgtcaacagtattatagtgccctccggaggacttttggccaggggaccaaggtggagatcaaa

SEQ ID NO: 2992 - DNA, 324 bp, synthetic construct
  source 1..324: mol_type = other DNA
gaaatcccattgacccagtctccatcctccctgtctgcttctgtaggagacagagtcaccatcacttgccgggcgagtcagggcattaggaattctttagcctggtatcagcaaaaaccagggaaagcccctaagctcctgctctatgctgcatccagattgcaaagtggggtcccatccaggttcagtggcagtggatctgggacagattacactctcaccatcagcagcctgcagcctgaagattttgcaacttattactgtcaacagtattataatacccctccgtggacgttcggccaagggaccaaggtggaaatcaaa

SEQ ID NO: 2993 - DNA, 321 bp, synthetic construct
  source 1..321: mol_type = other DNA
gacatccagatgacccagtctccatcctccctgcctgcatctgtaggagacagagtcaccatcacttgccgggcaagtcagagcattagcagttatttaaattggtatcagcaaaaaccagggaaagcccctaagctcctgatttatggtgcatccagtttgcatactggggtcccatcaaggttcagtggcagtggatctgggacagatttcactctcaccatcagcagtctgcaacctgaagattttgcaacttactactgtcaacagagttacagtacccctcggacttttggccaggggaccaaggtggaaatcaaa

SEQ ID NO: 2994 - DNA, 324 bp, synthetic construct
  source 1..324: mol_type = other DNA
gaaattgtgctgacgcagtctccatcctccctgtctgcatctgtaggagacagagtcaccatcacttgccgggcaagtcagagcattagcaactatttaaattggtatcagcagaaaccagggaaagcccctaagctcctgatctatgctgcatccagtttgcaaagtggggtcccatcaaggttcagtggcagtggatctgggacagatttcactctcaccatcagcagtctgcaacctgaagatcttgcaacttactactgtcaacagagttacaatactcctccttggacgttcggccaagggaccaaggtggaaatcaaa

SEQ ID NO: 2995 - DNA, 324 bp, synthetic construct
  source 1..324: mol_type = other DNA
gacatcacactgacccagtctccatcctccctgtctgcatctgtgggagacagagtcaccatcacttgccgggcaagtcagagcattagcagacatttgagttggtatcagcagaagccagggagagcccctaagctcctgatctatgctgcatccaatttgcaaagtggggtcccatcaaggtttagtggcagtggatctgggacagatttcactctcaccatcagcagtctgcaacctgaagattttgcaacttactactgtcaacagagttacaatacccccccgtggacgttcggcccagggaccaaggtggaaatcaaa

SEQ ID NO: 2996 - DNA, 330 bp, synthetic construct
  source 1..330: mol_type = other DNA
cagcctgtgctgattcagcctgcctccgtgtctgggtctcctggacagtcgatcaccatctcctgcactggaaccagcagtgatgttggtggttacaattatgtctcctggtaccaacaacacccaggcaaagcccccaaagtcctgacttatgatgtcagtaagcggccctcaggggcttctgatcgcttctctggctccaagtctggcaacacggcctccctgacaatctctgggctccaggctgaggacgaggctgactattactgctgctcatatgcaggtagtagaggttggctattcggcggagggaccaagctcaccgtccta

SEQ ID NO: 2997 - DNA, 321 bp, synthetic construct
  source 1..321: mol_type = other DNA
gacatcgtgatgacccagtctccatcttccctgtctgcatctgtaggagacagagtcaccatcacttgccgggcaggtcagagcattagcgactttttaaattggtatcagcagaaaccagggaaagcccctaagctcctgatctatgctgtatccactttgcaaagtggggtcccttcaaggttcagtgccagtggatctgggacagatttcgctctcaccatcagcagtctccaacctgaagattttgcaacttactactgtcaacagagttacagttcccccctcactttcggcggagggaccaaggtggaaatcaaa

SEQ ID NO: 2998 - DNA, 321 bp, synthetic construct
  source 1..321: mol_type = other DNA
gacatccagatgacccagtctccatcctccctgtctgcatctgtaggagacagagtcaccatcacttgccgggcgagtcaggacattaagtattctttagcctggtatcagcagaaaccagggaaagcccctaagctcctcctctatgttgcatccagattggagagtggcgtcccatccaggttcagtggcagtggatctgggacggattacagtctcaccatcagcagcctgcagcctgaagattttgcaacttattactgtcaacaatattataatacccccgtgacgttcggccaagggaccaaggtggaaatcaaa

SEQ ID NO: 2999 - DNA, 324 bp, synthetic construct
  source 1..324: mol_type = other DNA
tcgtatgagctgactcagccaccctcggtgtcagtggccccaggacagacggccaagattacctgtgggggaaacaatgttggaagtaaaactgtgcactggtatcagcagaggccaggccaggcccctgtgctggtcgtctatgataatgacgcccggccctcagggattcctgagcgattctctgcctacgattctgggaacacggccaccctgaccatcaccagggtcgaggccggggatgaggccgactattactgtcaggtgtgggatagtggcagtgatcattatgtcttcggaactgggaccaaggtcaccgtccta

SEQ ID NO: 3000 - DNA, 324 bp, synthetic construct
  source 1..324: mol_type = other DNA
gacatccagatgacccagtctccatcctccctgtctgcatctgtaggagacagagtcaccatcacttgccgggcaagtcagagcattaggaactatttaaattggtatcagcagaaaccagggaaagcccctaaactcctgatctatgatgcatccagtctccaacgtggggtcccatcgaggttcagtggcagtggatctgggacagattacactctcaccatcagcagtctgcaacctgaagattttgcaacttactactgtcaacagagttacaatactcctccgtggacgttcggccaagggaccaaggtggaaatcaaa

SEQ ID NO: 3001 - DNA, 321 bp, synthetic construct
  source 1..321: mol_type = other DNA
gacatccagatgacccagtctccatcttccgtgtctgcatctgtaggagatagagtcaccatcacttgtcgggcgagtcagggtattagcaggtggttagcctggtatcagcagaaaccagggaaagcccccaagctcctgatctatgctgcatccagtttgcaaagtggggtcccatcaaggttcagcggcagtggatctgggacagatttcactctcaccatcagcagcctgcagcctgaagattttgcaacttactattgtcaacaggctgacagtttccccctcactttcggcggagggaccaaggtggaaatcaaa

SEQ ID NO: 3002 - DNA, 321 bp, synthetic construct
  source 1..321: mol_type = other DNA
gacatccagttgacccagtctccatcctccctgtctgcatctgtaggagacagagtcaccatcacttgccaggcgagtcaggacattaccaaaaatttaaattggtatcagcagagaccagggaaggcccctaagctcctgatcttcgatgcgtcctatttggaaacaggggtcccgtcaaggttcagtggaagtggatctgggacagattttactatcaccatcagcagcctgcagcctgaagattttgcaacatatttctgtcaacaatatgaaagtctccctcctactttcggcggagggaccaaagtggatatcaaa

SEQ ID NO: 3003 - DNA, 351 bp, synthetic construct
  source 1..351: mol_type = other DNA
cagcctgtgctgactcagcccccttcccattctgcatcttctggaacatcagtcagactcacctgcatgctgagcagtggcttcagtgttggggacttctggataaggtggtaccaacaaaagccagggaaccctccccggtatctcctgtactaccactcagactccaataagggccaaggctctggagttcccagccgcttctctggatccaacgatgcatcagccaatgcagggattctgcgtatctctgggctccagcctgaggatgaggctgactattactgtggtacatggcacagcaactctaagactcaggtgttcggcggagggaccaagctcaccgtccta

SEQ ID NO: 3004 - DNA, 321 bp, synthetic construct
  source 1..321: mol_type = other DNA
gacatccagatgacccagtctccatcctccctgtctgcatctgtaggagacagagtcaccatcacttgccaggcgagtcagcacattagcaactatttaaattggtatcagcacagaccagggaaagcccctaagctcctgatctacgatgcatccaatttggaaacaggggtcccatcaaggttcagtggaagtggatctgggacagatttcactttcacgatcagcagcctgcagccggaagatattgcaacatattattgtcagcaatacggtagtctcccgatcaccttcggccaagggacacgactggagattaaa

SEQ ID NO: 3005 - DNA, 324 bp, synthetic construct
  source 1..324: mol_type = other DNA
gaaacgacactcacgcagtctccatcctccctgtctgcatctgtgggagacagagtcaccatcacttgccgggcgagtcagggcattagcaattctttagcctggtatcagcagaaaccagggaaagcccctaaactcctgctctatgctgcatccacattggaaagtggggtcccatccaggttcagtggcagtggatctgggacggatttcactctcaccatcgccagcctgcagcctgaagattttgcaacatattactgtcaacagtattatagttccgtccggttcacttttggccaggggaccattctggatctcaac

SEQ ID NO: 3006 - DNA, 324 bp, synthetic construct
  source 1..324: mol_type = other DNA
gacatcccgatgacccagtctccatcgaccctgtctgcatctgtaggagacagagtcaccataacttgccgggcgagccagggcatcagcaattctttagcctggtatcagcagaaaccagggagagcccctaagctcctgctctatgctgcatccacattggaaagtggggtcccatccaggttcagtggcagtggatctgggacggatttcaccctcaccatcagcagcctgcagcctgaagattttgcaacttattactgtcaacagtattatagtacccccccacggacgttcggccaagggaccaaggtggaaatcaaa

SEQ ID NO: 3007 - DNA, 321 bp, synthetic construct
  source 1..321: mol_type = other DNA
gacatccagttgacccagtctccatcctccctgtctgcatctgtaggagatagagtcaccatcacttgccgggcaagtcagaccattaacagctttgttaattggtatcagcacaagccagggaaagcccctgagctcctgatctatgctgcatccactttgcaaaggggggtcccatcaaggttcagtggcagtggaactgggacagatttcactctcaccatcagcagtctgcaacctgaagattttgcaacgtacttctgtcaacagagttacaattcccctaggacgttcggccaagggaccaaggtggagatcaaa

SEQ ID NO: 3008 - DNA, 324 bp, synthetic construct
  source 1..324: mol_type = other DNA
gacatccagatgacccagtctccatcctccctgtctgcatctattggagacagagtcaccatcacttgccgggcaagtcagagcattaacagctatttaaattggtatcaacagaaaccagggaaagcccctaagctcctgatctatgttgcatccagtttgcaaagtggggtcccatcaaggttcagtggcagtggatctgggacagatttcactctcaccatcagcagtctgcaacctgaagattttgcaacttactactgtcaacagagttacagtacccctccatggacgttcggccaagggaccaaggtggagatcaaa

SEQ ID NO: 3009 - DNA, 327 bp, synthetic construct
  source 1..327: mol_type = other DNA
tcgtatgtgctgactcagccaccctcggtgtcagtggccccaggacagacggccaggattacctgtaagggagacgacattggaagtaaaaatgtgcactggtaccagcagaagccaggccaggcccctgtgctggtcgtctatgatgataccgaccggccctcagggatccctgagcgattctctggctccaactctgggaacccggccaccctgaccatcagcagggtcgaagccggggatgaggccgactattactgtcaggtatgggatagtaatattgatcatccttgggtgttcggcggagggaccaagctcaccgtccta

SEQ ID NO: 3010 - DNA, 321 bp, synthetic construct
  source 1..321: mol_type = other DNA
gacatccagatgacccagtctccatcttccgtgtctgcatctgtaggagacagagtcacaatcacttgtcgggcgagccagggtcttagcagatggttagcctggtatcagcagaaaccagggaaagcccctaaactcctgatctatgctgcatctagtttgcagagtggggtcccatcaaggttcagcggcagtggatctgggacagatttcactctcaccatcagcagcctgcagcctgaagactttgcaacttactattgtcaacaggctaacagtttcccactcactttcggcggagggaccaaggtggagatcaaa

SEQ ID NO: 3011 - DNA, 324 bp, synthetic construct
  source 1..324: mol_type = other DNA
gacatccagatgacccagtctccatcctccctgtctacatctgtgggagacagagtcaccatcacttgtcgggcaagtcagagcattagtagttttttaaattggtatcggcagaaaccagggaaagcccctgaactcctgatctatgctgcatccaggttgcaaagtggggtcccatcaaggttcagtggcagtggatctgggacagatttcactctcaccatcagcagtctgcaacccgaagattttgcaacttactactgtcaacagagttacagtatgcctccgatcaccttcggccaagggacacgactggagattaaa

SEQ ID NO: 3012 - DNA, 318 bp, synthetic construct
  source 1..318: mol_type = other DNA
gacatccagatgacccagtctccatcctccctgtctgcatctgtgggagacagagtcaccatcacttgcccggcgagtcagggcattagcaattctttagcctggtatcagcaaaaaccagggaaagcccctaagctcctgctctatgctacatccacattggaaagtggggtcccatccaggttcagtggcggtggatctgggacggattacactctcaccatcagcggcctgcagcctgaagattttgcaacttattactgtcaacagtattatagttttcggacgttcggccaagggaccaaggtggaaatcaaa

SEQ ID NO: 3013 - DNA, 318 bp, synthetic construct
  source 1..318: mol_type = other DNA
acgtatatgctgactcagcccccctcggtgtcagtgtccccaggacagacggccaggatcacctgctctggagatgcattcccaaaccaatatgcttattggtaccaactgaagccaggccaggcccctgtagcggtgatatataaagacagtgagaggccctcagggatccctgagcgattctctggctccagctcagggacaacagccacgttgaccatcaatgaagtccaggcagaggacgaggctgactattactgtcaatcagcagacagccgggggacggtgttcggcggagggaccaaggtcaccgtccta

SEQ ID NO: 3014 - DNA, 318 bp, synthetic construct
  source 1..318: mol_type = other DNA
gaaatcccgatgacccagtctccatcctacctgtctgcatctgtaggagacagagtcaccatcacttgccgggcgagtcagggcattaggaactctttagcctggtatcagcagaaattagggaaagcccctaagctcctgctctatgctgcatccacattggaaagtggggtcccatccaggttcagtggcagtggatctgggacggattacactctcaccatcagcagcctgcagcctgaagatttcgcaacttatttctgtcaacagtattatgatattcggacgttcggccaagggaccaaggtggatatcaaa

SEQ ID NO: 3015 - DNA, 327 bp, synthetic construct
  source 1..327: mol_type = other DNA
tcgtatgagctgactcagccaccctcggtgtccgtggccccaggacagacggccagacttacctgtgggggagacagccttggaagtaaaaatgtgcactggtaccagcagaagccaggccaggcccctgtgttggtcgtctttgatgatagcgaccggccctcagggatccctgagcgattctctggctccaactctgggaacacggccaccctgaccatcagcagggtcgaagccggggatgaggccgactattggtgtcaggtgtgggatagtaatattggtcatccttgggtgttcggcggaggcacccagctgaccgtccta

SEQ ID NO: 3016 - DNA, 321 bp, synthetic construct
  source 1..321: mol_type = other DNA
gacatccagttgacgcagtctccgtcctccctgtctgcttctgtgggagacagagtcaccatcacttgccgggcaagtcagaccgttggggcctttttaaattggtatcagcagaaaccagggaaagcccctaagctcctggtctttactgcacccgagatggaaggcggagtccccccgaggttcagtggcactggatctggcacagatttcactctcaccatcagcagtctacaacctgaagactttgcaacttacttctgtcaacagagtcacactatcccatacacttttggccaggggaccaaggtggagatcaaa

SEQ ID NO: 3017 - DNA, 324 bp, synthetic construct
  source 1..324: mol_type = other DNA
gaaatcccgatgacccagtctccatcctccctgtctgcatctgtaggagacagagtcaccatcacttgccgggcaagtcagagcattggcagctttttaaattggtatcgccagaaaccagggaaagccccgaacctcctgatctatgctgcgtccactttgcaaaggggagtcccttcaaggttcagtggcagtggatctgggacagatttcactctcaccatcagcagtctgcaacctgaggattttgcaacttacttttgtcaacagagttacactactcatatgtacacttttggccaggggaccaaggtggagatcaaa

SEQ ID NO: 3018 - DNA, 339 bp, synthetic construct
  source 1..339: mol_type = other DNA
gacatccagttgacccagtctccagactccctggctgtgtctctgggcgagagggccaccatcacctgcaagtccagccagagtgttgtatacagctccaacaataagaactacttagcttggtaccagcaaaaaccaggacagcctcctaagctgctcatttactgggcatctacccgggaatccggggtccctgcccgattcagtggcagcgggtctgggacagatttcactctcaccatcagcagcctgcaggctgaagatgtggcagtttattactgtcagcaatattatattactcctctcactttcggcggagggaccaaagtggatatcaaa

SEQ ID NO: 3019 - DNA, 321 bp, synthetic construct
  source 1..321: mol_type = other DNA
gacatccagatgacccagtctccatcctccctgtctgcatctgtaggagacagagtcaccatcgcttgccgggcaagtcagagcatgacgagctctttaaattggtatcagcagagaccagggaaagcccctaagctcctgatctttggtgcatccagtttgcatagtggggtcccatcaaggttcagtggcagtggatctgggacagatttcactctcaccatcagcagtctgcaacctgaagattttgcaacttactactgtcaacagagttacagtaccccgtggacgttcggccaagggaccaaggtggaaatcaaa

SEQ ID NO: 3020 - DNA, 321 bp, synthetic construct
  source 1..321: mol_type = other DNA
gaaatgacactcacgcagtctccatcctccctgtctgcatctgtaggagacagagtcaccatcacttgtcgggcaagtcacaggattgacaggtatttaaattggtatcagcagaaaccagggcaagcccccaagctcctgatctatgtagcatccactttgcaaagtggggtcccatcaaggttcactggcagtggatctgggacagatttcactctcactatcagcagtctgcaacctgaggattttgcaacttactactgtcaacagagttacactacccctcggactttcggccctgggaccaaggtggagatcaaa

SEQ ID NO: 3021 - DNA, 318 bp, synthetic construct
  source 1..318: mol_type = other DNA
tcgtatgagctgactcagccaccctcggtgtcagtgtccccaggacagacggccaggatcacctgctgtggagatgcattgccaaaccaatatacttattggtaccagcagaagccaggccaggcccctgtggtgataatatataaagacagtgagaggccctcagggatccctgagcgattctctggctccacctcagggacaacagtcacgttgaccatcagtggagtccaggcagaagacgaggctgactattactgtcaatcagcagacagcagtggtgttgtattcggcggagggaccaaggtcaccgtccta

SEQ ID NO: 3022 - DNA, 324 bp, synthetic construct
  source 1..324: mol_type = other DNA
gaaatgacactgacgcagtctccagccaccctgtctgtgtctccaggggaaagagccaccctctcctgcagggccagtcagagtgtcagcagcagcttagcctggtaccagcagaaacctggccagcctcccaggctcctcatctatgatgcatccaccagggccactggtatcccagccaggttcagtggcagtgggtctgggacagagttcactctcaccatcagcagcctgcagtctgaagatttcgcagtttattactgtcagcagtataataactggcctacgtggacgttcggccaagggaccaaggtggagatcaaa

SEQ ID NO: 3023 - DNA, 321 bp, synthetic construct
  source 1..321: mol_type = other DNA
gacatccagatgacccagtctccatcttccgtgtctgcatctgtaggagaccgagtcaccatcacttgtcgggcgagtcaggatattggcagctggctagcctggtatcagcagaaaccagggaaagcccctagactcctgatctatgctgcagccagtttgcaaagtggggtcccatcaaggttcagcggcagtggctctgggacagaattcactctcaccatcagcaggctacagcctgaagattttgcaacttactattgtcaacaggctaccagttttccgctcactttcggcggagggaccaaggtggaaatcaaa

SEQ ID NO: 3024 - DNA, 324 bp, synthetic construct
  source 1..324: mol_type = other DNA
gaaatccagatgacccagtctccatcctccctgtctgcatctgttggagacagagtcaccatcacttgccgggcgagtcagggcattagcaattccttagcctggtatcaacagagacgagggaaagcccctaagctcctgctctatgctgcatccactttggaaagtggggtcccatccaggttcagtggcagtggatctgggacggatttcactctcaccatcagcagcctccagcctgaggattttgcaacttattactgtcaacagtactatagtccccctccgctcactttcggcggagggaccaaggtggaaatcaaa

SEQ ID NO: 3025 - DNA, 324 bp, synthetic construct
  source 1..324: mol_type = other DNA
gaaatccaattgacccagtctccatcctccctgtctgcatctgtgggagacagagtcaccatcacttgccgggcaagtcaggccattagcagttatttaaattggtatcagcagaaaccagggaaagcccctaagctcctcatctatgctgcatccagtttgcacagtggggtcccatcaaggttcagtggcagtggatctgggacagatttcactctcaccatcaacagtctgcaacctgaagattttgcaacttactactgtcaacagagttacactatccctacgctcactttcggcggagggaccaaggtggagatcaaa

SEQ ID NO: 3026 - DNA, 318 bp, synthetic construct
  source 1..318: mol_type = other DNA
gacatccagatgacccagtctccatcctccctgtctgcatctgtaggagacagagtcaccatcacttgccgggcgagtcagggcattggcaattctttagcctggtatcagcagaaaccagggaaagcccctaagttcctgctctatgctgcatccacattggaaagtggggtcccatccaggttcagtggcagtggatctgggacggatttcactctcaccatcagcagcctgcaacctgaagattttgcaacttattactgtcaacaatactatactacccggacgttcggccaagggaccaaggtggaaatcaaa

SEQ ID NO: 3027 - DNA, 327 bp, synthetic construct
  source 1..327: mol_type = other DNA
cagtctgtgctgactcagcctgcctccgtgtctgggtctcctggacagtcgatcaccatctcctgcactgcaaccaccagtgacgttggtgtttttaactatgtctcgtggtaccaacagcacccaggcaaggcccccaaactcatgatttatgaggtcagtaatcggccctcaggggtttctaatcgcttctctggctccaagtctggcaacacggcctccctgaccatctctgggctccaggctgaggacgaggctgattatttctgcagctcatatacaaccagcagcacggtgttcggcggagggacccagctgaccgtccta

SEQ ID NO: 3028 - DNA, 324 bp, synthetic construct
  source 1..324: mol_type = other DNA
tcgtatgagctgactcagccaccctcggtgtcagtggccccaggacagacggccaggattacctgtgggggaaacaacattggaagtgaaagtgtccactggtaccagcagaagccaggccaggcccctgtgctggtcgtctatgaggacagcgaccggccctcagggatccctgagcgattctctggctccacctctgggaacacggccaccctgaccatcagcagggtcgaagccggggatgaggccgattattactgtcaggtgtgggatggtattagtgttcattatgtcttcggaactgggaccaagctcaccgtccta

SEQ ID NO: 3029 - DNA, 327 bp, synthetic construct
  source 1..327: mol_type = other DNA
gaaattgcgatgacgcagtctccagccaccctgtctgtgtctccaggggaaagagccaccctctcctgcagggccagtgagagtgttagcagcaacttagcctggtaccagcagaaacctggccaggctcccagactcctcatctatggtgcatccaccagggccactggtatcccagccaggttcagtggcagtgggtctgggacagagttcactctcaccatcagcagcctgcagtctgaagattttgcagtttatttctgtcagcagtatattgactggcctccggggtacacttttggccaggggaccaaggtggagatcaaa

SEQ ID NO: 3030 - DNA, 321 bp, synthetic construct
  source 1..321: mol_type = other DNA
gaaatccaaatgacccagtctccatcctccctgcctgcatctgtaggagacagagtcaccatcacttgccgggcaagtcagagcattagcagttatttaaattggtatcagcaaaaaccagggaaagcccctaagctcctgatttatggtgcatccagtttgcatgctggggtcccatcaaggttcagtggcagtggatctgggacagatttcactctcaccatcagcagtctgcaacctgaagattttgcaacttactactgtcaacagagttacactacccctcggacttttggccaggggaccaaggtggatatcaaa

SEQ ID NO: 3031 - DNA, 318 bp, synthetic construct
  source 1..318: mol_type = other DNA
gacatccagttgacccagtctccatcgtccctgtctgcatctgtaggagacagagtcaccatcacttgccgggcaagtcagagagttagcagctatttaaattggtttcaacagaaaccagggaaagcccctaggctcctgatctttgctgcatccagtttgcaaagtggggtcccttcaaggttcagtggcagtggatctgggacagatttcactctcaccatcagcagtctggaacctgaagattttgcaacttactactgtcaacagagttatgatgcgattaccttcggccaagggacacgactggagattaaa

SEQ ID NO: 3032 - DNA, 321 bp, synthetic construct
  source 1..321: mol_type = other DNA
gacatcacgatgacccagtctccatcttccgtgtctgcatctgtaggagacagagtctccatcacttgtcgggcgagtcaaagtattggcagctggttaggctggtatcagcagaaaccagggaaagcccctaaactcctgatctatgctgcgtccattttgcaaagtggggtcccatcaaggttcagcggcagtggatctgggacagatttcactctcaccatcagtagcctgcagcctgaagattttgcgacttactattgtcaacaggctgacagtttccctccggctttcggccctgggaccaaagtggatatcaaa

SEQ ID NO: 3033 - DNA, 318 bp, synthetic construct
  source 1..318: mol_type = other DNA
gaaatcccgatgacccagtctccatcctccctgtctgcatctgtaggagacagagtcaccatcacttgccgggcgagtcagggcattggcaattctttagcctggtatcagcagaaaccggggaaagcccctaagttcctgctctatgctgcatccacattggaaagtggggtcccatccaggttcagtggcagtggatctgggacggatttcactctcaccatcagcagcctgcaacctgaagattttgcaacttattactgtcaacaatactatactacccggacgttcggccaagggaccaaggtggatatcaaa

SEQ ID NO: 3034 - DNA, 333 bp, synthetic construct
  source 1..333: mol_type = other DNA
aatcttatgctgactcagccccactctgtgtcggagtctccggggaagacggtaaccatctcctgcacccgcagcagtggcagcattgccagcaactatgtgcagtggtaccagcagcgcccgggcagtgcccccaccactgtgatctatgaggataaccagagaccctctggggtccctgatcgtttctctggctccatcgacagctcctccaactctgcctccctcaccatctctggactgaagactgaggacgaggctgactactactgtcagtcttatgataccaggcttcgaggcgttttcggcggagggaccaagctcaccgtccta

SEQ ID NO: 3035 - DNA, 336 bp, synthetic construct
  source 1..336: mol_type = other DNA
gaaattgtgatgacgcagtctccactctccctgcccgtcacccctggagagccggcctccatctcctgcaagtctagtcagagcctcctgcatagtaatggatacaagtatttggattggtacctgcagaagccagggcagtctccacagctcctgatctatttgggttctaatcgggcctccggggtccctgacaggttcagtggcagtggatcaggcacagattttacactgaaaatcagcagagtggaggctgaggatgttgggatttattactgcatgcaagctctacaaactccgatcaccttcggccaagggacacgactggagattaaa

SEQ ID NO: 3036 - DNA, 318 bp, synthetic construct
  source 1..318: mol_type = other DNA
gacatccagttgacccagtctccatcctccctgtctgcatctgttggagacagagtcaccatcacttgccaggcgagtcaggacattggcaattatttaagttggtttcagcagaaagcagggaaagcccctaggctcctgatgtacgaagcatccaatttggaaacaggtgtcccatcaaggttcagtggaagtggatctgggacagattttgcgctcaccatcagcagcctgcagccggaagatattgcaacatattactgtcaacagtatgacagtctactcactttcggccctgggaccaaggtggatatcaaa

SEQ ID NO: 3037 - DNA, 321 bp, synthetic construct
  source 1..321: mol_type = other DNA
gacatccaattgacccagtctccatcctccctgtctgcatctgtaggagacagagtcaccatcacttgccgggcaagtcagagcgttaacaactatttaaattggtttcagcagaaaccagggaaagcccctaagctcctgatctatgctgcatccagcttgcaaagtggggtcccctcaaggttcagtggcagtggatctgggacagattacactctcgccatcagcagtctacaacctgaagattttgcaacttactactgtcaacagagttacgctacccctctcactttcggccctgggaccaaggtggaaatcaaa

SEQ ID NO: 3038 - DNA, 324 bp, synthetic construct
  source 1..324: mol_type = other DNA
gacatcccattgacccagtctccatcctccctgtctgcatctgtaggagacagagtcaccatcacttgccgggcgagtcaggacattagcaattctttagcctggtatcagcagaaaccagggaaagcccctaagctcctgctctatactgcttccacattggaaagtggggtcccatccaggttcagtggcagtggatctgggaccgattacactctcaccatcagcagcctgcagcctgaagattttgcaacttattactgtcagcagtattatagtgccctcgggcgcactttcggcggagggaccaaagtggatatcaaa

SEQ ID NO: 3039 - DNA, 330 bp, synthetic construct
  source 1..330: mol_type = other DNA
cagtctgtgctgactcagccgccctcggtgtctgcagcccccaggcagagggtcaccatctcctgttctggcagcagctccaacatcgagattaatgctgtaaactggtaccagcaactcccaggaaaggctcccaagctcctcatctattatgatgatctgttgccctcaggggtctctgaccgattctctggctccaagtctggcacctcagcctccctggccatcagtgggctccagtctgaggatgaggctgattattactgtgtcacatttgatgacaggctggatggctgggtgttcggcggagggaccaagctcaccgtccta

SEQ ID NO: 3040 - DNA, 321 bp, synthetic construct
  source 1..321: mol_type = other DNA
gaaatcaagatgacgcagtctccatcctccctgcctgcatctgtaggagacagagtcaccatcacttgccgggcaagtcagagcattaccagttatttaaattggtatcagcagaaaccagggaaagcccctaagctcctgatctatggtgcatccagtttgcatactggggtcccctcaaggttcagtggcagtggatctgggacacatttcactctcaccatcagcagtctgcaacctgaagattttgcaacttacttctgtcaacagagttacactacccctcggacttttggccaggggaccaaggtggaaatcaaa

SEQ ID NO: 3041 - DNA, 321 bp, synthetic construct
  source 1..321: mol_type = other DNA
gaaatccagatgacccagtctccatcctccctgtctgcatctgttggagacagagtcaccatcacttgccgggcaagtcagggcattagctttgctttagcctggtatcagcaaaaaccagggaaagctcctaagctcctgatctatgatgcctccagtttggaaagtggggtcccatcaaggttcagcggcagtggatctgggacagatttcactctcaccatcagcagcctgcagcctgaagattttgcaacttattactgtcaacagtttaatcattatccgatcaccttcggccaagggacacgactggagattaaa

SEQ ID NO: 3042 - DNA, 324 bp, synthetic construct
  source 1..324: mol_type = other DNA
gaaattgtgatgacgcagtctccatcctccctgtctgcatctgtaggagacagagtcaccatcacttgccgggcaagtcagagcattagaagttatttaaattggtttcaacagaaaccaggaaaagcccctaaactccttatctatagtgcatccactttgcaaagtggggtcccatcaaggttcagtggcagtgcatctgggacagatttcactctcaccatcagcagtctgcaacctgaagattttgcaacttactactgtcaacagagttacaatacccctccgtggacgttcggccaagggaccaaggtggagatcaaa

SEQ ID NO: 3043 - DNA, 339 bp, synthetic construct
  source 1..339: mol_type = other DNA
gacatccaaatgacccagtctccagactccctggctgtgtctctgggcgagagggccaccatcaactgcatgtccagccagagtgttttagacagctccaacaataagaacttcttagcttggtaccagcagagaccaggacagcctcctaagctgatcatttactgggcatctacccggaaatccggggtccctgaccgattcagtggcagcgggtctgggacagatttcactctcacaatcagcagcctgcagcctgaagatgtggcagtttattactgtcagcaatattacagaactcctctcactttcggcggagggaccaaggtggaaatcaaa

SEQ ID NO: 3044 - DNA, 318 bp, synthetic construct
  source 1..318: mol_type = other DNA
gacatccagatgacccagtctccttccaccctgtctgcatctgtaggggacagagtcaccatcagttgccgggccagtcagagtattagtaggtggttggcctggtatcagcagaaaccagggaaagcccctaagctcctgatctatatggcgtccagtttagaaagtggggtcccatcgaggttcagcggcagtggatctgggacagaattcactctcaccatcagcagccttcagcctgatgattttgcaacttattactgccaacaatataatagttattggacgttcggccaagggaccaaggtggaaatcaaa

SEQ ID NO: 3045 - DNA, 324 bp, synthetic construct
  source 1..324: mol_type = other DNA
gacatccagatgacccagtctccatcctccctgtctgcatctgttggagacggagtcaccatcacttgccgggcgagtcaggggattagcaattctttagcttggtatcagcagaaaccggggaaagcccctaagctcctcgtctatgtcgcatccacatgggaaagtggggtcccaaccaggttcagtggcagtggatatgggacggatttcactctcaccatcagcagcctgcagcctgaagattttgcaacttattactgtcaacagtattatagtcccccgccgcccaccttcggcggagggaccaaggtggagatcaaa

SEQ ID NO: 3046 - DNA, 318 bp, synthetic construct
  source 1..318: mol_type = other DNA
gaaatcgcgctgacgcagtctccagccaccctgtctttgtctccaggggaaagagccaccctctcctgcagggccagtcagagtgttagcacctacttagcctggtaccaacagaaacctggccaggctcccaggctcctcatctatgatgcatccaagagggccactggcatcccagccaggttcaatggcagtgggtctgggacagacttcactctcaccatcagcagcctcgagcctgaagattttgcagtttattactgtcagcagcgtagcacctggcccactttcggcggagggaccaaggtggatatcaaa

SEQ ID NO: 3047 - DNA, 324 bp, synthetic construct
  source 1..324: mol_type = other DNA
gacatccagttgacccagtctccatcctccctgtctgcatctgtaggagacagagtcaccatcacttgccgggcaagtcagagcattggcagctatttaaattggtatcagcagaaaccagggaaagcccctaacctcctgatctatgctgcatccaatttgcaaagtggagtcccatcaaggttcagtggcagtggatctgggacagatttcactctcaccatcagcagtctgcagcctgaagattttgcaacttacttctgtcagcagagttacagtgcccctccttggacattcggccaggggaccaaggtggagatcaaa

SEQ ID NO: 3048 - DNA, 324 bp, synthetic construct
  source 1..324: mol_type = other DNA
cagtctgtgctgactcagccaccctcagtgtcagtggccccaggaaagacggccaggattacctgtgggggaaacaacattggaagtcaaagtgtgcactggtaccagcagaagccaggccaggcccccgtgctggtcatctattatgataacgaccggccctctgggatccctgagcgattctctggctccaactctgggaacacggccaccctgaccatcagcagggtcgaagccggggatgaggccgacttttactgtcaggtgtgggatactagtggtgatcattgggtgttcggcggaggcaccaagctcaccgtccta

SEQ ID NO: 3049 - DNA, 318 bp, synthetic construct
  source 1..318: mol_type = other DNA
gacatccagatgacccagtctccatcctccctgtctgcatctataggagacagagtcaccatcacttgccgggcaagtcagagcgttagcacctttttaaattggtatcagcagaagccaggaaaagccccaaagctcctgatttattctgcatccggtttgcaaagtggggtcccatcaaggttcagtggcagtggatctgggacagatttcactctcaccatcagcagtctgcaacctgaagattttgcaacttactactgtcaacagagttacaatatgttcactttcggccctgggaccaaggtggaaatcaaa

SEQ ID NO: 3050 - DNA, 324 bp, synthetic construct
  source 1..324: mol_type = other DNA
gacatcccgatgacccagtctccatcctccctgtctgcatctgtaggagacagagtcaccatctcttgccgggcaagtcagaccattaccaggtatttaaattggtatcagcaaaaaccagggaaagcccctaagctcctgatctatgctgcatccagtttgcaaagtggggtcccatcaaggttcagtggcagtggatctgggacagatttcactctcaccatcagcagtctgcaacctgaggattttgcaacttacttctgtcagcagagttatactacccacatgtacacttttggccaggggaccaaggtggatatcaaa

SEQ ID NO: 3051 - DNA, 327 bp, synthetic construct
  source 1..327: mol_type = other DNA
cagcctgtgctgactcagcctgcctccgtgtctgggtctcctggacagtcgatcaccatctcctgcactggaaccagcagtgaccttggtgcttttaaccatgtctcctggtaccaacacttcccaggcaaggcccccaaacttttgatttatgagttcactaatcggccctcaggggtttctaatcgcttctccggctccaagtctgacaagacggcctccctgaccatctttgggctccaggctgaggacgaggctgattattactgcagtgcatatacatccaccagcacagtattcggcggagggaccaaggtcaccgtccta

SEQ ID NO: 3052 - DNA, 324 bp, synthetic construct
  source 1..324: mol_type = other DNA
gaaattgtgatgacccagtctccatcctccctgtctgcatctgtaggagacagaatcaccatcacttgccgggcgagtcagggcattagcaattctttagcctggtatcagcagaaaccagggaaagcccctaagctcctgctctatgctgcatccacattggaaagtggggtcccatccaggttcagtggcagtggatctgggacggatttcactctcaccatcaacagcctgcagcctgaagattttgcaacttattactgtcaacagtattatagtccccctccccggacgttcggccaagggaccaaggtggaaatcaaa

SEQ ID NO: 3053 - DNA, 321 bp, synthetic construct
  source 1..321: mol_type = other DNA
gaaattgtgatgacccagtctccaggcaccctgtctttgtctccaggggaaagagccaccctctcctgcagggccagtcagagtgttagcggctacttagcctggtaccagcagagacctggccaggctcccaggctcctcatctatgatgcatccagcagggccactggcatcccagacaggttcagtggcagtgggtctgggacagacttcactctcaccatcagcagactggagcctgaggattttgcagtgtatttctgtcagcagtatggtagctcacctcgaacgttcggccaagggaccaaggtggaaatcaaa

SEQ ID NO: 3054 - DNA, 324 bp, synthetic construct
  source 1..324: mol_type = other DNA
gacatccagatgacccagtctccttccaccctgtctgcatctgtgggagacagagtcaccatcacttgccgggccagtcagagtattgatgactggttggcctggtatcagcagaaaccagggaaagcccctaaactcctgatctataagacgtctagtttagaaagtggggtcccatcaagattcagcggcagtggatctgggacagaattcactctcaccatcagcagcctgcagcctgatgattttgcaacttattactgccaacactttaatagttacctcatgtacacttttggccaggggaccaaggtggatatcaaa

SEQ ID NO: 3055 - DNA, 324 bp, synthetic construct
  source 1..324: mol_type = other DNA
cagcctgtgctgactcagcccccctcggtgtcagtggccccaggacagacggccgggattacctgtggggcacacgacattggaagtaagagtgtgcactggtaccagcaaaagccaggccaggcccctgtgctggtcgtctatgatgatagcgaccggccctcagggatccctgagcgagtctctggctccaactctggaaacacggccaccctgaccatcagcagggtcgaagccggggatgaggccgactattactgtcaggtgtgggatactagtggtgatcattgggtgttcggcggagggaccaagctcaccgtccta

SEQ ID NO: 3056 - DNA, 321 bp, synthetic construct
  source 1..321: mol_type = other DNA
gacatccggatgacccagtctccatcctccctgtctgcatctgtaggagacagagtcaccatcacttgccaggcgagtcaggacattaacacctatttaaattggtatcagcagaaaccagggaaagcccctaaactcctgatctacgatgcatccaatttggaaacaggggtcccatcaaggttcagtggaagtggatctgggacacattttactttcaccatcaccagcctgcagcctgaagacattgcaacatattactgtcaatcctatgataatccccctccgactttcggccctgggaccaaggtggagatcaaa

SEQ ID NO: 3057 - DNA, 324 bp, synthetic construct
  source 1..324: mol_type = other DNA
gacatgacgatgacgcagtctccagccaccctgtctgtgtctctaggagaaagagtcaccctctcctgcagggccagtcagagtattagcagcaacttagcctggtaccagcagaaacctggccaggctcccaggctcctcatctatggtgcatccaccagggccactggtatctcagccaggttcagtggcagtgggtctgggacaaaattcactctcaccatcagcagcctgcagtctgaagattttgcagtttattactgtcagcaatataataactggcctccgtggacgttcggccaggggaccaaggtggaaatcaaa

SEQ ID NO: 3058 - DNA, 336 bp, synthetic construct
  source 1..336: mol_type = other DNA
gacattgtgatgacgcagtctccactcaccctgcccgtcacccctggagagccggcctccatctcctgcaagtctagtcagagcctcctgcatagtaatggacacaagtacttggattggtacctgcagaagccagggcagtctccacagctcctgatctatttgggttctaatcgggcctccggggtccctgacaggttcagtggcagtggatcaggcacagatttcacactgaaaatcagcagagtggaggctgaggatgttgggatttattactgcatgcaagctctacaaactccgatcaccttcggccaagggacacgactggagattaaa

SEQ ID NO: 3059 - DNA, 330 bp, synthetic construct
  source 1..330: mol_type = other DNA
cagtcagtggtgactcagccaccctcagtgtctgcggccccaggacagagggtcaccatctcctgctctggaaccagctccaacattgggaataattatgtatcctggtaccagcacctcccaggaacagcccccaaactcctcatttatgacaatgataagcgaccctcagggattcctgaccgattctctggctccaagtctggcacgtcagccaccctgggcatcaccggtctccagagtggggacgaggccgattattattgcgctacatgggatgacagcctgagtgtggggattttcggcggaggcacccagctgaccgtcctc

SEQ ID NO: 3060 - DNA, 330 bp, synthetic construct
  source 1..330: mol_type = other DNA
cagcctgtgctgactcagcccccctcggtgtctgaagcccccaggcagagggtcaccatctcctgttttgggagcagctccaacatcggacataatgctgtaaactggtatcagcagctcccaggaaaggctcccaaacttatcatctactatgatgatctgctgccctcaggggtctccgaccgattctctggctccaagtctggcacctcagcctccctggccatcagtgggctccagtctgaggatgaggctgattattactgtgcagcatgggatgacaggctgaatggttatgtcttcggacctgggaccaaggtcaccgtccta

SEQ ID NO: 3061 - DNA, 324 bp, synthetic construct
  source 1..324: mol_type = other DNA
gaaatcccgatgacccagtctccatcctccctgtctgcatctgtaggagacagagtcaccatcacttgccgggcaagtcagaccattagtaggtttttaaattggtatcagcagaaaccagggaaagcccctaaactcctgatctatgctgcatccagtttgcaaagtggggtcccatcaaggttcagtggcagtggatctgggacagatttcactctcaccatcagcagtctgcaacctgaagattttgcaacttactactgtcaacagagttacagtgcccctccgtggacttttgcccaggggaccaaggtggatatcaaa

SEQ ID NO: 3062 - DNA, 324 bp, synthetic construct
  source 1..324: mol_type = other DNA
gacatccagatgacccagtctccatcctccctgtctgcatctgtaggggacagagtcaccatcagttgccgggcaagtcagagcattagcaggtatttaaattggtatcagcagagaccagggaaagcccctaaactcctgatctatgctgcatccactttgcaaagtggggtcccatcaagattcagtggcagtggatctgggacagacttcactcttaccatcagcagtctgcaacctgaagattttgcaacttacatctgtcaacagagttacgttagccccccgtggacgttcggcccagggaccaaggtggaaatcaaa

SEQ ID NO: 3063 - DNA, 321 bp, synthetic construct
  source 1..321: mol_type = other DNA
gacatccagatgacccagtctccatcctccctgtctgcatctgtaggagacagagtcaccatcacttgccgggcaagtcagaggattagtagctatttaaattggtatcagcagagaccagggaaagcccctaacttcctgatctataatgcatccagttttgaaagtggggtcccatcaaggttcagtggcagtggatctgggacagatttcactctcaccatcagcagtctgcaacctgaagattttgcaacttactactgtcaacagagttacagtgacccatacacttttggccaggggaccaaagtggaaatcaaa

SEQ ID NO: 3064 - DNA, 321 bp, synthetic construct
  source 1..321: mol_type = other DNA
gacatcaagatgacccagtctccatccttcctgtctgcatctgtaggagacagagtcaccatcacttgccgggccagtcagggcattagcagttatttagcctggtatcagcaaaagccagggaaagcccctaaactcctaatctatgctgcatccactttgcaaagtggggtcccatcaaggttcagcggcagtggatctgggacagaattcactctcacaatcagcagcctgcagcctgaagattttgcaacttattactgtcaacagcttaatactcaccctccccctttcggccctgggaccaaggtggagatcaaa

SEQ ID NO: 3065 - DNA, 324 bp, synthetic construct
  source 1..324: mol_type = other DNA
gacatcgtgatgacgcagtctccatcctccctgtctgcatctgtaggagacagagtcaccatcacttgccgggcaagtcagagcattagcacgtatttaaattggtatcagcagaaaccagagaaagcccctaagctcctgatctatgctgcatccagtttgcaaagtggggtcccatcaaggttcagtggcagcggatctgggacagatttcactctcaccatcagcagtctgcaacctgaagattttgcaacttactactgtcaacagagttacacttcccctgcgtacacgtttggccaggggaccaaggtggagatcaaa

SEQ ID NO: 3066 - DNA, 321 bp, synthetic construct
  source 1..321: mol_type = other DNA
gacatcaagatgacccagtctccatccttcctgtctgcatctgtaggagacagagtcaccatcacttgccgggccagtcagggcattagtactgatttagcctggtatcagcaaaaatcagggaaagcccccaagctcctgatctatggtgcatccactttgcaaagtggggtcccatcaaggttcagcggcagtggatctgggacagaattcactctcacaatcagcagcctgcagcctgaagattttgcaacttattactgtcaacaccttaatagtgacgcgatcaccttcggccaagggacacgactggagattaaa

SEQ ID NO: 3067 - DNA, 321 bp, synthetic construct
  source 1..321: mol_type = other DNA
gacatccagatgacccagtctccatccttcctgtctgcatttgtaggagacagagtcaccatcacttgccgggccagtcagggcattagcaggtatttagcctggtatcagcaaaaaccagggaaagcccctaagctcctgatctatgctgcctccactttacaaagtggggtcccatcaaggttcagcggcagtggatctgggacagaattcactctcacaatcagcagcctgcagactgaagattttgcaacttattactgtcaacaccttgatactgactcggggacgttcggccgagggaccaaggtggaaatcaaa

SEQ ID NO: 3068 - DNA, 333 bp, synthetic construct
  source 1..333: mol_type = other DNA
gacatccagatgacccagtctccagactccctggctgtgtctctgggcgagagggccaccatcaactgcaagtccaaccagagtgttttatacagttctaagaacttcttaggttggtaccagcagaaaccaggacagcctcctaaactgctcatttactgggcatctacccgggaatccgggatccctgaccgattcagtggcagcggctctgggacagatttcactctcaccatcagcagcctgcaggctgaagatgtggcagtttattactgtcagcaatattataatactcctgtgacgttcggccaagggaccaaggtggagatcaaa

SEQ ID NO: 3069 - DNA, 324 bp, synthetic construct
  source 1..324: mol_type = other DNA
gacatcaagatgacccagactccatccttcctgtctgcatctgtgggagacagagtcaccatcacttgccgggccagtcagggcattagcagttttttagcctggtatcagcaaaaaccagggaaagcccctaagctcctgatctatggtgcatccactttgcaaagtggggtcccattaaggttcagcggcagtggatctgggacagaattcactctcacaatcagcagcctgcagcctgaagattttgcaacttattactgtcaacaccttgatagttaccctcggtacacttttggccaggggaccaaggtggatatcaaa

SEQ ID NO: 3070 - DNA, 318 bp, synthetic construct
  source 1..318: mol_type = other DNA
gaaatccaattgacccagtctccatcctccctgtctgcatctgtcggagacagagtcaccatcacttgccgggcgagtcagggcattagcaattctttagcctggtatcagcagaaaccagggaaagcccctaagctcctgctctatgctgcgtctacgttggaaagtggggtcccatcccggttcagtgggagtggatctgggacggacttctctctcaccatcagcagcctgcagcctgaggattttgcaacttattactgtcaagagtattatgatacccggacgttcggccaagggaccaaggtggatatcaaa

SEQ ID NO: 3071 - DNA, 318 bp, synthetic construct
  source 1..318: mol_type = other DNA
gaaattgtgttgacacagtctccagccaccctgtctttgtctccaggggaaagagccaccctctcctgcagggccagtcagagtgttagcacctacttagcctggtaccaacagagacctggccaggctcccaggctcctcatctatgatgcatccaacagggccactggcatcccagccaggttcagtggcagtgggtctgagacagacttcactctcaccatcagcagcctggagcctgaagattttgcagtttattattgtcaacagcggagcaactggctcactttcggcggcgggaccaaggtggaaatcaaa

SEQ ID NO: 3072 - DNA, 327 bp, synthetic construct
  source 1..327: mol_type = other DNA
cagtctgctctgattcagcctgcctccgtgtctgggtctcctggacagtcgatcaccatctcctgcactgcaaccagtagtgacgttggtgcttatatctatgtctcgtggtaccaacaacacccaggcaaagcccccaaactcacgatttatgaggtcactaaacggccgtcagggatttctaatcgcttctctggctccaagtctggcaacacggcctccctgaccatctctgggctccaggctgaggacgaggctcattattactgcagctcatatacaactagcggcgtggtattcggcggaggcacccagctgaccgtccta

SEQ ID NO: 3073 - DNA, 324 bp, synthetic construct
  source 1..324: mol_type = other DNA
gacatcccgatgacccagtctccatcctccctgtctgcatctgtaggagacagagtcaccatcacttgccgggcaagtcagagcataaccacttatttaaattggtatcagcagaaaccagggaaagcccctaagctcctgatctatgctgcatccagtttgcaaagtggggtcccatcaaggttcagtggcagtggatctgggacagatttcactctcaccatcaccagtctgcaacctgaagactttgcaatttactactgtcaacagagttacaatacccctccgtggacgttcggccaagggaccaaggtggagatcaaa

SEQ ID NO: 3074 - DNA, 333 bp, synthetic construct
  source 1..333: mol_type = other DNA
cagtctgtgttgacgcagccgccctcagtgtctggggccccagggcagagggtcaccatctcctgcactgggagcaactccaacatcggggcaggttatgatgtacactggtaccagcagcttccaggaacagcccccaaactcctcatctatgataacaccaatcggccctcaggggtccctgaccgattctctgggtccaagtctggcacctcagcctccctggccatcactgggctccaggctgaggatgaggctgattattactgccagtcctatgacagcagcctgactggttctgtcttcggaactgggaccaaggtcaccgtccta

SEQ ID NO: 3075 - DNA, 321 bp, synthetic construct
  source 1..321: mol_type = other DNA
gaaatcccgatgacccagtctccatcttccgtgtctgcatctgtaggagacagagtcaccatcgcttgtcgggcgagtcagggtattggcagctggttaggctggtatcagcagaaaccagggaaagcccctaagctcctgatctatgctgcgtccattttgcaaagtggagtcccatcaaggttcagcggcagtggatctgggacagaattcactctcaccatcagcagcctgcagcctgaagattttgcaacttactattgtcaacaggctgacagtttccctccggctttcggccctgggaccaaggtggaaatcaaa

SEQ ID NO: 3076 - DNA, 336 bp, synthetic construct
  source 1..336: mol_type = other DNA
gaaattgtgttgacacagtctccgctctccctgcccgtcacccttggacagccggcctccatctcctgcaggtctagtgaaagcctctcatacagtgatggaaacacctacttgaattggtttcagcagaggccaggccaatctccaaggcgccttatttataaggtttctaaccgggactctggggtcccagacagattcagcggcagtgggtcaggcactgatttcacattgaaaatcagcagggtggaggctgaggatgttggggtttattactgcatgcaaggtacacactggcctccgacgttcggccaagggaccaaggtggaaatcaaa

SEQ ID NO: 3077 - DNA, 324 bp, synthetic construct
  source 1..324: mol_type = other DNA
gacatccagatgacccagtctccttccaccctgtctgcatctgtgggagacagagtcaccatcacttgccgggccagtcagagtattgatgactggttggcctggtatcagcagaaaccagggaaagcccctaaactcctgatctataagacgtctactttagaaagtggggtcccatcaagattcagcggcagtggatctgggacagaattcactctcaccatcagcagcctgcagcctgatgattttgcaacttattactgccaacactttaatagttacctcatgtacacttttggccaggggaccaaggtggagatcaaa

SEQ ID NO: 3078 - DNA, 318 bp, synthetic construct
  source 1..318: mol_type = other DNA
gacatccagatgacccagtctccttccaccctgtctgcatctgttggagacagagtcaccgtcacttgccgggccagtcagagtattagtacctggttggcctggtatcagcagaaaccagggaaagcccctaaggtcctgatctataaggcaactcatttagaaactggggtcccatcaaggttcagcggcagtggatctgggacagaattcactctcaccatcagcagcctgcagcctgatgattttgcaacttattactgccaacagtataatagttattacacttttggccaggggaccaaggtggatatcaaa

SEQ ID NO: 3079 - DNA, 327 bp, synthetic construct
  source 1..327: mol_type = other DNA
tcgtatgtgctgactcagccaccctcggtgtcagtggccccaggacagacggccaggattacctgtgggggaaacgaccttggaagtaaaaatgtgcactggtaccagcagaagccaggccaggcccctgtgctggtcgtctttgatgatagcgaccggccctcagggatccctgagcgattctctggctccaactctgggaacacggccaccctgaccatcagcagggtcgaaaccggggatgaggccgactattactgtcaggtgtgggatagtaatattgatcatccttgggtgttcggcggagggaccaagctcaccgtccta

SEQ ID NO: 3080 - DNA, 321 bp, synthetic construct
  source 1..321: mol_type = other DNA
gacatccagatgacccagtctccatcctccctgtctgcatctgtcggagacagagtcaccatcacttgccaggcgagtcaggacattaacaactatttaaattggtatcagcagaaaccaggaaaagcccctaagctcctcatctacgatgcatccaatttggaaacaggggtcccatcaaggttcagtggaagtggatctgggacagattttactttcaccatcagcagcctgcagcctgaagatattgcaacatattactgtcaatattatgataatccccctccgactttcggccctgggaccaaggtggaaatcaaa

SEQ ID NO: 3081 - DNA, 333 bp, synthetic construct
  source 1..333: mol_type = other DNA
cagcctgtgctgactcagccgccctcagtgtctggggccccagggcggggggtcaccatctcctgcactgggagcacctccaacatcgggggaggttatgatgtgcactggtaccagcagcttccaggagaggcccccaaactcctcatctatcttaacaataatcggccctcaggggtccctgaccgattctctggctccaagtctggcacctcagcctccctggccatcactgggctccagcctgtcgatgaggctgattattactgccagtcgtatgacagcagcctgagtgtttgggtgttcggcggaggcacccagctcaccgtccta

SEQ ID NO: 3082 - DNA, 318 bp, synthetic construct
  source 1..318: mol_type = other DNA
cagtctgtgctgactcagcccctctcagtgtcagtggccctgggacagacggccaggattccctgtggactgaacatcattcctggtaaaaatgtgcactggtaccagcagaagccaggccaggcccctatactggtcatctatagggataacatccggccctctggaatctctgagcgattctctgtctcccactcggggaacatggccaccctgaccatcagtagagcccaagccggggatgaggctgactattactgtcagatttgggacatcaacactgtgatattcggcggagggacccagctgaccgtccta

SEQ ID NO: 3083 - DNA, 324 bp, synthetic construct
  source 1..324: mol_type = other DNA
cagtatgtgctgactcagccaccctcagtgtcagtggccccgggagagacggccaggattacctgtgggggaaacaacattggaagtaaacatgtacactggtacctgcagaggccaggccaggcccctgtgctggtcatctcttttaatagcgaccggccctcagggatccccgggcgattctctggctccaactctgggaacacggccaccctgaccatcagcagggtcgaagccggggatgaggccgactattactgtcaggtgtgggatagtaatactgaccatcgggtgttcggcggagggaccaagctcaccgtccta

SEQ ID NO: 3084 - DNA, 321 bp, synthetic construct
  source 1..321: mol_type = other DNA
gacatccggatgacccagtctccctcggtgtcagtgtccccgggacagacggccaggatcacctgctctggagatgcattgccaaatcaatatacttattggtaccaacaaaagtcaggccaggcccctgtgttggtgatatatagagacactgagaggccctcagggatccctgagcgattctctggctccagctcagggacggcagtcacgttgaccatcagtggagtccaggcagaagacgaggctgactattactgtcaatcagcagactatagcggtacttgcgtgttcggcggggggaccaagctgaccgtccta

SEQ ID NO: 3085 - DNA, 318 bp, synthetic construct
  source 1..318: mol_type = other DNA
gacatccagttgacccagtctccatcctccctgtctgcatctgtaggagacagagtcaccgtcacttgccgggcaagtcagagcattagcacctttttaaattggtatcaacagaaaccagggaaagtccctaacctcctgatctatgctgcatccagcttgcaaagtggggtcccatcaaggttcagtgggagtggatctgggacagatttcactctcaccatcaacggtctgcaacctgaagattttgcaacttactactgtcagcagagttacagtaccccttccttcggccaagggacacgactggagattaaa

SEQ ID NO: 3086 - DNA, 321 bp, synthetic construct
  source 1..321: mol_type = other DNA
gacattgtgttgacccagtctccatcctccctgtctgcatctgtaggagacagagtcaccatcacttgccgggccagtcagggcattagcagtcatttagcctggtatcagcaaaaaccagggaaagcccctaagcttctgatctatgctgcatccactttgcaaagtggggtcccatcaaggttcagcggcagtggatctgggacagatttcactctcaccatcagcagcctgcagcctgaagattttgcaagttattactgtcaacagcttaatagtgactcccccactttcggcggagggaccaaagtggatatcaaa

SEQ ID NO: 3087 - DNA, 321 bp, synthetic construct
  source 1..321: mol_type = other DNA
gaaattgcactgacgcagtctccagccaccctgtctttgtctccaggggaaagagccaccctctcctgcagggccagtcagagtgttaacagctacttagcctggtaccaacagaaacctggccaggctcccaggctcctcatctatgatgcatacaacagggccactggcatcccagccaggttcagtggcagtgggtctgggacagacttcactctcaccatcagcagcctagagcctgaggattttgcagtttattactgtcagcaacgtctccacccgccattcactttcggccctgggaccaaggtggagatcaaa

SEQ ID NO: 3088 - DNA, 324 bp, synthetic construct
  source 1..324: mol_type = other DNA
gacatccagatgacccagtctccatcctccctgtctgcatctgtaggagacagagtcaccatcacttgccgggcaagtcagagcattagtagatttttaagttggtatcagcagaaaccagggaaagcccctaagctcctgatctatgctgcatccactttgcagagtggggtcccatcaaggttcagtggcagtggatctgggacagatttcactctcattatcagcagtctgcaacctgaagattttgcaacctacttctgtcaacagagttacagtacccctccggtcaccttcggccaagggacacgactggagattaaa

SEQ ID NO: 3089 - DNA, 321 bp, synthetic construct
  source 1..321: mol_type = other DNA
tcctatgtgctgacacagccaccctcggtgtcagtgtccccaggacagacggccaggatcacctgctccggagatgtattgtcaaagcaatacgcttattggtaccaacagaaaccaggccaggcccctgtgttggtgatatataaagacactgagaggccctcagggatccctgagcgattgtctggctccagctcagggacaacagtcacgttgaccatcagtggagtccaggcagaagacgaggctgactattattgtgtatcagcagacagtagtggtgtttatgtcttcggaactgggaccaagctgaccgtccta

SEQ ID NO: 3090 - DNA, 336 bp, synthetic construct
  source 1..336: mol_type = other DNA
cagtctgtgttgacgcagccgccctcagtgtctggagccccagggcagagggtcaccatctcctgcactgggagcagctccaacatcggggcaggtcatgatgtgaattggtaccagcaaattccaggaacagcccccaaactcctcatctctgctaacgacaaccggccctcaggggtccctgaccgattctctggctccaagtctggcacctcagcctccctggccatcactgggctccaggctgaggatgaggctgattattactgccagtcctatgacagcggactgagtggttctgtgctattcggcggagggaccaagctgaccgtccta

SEQ ID NO: 3091 - DNA, 321 bp, synthetic construct
  source 1..321: mol_type = other DNA
gacatccagatgacccagtctccatcctccctgtctgcatctgtaggagacagagtcaccatcacttgccaggcgagtcaggacattaacaagtttttaaattggtatcagcagaaaccagggaaagcccctacgctcctgatctacgatgcatccaatttggaaccaggggtcccatcaaggttcagtggaagtggatctgggacagattttactttcaccatcaccagcctgcagcctgaagatattgcaacatattactgtcaacagtatgataatgttcctccgactttcggccctgggaccaaggtggaaatcaaa

SEQ ID NO: 3092 - DNA, 321 bp, synthetic construct
  source 1..321: mol_type = other DNA
gaaatccaaatgacccagtctccatcctccctgtctgcatctgtaggagacagagtcaccatcacttgccaggcgagtcaggacattaacaagtatttaaattggtatcagcagaaaccagggaaagcccctaaggtcctgatctacgatgcatccaatttggaaacaggagtcccatcaaggttcagtggaagtggatctgggacagattttactttcaccatcagcggcctgcagcctgaagatattgcaacatattactgtcaacagtatgataatctccctcagactttcggcggagggaccaaggtggaaatcaaa

SEQ ID NO: 3093 - DNA, 318 bp, synthetic construct
  source 1..318: mol_type = other DNA
acatgcgtgatgacgcagtctccttccaccctgtctgcatctgtaggagacagagtcaccatcacttgccggaccagtcagagtattagtacctggttggcctggtatcagcagaaaccagggaaagcccctaagctcctgatctataaggcgtctagtttagaaagtggggtcccaccaaggttcagcggcagtggatctgggacagaattcactctcaccatcagcagcctgcagcctgatgattttgctacttattactgccagcagtataaaagtttttggacgttcggccaagggaccaaggtggaaatcaaa

SEQ ID NO: 3094 - DNA, 318 bp, synthetic construct
  source 1..318: mol_type = other DNA
gacatcgtgatgacccagactcctcccaccctgtctgcatctgtaggagacagagtcaccatcacttgccgggccagtcagagtattagtacctggttggcctggtatcagcagaaaccagggaaagcccctaagctcctgatctataaggcgtctagtttagagagtggggtcccatcaaggttcagcggcagtggatctgggacagagttcactctcaccatcagcagcctgcagcctgatgattttgcaacttattactgccaacagtataatagttattggacgttcggccaagggaccaaggtggatatcaaa

SEQ ID NO: 3095 - DNA, 333 bp, synthetic construct
  source 1..333: mol_type = other DNA
cagtctgtgttgacgcagccgccctcagcgtctgggacccccgggcagagggtcgtcatttcttgttctgggagcagctccaacatcggaagtaatagtgtaaactggtaccagcaatttccaggaacggcccccaaactcctcatctatactaataatcagcggcggccctcaggggtccctgaccgattctctggctccaagtctggcacctcagcctccctggccatcagtgacctccagtctgaggatgaggctgattatcactgtgcagcatgggatgacagcctgaatggtgtggtcttcggcggagggaccaagctcaccgtccta

SEQ ID NO: 3096 - DNA, 324 bp, synthetic construct
  source 1..324: mol_type = other DNA
gaaatccagatgacccagtctccatcctccctgtctgcatctgtaggagacagagtcaccatcacttgccgggcaagtcagagcattagtagttatttaaattggtatcagcagaaaccagggaaagcccctaagctcctgatgtatgctgcatccagtttgcaaagtggggtcccatcaaggttcagtggcagtggatctgggacagatttcactctcaccatcagcaatctgcaacctgaagattttgcaacctactactgtcaacagagttacagtttgcccgagtacacttttggccaggggaccaaggtggagatcaaa

SEQ ID NO: 3097 - DNA, 330 bp, synthetic construct
  source 1..330: mol_type = other DNA
tcgtatgagctgacacagccaccctcagcgtctgggacccccgggcagagggtcaccatctcttgttctggaagcagctccaacatcggaagtaattctgtaaactggtaccagcaactcccaggaacggcccccaaactcctcatctatagtaataatcagcggccctcaggggtccctgaccgattctctggctccaagtctggcacctcagcctccctggccatcagtgggctccagtctgaggatgaggctgattattactgcgcaacatgggatgacagcctgactggtccggtgttcggcggagggacccaggtgaccgtcctc

SEQ ID NO: 3098 - DNA, 321 bp, synthetic construct
  source 1..321: mol_type = other DNA
gaaatgacactgacgcagtctccaggcaccctgtctttgtctccaggggaaagagccaccctctcctgcagggccagtcagagtgttagcagctacttagcctggtaccaacagaaacctggccaggctcccaggctcctcatctatggtgcatccagcagggccactggcatcccagacaggttcagtggcagtgggtctgggacagacttcactctcaccatcagcagactggagcctgaagattttgcagtgtattactgtcagcagtatggtagctcaccgaggacgttcggccaagggaccaaggtggagatcaaa

SEQ ID NO: 3099 - DNA, 321 bp, synthetic construct
  source 1..321: mol_type = other DNA
gacatcgtgatgacccagtctccatcttccctgtctgcatctgtgggagacagagtcaccatcacttgccgggcaaaccagaccattagcaactatttaaattggtatcagcagaaaccagggaaagcccctaaactcctgatctatgctgcatccagtttgcaaagtggggtcccgtcaaggttcagtggcagtggatctgggacagatttcactctcaccatcagcagtctgcaacctgaagattttgcaatttatttctgtcaacagagttacagttcccctccgacgttcggcctagggaccaaggtggaaatcaaa

SEQ ID NO: 3100 - DNA, 327 bp, synthetic construct
  source 1..327: mol_type = other DNA
agcctgctcctgactcagcctgcctccgtgtctgggtctcctggacagtcgatcaccatctcctgcactggagccagcagtgacgttggtgcttatatctatgtctcctggtaccaacagcacccaggcaaagcccccaaactcatgatttatgaggtcactaatcggccctcaggggtttctgatcgcttctctggctccaagtctggcaacacggcctccctgaccatctctgggctccaggctgaggacgaggctgattattactgcagctcatatacaagcagcagcgcggtattcggcggagggaccaagctcaccgtccta

SEQ ID NO: 3101 - DNA, 339 bp, synthetic construct
  source 1..339: mol_type = other DNA
gacatccagatgacccagtctccagactccctggctgtgtctctgggcgagagggccaccatcaagtgcatgtccagccagagtgtcttagacagctccaacgataagaacttcttagcttggtatcagcagaaaccaggacagcctcctaagttgttcatttactgggcatctacccggaaatccggggtccctgaccgattcagtggcagcgggtccgggacagatttcactctcacaatcagcagcctgcaggctgaagatgtggcagtttattactgtcagcaatattatagaactcctctcactttcggcggagggaccaaggtggaaatcaaa

SEQ ID NO: 3102 - DNA, 321 bp, synthetic construct
  source 1..321: mol_type = other DNA
gacatccagatgacccagtctccatcctccctgtctgcgtctgtaggagacagagtcgccatcacttgccaggcgagtcaggacattaataagtatttagcttggtatcagcagaaagcagggagagcccctaagctcctgatctacgatgcctccattttggaaacaggggtcccatcaaggttcagtggaagtggatctgggacacattttactttgaccatcaacagcctgcagactgaagatattgcaacatattactgtcaacagtttgataatgtcccgtacacttttggccaggggaccaaggtggatatcaaa

SEQ ID NO: 3103 - DNA, 324 bp, synthetic construct
  source 1..324: mol_type = other DNA
gacatccaggtgacccagtctccagccaccctgtctttgtctccaggggaaagagccaccctctcctgcagggccagtcagagtgttagcagttacttagcctggtaccaacacaaacctggccaggctcccaggctcctcatctatgatgcatccaacagggccactggcatcccagccaggttcagtggcagtgggtctgggacagacttcactctcaccatcagcagcctagagcctgaagattttgcagtttattactgtcagctacgtagcaactggcctccattcactttcggccctgggaccaaggtggaaatcaaa

SEQ ID NO: 3104 - DNA, 321 bp, synthetic construct
  source 1..321: mol_type = other DNA
gatattgtgatgacccagtctccgtcctccctgtctgcttctgtgggagacagagtctccatcacttgccgggcaagtcagaccgtaagaagttttttaaattggtatcagcagaaaccagggaaagcccctaaactcctggtctttactgcacccactgtggaaggtggagtccccccgaggttcagtgccactggatctggcacagatttcactctctccatcagcggtctacaacctgaggattttgcaacttacttctgtcaacagagttacagtatcccgtacacttttggccaggggaccaagctggagatcaaa

SEQ ID NO: 3105 - DNA, 321 bp, synthetic construct
  source 1..321: mol_type = other DNA
gacatccagatgacccagtctccatcctccctgtctgcatctgtaggagacagagtaaccatcacttgccaggcgagtcaggacattagcgactatctaaattggtatcagcagaaaccagggaaagcccctaaactcctgatctacgatgcattgaatttgaaatcaggggtcccctcaaggttcagtggaagtggatctgggacagattttactttcaccatcagcagcctgcagcctgaagatattgcaacatattactgtcaacagtacaataatttcccgtacacttttggccaggggaccaaggtggaaatcaaa

SEQ ID NO: 3106 - DNA, 333 bp, synthetic construct
  source 1..333: mol_type = other DNA
cagtctgtggtgacgcagccgccctcagtgtctggggccctagggcagagggtcaccatctcctgcactgggaccaactccaacatcggggcaggttatgatgtacactggtaccagcagcttccaggaacagcccccaaactcctcatctatgataatagtaatcggccctcaggggtccctgaccgattctctggctccaagtctgacacctcagcctccctggccatcactgggctccaggctgaggatgaggctgattattactgccagtcctatgacagcagcctgattggttctatcttcgggactgggaccaagctcaccgtccta

SEQ ID NO: 3107 - DNA, 330 bp, synthetic construct
  source 1..330: mol_type = other DNA
cagcctgtgctgactcagcccccctccgcgtccgggtctcctggacagtcagtcaccatctcctgcactggaaccagcagtgacgttggtgctcataactatgtctcctggtaccaacagtacccagacaaagcccccaaactcatgatttatgaggtcaataagcggccctcaggggtccctgatcgcttctctggctccaagtctggcgacacggcctccctgaccgtctctggactccaggctgaggatgaggctgattattattgcagctcatatgcaggcagcaacaattgggtgttcggcggagggaccaagctcaccgtccta

SEQ ID NO: 3108 - DNA, 327 bp, synthetic construct
  source 1..327: mol_type = other DNA
gaaattgcactgacgcagtctccaggcaccctgtctttgtctccaggggaaagagccaccctctcctgcagggccagtcagagtgttagcagcaactacttagcctggtaccagcagaaacctggccaggctcccaggctcctcatctatggtgcatccagcagggccactggcatcccagacaggttcagtggcggtgggtctgggacagacttcactctcaccatcagcagactggagcctgaagattttgcagtgtattactgtcagcattatgggagctcacctccgtacacttttggccaggggaccaaggtggaaatcaaa

SEQ ID NO: 3109 - DNA, 333 bp, synthetic construct
  source 1..333: mol_type = other DNA
cagtctgtcgtgacgcagccgccctcagtgtctggggccccagggcagagggtcaccatctcctgcactgggaccaactccaacatcggggcaggttatgatgtccactggtaccagcaacttccaggaacagcccccaaactcctcatctatgatatcaacaatcggccctcaggggtccctgaccgattctctggctccaagtctgacacctcagcctccctggccatcactgggctccaggctgaggatgaggctgattatttctgccagtcctatgacagcggcctgactagtcctgtcttcggaactgggaccaagctcaccgtccta

SEQ ID NO: 3110 - DNA, 324 bp, synthetic construct
  source 1..324: mol_type = other DNA
gaaatccagttgacccagtctccatcctccctgtctgcatctgtcggagacagagtcaccatcacttgccgggcgagtcagggcattagcaattctttagcctggtatcaacagataccaggtaaagcccctaagctcctactctatgctgcatccatattggaaagtggggtcccatccaggttcaggggcagtggctctgggacggatttcactctcaccatcagcagcctgcagcctgaagattttgcaacttattactgtcaacagtattatagttccctcgggcgcactttcggcggagggaccaaggtggaaatcaaa

SEQ ID NO: 3111 - DNA, 333 bp, synthetic construct
  source 1..333: mol_type = other DNA
cagtctgtcttgacgcagccgccctcagtgtctggggccccagggcagagggtcaccatctcctgcactgggagcaactccaacatcggggcaggttatgatgtgcactggtaccagcagcttccaggaagagcccccaaactcctcatctatgttaacaacaatcgaccctcaggggtccctgaccgattctctggctccaagtctgacacctcagcctccctggccatcactgggctccaggctgaggatgaggctgactattactgccagtcctatgacagcagcctgagtgcctcggttttcggcggagggaccaagctcaccgtccta

SEQ ID NO: 3112 - DNA, 330 bp, synthetic construct
  source 1..330: mol_type = other DNA
cagcctgtgctgactcagcctgcctccgtgtctgggtctcctggacagtcgatcaccatcccctgcactggaaccagcagtgacgttggtggttataattatgtctcctggtaccaacagcacccaggcaaagtccccaaactcatgatttatgaggtcagtaatcggccctcaggggtttctaatcgcttctctggctccaagtctggcagcacggcctccctgaccatctctgggctccagtctgaggacgaggctgattattattgcagctcatatacaagtagcgactcttgggtgttcggcggagggaccaagctcaccgtccta

SEQ ID NO: 3113 - DNA, 324 bp, synthetic construct
  source 1..324: mol_type = other DNA
tcgtatgagctgactcagccaccctcggtgtcagtggccccaggacagacggccaggattacctgtgggggaagcaacattggaagtaaaagtgtgcactggtaccagcagaagccaggccaggcccctgtgctggtcgtctatgatgatagcgaccggccctcagggatccctgagcgattctctggctccaactctggggacacggccaccctgaccatcagcagggtcgaagccggggatgaggccgactattactgtcaggtgtgggatagtagtagtgatcattgggtgttcggcggagggaccaagctcaccgtccta

SEQ ID NO: 3114 - DNA, 324 bp, synthetic construct
  source 1..324: mol_type = other DNA
gacatccggatgacccagtctccatcctccctgtctgcatctgtaggagacagcgtcaccatcacttgccgggcaagtcagagcattaccagctatttacattggtatcagcagaaaccagggaaagcccctaagctcctgatctatgctgcatccagtttgcaaagtggggtcccatcaaggttcagtggcagtggatctgggacagatttcactctcaccatcaccagtctgaaacctgaagattttgcaacttactactgtctacagacttacagtacccattcgtggacgttcggccaagggaccaaggtggaaatcaaa

SEQ ID NO: 3115 - DNA, 324 bp, synthetic construct
  source 1..324: mol_type = other DNA
gacatcctgatgacccagtctccatcctccctgtctgcatctgttggagacagagtcaccatcacttgccgggcaagtcagagcattaaccactatttaaattggtatcagcagaagccagggaaggcccccaagctcctgatctctgctgcatccagtttgcaaagtggggtcccatcaaggttcggtggcagtggatctgagacagatttcactctcaccatcagcagtctggaacctgaagattttgcaacttactactgtcaacagagttacagtaccccccatgggagttttggccaggggaccaaggtggaaatcaaa

SEQ ID NO: 3116 - DNA, 324 bp, synthetic construct
  source 1..324: mol_type = other DNA
gaaatcgtgttgacccagtctccatcctcgctgtctgcaactgtaggagacagagtcaccatcacttgccgggcaagtcagagcgttggcaggtatttaaattggtatcagcagaaaccagggaaagcccctaaactcctgatctatgctgcatccaatttgcaaagtggggtcccgtcaaggttcagtggcagtggatctgggacagatttcactctcaccatcagcagtctgcaacctgaagattttgcaagttactactgtcaacagagttacacgacccacatgtacacttttggccaggggaccaaggtggagatcaaa

SEQ ID NO: 3117 - DNA, 324 bp, synthetic construct
  source 1..324: mol_type = other DNA
gacatccagatgacccagtctccatcctccctgtctgcatctgtcggagacagagtcaccatcacttgccgggcgagtcagggcattagcaattctttagcctggtatcaacaactaccagggaaagcccctaaactcctgctctatgctgcatccatattggaaagtggggtcccatccaggttcaggggcagtggttctgggacggatttcactctcaccatcagcagcctgcagcctgaagattttgcaacttattactgtcaacagtattatagttccctcgggcgcactttcggcggagggaccaaggtggagatcaaa

SEQ ID NO: 3118 - DNA, 321 bp, synthetic construct
  source 1..321: mol_type = other DNA
gacatccagatgacccagtctccatcctccctgtctgcatctgtaggagacagcgtcaccatcacttgccaggcgagtcaggacattaacaagtatttaaattggtatcagcagaaaccagggaaagcccctaagctcctgatctacgatgcatccaatttggaaacaggggtcccatcaaggttcagtggaagtggatctgggagacattttactttcaccatcagcagcctgcagcctgaagatattggaacatattactgtcaccagtatgataatctccctaggacgttcggccaagggaccaaggtggaaatcaaa

SEQ ID NO: 3119 - DNA, 339 bp, synthetic construct
  source 1..339: mol_type = other DNA
gacatcccgatgacccagtctccagattccctggctgtgtctctgggcgagagggccaccatcaactgcaggtccagccagagtgttttgtacagctccaacgatcagaactacttagcttggtaccagcagaaaccaggacagcctcctaagttgctcatttactgggcatctacccgggaatccggggtccctgaccgattcagtggcagcgggtctgggacacatttcactctcaccatcagcagcctgcaggctgaagatgtggcagtttattactgtcagcaatattatagtagtcctcccactttcggccctgggaccaaggtggaaatcaaa

SEQ ID NO: 3120 - DNA, 321 bp, synthetic construct
  source 1..321: mol_type = other DNA
gaaatccagatgacccagtctccatcctccctgtctgcatatgtaggagacagagtcaccatcacttgccgggcaagtcagagcattagcagctatttgaattggtatcagcagaaaccagggaaagcccctaaactcctgatctatcatgcactcagtttgcaaagtggggtcccatcaaggttcagtggcagtggatctgggacagatttcactctcaccatcagcagtctgcaacctgaagattttgcaacttactactgtcaacagagttacactaccccgtacacttttggccaggggaccaaggtggatatcaaa

SEQ ID NO: 3121 - DNA, 339 bp, synthetic construct
  source 1..339: mol_type = other DNA
gacatccagttgacccagactccagattccctggctgtgtctctgggcgagagggccaccatcaactgcaggtccagccagagtgttttgtacagctccaacgatcagaactacttagcttggtaccagcagaaaccaggacagcctcctaagttgctcatttactgggcatctacccgggaatccggggtccctgaccgattcagtggcagcgggtctgggacacatttcactctcaccatcagcagcctgcaggctgaagatgtggcagtttattactgtcagcaatattatagtagtcctcccactttcggccctgggaccaaagtggatatcaaa

SEQ ID NO: 3122 - DNA, 324 bp, synthetic construct
  source 1..324: mol_type = other DNA
gaaatcgagatgacccagtctccatccttcctgtctgcatctgtaggagacagagtcaccatcacttgccgggccagtcagggcattagcagttttttagcctggtatcagcaaaaaccagggaaagcccctaagctcctgatctatggtgcatccactttgcaaagtggggtcccattaaggttcagcggcagtggatctgggacagaattcactctcacaatcagcagcctgcagcctgaagattttgcaacttattactgtcaacaccttgatagttaccctcggtacacttttggccaggggaccaaggtggaaatcaaa

SEQ ID NO: 3123 - DNA, 327 bp, synthetic construct
  source 1..327: mol_type = other DNA
gaaattgtattgacgcagtctccagccaccctgtctttgtctccaggggaaagagccaccctctcctgcagggccagtcagagtgttagcagctacttagcctggtaccaacagaaacctggccaggctcccaggctcctcatctatgatgcatccaacagggccactggcatcccagccaggttcagtggcagtgggtctgggacagacttcactctcaccatcagcagcctagagcctgaagattttgcagtttattactgtcagcagcgtagcaactggcctccggggctcactttcggcggagggaccaaagtggatatcaaa

SEQ ID NO: 3124 - DNA, 330 bp, synthetic construct
  source 1..330: mol_type = other DNA
cagcctgtgctgactcagcctgcctccgtgtctgggtctcctggacagtcgatcaccatctcctgcactggaaccagcagtgacattggtgattataactatgtctcctggtaccaacaacacccaggcaaagcccccaaactcatggtctatgatgtcactaatcggccctcaggggtttcttatcgcttctctggcttcaagtctggcaacacggcctccctgaccatctctggactccaggctgaggacgaggctgattattactgcagctcatatacaagcagcgacacatatgtcttcggaactgggaccaagctcaccgtccta

SEQ ID NO: 3125 - DNA, 324 bp, synthetic construct
  source 1..324: mol_type = other DNA
gacatccagatgacccagtctccatcctccctgtctgcatctgtcggagacagagtcaccatcacttgccgggcgagtcagggcattagcaattctttagcctggtatcaacacataccagggaaagcccctaagctcctactctatgctgcatccatattggaaagtggggtcccatccaggttcaggggcagtggctctgggacggatttcactctcaccatcagcagcctgcagcctgaagattttgcaagttattactgtcaacagtattacagttccctcgggcgcactttcggcggagggaccaaggtggaaatcaaa

SEQ ID NO: 3126 - DNA, 330 bp, synthetic construct
  source 1..330: mol_type = other DNA
cagccagtgctgactcagcccccctcggtgtcagtggccccgggacagacggccaggattacctgtgggggagacaacattgggagcaaaggtgttcactggtaccagcagaagccaggccaggcccctgtgttggtcgtttatgatgatagcgaccggccctcagggatccctgagcgattctttggctccaactcggggaacacggccaccctgaccatcagcagggtcgaagccggggatgaggccgactacttctgtcaggtgtgggatagtacgagtgatcatccggcttatgtcttcggaactgggaccaagctcaccgtccta

SEQ ID NO: 3127 - DNA, 324 bp, synthetic construct
  source 1..324: mol_type = other DNA
cagtctgagctgactcagccaccctcggtgtcagtggccccacgacagacggccaggattacctgtgggggaaacaacattggaagtaatagtgtgcattggtaccagcagaggccaggccaggcccctgtgctggtcgtctatgatgatagcggccggccctcagggatccctgagcgattttctggctccaagtctgggaacacggccaccctgaccatcagcagggtcgaagccggggatgaggccgactattactgtcaggtgtgggatagtagtagtgatcctgtggttttcggcggagggaccaagctcaccgtccta

SEQ ID NO: 3128 - DNA, 324 bp, synthetic construct
  source 1..324: mol_type = other DNA
cagcctgtcctgactcagcctgcctccgtgtctgggtctcctggacagtcgatcaccatctcctgcactggaaccagcagtgacgttggtagttatgactatgtctcctggtaccaactacacccaggcaaagcccccaaactcatgatttatgaggtcaataatcggccctcagggatttctactcgcttctctggctccaagtctggcaacacggcctccctgaccatctctgggctccaggctgaggacgaggctgattattactgcagctcatatacaagcaacatcgtcttcggaactgggaccaaggtcaccgtccta

SEQ ID NO: 3129 - DNA, 342 bp, synthetic construct
  source 1..342: mol_type = other DNA
gacattgtgatgacgcagtctccactctccctgcccgtcacccctggagagccggcctccatctcctgcaggtctaatcagagcctcctgcatagtcatggatacatctatttggattggtacctgcataagccagggcagtctccgcagctcctgatctatttgggttctaatcgggcctccggggtccctgacaggttcagtggcagtggatcaggcacagattttacactgagtatcagcagagtggagcctgaggatgttggggtttattactgcgtgcaagctctacagactcccttcatgtacacttttggccaggggaccaaggtggagatcaaa

SEQ ID NO: 3130 - DNA, 333 bp, synthetic construct
  source 1..333: mol_type = other DNA
cagtctgtgttgacgcagccgccctcagtgtctggggccccagggcagagggtcaccatctcctgcactgggagcaactccaacatcggggcaggttatgatgttcactggtatcagcagcttccaggaacagcccccaaactcctcatctatgacaacaacaatcggccctcaggggtccctgaccgattctctggctccaagtctgacacctcagcctccctggccatcactgggctccaggctgaggatgaggctgattattactgccagtcctatgacagcagcctgagtgattcggtgttcggcggaggcacccagctgaccgtcctc

SEQ ID NO: 3131 - DNA, 321 bp, synthetic construct
  source 1..321: mol_type = other DNA
gaaatccagatgacccagactccatcctccctgtctgcatctgtaggagacagagtcaccatcacttgccaggcgagtcaggacattagcaagtttttaaattggtatcagcagaaaccagggaaagcccctaagctcctgatctacgatgcatctaatctggaaacaggggtcccatcaaggttcagtggaagtggatctgggacaggttttactttcaccatcagcagcctgcagcctgaagatattgcaacgtattactgtcaacagtatgataatcttccggttactttcggcggagggaccaaggtggagatcaaa

SEQ ID NO: 3132 - DNA, 342 bp, synthetic construct
  source 1..342: mol_type = other DNA
cagtctgtgctgacgcagccgccctcagtgtctggggccccagggcagagggtcaccatctcctgcactgggagcaggtccaacatcggggcaggttatgatgtacactggtaccagcagcttccaggaacagtccccaaactcctcatctatggcaacagcaatcggccctcaggggtccctgaccgattctctggctccaagtctggctcctcagcttccctggccatcactgggctccaggctgaggatgaggctgtttattactgccagtcctatgacagcagcctgactttttcggctttttatgtcttcggaactgggaccaagctcaccgtccta

SEQ ID NO: 3133 - DNA, 327 bp, synthetic construct
  source 1..327: mol_type = other DNA
gacatcgtgatgacccagtctccatcctccctgtctgcctctgtaggagccagagtcaccatcacttgccgggcaagtcagagcattagcagatatttaaattggtatcagcagaaaccagggaaagcccctaagctcctgatccatactgcatccactttgcaaactggggtcccatcaaggttcagtggcagtgggtctgggacagatttcactctcaccatcagcaatctgcaacctgaagattttgcaacttactactgtcaacagagttacactacccctccattgtggacgttcggccaggggaccaaggtggaaatcaaa

SEQ ID NO: 3134 - DNA, 333 bp, synthetic construct
  source 1..333: mol_type = other DNA
cagtctgtggtgacgcagccgccctcagtgtctggggccccagggcagagggtcaccatctcctgcactgggagcagctccagcatcggggcaggttatgatgtacactggtaccagcagcttccaggaacagcccccaaactcctcatctatgctaacagcaatcggccctcaggggtccctgaccgattttctggctccaagtctggcacctcagcctccctggccatcactgggttccaggctgaggatgaggatgattattattgccagtcctatgccagcagcgtgagtggtgtgatattcggcggagggaccaagctgaccgtccta

SEQ ID NO: 3135 - DNA, 324 bp, synthetic construct
  source 1..324: mol_type = other DNA
gacatccagatgacccagtctccatccttcctgtctgcatctgtaggagacagagtcaccatcacttgccgggccagtcagggcattagcaattatttagcctggtatcagcaaaaaccagggaaagcccctaagctcctgatctatgctgcatccactttgcaaagtggggtcccatcaaggttcagcggcggtggatctgggacagaattcactctcacaatcagcagcctgcagcctgaagattttgcaacttattactgtcaacagcttaatagtaacccccctatcaccttcggccaagggacacgactggagattaaa

SEQ ID NO: 3136 - DNA, 327 bp, synthetic construct
  source 1..327: mol_type = other DNA
agccatgtgctgactcagccaccctcggtgtcagtggccccaggacagacggccaggattacctgtgggggaaacaacattggaagtaaaaatgtgcactggtaccagcagaagccaggccaggcccctgaactggtcgtctatgacgatagcgaccggccctcagggatccctgagcgattctctggctccaactctgggaacacggccaccctgaccatcagcagggtcgaagccggggatgaggccgactacttctgtcaggtgtgggatagtactactgatcttctttatgtcttcggaactgggaccaaggtcaccgtccta

SEQ ID NO: 3137 - DNA, 330 bp, synthetic construct
  source 1..330: mol_type = other DNA
cagtctgtgctgactcagcccccctcggtgtctgaagcccccaggcagagggtcaccatctcctgttctggaagcagctccaacatcggaaataatgctgtaaactggtaccagcagttcccaggaaaggctcccaaactcctcatctattatgatgatctgctgccctcaggggtctctgaccgattctctggctccaagtctggcacctcagcctccctggccatcagtgggctccagtctgaggatgaggctgattattactgtgcagcatgggatgacaggctcaatggtgtgatcttcggcggggggaccaagctcaccgtccta

SEQ ID NO: 3138 - DNA, 318 bp, synthetic construct
  source 1..318: mol_type = other DNA
gacatccagatgacccagtctccttccaccctgtctgcatctgtaggagacagagtcaccatcacttgccgggccagtcagagtattagtagctggttggcctggtatcagcagaagccagggaaagcccctaagctcctgatctataagtcatctagtttagaaagtggggtcccatcaaggttcagcggcagtggatctgggacagaattcactctcaccatcagcagcctgcagcctgatgattttgcaacttattactgccaacagtataatagttattacacttttggccaggggaccaaggtggaaatcaaa

SEQ ID NO: 3139 - DNA, 324 bp, synthetic construct
  source 1..324: mol_type = other DNA
gaaatgacaatgacgcagtctccaggcaccctgtctttgtctccaggggaaagagccaccctctcctgcagggccagtgagagcgttagcagcgagtacctagcctggcaccagcagagacctggccaggctcccaggctcctcatctatggtgcatccagcaggcccacgggcatcccagacaggttcagtggcagtgggtctgggacagacttcactctcaccatcagcagactggagcctgaagattttgcagtgtattactgtcaccagtttgctagcgcaccgatcaccttcggccaagggacacgactggagattaaa

SEQ ID NO: 3140 - DNA, 321 bp, synthetic construct
  source 1..321: mol_type = other DNA
gaaacgacactcacgcagtctccaggcaccctggttttgtctccaggggaaagagccaccctctcctgcagggccagtgagagtgttcggagcagctatttagcctggtaccagcagagtcctggccagactcccaggctcctcatctatggtgcatccagggccactggcatcccagacaggttcagtggtagtgggtctgggacagacttcactctcaccatcaccagattggagcctgaagattttgcagtgtattactgtcagcagtatgctaggtcaccgtggacgttcggccaagggaccaaggtggagatcaaa

SEQ ID NO: 3141 - DNA, 333 bp, synthetic construct
  source 1..333: mol_type = other DNA
aattttatgctgactcagccccactctgtgtcggagtctccggggaagacggtaaccatctcctgcacccgcagtagtggcagccttgccaccaactatgtgcagtggtaccagctgcgcccgggcagttcccccagcactgtgatctatgaggataaccaaagaccctctggggtccctgatcggttctctggctccatcgacagctcctccaactctgcctccctcaccatctctggactgaagactgaggacgaggctgactactactgtcagtcttgggatagcagcgctctttgggtgttcggcggagggaccaagctcaccgtccta

SEQ ID NO: 3142 - DNA, 321 bp, synthetic construct
  source 1..321: mol_type = other DNA
gaaattgcgatgacccagtctccaggcaccctgtctttgtctccagggcaaagagccaccctctcctgcagggccagtgagagtgttagcagcagctacttagcctggtaccagcagaaacctggccaggctcccaggctcctcatctatggtgcatccagcagggccactggcatcccagacaggttcagtggcagtgggtctgggacagacttcactctcaccatcagcagactggagcctgaagattatgcagtatattactgtcagcagtatggtagctcacctgttttcggccctgggaccaaagtggaaatcaaa

SEQ ID NO: 3143 - DNA, 321 bp, synthetic construct
  source 1..321: mol_type = other DNA
gacatcccgatgacccagtctccatcctccctgtctgcttctgtaggagacagcgtcaccatcacttgccgggcaagtcagagcattagcaactttttaaattggtatcagcagaaaccagggagagcccctaacctcctgatctacattgcatccaatttgcaacgtggggtcccatcaaggttcagtggcagtgggtctgggacagatttcactctcaccatcagcagtctgcaacctgaagattttgcaacttactactgtcaacagagttacactactcctccgactttcggcggagggaccaaggtggagatcaaa

SEQ ID NO: 3144 - DNA, 333 bp, synthetic construct
  source 1..333: mol_type = other DNA
cagtctgtcttgacgcagccgccctcagtgtctggggccccagggcagagggtcaccatctcctgcactgggagcaactccaacatcggagcaggttatgatatacactggtaccagcagcttccaggaacggcccccaaactcctcatctatggtaacaccaatcggccctcaggggtccctgaccgattctctggctccaagtctgacacctcagcctccctggccatcactgggctccaggctgaggatgaggctgattattactgccagtcttatgacagcagcctgagtggtgtggtattcggcggagggaccaaggtgaccgtccta

SEQ ID NO: 3145 - DNA, 330 bp, synthetic construct
  source 1..330: mol_type = other DNA
cagtctgcgctgactcagcctcgctcagtgtccgggtctcctggacagtcagtcaccatctcctgcactggaaccagcagtgatgttggtggttataactatgtctcctggtaccaacaacacccaggcaaagcccccaaactcatgatttatgatgtcagtaagcggccctcaggggtccctgatcgcttctctggctccaagtctggcaacacggcctccctgaccatgtctgggctccaggctgaggatgaggctgattattactgctgctcatatgtaggcagctatagttatgtcttcggaactgggaccaagctcaccgtccta

SEQ ID NO: 3146 - DNA, 321 bp, synthetic construct
  source 1..321: mol_type = other DNA
gaaattgtgatgacgcagtctccagccaccctgtctttgtctccaggggaaagagccaccctctcctgcagggccagtcagagtgttagcagctacttagcctggtaccaacagaaacctggccaggctcccaggctcctcatctatgatgcttccaacagggccactggcatcccagccaggttcactggcagtgggtctgggacagacttcactctcaccatcagcagcctagagcctgaagattttgcagtttattactgtcagcaacgtatccacccgccattcactttcggccctgggaccaaggtggagatcaaa

SEQ ID NO: 3147 - DNA, 321 bp, synthetic construct
  source 1..321: mol_type = other DNA
gacatccagttgacccagtctccatcctcactgtctgcatctgtaggagacagagtcaccatcacttgtcgggcgagtcagggcattagcaattatttagcctggtttcaacagaaaccagggaaagcccctaagtccctcatctatgatgcatccactttgcaaaatggggtcccatcaaagttcagcggcagtggatctgggacacatttcactctcaccatcagcagcctgcagcctgaagattttgcaacttattactgccaacaatatgatagttacccgctcactttcggcggagggaccaaggtggaaatcaaa

SEQ ID NO: 3148 - DNA, 324 bp, synthetic construct
  source 1..324: mol_type = other DNA
gaaatgcaactcacgcagactccaggcaccctgtctttgtctccaggagaaggagccaccgtctcctgcagggccagtcagagtcttaacagcaagtacttcgcctggtaccagcagaaaccgggccaggctcccaggctcctcatctatgctgcgtccagcagggccactggcatcccagacaggttcagtggcagtgggtatgggacagacttcactctcaccatcaccagactggagcctgaagattttgcagtttatttctgtcagcaatatggttactcaccggccactttcggcggagggaccaaagtggatatcaaa

SEQ ID NO: 3149 - DNA, 324 bp, synthetic construct
  source 1..324: mol_type = other DNA
gacatccagatgacccagtctccatcctccctgtctgcctctgtaggagacagagtcaccatcacttgccgggcaagtcagagcattagcagctttttaaattggtatcagcagaaaccggggaaagcccctaagctcctgatttatgctgcatccagtttgcaaagtggggtcccatcaagggtcagtggcagtggatctgggacagaattcactctcaccatcagcagcctgcaacctgacgattttgcaacttactactgtcaacagagttacagtagccccatgtacacttttggccaggggaccaaggtggagatcaaa

SEQ ID NO: 3150 - DNA, 321 bp, synthetic construct
  source 1..321: mol_type = other DNA
gaaatcccgatgacccagtctccatcctccctgtctgcatctgtaggagacacagtcaccatcacttgccgggcaagtcagagcattagcacctttttaaattggtatcagcagaaaccagggaaagcccctaacctcctcgtctatgctgcatccaatttgcaaagtggggtcccatcaaggttcagtggcagtggatctgggacagatttcactctcaccatcagcagtctgcaacctgaagattttgcaacttactactgtcaacagagttacagttccccgtgcagttttggccaggggaccaaggtggaaatcaaa

SEQ ID NO: 3151 - DNA, 333 bp, synthetic construct
  source 1..333: mol_type = other DNA
aatcttatgctgactcagccccactctgtgtcggcgtctccggggaagacggtaaccatctcctgcacccgcagcggtggcagtattgccagctactatgtgcagtggtaccagcaccgcccgggcagtgcccccaccattgtgatttatgaggataaccaaagaccctctggggtccctgatcggttctctggctccatcgacagctcctccaactccgcctccctcaccatctctggactgaagactgaggacgaggctgactactactgtcactcttatgacagcagcaatcctgtggtcttcggcggagggaccaagctcaccgtccta

SEQ ID NO: 3152 - DNA, 324 bp, synthetic construct
  source 1..324: mol_type = other DNA
cagcctgtgctgactcagcctcgctcagtgtccgggtctcctggacagtcagtcaccatctcctgcactggaaccaccagtgatgttggtagttataactatgtctcctggtaccccccgcacccaggcaaagcccccaaactcatgatttatgatgtcagtaagcggccctcaggggtccctgatcgcttctctggctccaagtctggcaacacggcctccctgaccatctctgggctccaggctgaggatgaggctgattattactgctgttcatatgcaggcacctacatcttcggaactgggaccaagctcaccgtccta

SEQ ID NO: 3153 - DNA, 321 bp, synthetic construct
  source 1..321: mol_type = other DNA
gaaatccaattgacccagtctccatcctccctgtctgcatctgtaggagacagagtcaccatcacttgccaggcgagtcaggacattaacaagtatttaaattggtatcagcagaaaccagggaaagcccctaagctcctgatctacggtgcaaccaatttggagacaggggtcccatcaaggttcagtggaagtggatctgggacagattttagtttcaccatcaacagcctgcagcctgaagatattgcaacatattactgtcaatattatgataatccccctccgactttcggccctgggaccaaggtggagatcaaa

SEQ ID NO: 3154 - DNA, 333 bp, synthetic construct
  source 1..333: mol_type = other DNA
cagtctgtgttgacgcagccgccctcagtgtctggggccccagggcagagggtcaccatctcctgcactgggagcaactccaacatcggagcaggttatgatatacactggtaccagcagcttccaggaacagcccccaaactcctcatctatgctaacaccaatcggccctcaggggtccctgaccgattctctggctccaagtctgacacctcagcctccctggccatcactgggctccaggctgaggatgaggctgattattactgccagtcttatgacagcagcctgagtggtgtgctattcggcggagggaccaaggtcaccgtccta

SEQ ID NO: 3155 - DNA, 333 bp, synthetic construct
  source 1..333: mol_type = other DNA
cagcctgtgttgacgcagccgccctcagtgtctgcggccccagggcagagggtcaccatctcctgcactgggagcaactccaacatcggggcaggttatgatgtacactggtaccagcaacttccaggaacagcccccaaactcctcatctatgataacaacaatcggccctcaggggtccctgaccgattctctggctccaagtctgacacctcagcctccctggccatcactgggctccaggctgaggatgaggctgattattactgccagtcctatgacagcagcctgagtgattctgtcttcggatatgggaccaagctgaccgtccta

SEQ ID NO: 3156 - DNA, 324 bp, synthetic construct
  source 1..324: mol_type = other DNA
gaaattgtgttgacgcagtctccagccacactgtctgtgtctccaggggaaagagcctccctctcctgcagggccagtcagagtattaacagcgacttagcctggttccagcagaaacctggccaggctcccaggctcctcatgtttggtgcgtctgccagggccgctggtatcccagccaggttcggtggcagtgggtctgggacagagttcactctcaccatcagcggcctgcagtctgaagattttgcagtttattactgtctgcagtatcataacaggcctccgtggacgttcggccaagggaccaaggtggaaatcaaa

SEQ ID NO: 3157 - DNA, 333 bp, synthetic construct
  source 1..333: mol_type = other DNA
cagtctgtgttgacgcagccgccctcagtgtctggggccccagggcagagggtcacaatctcctgcactgggagcagctccaacatcggggcaggttatgatgtacactggtaccagcagcttccaggaacagcccccaaactcctcatttatggtaacacccatcggccctcaggggtccctgaccgattctctggctccaagtctggcacctcagcctccctggccatcactggactccaggctgaggatgaggctgattattactgccagtcctatgacagcagcctgattggttcggtgttcggcggagggaccaagctcaccgtccta

SEQ ID NO: 3158 - DNA, 327 bp, synthetic construct
  source 1..327: mol_type = other DNA
gaaatgacaatgacgcagtctccagccaccctgtctgtgtctccaggggaaagagccaccctctcctgcagggccagtcagagtgttagcaccaacttagcctggtaccagcagaaacctggccaggctcccaggctcctcatctatggtgcatccaccagggccactggtatcccagccaggttcagtggcagtgggtctgggacagagttcactctcaccatcagcagcctgcagtctgaagattttgcagtttattactgtcaacagtatgataactggcctcccacgtggacgttcggccaagggaccaaggtggaaatcaaa

SEQ ID NO: 3159 - DNA, 321 bp, synthetic construct
  source 1..321: mol_type = other DNA
gaaatgacactgacgcagtctccagccaccctgtctgtgtctccaggggagacagtcaccctctcctgcagggccagtcagagtctcagtaataagttagcctggtaccaacagagacctggccaggctcccaccctcctcatccatggtgcttccggcagggccactggtctcccagaccggttcagtggcagtgggtatgggacagagttcactctcaccatccgccgcctgcagtctgaagactttgcagtttattactgtcagcagtatgattcctggcctcggacgttcggccaagggaccaaggtggaaatcaaa

SEQ ID NO: 3160 - DNA, 309 bp, synthetic construct
  source 1..309: mol_type = other DNA
cagtgtctggggccccagggcagagggtcaccatctcctgcactgggagcagctccaacatcggggcaggttatgatgtacactggtaccagcagcttccagcccctagcccccaaactcctcatctatggtaataacaatcggccctcaggggtccctgaccgattctctggctccaagtctggcacctcagcctccctggccgtcactgggctccaggctgaggatgaggctgattattactgccagtcctatgacagcagactgagtggtgtggtatttggcggagggacccagctcaccgtctta

SEQ ID NO: 3161 - DNA, 330 bp, synthetic construct
  source 1..330: mol_type = other DNA
cagtctgtgctgactcagcccccctcggtgtctgaagcccccaggcagagggtcaccatctcctgttctggaagcagctccaacatcggaaaaaatgctgtaaactggtaccagcagctcccagcacaggctcccaaactcctcatctactatgatcatctgttgccctcaggggtctctgaccgattctctggctccaggtctggcacctcagcctccctggccatcagtgggctccagtctgaggatgaggctgattattactgtgcagcatgggatgacagcctgaatggccttgtattcggcggagggaccaagctcaccgtccta

SEQ ID NO: 3162 - DNA, 330 bp, synthetic construct
  source 1..330: mol_type = other DNA
cagcatgagctgactcagccaccctcggtgtctgaagcccccaggcagagggtcaccatctcctgttctggaagcagcgccaacatcggacataatgctgtgaactggtaccagcagctcccaggaaaggctcccaagctcctcatctattatgatgatctgctgccctcaggggtctctgaccgattctctggctccaagtctggcacctcagcctccctggccatcagtgggctccagtctgaggatgaggctgattattactgtgcatcatgggatgacaggctgaatggtccggtgttcggcggagggaccaagctgaccgtccta

SEQ ID NO: 3163 - DNA, 339 bp, synthetic construct
  source 1..339: mol_type = other DNA
acaatcgtgatgacgcagtctccagattccgtggctgtgtctctgggcgagagggccaccatcaactgcaggtccagccagagtgttttatacagctccaacaataagaattacttaacttggtaccagcaaaaaccaggacagcctcctaagttactcatttactgggcatctacccgggaatccggggtccctgaccgattcagtggcagcgggtctgggacgcatttcactctcaccatcagcagcctgcaggctgaagatgtggcggtttattattgtcagcagtattatagtagtcctcccactttcggccctgggaccaaggtggagatcaaa

SEQ ID NO: 3164 - DNA, 321 bp, synthetic construct
  source 1..321: mol_type = other DNA
gaaatccaaatgacgcagtctccatcctccctgtctgcatctgtaggagacagagtcaccatcacttgccgggcaagtcagagcattagcagctatttaaattggtatcagcagaaaccagggaaagcccctaagctcctgattaatgcggcatccagtttgcaaagtggggtcccatcaaggttcagtggcagtggatctgggacagatttcactctcaccatcagcagtctgcaacctgaagattttgcaacttaccactgtcaacagggatacagtaccccgtacacttttggccaggggaccaaggtggaaatcaaa

SEQ ID NO: 3165 - DNA, 324 bp, synthetic construct
  source 1..324: mol_type = other DNA
tcgtatgtgctgactcagccaccctcggtgtcagtggccccaggacagacggccaggattacgtgtgggggaaataacattggaagtaaaagtgtgcactggtaccagcagaagcccggccaggcccctgtgctggtcgtctatgataatagcgaccggccctcagggatccctgcgcgattctctggctccaattctgggaacacggccaccctgaccatcagcagggtcgaagtcggggatgaggccgactatcactgtcacgtgtgggatagtagtagtgatcttcatgtcttcggaactgggacccagctcaccgtccta

SEQ ID NO: 3166 - DNA, 333 bp, synthetic construct
  source 1..333: mol_type = other DNA
cagtctgtcgtgacgcagccgccctcagtgtctggggccccagggcagagggtcaccatctcctgcactgggagcaactccaatatcggggcaggttatgatgtacactggtaccagcagcttccaggaacagcccccaaactcctcatctatgataataacaatcggccctcaggggtccctgaccgattctctggctccaagtctgacacctcagcctccctggccatcactgggctccaggctgaggatgaggctgattattactgccagtcctatgacagcagcctgattggttcgctgttcggcggagggacccagctcaccgtcctc

SEQ ID NO: 3167 - DNA, 333 bp, synthetic construct
  source 1..333: mol_type = other DNA
cagtctgtggtgactcagccgccctcagtgtctggggccccaggtcagagggtcaccatctcctgcgctgggagcaactccaacatcggggcaggttatgatgttcactggtaccagcagcttccaggaacagccccccaactcctcatctatggtaacaccaatcggccctcaggggtccctgaccggttctctggctccaagtctgacacctcagcctccctggccatcactgggctccaggctgaggatgaggccgattattactgccagtcctatgacagcagcctgagtgattcggtgttcggcggagggaccaagctcaccgtccta

SEQ ID NO: 3168 - DNA, 333 bp, synthetic construct
  source 1..333: mol_type = other DNA
cagtctgtgctgactcagcctcgctcagtgtccgggtctcctggacagtcagtcaccatctcctgcactggaaatagcagtgatgttggtgattataattatgtctcctggtaccaacaacaccccggcacagcccccaaactcatgatttatgatgtcactaagcggccctcaggggtccctaatcgcttctctggctccaagtctggcaacacggcctccctgaccatctctgggctccaggctgaggatgaggctgattattcctgctgttcatattcaggaacctacattcctttaatcttcggacctggcacccagctgaccgtcctc

SEQ ID NO: 3169 - DNA, 327 bp, synthetic construct
  source 1..327: mol_type = other DNA
tcgtatgtgctgactcagccaccctcggtgtcagtggccccaggacagacggccaggattacctgtgggggaaacaatattggaagtaaaagtgtgcactggtaccagcagaagccaggccaggcccctgtgctggtcgtctatgatgatagcgaccggccctcagggatccctgagcgattctctggctccaactctggaaacacggccacactgaccatcagcagggtcgaagtcggggatgaggccgactattactgtcaggtgtgggatggtagtagtgatcatttttatgtcttcggaactgggaccaaggtcaccgtccta

SEQ ID NO: 3170 - DNA, 330 bp, synthetic construct
  source 1..330: mol_type = other DNA
gagcctgtgttgactcagcctccctccgcgtccgggtctcctggacagtcagtcaccatctcctgcactagaaccagcaatgacgttggtaattataactatgtctcctggtaccagctgcacccaggcaaagcccccaaagccttgatttatgaggtcaataagcggccctcaggggtccctgatcgcttctctggctccaagtctggcaacacggcctccctgaccatctctgggctccaggctgaggatgaggctgattattactgcagctcacatacagtcaataacaattttgtcttcggagctgggaccaagctcaccgtccta

SEQ ID NO: 3171 - DNA, 327 bp, synthetic construct
  source 1..327: mol_type = other DNA
cagtctgtgctgactcagccaccctcggtgtcagtggccccaggacagacggccagaattacctgtgggggaaacaacattggaagtaaaagtgtgcactggtaccagcagaagccaggccaggcccctgtgctggtcgtcaatgatgatagcgaccggccctcagggatccctgagcgattctctggctccaactctgggaacacggccaccctgaccatcagcagggtcgaagccggggatgaggccgactattactgtcaggtgtgggatagtagtagtgatcttcatgtggtattcggcggagggaccaagctcaccgtccta

SEQ ID NO: 3172 - DNA, 333 bp, synthetic construct
  source 1..333: mol_type = other DNA
tcagctgtgctgactcagccaccctcagtgtctggggccccagggcagaggatcaccatctcctgcactgggagcagctccaacatcggggcaggttatgatgtacactggtaccagcagcttccacgaacagcccccaaactcctcatatatggtaacagcaatcggccctcaggggtccctgacagattctctgggtccaagtctggcacatcagcctccctggccatcactggggtccagggtgaggatgagggtgattattactgccagtcgtatgacagcagcgcgagtggttcggtgttcggcggagggaccaagctcaccgtccta

SEQ ID NO: 3173 - DNA, 321 bp, synthetic construct
  source 1..321: mol_type = other DNA
gacatccagatgacccagtctccatcctccctgtctgcatctgtaggagacagagtcaccatcacttgccaggcgagtcaggacattagcaactatttaaattggtatcagcagaaaccagggaaagcccctaagctcctgatctacgatgcatccaatttggaaacaggggtcccatcaaggttcagtggaagtggatctgggacagaatttactttcaccatcaacagcctgcagcctgaagatattgcaacatattactgtcaacagtatgataatctcccgatcatcttcggccaagggacacgactggagattaaa

SEQ ID NO: 3174 - DNA, 336 bp, synthetic construct
  source 1..336: mol_type = other DNA
cagtatgtggtgacgcagccgccttcagtgtttggggccagagggcagagggtcaccatctcatgcactgagagcagatccaacatcggggcaggttttgatgtacaagggtaccagcaatttccaggcacagcccccaaactcatcatctatggtaacaacattcggccgtcacgggtccatgaccgattgtttggctccaagtgtgacacctcagcctccatggccatcactgggatccagggtgaggatgaggcttattattactgccagtcctatgacagtatgctgagtgacccttatgttttcggaatagggaccaaggtaaccgtctta

SEQ ID NO: 3175 - DNA, 321 bp, synthetic construct
  source 1..321: mol_type = other DNA
gacatccagttgacccagtctccatcctccctgtctgcatctgtaggagacagagtcaccatcacttgtcgggcaagtcacaggattgacaggtatttaaattggtatcagcagaaaccagggcaagcccccaagctcctgatctatgtagcatccactttgcaaagtggggtcccatcaaggttcactggcagtggatctgggacagatttcactctcactatcagcagtctgcaacctgaggattttgcaacttactactgtcaacagagttacactacccctcggactttcggccctgggaccaaggtggaaatcaaa

SEQ ID NO: 3176 - DNA, 330 bp, synthetic construct
  source 1..330: mol_type = other DNA
tcgtatgagctgactcagccaccctcagcgtctgggacccccgggcagagggtcaccatctcttgttctggaagcacctccaacatcgggagtaatactgtaaaatggtaccagcacctcccaggaacggcccccaaactcctcatctatagtgatgatctgcgaccctcaggggtccctgaccgattctctggctccaagtctggcacctcagcctccctggccatcagtgcgctccagtctgaggatgagtctcattattactgtgcaacgtgggatgacactttggctggtccggtgttcggcggaggcacccagctcaccgtccta

SEQ ID NO: 3177 - DNA, 324 bp, synthetic construct
  source 1..324: mol_type = other DNA
tcgtatgtgctgactcagcccccctcagtgtcagtggccccaggaaagacggccagccttacctgtgggggaaacaacattggaactaagagtgtgcactggtaccagcagaagccaggccaggcccctgtgctggtcatctattatgatagcgaccggccctcagggacccctgagcgattctctggctccaactctgggaacacggccaccctgaccatcagcagggtcgaagccggggatgaggccgactattactgtcaggtgtgggatagtaatagtgatcatcgggtcttcggcgaagggaccaaggtgaccgtccta

SEQ ID NO: 3178 - DNA, 333 bp, synthetic construct
  source 1..333: mol_type = other DNA
cagtctgtcgtgacgcagccgccctcagtgtctggggccccagggcagagggtcaccatcccctgcactgggagcagctccaacatcggggcaggttatgatgttcactggtaccagcaggtcccgggaaaagcccccacactcctcatctatcgtaacactcatcggccctcaggggtccctgaccgattctctggctccaggtctggcacctcagcctccctggccatcactggactccaggctgaggatgaggctgattattactgccagtcctatgacagcagcctgagtgattcggtgttcggcggagggaccaaggtcaccgtccta

SEQ ID NO: 3179 - DNA, 324 bp, synthetic construct
  source 1..324: mol_type = other DNA
gaaacgacactcacgcagtctccttcggtgtcagtggccccaggacagacggccaggattacctgtgagggagacaacattggaaggaaaagtgtgcactggtaccagcagaagccagcccaggcccctgtgcttgtcgtctatggtgatggcgaccggccctcagggatccctgagcgactctctggctccacctctgggaacacggccaccctgaccatcagcagggtcgaagccggggatgaggccgactattactgtcaggtgtgggacagtagtagtgatctcgtgctgttcggcggaggcacccagctgaccgtcctc

SEQ ID NO: 3180 - DNA, 333 bp, synthetic construct
  source 1..333: mol_type = other DNA
tcctatgagctgacacagccaccctcggcgtctgggacccccgggcagagggtcaccatctcttgttctggaagcagctccaacatcggaagtaatactgtaaactggtaccagcaactcccaggaacggcccccaaactcctcatctatagtaataatcagcggccctcagggatccctgaccgattctctggctccaagtctggcacctccgcctccctggtcatcagtgggctccagtctgaggatgaggctggttattactgtgcagcatgggatgacagcctgaatggtcgtctactattcggcggagggaccaaggtgaccgtccta

SEQ ID NO: 3181 - DNA, 324 bp, synthetic construct
  source 1..324: mol_type = other DNA
tcctatgagctgactcagccaccctcagcgtctgggacccccgggcagagggtcaccatctcttgttctggaagcagctccaacatcggaagtaattatgtatgctggtaccagcagctcccaggaacggcccccaaactcctcatctatggtgatattcagcggccctcaggggtccctgaccgattctctggctccaagtctggcacctcagcctccctggccatcagtgggctccggtccgaagatgaggctgattattactgtgcaacacgggatgacggccgttgggtgttcggcggagggacccagctgaccgtccta

SEQ ID NO: 3182 - DNA, 321 bp, synthetic construct
  source 1..321: mol_type = other DNA
gacatccagatgacccagtctccatcctccctgtctgcatctgtgggagacagagtcaccatcacttgccgggcaagtcagagcactagcatctatttaaattggtatcagcagaaaccagggaaagcccctaagctcctaatctatgctgcatccactttacaaagtggggtcccatcaaggttcagtggcagtggatctgggacagatttcactctcaccatcagcagtctgcaacctgaagattttgcaacttactactgtcaacagagttacactacccggtggacgttcggccaagggaccaaggtggaaatcaaa

SEQ ID NO: 3183 - DNA, 333 bp, synthetic construct
  source 1..333: mol_type = other DNA
aagtttatgctgactcagccccactctgtgtcggaggctccggggaagacggtaaccatctcctgcaccggcagcagtggcagcattgccaacaactatgtgcagtggtatcagcagcgcccgggcagagcccccaccactattatctatgaggatgaccaaagaccctctggggtccctgatcgcttctctggctccatcgacagttcctccaactctgcctccctcaccatctccgggctgaagactgaggacgaggctgactactactgtcagtcttatcatagccgcaatctttgggtgttcggcggaggcaccaagctcaccgtccta

SEQ ID NO: 3184 - DNA, 324 bp, synthetic construct
  source 1..324: mol_type = other DNA
cagtctgtgctgactcagccaccctcggtgtcagtggcccctggacagacggccaggattgcctgtgggggaaacagcattggaagtaaaagtgtgcactggtaccagcagaagccaggccaggcccctgtgctggtcgtctctgatgctcgcgaccggccctcagggatccctgagcgattctctggctccaactctgtgaacacggccaccctgaccatcagcagggtcgaagccggggatgaggccgactattattgtcaggtgtgggatagtagtagtgaccattatgtcttcggaactgggaccaagctcaccgtccta

SEQ ID NO: 3185 - DNA, 324 bp, synthetic construct
  source 1..324: mol_type = other DNA
cagcctgtgctgactcagccaccctcagtgtccgtgtccccaggacagacagccaccatcacctgctctggagataaattgggggataaatatgcttgctggtatcagaagaagccaggccagtcccctgtattggtcatctatcaagattccgagcggccctcagggatccctgagcgattctctggctccaactctgggaacacagccactctgaccatcagcgggacccaggctatggatgaggctgactattactgtcaggcgtgggacagcagcactgcccattgggtgttcggcggagggaccaaggtgaccgtccta

SEQ ID NO: 3186 - DNA, 336 bp, synthetic construct
  source 1..336: mol_type = other DNA
aattttatgctgactcagccccactctgtgtcggagtctccggggaagacagtaaccatctcctgcacccgcagcagtggcagcattgccagcaactatgtgcagtggtaccagcagcgcccggggagtgcccccaccactgtgatctttgaggataatgagagaccctctggggtccctgatcggttctctggctccatcgacaggtcctccaactctgcctccctcaccatctctgcactgaagactgaggacgaggctgactactattgtcagtcttatgctagcagccccttctattgggtgtttggcggagggaccaagctgaccgtccta

SEQ ID NO: 3187 - DNA, 321 bp, synthetic construct
  source 1..321: mol_type = other DNA
gacatccaggtgacccagtctccatcctccctgtctgcatctgtaggagacagagtcaccatcacttgccgggcaagtcagaacattgtcagctatttaaattggtatcagcagaaaccagggaaagcccctaagctcctgatgtttgctgcatccagtttgcaaagtggggtcccatcaaggttcagtggcagtggatctgggacagatttcactctcaccatcagcagtctgcaacctgaagactttgcaacttactactgtcaacagagttatagtacccctcgaacgttcggccaagggaccaaagtggatatcaaa

SEQ ID NO: 3188 - DNA, 324 bp, synthetic construct
  source 1..324: mol_type = other DNA
tcgtatgagctgactcagccaccctcggtgtcagtggccccaggacagacggccaggattacctgtgggggaaacaacattggaagtaaaagtgtgcactggtaccagcagaagccaggccaggcccctgtactggtcgtctatgatgatagcgaccggccctcagggatccctgagcgattctctggctccaactctgggaacacggccaccctgaccatcagcagggtcgaagtcggggatgaggccgactatttctgtcaggtgtgggatagtagtagtgttcattatgtcttcggaactgggaccaagctcaccgtccta

SEQ ID NO: 3189 - DNA, 324 bp, synthetic construct
  source 1..324: mol_type = other DNA
gacatcgagatgacccagtctccatcctccctgtctgcatctgtaggagacagagtcaccatctcctgccgggcaagtcagagcattagcaggtatttaaattggtatcagcagaaaccagggaaagcccctaagctcctgatctatgctgcatccagtttgcaaagtggggtcccatcaaggttcagtggcagtggatctgggacagatttcactctcaccatcagcagtctgcaacctgaagattttgcaacttactactgtcaacagagttacagaaccccccccctcactttcggccctgggaccaaggtggaaatcaaa

SEQ ID NO: 3190 - DNA, 324 bp, synthetic construct
  source 1..324: mol_type = other DNA
tcgtatgtgctgactcagccaccctcggtgtcagtggccccaggacagacggccaggattccctgtgggggaaacaacattggaagtaaaagtgtgcactggtaccagcagaagccaggccaggcccctgtgctggtcgtctatgatgatagcgaccggccctcagggatccctgagcgattctctggctccagctctgggaacacggccaccctgaccctcagcagggtcgaagccggggatgaggccgactattactgtcaagtgtgggatagtagtagtgatcttgtgatattcggcggagggaccaagctcaccgtccta

SEQ ID NO: 3191 - DNA, 330 bp, synthetic construct
  source 1..330: mol_type = other DNA
cagtctgtgttgacgcagccgccctcagtgtctggggccccagggcagagggtcaccatctcctgcactgcgagcagcaacatcggggcaggttatgatgtacactggtatcagcagtttccaggaagagcccccaaactcctcatctatggtaacaacattcggccctcaggggtccctgaccgattctctggttccaagtctggcacctcagcctccctggccatcactgggctccaggctgaggatgaggctgattattactgccagtcgtctgacaccagcctgagtgattgggtgttcggcggaggcacccagctcaccgtcctc

SEQ ID NO: 3192 - DNA, 324 bp, synthetic construct
  source 1..324: mol_type = other DNA
gaaatccagatgacccagtctccatcctccctgtctgcatctgtaggagacagagtcaccatcacttgccgggcaagtcagagcattagcaggcacttaaattggtatcagcagaaaccagggaaagcccctaagctcctgatctatactgcatccagtttgcaaagtggggtcccatcaaggttcagtggcagtggatctgggacagatttcactctcaccatcagcagtctgcaacctgaagattttgcaagttactactgtcaacagagttacgaaacccctccgtggacgttcggccaagggaccaaggtggaaatcaaa

SEQ ID NO: 3193 - DNA, 327 bp, synthetic construct
  source 1..327: mol_type = other DNA
gacatccagatgacccagtctccttccaccctgtctgcatctgtaggagacagagtcaccatcacttgccgggccagtcagagtatcggtagctggttggcctggtatcagcagaaaccagggaaagcccctaagttagtgatctatgatgcctccagtttggaaactggggtcccatcaaggttcagcggcagtggatctgggacagaattcactctcaccatcagcagcctgcagcctgatgattttgcatcttattactgccaacagtataatggttattctccggggctcactttcggcggagggaccaaggtggaaatcaaa

SEQ ID NO: 3194 - DNA, 321 bp, synthetic construct
  source 1..321: mol_type = other DNA
gacatccagatgacccagtctccatcctccctgtctgcatctgtcggagacagagtcaccatcacttgccgggcaagtcagagcattagcagctatttaaattggtatcagcagaaaccagggaaagcccctaaactcctgatctatgctgcatccgttttgcaaagtggggtcccatcaaggttcagtggcagtggatctgagacagatttcactctcacgatcagtagtctgcaacctgaagattttgcaacttactactgtcaacagagttacagtaattttcggacttttggccaggggaccaaggtggagatcaaa

SEQ ID NO: 3195 - DNA, 321 bp, synthetic construct
  source 1..321: mol_type = other DNA
gaaacgacactcacgcagtctccagccaccctgtctgtgtctccaggagaaagagccaccctctcctgtagggccagtcagagtgttagcagcaacttagcctggtaccaacagaaacctggccaggctcccaggctcctcatctatggtgcatccagcagggccactggtatcccagccaggttcagtggcagtgggtctgggacagagttcactctcaccatcagcagcctgcagtctgaagattttgcagtttatcactgtcagcagtataataactggcctagaacttttggccaggggaccaaggtggagatcaaa

SEQ ID NO: 3196 - DNA, 324 bp, synthetic construct
  source 1..324: mol_type = other DNA
gacatcgtgatgacccagtctccatcctccctgtctgcatctgtgggagacagagtcaccatcacttgccgggcaagtcagagcattggcagctatttaaattggtatcagcaaaaaccagggaaagcccctaagctcctgatctatgctgcatccagtttgccaagtggggtcccatcaaggttcagtggcagcggatttgggacagatttcactctcaccatcagcagtctgcaacctgaggattttgcaacttactactgtcaacagagttacagtgcccctccgaacaccttcggccaagggacacgactggagattaaa

SEQ ID NO: 3197 - DNA, 324 bp, synthetic construct
  source 1..324: mol_type = other DNA
tcgcatgtgctgactcagccaccctcggtgtcagcggccccaggacagacggccaggattacctgtgggggaaccaatattggaggtagaagtgtgcactggtaccagcagaagccaggccaggcccctgtgctggtcgtctatgatgatggcgaccggccctcagggatccctgggcgaatctctggctccaactctgggaacacggccaccctgaccatcagcagggtcgtagccggggatgaggccgactattactgtcaggtgtggcatagtagtagtgattcctgggtgttcggcggagggaccaagctcaccgtccta

SEQ ID NO: 3198 - DNA, 339 bp, synthetic construct
  source 1..339: mol_type = other DNA
gacatcccgatgacccagtctccagactccctggctgtgtctctgggcgagagggccaccatcaactgcaagtccagccagaatgttttatacagctccaacaataagaactacttagcttggtaccagcagaaaccaggacagcctcctaagctgctcatttactgggcatcttcccgggaatccggggtccctgaccgattcagtggcagcgggtctgggacagatttcactctcaccatcacccgcctgcaggctgaagatgtggcagtgtattactgtcagcaatattatagtagtcctcccactttcggccctgggaccaaggtggagatcaaa

SEQ ID NO: 3199 - DNA, 333 bp, synthetic construct
  source 1..333: mol_type = other DNA
cagtctgtggtgacgcagccgccctcagtgtctggggccccagggcagagggtcaccatctcctgcactgggaccaactccaacatcggggccggttatgatgtacactggtaccagcagcttccaggaacagcccccaaactcctcatctatgctaacatcaatcggccctcgggggtccctgaccgattctctggctccaagtctggcacctcagcctccctggccatcactgggctccaggctgaggatgaggctgattattactgccagtcctatgacagcagcctgactgctccgttattcggcggacggaccaagctcaccgtcctc

SEQ ID NO: 3200 - DNA, 324 bp, synthetic construct
  source 1..324: mol_type = other DNA
tcgtatgagctgactcagccaccctcggtgtcagtggccccaggacagacggccatgattacttgtgggggaaacaacattggaagtaaaagtgtacactggtaccagcagaagccaggccaggcccctgtactggtcgtctatgatgatagcgaccggccgtccgggatccctgagcgattctctggctccaattctgggaacacggccaccctgaccatcagcagggtcgaagccggggatgaggccgactattactgtcaggtgtgggatactagtagtgatcatcaggtgttcggcggagggaccaagctcaccgtccta

SEQ ID NO: 3201 - DNA, 327 bp, synthetic construct
  source 1..327: mol_type = other DNA
acaatgacactgacgcagtctccaggcaccctgtctttgtctccaggggaaagagccaccctctcctgcagggccagtcagagtgttagcagcagctacttagcctggtatcagcagaaacctggccaggctcccaggctcctcatctatggtgcatccagcagggccgctggcatcccagacagattcattggcagtgggtctgggacagacttcactctcaccatcagcaggctggagcctgaggattttgcagtgtattactgtcagcagtatggtagctcacctccattcactttcggccctgggaccaaggtggaaatcaaa

SEQ ID NO: 3202 - DNA, 312 bp, synthetic construct
  source 1..312: mol_type = other DNA
gacatccagttgacccagtctccgtcctccctgtctgcttctgtgggagacagagtcagtatcacttgccgggcaagtcagaccgttaggacctttttaaattggtatcagcagaaaccagggaaagcccccaaactcctggtctttgctgcgcctggtggagaccccccgaggttcagtgccactggatctggcacagacttcactctcaccatcagcagtctccaacctgaagattttgcaatttacttctgtcaacagagttacagtatcccgtacacttttggccaggggaccaaggtggagatcaaa

SEQ ID NO: 3203 - DNA, 330 bp, synthetic construct
  source 1..330: mol_type = other DNA
tcgtatgagctgactcagccaccctcagcgtctgggacccccgggcagagggtcaccatctcttgttctgggagcagctccaacatcggaagtaatgctgtaaactggtaccagcagctcccaggaacggcccccaaactcctcatgtataattataatcagcggccctcaggggtccctgaccgattctctggctccaagtctggcacctcagcctccctggccatcagtgggctccagtctgaggatgaggctgattattactgtgcagcatgggatgacagcctgaatggtgtggttttcggcggagggaccaagctcaccgtccta

SEQ ID NO: 3204 - DNA, 333 bp, synthetic construct
  source 1..333: mol_type = other DNA
cagtctgtgttgacgcagccgccctcagtgtctggggccccagggcagagggtcatcatctcctgcactgggagcaactccaacatcggggcaggttatgatgtacactggtaccagcagcttccaggaacagcccccaaactcctcatctatggtaacaccaatcggccctcaggggtccctgaccggttctctggctccaagtctgacacctcagcctccctggccatcactggactccaggctgaggatgaggctgattattactgccagtcctatgacagcggcctgactggttcgcttttcggcggagggaccaagctgaccgtccta

SEQ ID NO: 3205 - DNA, 336 bp, synthetic construct
  source 1..336: mol_type = other DNA
gacattgtgatgactcagtctccactctccctgcccgtcacccctggagagccggcctccatctcctgcaggtctagtcagagcctcctgcatagtaatggatacaagtatttggattggtacctgcagaagccagggcagtctccacagctcctgatctatttgggttctaatcgggcctccggggtccctgacaggttcagtggcagtggatcaggcacagattttacactgaaaatcagcagagtggaggctgaggatgttggggtttattactgcatgcaagctctacaagctcctccgacgttcggccaagggaccaaggtggagatcaaa

SEQ ID NO: 3206 - DNA, 321 bp, synthetic construct
  source 1..321: mol_type = other DNA
gacatcacactgacgcagtctccatcctccctgtctgcatctgtaggggacagagtcaccatcacttgccgggcaagtcagagcgttagcaattatttaaattggtatcagcaaaaaccagggaaagcccctgagctcctgatctatgctgcatccagtttgcaaagtggcgtcccattaaggttcagtgtcagtggatctgggacagctttcaatctcacaatcagtagtctgcagcctggagatttcgcaacttactactgtcaacagagttacagtaccccgctcactttcggcggagggaccaaggtggaaatcaaa

SEQ ID NO: 3207 - DNA, 327 bp, synthetic construct
  source 1..327: mol_type = other DNA
cagactgtggtgacccaggagccctcactgactgtgtccccaggagggacagtcactctcacctgtgcttccagcactggaacagtcaccaatggttactatccaacctggttccagcagaaacctggacaagcacccagggcattgatttatagtacaaacaacaaacactcctggacccctgcccggttctcaggctccctccttgggggcaaagctgccctgacactgtcaggtgtgcagcctgaggacgaggctgactattactgcctgctctactacggtggtgttcgagtcttcggcggagggaccaagctgaccgtccta

SEQ ID NO: 3208 - DNA, 321 bp, synthetic construct
  source 1..321: mol_type = other DNA
gaaatcccaatgacacagtctccatcctccctgtctgcatctgtaggagacagagtcaccatcacttgccgggcaagtcagggcattagcaactatttaaattggtatcaacagagaccagggaaagcccctaaactccttatctatgctgcatccagtttgcaaagtggggtcccatcaaggttcagtggcagtggatttgggacagatttcactctcaccatcagcagtctgcaacctgacgactttgcaacttactactgtcaacagagttacactacccggtggacgttcggccaagggaccaaggtggagatcaaa

SEQ ID NO: 3209 - DNA, 324 bp, synthetic construct
  source 1..324: mol_type = other DNA
cagcctgagctgactcagccaccctcggtgtcagtggccccaggacagacggccaggattacctgtgggggtgacaacattggaactaaaagtgtgcactggtaccagcagaggccaggccaggcccctgtgctggtcgtctttgataattccgaccggccctcagggatccctgagcgattctctggctccaattctgggaacacggccaccctgaccatcagcagggtcgaagccggggatgaggccgacttttactgtcaggtgtgggatagtgttactgatcatgtgcttttcggcggagggaccaaggtcaccgtccta

SEQ ID NO: 3210 - DNA, 333 bp, synthetic construct
  source 1..333: mol_type = other DNA
cagtctgtgttgacgcagccgccctcagtgtctggggccccagggcagagggtcaccatctcctgcactgggagcaactccaacatcggggcaggttatgatgtacactggtaccagcagcttccaggaacagcccccaaactcctcatctatgctaacgccaatcggccctcaggggtccctgaccgattctctggctccaggtctggcacctcagcctccctggccatcactgggctccaggctgaggatgaggctgattattactgtcagtcctatgacagcagcctgagtggttcggtgttcggcggaggcacccagctgaccgtcctc

SEQ ID NO: 3211 - DNA, 321 bp, synthetic construct
  source 1..321: mol_type = other DNA
gacatcctgatgacccagtctccatcctccctgtctgcatctgtaggagacagagtcaccatcacttgccaggcgagtcaggacattaacaactatttaaattggtatcagcagaaaccagggaaagcccctaagctcctgatctacgatgcatccaatttggaaacaggggtcccatcaaggttcagtggaagtggatctgggacagattttactttcaccatcagcagcctgcagcctgaagatattgcaacatattactgtcaacagtatgataatctccctcggacgttcggccaagggaccaaggtggaaatcaaa

SEQ ID NO: 3212 - DNA, 321 bp, synthetic construct
  source 1..321: mol_type = other DNA
gaaatcacactgacccagtctccttccaccctgtctgcatctgtgggagacagcgtcactatcacttgtcgggccagtcagagtattagaagctggttggcctggtatcagcagaaaccagggaaagcccctaagctcctgatctataaggcgtctactttagaaagtggggtcccatcaaggttcagcggcagtggatctgagacagaattcacactcaccatcagaagcctgcagcctgaagattttgcaacttattactgccaacagtataatactgatcggtacacttttggccaggggaccaaggtggaaatcaaa

SEQ ID NO: 3213 - DNA, 324 bp, synthetic construct
  source 1..324: mol_type = other DNA
acgtatgtgctgactcagccaccctcggtgtcagtggccccaggacagccggccaggattacctgtgggggacacaatattggaggtaaaagtgtgcactggtaccagcagaagccaggccaggcccctgtgctggtcgtctatgatgatggcgaccggccctcagggatccctgagcgaatctctggctccaactctgggaacacggccaccctgaccatcagcagggtcgaagccggggatgaggccgactattactgtcaggtgtggcatagtagtagtgattcctgggtgttcggcggagggaccaagctcaccgtccta

SEQ ID NO: 3214 - DNA, 333 bp, synthetic construct
  source 1..333: mol_type = other DNA
cagtctgtcttgacgcagccgccctcagtgtctggggccccagggcagagggtcaccatctcctgcactgggaccaactccaacatcggggcaggttatgatgtacactggtaccagcagcttccaggaacagcccccaaactcctcatctatggtaacatcaatcggccctcaggggtccctgaccgattctctggctccaagtctggctcctctgcctccctggccatcactgggctccaggctgaggatgaggctgattattactgccagtcctatgacagcagtctgagtggttcgttattcggcggacgcaccaagctgaccgtccta

SEQ ID NO: 3215 - DNA, 324 bp, synthetic construct
  source 1..324: mol_type = other DNA
cagcatgtgctgactcagccgccctcggtgtcagtggccccaggacagacggccaggattacctgtgggggcaacaacattggaagtaaaagtgtgcactggtaccagcagaagccaggccaggcccctgtgctggtcgtctatgatgatagcgaccggccctcagggatccctgagcgattttctggctccaactctgggaccacggccaccctgaccatcagcagggtcgaggccggggatgaggccgactatttttgtcaggtgtgggatagtaataatgatcatgtggtattcggcggagggaccaagctcaccgtccta

SEQ ID NO: 3216 - DNA, 318 bp, synthetic construct
  source 1..318: mol_type = other DNA
gaaattgtgctgactcagtctccagccaccctgtctgtgtctccaggggaaagagccaccctctcctgcagggccagtcagagtgttagcagcgacttagcctggtaccagcagcaacctggccaggctcccagactcctcatctatgatgcatccaccagggccactggtatcccagccaggttcagtggcagtgggtctgggacagagttcactctcaccatcagcagcctgcagtctgaagattttgtagtttattactgtcagcagtacaatgactggctcactttcggcggagggaccaaggtggaaatcaaa

SEQ ID NO: 3217 - DNA, 318 bp, synthetic construct
  source 1..318: mol_type = other DNA
gaaattgtgatgacgcagtctccagccaccctgtctgtgtctccaggggaaagagccaccctctcctgcagggccagtcagagtgttagcagcgacttagcctggtaccagcagcaacctggccaggctcccagactcctcatctatgatgcatccaccagggccactggtatcccagccaggttcagtggcagtgggtctgggacagagttcactctcaccatcagcagcctgcagtctgaagattttgtagtttattactgtcagcagtacaatgactggctcactttcggcggagggaccaaggtggaaatcaaa

SEQ ID NO: 3218 - DNA, 321 bp, synthetic construct
  source 1..321: mol_type = other DNA
gacatccagttgacccagtctccatcctccctgtctgcatctgtaggagacagagtcaccatcacttgccgggcaagtcagagcattagcaattatttaaattggtatcagcagaaaccagggaaagcccctaagctccagatctatgctgcatccagtttgcaaagtggggtcccatcaaggttcagtggcagtggatctgggacagatttcactctcaccatcagcagtctgcaagttgaagattttgcaacttattactgtcaacagagttacagtacccctgtcacttttggccaggggaccaaggtggagatcaaa

SEQ ID NO: 3219 - DNA, 336 bp, synthetic construct
  source 1..336: mol_type = other DNA
gacattgtgatgacccagtctccactctccctgcccgtcacccctggagagccggcctccatctcctgcaggtctagtcagagcctcctgcatagtaatggatacacctatttggattggtacctgcagaagccagggcagtctccacagctcctgatctatttgggtactaatcgggcctccggggtccctgacaggttcagtggcagtggatcaggcacagattttacactgaaaatcagcagagtggaggctgaagatgttgggatttattactgcatgcaagctctacaaactccgctcactttcggcggagggaccaaggtggagatcaaa

SEQ ID NO: 3220 - DNA, 324 bp, synthetic construct
  source 1..324: mol_type = other DNA
tattatatgctgactcagcccccctcggtgtcagtggccccaggacagacggccaggcttacctgtgggggaaacgacattggaggtaaagctgtgcactggtaccagcagaggccaggccaggcccctgtgctggtcgtctatgatgatagcgaccggccctcagggatccctgagcgattctctggctccaactctgggaacacggccaccctgaccatcagcagggtcgaagccggggatgaggccgactattactgtcaaatgtgggatagtcgtagtgatcatccggtgttcggcggagggaccaaggtgaccgtcctc

SEQ ID NO: 3221 - DNA, 321 bp, synthetic construct
  source 1..321: mol_type = other DNA
gacatccggatgacccagtctccatcctccctgtctgcatctataggagacagagtcaccatcacttgccgggcaagtcagagcattagtaccattttaaattggtatcagcagaaaccagggagagcccctaagctcctgatctatgctgcatccagtttgcaaagtggggtcccatcaaggttcagtggcggtggatctgggacagatttcactctcaccatcagcagtctgcaacctgaagattttgcaacgtactactgtcagcagggttccactacccctcagacgttcggccgtgggaccaaggtggagatcaaa

SEQ ID NO: 3222 - DNA, 321 bp, synthetic construct
  source 1..321: mol_type = other DNA
gacatccagatgacccagtctccatcttccgtgtctgcatctgtaggagacagagtcaccatcacttgtcgggcgagtcagggtattagcagctggttagcctggtatcagcagaaaccagggaaagcccctaagctcctgatctatgctgcatccagtttgcaaagtggggtcccatcaaggttcagcggcagtggatctgggacagatttcactctcaccatcagcagcctgcagcctgaagattttgcaacttactattgtcaacaggctaacagtttccctatcacctttggcggagggaccaaggtggaaatcaaa

SEQ ID NO: 3223 - DNA, 321 bp, synthetic construct
  source 1..321: mol_type = other DNA
gaaattgtgatgacccagtctccatcctccctgtctgcatctgtaggagacagagtcaccatcacttgtcgggcaagtcacaggattgacaggtatttaaattggtatcagcagaaaccagggcaagcccccaagctcctgatctatgtagcatccactttgcaaagtggggtcccatcaaggttcactggcagtggatctgggacagatttcactctcactatcagcagtctgcaacctgaggattttgcaacttactactgtcaacagagttacactacccctcggactttcggccctgggaccaaggtggaaatcaaa

SEQ ID NO: 3224 - DNA, 339 bp, synthetic construct
  source 1..339: mol_type = other DNA
gaaattgtgatgacacagtctccactctccctgcccgtcacccctggagagccggcctccatctcctgcaggtctagtcagagcctcttggatagtgatgatgtatacacctatttggactggtacctgcagaagccagggcagtctccacagctcctgatgtatacactttcctatcgggcctctggagtcccagacaggttcagtggcagtgggtcaggcactaatttcacactgaaaatcaatagggtaaagactgaggacgttggagtttattactgcatgcaacgtatagagttcccctacacttttggccaggggaccaaggtggaaatcaaa

SEQ ID NO: 3225 - DNA, 321 bp, synthetic construct
  source 1..321: mol_type = other DNA
ccgtctgagctgactcagccaccctcagtgtccgtgtccccaggacagacagccagcatcacctgctctggagaaaatttgggacgtaaatatgtttgttggtatcaacagaggtcaggccagtcccctgtgctggttatctatcgagatgacaagcggccctcagggatccctgagcgattctctggctccaattctgggaacacagccactctgaccatcagcgggacccaggctatggatgaggctgactattactgtcaggcgtgggacagcaggactgcacaggtcttcggaactgggaccaaggtgaccgtccta

SEQ ID NO: 3226 - DNA, 321 bp, synthetic construct
  source 1..321: mol_type = other DNA
gacatccagatgacccagtctccatcctccctgtctgcatctgtaggggacagagtcaccatcacttgccgggcaagtcagaccattaacaactatttaacttggtatcagcagaaaccagggaaagcccctaacctcctgatctatgctgcatccagtttgcaaagtggggtcccatcaaggttcagtggcagtggatctgggacagatttcactctcaccatcagcagtctgcaacctgaagattttgcaacttactactgtcaacagagttacagttcccctatcaccttcggccaagggacacgactggagattaaa

SEQ ID NO: 3227 - DNA, 330 bp, synthetic construct
  source 1..330: mol_type = other DNA
aagcctgtgctgactcagccccactctgtgtcggagtctccggggaagacagtaaccatctcctgcacccgcagcagtggcagcattgccagcaactatgtgcagtggtaccagcagcgcccgggcagttcaccttccactgttatctatgaggataaccaaagaccctctggggtccctgatcggttctctggctccatcgacagctcctccaactctgcctccctcaccatctctggactgcagactgacgacgaggctgactactactgtcagtcttatgatagcagcctttgggtgttcggcggagggaccaagctcaccgtctta

SEQ ID NO: 3228 - DNA, 333 bp, synthetic construct
  source 1..333: mol_type = other DNA
cagtctgtgttgacgcagccgccctcagtgtctggggccccagggcagagggtcaccatctcctgcactgggagcaactccaacatcggggcaggttatgatgtacactggtaccagcaacttccaggaacagcccccaaactcctcatctatggtaacaacaatcggccctcaggggtccctgaccgattctctggctccaagtctgtcacctcagcctccctggccatcactgggctccaggctgaggatgaggctgattattactgccagtcctatgacagcagcctgagtgattcggtgttcggcggagggaccaaggtgaccgtccta

SEQ ID NO: 3229 - DNA, 324 bp, synthetic construct
  source 1..324: mol_type = other DNA
gaaattgtgatgacccagtctccaggcaccctgtctttgtctccaggggaaagagccaccctctcctgcagggccagtcagagtgttagcagcagctacttagcctggtaccagcagaaacctggccaggctcccaggctcctcatctatggtgcatccagcagggccactggcatcccagacaggttcagtggcagtgggtctgggacagacttcactctcaccatcagcagactggagcctgaagattttgcagtgtattactgtcagcagtatggtagctcacctggaacttttggccaggggaccaaggtggagatcaaa

SEQ ID NO: 3230 - DNA, 321 bp, synthetic construct
  source 1..321: mol_type = other DNA
gacatcacgatgacgcagtctccatcctccctgtctgcatctgtaggagacagagtcaccatcgcttgccgggcaagtcagggcattagcacctctttaaattggtgtcagcagaaaccagggaaagcccctaagctcctgatctctgctgcatccagtttgcaaagtggggtcccatcaaggttcagtggcagtggatctgggacagatttcactctcaccatcagcaatctgcaacctgaagattttgcaacttactactgtcaacagagttatagtaccccgtggacgttcggccaagggaccaaggtggaaatcaaa

SEQ ID NO: 3231 - DNA, 324 bp, synthetic construct
  source 1..324: mol_type = other DNA
gaaattgtgatgacgcagtctccatcctccctgtctgcatctgtaggagacagagtcaccatcacttgccgggcaagtcagagcattggcacctatttaaattggtatcagcagaaatcagggaaagcccctaaactcctcatctatgctacatccagtttgcatagtggtgtcccatcaaggttcagtggcagtggatatgggacagatttcactctcaccatcgacagtgtgcaacctgaagattttgcaacttattactgtcaacagagttacaatagccctgggttcagttttggccaggggaccaaggtggaaatcaaa

SEQ ID NO: 3232 - DNA, 333 bp, synthetic construct
  source 1..333: mol_type = other DNA
cagtctgtcgtgacgcagccgccctcagtgtctggggccccagggcagagggtcaccatctcctgcactgggagcagctccaacatcgggacaggttatgatgtacactggtaccaacaacttccaggaacagcccccaaactcctcatctatggtgacaacaatcggccctcaggagtccctgaccgattctctggctccaagtctggcacctcagcctccctggccatcactgggctccagcctgacgatgaggctgcttattactgccagtcctatgacagcaccctgattggtccggtattcggcggagggaccaagctcaccgtccta

SEQ ID NO: 3233 - DNA, 330 bp, synthetic construct
  source 1..330: mol_type = other DNA
aattttatgctgactcagccccactctgtgtcggagtctccggggaagacggtaaccatctcctgcacccgcagcagtggctacattgccagcaactatgtgctatggtaccaacagcgcccgggcagtgcccccaccattgtgatctctgaggataaccaaagaccctctggggtccctgagcggttctctgcctccgtcgacagctcctccaactctgcctccctcaccatctctggactgaagactgaggacgaggctgactactactgtcagtcttatgaaagtgacactgtgattttcggcggaggcaccaagctcaccgtccta

SEQ ID NO: 3234 - DNA, 324 bp, synthetic construct
  source 1..324: mol_type = other DNA
tcgcctgtgctgactcagccaccctcggtgtcagtggcccctgggcagacggccaggatcacctgtgggggagacaacattggaagtaaaaatgtccactggtaccagcagaagccaggccaggcccctgtgctggtcgtctatgatgataccgaccggccctcagggatccctgagcgattctctggctccaattctgggaacacggccaccctgaccatcagcagggtcgaagccggggatgaggccgactattactgtcaggtgtgggatactagtggtgatcattatgtcttcggaactgggaccaagctcaccgtccta

SEQ ID NO: 3235 - DNA, 324 bp, synthetic construct
  source 1..324: mol_type = other DNA
ccgtctgagctgactcagccaccctcagcgtctgggacccccgggcagggggtcaccatctcttgctctggaagcagctccaacatcggaagtaattctgtatactggtaccagcagctcccaggaacggcccccaaactcctcatctatagtaataatcagcggccctcaggggtccctgaccgattctctggctccaagtctggcacctcagcctccctggccatcagtgggctccggtccgaggatgaggctgattattactgtgcagcatgggatgacagccgttgggtgttcggcggagggaccaagctcaccgtccta

SEQ ID NO: 3236 - DNA, 324 bp, synthetic construct
  source 1..324: mol_type = other DNA
gaaattgcaatgacgcagtctccaggcaccctgtctttgtctccaggggaaagagccaccctctcctgcagggccagtcagagtgttagcagcagctacttagcctggtaccagcagaaacctggccaggctcccaggctcctcatctatggtgcatccagcagggccactggcatcccagacaggttcagtggcagtgggtctgggacagacttcactctcaccatcagcagactggagcctgaagattttgcagtgtattactgtcagcagtatggtagctcaccgtacacttttggccaggggaccaaggtggaaatcaaa

SEQ ID NO: 3237 - DNA, 339 bp, synthetic construct
  source 1..339: mol_type = other DNA
gacatccagatgacccagtctccagactccctggctgtgtctctgggcgagagggccaccatcaactgcaagtccagccagagtgttttatacagctccaacaataagaactacttagcttggtaccagcagaaaccaggacagcctcctaagctgctcatttactgggcatctacccgggaatccggggtccctgaccgattcagtggcagcgggtctgggacagatttcactctcaccatcagcagcctgcaggctgaagatgtggcagtttattactgtcagcaatattatactcctcctctcactttcggccctgggaccaaggtggaaatcaaa

SEQ ID NO: 3238 - DNA, 330 bp, synthetic construct
  source 1..330: mol_type = other DNA
acttttatgctgactcagccccactctgtgtcggagtctccggggaagacggtaaccatctcctgcacccgcagcagtggcagcattgccagcaactatgtgcagtggtaccagcagcgcccgggcagtgcccccaccactgtgatctatcaggataatgaaagaccctctggagtccctgatcggttctctggctccatcgacagttcttccaactctgcctccctcaccatctctggactgaagactgaggacgaggctgactactactgtcagtcttatgatactagcaatgaggtgttcggcggagggaccaagctcaccgtccta

SEQ ID NO: 3239 - DNA, 324 bp, synthetic construct
  source 1..324: mol_type = other DNA
cagtctgtgctgactcagccaccctcagcgtctgggacccccgggcagagggtcaccatcacttgttctggaaggagctccaacattggaagtaattctgtaaactggtatcaacagttcccaggaacggcccccaaactcctcatctatggtgatgatcaacggccctcaggggtcccggaccgattttctggctccaagtctggcacctcagcctccctggccatcagtgggctccggtccgaagatgaggctgattattattgtgcaacatgggatgacagcggttgggtgttcggcggagggaccaagctcaccgtccta

SEQ ID NO: 3240 - DNA, 330 bp, synthetic construct
  source 1..330: mol_type = other DNA
tcgcatgagctgactcagccaccctcagcgtctgggacccccgggcagagggtcaccatctcttgttctggaagcacctccaacatcgggagtaatactgtaaaatggtaccagcacctcccaggaacggcccccaaactcctcatctatagtgatgatcagcggccctcaggggtccctgaccgattctctggctccaagtctggcacctcagcctccctggccatcagtgggctccagtctgaggatgagtctgattattactgtgcagcatgggatgacactttggctggtccggtgttcggcggagggaccaagctcaccgtccta

SEQ ID NO: 3241 - DNA, 336 bp, synthetic construct
  source 1..336: mol_type = other DNA
gatattgtgatgacccagtctccagactccctggctgtgtctctgggcgagagggccaccatcaactgcaagtccagccagagtgttttatacaggtccaaaaataagaactacttagcttggtaccagcagagaccaggacagcctcctaagctgctcatttactgggcatctacccgggaatccggggtccctgaccgattcagtggcagcgggtctgggacagatttcactctcaccatcagcagcctgcaggctgaagatgtggcagtttattactgtcagcaatattatagttctccctctttcggccctgggaccaaagtggatatcaaa

SEQ ID NO: 3242 - DNA, 321 bp, synthetic construct
  source 1..321: mol_type = other DNA
gacatccagatgacccagtctccatcttccctgtctgcatctgtaggagacagagtcaccatcgcttgccgggcaagtcagagcattagcacctatttaaattggtatcagcagaaaccagggaaagcccctaaggtcctgatctatgctgcatccagtttaccaagtggggtcccatcaaggttccgtggcagtggatctgggacagatttcactctcaccatcagcagtctgcaacctgaagattttgcaacttactactgtcaacagagttacaatgcccctcggacgttcggccaagggaccaaggtggaaatcaaa

SEQ ID NO: 3243 - DNA, 318 bp, synthetic construct
  source 1..318: mol_type = other DNA
gaaattgtgttgacacagtctccagccaccctgtctttgtctccaggggaaagagccaccctctcctgcagggccagtcagagtgttagcacctacttagcctggtaccaacagagacctggccaggctcccaggctcctcatctatgatgcatccaacagggccactggcatcccagccaggttcagtggcagtgggtctgagacagacttcactctcaccatcagcagcctggagcctgaagattttgcagtttattattgtcaacagcggagcaactggctcactttcggcggagggaccaaggtggagatcaaa

SEQ ID NO: 3244 - DNA, 321 bp, synthetic construct
  source 1..321: mol_type = other DNA
gacattcagatgactcagtcgccttcatctctgtctgcatctgtcggcgatactgttactatcacatgtagagccagccagggaattacgaattcacttgcttggtatcagcaaaaacctggaaaagcacctaacctcttgctctacgcggcgtccaccttggaatctggtgtcccaccacgatttcggggcagtggaagtggcacagactttactctcaccatctcgagcttgcaacctgaggatttcgctacattttactgtcaacaatatttcgactctccccacaccttcggccaaggcacaaaggtggagattaaa

SEQ ID NO: 3245 - protein, 107 aa, synthetic construct
DIQLTQSPSSLSASVGDRVTITCQASQDITNYLSWYQQKPGKAPKLLIYDAVNLETGVPSRFSGSGSGTDFTFTISSLQPEDFATYYCQQYDNLPLTFGGGTKVEIK

SEQ ID NO: 3246 - protein, 108 aa, synthetic construct
EIAMTQSPATLSVSPGERATLSCRASQSVNSNLAWYQQKPGQAPRLLIYGASTRATGIPARFSGSGSGTEFTLTISSLQSEDFAVYFCQQYNIWPLYTFGQGTKVEIK

SEQ ID NO: 3247 - protein, 108 aa, synthetic construct
DIQMTQSPSSLSASVGDRVTITCRASQSISSYLNWYQQKPGKAPKLLIYSASSLQSGVPSRFSGSGSGTDFSLTISSLQPEDFATYYCQQSYNTPPWTFGQGTKVEIK

SEQ ID NO: 3248 - protein, 108 aa, synthetic construct
DIQLTQSPSSLSASVGDRVTITCRASQAISNSLAWYQQKPGKAPKLLLYAASILESGVPSRFSGSGSGTDYTLTISSLQPEDFATYYCQQYYSSLGRTFGGGTKVDIK

SEQ ID NO: 3249 - protein, 107 aa, synthetic construct
DIQMTQSPSTLSASVGDRVTITCRASQSISRWLAWYQQKPGKAPKLLIYKASSLESGVPSRFSGSGSGTEFTLTISSLQPDDFATYYCQQYDSYPWTFGQGTKVEIK

SEQ ID NO: 3250 - protein, 112 aa, synthetic construct
DIQMTQSPNSLPVTPGEPASISCRSSQSLLHTNGYNYLDWYLQKPGQSPQLLIYLGSNRASGVPDRFSGSGSGTDFTLKISRVEAEDVGVYYCMQGLQTPPTFGGGTKVEIK

SEQ ID NO: 3251 - protein, 106 aa, synthetic construct
EIQMTQSPSSLSASVGDRVTITCRASQGIGSALAWYRQRPGKPPKLLISDASSLEGGVPSRFSGSGSGTDFTLTISSLQPEDFATYYCQQFNNRITFGGGTKVEIK

SEQ ID NO: 3252 - protein, 108 aa, synthetic construct
DITMTQSPSSLSASVGDRVTITCRASQSIRRFLNWYQQKPGKAPKLLIYDASSLQSGVPSRFSGSGSGTDFTLTISSLQPEDFATYYCQQSYNTPPWTFGQGTKVEIK

SEQ ID NO: 3253 - protein, 108 aa, synthetic construct
SYVLTQPPSVSVAPGQTARITCEGNYIGGQSVNWYQQRPGQAPVVVLYDDFGRPSGIPERFSGSNSGNTATLTINWVEAGDEADYYCQVWDTSSDRILFGGGTKLTVL

SEQ ID NO: 3254 - protein, 108 aa, synthetic construct
DMTMTQSPSSLSASVGDRVTITCRASQSISKFLNWYQQKPGKAPNLLIYAASSLQSGVPSRFSGSGSGTDFTLTINSLQPEDFATYYCQQSYTMPPVTFGQGTRLEIK

SEQ ID NO: 3255 - protein, 107 aa, synthetic construct
DIQMTQSPSSLSASVGDRVTITCRASQSISDFLSWFQQRPGKAPKLLIYAASTLQSGVPSRFSGSGSGTDFTLTISSLQPEDFATYYCQQSFVTPYTFGRGTKVEIK

SEQ ID NO: 3256 - protein, 107 aa, synthetic construct
DIQMTQSPSSVSASVGDRVTITCRASQGLSRWLAWYQQKPGKAPKLLIYAASSLQSGVPSRFSGSGSGTDFTLTISSLQPEDFATYYCQQANSFPLTFGGGTKVEIK

SEQ ID NO: 3257 - protein, 107 aa, synthetic construct
DIKLTQSPSSLSASVGDRVTITCQASHDINNYLNWYQQKPGKAPKLLIYEASNLETGVPSRFSGSGSGTDFTFTISSLQPEDIATYYCQQYDNLPITFGQGTRLEIK

SEQ ID NO: 3258 - protein, 109 aa, synthetic construct
ELVLTQSPSASGSPGQSVTISCTGTSSDVGGYNYVSWYQQHPGKAPKLMIYEVNKRPSGVPDRFSGSKSGNTASLTVSGLQAEDEADYYCSSYAGPFWVFGGGTKLTVL

SEQ ID NO: 3259 - protein, 106 aa, synthetic construct
DIQMTQSPSSLSASVGDRVTITCRASQGISNSLAWYQQKPGKAPKLLLYSASTLESGVPSRFSGSGSGTDFTLTITSLQPEDFATYYCQEYYSTRTFGPGTKVEIK

SEQ ID NO: 3260 - protein, 106 aa, synthetic construct
DIQMTQSPSSLSASVGDRVTITCRASQGINSALAWYQQKPGKAPKLLLYDASSLENGVPSRFSGGGSGTDFTLTITSLQPEDFATYYCQQFNNLITFGGGTKVDIK

SEQ ID NO: 3261 - protein, 107 aa, synthetic construct
EIQMTQSPSSLSASVGDRVTITCRAGQSIATYLNWYQQKPGKAPKLLIYAASSLQSGVPSRFSGSGSGADFTLTISSLQPEDFATYYCQQSYSTPITFGQGTRLEIK

SEQ ID NO: 3262 - protein, 107 aa, synthetic construct
DIQLTQSPSSLSASVGDRVTITCQASQDINNYLIWYQQKPGKAPRVLIYDASNLEAGVPSRFSGSGSGTDFTFTISSLQPEDIATYFCQQYDNVPLIFGGGTKVEIK

SEQ ID NO: 3263 - protein, 108 aa, synthetic construct
EIVLTQSPSSLSASVGDRVTITCRASQSISTYLNWYQQKPGKAPKLLIYAASSLQSGVPSRFSGSGSGTDFTLTVSSLQPEDFATYFCQQSYTAPGYTFGQGTKVEIK

SEQ ID NO: 3264 - protein, 107 aa, synthetic construct
EIVMTQSPSSLSASVGDTVTITCRASQGITNSLAWYQQKPGKAPNLLLYAASTLESGVPPRFRGSGSGTDFTLTISSLQPEDFATFYCQQYFDSPHTFGQGTKVEIK

SEQ ID NO: 3265 - protein, 108 aa, synthetic construct
EIVLTQSPSVSVAPGQTARITCGGNNIGSRSVHWLQQKPGQAPVLVVYDDSDRPSGIPERFSGSNSGNTATLTISRVEAGDEADYYCQVWDSYSNNDVFGTGTQLTVL

SEQ ID NO: 3266 - protein, 106 aa, synthetic construct
EIVMTQSPSSLSASVGDRVTITCRASQGISNSLAWYQQKPGKAPKLLLYAASTLESGVPSRFSGSGSGTDYTLTISSLQPEDFATYYCQQYYSTRSFGQGTKVDIK

SEQ ID NO: 3267 - protein, 108 aa, synthetic construct
TYELTQPPSVSVSPGQTARITCSGDSLPRQYAYWYQQKPGQAPVMVIHKDSERPSGIPERFSGSTSGTTVTLTISGVQAEDEADYYCQSADSGSYHVIFGGGTKLTVL

SEQ ID NO: 3268 - protein, 106 aa, synthetic construct
DIQMTQSPSSLSASVGDRVTITCRAGQGIGTALAWYQQKPGKAPKLLLYDASSLENGVPSRFSGSGSGTDFTLTISSLQPEDFATYYCQQFNKLVTFGGGTKVDIK

SEQ ID NO: 3269 - protein, 105 aa, synthetic construct
SHVLTQPPSVSVAPGKTAKITCGEDDIGSKSVHWYQQKPGQAPMLIIYYDRDRPSGIPERFSGSNSGNTATLTISSVEAGDEADYYCQVWDNSWVFGGGTKLTVL

SEQ ID NO: 3270 - protein, 106 aa, synthetic construct
DIVMTQSPSSLSASVGDSITITCRASQDIGSALAWYQQKPGNAPRFLISDASSLGSGVPSRFSGSGSGTDFTLTIRGLQPADFATYYCQQFNSLVTFGGGTKVEIK

SEQ ID NO: 3271 - protein, 108 aa, synthetic construct
DIQMTQSPSSLSASVGDRVTISCRASQTINTYLNWYQQKPGKAPKLLIYGASSLQSGVPSRFSGSGSGTDFTLSISGVQPEDFATYYCQQTYSTPGVTFGPGTKVEIK

SEQ ID NO: 3272 - protein, 107 aa, synthetic construct
DIQMTQSPSSLSASVGDRVTIACRASQSMTNSLNWYQQKPGKAPKLLIHGASSLHSGVPSRFSGSGSGTDFTLTISSLQPEDFATYYCQQSYSNPWTFGQGTKVEIK

SEQ ID NO: 3273 - protein, 106 aa, synthetic construct
DIQMTQSPSSLSASVGDRVTITCRASQGISNSLAWYQQQPGKAPKLLLYAVSTLESGVPSRFSGSGSGTDYTLTINSLQPEDFATYYCQEYYSTRTFGQGTKVEIK

SEQ ID NO: 3274 - protein, 108 aa, synthetic construct
DIQMTQSPSSLSASVGDRITITCRASQDITNSLAWYQQRPGKAPKLLLYAASTLESGVPSRFTGSGSGTDFTLTISSLQPEDFATYYCQQYYSALRRTFGQGTKVEIK

SEQ ID NO: 3275 - protein, 108 aa, synthetic construct
EIPLTQSPSSLSASVGDRVTITCRASQGIRNSLAWYQQKPGKAPKLLLYAASRLQSGVPSRFSGSGSGTDYTLTISSLQPEDFATYYCQQYYNTPPWTFGQGTKVEIK

SEQ ID NO: 3276 - protein, 107 aa, synthetic construct
DIQMTQSPSSLPASVGDRVTITCRASQSISSYLNWYQQKPGKAPKLLIYGASSLHTGVPSRFSGSGSGTDFTLTISSLQPEDFATYYCQQSYSTPRTFGQGTKVEIK

SEQ ID NO: 3277 - protein, 108 aa, synthetic construct
EIVLTQSPSSLSASVGDRVTITCRASQSISNYLNWYQQKPGKAPKLLIYAASSLQSGVPSRFSGSGSGTDFTLTISSLQPEDLATYYCQQSYNTPPWTFGQGTKVEIK

SEQ ID NO: 3278 - protein, 108 aa, synthetic construct
DITLTQSPSSLSASVGDRVTITCRASQSISRHLSWYQQKPGRAPKLLIYAASNLQSGVPSRFSGSGSGTDFTLTISSLQPEDFATYYCQQSYNTPPWTFGPGTKVEIK

SEQ ID NO: 3279 - protein, 110 aa, synthetic construct
QPVLIQPASVSGSPGQSITISCTGTSSDVGGYNYVSWYQQHPGKAPKVLTYDVSKRPSGASDRFSGSKSGNTASLTISGLQAEDEADYYCCSYAGSRGWLFGGGTKLTVL

SEQ ID NO: 3280 - protein, 107 aa, synthetic construct
DIVMTQSPSSLSASVGDRVTITCRAGQSISDFLNWYQQKPGKAPKLLIYAVSTLQSGVPSRFSASGSGTDFALTISSLQPEDFATYYCQQSYSSPLTFGGGTKVEIK

SEQ ID NO: 3281 - protein, 107 aa, synthetic construct
DIQMTQSPSSLSASVGDRVTITCRASQDIKYSLAWYQQKPGKAPKLLLYVASRLESGVPSRFSGSGSGTDYSLTISSLQPEDFATYYCQQYYNTPVTFGQGTKVEIK

SEQ ID NO: 3282 - protein, 108 aa, synthetic construct
SYELTQPPSVSVAPGQTAKITCGGNNVGSKTVHWYQQRPGQAPVLVVYDNDARPSGIPERFSAYDSGNTATLTITRVEAGDEADYYCQVWDSGSDHYVFGTGTKVTVL

SEQ ID NO: 3283 - protein, 108 aa, synthetic construct
DIQMTQSPSSLSASVGDRVTITCRASQSIRNYLNWYQQKPGKAPKLLIYDASSLQRGVPSRFSGSGSGTDYTLTISSLQPEDFATYYCQQSYNTPPWTFGQGTKVEIK

SEQ ID NO: 3284 - protein, 107 aa, synthetic construct
DIQMTQSPSSVSASVGDRVTITCRASQGISRWLAWYQQKPGKAPKLLIYAASSLQSGVPSRFSGSGSGTDFTLTISSLQPEDFATYYCQQADSFPLTFGGGTKVEIK

SEQ ID NO: 3285 - protein, 107 aa, synthetic construct
DIQLTQSPSSLSASVGDRVTITCQASQDITKNLNWYQQRPGKAPKLLIFDASYLETGVPSRFSGSGSGTDFTITISSLQPEDFATYFCQQYESLPPTFGGGTKVDIK

SEQ ID NO: 3286 - protein, 117 aa, synthetic construct
QPVLTQPPSHSASSGTSVRLTCMLSSGFSVGDFWIRWYQQKPGNPPRYLLYYHSDSNKGQGSGVPSRFSGSNDASANAGILRISGLQPEDEADYYCGTWHSNSKTQVFGGGTKLTVL

SEQ ID NO: 3287 - protein, 107 aa, synthetic construct
DIQMTQSPSSLSASVGDRVTITCQASQHISNYLNWYQHRPGKAPKLLIYDASNLETGVPSRFSGSGSGTDFTFTISSLQPEDIATYYCQQYGSLPITFGQGTRLEIK

SEQ ID NO: 3288 - protein, 108 aa, synthetic construct
ETTLTQSPSSLSASVGDRVTITCRASQGISNSLAWYQQKPGKAPKLLLYAASTLESGVPSRFSGSGSGTDFTLTIASLQPEDFATYYCQQYYSSVRFTFGQGTILDLN

SEQ ID NO: 3289 - protein, 108 aa, synthetic construct
DIPMTQSPSTLSASVGDRVTITCRASQGISNSLAWYQQKPGRAPKLLLYAASTLESGVPSRFSGSGSGTDFTLTISSLQPEDFATYYCQQYYSTPPRTFGQGTKVEIK

SEQ ID NO: 3290 - protein, 107 aa, synthetic construct
DIQLTQSPSSLSASVGDRVTITCRASQTINSFVNWYQHKPGKAPELLIYAASTLQRGVPSRFSGSGTGTDFTLTISSLQPEDFATYFCQQSYNSPRTFGQGTKVEIK

SEQ ID NO: 3291 - protein, 108 aa, synthetic construct
DIQMTQSPSSLSASIGDRVTITCRASQSINSYLNWYQQKPGKAPKLLIYVASSLQSGVPSRFSGSGSGTDFTLTISSLQPEDFATYYCQQSYSTPPWTFGQGTKVEIK

SEQ ID NO: 3292 - protein, 109 aa, synthetic construct
SYVLTQPPSVSVAPGQTARITCKGDDIGSKNVHWYQQKPGQAPVLVVYDDTDRPSGIPERFSGSNSGNPATLTISRVEAGDEADYYCQVWDSNIDHPWVFGGGTKLTVL

SEQ ID NO: 3293 - protein, 108 aa, synthetic construct
DIQMTQSPSSLSTSVGDRVTITCRASQSISSFLNWYRQKPGKAPELLIYAASRLQSGVPSRFSGSGSGTDFTLTISSLQPEDFATYYCQQSYSMPPITFGQGTRLEIK

SEQ ID NO: 3294 - protein, 106 aa, synthetic construct
DIQMTQSPSSLSASVGDRVTITCPASQGISNSLAWYQQKPGKAPKLLLYATSTLESGVPSRFSGGGSGTDYTLTISGLQPEDFATYYCQQYYSFRTFGQGTKVEIK

SEQ ID NO: 3295 - protein, 106 aa, synthetic construct
TYMLTQPPSVSVSPGQTARITCSGDAFPNQYAYWYQLKPGQAPVAVIYKDSERPSGIPERFSGSSSGTTATLTINEVQAEDEADYYCQSADSRGTVFGGGTKVTVL

SEQ ID NO: 3296 - protein, 106 aa, synthetic construct
EIPMTQSPSYLSASVGDRVTITCRASQGIRNSLAWYQQKLGKAPKLLLYAASTLESGVPSRFSGSGSGTDYTLTISSLQPEDFATYFCQQYYDIRTFGQGTKVDIK

SEQ ID NO: 3297 - protein, 109 aa, synthetic construct
SYELTQPPSVSVAPGQTARLTCGGDSLGSKNVHWYQQKPGQAPVLVVFDDSDRPSGIPERFSGSNSGNTATLTISRVEAGDEADYWCQVWDSNIGHPWVFGGGTQLTVL

SEQ ID NO: 3298 - protein, 107 aa, synthetic construct
DIQLTQSPSSLSASVGDRVTITCRASQTVGAFLNWYQQKPGKAPKLLVFTAPEMEGGVPPRFSGTGSGTDFTLTISSLQPEDFATYFCQQSHTIPYTFGQGTKVEIK

SEQ ID NO: 3299 - protein, 108 aa, synthetic construct
EIPMTQSPSSLSASVGDRVTITCRASQSIGSFLNWYRQKPGKAPNLLIYAASTLQRGVPSRFSGSGSGTDFTLTISSLQPEDFATYFCQQSYTTHMYTFGQGTKVEIK

SEQ ID NO: 3300 - protein, 113 aa, synthetic construct
DIQLTQSPDSLAVSLGERATITCKSSQSVVYSSNNKNYLAWYQQKPGQPPKLLIYWASTRESGVPARFSGSGSGTDFTLTISSLQAEDVAVYYCQQYYITPLTFGGGTKVDIK

SEQ ID NO: 3301 - protein, 107 aa, synthetic construct
DIQMTQSPSSLSASVGDRVTIACRASQSMTSSLNWYQQRPGKAPKLLIFGASSLHSGVPSRFSGSGSGTDFTLTISSLQPEDFATYYCQQSYSTPWTFGQGTKVEIK

SEQ ID NO: 3302 - protein, 107 aa, synthetic construct
EMTLTQSPSSLSASVGDRVTITCRASHRIDRYLNWYQQKPGQAPKLLIYVASTLQSGVPSRFTGSGSGTDFTLTISSLQPEDFATYYCQQSYTTPRTFGPGTKVEIK

SEQ ID NO: 3303 - protein, 106 aa, synthetic construct
SYELTQPPSVSVSPGQTARITCCGDALPNQYTYWYQQKPGQAPVVIIYKDSERPSGIPERFSGSTSGTTVTLTISGVQAEDEADYYCQSADSSGVVFGGGTKVTVL

SEQ ID NO: 3304 - protein, 108 aa, synthetic construct
EMTLTQSPATLSVSPGERATLSCRASQSVSSSLAWYQQKPGQPPRLLIYDASTRATGIPARFSGSGSGTEFTLTISSLQSEDFAVYYCQQYNNWPTWTFGQGTKVEIK

SEQ ID NO: 3305 - protein, 107 aa, synthetic construct
DIQMTQSPSSVSASVGDRVTITCRASQDIGSWLAWYQQKPGKAPRLLIYAAASLQSGVPSRFSGSGSGTEFTLTISRLQPEDFATYYCQQATSFPLTFGGGTKVEIK

SEQ ID NO: 3306 - protein, 108 aa, synthetic construct
EIQMTQSPSSLSASVGDRVTITCRASQGISNSLAWYQQRRGKAPKLLLYAASTLESGVPSRFSGSGSGTDFTLTISSLQPEDFATYYCQQYYSPPPLTFGGGTKVEIK

SEQ ID NO: 3307 - protein, 108 aa, synthetic construct
EIQLTQSPSSLSASVGDRVTITCRASQAISSYLNWYQQKPGKAPKLLIYAASSLHSGVPSRFSGSGSGTDFTLTINSLQPEDFATYYCQQSYTIPTLTFGGGTKVEIK

SEQ ID NO: 3308 - protein, 106 aa, synthetic construct
DIQMTQSPSSLSASVGDRVTITCRASQGIGNSLAWYQQKPGKAPKFLLYAASTLESGVPSRFSGSGSGTDFTLTISSLQPEDFATYYCQQYYTTRTFGQGTKVEIK

SEQ ID NO: 3309 - protein, 109 aa, synthetic construct
QSVLTQPASVSGSPGQSITISCTATTSDVGVFNYVSWYQQHPGKAPKLMIYEVSNRPSGVSNRFSGSKSGNTASLTISGLQAEDEADYFCSSYTTSSTVFGGGTQLTVL

SEQ ID NO: 3310 - protein, 108 aa, synthetic construct
SYELTQPPSVSVAPGQTARITCGGNNIGSESVHWYQQKPGQAPVLVVYEDSDRPSGIPERFSGSTSGNTATLTISRVEAGDEADYYCQVWDGISVHYVFGTGTKLTVL

SEQ ID NO: 3311 - protein, 109 aa, synthetic construct
EIAMTQSPATLSVSPGERATLSCRASESVSSNLAWYQQKPGQAPRLLIYGASTRATGIPARFSGSGSGTEFTLTISSLQSEDFAVYFCQQYIDWPPGYTFGQGTKVEIK

SEQ ID NO: 3312 - protein, 107 aa, synthetic construct
EIQMTQSPSSLPASVGDRVTITCRASQSISSYLNWYQQKPGKAPKLLIYGASSLHAGVPSRFSGSGSGTDFTLTISSLQPEDFATYYCQQSYTTPRTFGQGTKVDIK

SEQ ID NO: 3313 - protein, 106 aa, synthetic construct
DIQLTQSPSSLSASVGDRVTITCRASQRVSSYLNWFQQKPGKAPRLLIFAASSLQSGVPSRFSGSGSGTDFTLTISSLEPEDFATYYCQQSYDAITFGQGTRLEIK

SEQ ID NO: 3314 - protein, 107 aa, synthetic construct
DITMTQSPSSVSASVGDRVSITCRASQSIGSWLGWYQQKPGKAPKLLIYAASILQSGVPSRFSGSGSGTDFTLTISSLQPEDFATYYCQQADSFPPAFGPGTKVDIK

SEQ ID NO: 3315 - protein, 106 aa, synthetic construct
EIPMTQSPSSLSASVGDRVTITCRASQGIGNSLAWYQQKPGKAPKFLLYAASTLESGVPSRFSGSGSGTDFTLTISSLQPEDFATYYCQQYYTTRTFGQGTKVDIK

SEQ ID NO: 3316 - protein, 111 aa, synthetic construct
NLMLTQPHSVSESPGKTVTISCTRSSGSIASNYVQWYQQRPGSAPTTVIYEDNQRPSGVPDRFSGSIDSSSNSASLTISGLKTEDEADYYCQSYDTRLRGVFGGGTKLTVL

SEQ ID NO: 3317 - protein, 112 aa, synthetic construct
EIVMTQSPLSLPVTPGEPASISCKSSQSLLHSNGYKYLDWYLQKPGQSPQLLIYLGSNRASGVPDRFSGSGSGTDFTLKISRVEAEDVGIYYCMQALQTPITFGQGTRLEIK

SEQ ID NO: 3318 - protein, 106 aa, synthetic construct
DIQLTQSPSSLSASVGDRVTITCQASQDIGNYLSWFQQKAGKAPRLLMYEASNLETGVPSRFSGSGSGTDFALTISSLQPEDIATYYCQQYDSLLTFGPGTKVDIK

SEQ ID NO: 3319 - protein, 107 aa, synthetic construct
DIQLTQSPSSLSASVGDRVTITCRASQSVNNYLNWFQQKPGKAPKLLIYAASSLQSGVPSRFSGSGSGTDYTLAISSLQPEDFATYYCQQSYATPLTFGPGTKVEIK

SEQ ID NO: 3320 - protein, 108 aa, synthetic construct
DIPLTQSPSSLSASVGDRVTITCRASQDISNSLAWYQQKPGKAPKLLLYTASTLESGVPSRFSGSGSGTDYTLTISSLQPEDFATYYCQQYYSALGRTFGGGTKVDIK

SEQ ID NO: 3321 - protein, 110 aa, synthetic construct
QSVLTQPPSVSAAPRQRVTISCSGSSSNIEINAVNWYQQLPGKAPKLLIYYDDLLPSGVSDRFSGSKSGTSASLAISGLQSEDEADYYCVTFDDRLDGWVFGGGTKLTVL

SEQ ID NO: 3322 - protein, 107 aa, synthetic construct
EIKMTQSPSSLPASVGDRVTITCRASQSITSYLNWYQQKPGKAPKLLIYGASSLHTGVPSRFSGSGSGTHFTLTISSLQPEDFATYFCQQSYTTPRTFGQGTKVEIK

SEQ ID NO: 3323 - protein, 107 aa, synthetic construct
EIQMTQSPSSLSASVGDRVTITCRASQGISFALAWYQQKPGKAPKLLIYDASSLESGVPSRFSGSGSGTDFTLTISSLQPEDFATYYCQQFNHYPITFGQGTRLEIK

SEQ ID NO: 3324 - protein, 108 aa, synthetic construct
EIVMTQSPSSLSASVGDRVTITCRASQSIRSYLNWFQQKPGKAPKLLIYSASTLQSGVPSRFSGSASGTDFTLTISSLQPEDFATYYCQQSYNTPPWTFGQGTKVEIK

SEQ ID NO: 3325 - protein, 113 aa, synthetic construct
DIQMTQSPDSLAVSLGERATINCMSSQSVLDSSNNKNFLAWYQQRPGQPPKLIIYWASTRKSGVPDRFSGSGSGTDFTLTISSLQPEDVAVYYCQQYYRTPLTFGGGTKVEIK

SEQ ID NO: 3326 - protein, 106 aa, synthetic construct
DIQMTQSPSTLSASVGDRVTISCRASQSISRWLAWYQQKPGKAPKLLIYMASSLESGVPSRFSGSGSGTEFTLTISSLQPDDFATYYCQQYNSYWTFGQGTKVEIK

SEQ ID NO: 3327 - protein, 108 aa, synthetic construct
DIQMTQSPSSLSASVGDGVTITCRASQGISNSLAWYQQKPGKAPKLLVYVASTWESGVPTRFSGSGYGTDFTLTISSLQPEDFATYYCQQYYSPPPPTFGGGTKVEIK

SEQ ID NO: 3328 - protein, 106 aa, synthetic construct
EIALTQSPATLSLSPGERATLSCRASQSVSTYLAWYQQKPGQAPRLLIYDASKRATGIPARFNGSGSGTDFTLTISSLEPEDFAVYYCQQRSTWPTFGGGTKVDIK

SEQ ID NO: 3329 - protein, 108 aa, synthetic construct
DIQLTQSPSSLSASVGDRVTITCRASQSIGSYLNWYQQKPGKAPNLLIYAASNLQSGVPSRFSGSGSGTDFTLTISSLQPEDFATYFCQQSYSAPPWTFGQGTKVEIK

SEQ ID NO: 3330 - protein, 108 aa, synthetic construct
QSVLTQPPSVSVAPGKTARITCGGNNIGSQSVHWYQQKPGQAPVLVIYYDNDRPSGIPERFSGSNSGNTATLTISRVEAGDEADFYCQVWDTSGDHWVFGGGTKLTVL

SEQ ID NO: 3331 - protein, 106 aa, synthetic construct
DIQMTQSPSSLSASIGDRVTITCRASQSVSTFLNWYQQKPGKAPKLLIYSASGLQSGVPSRFSGSGSGTDFTLTISSLQPEDFATYYCQQSYNMFTFGPGTKVEIK

SEQ ID NO: 3332 - protein, 108 aa, synthetic construct
DIPMTQSPSSLSASVGDRVTISCRASQTITRYLNWYQQKPGKAPKLLIYAASSLQSGVPSRFSGSGSGTDFTLTISSLQPEDFATYFCQQSYTTHMYTFGQGTKVDIK

SEQ ID NO: 3333 - protein, 109 aa, synthetic construct
QPVLTQPASVSGSPGQSITISCTGTSSDLGAFNHVSWYQHFPGKAPKLLIYEFTNRPSGVSNRFSGSKSDKTASLTIFGLQAEDEADYYCSAYTSTSTVFGGGTKVTVL

SEQ ID NO: 3334 - protein, 108 aa, synthetic construct
EIVMTQSPSSLSASVGDRITITCRASQGISNSLAWYQQKPGKAPKLLLYAASTLESGVPSRFSGSGSGTDFTLTINSLQPEDFATYYCQQYYSPPPRTFGQGTKVEIK

SEQ ID NO: 3335 - protein, 107 aa, synthetic construct
EIVMTQSPGTLSLSPGERATLSCRASQSVSGYLAWYQQRPGQAPRLLIYDASSRATGIPDRFSGSGSGTDFTLTISRLEPEDFAVYFCQQYGSSPRTFGQGTKVEIK

SEQ ID NO: 3336 - protein, 108 aa, synthetic construct
DIQMTQSPSTLSASVGDRVTITCRASQSIDDWLAWYQQKPGKAPKLLIYKTSSLESGVPSRFSGSGSGTEFTLTISSLQPDDFATYYCQHFNSYLMYTFGQGTKVDIK

SEQ ID NO: 3337 - protein, 108 aa, synthetic construct
QPVLTQPPSVSVAPGQTAGITCGAHDIGSKSVHWYQQKPGQAPVLVVYDDSDRPSGIPERVSGSNSGNTATLTISRVEAGDEADYYCQVWDTSGDHWVFGGGTKLTVL

SEQ ID NO: 3338 - protein, 107 aa, synthetic construct
DIRMTQSPSSLSASVGDRVTITCQASQDINTYLNWYQQKPGKAPKLLIYDASNLETGVPSRFSGSGSGTHFTFTITSLQPEDIATYYCQSYDNPPPTFGPGTKVEIK

SEQ ID NO: 3339 - protein, 108 aa, synthetic construct
DMTMTQSPATLSVSLGERVTLSCRASQSISSNLAWYQQKPGQAPRLLIYGASTRATGISARFSGSGSGTKFTLTISSLQSEDFAVYYCQQYNNWPPWTFGQGTKVEIK

SEQ ID NO: 3340 - protein, 112 aa, synthetic construct
DIVMTQSPLTLPVTPGEPASISCKSSQSLLHSNGHKYLDWYLQKPGQSPQLLIYLGSNRASGVPDRFSGSGSGTDFTLKISRVEAEDVGIYYCMQALQTPITFGQGTRLEIK

SEQ ID NO: 3341 - protein, 110 aa, synthetic construct
QSVVTQPPSVSAAPGQRVTISCSGTSSNIGNNYVSWYQHLPGTAPKLLIYDNDKRPSGIPDRFSGSKSGTSATLGITGLQSGDEADYYCATWDDSLSVGIFGGGTQLTVL

SEQ ID NO: 3342 - protein, 110 aa, synthetic construct
QPVLTQPPSVSEAPRQRVTISCFGSSSNIGHNAVNWYQQLPGKAPKLIIYYDDLLPSGVSDRFSGSKSGTSASLAISGLQSEDEADYYCAAWDDRLNGYVFGPGTKVTVL

SEQ ID NO: 3343 - protein, 108 aa, synthetic construct
EIPMTQSPSSLSASVGDRVTITCRASQTISRFLNWYQQKPGKAPKLLIYAASSLQSGVPSRFSGSGSGTDFTLTISSLQPEDFATYYCQQSYSAPPWTFAQGTKVDIK

SEQ ID NO: 3344 - protein, 108 aa, synthetic construct
DIQMTQSPSSLSASVGDRVTISCRASQSISRYLNWYQQRPGKAPKLLIYAASTLQSGVPSRFSGSGSGTDFTLTISSLQPEDFATYICQQSYVSPPWTFGPGTKVEIK

SEQ ID NO: 3345 - protein, 107 aa, synthetic construct
DIQMTQSPSSLSASVGDRVTITCRASQRISSYLNWYQQRPGKAPNFLIYNASSFESGVPSRFSGSGSGTDFTLTISSLQPEDFATYYCQQSYSDPYTFGQGTKVEIK

SEQ ID NO: 3346 - protein, 107 aa, synthetic construct
DIKMTQSPSFLSASVGDRVTITCRASQGISSYLAWYQQKPGKAPKLLIYAASTLQSGVPSRFSGSGSGTEFTLTISSLQPEDFATYYCQQLNTHPPPFGPGTKVEIK

SEQ ID NO: 3347 - protein, 108 aa, synthetic construct
DIVMTQSPSSLSASVGDRVTITCRASQSISTYLNWYQQKPEKAPKLLIYAASSLQSGVPSRFSGSGSGTDFTLTISSLQPEDFATYYCQQSYTSPAYTFGQGTKVEIK

SEQ ID NO: 3348 - protein, 107 aa, synthetic construct
DIKMTQSPSFLSASVGDRVTITCRASQGISTDLAWYQQKSGKAPKLLIYGASTLQSGVPSRFSGSGSGTEFTLTISSLQPEDFATYYCQHLNSDAITFGQGTRLEIK

SEQ ID NO: 3349 - protein, 107 aa, synthetic construct
DIQMTQSPSFLSAFVGDRVTITCRASQGISRYLAWYQQKPGKAPKLLIYAASTLQSGVPSRFSGSGSGTEFTLTISSLQTEDFATYYCQHLDTDSGTFGRGTKVEIK

SEQ ID NO: 3350 - protein, 111 aa, synthetic construct
DIQMTQSPDSLAVSLGERATINCKSNQSVLYSSKNFLGWYQQKPGQPPKLLIYWASTRESGIPDRFSGSGSGTDFTLTISSLQAEDVAVYYCQQYYNTPVTFGQGTKVEIK

SEQ ID NO: 3351 - protein, 108 aa, synthetic construct
DIKMTQTPSFLSASVGDRVTITCRASQGISSFLAWYQQKPGKAPKLLIYGASTLQSGVPLRFSGSGSGTEFTLTISSLQPEDFATYYCQHLDSYPRYTFGQGTKVDIK

SEQ ID NO: 3352 - protein, 106 aa, synthetic construct
EIQLTQSPSSLSASVGDRVTITCRASQGISNSLAWYQQKPGKAPKLLLYAASTLESGVPSRFSGSGSGTDFSLTISSLQPEDFATYYCQEYYDTRTFGQGTKVDIK

SEQ ID NO: 3353 - protein, 106 aa, synthetic construct
EIVLTQSPATLSLSPGERATLSCRASQSVSTYLAWYQQRPGQAPRLLIYDASNRATGIPARFSGSGSETDFTLTISSLEPEDFAVYYCQQRSNWLTFGGGTKVEIK

SEQ ID NO: 3354 - protein, 109 aa, synthetic construct
QSALIQPASVSGSPGQSITISCTATSSDVGAYIYVSWYQQHPGKAPKLTIYEVTKRPSGISNRFSGSKSGNTASLTISGLQAEDEAHYYCSSYTTSGVVFGGGTQLTVL

SEQ ID NO: 3355 - protein, 108 aa, synthetic construct
DIPMTQSPSSLSASVGDRVTITCRASQSITTYLNWYQQKPGKAPKLLIYAASSLQSGVPSRFSGSGSGTDFTLTITSLQPEDFAIYYCQQSYNTPPWTFGQGTKVEIK

SEQ ID NO: 3356 - protein, 111 aa, synthetic construct
QSVLTQPPSVSGAPGQRVTISCTGSNSNIGAGYDVHWYQQLPGTAPKLLIYDNTNRPSGVPDRFSGSKSGTSASLAITGLQAEDEADYYCQSYDSSLTGSVFGTGTKVTVL

SEQ ID NO: 3357 - protein, 107 aa, synthetic construct
EIPMTQSPSSVSASVGDRVTIACRASQGIGSWLGWYQQKPGKAPKLLIYAASILQSGVPSRFSGSGSGTEFTLTISSLQPEDFATYYCQQADSFPPAFGPGTKVEIK

SEQ ID NO: 3358 - protein, 112 aa, synthetic construct
EIVLTQSPLSLPVTLGQPASISCRSSESLSYSDGNTYLNWFQQRPGQSPRRLIYKVSNRDSGVPDRFSGSGSGTDFTLKISRVEAEDVGVYYCMQGTHWPPTFGQGTKVEIK

SEQ ID NO: 3359 - protein, 108 aa, synthetic construct
DIQMTQSPSTLSASVGDRVTITCRASQSIDDWLAWYQQKPGKAPKLLIYKTSTLESGVPSRFSGSGSGTEFTLTISSLQPDDFATYYCQHFNSYLMYTFGQGTKVEIK

SEQ ID NO: 3360 - protein, 106 aa, synthetic construct
DIQMTQSPSTLSASVGDRVTVTCRASQSISTWLAWYQQKPGKAPKVLIYKATHLETGVPSRFSGSGSGTEFTLTISSLQPDDFATYYCQQYNSYYTFGQGTKVDIK

SEQ ID NO: 3361 - protein, 109 aa, synthetic construct
SYVLTQPPSVSVAPGQTARITCGGNDLGSKNVHWYQQKPGQAPVLVVFDDSDRPSGIPERFSGSNSGNTATLTISRVETGDEADYYCQVWDSNIDHPWVFGGGTKLTVL

SEQ ID NO: 3362 - protein, 107 aa, synthetic construct
DIQMTQSPSSLSASVGDRVTITCQASQDINNYLNWYQQKPGKAPKLLIYDASNLETGVPSRFSGSGSGTDFTFTISSLQPEDIATYYCQYYDNPPPTFGPGTKVEIK

SEQ ID NO: 3363 - protein, 111 aa, synthetic construct
QPVLTQPPSVSGAPGRGVTISCTGSTSNIGGGYDVHWYQQLPGEAPKLLIYLNNNRPSGVPDRFSGSKSGTSASLAITGLQPVDEADYYCQSYDSSLSVWVFGGGTQLTVL

SEQ ID NO: 3364 - protein, 106 aa, synthetic construct
QSVLTQPLSVSVALGQTARIPCGLNIIPGKNVHWYQQKPGQAPILVIYRDNIRPSGISERFSVSHSGNMATLTISRAQAGDEADYYCQIWDINTVIFGGGTQLTVL

SEQ ID NO: 3365 - protein, 108 aa, synthetic construct
QYVLTQPPSVSVAPGETARITCGGNNIGSKHVHWYLQRPGQAPVLVISFNSDRPSGIPGRFSGSNSGNTATLTISRVEAGDEADYYCQVWDSNTDHRVFGGGTKLTVL

SEQ ID NO: 3366 - protein, 107 aa, synthetic construct
DIRMTQSPSVSVSPGQTARITCSGDALPNQYTYWYQQKSGQAPVLVIYRDTERPSGIPERFSGSSSGTAVTLTISGVQAEDEADYYCQSADYSGTCVFGGGTKLTVL

SEQ ID NO: 3367 - protein, 106 aa, synthetic construct
DIQLTQSPSSLSASVGDRVTVTCRASQSISTFLNWYQQKPGKVPNLLIYAASSLQSGVPSRFSGSGSGTDFTLTINGLQPEDFATYYCQQSYSTPSFGQGTRLEIK

SEQ ID NO: 3368 - protein, 107 aa, synthetic construct
DIVLTQSPSSLSASVGDRVTITCRASQGISSHLAWYQQKPGKAPKLLIYAASTLQSGVPSRFSGSGSGTDFTLTISSLQPEDFASYYCQQLNSDSPTFGGGTKVDIK

SEQ ID NO: 3369 - protein, 107 aa, synthetic construct
EIALTQSPATLSLSPGERATLSCRASQSVNSYLAWYQQKPGQAPRLLIYDAYNRATGIPARFSGSGSGTDFTLTISSLEPEDFAVYYCQQRLHPPFTFGPGTKVEIK

SEQ ID NO: 3370 - protein, 108 aa, synthetic construct
DIQMTQSPSSLSASVGDRVTITCRASQSISRFLSWYQQKPGKAPKLLIYAASTLQSGVPSRFSGSGSGTDFTLIISSLQPEDFATYFCQQSYSTPPVTFGQGTRLEIK

SEQ ID NO: 3371 - protein, 107 aa, synthetic construct
SYVLTQPPSVSVSPGQTARITCSGDVLSKQYAYWYQQKPGQAPVLVIYKDTERPSGIPERLSGSSSGTTVTLTISGVQAEDEADYYCVSADSSGVYVFGTGTKLTVL

SEQ ID NO: 3372 - protein, 112 aa, synthetic construct
QSVLTQPPSVSGAPGQRVTISCTGSSSNIGAGHDVNWYQQIPGTAPKLLISANDNRPSGVPDRFSGSKSGTSASLAITGLQAEDEADYYCQSYDSGLSGSVLFGGGTKLTVL

SEQ ID NO: 3373 - protein, 107 aa, synthetic construct
DIQMTQSPSSLSASVGDRVTITCQASQDINKFLNWYQQKPGKAPTLLIYDASNLEPGVPSRFSGSGSGTDFTFTITSLQPEDIATYYCQQYDNVPPTFGPGTKVEIK

SEQ ID NO: 3374 - protein, 107 aa, synthetic construct
EIQMTQSPSSLSASVGDRVTITCQASQDINKYLNWYQQKPGKAPKVLIYDASNLETGVPSRFSGSGSGTDFTFTISGLQPEDIATYYCQQYDNLPQTFGGGTKVEIK

SEQ ID NO: 3375 - protein, 106 aa, synthetic construct
TCVMTQSPSTLSASVGDRVTITCRTSQSISTWLAWYQQKPGKAPKLLIYKASSLESGVPPRFSGSGSGTEFTLTISSLQPDDFATYYCQQYKSFWTFGQGTKVEIK

SEQ ID NO: 3376 - protein, 106 aa, synthetic construct
DIVMTQTPPTLSASVGDRVTITCRASQSISTWLAWYQQKPGKAPKLLIYKASSLESGVPSRFSGSGSGTEFTLTISSLQPDDFATYYCQQYNSYWTFGQGTKVDIK

SEQ ID NO: 3377 - protein, 111 aa, synthetic construct
QSVLTQPPSASGTPGQRVVISCSGSSSNIGSNSVNWYQQFPGTAPKLLIYTNNQRRPSGVPDRFSGSKSGTSASLAISDLQSEDEADYHCAAWDDSLNGVVFGGGTKLTVL

SEQ ID NO: 3378 - protein, 108 aa, synthetic construct
EIQMTQSPSSLSASVGDRVTITCRASQSISSYLNWYQQKPGKAPKLLMYAASSLQSGVPSRFSGSGSGTDFTLTISNLQPEDFATYYCQQSYSLPEYTFGQGTKVEIK

SEQ ID NO: 3379 - protein, 110 aa, synthetic construct
SYELTQPPSASGTPGQRVTISCSGSSSNIGSNSVNWYQQLPGTAPKLLIYSNNQRPSGVPDRFSGSKSGTSASLAISGLQSEDEADYYCATWDDSLTGPVFGGGTQVTVL

SEQ ID NO: 3380 - protein, 107 aa, synthetic construct
EMTLTQSPGTLSLSPGERATLSCRASQSVSSYLAWYQQKPGQAPRLLIYGASSRATGIPDRFSGSGSGTDFTLTISRLEPEDFAVYYCQQYGSSPRTFGQGTKVEIK

SEQ ID NO: 3381 - protein, 107 aa, synthetic construct
DIVMTQSPSSLSASVGDRVTITCRANQTISNYLNWYQQKPGKAPKLLIYAASSLQSGVPSRFSGSGSGTDFTLTISSLQPEDFAIYFCQQSYSSPPTFGLGTKVEIK

SEQ ID NO: 3382 - protein, 109 aa, synthetic construct
SLLLTQPASVSGSPGQSITISCTGASSDVGAYIYVSWYQQHPGKAPKLMIYEVTNRPSGVSDRFSGSKSGNTASLTISGLQAEDEADYYCSSYTSSSAVFGGGTKLTVL

SEQ ID NO: 3383 - protein, 113 aa, synthetic construct
DIQMTQSPDSLAVSLGERATIKCMSSQSVLDSSNDKNFLAWYQQKPGQPPKLFIYWASTRKSGVPDRFSGSGSGTDFTLTISSLQAEDVAVYYCQQYYRTPLTFGGGTKVEIK

SEQ ID NO: 3384 - protein, 107 aa, synthetic construct
DIQMTQSPSSLSASVGDRVAITCQASQDINKYLAWYQQKAGRAPKLLIYDASILETGVPSRFSGSGSGTHFTLTINSLQTEDIATYYCQQFDNVPYTFGQGTKVDIK

SEQ ID NO: 3385 - protein, 108 aa, synthetic construct
DIQVTQSPATLSLSPGERATLSCRASQSVSSYLAWYQHKPGQAPRLLIYDASNRATGIPARFSGSGSGTDFTLTISSLEPEDFAVYYCQLRSNWPPFTFGPGTKVEIK

SEQ ID NO: 3386 - protein, 107 aa, synthetic construct
DIVMTQSPSSLSASVGDRVSITCRASQTVRSFLNWYQQKPGKAPKLLVFTAPTVEGGVPPRFSATGSGTDFTLSISGLQPEDFATYFCQQSYSIPYTFGQGTKLEIK

SEQ ID NO: 3387 - protein, 107 aa, synthetic construct
DIQMTQSPSSLSASVGDRVTITCQASQDISDYLNWYQQKPGKAPKLLIYDALNLKSGVPSRFSGSGSGTDFTFTISSLQPEDIATYYCQQYNNFPYTFGQGTKVEIK

SEQ ID NO: 3388 - protein, 111 aa, synthetic construct
QSVVTQPPSVSGALGQRVTISCTGTNSNIGAGYDVHWYQQLPGTAPKLLIYDNSNRPSGVPDRFSGSKSDTSASLAITGLQAEDEADYYCQSYDSSLIGSIFGTGTKLTVL

SEQ ID NO: 3389 - protein, 110 aa, synthetic construct
QPVLTQPPSASGSPGQSVTISCTGTSSDVGAHNYVSWYQQYPDKAPKLMIYEVNKRPSGVPDRFSGSKSGDTASLTVSGLQAEDEADYYCSSYAGSNNWVFGGGTKLTVL

SEQ ID NO: 3390 - protein, 109 aa, synthetic construct
EIALTQSPGTLSLSPGERATLSCRASQSVSSNYLAWYQQKPGQAPRLLIYGASSRATGIPDRFSGGGSGTDFTLTISRLEPEDFAVYYCQHYGSSPPYTFGQGTKVEIK

SEQ ID NO: 3391 - protein, 111 aa, synthetic construct
QSVVTQPPSVSGAPGQRVTISCTGTNSNIGAGYDVHWYQQLPGTAPKLLIYDINNRPSGVPDRFSGSKSDTSASLAITGLQAEDEADYFCQSYDSGLTSPVFGTGTKLTVL

SEQ ID NO: 3392 - protein, 108 aa, synthetic construct
EIQLTQSPSSLSASVGDRVTITCRASQGISNSLAWYQQIPGKAPKLLLYAASILESGVPSRFRGSGSGTDFTLTISSLQPEDFATYYCQQYYSSLGRTFGGGTKVEIK

SEQ ID NO: 3393 - protein, 111 aa, synthetic construct
QSVLTQPPSVSGAPGQRVTISCTGSNSNIGAGYDVHWYQQLPGRAPKLLIYVNNNRPSGVPDRFSGSKSDTSASLAITGLQAEDEADYYCQSYDSSLSASVFGGGTKLTVL

SEQ ID NO: 3394 - protein, 110 aa, synthetic construct
QPVLTQPASVSGSPGQSITIPCTGTSSDVGGYNYVSWYQQHPGKVPKLMIYEVSNRPSGVSNRFSGSKSGSTASLTISGLQSEDEADYYCSSYTSSDSWVFGGGTKLTVL

SEQ ID NO: 3395 - protein, 108 aa, synthetic construct
SYELTQPPSVSVAPGQTARITCGGSNIGSKSVHWYQQKPGQAPVLVVYDDSDRPSGIPERFSGSNSGDTATLTISRVEAGDEADYYCQVWDSSSDHWVFGGGTKLTVL

SEQ ID NO: 3396 - protein, 108 aa, synthetic construct
DIRMTQSPSSLSASVGDSVTITCRASQSITSYLHWYQQKPGKAPKLLIYAASSLQSGVPSRFSGSGSGTDFTLTITSLKPEDFATYYCLQTYSTHSWTFGQGTKVEIK

SEQ ID NO: 3397 - protein, 108 aa, synthetic construct
DILMTQSPSSLSASVGDRVTITCRASQSINHYLNWYQQKPGKAPKLLISAASSLQSGVPSRFGGSGSETDFTLTISSLEPEDFATYYCQQSYSTPHGSFGQGTKVEIK

SEQ ID NO: 3398 - protein, 108 aa, synthetic construct
EIVLTQSPSSLSATVGDRVTITCRASQSVGRYLNWYQQKPGKAPKLLIYAASNLQSGVPSRFSGSGSGTDFTLTISSLQPEDFASYYCQQSYTTHMYTFGQGTKVEIK

SEQ ID NO: 3399 - protein, 108 aa, synthetic construct
DIQMTQSPSSLSASVGDRVTITCRASQGISNSLAWYQQLPGKAPKLLLYAASILESGVPSRFRGSGSGTDFTLTISSLQPEDFATYYCQQYYSSLGRTFGGGTKVEIK

SEQ ID NO: 3400 - protein, 107 aa, synthetic construct
DIQMTQSPSSLSASVGDSVTITCQASQDINKYLNWYQQKPGKAPKLLIYDASNLETGVPSRFSGSGSGRHFTFTISSLQPEDIGTYYCHQYDNLPRTFGQGTKVEIK

SEQ ID NO: 3401 - protein, 113 aa, synthetic construct
DIPMTQSPDSLAVSLGERATINCRSSQSVLYSSNDQNYLAWYQQKPGQPPKLLIYWASTRESGVPDRFSGSGSGTHFTLTISSLQAEDVAVYYCQQYYSSPPTFGPGTKVEIK

SEQ ID NO: 3402 - protein, 107 aa, synthetic construct
EIQMTQSPSSLSAYVGDRVTITCRASQSISSYLNWYQQKPGKAPKLLIYHALSLQSGVPSRFSGSGSGTDFTLTISSLQPEDFATYYCQQSYTTPYTFGQGTKVDIK

SEQ ID NO: 3403 - protein, 113 aa, synthetic construct
DIQLTQTPDSLAVSLGERATINCRSSQSVLYSSNDQNYLAWYQQKPGQPPKLLIYWASTRESGVPDRFSGSGSGTHFTLTISSLQAEDVAVYYCQQYYSSPPTFGPGTKVDIK

SEQ ID NO: 3404 - protein, 108 aa, synthetic construct
EIEMTQSPSFLSASVGDRVTITCRASQGISSFLAWYQQKPGKAPKLLIYGASTLQSGVPLRFSGSGSGTEFTLTISSLQPEDFATYYCQHLDSYPRYTFGQGTKVEIK

SEQ ID NO: 3405 - protein, 109 aa, synthetic construct
EIVLTQSPATLSLSPGERATLSCRASQSVSSYLAWYQQKPGQAPRLLIYDASNRATGIPARFSGSGSGTDFTLTISSLEPEDFAVYYCQQRSNWPPGLTFGGGTKVDIK

SEQ ID NO: 3406 - protein, 110 aa, synthetic construct
QPVLTQPASVSGSPGQSITISCTGTSSDIGDYNYVSWYQQHPGKAPKLMVYDVTNRPSGVSYRFSGFKSGNTASLTISGLQAEDEADYYCSSYTSSDTYVFGTGTKLTVL

SEQ ID NO: 3407 - protein, 108 aa, synthetic construct
DIQMTQSPSSLSASVGDRVTITCRASQGISNSLAWYQHIPGKAPKLLLYAASILESGVPSRFRGSGSGTDFTLTISSLQPEDFASYYCQQYYSSLGRTFGGGTKVEIK

SEQ ID NO: 3408 - protein, 110 aa, synthetic construct
QPVLTQPPSVSVAPGQTARITCGGDNIGSKGVHWYQQKPGQAPVLVVYDDSDRPSGIPERFFGSNSGNTATLTISRVEAGDEADYFCQVWDSTSDHPAYVFGTGTKLTVL

SEQ ID NO: 3409 - protein, 108 aa, synthetic construct
QSELTQPPSVSVAPRQTARITCGGNNIGSNSVHWYQQRPGQAPVLVVYDDSGRPSGIPERFSGSKSGNTATLTISRVEAGDEADYYCQVWDSSSDPVVFGGGTKLTVL

SEQ ID NO: 3410 - protein, 108 aa, synthetic construct
QPVLTQPASVSGSPGQSITISCTGTSSDVGSYDYVSWYQLHPGKAPKLMIYEVNNRPSGISTRFSGSKSGNTASLTISGLQAEDEADYYCSSYTSNIVFGTGTKVTVL

SEQ ID NO: 3411 - protein, 114 aa, synthetic construct
DIVMTQSPLSLPVTPGEPASISCRSNQSLLHSHGYIYLDWYLHKPGQSPQLLIYLGSNRASGVPDRFSGSGSGTDFTLSISRVEPEDVGVYYCVQALQTPFMYTFGQGTKVEIK

SEQ ID NO: 3412 - protein, 111 aa, synthetic construct
QSVLTQPPSVSGAPGQRVTISCTGSNSNIGAGYDVHWYQQLPGTAPKLLIYDNNNRPSGVPDRFSGSKSDTSASLAITGLQAEDEADYYCQSYDSSLSDSVFGGGTQLTVL

SEQ ID NO: 3413 - protein, 107 aa, synthetic construct
EIQMTQTPSSLSASVGDRVTITCQASQDISKFLNWYQQKPGKAPKLLIYDASNLETGVPSRFSGSGSGTGFTFTISSLQPEDIATYYCQQYDNLPVTFGGGTKVEIK

SEQ ID NO: 3414 - protein, 114 aa, synthetic construct
QSVLTQPPSVSGAPGQRVTISCTGSRSNIGAGYDVHWYQQLPGTVPKLLIYGNSNRPSGVPDRFSGSKSGSSASLAITGLQAEDEAVYYCQSYDSSLTFSAFYVFGTGTKLTVL

SEQ ID NO: 3415 - protein, 109 aa, synthetic construct
DIVMTQSPSSLSASVGARVTITCRASQSISRYLNWYQQKPGKAPKLLIHTASTLQTGVPSRFSGSGSGTDFTLTISNLQPEDFATYYCQQSYTTPPLWTFGQGTKVEIK

SEQ ID NO: 3416 - protein, 111 aa, synthetic construct
QSVVTQPPSVSGAPGQRVTISCTGSSSSIGAGYDVHWYQQLPGTAPKLLIYANSNRPSGVPDRFSGSKSGTSASLAITGFQAEDEDDYYCQSYASSVSGVIFGGGTKLTVL

SEQ ID NO: 3417 - protein, 108 aa, synthetic construct
DIQMTQSPSFLSASVGDRVTITCRASQGISNYLAWYQQKPGKAPKLLIYAASTLQSGVPSRFSGGGSGTEFTLTISSLQPEDFATYYCQQLNSNPPITFGQGTRLEIK

SEQ ID NO: 3418 - protein, 109 aa, synthetic construct
SHVLTQPPSVSVAPGQTARITCGGNNIGSKNVHWYQQKPGQAPELVVYDDSDRPSGIPERFSGSNSGNTATLTISRVEAGDEADYFCQVWDSTTDLLYVFGTGTKVTVL

SEQ ID NO: 3419 - protein, 110 aa, synthetic construct
QSVLTQPPSVSEAPRQRVTISCSGSSSNIGNNAVNWYQQFPGKAPKLLIYYDDLLPSGVSDRFSGSKSGTSASLAISGLQSEDEADYYCAAWDDRLNGVIFGGGTKLTVL

SEQ ID NO: 3420 - protein, 106 aa, synthetic construct
DIQMTQSPSTLSASVGDRVTITCRASQSISSWLAWYQQKPGKAPKLLIYKSSSLESGVPSRFSGSGSGTEFTLTISSLQPDDFATYYCQQYNSYYTFGQGTKVEIK

SEQ ID NO: 3421 - protein, 108 aa, synthetic construct
EMTMTQSPGTLSLSPGERATLSCRASESVSSEYLAWHQQRPGQAPRLLIYGASSRPTGIPDRFSGSGSGTDFTLTISRLEPEDFAVYYCHQFASAPITFGQGTRLEIK

SEQ ID NO: 3422 - protein, 107 aa, synthetic construct
ETTLTQSPGTLVLSPGERATLSCRASESVRSSYLAWYQQSPGQTPRLLIYGASRATGIPDRFSGSGSGTDFTLTITRLEPEDFAVYYCQQYARSPWTFGQGTKVEIK

SEQ ID NO: 3423 - protein, 111 aa, synthetic construct
NFMLTQPHSVSESPGKTVTISCTRSSGSLATNYVQWYQLRPGSSPSTVIYEDNQRPSGVPDRFSGSIDSSSNSASLTISGLKTEDEADYYCQSWDSSALWVFGGGTKLTVL

SEQ ID NO: 3424 - protein, 107 aa, synthetic construct
EIAMTQSPGTLSLSPGQRATLSCRASESVSSSYLAWYQQKPGQAPRLLIYGASSRATGIPDRFSGSGSGTDFTLTISRLEPEDYAVYYCQQYGSSPVFGPGTKVEIK

SEQ ID NO: 3425 - protein, 107 aa, synthetic construct
DIPMTQSPSSLSASVGDSVTITCRASQSISNFLNWYQQKPGRAPNLLIYIASNLQRGVPSRFSGSGSGTDFTLTISSLQPEDFATYYCQQSYTTPPTFGGGTKVEIK

SEQ ID NO: 3426 - protein, 111 aa, synthetic construct
QSVLTQPPSVSGAPGQRVTISCTGSNSNIGAGYDIHWYQQLPGTAPKLLIYGNTNRPSGVPDRFSGSKSDTSASLAITGLQAEDEADYYCQSYDSSLSGVVFGGGTKVTVL

SEQ ID NO: 3427 - protein, 110 aa, synthetic construct
QSALTQPRSVSGSPGQSVTISCTGTSSDVGGYNYVSWYQQHPGKAPKLMIYDVSKRPSGVPDRFSGSKSGNTASLTMSGLQAEDEADYYCCSYVGSYSYVFGTGTKLTVL

SEQ ID NO: 3428 - protein, 107 aa, synthetic construct
EIVMTQSPATLSLSPGERATLSCRASQSVSSYLAWYQQKPGQAPRLLIYDASNRATGIPARFTGSGSGTDFTLTISSLEPEDFAVYYCQQRIHPPFTFGPGTKVEIK

SEQ ID NO: 3429 - protein, 107 aa, synthetic construct
DIQLTQSPSSLSASVGDRVTITCRASQGISNYLAWFQQKPGKAPKSLIYDASTLQNGVPSKFSGSGSGTHFTLTISSLQPEDFATYYCQQYDSYPLTFGGGTKVEIK

SEQ ID NO: 3430 - protein, 108 aa, synthetic construct
EMQLTQTPGTLSLSPGEGATVSCRASQSLNSKYFAWYQQKPGQAPRLLIYAASSRATGIPDRFSGSGYGTDFTLTITRLEPEDFAVYFCQQYGYSPATFGGGTKVDIK

SEQ ID NO: 3431 - protein, 108 aa, synthetic construct
DIQMTQSPSSLSASVGDRVTITCRASQSISSFLNWYQQKPGKAPKLLIYAASSLQSGVPSRVSGSGSGTEFTLTISSLQPDDFATYYCQQSYSSPMYTFGQGTKVEIK

SEQ ID NO: 3432 - protein, 107 aa, synthetic construct
EIPMTQSPSSLSASVGDTVTITCRASQSISTFLNWYQQKPGKAPNLLVYAASNLQSGVPSRFSGSGSGTDFTLTISSLQPEDFATYYCQQSYSSPCSFGQGTKVEIK

SEQ ID NO: 3433 - protein, 111 aa, synthetic construct
NLMLTQPHSVSASPGKTVTISCTRSGGSIASYYVQWYQHRPGSAPTIVIYEDNQRPSGVPDRFSGSIDSSSNSASLTISGLKTEDEADYYCHSYDSSNPVVFGGGTKLTVL

SEQ ID NO: 3434 - protein, 108 aa, synthetic construct
QPVLTQPRSVSGSPGQSVTISCTGTTSDVGSYNYVSWYPPHPGKAPKLMIYDVSKRPSGVPDRFSGSKSGNTASLTISGLQAEDEADYYCCSYAGTYIFGTGTKLTVL

SEQ ID NO: 3435 - protein, 107 aa, synthetic construct
EIQLTQSPSSLSASVGDRVTITCQASQDINKYLNWYQQKPGKAPKLLIYGATNLETGVPSRFSGSGSGTDFSFTINSLQPEDIATYYCQYYDNPPPTFGPGTKVEIK

SEQ ID NO: 3436 - protein, 111 aa, synthetic construct
QSVLTQPPSVSGAPGQRVTISCTGSNSNIGAGYDIHWYQQLPGTAPKLLIYANTNRPSGVPDRFSGSKSDTSASLAITGLQAEDEADYYCQSYDSSLSGVLFGGGTKVTVL

SEQ ID NO: 3437 - protein, 111 aa, synthetic construct
QPVLTQPPSVSAAPGQRVTISCTGSNSNIGAGYDVHWYQQLPGTAPKLLIYDNNNRPSGVPDRFSGSKSDTSASLAITGLQAEDEADYYCQSYDSSLSDSVFGYGTKLTVL

SEQ ID NO: 3438 - protein, 108 aa, synthetic construct
EIVLTQSPATLSVSPGERASLSCRASQSINSDLAWFQQKPGQAPRLLMFGASARAAGIPARFGGSGSGTEFTLTISGLQSEDFAVYYCLQYHNRPPWTFGQGTKVEIK

SEQ ID NO: 3439 - protein, 111 aa, synthetic construct
QSVLTQPPSVSGAPGQRVTISCTGSSSNIGAGYDVHWYQQLPGTAPKLLIYGNTHRPSGVPDRFSGSKSGTSASLAITGLQAEDEADYYCQSYDSSLIGSVFGGGTKLTVL

SEQ ID NO: 3440 - protein, 109 aa, synthetic construct
EMTMTQSPATLSVSPGERATLSCRASQSVSTNLAWYQQKPGQAPRLLIYGASTRATGIPARFSGSGSGTEFTLTISSLQSEDFAVYYCQQYDNWPPTWTFGQGTKVEIK

SEQ ID NO: 3441 - protein, 107 aa, synthetic construct
EMTLTQSPATLSVSPGETVTLSCRASQSLSNKLAWYQQRPGQAPTLLIHGASGRATGLPDRFSGSGYGTEFTLTIRRLQSEDFAVYYCQQYDSWPRTFGQGTKVEIK

SEQ ID NO: 3442 - protein, 103 aa, synthetic construct
QCLGPQGRGSPSPALGAAPTSGQVMMYTGTSSFQPLAPKLLIYGNNNRPSGVPDRFSGSKSGTSASLAVTGLQAEDEADYYCQSYDSRLSGVVFGGGTQLTVL

SEQ ID NO: 3443 - protein, 110 aa, synthetic construct
QSVLTQPPSVSEAPRQRVTISCSGSSSNIGKNAVNWYQQLPAQAPKLLIYYDHLLPSGVSDRFSGSRSGTSASLAISGLQSEDEADYYCAAWDDSLNGLVFGGGTKLTVL

SEQ ID NO: 3444 - protein, 110 aa, synthetic construct
QHELTQPPSVSEAPRQRVTISCSGSSANIGHNAVNWYQQLPGKAPKLLIYYDDLLPSGVSDRFSGSKSGTSASLAISGLQSEDEADYYCASWDDRLNGPVFGGGTKLTVL

SEQ ID NO: 3445 - protein, 113 aa, synthetic construct
TIVMTQSPDSVAVSLGERATINCRSSQSVLYSSNNKNYLTWYQQKPGQPPKLLIYWASTRESGVPDRFSGSGSGTHFTLTISSLQAEDVAVYYCQQYYSSPPTFGPGTKVEIK

SEQ ID NO: 3446 - protein, 107 aa, synthetic construct
EIQMTQSPSSLSASVGDRVTITCRASQSISSYLNWYQQKPGKAPKLLINAASSLQSGVPSRFSGSGSGTDFTLTISSLQPEDFATYHCQQGYSTPYTFGQGTKVEIK

SEQ ID NO: 3447 - protein, 108 aa, synthetic construct
SYVLTQPPSVSVAPGQTARITCGGNNIGSKSVHWYQQKPGQAPVLVVYDNSDRPSGIPARFSGSNSGNTATLTISRVEVGDEADYHCHVWDSSSDLHVFGTGTQLTVL

SEQ ID NO: 3448 - protein, 111 aa, synthetic construct
QSVVTQPPSVSGAPGQRVTISCTGSNSNIGAGYDVHWYQQLPGTAPKLLIYDNNNRPSGVPDRFSGSKSDTSASLAITGLQAEDEADYYCQSYDSSLIGSLFGGGTQLTVL

SEQ ID NO: 3449 - protein, 111 aa, synthetic construct
QSVVTQPPSVSGAPGQRVTISCAGSNSNIGAGYDVHWYQQLPGTAPQLLIYGNTNRPSGVPDRFSGSKSDTSASLAITGLQAEDEADYYCQSYDSSLSDSVFGGGTKLTVL

SEQ ID NO: 3450 - protein, 111 aa, synthetic construct
QSVLTQPRSVSGSPGQSVTISCTGNSSDVGDYNYVSWYQQHPGTAPKLMIYDVTKRPSGVPNRFSGSKSGNTASLTISGLQAEDEADYSCCSYSGTYIPLIFGPGTQLTVL

SEQ ID NO: 3451 - protein, 109 aa, synthetic construct
SYVLTQPPSVSVAPGQTARITCGGNNIGSKSVHWYQQKPGQAPVLVVYDDSDRPSGIPERFSGSNSGNTATLTISRVEVGDEADYYCQVWDGSSDHFYVFGTGTKVTVL

SEQ ID NO: 3452 - protein, 110 aa, synthetic construct
EPVLTQPPSASGSPGQSVTISCTRTSNDVGNYNYVSWYQLHPGKAPKALIYEVNKRPSGVPDRFSGSKSGNTASLTISGLQAEDEADYYCSSHTVNNNFVFGAGTKLTVL

SEQ ID NO: 3453 - protein, 109 aa, synthetic construct
QSVLTQPPSVSVAPGQTARITCGGNNIGSKSVHWYQQKPGQAPVLVVNDDSDRPSGIPERFSGSNSGNTATLTISRVEAGDEADYYCQVWDSSSDLHVVFGGGTKLTVL

SEQ ID NO: 3454 - protein, 111 aa, synthetic construct
SAVLTQPPSVSGAPGQRITISCTGSSSNIGAGYDVHWYQQLPRTAPKLLIYGNSNRPSGVPDRFSGSKSGTSASLAITGVQGEDEGDYYCQSYDSSASGSVFGGGTKLTVL

SEQ ID NO: 3455 - protein, 107 aa, synthetic construct
DIQMTQSPSSLSASVGDRVTITCQASQDISNYLNWYQQKPGKAPKLLIYDASNLETGVPSRFSGSGSGTEFTFTINSLQPEDIATYYCQQYDNLPIIFGQGTRLEIK

SEQ ID NO: 3456 - protein, 112 aa, synthetic construct
QYVVTQPPSVFGARGQRVTISCTESRSNIGAGFDVQGYQQFPGTAPKLIIYGNNIRPSRVHDRLFGSKCDTSASMAITGIQGEDEAYYYCQSYDSMLSDPYVFGIGTKVTVL

SEQ ID NO: 3457 - protein, 107 aa, synthetic construct
DIQLTQSPSSLSASVGDRVTITCRASHRIDRYLNWYQQKPGQAPKLLIYVASTLQSGVPSRFTGSGSGTDFTLTISSLQPEDFATYYCQQSYTTPRTFGPGTKVEIK

SEQ ID NO: 3458 - protein, 110 aa, synthetic construct
SYELTQPPSASGTPGQRVTISCSGSTSNIGSNTVKWYQHLPGTAPKLLIYSDDLRPSGVPDRFSGSKSGTSASLAISALQSEDESHYYCATWDDTLAGPVFGGGTQLTVL

SEQ ID NO: 3459 - protein, 108 aa, synthetic construct
SYVLTQPPSVSVAPGKTASLTCGGNNIGTKSVHWYQQKPGQAPVLVIYYDSDRPSGTPERFSGSNSGNTATLTISRVEAGDEADYYCQVWDSNSDHRVFGEGTKVTVL

SEQ ID NO: 3460 - protein, 111 aa, synthetic construct
QSVVTQPPSVSGAPGQRVTIPCTGSSSNIGAGYDVHWYQQVPGKAPTLLIYRNTHRPSGVPDRFSGSRSGTSASLAITGLQAEDEADYYCQSYDSSLSDSVFGGGTKVTVL

SEQ ID NO: 3461 - protein, 108 aa, synthetic construct
ETTLTQSPSVSVAPGQTARITCEGDNIGRKSVHWYQQKPAQAPVLVVYGDGDRPSGIPERLSGSTSGNTATLTISRVEAGDEADYYCQVWDSSSDLVLFGGGTQLTVL

SEQ ID NO: 3462 - protein, 111 aa, synthetic construct
SYELTQPPSASGTPGQRVTISCSGSSSNIGSNTVNWYQQLPGTAPKLLIYSNNQRPSGIPDRFSGSKSGTSASLVISGLQSEDEAGYYCAAWDDSLNGRLLFGGGTKVTVL

SEQ ID NO: 3463 - protein, 108 aa, synthetic construct
SYELTQPPSASGTPGQRVTISCSGSSSNIGSNYVCWYQQLPGTAPKLLIYGDIQRPSGVPDRFSGSKSGTSASLAISGLRSEDEADYYCATRDDGRWVFGGGTQLTVL

SEQ ID NO: 3464 - protein, 107 aa, synthetic construct
DIQMTQSPSSLSASVGDRVTITCRASQSTSIYLNWYQQKPGKAPKLLIYAASTLQSGVPSRFSGSGSGTDFTLTISSLQPEDFATYYCQQSYTTRWTFGQGTKVEIK

SEQ ID NO: 3465 - protein, 111 aa, synthetic construct
KFMLTQPHSVSEAPGKTVTISCTGSSGSIANNYVQWYQQRPGRAPTTIIYEDDQRPSGVPDRFSGSIDSSSNSASLTISGLKTEDEADYYCQSYHSRNLWVFGGGTKLTVL

SEQ ID NO: 3466 - protein, 108 aa, synthetic construct
QSVLTQPPSVSVAPGQTARIACGGNSIGSKSVHWYQQKPGQAPVLVVSDARDRPSGIPERFSGSNSVNTATLTISRVEAGDEADYYCQVWDSSSDHYVFGTGTKLTVL

SEQ ID NO: 3467 - protein, 108 aa, synthetic construct
QPVLTQPPSVSVSPGQTATITCSGDKLGDKYACWYQKKPGQSPVLVIYQDSERPSGIPERFSGSNSGNTATLTISGTQAMDEADYYCQAWDSSTAHWVFGGGTKVTVL

SEQ ID NO: 3468 - protein, 112 aa, synthetic construct
NFMLTQPHSVSESPGKTVTISCTRSSGSIASNYVQWYQQRPGSAPTTVIFEDNERPSGVPDRFSGSIDRSSNSASLTISALKTEDEADYYCQSYASSPFYWVFGGGTKLTVL

SEQ ID NO: 3469 - protein, 107 aa, synthetic construct
DIQVTQSPSSLSASVGDRVTITCRASQNIVSYLNWYQQKPGKAPKLLMFAASSLQSGVPSRFSGSGSGTDFTLTISSLQPEDFATYYCQQSYSTPRTFGQGTKVDIK

SEQ ID NO: 3470 - protein, 108 aa, synthetic construct
SYELTQPPSVSVAPGQTARITCGGNNIGSKSVHWYQQKPGQAPVLVVYDDSDRPSGIPERFSGSNSGNTATLTISRVEVGDEADYFCQVWDSSSVHYVFGTGTKLTVL

SEQ ID NO: 3471 - protein, 108 aa, synthetic construct
DIEMTQSPSSLSASVGDRVTISCRASQSISRYLNWYQQKPGKAPKLLIYAASSLQSGVPSRFSGSGSGTDFTLTISSLQPEDFATYYCQQSYRTPPLTFGPGTKVEIK

SEQ ID NO: 3472 - protein, 108 aa, synthetic construct
SYVLTQPPSVSVAPGQTARIPCGGNNIGSKSVHWYQQKPGQAPVLVVYDDSDRPSGIPERFSGSSSGNTATLTLSRVEAGDEADYYCQVWDSSSDLVIFGGGTKLTVL

SEQ ID NO: 3473 - protein, 110 aa, synthetic construct
QSVLTQPPSVSGAPGQRVTISCTASSNIGAGYDVHWYQQFPGRAPKLLIYGNNIRPSGVPDRFSGSKSGTSASLAITGLQAEDEADYYCQSSDTSLSDWVFGGGTQLTVL

SEQ ID NO: 3474 - protein, 108 aa, synthetic construct
EIQMTQSPSSLSASVGDRVTITCRASQSISRHLNWYQQKPGKAPKLLIYTASSLQSGVPSRFSGSGSGTDFTLTISSLQPEDFASYYCQQSYETPPWTFGQGTKVEIK

SEQ ID NO: 3475 - protein, 109 aa, synthetic construct
DIQMTQSPSTLSASVGDRVTITCRASQSIGSWLAWYQQKPGKAPKLVIYDASSLETGVPSRFSGSGSGTEFTLTISSLQPDDFASYYCQQYNGYSPGLTFGGGTKVEIK

SEQ ID NO: 3476 - protein, 107 aa, synthetic construct
DIQMTQSPSSLSASVGDRVTITCRASQSISSYLNWYQQKPGKAPKLLIYAASVLQSGVPSRFSGSGSETDFTLTISSLQPEDFATYYCQQSYSNFRTFGQGTKVEIK

SEQ ID NO: 3477 - protein, 107 aa, synthetic construct
ETTLTQSPATLSVSPGERATLSCRASQSVSSNLAWYQQKPGQAPRLLIYGASSRATGIPARFSGSGSGTEFTLTISSLQSEDFAVYHCQQYNNWPRTFGQGTKVEIK

SEQ ID NO: 3478 - protein, 108 aa, synthetic construct
DIVMTQSPSSLSASVGDRVTITCRASQSIGSYLNWYQQKPGKAPKLLIYAASSLPSGVPSRFSGSGFGTDFTLTISSLQPEDFATYYCQQSYSAPPNTFGQGTRLEIK

SEQ ID NO: 3479 - protein, 108 aa, synthetic construct
SHVLTQPPSVSAAPGQTARITCGGTNIGGRSVHWYQQKPGQAPVLVVYDDGDRPSGIPGRISGSNSGNTATLTISRVVAGDEADYYCQVWHSSSDSWVFGGGTKLTVL

SEQ ID NO: 3480 - protein, 113 aa, synthetic construct
DIPMTQSPDSLAVSLGERATINCKSSQNVLYSSNNKNYLAWYQQKPGQPPKLLIYWASSRESGVPDRFSGSGSGTDFTLTITRLQAEDVAVYYCQQYYSSPPTFGPGTKVEIK

SEQ ID NO: 3481 - protein, 111 aa, synthetic construct
QSVVTQPPSVSGAPGQRVTISCTGTNSNIGAGYDVHWYQQLPGTAPKLLIYANINRPSGVPDRFSGSKSGTSASLAITGLQAEDEADYYCQSYDSSLTAPLFGGRTKLTVL

SEQ ID NO: 3482 - protein, 108 aa, synthetic construct
SYELTQPPSVSVAPGQTAMITCGGNNIGSKSVHWYQQKPGQAPVLVVYDDSDRPSGIPERFSGSNSGNTATLTISRVEAGDEADYYCQVWDTSSDHQVFGGGTKLTVL

SEQ ID NO: 3483 - protein, 109 aa, synthetic construct
TMTLTQSPGTLSLSPGERATLSCRASQSVSSSYLAWYQQKPGQAPRLLIYGASSRAAGIPDRFIGSGSGTDFTLTISRLEPEDFAVYYCQQYGSSPPFTFGPGTKVEIK

SEQ ID NO: 3484 - protein, 104 aa, synthetic construct
DIQLTQSPSSLSASVGDRVSITCRASQTVRTFLNWYQQKPGKAPKLLVFAAPGGDPPRFSATGSGTDFTLTISSLQPEDFAIYFCQQSYSIPYTFGQGTKVEIK

SEQ ID NO: 3485 - protein, 110 aa, synthetic construct
SYELTQPPSASGTPGQRVTISCSGSSSNIGSNAVNWYQQLPGTAPKLLMYNYNQRPSGVPDRFSGSKSGTSASLAISGLQSEDEADYYCAAWDDSLNGVVFGGGTKLTVL

SEQ ID NO: 3486 - protein, 111 aa, synthetic construct
QSVLTQPPSVSGAPGQRVIISCTGSNSNIGAGYDVHWYQQLPGTAPKLLIYGNTNRPSGVPDRFSGSKSDTSASLAITGLQAEDEADYYCQSYDSGLTGSLFGGGTKLTVL

SEQ ID NO: 3487 - protein, 112 aa, synthetic construct
DIVMTQSPLSLPVTPGEPASISCRSSQSLLHSNGYKYLDWYLQKPGQSPQLLIYLGSNRASGVPDRFSGSGSGTDFTLKISRVEAEDVGVYYCMQALQAPPTFGQGTKVEIK

SEQ ID NO: 3488 - protein, 107 aa, synthetic construct
DITLTQSPSSLSASVGDRVTITCRASQSVSNYLNWYQQKPGKAPELLIYAASSLQSGVPLRFSVSGSGTAFNLTISSLQPGDFATYYCQQSYSTPLTFGGGTKVEIK

SEQ ID NO: 3489 - protein, 109 aa, synthetic construct
QTVVTQEPSLTVSPGGTVTLTCASSTGTVTNGYYPTWFQQKPGQAPRALIYSTNNKHSWTPARFSGSLLGGKAALTLSGVQPEDEADYYCLLYYGGVRVFGGGTKLTVL

SEQ ID NO: 3490 - protein, 107 aa, synthetic construct
EIPMTQSPSSLSASVGDRVTITCRASQGISNYLNWYQQRPGKAPKLLIYAASSLQSGVPSRFSGSGFGTDFTLTISSLQPDDFATYYCQQSYTTRWTFGQGTKVEIK

SEQ ID NO: 3491 - protein, 108 aa, synthetic construct
QPELTQPPSVSVAPGQTARITCGGDNIGTKSVHWYQQRPGQAPVLVVFDNSDRPSGIPERFSGSNSGNTATLTISRVEAGDEADFYCQVWDSVTDHVLFGGGTKVTVL

SEQ ID NO: 3492 - protein, 111 aa, synthetic construct
QSVLTQPPSVSGAPGQRVTISCTGSNSNIGAGYDVHWYQQLPGTAPKLLIYANANRPSGVPDRFSGSRSGTSASLAITGLQAEDEADYYCQSYDSSLSGSVFGGGTQLTVL

SEQ ID NO: 3493 - protein, 107 aa, synthetic construct
DILMTQSPSSLSASVGDRVTITCQASQDINNYLNWYQQKPGKAPKLLIYDASNLETGVPSRFSGSGSGTDFTFTISSLQPEDIATYYCQQYDNLPRTFGQGTKVEIK

SEQ ID NO: 3494 - protein, 107 aa, synthetic construct
EITLTQSPSTLSASVGDSVTITCRASQSIRSWLAWYQQKPGKAPKLLIYKASTLESGVPSRFSGSGSETEFTLTIRSLQPEDFATYYCQQYNTDRYTFGQGTKVEIK

SEQ ID NO: 3495 - protein, 108 aa, synthetic construct
TYVLTQPPSVSVAPGQPARITCGGHNIGGKSVHWYQQKPGQAPVLVVYDDGDRPSGIPERISGSNSGNTATLTISRVEAGDEADYYCQVWHSSSDSWVFGGGTKLTVL

SEQ ID NO: 3496 - protein, 111 aa, synthetic construct
QSVLTQPPSVSGAPGQRVTISCTGTNSNIGAGYDVHWYQQLPGTAPKLLIYGNINRPSGVPDRFSGSKSGSSASLAITGLQAEDEADYYCQSYDSSLSGSLFGGRTKLTVL

SEQ ID NO: 3497 - protein, 108 aa, synthetic construct
QHVLTQPPSVSVAPGQTARITCGGNNIGSKSVHWYQQKPGQAPVLVVYDDSDRPSGIPERFSGSNSGTTATLTISRVEAGDEADYFCQVWDSNNDHVVFGGGTKLTVL

SEQ ID NO: 3498 - protein, 106 aa, synthetic construct
EIVLTQSPATLSVSPGERATLSCRASQSVSSDLAWYQQQPGQAPRLLIYDASTRATGIPARFSGSGSGTEFTLTISSLQSEDFVVYYCQQYNDWLTFGGGTKVEIK

SEQ ID NO: 3499 - protein, 106 aa, synthetic construct
EIVMTQSPATLSVSPGERATLSCRASQSVSSDLAWYQQQPGQAPRLLIYDASTRATGIPARFSGSGSGTEFTLTISSLQSEDFVVYYCQQYNDWLTFGGGTKVEIK

SEQ ID NO: 3500 - protein, 107 aa, synthetic construct
DIQLTQSPSSLSASVGDRVTITCRASQSISNYLNWYQQKPGKAPKLQIYAASSLQSGVPSRFSGSGSGTDFTLTISSLQVEDFATYYCQQSYSTPVTFGQGTKVEIK

SEQ ID NO: 3501 - protein, 112 aa, synthetic construct
DIVMTQSPLSLPVTPGEPASISCRSSQSLLHSNGYTYLDWYLQKPGQSPQLLIYLGTNRASGVPDRFSGSGSGTDFTLKISRVEAEDVGIYYCMQALQTPLTFGGGTKVEIK

SEQ ID NO: 3502 - protein, 108 aa, synthetic construct
YYMLTQPPSVSVAPGQTARLTCGGNDIGGKAVHWYQQRPGQAPVLVVYDDSDRPSGIPERFSGSNSGNTATLTISRVEAGDEADYYCQMWDSRSDHPVFGGGTKVTVL

SEQ ID NO: 3503 - protein, 107 aa, synthetic construct
DIRMTQSPSSLSASIGDRVTITCRASQSISTILNWYQQKPGRAPKLLIYAASSLQSGVPSRFSGGGSGTDFTLTISSLQPEDFATYYCQQGSTTPQTFGRGTKVEIK

SEQ ID NO: 3504 - protein, 107 aa, synthetic construct
DIQMTQSPSSVSASVGDRVTITCRASQGISSWLAWYQQKPGKAPKLLIYAASSLQSGVPSRFSGSGSGTDFTLTISSLQPEDFATYYCQQANSFPITFGGGTKVEIK

SEQ ID NO: 3505 - protein, 107 aa, synthetic construct
EIVMTQSPSSLSASVGDRVTITCRASHRIDRYLNWYQQKPGQAPKLLIYVASTLQSGVPSRFTGSGSGTDFTLTISSLQPEDFATYYCQQSYTTPRTFGPGTKVEIK

SEQ ID NO: 3506 - protein, 113 aa, synthetic construct
EIVMTQSPLSLPVTPGEPASISCRSSQSLLDSDDVYTYLDWYLQKPGQSPQLLMYTLSYRASGVPDRFSGSGSGTNFTLKINRVKTEDVGVYYCMQRIEFPYTFGQGTKVEIK

SEQ ID NO: 3507 - protein, 107 aa, synthetic construct
PSELTQPPSVSVSPGQTASITCSGENLGRKYVCWYQQRSGQSPVLVIYRDDKRPSGIPERFSGSNSGNTATLTISGTQAMDEADYYCQAWDSRTAQVFGTGTKVTVL

SEQ ID NO: 3508 - protein, 107 aa, synthetic construct
DIQMTQSPSSLSASVGDRVTITCRASQTINNYLTWYQQKPGKAPNLLIYAASSLQSGVPSRFSGSGSGTDFTLTISSLQPEDFATYYCQQSYSSPITFGQGTRLEIK

SEQ ID NO: 3509 - protein, 110 aa, synthetic construct
KPVLTQPHSVSESPGKTVTISCTRSSGSIASNYVQWYQQRPGSSPSTVIYEDNQRPSGVPDRFSGSIDSSSNSASLTISGLQTDDEADYYCQSYDSSLWVFGGGTKLTVL

SEQ ID NO: 3510 - protein, 111 aa, synthetic construct
QSVLTQPPSVSGAPGQRVTISCTGSNSNIGAGYDVHWYQQLPGTAPKLLIYGNNNRPSGVPDRFSGSKSVTSASLAITGLQAEDEADYYCQSYDSSLSDSVFGGGTKVTVL

SEQ ID NO: 3511 - protein, 108 aa, synthetic construct
EIVMTQSPGTLSLSPGERATLSCRASQSVSSSYLAWYQQKPGQAPRLLIYGASSRATGIPDRFSGSGSGTDFTLTISRLEPEDFAVYYCQQYGSSPGTFGQGTKVEIK

SEQ ID NO: 3512 - protein, 107 aa, synthetic construct
DITMTQSPSSLSASVGDRVTIACRASQGISTSLNWCQQKPGKAPKLLISAASSLQSGVPSRFSGSGSGTDFTLTISNLQPEDFATYYCQQSYSTPWTFGQGTKVEIK

SEQ ID NO: 3513 - protein, 108 aa, synthetic construct
EIVMTQSPSSLSASVGDRVTITCRASQSIGTYLNWYQQKSGKAPKLLIYATSSLHSGVPSRFSGSGYGTDFTLTIDSVQPEDFATYYCQQSYNSPGFSFGQGTKVEIK

SEQ ID NO: 3514 - protein, 111 aa, synthetic construct
QSVVTQPPSVSGAPGQRVTISCTGSSSNIGTGYDVHWYQQLPGTAPKLLIYGDNNRPSGVPDRFSGSKSGTSASLAITGLQPDDEAAYYCQSYDSTLIGPVFGGGTKLTVL

SEQ ID NO: 3515 - protein, 110 aa, synthetic construct
NFMLTQPHSVSESPGKTVTISCTRSSGYIASNYVLWYQQRPGSAPTIVISEDNQRPSGVPERFSASVDSSSNSASLTISGLKTEDEADYYCQSYESDTVIFGGGTKLTVL

SEQ ID NO: 3516 - protein, 108 aa, synthetic construct
SPVLTQPPSVSVAPGQTARITCGGDNIGSKNVHWYQQKPGQAPVLVVYDDTDRPSGIPERFSGSNSGNTATLTISRVEAGDEADYYCQVWDTSGDHYVFGTGTKLTVL

SEQ ID NO: 3517 - protein, 108 aa, synthetic construct
PSELTQPPSASGTPGQGVTISCSGSSSNIGSNSVYWYQQLPGTAPKLLIYSNNQRPSGVPDRFSGSKSGTSASLAISGLRSEDEADYYCAAWDDSRWVFGGGTKLTVL

SEQ ID NO: 3518 - protein, 108 aa, synthetic construct
EIAMTQSPGTLSLSPGERATLSCRASQSVSSSYLAWYQQKPGQAPRLLIYGASSRATGIPDRFSGSGSGTDFTLTISRLEPEDFAVYYCQQYGSSPYTFGQGTKVEIK

SEQ ID NO: 3519 - protein, 113 aa, synthetic construct
DIQMTQSPDSLAVSLGERATINCKSSQSVLYSSNNKNYLAWYQQKPGQPPKLLIYWASTRESGVPDRFSGSGSGTDFTLTISSLQAEDVAVYYCQQYYTPPLTFGPGTKVEIK

SEQ ID NO: 3520 - protein, 110 aa, synthetic construct
TFMLTQPHSVSESPGKTVTISCTRSSGSIASNYVQWYQQRPGSAPTTVIYQDNERPSGVPDRFSGSIDSSSNSASLTISGLKTEDEADYYCQSYDTSNEVFGGGTKLTVL

SEQ ID NO: 3521 - protein, 108 aa, synthetic construct
QSVLTQPPSASGTPGQRVTITCSGRSSNIGSNSVNWYQQFPGTAPKLLIYGDDQRPSGVPDRFSGSKSGTSASLAISGLRSEDEADYYCATWDDSGWVFGGGTKLTVL

SEQ ID NO: 3522 - protein, 110 aa, synthetic construct
SHELTQPPSASGTPGQRVTISCSGSTSNIGSNTVKWYQHLPGTAPKLLIYSDDQRPSGVPDRFSGSKSGTSASLAISGLQSEDESDYYCAAWDDTLAGPVFGGGTKLTVL

SEQ ID NO: 3523 - protein, 112 aa, synthetic construct
DIVMTQSPDSLAVSLGERATINCKSSQSVLYRSKNKNYLAWYQQRPGQPPKLLIYWASTRESGVPDRFSGSGSGTDFTLTISSLQAEDVAVYYCQQYYSSPSFGPGTKVDIK

SEQ ID NO: 3524 - protein, 107 aa, synthetic construct
DIQMTQSPSSLSASVGDRVTIACRASQSISTYLNWYQQKPGKAPKVLIYAASSLPSGVPSRFRGSGSGTDFTLTISSLQPEDFATYYCQQSYNAPRTFGQGTKVEIK

SEQ ID NO: 3525 - protein, 107 aa, synthetic construct
DIQMTQSPSSLSASVGDTVTITCRASQGITNSLAWYQQKPGKAPNLLLYAASTLESGVPPRFRGSGSGTDFTLTISSLQPEDFATFYCQQYFDSPHTFGQGTKVEIK

SEQ ID NO: 3526 - protein, 109 aa, synthetic construct
QSALTQPASVSGSPGQSITISCTATTSDVGVFNYVSWYQQHPGKAPKLMIYEVSNRPSGVSNRFSGSKSGNTASLTISGLQAEDEADYFCSSYTTSSTVFGGGTQLTVL

SEQ ID NO: 3527 - protein, 110 aa, synthetic construct
QSVLTQPPSVSEAPRQRVTISCSGSSANIGHNAVNWYQQLPGKAPKLLIYYDDLLPSGVSDRFSGSKSGTSASLAISGLQSEDEADYYCASWDDRLNGPVFGGGTKLTVL

SEQ ID NO: 3528 - protein, 23 aa, synthetic construct
DTLMKQSPSSLLASVGDAVISSS

SEQ ID NO: 3529 - protein, 22 aa, synthetic construct
SYELTQPPSVSVAPGQTASITC

SEQ ID NO: 3530 - protein, 23 aa, synthetic construct
DITVTQSPSSLSTSVGDRVTITC

SEQ ID NO: 3531 - protein, 22 aa, synthetic construct
PSEVTQEPSLTVSPGGTVTLTC

SEQ ID NO: 3532 - protein, 23 aa, synthetic construct
DIQMTQTPSTLSASVGDRVTITC

SEQ ID NO: 3533 - protein, 23 aa, synthetic construct
ETTIKQSPSSLSALVGDRVTITC

SEQ ID NO: 3534 - protein, 23 aa, synthetic construct
EMTLTQSPATLSLSPGERATLSC

SEQ ID NO: 3535 - protein, 23 aa, synthetic construct
EMAMTQSPSSMSASVGDRVTITC

SEQ ID NO: 3536 - protein, 22 aa, synthetic construct
QSALTQPASVSGSAGQSITISC

SEQ ID NO: 3537 - protein, 22 aa, synthetic construct
QSVLTQPPSVSGAPGRGVTISC

SEQ ID NO: 3538 - protein, 23 aa, synthetic construct
EIMLTQSPGTLSLSPGERATLSR

SEQ ID NO: 3539 - protein, 23 aa, synthetic construct
DIRLTQSPSSLSASVGDRVTITC

SEQ ID NO: 3540 - protein, 23 aa, synthetic construct
EIPMTQSPATLSLAPGDRATLSC

SEQ ID NO: 3541 - protein, 22 aa, synthetic construct
SLFLTQPASVSGSPGQSITISC

SEQ ID NO: 3542 - protein, 23 aa, synthetic construct
EIPMTQSPSTLSASVGDRVTITC

SEQ ID NO: 3543 - protein, 23 aa, synthetic construct
EIQMTQSPPSLSASVGDSVTITC

SEQ ID NO: 3544 - protein, 23 aa, synthetic construct
EMTVTQSPSSLSASVGDRVTISC

SEQ ID NO: 3545 - protein, 23 aa, synthetic construct
DIVMTQSPLSLSVTPGQSASISC

SEQ ID NO: 3546 - protein, 23 aa, synthetic construct
EITLTQSPGTLSLSPGERATLSC

SEQ ID NO: 3547 - protein, 22 aa, synthetic construct
QPVMTQPPSASGSPGQSVTISC

SEQ ID NO: 3548 - protein, 22 aa, synthetic construct
QSVLTQPPSVSLAPGQTARITC

SEQ ID NO: 3549 - protein, 23 aa, synthetic construct
DIVLTQSPSSLSASIGDRVTFTC

SEQ ID NO: 3550 - protein, 23 aa, synthetic construct
EIVLTQSPGTLSLSPGERATLAC

SEQ ID NO: 3551 - protein, 23 aa, synthetic construct
DIPVTQSPSTLSASVGDRVTITC

SEQ ID NO: 3552 - protein, 23 aa, synthetic construct
EIGMTQSPSSLSASVGDRVTITC

SEQ ID NO: 3553 - protein, 22 aa, synthetic construct
SSVLIQPPSVSVSPGQTASITC

SEQ ID NO: 3554 - protein, 22 aa, synthetic construct
QSVLTQPPSVSGAPGQTVTISC

SEQ ID NO: 3555 - protein, 23 aa, synthetic construct
DIRLTQSPSSLCASVGDRVSITC

SEQ ID NO: 3556 - protein, 23 aa, synthetic construct
EIELTQSPSSLSASVGDRVTITC

SEQ ID NO: 3557 - protein, 22 aa, synthetic construct
SYELIQPPSASGTPGQRVTISC

SEQ ID NO: 3558 - protein, 23 aa, synthetic construct
DIPMTQSPSSLSASVGDRVSFTC

SEQ ID NO: 3559 - protein, 23 aa, synthetic construct
DIQLTQSPGSLSLSPGERATLFC

SEQ ID NO: 3560 - protein, 23 aa, synthetic construct
EIVVTQSPSSLSASVGDRVTIIC

SEQ ID NO: 3561 - protein, 22 aa, synthetic construct
QSVVTQPPSVSVSPGQTARITC

SEQ ID NO: 3562 - protein, 22 aa, synthetic construct
YYELTQPPSVSVAPGQTARITC

SEQ ID NO: 3563 - protein, 23 aa, synthetic construct
EMTLTQSPSFLSASVGDRVAITC

SEQ ID NO: 3564 - protein, 23 aa, synthetic construct
DIGMTQSPSSLSASVGDRVTITC

SEQ ID NO: 3565 - protein, 23 aa, synthetic construct
ETTLTQSPGTLSVFPGERATLSC

SEQ ID NO: 3566 - protein, 22 aa, synthetic construct
QSVLTQPPSASGTPGQRVTISC

SEQ ID NO: 3567 - protein, 23 aa, synthetic construct
EITLTQSPSSLSASVGDRVTITC

SEQ ID NO: 3568 - protein, 23 aa, synthetic construct
DIEMTQSPSSVSASVGDRVTITC

SEQ ID NO: 3569 - protein, 23 aa, synthetic construct
EIQLTQSPSSLSASLGDRVTITC

SEQ ID NO: 3570 - protein, 23 aa, synthetic construct
DIQVTQSPSSMSASVGDRVTITC

SEQ ID NO: 3571 - protein, 23 aa, synthetic construct
EIVMTQSPSSLSASVGDRVAITC

SEQ ID NO: 3572 - protein, 22 aa, synthetic construct
SYELTQPPSVSGAPGLRVTISC

SEQ ID NO: 3573 - protein, 23 aa, synthetic construct
EMTLTQSPPSLAASVGDRVTITC

SEQ ID NO: 3574 - protein, 22 aa, synthetic construct
YYVLTQPPSVSVAPGQTARITC

SEQ ID NO: 3575 - protein, 23 aa, synthetic construct
EMTLTQSPSYLSASAGDRVTITC

SEQ ID NO: 3576 - protein, 23 aa, synthetic construct
DIRMTQSPSSLSTSVGDRVTITC

SEQ ID NO: 3577 - protein, 23 aa, synthetic construct
EIVVTQSPSSLSASVGDRVTITC

SEQ ID NO: 3578 - protein, 22 aa, synthetic construct
QSVLTQPPSVSGAPVQRVTISC

SEQ ID NO: 3579 - protein, 23 aa, synthetic construct
EIQLTQSPSSLSASIGDRVIITC

SEQ ID NO: 3580 - protein, 22 aa, synthetic construct
QSVLTQPASVYGSPGQSITISC

SEQ ID NO: 3581 - protein, 23 aa, synthetic construct
EIVLTQSPGTLSLSPGERATLSC

SEQ ID NO: 3582 - protein, 22 aa, synthetic construct
QSVLTQPPSASGSPGQSVTISC

SEQ ID NO: 3583 - protein, 23 aa, synthetic construct
EMTLTQSPATLSLSPGERADLSC

SEQ ID NO: 3584 - protein, 22 aa, synthetic construct
QSKLTQPPSAFGTPGQRVTISC

SEQ ID NO: 3585 - protein, 23 aa, synthetic construct
DIQMTQSPSSLSAFVGDRISITC

SEQ ID NO: 3586 - protein, 22 aa, synthetic construct
QSVLTQPPSVSGAPGHRVTISC

SEQ ID NO: 3587 - protein, 23 aa, synthetic construct
DIAMTQSPSSLSASVGDRVTISC

SEQ ID NO: 3588 - protein, 22 aa, synthetic construct
QSELTQPPSTSGTPGQRVTISC

SEQ ID NO: 3589 - protein, 23 aa, synthetic construct
EMTITQSPSSLSASVGDRITITC

SEQ ID NO: 3590 - protein, 23 aa, synthetic construct
EIVMTQSPSTLSASVGDRVTITC

SEQ ID NO: 3591 - protein, 23 aa, synthetic construct
DIVLTQSPSSVSASVGDRVTITC

SEQ ID NO: 3592 - protein, 23 aa, synthetic construct
EIPLTQSPSSLSASVGDRVTLTC

SEQ ID NO: 3593 - protein, 23 aa, synthetic construct
EIVMTQSPATLSLSPGDRATLSC

SEQ ID NO: 3594 - protein, 22 aa, synthetic construct
QSELTQPPSASGTPGQRVSISC

SEQ ID NO: 3595 - protein, 22 aa, synthetic construct
QFVVTQPPSVFGAPGQRVTISC

SEQ ID NO: 3596 - protein, 23 aa, synthetic construct
EITLTQSPSTLSASVGDRVTITC

SEQ ID NO: 3597 - protein, 23 aa, synthetic construct
EIPMTQSPSFLSASVGDRVTITC

SEQ ID NO: 3598 - protein, 23 aa, synthetic construct
EIELTQSPSPLSASVGDRVTITC

SEQ ID NO: 3599 - protein, 22 aa, synthetic construct
SYELTQPLSASGTPGQRVTISC

SEQ ID NO: 3600 - protein, 23 aa, synthetic construct
ETTLTQSPSSVSASVGDTVTITC

SEQ ID NO: 3601 - protein, 23 aa, synthetic construct
EMTITQSPATLFVSPGDRATLSC

SEQ ID NO: 3602 - protein, 23 aa, synthetic construct
EMTMTQSPSSLSASVGDRVTITC

SEQ ID NO: 3603 - protein, 22 aa, synthetic construct
SHELTQPPSVSVSPGQTARITC

SEQ ID NO: 3604 - protein, 23 aa, synthetic construct
DIGMTQSPSSLSAAVGDRVTITC

SEQ ID NO: 3605 - protein, 22 aa, synthetic construct
QSVLTQPPSVSGAPGQRVTIPC

SEQ ID NO: 3606 - protein, 22 aa, synthetic construct
QYVLTQPPSVSVSPGQTARITC

SEQ ID NO: 3607 - protein, 23 aa, synthetic construct
DIRMTQSPSSLSAAVGDRVTITC

SEQ ID NO: 3608 - protein, 23 aa, synthetic construct
EMTLTQSPSSLSAYVGDRVTITC

SEQ ID NO: 3609 - protein, 23 aa, synthetic construct
EIPVTQSPSSVSASVGDRVTITC

SEQ ID NO: 3610 - protein, 23 aa, synthetic construct
DIRMTQSPSTLSASVGDRVTITC

SEQ ID NO: 3611 - protein, 22 aa, synthetic construct
QFVLNQPASVSGSPGQSITISC

SEQ ID NO: 3612 - protein, 23 aa, synthetic construct
EIVMTQSPGSLSLSPGERATLSC

SEQ ID NO: 3613 - protein, 23 aa, synthetic construct
EMPMTQSPSTLSASVGDRVTITC

SEQ ID NO: 3614 - protein, 23 aa, synthetic construct
DIQLTQSPDSLAVPLGERATINC

SEQ ID NO: 3615 - protein, 22 aa, synthetic construct
NYVLTQPPSASGTPGQRVTISC

SEQ ID NO: 3616 - protein, 22 aa, synthetic construct
QHVLTQPPSLSVAPGRTARITC

SEQ ID NO: 3617 - protein, 23 aa, synthetic construct
DIQLTQSPSFLSASVGDRVTITC

SEQ ID NO: 3618 - protein, 23 aa, synthetic construct
DIRVTQSPSSLSASVGDRVTITC

SEQ ID NO: 3619 - protein, 23 aa, synthetic construct
EMTMTQSPSTLSASVGDRVTITC

SEQ ID NO: 3620 - protein, 22 aa, synthetic construct
QPVVTQPPSVSGAPGQRVTISC

SEQ ID NO: 3621 - protein, 23 aa, synthetic construct
ETTLTQSPDSLAVSLGERATINC

SEQ ID NO: 3622 - protein, 22 aa, synthetic construct
QHVLTQPPSVSVAPGQTARVTC

SEQ ID NO: 3623 - protein, 23 aa, synthetic construct
EIVMTQSPSSLSASVRDRVTITC

SEQ ID NO: 3624 - protein, 23 aa, synthetic construct
EMTMTQSPGTLSVSPGERATLSC

SEQ ID NO: 3625 - protein, 23 aa, synthetic construct
EMTMTQSPSSLSASVGDRVTIAC

SEQ ID NO: 3626 - protein, 23 aa, synthetic construct
EMTLTQSPGTLSVSPGERATLSC

SEQ ID NO: 3627 - protein, 22 aa, synthetic construct
SYELTQPPSVSVAPGKTARITC

SEQ ID NO: 3628 - protein, 23 aa, synthetic construct
ETTLTQSPGTLSLSPGERATLSC

SEQ ID NO: 3629 - protein, 23 aa, synthetic construct
ETTLTQSPGTLYLSPGERATLSC

SEQ ID NO: 3630 - protein, 23 aa, synthetic construct
EMTLTQSPLSSHVTLGQPASISC

SEQ ID NO: 3631 - protein, 23 aa, synthetic construct
DIQMTQSPSSLSASVGDRVTVTC

SEQ ID NO: 3632 - protein, 23 aa, synthetic construct
DIGMTQSPSTLAASVGDRVTITC

SEQ ID NO: 3633 - protein, 23 aa, synthetic construct
ETTLTQSPATLSLSPGERATLSC

SEQ ID NO: 3634 - protein, 22 aa, synthetic construct
QSVLTQPPSVSAAPGQRVTISC

SEQ ID NO: 3635 - protein, 23 aa, synthetic construct
DIVMTQSPSTLSASVGDRVTITC

SEQ ID NO: 3636 - protein, 23 aa, synthetic construct
EIRLTQSPSSLSASVRDRVTITC

SEQ ID NO: 3637 - protein, 23 aa, synthetic construct
EITMTQSPSSLSASVGDRVTITC

SEQ ID NO: 3638 - protein, 23 aa, synthetic construct
DITLTQSPSSLSASVGDRVTFTC

SEQ ID NO: 3639 - protein, 23 aa, synthetic construct
DMTLTQSPDSLAVSLGERATINC

SEQ ID NO: 3640 - protein, 22 aa, synthetic construct
QHVLTQPPSVSVAPGQTASITC

SEQ ID NO: 3641 - protein, 23 aa, synthetic construct
DIPLTQSPSSVSASVGDRVTITC

SEQ ID NO: 3642 - protein, 23 aa, synthetic construct
DIPVTQSPSSLSASVGDRVTITC

SEQ ID NO: 3643 - protein, 23 aa, synthetic construct
DITMTQTPATLSVSPGERATLSC

SEQ ID NO: 3644 - protein, 23 aa, synthetic construct
ETALTQSPGTLSLSPGERATLSC

SEQ ID NO: 3645 - protein, 23 aa, synthetic construct
DIVLTQSPSSLPASVGDRVTITC

SEQ ID NO: 3646 - protein, 23 aa, synthetic construct
DITLTQSPSTLSASVGARVTITC

SEQ ID NO: 3647 - protein, 22 aa, synthetic construct
QPVLTQPPSVSGAPGQRVTISC

SEQ ID NO: 3648 - protein, 23 aa, synthetic construct
DMTMTQSPSFLSASVGDRVTITC

SEQ ID NO: 3649 - protein, 22 aa, synthetic construct
SSELSQQPSVSGAPGQRVIISC

SEQ ID NO: 3650 - protein, 22 aa, synthetic construct
QSGLTQPPSVSGAPGQRVTISC

SEQ ID NO: 3651 - protein, 22 aa, synthetic construct
SHVLTQPPSVSVSPRQTARITC

SEQ ID NO: 3652 - protein, 22 aa, synthetic construct
QPMLTQPHSVSESPGKTVTISC

SEQ ID NO: 3653 - protein, 23 aa, synthetic construct
EIEMTQSPSSLFASVGDRVTITC

SEQ ID NO: 3654 - protein, 23 aa, synthetic construct
EIQMTQSPSSLSASIGDRVTITC

SEQ ID NO: 3655 - protein, 23 aa, synthetic construct
DMRMTQSPSSLSASVGDRVTITC

SEQ ID NO: 3656 - protein, 23 aa, synthetic construct
EIRLTQSPSSLPASVGDRVTITC

SEQ ID NO: 3657 - protein, 22 aa, synthetic construct
QHVLTQPPSASGTPGQRVTISC

SEQ ID NO: 3658 - protein, 23 aa, synthetic construct
DIQMTQSPSTLSASVGDRVAITC

SEQ ID NO: 3659 - protein, 23 aa, synthetic construct
EMTLTQSPATLSVSPGERATLFC

SEQ ID NO: 3660 - protein, 23 aa, synthetic construct
EMTLTQSPPSLSASVGDRVSITC

SEQ ID NO: 3661 - protein, 22 aa, synthetic construct
QPVLTQPPSVSVSPGQTARITC

SEQ ID NO: 3662 - protein, 22 aa, synthetic construct
QFVLTQPPSASGSPGQSVTISC

SEQ ID NO: 3663 - protein, 23 aa, synthetic construct
EIGVTQSPSTLSASVGDRVTITC

SEQ ID NO: 3664 - protein, 23 aa, synthetic construct
DIAMTQSPSSLSASVGDRVTFTC

SEQ ID NO: 3665 - protein, 22 aa, synthetic construct
QSVVTQEPSFSVSPGGTVTLTC

SEQ ID NO: 3666 - protein, 22 aa, synthetic construct
SYELTQPPSVSVAPGQTARIPC

SEQ ID NO: 3667 - protein, 22 aa, synthetic construct
YYELTQPPSVSVSPGQTARITC

SEQ ID NO: 3668 - protein, 23 aa, synthetic construct
ETTLTQSPGTLSLSPGERATFSC

SEQ ID NO: 3669 - protein, 23 aa, synthetic construct
ETTLTQSPGTLSLSPGERVTLSC

SEQ ID NO: 3670 - protein, 23 aa, synthetic construct
EMALTQSPATLSLSPGEGATLSC

SEQ ID NO: 3671 - protein, 23 aa, synthetic construct
EIRMTQSPSSLSASVGDRVTITC

SEQ ID NO: 3672 - protein, 23 aa, synthetic construct
EIVLTQSPSTLSASVGDRVTITC

SEQ ID NO: 3673 - protein, 23 aa, synthetic construct
EMTMTQSPSTVSASVGDRVTITC

SEQ ID NO: 3674 - protein, 23 aa, synthetic construct
EIAMTQSPSSLSASVGDRVTITC

SEQ ID NO: 3675 - protein, 23 aa, synthetic construct
EMTLTQSPATLSVSPGGRATLSC

SEQ ID NO: 3676 - protein, 23 aa, synthetic construct
EMTLTQSPGTLSVSPGKRATLSC

SEQ ID NO: 3677 - protein, 23 aa, synthetic construct
EIVMTQSPATLSVSPGERVTLSC

SEQ ID NO: 3678 - protein, 22 aa, synthetic construct
QSVMTQPPSVSGAPGQRVTISC

SEQ ID NO: 3679 - protein, 23 aa, synthetic construct
EIQLTQSPSTLSASVGDRVTITC

SEQ ID NO: 3680 - protein, 22 aa, synthetic construct
QPGLTQPPSVSGAPGQRVTISC

SEQ ID NO: 3681 - protein, 23 aa, synthetic construct
EIPMTQSPGTLSLSPGERATLSC

SEQ ID NO: 3682 - protein, 22 aa, synthetic construct
QPVLTQPPSSSASPGESARLTC

SEQ ID NO: 3683 - protein, 23 aa, synthetic construct
DIRMTQSPSFLSASVGDRVTITC

SEQ ID NO: 3684 - protein, 22 aa, synthetic construct
SYVLTQPPSVSVAPGKTAKITC

SEQ ID NO: 3685 - protein, 23 aa, synthetic construct
EIQMTQSPSVLSASVGDRVTITC

SEQ ID NO: 3686 - protein, 23 aa, synthetic construct
EIAMTQSPLSLPVTPGEPASISC

SEQ ID NO: 3687 - protein, 23 aa, synthetic construct
DIRLTQSPSFLSASVGDSVTITC

SEQ ID NO: 3688 - protein, 23 aa, synthetic construct
DIPVTQSPDSLAVSLGERATINC

SEQ ID NO: 3689 - protein, 23 aa, synthetic construct
DIQVTQSPDSLAVSLGERATINC

SEQ ID NO: 3690 - protein, 22 aa, synthetic construct
SYVLTQPPSVSVSPGQTASITC

SEQ ID NO: 3691 - protein, 22 aa, synthetic construct
QYVLTQPPSASGTPVQRVTISC

SEQ ID NO: 3692 - protein, 22 aa, synthetic construct
KFMLTQPHSVSESPGKTVTISC

SEQ ID NO: 3693 - protein, 23 aa, synthetic construct
DIVMTQSPSLLSASVGDRVTITC

SEQ ID NO: 3694 - protein, 23 aa, synthetic construct
EIVMTQSPSTLSASAGDRVTITC

SEQ ID NO: 3695 - protein, 23 aa, synthetic construct
EIRMTQSPSTLSASVGDRVTITC

SEQ ID NO: 3696 - protein, 23 aa, synthetic construct
EIGVTQSPSSLSASVGDRVTITC

SEQ ID NO: 3697 - protein, 23 aa, synthetic construct
DIVLTQSPDSLAVSLGERATINC

SEQ ID NO: 3698 - protein, 23 aa, synthetic construct
EMALTQSPGTLSLSPGERATLSC

SEQ ID NO: 3699 - protein, 23 aa, synthetic construct
DIRVTQSPDSLAVSLGERATINC

SEQ ID NO: 3700 - protein, 23 aa, synthetic construct
DIPMTQSPSFLSASVGDRVTITC

SEQ ID NO: 3701 - protein, 23 aa, synthetic construct
EIPLTQSPATLSLSPGERATLSC

SEQ ID NO: 3702 - protein, 23 aa, synthetic construct
DIRMTQSPLSLPVTPGEPASISC

SEQ ID NO: 3703 - protein, 23 aa, synthetic construct
EMTLTQSPLSLPVTPGEPASISC

SEQ ID NO: 3704 - protein, 23 aa, synthetic construct
EIVMTQSPDSLAVSLGERATINC

SEQ ID NO: 3705 - protein, 22 aa, synthetic construct
QHVLTQPPSVSVAPGKTARITC

SEQ ID NO: 3706 - protein, 23 aa, synthetic construct
EITMTQSPATLSVSPGERATLSC

SEQ ID NO: 3707 - protein, 22 aa, synthetic construct
QYVLTQPPSVSVAPGQTARITC

SEQ ID NO: 3708 - protein, 23 aa, synthetic construct
EITLTQSPSSVSASVGDRVTITC

SEQ ID NO: 3709 - protein, 11 aa, synthetic construct
AASKSSGSYLT

SEQ ID NO: 3710 - protein, 11 aa, synthetic construct
GGNNIGSKGVH

SEQ ID NO: 3711 - protein, 11 aa, synthetic construct
RSSQYVSNFLN

SEQ ID NO: 3712 - protein, 11 aa, synthetic construct
RANESISTFLS

SEQ ID NO: 3713 - protein, 14 aa, synthetic construct
GSSTGPVTTGHWPF

SEQ ID NO: 3714 - protein, 11 aa, synthetic construct
RASQSIDTWLA

SEQ ID NO: 3715 - protein, 11 aa, synthetic construct
RASQSISRFLK

SEQ ID NO: 3716 - protein, 11 aa, synthetic construct
RASQNINIYLA

SEQ ID NO: 3717 - protein, 11 aa, synthetic construct
QASQDITDYLN

SEQ ID NO: 3718 - protein, 14 aa, synthetic construct
TGASGDIDTYNYVS

SEQ ID NO: 3719 - protein, 11 aa, synthetic construct
RASQDISTYVN

SEQ ID NO: 3720 - protein, 11 aa, synthetic construct
RASQDVNTAVA

SEQ ID NO: 3721 - protein, 12 aa, synthetic construct
RARQSVGSGFLA

SEQ ID NO: 3722 - protein, 11 aa, synthetic construct
RASQNIATFLN

SEQ ID NO: 3723 - protein, 11 aa, synthetic construct
RASQTVNSYLN

SEQ ID NO: 3724 - protein, 11 aa, synthetic construct
GGNNIADQIVH

SEQ ID NO: 3725 - protein, 11 aa, synthetic construct
RASQSVGTYLG

SEQ ID NO: 3726 - protein, 14 aa, synthetic construct
TGASSDVGGYNFVS

SEQ ID NO: 3727 - protein, 11 aa, synthetic construct
RASQSIGPWLA

SEQ ID NO: 3728 - protein, 11 aa, synthetic construct
RASQSISRYLH

SEQ ID NO: 3729 - protein, 11 aa, synthetic construct
RASQYINNYLN

SEQ ID NO: 3730 - protein, 11 aa, synthetic construct
RASQSIGGYLN

SEQ ID NO: 3731 - protein, 11 aa, synthetic construct
RASQNISTYLN

SEQ ID NO: 3732 - protein, 17 aa, synthetic construct
ESSKSLLHSGDGKTYLY

SEQ ID NO: 3733 - protein, 12 aa, synthetic construct
RASESVSSEHLA

SEQ ID NO: 3734 - protein, 14 aa, synthetic construct
TGTSSDVGDSNYVS

SEQ ID NO: 3735 - protein, 11 aa, synthetic construct
RASQTINSYLN

SEQ ID NO: 3736 - protein, 11 aa, synthetic construct
RTSLNIKNYLN

SEQ ID NO: 3737 - protein, 11 aa, synthetic construct
GGDNIGSYRVH

SEQ ID NO: 3738 - protein, 11 aa, synthetic construct
RASQSINNYLN

SEQ ID NO: 3739 - protein, 11 aa, synthetic construct
RASQSVTSSLA

SEQ ID NO: 3740 - protein, 11 aa, synthetic construct
RASQSINNRLA

SEQ ID NO: 3741 - protein, 12 aa, synthetic construct
RASQSISSSYLN

SEQ ID NO: 3742 - protein, 11 aa, synthetic construct
SGDLLANTYAR

SEQ ID NO: 3743 - protein, 14 aa, synthetic construct
TGSSSNIGAGHDVH

SEQ ID NO: 3744 - protein, 11 aa, synthetic construct
QASQDIGTYLS

SEQ ID NO: 3745 - protein, 11 aa, synthetic construct
RASHGITDSLA

SEQ ID NO: 3746 - protein, 11 aa, synthetic construct
RASHDISKSLA

SEQ ID NO: 3747 - protein, 13 aa, synthetic construct
SGSSSNIGSNFVY

SEQ ID NO: 3748 - protein, 14 aa, synthetic construct
TGTTSNIGAGYDAH

SEQ ID NO: 3749 - protein, 11 aa, synthetic construct
RAAQSIGTYLN

SEQ ID NO: 3750 - protein, 12 aa, synthetic construct
RASQSVRSSYLA

SEQ ID NO: 3751 - protein, 11 aa, synthetic construct
RASQSIDNYLN

SEQ ID NO: 3752 - protein, 11 aa, synthetic construct
SGDLVEKKYVR

SEQ ID NO: 3753 - protein, 11 aa, synthetic construct
GGKNIGGQSVQ

SEQ ID NO: 3754 - protein, 11 aa, synthetic construct
RASQNVSNYLG

SEQ ID NO: 3755 - protein, 11 aa, synthetic construct
RASQMIRTFLN

SEQ ID NO: 3756 - protein, 14 aa, synthetic construct
TGTSSDIGAYNYVS

SEQ ID NO: 3757 - protein, 13 aa, synthetic construct
RASQSISDSRYLA

SEQ ID NO: 3758 - protein, 13 aa, synthetic construct
SGHFSNIGDNTVN

SEQ ID NO: 3759 - protein, 11 aa, synthetic construct
RASQNIVGYLN

SEQ ID NO: 3760 - protein, 11 aa, synthetic construct
RASQDIRSRLG

SEQ ID NO: 3761 - protein, 11 aa, synthetic construct
RAGHSIRNYLN

SEQ ID NO: 3762 - protein, 11 aa, synthetic construct
QASQDIRSFLN

SEQ ID NO: 3763 - protein, 14 aa, synthetic construct
TGSDSNIGAGYDVH

SEQ ID NO: 3764 - protein, 11 aa, synthetic construct
RASQNINNWLA

SEQ ID NO: 3765 - protein, 11 aa, synthetic construct
GGSDIGSKGVH

SEQ ID NO: 3766 - protein, 11 aa, synthetic construct
RASQGINNFLA

SEQ ID NO: 3767 - protein, 12 aa, synthetic construct
RASQSVSSGHLA

SEQ ID NO: 3768 - protein, 14 aa, synthetic construct
TGSNSNLGAGYDVH

SEQ ID NO: 3769 - protein, 11 aa, synthetic construct
QASHDISDYLN

SEQ ID NO: 3770 - protein, 11 aa, synthetic construct
RASQSIMRYLN

SEQ ID NO: 3771 - protein, 11 aa, synthetic construct
RASQNINSYLN

SEQ ID NO: 3772 - protein, 14 aa, synthetic construct
TATSSDVGSYNYVS

SEQ ID NO: 3773 - protein, 11 aa, synthetic construct
RASQAIGNYVA

SEQ ID NO: 3774 - protein, 12 aa, synthetic construct
RASQSVRSDYLA

SEQ ID NO: 3775 - protein, 11 aa, synthetic construct
RASQGIRTYLA

SEQ ID NO: 3776 - protein, 14 aa, synthetic construct
TGTNSDVGGHNSVS

SEQ ID NO: 3777 - protein, 11 aa, synthetic construct
RASQSVSRKLA

SEQ ID NO: 3778 - protein, 13 aa, synthetic construct
CGSSSNLGSNCVN

SEQ ID NO: 3779 - protein, 14 aa, synthetic construct
TGTSSDLGNFNYVS

SEQ ID NO: 3780 - protein, 11 aa, synthetic construct
RASQSIFSYLN

SEQ ID NO: 3781 - protein, 13 aa, synthetic construct
SGSSSNIGGNVVN

SEQ ID NO: 3782 - protein, 11 aa, synthetic construct
RASQSIRGHLN

SEQ ID NO: 3783 - protein, 11 aa, synthetic construct
RARQSISNWLA

SEQ ID NO: 3784 - protein, 11 aa, synthetic construct
RASQTISRYLN

SEQ ID NO: 3785 - protein, 11 aa, synthetic construct
RASQDISSYLA

SEQ ID NO: 3786 - protein, 11 aa, synthetic construct
RASQSFNNYLA

SEQ ID NO: 3787 - protein, 11 aa, synthetic construct
RASQSISGYLN

SEQ ID NO: 3788 - protein, 11 aa, synthetic construct
RASQSIRDFLN

SEQ ID NO: 3789 - protein, 13 aa, synthetic construct
SGTNSNIGGNTVN

SEQ ID NO: 3790 - protein, 11 aa, synthetic construct
RASQGIPSFLA

SEQ ID NO: 3791 - protein, 11 aa, synthetic construct
RASQSIGKYLN

SEQ ID NO: 3792 - protein, 13 aa, synthetic construct
SGGSSNIGSYPVS

SEQ ID NO: 3793 - protein, 11 aa, synthetic construct
RASQSIHTYLN

SEQ ID NO: 3794 - protein, 11 aa, synthetic construct
QAGQDISNHLS

SEQ ID NO: 3795 - protein, 11 aa, synthetic construct
SGDALPSQYAY

SEQ ID NO: 3796 - protein, 11 aa, synthetic construct
RASQTISNYLN

SEQ ID NO: 3797 - protein, 11 aa, synthetic construct
RASQSITRYLN

SEQ ID NO: 3798 - protein, 14 aa, synthetic construct
SGSNSNIGAGYDVH

SEQ ID NO: 3799 - protein, 11 aa, synthetic construct
SGDALPRKYAH

SEQ ID NO: 3800 - protein, 11 aa, synthetic construct
RASQIITAYLN

SEQ ID NO: 3801 - protein, 11 aa, synthetic construct
RASQHFSNWLA

SEQ ID NO: 3802 - protein, 11 aa, synthetic construct
RASQSISGWLA

SEQ ID NO: 3803 - protein, 14 aa, synthetic construct
TGTSSDVGDYNYVS

SEQ ID NO: 3804 - protein, 12 aa, synthetic construct
RASQSISRTYLA

SEQ ID NO: 3805 - protein, 11 aa, synthetic construct
RASQSIGSRLA

SEQ ID NO: 3806 - protein, 17 aa, synthetic construct
KSSQSVFSSSNNRNNLA

SEQ ID NO: 3807 - protein, 11 aa, synthetic construct
RASQNINGYLN

SEQ ID NO: 3808 - protein, 12 aa, synthetic construct
RASQSVGSGFLA

SEQ ID NO: 3809 - protein, 13 aa, synthetic construct
SGNRSNIGDNYVY

SEQ ID NO: 3810 - protein, 11 aa, synthetic construct
RASQGFGSYVA

SEQ ID NO: 3811 - protein, 11 aa, synthetic construct
RASQGIRNDLG

SEQ ID NO: 3812 - protein, 11 aa, synthetic construct
RASQSISNWLA

SEQ ID NO: 3813 - protein, 17 aa, synthetic construct
KSSQSVLSSSNNRNYLS

SEQ ID NO: 3814 - protein, 11 aa, synthetic construct
RASQSVRTYLN

SEQ ID NO: 3815 - protein, 11 aa, synthetic construct
GGNNVGSTSVH

SEQ ID NO: 3816 - protein, 11 aa, synthetic construct
RASQSISSHLS

SEQ ID NO: 3817 - protein, 11 aa, synthetic construct
RASQSVDSNLA

SEQ ID NO: 3818 - protein, 11 aa, synthetic construct
RASQDISNFLA

SEQ ID NO: 3819 - protein, 11 aa, synthetic construct
RASQSISDYLN

SEQ ID NO: 3820 - protein, 11 aa, synthetic construct
GGNNIGSKSVY

SEQ ID NO: 3821 - protein, 11 aa, synthetic construct
QASQDIDNFLN

SEQ ID NO: 3822 - protein, 12 aa, synthetic construct
RASQSVRSGYLA

SEQ ID NO: 3823 - protein, 11 aa, synthetic construct
RASQTISSWLA

SEQ ID NO: 3824 - protein, 12 aa, synthetic construct
RASLSVSAGYLA

SEQ ID NO: 3825 - protein, 16 aa, synthetic construct
RSSESLVHSDGNTYLN

SEQ ID NO: 3826 - protein, 12 aa, synthetic construct
RASQSVSTTYLA

SEQ ID NO: 3827 - protein, 11 aa, synthetic construct
RASQSVSDYLA

SEQ ID NO: 3828 - protein, 11 aa, synthetic construct
RASQSISRFFN

SEQ ID NO: 3829 - protein, 11 aa, synthetic construct
RASQTVSKYLN

SEQ ID NO: 3830 - protein, 14 aa, synthetic construct
TGSSSDVGGYNYVS

SEQ ID NO: 3831 - protein, 11 aa, synthetic construct
QASQHINNYLN

SEQ ID NO: 3832 - protein, 13 aa, synthetic construct
SGSNSNIGSNTVS

SEQ ID NO: 3833 - protein, 11 aa, synthetic construct
QASQDITTYLN

SEQ ID NO: 3834 - protein, 11 aa, synthetic construct
RASQSISSYLH

SEQ ID NO: 3835 - protein, 11 aa, synthetic construct
QASQDIRNYLN

SEQ ID NO: 3836 - protein, 17 aa, synthetic construct
KTSQSVLDRSDNRNYLA

SEQ ID NO: 3837 - protein, 11 aa, synthetic construct
RASQNINTYLN

SEQ ID NO: 3838 - protein, 11 aa, synthetic construct
QASQDINNFLN

SEQ ID NO: 3839 - protein, 11 aa, synthetic construct
RASQSIYNYLN

SEQ ID NO: 3840 - protein, 17 aa, synthetic construct
KSSQSVLSSSNNKNYLT

SEQ ID NO: 3841 - protein, 11 aa, synthetic construct
QASQDIFNYLT

SEQ ID NO: 3842 - protein, 11 aa, synthetic construct
GVNNFGSKSVP

SEQ ID NO: 3843 - protein, 11 aa, synthetic construct
RASQDISGWLA

SEQ ID NO: 3844 - protein, 11 aa, synthetic construct
RASQSVTNYLA

SEQ ID NO: 3845 - protein, 11 aa, synthetic construct
RASQSVSGNLA

SEQ ID NO: 3846 - protein, 12 aa, synthetic construct
RASESVSSGYLA

SEQ ID NO: 3847 - protein, 11 aa, synthetic construct
RASQTINRYLN

SEQ ID NO: 3848 - protein, 11 aa, synthetic construct
RASQTISTYLN

SEQ ID NO: 3849 - protein, 11 aa, synthetic construct
RASQSINTWLA

SEQ ID NO: 3850 - protein, 16 aa, synthetic construct
RYTQSLLLSNGYNYLD

SEQ ID NO: 3851 - protein, 11 aa, synthetic construct
RASQGISSYVA

SEQ ID NO: 3852 - protein, 11 aa, synthetic construct
GEDGIGSKSVH

SEQ ID NO: 3853 - protein, 13 aa, synthetic construct
TRNSGSIASNYVQ

SEQ ID NO: 3854 - protein, 14 aa, synthetic construct
TGSGSNIGAGYDVH

SEQ ID NO: 3855 - protein, 11 aa, synthetic construct
RASQTISNNLA

SEQ ID NO: 3856 - protein, 14 aa, synthetic construct
AGSGSNIGAGYDVH

SEQ ID NO: 3857 - protein, 14 aa, synthetic construct
TGSSSNIGAGSDVH

SEQ ID NO: 3858 - protein, 11 aa, synthetic construct
SGEALPMQYTY

SEQ ID NO: 3859 - protein, 12 aa, synthetic construct
RASQSVSSGYLA

SEQ ID NO: 3860 - protein, 14 aa, synthetic construct
TGTSSDIGGYNYVS

SEQ ID NO: 3861 - protein, 11 aa, synthetic construct
QATQDINNSLN

SEQ ID NO: 3862 - protein, 11 aa, synthetic construct
RASQSISTTLA

SEQ ID NO: 3863 - protein, 11 aa, synthetic construct
RASQSIGIYLN

SEQ ID NO: 3864 - protein, 13 aa, synthetic construct
TRSSGGIVNNYVQ

SEQ ID NO: 3865 - protein, 11 aa, synthetic construct
RPSQSISSFLN

SEQ ID NO: 3866 - protein, 14 aa, synthetic construct
GLSSGSVSTSYYPS

SEQ ID NO: 3867 - protein, 11 aa, synthetic construct
SGDTLPTQYAY

SEQ ID NO: 3868 - protein, 12 aa, synthetic construct
RASQSVSSSHLA

SEQ ID NO: 3869 - protein, 11 aa, synthetic construct
GGNEIGSKSVH

SEQ ID NO: 3870 - protein, 11 aa, synthetic construct
QASQDITNYLN

SEQ ID NO: 3871 - protein, 11 aa, synthetic construct
RASQSVSNYLA

SEQ ID NO: 3872 - protein, 17 aa, synthetic construct
KSSQSVLYSSNSQNYLA

SEQ ID NO: 3873 - protein, 12 aa, synthetic construct
RASQSVSSTYLA

SEQ ID NO: 3874 - protein, 11 aa, synthetic construct
QASQDISNSLH

SEQ ID NO: 3875 - protein, 13 aa, synthetic construct
SGSSSNIGSNTLN

SEQ ID NO: 3876 - protein, 11 aa, synthetic construct
GGNDIGSKNVH

SEQ ID NO: 3877 - protein, 16 aa, synthetic construct
RSSQSLLHSNGHNYLD

SEQ ID NO: 3878 - protein, 11 aa, synthetic construct
RASQSVSNNLA

SEQ ID NO: 3879 - protein, 11 aa, synthetic construct
RASQSVRSNLA

SEQ ID NO: 3880 - protein, 11 aa, synthetic construct
RASQTISSYLN

SEQ ID NO: 3881 - protein, 11 aa, synthetic construct
RASQSLSGYLA

SEQ ID NO: 3882 - protein, 11 aa, synthetic construct
RASQGISYSLA

SEQ ID NO: 3883 - protein, 14 aa, synthetic construct
TLPSDINVGSYNVY

SEQ ID NO: 3884 - protein, 11 aa, synthetic construct
RASQGISGWLA

SEQ ID NO: 3885 - protein, 12 aa, synthetic construct
RASQSVSSSFLA

SEQ ID NO: 3886 - protein, 11 aa, synthetic construct
RASQGIRNYLA

SEQ ID NO: 3887 - protein, 16 aa, synthetic construct
RSSQSLLHSNGYNYLD

SEQ ID NO: 3888 - protein, 11 aa, synthetic construct
RASQSINTYLN

SEQ ID NO: 3889 - protein, 11 aa, synthetic construct
RASQSVSSKLA

SEQ ID NO: 3890 - protein, 11 aa, synthetic construct
RASQSINSWLA

SEQ ID NO: 3891 - protein, 13 aa, synthetic construct
TGSSGYIASNYVQ

SEQ ID NO: 3892 - protein, 14 aa, synthetic construct
TGSSSNIGAGFDVH

SEQ ID NO: 3893 - protein, 14 aa, synthetic construct
TGTSSDVGGHNYVS

SEQ ID NO: 3894 - protein, 13 aa, synthetic construct
TRSSGSIASSYVQ

SEQ ID NO: 3895 - protein, 11 aa, synthetic construct
QASQAISNYLN

SEQ ID NO: 3896 - protein, 17 aa, synthetic construct
KSSQSVLYSSNNENYLG

SEQ ID NO: 3897 - protein, 11 aa, synthetic construct
QASQDISNSLN

SEQ ID NO: 3898 - protein, 17 aa, synthetic construct
KSSQSVLYSSNNKNFLA

SEQ ID NO: 3899 - protein, 17 aa, synthetic construct
KSSQSVLYSSNNNNYLA

SEQ ID NO: 3900 - protein, 11 aa, synthetic construct
RASQSVRSYLA

SEQ ID NO: 3901 - protein, 11 aa, synthetic construct
RASQGISNWLA

SEQ ID NO: 3902 - protein, 13 aa, synthetic construct
TGSSGSIASNYVQ

SEQ ID NO: 3903 - protein, 14 aa, synthetic construct
TGTSSDVGSYNLVS

SEQ ID NO: 3904 - protein, 17 aa, synthetic construct
KSSQSVLYSSNNKNNLA

SEQ ID NO: 3905 - protein, 12 aa, synthetic construct
RASLSVSSSYLA

SEQ ID NO: 3906 - protein, 15 aa, synthetic construct
WYQQKPGQAPRVLIY

SEQ ID NO: 3907 - protein, 25 aa, synthetic construct
WYQQKPGQAPVLVVYDDSDRPSGVY

SEQ ID NO: 3908 - protein, 15 aa, synthetic construct
WYQLKPGKAPMLLIY

SEQ ID NO: 3909 - protein, 15 aa, synthetic construct
WYQLKPGKAPKLLIY

SEQ ID NO: 3910 - protein, 15 aa, synthetic construct
WFQQRPGQAPRTLFC

SEQ ID NO: 3911 - protein, 15 aa, synthetic construct
WYQQKPGKAHKLMIH

SEQ ID NO: 3912 - protein, 15 aa, synthetic construct
WYQQKPGQAPRLLIF

SEQ ID NO: 3913 - protein, 15 aa, synthetic construct
WYQQKPGSAPKLLIY

SEQ ID NO: 3914 - protein, 15 aa, synthetic construct
WYQQEPGKAPKLMIY

SEQ ID NO: 3915 - protein, 15 aa, synthetic construct
WYQQKPGGAPKLLIY

SEQ ID NO: 3916 - protein, 15 aa, synthetic construct
WYQVLPGSAPKLLIY

SEQ ID NO: 3917 - protein, 15 aa, synthetic construct
WYQKKPGKALKLLIY

SEQ ID NO: 3918 - protein, 15 aa, synthetic construct
WYQQRPGQAPRLLIF

SEQ ID NO: 3919 - protein, 15 aa, synthetic construct
WYQQHPGKTPKLILY

SEQ ID NO: 3920 - protein, 15 aa, synthetic construct
WYQQKTGRAPRLLIF

SEQ ID NO: 3921 - protein, 15 aa, synthetic construct
WYQQKPGTAPNLLIY

SEQ ID NO: 3922 - protein, 15 aa, synthetic construct
WYLQRPGQPPQLLIY

SEQ ID NO: 3923 - protein, 15 aa, synthetic construct
WYQQHPGNPPKLIIY

SEQ ID NO: 3924 - protein, 15 aa, synthetic construct
WYQHKPGKAPKLLIY

SEQ ID NO: 3925 - protein, 15 aa, synthetic construct
WYQRKPGQAPILVVY

SEQ ID NO: 3926 - protein, 15 aa, synthetic construct
WFQQKPGQAPRLLVY

SEQ ID NO: 3927 - protein, 15 aa, synthetic construct
WYQQKPGRAPKLLIS

SEQ ID NO: 3928 - protein, 15 aa, synthetic construct
WFQQKPGQAPVLFIY

SEQ ID NO: 3929 - protein, 15 aa, synthetic construct
WYQQLPGTAPRLLMF

SEQ ID NO: 3930 - protein, 15 aa, synthetic construct
WYQQKPGKAPRLLLY

SEQ ID NO: 3931 - protein, 15 aa, synthetic construct
WYQQTLGKAPKLLLY

SEQ ID NO: 3932 - protein, 15 aa, synthetic construct
WYQQLPGTAPRLLIY

SEQ ID NO: 3933 - protein, 15 aa, synthetic construct
WYQQVPGSAPKLIIY

SEQ ID NO: 3934 - protein, 15 aa, synthetic construct
WFQQKPGQAPVLVIY

SEQ ID NO: 3935 - protein, 15 aa, synthetic construct
WYQQRPGKAPTLLLY

SEQ ID NO: 3936 - protein, 15 aa, synthetic construct
WYQQYPGKAPKLIIY

SEQ ID NO: 3937 - protein, 15 aa, synthetic construct
WYQQVPGTAPKLLIH

SEQ ID NO: 3938 - protein, 15 aa, synthetic construct
WYQQKSGKAPKLLIF

SEQ ID NO: 3939 - protein, 15 aa, synthetic construct
WYQQKPGTAPKLLIY

SEQ ID NO: 3940 - protein, 15 aa, synthetic construct
WFQQKPGKVPKRLIY

SEQ ID NO: 3941 - protein, 15 aa, synthetic construct
WYRQLPGTAPKLLIY

SEQ ID NO: 3942 - protein, 15 aa, synthetic construct
WYQQKPGKAPKLLIF

SEQ ID NO: 3943 - protein, 15 aa, synthetic construct
WYQQRPGQAPVLVVN

SEQ ID NO: 3944 - protein, 15 aa, synthetic construct
WYQQRPGRAPKLLLY

SEQ ID NO: 3945 - protein, 15 aa, synthetic construct
WYQKLPGTAPKLLIY

SEQ ID NO: 3946 - protein, 15 aa, synthetic construct
WYQLHPGKAPKLLIY

SEQ ID NO: 3947 - protein, 15 aa, synthetic construct
WFQQQPGKAPKSLID

SEQ ID NO: 3948 - protein, 15 aa, synthetic construct
WYQLKPGQAPRLLIY

SEQ ID NO: 3949 - protein, 15 aa, synthetic construct
WFQQKPGEAPKSLIE

SEQ ID NO: 3950 - protein, 15 aa, synthetic construct
WYQHHPGKAPKLVIF

SEQ ID NO: 3951 - protein, 15 aa, synthetic construct
WYQQLPRTAPKLLVY

SEQ ID NO: 3952 - protein, 15 aa, synthetic construct
WYQHKPGRAPKLLIY

SEQ ID NO: 3953 - protein, 15 aa, synthetic construct
WYQQKFGQAPRLLIY

SEQ ID NO: 3954 - protein, 15 aa, synthetic construct
WYQQHPGKGPKLMIY

SEQ ID NO: 3955 - protein, 15 aa, synthetic construct
WYQQLPGTTPKVLIY

SEQ ID NO: 3956 - protein, 15 aa, synthetic construct
WYRQLPGTAPQLIFY

SEQ ID NO: 3957 - protein, 15 aa, synthetic construct
WYQKKPGKAPTLLIY

SEQ ID NO: 3958 - protein, 15 aa, synthetic construct
WYQQKAGKAPKLLIY

SEQ ID NO: 3959 - protein, 15 aa, synthetic construct
WYQQKPGKSPNLLIY

SEQ ID NO: 3960 - protein, 15 aa, synthetic construct
WYQWKPGKAPKFLIY

SEQ ID NO: 3961 - protein, 15 aa, synthetic construct
WYHQLPGTAPKLLIY

SEQ ID NO: 3962 - protein, 15 aa, synthetic construct
WYQQKPGKARKLLIY

SEQ ID NO: 3963 - protein, 15 aa, synthetic construct
WYQQEPGKAPKLLIY

SEQ ID NO: 3964 - protein, 15 aa, synthetic construct
WYQQKPGQAPLLMIY

SEQ ID NO: 3965 - protein, 15 aa, synthetic construct
WYQQRPGKGPKLLIY

SEQ ID NO: 3966 - protein, 15 aa, synthetic construct
WYQHKPGNAPKLLIY

SEQ ID NO: 3967 - protein, 15 aa, synthetic construct
WYQQKSGQAPVLVIH

SEQ ID NO: 3968 - protein, 15 aa, synthetic construct
WYQQKPGKAPQLLIY

SEQ ID NO: 3969 - protein, 15 aa, synthetic construct
WSQQKPGKAPKLLIY

SEQ ID NO: 3970 - protein, 15 aa, synthetic construct
WYQHHPGTAPKLMIY

SEQ ID NO: 3971 - protein, 15 aa, synthetic construct
WYQQKPGKAPSLLIY

SEQ ID NO: 3972 - protein, 15 aa, synthetic construct
WYQQKPGKGPKVLIY

SEQ ID NO: 3973 - protein, 15 aa, synthetic construct
WYQHRPGIAPKLLIY

SEQ ID NO: 3974 - protein, 15 aa, synthetic construct
WYQQRPGQAPVMVIY

SEQ ID NO: 3975 - protein, 15 aa, synthetic construct
WYQQKPGKAPKLLTY

SEQ ID NO: 3976 - protein, 15 aa, synthetic construct
WYQQHPGKAPKLLIS

SEQ ID NO: 3977 - protein, 15 aa, synthetic construct
WYQLLPGTPPKLLIY

SEQ ID NO: 3978 - protein, 15 aa, synthetic construct
WYQHKPGQPPKLLIY

SEQ ID NO: 3979 - protein, 15 aa, synthetic construct
WYQQLPGSAPKLLIY

SEQ ID NO: 3980 - protein, 15 aa, synthetic construct
WYQQKPGHAPVLVVY

SEQ ID NO: 3981 - protein, 15 aa, synthetic construct
WYQQNPGKAPNLLIY

SEQ ID NO: 3982 - protein, 15 aa, synthetic construct
WYQQKPGKVPRLLIY

SEQ ID NO: 3983 - protein, 15 aa, synthetic construct
WYQRLPGTAPKLLIY

SEQ ID NO: 3984 - protein, 15 aa, synthetic construct
WYRQKPGQAPRLLIY

SEQ ID NO: 3985 - protein, 15 aa, synthetic construct
WLQQRPGQPPRLLIY

SEQ ID NO: 3986 - protein, 15 aa, synthetic construct
WYQQKGGKAPKLLIY

SEQ ID NO: 3987 - protein, 15 aa, synthetic construct
WYQQKAGKAPNLLIY

SEQ ID NO: 3988 - protein, 15 aa, synthetic construct
WYQQKPGQAPRLFIS

SEQ ID NO: 3989 - protein, 15 aa, synthetic construct
WYQQHPGKAPKLIIF

SEQ ID NO: 3990 - protein, 15 aa, synthetic construct
WYQKLPGTAPKLLIS

SEQ ID NO: 3991 - protein, 15 aa, synthetic construct
WYQQLPGTAPKLFIY

SEQ ID NO: 3992 - protein, 15 aa, synthetic construct
WYQQLPGTAPKLLIS

SEQ ID NO: 3993 - protein, 15 aa, synthetic construct
WYQQKPGKVPKLLIS

SEQ ID NO: 3994 - protein, 15 aa, synthetic construct
WYQQKPGKAPNVLIY

SEQ ID NO: 3995 - protein, 15 aa, synthetic construct
WYQQKPGKAPKFLIY

SEQ ID NO: 3996 - protein, 15 aa, synthetic construct
WYQQKPGQAPRLLIS

SEQ ID NO: 3997 - protein, 15 aa, synthetic construct
WYQQKPGRPPKLLIY

SEQ ID NO: 3998 - protein, 15 aa, synthetic construct
WYQQLPGTAPTLLIS

SEQ ID NO: 3999 - protein, 15 aa, synthetic construct
WYQQKPGNAPKLLIY

SEQ ID NO: 4000 - protein, 15 aa, synthetic construct
WYQQLPGTAPKLLIF

SEQ ID NO: 4001 - protein, 15 aa, synthetic construct
WYQQKPGKVPKLLIH

SEQ ID NO: 4002 - protein, 15 aa, synthetic construct
WYQQLPGTAPKPLIY

SEQ ID NO: 4003 - protein, 15 aa, synthetic construct
WYQQKPGQAPRLLIH

SEQ ID NO: 4004 - protein, 15 aa, synthetic construct
WYQQKPGQAPSLLIY

SEQ ID NO: 4005 - protein, 15 aa, synthetic construct
WYQQHPGKAPKLMAY

SEQ ID NO: 4006 - protein, 15 aa, synthetic construct
WYQQKPGQAPRLLMY

SEQ ID NO: 4007 - protein, 15 aa, synthetic construct
WYQQFPGTAPKLLIF

SEQ ID NO: 4008 - protein, 15 aa, synthetic construct
WYQQLAGTAPKLLIY

SEQ ID NO: 4009 - protein, 15 aa, synthetic construct
WYQQRPGSSPTTVIY

SEQ ID NO: 4010 - protein, 15 aa, synthetic construct
WYRQTPGQAPRTLIY

SEQ ID NO: 4011 - protein, 15 aa, synthetic construct
WYQLKAGQAPVLVVY

SEQ ID NO: 4012 - protein, 15 aa, synthetic construct
WYQQKVGKAPKLLIY

SEQ ID NO: 4013 - protein, 15 aa, synthetic construct
WYQQKPGQPPKLLLY

SEQ ID NO: 4014 - protein, 15 aa, synthetic construct
WYQQKAGQAPRLLIY

SEQ ID NO: 4015 - protein, 15 aa, synthetic construct
WYQQKPGQAPRLFIY

SEQ ID NO: 4016 - protein, 15 aa, synthetic construct
WYQQKPGRPPRYLLY

SEQ ID NO: 4017 - protein, 15 aa, synthetic construct
WYQQKRGKAPKVLIY

SEQ ID NO: 4018 - protein, 15 aa, synthetic construct
WYLLKPGQSPQLLIY

SEQ ID NO: 4019 - protein, 15 aa, synthetic construct
WYQQKPGQSPVLVIY

SEQ ID NO: 4020 - protein, 15 aa, synthetic construct
WYQQKLGKAPKLLIY

SEQ ID NO: 4021 - protein, 15 aa, synthetic construct
WYQQVPGTAPKLLIY

SEQ ID NO: 4022 - protein, 15 aa, synthetic construct
WYQQKPGKAPKRLIY

SEQ ID NO: 4023 - protein, 15 aa, synthetic construct
WYQQKPGQPPQLLIY

SEQ ID NO: 4024 - protein, 7 aa, synthetic construct
GASSRAS

SEQ ID NO: 4025 - protein, 7 aa, synthetic construct
SASSLQD

SEQ ID NO: 4026 - protein, 11 aa, synthetic construct
AASSLPSTLQS

SEQ ID NO: 4027 - protein, 7 aa, synthetic construct
DTNYRQS

SEQ ID NO: 4028 - protein, 10 aa, synthetic construct
DVSSLKRGER

SEQ ID NO: 4029 - protein, 7 aa, synthetic construct
DVSTLQS

SEQ ID NO: 4030 - protein, 7 aa, synthetic construct
GASTRAS

SEQ ID NO: 4031 - protein, 7 aa, synthetic construct
TAANLEA

SEQ ID NO: 4032 - protein, 7 aa, synthetic construct
GVSNRPS

SEQ ID NO: 4033 - protein, 7 aa, synthetic construct
AASTLQT

SEQ ID NO: 4034 - protein, 7 aa, synthetic construct
GYTKRPS

SEQ ID NO: 4035 - protein, 7 aa, synthetic construct
SASFLYS

SEQ ID NO: 4036 - protein, 7 aa, synthetic construct
AGSGRAP

SEQ ID NO: 4037 - protein, 7 aa, synthetic construct
AASTLET

SEQ ID NO: 4038 - protein, 7 aa, synthetic construct
DDRERPS

SEQ ID NO: 4039 - protein, 7 aa, synthetic construct
DASHRAT

SEQ ID NO: 4040 - protein, 7 aa, synthetic construct
EVFNRPS

SEQ ID NO: 4041 - protein, 7 aa, synthetic construct
KASSIET

SEQ ID NO: 4042 - protein, 7 aa, synthetic construct
AASYLQS

SEQ ID NO: 4043 - protein, 7 aa, synthetic construct
AAASLHS

SEQ ID NO: 4044 - protein, 7 aa, synthetic construct
EVSKRFA

SEQ ID NO: 4045 - protein, 7 aa, synthetic construct
GASKRPT

SEQ ID NO: 4046 - protein, 7 aa, synthetic construct
GASTLLS

SEQ ID NO: 4047 - protein, 7 aa, synthetic construct
KAFTLES

SEQ ID NO: 4048 - protein, 7 aa, synthetic construct
AASSLDA

SEQ ID NO: 4049 - protein, 7 aa, synthetic construct
KDNERPS

SEQ ID NO: 4050 - protein, 6 aa, synthetic construct
DNNRPS

SEQ ID NO: 4051 - protein, 7 aa, synthetic construct
GASTLES

SEQ ID NO: 4052 - protein, 7 aa, synthetic construct
AASSLET

SEQ ID NO: 4053 - protein, 7 aa, synthetic construct
RENLRPS

SEQ ID NO: 4054 - protein, 7 aa, synthetic construct
RNTNRPS

SEQ ID NO: 4055 - protein, 7 aa, synthetic construct
AASTLHS

SEQ ID NO: 4056 - protein, 7 aa, synthetic construct
GPSSRAT

SEQ ID NO: 4057 - protein, 7 aa, synthetic construct
AASGLHI

SEQ ID NO: 4058 - protein, 7 aa, synthetic construct
RDRERPS

SEQ ID NO: 4059 - protein, 7 aa, synthetic construct
DASRRAT

SEQ ID NO: 4060 - protein, 7 aa, synthetic construct
EVTYRPS

SEQ ID NO: 4061 - protein, 7 aa, synthetic construct
NNNQRPS

SEQ ID NO: 4062 - protein, 7 aa, synthetic construct
VSSSLQS

SEQ ID NO: 4063 - protein, 7 aa, synthetic construct
GASSLQA

SEQ ID NO: 4064 - protein, 7 aa, synthetic construct
AASNLEI

SEQ ID NO: 4065 - protein, 7 aa, synthetic construct
GTSNRAT

SEQ ID NO: 4066 - protein, 7 aa, synthetic construct
SASTLEG

SEQ ID NO: 4067 - protein, 7 aa, synthetic construct
DVLNLKT

SEQ ID NO: 4068 - protein, 7 aa, synthetic construct
AASNLQG

SEQ ID NO: 4069 - protein, 7 aa, synthetic construct
TVSSRAT

SEQ ID NO: 4070 - protein, 7 aa, synthetic construct
GASNLQS

SEQ ID NO: 4071 - protein, 7 aa, synthetic construct
AASVLES

SEQ ID NO: 4072 - protein, 7 aa, synthetic construct
GISTGAT

SEQ ID NO: 4073 - protein, 7 aa, synthetic construct
SNNNRPS

SEQ ID NO: 4074 - protein, 7 aa, synthetic construct
EFSNRPS

SEQ ID NO: 4075 - protein, 7 aa, synthetic construct
DSSSLQS

SEQ ID NO: 4076 - protein, 7 aa, synthetic construct
KVSTLES

SEQ ID NO: 4077 - protein, 7 aa, synthetic construct
AASSLES

SEQ ID NO: 4078 - protein, 7 aa, synthetic construct
STSNLQS

SEQ ID NO: 4079 - protein, 7 aa, synthetic construct
NNYQRPS

SEQ ID NO: 4080 - protein, 7 aa, synthetic construct
KASSLQS

SEQ ID NO: 4081 - protein, 7 aa, synthetic construct
GVSTLQS

SEQ ID NO: 4082 - protein, 7 aa, synthetic construct
ATSRLQS

SEQ ID NO: 4083 - protein, 7 aa, synthetic construct
KDIERPS

SEQ ID NO: 4084 - protein, 7 aa, synthetic construct
RNNNRPS

SEQ ID NO: 4085 - protein, 7 aa, synthetic construct
EDRERPS

SEQ ID NO: 4086 - protein, 7 aa, synthetic construct
AVSSLKS

SEQ ID NO: 4087 - protein, 7 aa, synthetic construct
GASTLGS

SEQ ID NO: 4088 - protein, 7 aa, synthetic construct
ATSTRAT

SEQ ID NO: 4089 - protein, 7 aa, synthetic construct
DASNYDT

SEQ ID NO: 4090 - protein, 7 aa, synthetic construct
AASGRAP

SEQ ID NO: 4091 - protein, 7 aa, synthetic construct
KNNQRPS

SEQ ID NO: 4092 - protein, 7 aa, synthetic construct
AASPLQS

SEQ ID NO: 4093 - protein, 7 aa, synthetic construct
MTSRLEG

SEQ ID NO: 4094 - protein, 7 aa, synthetic construct
WASTRQS

SEQ ID NO: 4095 - protein, 7 aa, synthetic construct
DNANRPS

SEQ ID NO: 4096 - protein, 7 aa, synthetic construct
GDRDRPS

SEQ ID NO: 4097 - protein, 7 aa, synthetic construct
TNSDRPS

SEQ ID NO: 4098 - protein, 7 aa, synthetic construct
DATSLQS

SEQ ID NO: 4099 - protein, 7 aa, synthetic construct
GASARAT

SEQ ID NO: 4100 - protein, 7 aa, synthetic construct
AASSFQS

SEQ ID NO: 4101 - protein, 7 aa, synthetic construct
YHSDRPS

SEQ ID NO: 4102 - protein, 7 aa, synthetic construct
DVSNLET

SEQ ID NO: 4103 - protein, 7 aa, synthetic construct
INTNRPS

SEQ ID NO: 4104 - protein, 7 aa, synthetic construct
GSSSRAT

SEQ ID NO: 4105 - protein, 7 aa, synthetic construct
MTSRLES

SEQ ID NO: 4106 - protein, 7 aa, synthetic construct
KISKRFS

SEQ ID NO: 4107 - protein, 7 aa, synthetic construct
GASNRAT

SEQ ID NO: 4108 - protein, 7 aa, synthetic construct
DASNRAA

SEQ ID NO: 4109 - protein, 7 aa, synthetic construct
NASSLQS

SEQ ID NO: 4110 - protein, 7 aa, synthetic construct
DNINRPS

SEQ ID NO: 4111 - protein, 7 aa, synthetic construct
TNNQRPS

SEQ ID NO: 4112 - protein, 7 aa, synthetic construct
NKNRRPS

SEQ ID NO: 4113 - protein, 7 aa, synthetic construct
VNSNRPS

SEQ ID NO: 4114 - protein, 7 aa, synthetic construct
AASKLHG

SEQ ID NO: 4115 - protein, 7 aa, synthetic construct
AASTLHT

SEQ ID NO: 4116 - protein, 7 aa, synthetic construct
RASSLES

SEQ ID NO: 4117 - protein, 7 aa, synthetic construct
AASSLQT

SEQ ID NO: 4118 - protein, 7 aa, synthetic construct
KASTLKS

SEQ ID NO: 4119 - protein, 7 aa, synthetic construct
AASDLET

SEQ ID NO: 4120 - protein, 7 aa, synthetic construct
DASSRAA

SEQ ID NO: 4121 - protein, 7 aa, synthetic construct
INSNRPS

SEQ ID NO: 4122 - protein, 7 aa, synthetic construct
AATTLQS

SEQ ID NO: 4123 - protein, 7 aa, synthetic construct
AVSSLQS

SEQ ID NO: 4124 - protein, 7 aa, synthetic construct
AAFILQS

SEQ ID NO: 4125 - protein, 7 aa, synthetic construct
DTSNRAI

SEQ ID NO: 4126 - protein, 7 aa, synthetic construct
GATTRAS

SEQ ID NO: 4127 - protein, 7 aa, synthetic construct
GAASRAT

SEQ ID NO: 4128 - protein, 7 aa, synthetic construct
AGSTLQS

SEQ ID NO: 4129 - protein, 7 aa, synthetic construct
LGSHRAS

SEQ ID NO: 4130 - protein, 7 aa, synthetic construct
AASSLQG

SEQ ID NO: 4131 - protein, 7 aa, synthetic construct
EDKQRPS

SEQ ID NO: 4132 - protein, 7 aa, synthetic construct
INNRRPS

SEQ ID NO: 4133 - protein, 7 aa, synthetic construct
RNSNRPS

SEQ ID NO: 4134 - protein, 7 aa, synthetic construct
ATSSLQS

SEQ ID NO: 4135 - protein, 7 aa, synthetic construct
TNTNRPS

SEQ ID NO: 4136 - protein, 7 aa, synthetic construct
KASLLES

SEQ ID NO: 4137 - protein, 7 aa, synthetic construct
NTKTRSS

SEQ ID NO: 4138 - protein, 7 aa, synthetic construct
DDRDRPS

SEQ ID NO: 4139 - protein, 7 aa, synthetic construct
GASSRAP

SEQ ID NO: 4140 - protein, 7 aa, synthetic construct
DASNFET

SEQ ID NO: 4141 - protein, 7 aa, synthetic construct
KATNLES

SEQ ID NO: 4142 - protein, 7 aa, synthetic construct
KASSLEN

SEQ ID NO: 4143 - protein, 7 aa, synthetic construct
LASNRAS

SEQ ID NO: 4144 - protein, 7 aa, synthetic construct
EASSLDT

SEQ ID NO: 4145 - protein, 7 aa, synthetic construct
AASSLQN

SEQ ID NO: 4146 - protein, 11 aa, synthetic construct
YYSDSDKGQGS

SEQ ID NO: 4147 - protein, 7 aa, synthetic construct
DASTLES

SEQ ID NO: 4148 - protein, 7 aa, synthetic construct
QDTKRPS

SEQ ID NO: 4149 - protein, 7 aa, synthetic construct
KASILES

SEQ ID NO: 4150 - protein, 7 aa, synthetic construct
DDNQRPS

SEQ ID NO: 4151 - protein, 7 aa, synthetic construct
TASTLQS

SEQ ID NO: 4152 - protein, 7 aa, synthetic construct
AASGLQS

SEQ ID NO: 4153 - protein, 32 aa, synthetic construct
GVPDRFSGSGSGTDFTLTISRLQPEDFATYFC

SEQ ID NO: 4154 - protein, 32 aa, synthetic construct
GVPSRFSGGGSGTDFTLTITNVEPADFATYSC

SEQ ID NO: 4155 - protein, 32 aa, synthetic construct
WTPARFSGSLVGGKAALTLSGAQPEDEAVYYC

SEQ ID NO: 4156 - protein, 32 aa, synthetic construct
GVPSRFSGSGSGTEFTLTISRLQPDDLATYYC

SEQ ID NO: 4157 - protein, 32 aa, synthetic construct
GVPSRFSGSGCGTDFTLTISSLQPEDFATYYC

SEQ ID NO: 4158 - protein, 32 aa, synthetic construct
GIPDRFSGSGSGTDFTLTVRRLEPEDFAVYFC

SEQ ID NO: 4159 - protein, 32 aa, synthetic construct
GVSSRFSGSGSGTHFTFTISGLQPEDVATYYC

SEQ ID NO: 4160 - protein, 32 aa, synthetic construct
GVSDRFSGSKSANTASLTISGLQPEDEADYYC

SEQ ID NO: 4161 - protein, 32 aa, synthetic construct
GVPSRFTGSGSGTHFTLTITSLQPEDFATYSC

SEQ ID NO: 4162 - protein, 32 aa, synthetic construct
GVPARFSGSRSGSSASLVITGLQAEDEADYYC

SEQ ID NO: 4163 - protein, 32 aa, synthetic construct
GVPSRFSGSRSGTDFTLTISSLQPEDFATYYC

SEQ ID NO: 4164 - protein, 32 aa, synthetic construct
GIPDRFSGSGFGTDFTLTLSRLEPEDFAVYYC

SEQ ID NO: 4165 - protein, 32 aa, synthetic construct
VVPPRFSGSGSGTDFTLTISSLQPDDFATYYC

SEQ ID NO: 4166 - protein, 32 aa, synthetic construct
GVPSRFTGSGSGTDFTLTISGLQPEDFATYYC

SEQ ID NO: 4167 - protein, 32 aa, synthetic construct
GIPERFSGSHSGNTATLTISRVEAGDEGDYYC

SEQ ID NO: 4168 - protein, 32 aa, synthetic construct
DIPARFSGSGSGTNFTLTISSLEPEDFVVYYC

SEQ ID NO: 4169 - protein, 32 aa, synthetic construct
GVSSRFSGSKSGSTASLTISGLQDEDEADYYC

SEQ ID NO: 4170 - protein, 32 aa, synthetic construct
GVPSRFSGSWSGTEFTLTISSLQASDFATYYC

SEQ ID NO: 4171 - protein, 32 aa, synthetic construct
GVPSRFSGSGSGTDFSLTISGLQPEDLATYYC

SEQ ID NO: 4172 - protein, 32 aa, synthetic construct
GVPSRFSGSGSGTDFSLTISSLHPEDFATYYC

SEQ ID NO: 4173 - protein, 32 aa, synthetic construct
GVPSRFSGSGSGTEFTLTISGLQPDDFATYYC

SEQ ID NO: 4174 - protein, 32 aa, synthetic construct
GVPSRFSGSGSGTDFTLTISSLEREDFATYYC

SEQ ID NO: 4175 - protein, 32 aa, synthetic construct
GVPDRFTGSGSGTDFTLKISRVEAEDVGIYYC

SEQ ID NO: 4176 - protein, 32 aa, synthetic construct
GVPDRLSGSKSGNTASLTVSGLLPEDEAHYYC

SEQ ID NO: 4177 - protein, 32 aa, synthetic construct
GVPSRFSGSESGTDYTLTINGLQPEDFATYYC

SEQ ID NO: 4178 - protein, 32 aa, synthetic construct
GVPSRFRGSGSGTDFTLTISGLQPEDFATYFC

SEQ ID NO: 4179 - protein, 32 aa, synthetic construct
GIPERFSGSTSGNTATLTISGVEAGDEADYYC

SEQ ID NO: 4180 - protein, 32 aa, synthetic construct
GVPSRFAGSGSGTDFTLTITSLQPEDYATYYC

SEQ ID NO: 4181 - protein, 32 aa, synthetic construct
GIPDRFSGSGSGTDFTLTISRLEREDFAVYYC

SEQ ID NO: 4182 - protein, 32 aa, synthetic construct
GVPSKFSGSGSGTEFTLTISSLQPDDFATYYC

SEQ ID NO: 4183 - protein, 32 aa, synthetic construct
GVPSRFSASGSGTDFTLTISSLQPEDFATYYC

SEQ ID NO: 4184 - protein, 32 aa, synthetic construct
GIPERFSGSSSGTTVTLTISGAQVDDEAVYYC

SEQ ID NO: 4185 - protein, 32 aa, synthetic construct
GVPSRFSGSGCGTDFTLTISSLQPEDFAIYYC

SEQ ID NO: 4186 - protein, 32 aa, synthetic construct
GVPSRFSGSGSGTGSTLTISGLQPEDFATYYC

SEQ ID NO: 4187 - protein, 32 aa, synthetic construct
GVPSRFSGSGFGTDFTLTITSLQPEDFATYYC

SEQ ID NO: 4188 - protein, 32 aa, synthetic construct
GVPDRISGSKSGTSVSLAISGLRAEDEADYYC

SEQ ID NO: 4189 - protein, 32 aa, synthetic construct
GIPARFSGSGSGTDFSLTISRLEAEDVAVYYC

SEQ ID NO: 4190 - protein, 32 aa, synthetic construct
GVPSRFSGSGSGTDFTLTISGLQPEDFATYYC

SEQ ID NO: 4191 - protein, 32 aa, synthetic construct
GIPERFSGSNSGTTVTLTISGAQVEDEADYFC

SEQ ID NO: 4192 - protein, 32 aa, synthetic construct
GIPERLSGSKSGTTATLTITRVEAGDEADYSC

SEQ ID NO: 4193 - protein, 32 aa, synthetic construct
GIAARFSGSGSGTDFTLTISSLEPEDFVVYYC

SEQ ID NO: 4194 - protein, 32 aa, synthetic construct
GVPLRFSGSGSVTEFTLTISGLQPEDSATYYC

SEQ ID NO: 4195 - protein, 32 aa, synthetic construct
GVPPRFSGGGSGTVFTLTISSLQPEDFATYYC

SEQ ID NO: 4196 - protein, 32 aa, synthetic construct
GVPSRFSGTGSGTDFTLTISSLQPEDFAIYYC

SEQ ID NO: 4197 - protein, 32 aa, synthetic construct
GISGRFSGSKSGNTASLTISGLQAEDEADYYC

SEQ ID NO: 4198 - protein, 32 aa, synthetic construct
GIPDRFSGSGSGTDFTLTVSRLEPEDFAVYYC

SEQ ID NO: 4199 - protein, 32 aa, synthetic construct
GVPSRFSGSGSETDFTLTISSLQPEDIATYYC

SEQ ID NO: 4200 - protein, 32 aa, synthetic construct
GVPSRFSGSGYGTDFTLTISSLQPEDFATYYC

SEQ ID NO: 4201 - protein, 32 aa, synthetic construct
GVPSRFSGSGSGTDFTLTISSLQPEDSATYYC

SEQ ID NO: 4202 - protein, 32 aa, synthetic construct
GVALRFSGSGSGTEFTFTITSLQPEDFATYYC

SEQ ID NO: 4203 - protein, 32 aa, synthetic construct
GVPDRFSGSKSGISASLAITGLQAEDEADYYC

SEQ ID NO: 4204 - protein, 32 aa, synthetic construct
GIPERFLGSNSGNTATLTISRVEAGDEADYYC

SEQ ID NO: 4205 - protein, 32 aa, synthetic construct
GVPLRFSGSGSETEFTLTISSLQPEDFATYYC

SEQ ID NO: 4206 - protein, 32 aa, synthetic construct
GVASRFSGSGSGTDFTLTISSLQPEDFATYYC

SEQ ID NO: 4207 - protein, 32 aa, synthetic construct
GIPDRFSGSGSGTDFILTISRLESEDIAVYYC

SEQ ID NO: 4208 - protein, 32 aa, synthetic construct
GVPSRFSGSGSGTDFILTIDSLQPEDFATYYC

SEQ ID NO: 4209 - protein, 32 aa, synthetic construct
GVPDRFSGSKSGTSASLAIAGLQAEDEADYFC

SEQ ID NO: 4210 - protein, 32 aa, synthetic construct
GVPSRFSGSGSGTHFTFTISSLQPEDIATYYC

SEQ ID NO: 4211 - protein, 32 aa, synthetic construct
GVPSRFSGSGSGTDFRLTISSLQPEDYATYYC

SEQ ID NO: 4212 - protein, 32 aa, synthetic construct
GVPSRFSGSGSKTNFTLTITSLQPEDFATYYC

SEQ ID NO: 4213 - protein, 32 aa, synthetic construct
GVFNRFFGSKSGNTASLTISGLQAEDEADYYC

SEQ ID NO: 4214 - protein, 32 aa, synthetic construct
GVSSRFSGSGSGTDFTLTISSLQPEDFATYYC

SEQ ID NO: 4215 - protein, 32 aa, synthetic construct
GVSSKFSGSGSGTDFTLTISSLQPEDFATYYC

SEQ ID NO: 4216 - protein, 32 aa, synthetic construct
GVPDRFSGSKSGNTASLTVSGLQADDEADYYC

SEQ ID NO: 4217 - protein, 32 aa, synthetic construct
GIPARFTGSGSGTEFTLTISSLQSEDFAIYYC

SEQ ID NO: 4218 - protein, 32 aa, synthetic construct
GVPSRFSGRGSGTNFTLAISSLQPEDFATYYC

SEQ ID NO: 4219 - protein, 32 aa, synthetic construct
GTPARFRGSGSGTEFTLTISSLQSEDFAVYYC

SEQ ID NO: 4220 - protein, 32 aa, synthetic construct
GVPDRISGSRSDTSASLAITGLQAEDEADYFC

SEQ ID NO: 4221 - protein, 32 aa, synthetic construct
GVSHRFSGSKSGNTASLTISGLQPEDEADYYC

SEQ ID NO: 4222 - protein, 32 aa, synthetic construct
GVPSRFSGSGSGTDFTLTISSLQPEDLATYSC

SEQ ID NO: 4223 - protein, 32 aa, synthetic construct
GVPDRFSGSKSGTTASLAISGLQSEDEADYYC

SEQ ID NO: 4224 - protein, 32 aa, synthetic construct
GVPDRFSASKSGTSASLAITGLQADDEADYYC

SEQ ID NO: 4225 - protein, 32 aa, synthetic construct
GVPSRFSGTGSGTDFTLTIGSLQPEDFATYYC

SEQ ID NO: 4226 - protein, 32 aa, synthetic construct
GVPSRFSGSGSRTDFTLTISSLQPEDFATYYC

SEQ ID NO: 4227 - protein, 32 aa, synthetic construct
GVPSRFSGSGSGTDFTLTISSLQPEDFATYLC

SEQ ID NO: 4228 - protein, 32 aa, synthetic construct
GVPSRFSGSGSETHFTLTITNLQPEDFATYYC

SEQ ID NO: 4229 - protein, 32 aa, synthetic construct
GIPARFSGSGSGTDFTLTISSVEPEDFAIYYC

SEQ ID NO: 4230 - protein, 32 aa, synthetic construct
GVPARFSGSGSGTDFTLTINTLQPDDFATYYC

SEQ ID NO: 4231 - protein, 32 aa, synthetic construct
GVPDRFSGSKSGTSASLAISGLQSEDEAEYYC

SEQ ID NO: 4232 - protein, 32 aa, synthetic construct
GVPDRFSGSKFDTSASLAITGLQAEDEADYYC

SEQ ID NO: 4233 - protein, 32 aa, synthetic construct
GVPARFSGSASGTEFTLTISRLQPDDFATYYC

SEQ ID NO: 4234 - protein, 32 aa, synthetic construct
DIPARFSGSGFGAEFTLTISSLQFEDFAVYYC

SEQ ID NO: 4235 - protein, 32 aa, synthetic construct
GVPSRFTGSGSGTDFTFTISSLQPEDVTTYYC

SEQ ID NO: 4236 - protein, 32 aa, synthetic construct
GIPERFSGSSSGTTVTLTISGVQAEDEADYFC

SEQ ID NO: 4237 - protein, 32 aa, synthetic construct
GVPDRFSGSKSATSASLAITGLQAEDEADYYC

SEQ ID NO: 4238 - protein, 32 aa, synthetic construct
GIPERFSGSRSGTVATLTISGAQVEDEADYYC

SEQ ID NO: 4239 - protein, 32 aa, synthetic construct
GVPSRFSGSGSGTDFTLTISSLQPEDSAAYYC

SEQ ID NO: 4240 - protein, 32 aa, synthetic construct
GVPSRFSGSGSGTDFTLTISSLLPEDFATYYC

SEQ ID NO: 4241 - protein, 32 aa, synthetic construct
GVPSRFSGSGFGTEFTLTISSLQPDDFATYYC

SEQ ID NO: 4242 - protein, 32 aa, synthetic construct
GDSDRFSGSKSGNTASLTISGLQAEDEADYYC

SEQ ID NO: 4243 - protein, 32 aa, synthetic construct
GVPSRFSGSGSGTEFTLTISSLQPDDLATYFC

SEQ ID NO: 4244 - protein, 32 aa, synthetic construct
GVPSRFSGTGSGTDFTFTISSLQPEDIAIYFC

SEQ ID NO: 4245 - protein, 32 aa, synthetic construct
GIPERFSGSNSGNTATLTISRAEAGDEADYYC

SEQ ID NO: 4246 - protein, 32 aa, synthetic construct
GVPSRFSGSGSGTEFTLTISSLQPEDFATYFC

SEQ ID NO: 4247 - protein, 32 aa, synthetic construct
GVPSRFSGSESGTDFTLTISSLQPEDFANYFC

SEQ ID NO: 4248 - protein, 32 aa, synthetic construct
GIPARFSGSGSGTEFILTISSLQSEDFAVYFC

SEQ ID NO: 4249 - protein, 32 aa, synthetic construct
GIPERFSGSNSGNTATLTISRVDAGDEADYYC

SEQ ID NO: 4250 - protein, 32 aa, synthetic construct
GVPSRFSGSGSGTNFTLTISSLQPEDFATYYC

SEQ ID NO: 4251 - protein, 32 aa, synthetic construct
GVPSRFSGSGSGTDFTLTISSLQPEDFATYSC

SEQ ID NO: 4252 - protein, 32 aa, synthetic construct
GVPARFSGSGSGTEFTLTISSLQSEDFAVYYC

SEQ ID NO: 4253 - protein, 32 aa, synthetic construct
GVPSRFSGSRSGTDFTLTITSLQPEDVATYYC

SEQ ID NO: 4254 - protein, 32 aa, synthetic construct
GVPLRFTGSGSGTDFTLTISSLQPEDFATYYC

SEQ ID NO: 4255 - protein, 32 aa, synthetic construct
GFPERFSGFNSGSTATLTISGVEAGDEADYYC

SEQ ID NO: 4256 - protein, 32 aa, synthetic construct
GVPDRFSGSKSGTSASLAITGLLAEDEADYYC

SEQ ID NO: 4257 - protein, 32 aa, synthetic construct
GIPDRFSASGSGTDFTLTISRLEPEDFAVYFC

SEQ ID NO: 4258 - protein, 32 aa, synthetic construct
GVPDRFIGSGAGTDFTLKISRVEAEDVGVYYC

SEQ ID NO: 4259 - protein, 32 aa, synthetic construct
GVPARFSGSGSGTDFTLTIRSLQPEDFATYYC

SEQ ID NO: 4260 - protein, 32 aa, synthetic construct
GVPSRFSGSGSGTDFTLTISGLQPEDFAIYYC

SEQ ID NO: 4261 - protein, 32 aa, synthetic construct
GVPDRFSGSKSGNTASLTVSGLQAEDEANYYC

SEQ ID NO: 4262 - protein, 32 aa, synthetic construct
GVPSRFSGSRSGTDFSFTISSLQPEDIATYYC

SEQ ID NO: 4263 - protein, 32 aa, synthetic construct
GVPSRFSGSGSGTDFTFTISRLQPEDIATYYC

SEQ ID NO: 4264 - protein, 32 aa, synthetic construct
GVPDRFSASKSGTSASLAISGLQSEDEADYYC

SEQ ID NO: 4265 - protein, 32 aa, synthetic construct
GVPDRFSGSRSGTSAFLAITGLQAEDEADYYC

SEQ ID NO: 4266 - protein, 32 aa, synthetic construct
GVPSRFSGSGSGTDFTLTITSLQPEDFATYHC

SEQ ID NO: 4267 - protein, 32 aa, synthetic construct
GVPSRFSGSRSGTEFTLTISSLQPDDFATYYC

SEQ ID NO: 4268 - protein, 32 aa, synthetic construct
GVPSRFSGSGSGTDFSFTISSLQPEDIATYYC

SEQ ID NO: 4269 - protein, 32 aa, synthetic construct
GVPSRFSGSGSGTDFTLTISSLQPEDIATYYC

SEQ ID NO: 4270 - protein, 32 aa, synthetic construct
GVPSRFSGSGSETHFTLTISSLQPEDFATYYC

SEQ ID NO: 4271 - protein, 32 aa, synthetic construct
GVPSRISGSGSGTDFTLTISSLQPEDFATYYC

SEQ ID NO: 4272 - protein, 32 aa, synthetic construct
GIPDRFSGSGSGTDFTLTIGRLEPEDFAVYYC

SEQ ID NO: 4273 - protein, 32 aa, synthetic construct
GVPDRFSGGGSGTDFTLSISSLQAEDVAVYYC

SEQ ID NO: 4274 - protein, 32 aa, synthetic construct
GVPSRFSGSGSGTDFTLTISSLQPEDIATYSC

SEQ ID NO: 4275 - protein, 32 aa, synthetic construct
GVPSRFSGSEYGTDFTLTISSLQPEDFATYYC

SEQ ID NO: 4276 - protein, 32 aa, synthetic construct
GVPDRFSGSKSGTSASLTITGLQAEDEADYYC

SEQ ID NO: 4277 - protein, 32 aa, synthetic construct
GVPPRFSGSGSGTDFTLTISSLQPEDFATYYC

SEQ ID NO: 4278 - protein, 32 aa, synthetic construct
GIPARFSGSESGTEFTLTISSLQSEDFAVYYC

SEQ ID NO: 4279 - protein, 32 aa, synthetic construct
GVPSRFSGSGCGTDFTLTISSVQREDFATYYC

SEQ ID NO: 4280 - protein, 32 aa, synthetic construct
GVPSRFSGSGSGTDFTLTISSLQPEDFAIYYC

SEQ ID NO: 4281 - protein, 32 aa, synthetic construct
GVPDRFSGSKSGTSASLAITGLQAEDEAAYYC

SEQ ID NO: 4282 - protein, 32 aa, synthetic construct
GIPERFSGSSSGTTVTLTISGVQAEDEADYYC

SEQ ID NO: 4283 - protein, 32 aa, synthetic construct
GVPSRFSGSGSGTDFTLTISSLQPEDFSTYYC

SEQ ID NO: 4284 - protein, 32 aa, synthetic construct
GVPSRFSGSGSGTDFTLTISSLHPEDFATYYC

SEQ ID NO: 4285 - protein, 32 aa, synthetic construct
GVSYRFSGSGSGTDFTLTISSLQPEDVATYYC

SEQ ID NO: 4286 - protein, 32 aa, synthetic construct
GVPSRFSGSASGTDYTLTISSLQPEDFATYYC

SEQ ID NO: 4287 - protein, 32 aa, synthetic construct
GVPDRFSGSMSGTSASLAITGLQAEDEADYYC

SEQ ID NO: 4288 - protein, 32 aa, synthetic construct
GIPARFSGSGSGTEFTLTISSLQSEDSAVYYC

SEQ ID NO: 4289 - protein, 32 aa, synthetic construct
GIPARFSGSGSGTEFTLTISSLQSEDVAVYYC

SEQ ID NO: 4290 - protein, 32 aa, synthetic construct
GVPSRFFGSGSGTDFTLTISSLQPEDFATYYC

SEQ ID NO: 4291 - protein, 32 aa, synthetic construct
GVPDRFSGSKSGASASLAITGLQAEDEADYYC

SEQ ID NO: 4292 - protein, 34 aa, synthetic construct
GVPDRFSGSIDSSSNSASLTISGLKTEDEAVYYC

SEQ ID NO: 4293 - protein, 32 aa, synthetic construct
GVPSRFSGSESGTDFTLTISSLQPEDFATYYC

SEQ ID NO: 4294 - protein, 32 aa, synthetic construct
GVPDRFSGSILGNKAALTITGAQADDESDYHC

SEQ ID NO: 4295 - protein, 32 aa, synthetic construct
GIPERFSGSKSGNTATLIISRVEAGDEADYYC

SEQ ID NO: 4296 - protein, 32 aa, synthetic construct
GIPDRFSGSGSGTDFTLTISRLEPEDVAVYYC

SEQ ID NO: 4297 - protein, 32 aa, synthetic construct
GVPSRFSGSGSGTDFTFTISSLQPEDIAIYYC

SEQ ID NO: 4298 - protein, 32 aa, synthetic construct
GVPSRFSGSGFGTDFTLTISSLQPEDFATYHC

SEQ ID NO: 4299 - protein, 32 aa, synthetic construct
GIPGRFSGSGSGTDFTLTISGLEPEDFAVYYC

SEQ ID NO: 4300 - protein, 32 aa, synthetic construct
GIPDRFSGSGAGTDFTLTISRLEPEDFAVYYC

SEQ ID NO: 4301 - protein, 32 aa, synthetic construct
GVPSRFSGSGSGTEFTLTITSLQPDDFATYYC

SEQ ID NO: 4302 - protein, 32 aa, synthetic construct
GVPDRFSGSKSGTSASLAIRGLQSEDEADYYC

SEQ ID NO: 4303 - protein, 32 aa, synthetic construct
GIPERFSGSNSGNTATLTISRVEGGDEADYYC

SEQ ID NO: 4304 - protein, 32 aa, synthetic construct
GVPDRFSGSGSGTDFTLRISRVEAEDVGVYYC

SEQ ID NO: 4305 - protein, 32 aa, synthetic construct
GIPARFSGSGSGTEFTLTISSLQAEDFAVYYC

SEQ ID NO: 4306 - protein, 32 aa, synthetic construct
MVPSRFSGSGSGTDFTLTISSLQPEDFATYYC

SEQ ID NO: 4307 - protein, 32 aa, synthetic construct
GVPSRFSGSGSGTDFTLTISSLQAEDFATYYC

SEQ ID NO: 4308 - protein, 32 aa, synthetic construct
GIPARFSGSGSGTDFTLTISSLEPEDFALYYC

SEQ ID NO: 4309 - protein, 32 aa, synthetic construct
GVPSKFSGSGSGTDFTLTISSLQPEDFATYYC

SEQ ID NO: 4310 - protein, 34 aa, synthetic construct
GVPSRFSGSKDASANTGILLISGLQSEDEADYYC

SEQ ID NO: 4311 - protein, 32 aa, synthetic construct
GVPARFSGSGSGTEFTLTISSLQPEDFATYYC

SEQ ID NO: 4312 - protein, 32 aa, synthetic construct
GVPSRFSGSGSGTDFTLTISSLQPEDFTTYYC

SEQ ID NO: 4313 - protein, 32 aa, synthetic construct
GVPSRFSGSGSGTDFTFTISSLQPEDSATYYC

SEQ ID NO: 4314 - protein, 32 aa, synthetic construct
GVPDRFSGSGSGTDFSLKISRVEAEDVGVYYC

SEQ ID NO: 4315 - protein, 32 aa, synthetic construct
GIPARFSGSGSGTEFTLTISSLQFEDFAVYYC

SEQ ID NO: 4316 - protein, 32 aa, synthetic construct
GVPDRFSGSGSGTDFTLTIRSLQAEDVAVYYC

SEQ ID NO: 4317 - protein, 32 aa, synthetic construct
GIPERFSGSNSGNTATLTISGTQPMDEADYYC

SEQ ID NO: 4318 - protein, 32 aa, synthetic construct
GVSNRFSGSKSGNTASLTISGLQAEDEADYSC

SEQ ID NO: 4319 - protein, 32 aa, synthetic construct
GDPSRFSGSGSGTEFTLTISSLQPDDFATYYC

SEQ ID NO: 4320 - protein, 32 aa, synthetic construct
GVPSRFSGSGFGTDFTFTISSLQPEDFATYYC

SEQ ID NO: 4321 - protein, 32 aa, synthetic construct
GIPERFSGSNSGNTATLTISRVAAGDEADYYC

SEQ ID NO: 4322 - protein, 32 aa, synthetic construct
GIPARFSGSGSGTEFTLTISSLQSEDFALYYC

SEQ ID NO: 4323 - protein, 32 aa, synthetic construct
GIPARFSGSGSGTDFNLTISSLEPEDFAVYYC

SEQ ID NO: 4324 - protein, 32 aa, synthetic construct
GVPDRFSGSGSGTDFTLKISRVEAGDVGVYYC

SEQ ID NO: 4325 - protein, 32 aa, synthetic construct
GVSNRFSGSKSGNTASLTISGLQAEDEADYYC

SEQ ID NO: 4326 - protein, 9 aa, synthetic construct
QQSDSSPFT

SEQ ID NO: 4327 - protein, 11 aa, synthetic construct
QVWDSNSDLVV

SEQ ID NO: 4328 - protein, 9 aa, synthetic construct
QQTFGHPWT

SEQ ID NO: 4329 - protein, 9 aa, synthetic construct
QQSYSFPWT

SEQ ID NO: 4330 - protein, 9 aa, synthetic construct
LLDYTYFRI

SEQ ID NO: 4331 - protein, 9 aa, synthetic construct
QQYNSYPWT

SEQ ID NO: 4332 - protein, 9 aa, synthetic construct
QHYHSYPLT

SEQ ID NO: 4333 - protein, 10 aa, synthetic construct
HQYSDSPPLT

SEQ ID NO: 4334 - protein, 9 aa, synthetic construct
QQYNDFPYT

SEQ ID NO: 4335 - protein, 10 aa, synthetic construct
SSYTRSNTVK

SEQ ID NO: 4336 - protein, 10 aa, synthetic construct
QQTYSTHMST

SEQ ID NO: 4337 - protein, 11 aa, synthetic construct
QSYDNSLSASV

SEQ ID NO: 4338 - protein, 9 aa, synthetic construct
QQHYTTPPT

SEQ ID NO: 4339 - protein, 10 aa, synthetic construct
QQSYNTLSIT

SEQ ID NO: 4340 - protein, 10 aa, synthetic construct
QQSYSTLELT

SEQ ID NO: 4341 - protein, 13 aa, synthetic construct
QVWDRSGHHPVFV

SEQ ID NO: 4342 - protein, 9 aa, synthetic construct
HQRRNWPPT

SEQ ID NO: 4343 - protein, 10 aa, synthetic construct
CSYTSRSTYV

SEQ ID NO: 4344 - protein, 9 aa, synthetic construct
QQYSAYPYT

SEQ ID NO: 4345 - protein, 9 aa, synthetic construct
QQSYTTPLT

SEQ ID NO: 4346 - protein, 10 aa, synthetic construct
QQSYNTPPLT

SEQ ID NO: 4347 - protein, 10 aa, synthetic construct
QQTYIMPPWT

SEQ ID NO: 4348 - protein, 10 aa, synthetic construct
MQSIQLPPFT

SEQ ID NO: 4349 - protein, 10 aa, synthetic construct
SSNAGVTALI

SEQ ID NO: 4350 - protein, 10 aa, synthetic construct
QQTYSTPPWT

SEQ ID NO: 4351 - protein, 10 aa, synthetic construct
QQSYVTPPWT

SEQ ID NO: 4352 - protein, 14 aa, synthetic construct
QVWDTSRSTHHRGV

SEQ ID NO: 4353 - protein, 8 aa, synthetic construct
QQSYRSRT

SEQ ID NO: 4354 - protein, 9 aa, synthetic construct
QQFARSPRT

SEQ ID NO: 4355 - protein, 9 aa, synthetic construct
QQYNRYTWT

SEQ ID NO: 4356 - protein, 9 aa, synthetic construct
QQSHRAPAT

SEQ ID NO: 4357 - protein, 9 aa, synthetic construct
YSAAGNNRE

SEQ ID NO: 4358 - protein, 12 aa, synthetic construct
QSYDSSLSIYYV

SEQ ID NO: 4359 - protein, 9 aa, synthetic construct
QQYKSFPPT

SEQ ID NO: 4360 - protein, 9 aa, synthetic construct
QQYYSPPNA

SEQ ID NO: 4361 - protein, 9 aa, synthetic construct
QQYYGSPRT

SEQ ID NO: 4362 - protein, 11 aa, synthetic construct
AAWDDSLSGVV

SEQ ID NO: 4363 - protein, 11 aa, synthetic construct
QSYDSSLTGVV

SEQ ID NO: 4364 - protein, 10 aa, synthetic construct
QQSYVTPSIT

SEQ ID NO: 4365 - protein, 9 aa, synthetic construct
QQYGDSPWT

SEQ ID NO: 4366 - protein, 9 aa, synthetic construct
QQSHSIPIT

SEQ ID NO: 4367 - protein, 10 aa, synthetic construct
YSAADNNLGV

SEQ ID NO: 4368 - protein, 11 aa, synthetic construct
QVWDSSSDHPG

SEQ ID NO: 4369 - protein, 9 aa, synthetic construct
QQRSNWPLT

SEQ ID NO: 4370 - protein, 10 aa, synthetic construct
SSYRSSTSPS

SEQ ID NO: 4371 - protein, 9 aa, synthetic construct
QHYGSSLWT

SEQ ID NO: 4372 - protein, 11 aa, synthetic construct
AVWDDSLDGPV

SEQ ID NO: 4373 - protein, 9 aa, synthetic construct
QQSHSTPFT

SEQ ID NO: 4374 - protein, 9 aa, synthetic construct
LQANSFSLA

SEQ ID NO: 4375 - protein, 9 aa, synthetic construct
QQSFSPPYT

SEQ ID NO: 4376 - protein, 9 aa, synthetic construct
LQHNSSPIT

SEQ ID NO: 4377 - protein, 9 aa, synthetic construct
QQFDILPWT

SEQ ID NO: 4378 - protein, 8 aa, synthetic construct
QQYKTYST

SEQ ID NO: 4379 - protein, 8 aa, synthetic construct
QVWDVGAV

SEQ ID NO: 4380 - protein, 9 aa, synthetic construct
QQYYGPPHT

SEQ ID NO: 4381 - protein, 9 aa, synthetic construct
QQSVNFPRT

SEQ ID NO: 4382 - protein, 8 aa, synthetic construct
QQYYILRT

SEQ ID NO: 4383 - protein, 11 aa, synthetic construct
QSYDSSLSSSL

SEQ ID NO: 4384 - protein, 10 aa, synthetic construct
QQSYSSPPWT

SEQ ID NO: 4385 - protein, 10 aa, synthetic construct
QQSYSIPPIT

SEQ ID NO: 4386 - protein, 9 aa, synthetic construct
SSYTHDSTV

SEQ ID NO: 4387 - protein, 9 aa, synthetic construct
QQYKTYPLT

SEQ ID NO: 4388 - protein, 9 aa, synthetic construct
QQYGTSPWT

SEQ ID NO: 4389 - protein, 9 aa, synthetic construct
QQYKSFPLT

SEQ ID NO: 4390 - protein, 11 aa, synthetic construct
TSYADTGDCVL

SEQ ID NO: 4391 - protein, 10 aa, synthetic construct
LQYNNWPPLT

SEQ ID NO: 4392 - protein, 11 aa, synthetic construct
ATWDDSVTGPV

SEQ ID NO: 4393 - protein, 9 aa, synthetic construct
QHYYSNPRT

SEQ ID NO: 4394 - protein, 10 aa, synthetic construct
QQSYTLPGAT

SEQ ID NO: 4395 - protein, 9 aa, synthetic construct
QQYNHWPGT

SEQ ID NO: 4396 - protein, 11 aa, synthetic construct
QSYDSNVFGKV

SEQ ID NO: 4397 - protein, 9 aa, synthetic construct
SSYTTDSVV

SEQ ID NO: 4398 - protein, 9 aa, synthetic construct
QQSYSSMWT

SEQ ID NO: 4399 - protein, 12 aa, synthetic construct
AAWDDSLNGPLV

SEQ ID NO: 4400 - protein, 11 aa, synthetic construct
QSYDSSLSGVI

SEQ ID NO: 4401 - protein, 8 aa, synthetic construct
QQSSSYYT

SEQ ID NO: 4402 - protein, 9 aa, synthetic construct
QQAHSFPWT

SEQ ID NO: 4403 - protein, 10 aa, synthetic construct
QQSYGPPPTT

SEQ ID NO: 4404 - protein, 9 aa, synthetic construct
QQTHSPPRA

SEQ ID NO: 4405 - protein, 5 aa, synthetic construct
QHRSN

SEQ ID NO: 4406 - protein, 9 aa, synthetic construct
QQSYDYPRT

SEQ ID NO: 4407 - protein, 9 aa, synthetic construct
QESYTTPPA

SEQ ID NO: 4408 - protein, 12 aa, synthetic construct
ATWDDSLDGHNV

SEQ ID NO: 4409 - protein, 9 aa, synthetic construct
QQYDTYPWT

SEQ ID NO: 4410 - protein, 10 aa, synthetic construct
QYLDTYPRYT

SEQ ID NO: 4411 - protein, 10 aa, synthetic construct
QQSYSMPPWT

SEQ ID NO: 4412 - protein, 10 aa, synthetic construct
QQSYINPQVT

SEQ ID NO: 4413 - protein, 11 aa, synthetic construct
AAWDDSLNGYV

SEQ ID NO: 4414 - protein, 9 aa, synthetic construct
QQYNNWPRA

SEQ ID NO: 4415 - protein, 9 aa, synthetic construct
QQYEDLPPT

SEQ ID NO: 4416 - protein, 11 aa, synthetic construct
QSSDNTGTYVV

SEQ ID NO: 4417 - protein, 9 aa, synthetic construct
QQSYSTPPT

SEQ ID NO: 4418 - protein, 11 aa, synthetic construct
YSTDSSGTQGV

SEQ ID NO: 4419 - protein, 10 aa, synthetic construct
QQSYTTPALT

SEQ ID NO: 4420 - protein, 9 aa, synthetic construct
QQANSFPYT

SEQ ID NO: 4421 - protein, 9 aa, synthetic construct
QQYKSYSYT

SEQ ID NO: 4422 - protein, 10 aa, synthetic construct
SSYTSSNTLV

SEQ ID NO: 4423 - protein, 10 aa, synthetic construct
QQYGSSPMYT

SEQ ID NO: 4424 - protein, 9 aa, synthetic construct
QQYNSYSLT

SEQ ID NO: 4425 - protein, 9 aa, synthetic construct
QQYDSLPLT

SEQ ID NO: 4426 - protein, 8 aa, synthetic construct
QQYYSWYS

SEQ ID NO: 4427 - protein, 10 aa, synthetic construct
QQSYESPPWT

SEQ ID NO: 4428 - protein, 13 aa, synthetic construct
ASWHNGLSGSNWA

SEQ ID NO: 4429 - protein, 10 aa, synthetic construct
QQSYSISPYT

SEQ ID NO: 4430 - protein, 10 aa, synthetic construct
QVWDSRGVYV

SEQ ID NO: 4431 - protein, 9 aa, synthetic construct
QQLNSYPIT

SEQ ID NO: 4432 - protein, 9 aa, synthetic construct
LQDYSNFWT

SEQ ID NO: 4433 - protein, 11 aa, synthetic construct
QHYNSYSEMYT

SEQ ID NO: 4434 - protein, 9 aa, synthetic construct
QQYYSSPYT

SEQ ID NO: 4435 - protein, 10 aa, synthetic construct
QQSYSTPPLT

SEQ ID NO: 4436 - protein, 11 aa, synthetic construct
QVWDSSTDHWV

SEQ ID NO: 4437 - protein, 9 aa, synthetic construct
QQSFSTPPT

SEQ ID NO: 4438 - protein, 11 aa, synthetic construct
QQYNDWPPGYT

SEQ ID NO: 4439 - protein, 11 aa, synthetic construct
QVWDSASDQVV

SEQ ID NO: 4440 - protein, 10 aa, synthetic construct
QQSYNIPQLT

SEQ ID NO: 4441 - protein, 9 aa, synthetic construct
QQSYTTWVT

SEQ ID NO: 4442 - protein, 10 aa, synthetic construct
QHYYDWPPYT

SEQ ID NO: 4443 - protein, 9 aa, synthetic construct
QKYYNVPWT

SEQ ID NO: 4444 - protein, 9 aa, synthetic construct
QQSYSIPLT

SEQ ID NO: 4445 - protein, 11 aa, synthetic construct
QVWDSGNNHVV

SEQ ID NO: 4446 - protein, 9 aa, synthetic construct
QHYDNLKFT

SEQ ID NO: 4447 - protein, 11 aa, synthetic construct
QHYNSYFEMYT

SEQ ID NO: 4448 - protein, 9 aa, synthetic construct
QQYGTSPIT

SEQ ID NO: 4449 - protein, 9 aa, synthetic construct
TQATEFPQT

SEQ ID NO: 4450 - protein, 9 aa, synthetic construct
QQYNNYPIT

SEQ ID NO: 4451 - protein, 10 aa, synthetic construct
QQYRSPPRLT

SEQ ID NO: 4452 - protein, 8 aa, synthetic construct
QQRHNRLT

SEQ ID NO: 4453 - protein, 10 aa, synthetic construct
SSYAGSNIVV

SEQ ID NO: 4454 - protein, 5 aa, synthetic construct
QHSRT

SEQ ID NO: 4455 - protein, 12 aa, synthetic construct
AAWDDSLSGHVV

SEQ ID NO: 4456 - protein, 9 aa, synthetic construct
QQYDNLPYT

SEQ ID NO: 4457 - protein, 10 aa, synthetic construct
QQSYSNPQVT

SEQ ID NO: 4458 - protein, 8 aa, synthetic construct
QQSNSPWT

SEQ ID NO: 4459 - protein, 9 aa, synthetic construct
QQYNTYSEA

SEQ ID NO: 4460 - protein, 8 aa, synthetic construct
QQYDNLYT

SEQ ID NO: 4461 - protein, 9 aa, synthetic construct
QQTYIPPRT

SEQ ID NO: 4462 - protein, 11 aa, synthetic construct
QQCSVTPPMCS

SEQ ID NO: 4463 - protein, 9 aa, synthetic construct
QQSYSSPRT

SEQ ID NO: 4464 - protein, 9 aa, synthetic construct
QQSYSTPGT

SEQ ID NO: 4465 - protein, 9 aa, synthetic construct
QQYGSSPGS

SEQ ID NO: 4466 - protein, 9 aa, synthetic construct
QQSYSPPYT

SEQ ID NO: 4467 - protein, 9 aa, synthetic construct
QQYYNLPPT

SEQ ID NO: 4468 - protein, 11 aa, synthetic construct
QVWDSTSDHWV

SEQ ID NO: 4469 - protein, 9 aa, synthetic construct
QQANTFPRT

SEQ ID NO: 4470 - protein, 9 aa, synthetic construct
QQNYNSPLT

SEQ ID NO: 4471 - protein, 8 aa, synthetic construct
QQYYTFRT

SEQ ID NO: 4472 - protein, 12 aa, synthetic construct
QLRNNWPPGALT

SEQ ID NO: 4473 - protein, 8 aa, synthetic construct
QQYNNWLT

SEQ ID NO: 4474 - protein, 9 aa, synthetic construct
QQYHNSPRT

SEQ ID NO: 4475 - protein, 10 aa, synthetic construct
QQSYVLPMYT

SEQ ID NO: 4476 - protein, 10 aa, synthetic construct
QQSDTTPQIT

SEQ ID NO: 4477 - protein, 10 aa, synthetic construct
QQYHSFSPLT

SEQ ID NO: 4478 - protein, 9 aa, synthetic construct
MQALQTPQT

SEQ ID NO: 4479 - protein, 8 aa, synthetic construct
QQLSGYFT

SEQ ID NO: 4480 - protein, 11 aa, synthetic construct
QVWGFSGDHWV

SEQ ID NO: 4481 - protein, 9 aa, synthetic construct
QTADSSRVV

SEQ ID NO: 4482 - protein, 9 aa, synthetic construct
QSSHNSKGV

SEQ ID NO: 4483 - protein, 10 aa, synthetic construct
QQYYSNLGRT

SEQ ID NO: 4484 - protein, 11 aa, synthetic construct
QQSYSHPPEGS

SEQ ID NO: 4485 - protein, 9 aa, synthetic construct
QKYNTAPCT

SEQ ID NO: 4486 - protein, 10 aa, synthetic construct
QQYYSTPPFT

SEQ ID NO: 4487 - protein, 11 aa, synthetic construct
ASWDDSLNGLV

SEQ ID NO: 4488 - protein, 9 aa, synthetic construct
QQYNSFSWT

SEQ ID NO: 4489 - protein, 11 aa, synthetic construct
QSYDSSLSGSI

SEQ ID NO: 4490 - protein, 11 aa, synthetic construct
QHYDNWPPEYT

SEQ ID NO: 4491 - protein, 11 aa, synthetic construct
QSYDSSLTGSL

SEQ ID NO: 4492 - protein, 10 aa, synthetic construct
QQYNKWPPIT

SEQ ID NO: 4493 - protein, 11 aa, synthetic construct
QSYDSSLSDVI

SEQ ID NO: 4494 - protein, 9 aa, synthetic construct
QQSSSNFPT

SEQ ID NO: 4495 - protein, 11 aa, synthetic construct
QSYDTSLSGVV

SEQ ID NO: 4496 - protein, 12 aa, synthetic construct
QSADTSGNYRGV

SEQ ID NO: 4497 - protein, 9 aa, synthetic construct
QQYAFSPLT

SEQ ID NO: 4498 - protein, 10 aa, synthetic construct
SSYAGSNTVV

SEQ ID NO: 4499 - protein, 9 aa, synthetic construct
QLYNSDSWT

SEQ ID NO: 4500 - protein, 9 aa, synthetic construct
QQYDIFGFT

SEQ ID NO: 4501 - protein, 9 aa, synthetic construct
QHYNNWTPT

SEQ ID NO: 4502 - protein, 11 aa, synthetic construct
QSYDSGLSGSV

SEQ ID NO: 4503 - protein, 10 aa, synthetic construct
QQSYTTPTWT

SEQ ID NO: 4504 - protein, 13 aa, synthetic construct
QSFDSSLSGPNYV

SEQ ID NO: 4505 - protein, 10 aa, synthetic construct
QSYDTSNHGV

SEQ ID NO: 4506 - protein, 9 aa, synthetic construct
QQYNNWTPT

SEQ ID NO: 4507 - protein, 10 aa, synthetic construct
MLYMGSGIWV

SEQ ID NO: 4508 - protein, 11 aa, synthetic construct
HVWDSSSDHWV

SEQ ID NO: 4509 - protein, 9 aa, synthetic construct
QSADSSDIR

SEQ ID NO: 4510 - protein, 9 aa, synthetic construct
QQYRSSPWT

SEQ ID NO: 4511 - protein, 8 aa, synthetic construct
QQYVTSPT

SEQ ID NO: 4512 - protein, 11 aa, synthetic construct
QQRTNWPRMYT

SEQ ID NO: 4513 - protein, 13 aa, synthetic construct
QVWDSISHHFNWV

SEQ ID NO: 4514 - protein, 9 aa, synthetic construct
QQFDSLPLT

SEQ ID NO: 4515 - protein, 10 aa, synthetic construct
QQSYIMPPWT

SEQ ID NO: 4516 - protein, 10 aa, synthetic construct
QQSYVMPPWT

SEQ ID NO: 4517 - protein, 11 aa, synthetic construct
QLRSNWPPRLS

SEQ ID NO: 4518 - protein, 9 aa, synthetic construct
QQYYSTPLT

SEQ ID NO: 4519 - protein, 9 aa, synthetic construct
QQYGYAPWT

SEQ ID NO: 4520 - protein, 9 aa, synthetic construct
QQYNSFPYT

SEQ ID NO: 4521 - protein, 9 aa, synthetic construct
QQYSSYPRT

SEQ ID NO: 4522 - protein, 10 aa, synthetic construct
QQYDNLPSYT

SEQ ID NO: 4523 - protein, 13 aa, synthetic construct
QLWDSTGDHPEVL

SEQ ID NO: 4524 - protein, 8 aa, synthetic construct
QQYNIQWT

SEQ ID NO: 4525 - protein, 11 aa, synthetic construct
QSYDSSLSTVF

SEQ ID NO: 4526 - protein, 10 aa, synthetic construct
QQYHSWPLFT

SEQ ID NO: 4527 - protein, 9 aa, synthetic construct
HQYTHWPLT

SEQ ID NO: 4528 - protein, 11 aa, synthetic construct
QSYDSALSGSV

SEQ ID NO: 4529 - protein, 10 aa, synthetic construct
QHSYSTPPWT

SEQ ID NO: 4530 - protein, 10 aa, synthetic construct
QQSYTMPPIT

SEQ ID NO: 4531 - protein, 11 aa, synthetic construct
QQRSSWPRLYT

SEQ ID NO: 4532 - protein, 8 aa, synthetic construct
QQYNSYLT

SEQ ID NO: 4533 - protein, 9 aa, synthetic construct
QQYHSYPQT

SEQ ID NO: 4534 - protein, 10 aa, synthetic construct
MIWPSNLLGV

SEQ ID NO: 4535 - protein, 9 aa, synthetic construct
QQLNSYPLT

SEQ ID NO: 4536 - protein, 9 aa, synthetic construct
QQANSFPRT

SEQ ID NO: 4537 - protein, 9 aa, synthetic construct
QQYDSSPLT

SEQ ID NO: 4538 - protein, 9 aa, synthetic construct
QQLNSHPCS

SEQ ID NO: 4539 - protein, 9 aa, synthetic construct
QQSSTTPIT

SEQ ID NO: 4540 - protein, 9 aa, synthetic construct
QQYNDYPIT

SEQ ID NO: 4541 - protein, 10 aa, synthetic construct
LQSYNTPPWT

SEQ ID NO: 4542 - protein, 10 aa, synthetic construct
QQYNNLPPWT

SEQ ID NO: 4543 - protein, 8 aa, synthetic construct
QQYKNYWT

SEQ ID NO: 4544 - protein, 9 aa, synthetic construct
QQLNSDLFT

SEQ ID NO: 4545 - protein, 12 aa, synthetic construct
QSYDSSLSGYVV

SEQ ID NO: 4546 - protein, 9 aa, synthetic construct
QQYYNTPLT

SEQ ID NO: 4547 - protein, 10 aa, synthetic construct
QAWDSSNHYV

SEQ ID NO: 4548 - protein, 11 aa, synthetic construct
AAWDDSLNGVL

SEQ ID NO: 4549 - protein, 9 aa, synthetic construct
QQLNSYPRT

SEQ ID NO: 4550 - protein, 9 aa, synthetic construct
QSYDNTNWV

SEQ ID NO: 4551 - protein, 10 aa, synthetic construct
QQLNSYPRYT

SEQ ID NO: 4552 - protein, 8 aa, synthetic construct
QQYNSYFT

SEQ ID NO: 4553 - protein, 11 aa, synthetic construct
QQYDNWPPMWT

SEQ ID NO: 4554 - protein, 9 aa, synthetic construct
QQHNSWPAT

SEQ ID NO: 4555 - protein, 9 aa, synthetic construct
QQSYSTPYT

SEQ ID NO: 4556 - protein, 9 aa, synthetic construct
QQYDSYSGT

SEQ ID NO: 4557 - protein, 12 aa, synthetic construct
QSYDSSLSGFVI

SEQ ID NO: 4558 - protein, 10 aa, synthetic construct
QQSYSNPMYT

SEQ ID NO: 4559 - protein, 10 aa, synthetic construct
QQYNNWPPLT

SEQ ID NO: 4560 - protein, 11 aa, synthetic construct
SSYASSTSPVV

SEQ ID NO: 4561 - protein, 9 aa, synthetic construct
QQYSTYPYT

SEQ ID NO: 4562 - protein, 9 aa, synthetic construct
QSHDSSTVI

SEQ ID NO: 4563 - protein, 9 aa, synthetic construct
QQYDNLPFT

SEQ ID NO: 4564 - protein, 9 aa, synthetic construct
HQYGYSPWT

SEQ ID NO: 4565 - protein, 9 aa, synthetic construct
QQFDNLPIT

SEQ ID NO: 4566 - protein, 12 aa, synthetic construct
QVWDSNSDHHYV

SEQ ID NO: 4567 - protein, 9 aa, synthetic construct
QQYYSTPWT

SEQ ID NO: 4568 - protein, 8 aa, synthetic construct
QQRDNWVS

SEQ ID NO: 4569 - protein, 10 aa, synthetic construct
QQYNKWPRYT

SEQ ID NO: 4570 - protein, 9 aa, synthetic construct
QQYHSLPIT

SEQ ID NO: 4571 - protein, 11 aa, synthetic construct
QQRSNWPRTLT

SEQ ID NO: 4572 - protein, 9 aa, synthetic construct
QQRGNWPGT

SEQ ID NO: 4573 - protein, 10 aa, synthetic construct
QQTISFPAIT

SEQ ID NO: 4574 - protein, 9 aa, synthetic construct
QQHDNVPLT

SEQ ID NO: 4575 - protein, 9 aa, synthetic construct
QQLNNHPPA

SEQ ID NO: 4576 - protein, 9 aa, synthetic construct
QQRSKWRYT

SEQ ID NO: 4577 - protein, 9 aa, synthetic construct
MQALQSPPA

SEQ ID NO: 4578 - protein, 9 aa, synthetic construct
QSYDSSRVV

SEQ ID NO: 4579 - protein, 11 aa, synthetic construct
QQRSIWPPPFT

SEQ ID NO: 4580 - protein, 9 aa, synthetic construct
QQRSNWRYT

SEQ ID NO: 4581 - protein, 10 aa, synthetic construct
QQSYTNPMYT

SEQ ID NO: 4582 - protein, 10 aa, synthetic construct
MQALQTPPYG

SEQ ID NO: 4583 - protein, 8 aa, synthetic construct
CSYAGIYV

SEQ ID NO: 4584 - protein, 10 aa, synthetic construct
QQYYSTWALT

SEQ ID NO: 4585 - protein, 9 aa, synthetic construct
QQYGSSPLT

SEQ ID NO: 4586 - protein, 10 aa, synthetic construct
QQYHNWPPLT

SEQ ID NO: 4587 - protein, 8 aa, synthetic construct
QVWDSSWV

SEQ ID NO: 4588 - protein, 9 aa, synthetic construct
QQYNNWPWT

SEQ ID NO: 4589 - protein, 9 aa, synthetic construct
QQRSNWPGT

SEQ ID NO: 4590 - protein, 10 aa, synthetic construct
QQSYSNPPVT

SEQ ID NO: 4591 - protein, 13 aa, synthetic construct
QLWDGSSDHPEVV

SEQ ID NO: 4592 - protein, 10 aa, synthetic construct
FGLGTRLEIK

SEQ ID NO: 4593 - protein, 10 aa, synthetic construct
FGPGTRLEIK

SEQ ID NO: 4594 - protein, 10 aa, synthetic construct
FGQGTRVEIK

SEQ ID NO: 4595 - protein, 10 aa, synthetic construct
FGGGTKLPVL

SEQ ID NO: 4596 - protein, 10 aa, synthetic construct
LGEGTKLTVL

SEQ ID NO: 4597 - protein, 10 aa, synthetic construct
FGQGTRLELK

SEQ ID NO: 4598 - protein, 10 aa, synthetic construct
FGEGTKLTVL

SEQ ID NO: 4599 - protein, 10 aa, synthetic construct
FGRGTKVDIK

SEQ ID NO: 4600 - protein, 10 aa, synthetic construct
FGGGTKLTVV

SEQ ID NO: 4601 - protein, 10 aa, synthetic construct
FGTATKVTVL

SEQ ID NO: 4602 - protein, 10 aa, synthetic construct
FGHGTRLEIK

SEQ ID NO: 4603 - protein, 10 aa, synthetic construct
FGAGTKVTVL

SEQ ID NO: 4604 - protein, 10 aa, synthetic construct
FGGVTKLTVL

SEQ ID NO: 4605 - protein, 10 aa, synthetic construct
FGGGTNVDIK

SEQ ID NO: 4606 - DNA, 321 bp, synthetic construct
  source 1..321: mol_type = other DNA
gacacactgatgaagcagtctccatcctccttgttggcatcagtaggagacgccgtcatctccagcagcgccgcaagtaagagcagcggcagctatttaacttggtatcagcaaaaaccaggccaagcccccagggtcctgatctatggtgcatccagcagggccagtggggtcccagacaggttcagtggcagtggatctgggacagatttcactctcaccatcagcagactgcaacctgaagattttgcaacgtatttctgtcaacagagtgacagttccccgttcactttcggccgggggaccaaggtggagatcaaa

SEQ ID NO: 4607 - DNA, 354 bp, synthetic construct
  source 1..354: mol_type = other DNA
tcgtatgagctgacacagccaccctcggtgtcagtggccccaggacagacggccagcattacctgtgggggaaacaacattggaagtaaaggtgttcactggtaccagcagaagccaggccaggcccctgtgttggtcgtctatgatgatagcgaccggccctcaggggtctatgatgatagcgaccggccctcagggatccctgagcgattctctggctccaactctgggaacacggccaccctgaccatcagcagggtcgaagccggggatgaggccgactattactgtcaggtgtgggatagtaatagtgatcttgtggtattcggcggggggaccaagctcaccgtccta

SEQ ID NO: 4608 - DNA, 321 bp, synthetic construct
  source 1..321: mol_type = other DNA
gacatccagatgacccagtctccgtcctctctgtccgcatctgtaggagacagagtcaccatcacttgtcgatcaagtcagtatgtcagtaattttttaaattggtatcaactaaaaccagggaaagccccgatgctcctgatctactctgcatccagtttacaagatggggtcccatccaggttcagtggcggtggatctgggacagatttcactctcaccatcaccaatgttgaacctgcagattttgcgacctactcctgtcagcagacttttggtcacccgtggaccttcggccaagggaccaaggtggaaatcaaa

SEQ ID NO: 4609 - DNA, 333 bp, synthetic construct
  source 1..333: mol_type = other DNA
gacatcacagtgacccagtctccatcgtccctgtctacatctgtgggagacagagtcaccatcacttgccgggcaaatgagagcattagtacctttttaagttggtatcagctgaaaccagggaaagcccctaagctcctgatctatgctgcatccagtctaccctccactttacaaagtggggtcccatcaaggttcagtggcagtggatctgggacagatttcactctcaccatcagcagtctgcaacctgaagattttgcaacctacttctgtcaacaaagttacagtttcccgtggacgttcggccaagggaccaaggtggaaatcaaa

SEQ ID NO: 4610 - DNA, 327 bp, synthetic construct
  source 1..327: mol_type = other DNA
ccgtctgaggtgactcaggagccctcactgactgtgtccccaggagggacagtcactctcacctgtggctccagcactggacctgtcaccactggtcattggcccttttggttccagcagaggcctggccaagcccccaggacattattttgtgatacaaattacaggcagtcttggacccctgccaggttttcaggctccctcgtcgggggcaaggctgccctgaccctttcgggtgcgcagcctgaagatgaggctgtctattattgcttactcgactatacttattttcggatattcggcggagggaccaagctgaccgtccta

SEQ ID NO: 4611 - DNA, 330 bp, synthetic construct
  source 1..330: mol_type = other DNA
gacatccagatgacccagactccctccaccctgtctgcatctgtgggagacagagtcacaatcacttgccgggccagtcagagtatcgatacctggttggcctggtatcagcaaaaaccagggaaagcccctgaactcctgatttatgatgtctccagtttgaaaagaggggaaagaggggtcccatcaaggttcagcggcagtggatctgggacagaattcactctcaccatcagcagactgcagcctgatgatcttgcaacttattattgccaacagtataatagttacccttggacgttcggccaagggaccaaggtggaaatcaaa

SEQ ID NO: 4612 - DNA, 321 bp, synthetic construct
  source 1..321: mol_type = other DNA
gaaacgacaatcaagcagtctccatcctccttgtctgcattagtaggagacagagtcaccatcacttgccgggcaagtcagagtattagtaggtttttaaagtggtatcagcagaaaccagggaaagcccataaactcatgatccatgatgtttccactttgcaaagtggggtcccatcaaggttcagcggcagtggatgtgggacagatttcactctcaccatcagcagcctgcagcctgaagattttgcaacttattattgccaacactatcatagttaccctctcactttcggcggagggaccaaggtggagatcaaa

SEQ ID NO: 4613 - DNA, 324 bp, synthetic construct
  source 1..324: mol_type = other DNA
gaaatgacattgacgcagtctccagccaccctgtctttgtctccaggggaaagagccaccctctcctgcagggccagtcagaatattaacatctacttagcctggtaccagcagaaacctggccaggctcccaggctcctcatctttggtgcttctacgagggccagtggcatcccagacaggttcagtggcagtgggtctgggacagacttcactctcaccgtcaggagactggagcctgaagattttgcagtctatttctgccatcaatacagtgactcacctccgctcactttcggcggagggaccaaggtggagatcaaa

SEQ ID NO: 4614 - DNA, 321 bp, synthetic construct
  source 1..321: mol_type = other DNA
gaaatggcgatgacgcagtctccatcctccatgtctgcatctgtgggagacagagtcaccatcacctgccaggcgagtcaggacattaccgactatttaaattggtatcagcagaaaccagggagtgcccctaaactcctgatctacactgcagccaatttggaagccggggtctcgtccaggttcagtggaagtggatctgggacacattttactttcaccatcagcggcctccagcctgaagatgttgcaacatattactgtcaacagtataatgatttcccatacacttttggccaggggaccaaggtggaaatcaaa

SEQ ID NO: 4615 - DNA, 330 bp, synthetic construct
  source 1..330: mol_type = other DNA
cagtctgccctgactcagcctgcctccgtgtctgggtctgctggacagtcgatcaccatctcctgcactggagccagcggtgacattgatacttataactatgtctcctggtaccaacaggaaccaggcaaagcccccaaactcatgatttatggtgtcagtaatcggccctcaggggtttctgatcgcttctctggctccaagtctgccaacacggcctccctgaccatctctgggctccagcctgaggacgaggctgattattactgcagctcatatacaaggagtaacactgtgaaattcggcggcgggaccaagctcaccgtccta

SEQ ID NO: 4616 - DNA, 333 bp, synthetic construct
  source 1..333: mol_type = other DNA
cagtctgtcctgacgcagccgccctcagtgtctggggccccagggcggggggtcaccatctcctgcactgggagcacctccaacatcgggggaggttatgatgtgcactggtaccagcagcttccaggagaggcccccaaactcctcatctatcttaacaataatcggccctcaggggtccctgaccgattctctggctccaagtctggcacctcagcctccctggccatcactgggctccagcctgtcgatgaggctgattattactgccagtcgtatgacagcagcctgagtgtttgggtgttcggcggagggaccaagctcaccgtccta

SEQ ID NO: 4617 - DNA, 324 bp, synthetic construct
  source 1..324: mol_type = other DNA
gaaatccagatgacccagtctccatcctccctgtctgcatctgtaggagacagagtcaccatcacttgccgggcaagtcaagacattagtacttatgtaaattggtatcagcagaaacctgggggggcccctaaactcctgatctatgctgcctccactttgcaaactggggtcccatcaaggtttactggcagtggatctgggacacatttcactctcaccatcaccagtctgcaacctgaagattttgcaacttactcctgtcaacagacttacagtacccacatgtccacttttggccaggggaccaaggtggaaatcaaa

SEQ ID NO: 4618 - DNA, 333 bp, synthetic construct
  source 1..333: mol_type = other DNA
cagtctgtgttgacgcagccgccctcagtgtctggggccccagggcagagggtcaccatctcctgcactgggagcagctccaacatcgggacaggttatgatgtacactggtaccaggttcttccaggatccgcccccaaactcctcatctatggttacacaaaacggccctcaggggtccctgcccgattctctggctccaggtctggcagctcagcctccctggtcatcactgggctccaggctgaggatgaggctgattattactgccagtcctatgacaacagcctgagtgcttcggtgttcggcggagggaccaagctcaccgtccta

SEQ ID NO: 4619 - DNA, 321 bp, synthetic construct
  source 1..321: mol_type = other DNA
gacatccaaatgacccagtctccatcttccctgtctgcatctgtaggagacagagtcaccatcacttgtcgggcgagtcaggatgttaacaccgcggtagcctggtatcagcagaaaccagggaaagcccctaagctcctgatctattctgcatcctttttgtacagtggggtcccatcaaggttcagcggcagtagatctgggacagatttcactctcaccatcagcagcctgcagcctgaagattttgcaacttactattgtcagcaacactacactacgccacccacgttcggccaagggaccaaggtggaaatcaaa

SEQ ID NO: 4620 - DNA, 324 bp, synthetic construct
  source 1..324: mol_type = other DNA
gaaattatgctgacccagtctccaggcaccctgtctttgtctccaggggaaagagccaccctctcccgcagggcccgtcagagtgttggcagcggctttttagcctggtaccagcagaaacccggccaggctcccaggctcctcatttatgctgggtccggcagggcccctggcatcccagacaggttcagtggcagtggctttgggacagacttcactctcaccctcagcagactggagcctgaagattttgcagtgtattactgtcagcagtatggtagctcaccgtacacttttggccaggggaccaaagtggatatcaaa

SEQ ID NO: 4621 - DNA, 324 bp, synthetic construct
  source 1..324: mol_type = other DNA
gacatccggttgacccagtctccatcctccctgtctgcatctgtgggagacagagtcaccatcacttgccgggcaagtcagaacattgccacctttttaaattggtatcaaaagaaaccagggaaagcccttaaactcttgatttatgctgcatccaccttgcaaagtgtggtcccgccaaggttcagtggcagtggatctgggacagatttcactctcaccatcagcagtctgcaacctgacgattttgcaacttactactgtcaacagagttacaataccctctctatcaccttcggccaagggacacgactggagattaaa

SEQ ID NO: 4622 - DNA, 324 bp, synthetic construct
  source 1..324: mol_type = other DNA
gacatccggttgacccagtctccatcctccctgtctgcatctgtaggagacagagtcaccatcacttgccgggcaagtcagactgttaactcctatttaaattggtatcagcagagaccaggtaaagcccctaagctcctgatctatgctgcttccactttagaaactggggtcccatcaaggttcaccggcagtggatctgggacagatttcactctcaccatcagcggtctgcaacctgaggattttgcaacttactactgtcaacagagttacagtacccttgagctcactttcggcggagggaccaaggtggatatcaaa

SEQ ID NO: 4623 - DNA, 330 bp, synthetic construct
  source 1..330: mol_type = other DNA
tcgtatgagctgactcagccaccctcggtgtcagtggcccccggacagacggccagcattacctgtgggggaaacaatattgcagatcaaattgtgcactggtaccagcagaagccaggccaggcccctgttttggtcgtctttgatgatcgcgagcggccctcagggatccctgagcgattctctggctcccactctgggaacacggccaccctgaccatcagcagggtcgaagccggggacgagggcgactattattgtcaggtgtgggatcggagtggtcatcatccagtttttgtcttcggcactggcaccaaggtcaccgtccta

SEQ ID NO: 4624 - DNA, 321 bp, synthetic construct
  source 1..321: mol_type = other DNA
gaaatcccaatgacccagtctccagccaccctgtctttggctccaggggacagggccaccctctcctgcagggccagtcagagtgttggcacctacttaggctggtaccaacaaagacctggccaggctcccaggctcctcatctttgatgcatcccacagggccactgacatcccagccaggttcagtggcagtgggtctgggacaaacttcactctcaccatcagcagcctagagcctgaagactttgtagtttattactgtcaccagcgtcgcaactggcctccgactttcggccaggggaccaaggtggagatcaaa

SEQ ID NO: 4625 - DNA, 330 bp, synthetic construct
  source 1..330: mol_type = other DNA
agtctgttcctgactcagcctgcctccgtgtctgggtctcctggacagtcgatcaccatctcctgcactggagccagcagtgacgttggtggttataactttgtttcctggtaccaacaacacccagggaaaacccccaaactcatactttatgaggtcttcaatcgcccctcaggggtgtccagtcgcttctctggctccaagtctggcagcacggcctccctgacgatctctgggctccaggatgaggacgaggctgattactactgctgttcatatacaagcaggagcacttatgtcttcggaactgggaccaaggtcaccgtccta

SEQ ID NO: 4626 - DNA, 321 bp, synthetic construct
  source 1..321: mol_type = other DNA
gaaatcccgatgacccagtctccttccaccctgtctgcatctgtaggagacagagtcaccatcacttgccgggccagtcagagtattggtccctggttggcctggtatcagcagaaaccagggaaagcccctgagctcctgatctataaggcgtctagtatagaaactggggtcccatcaaggttcagcggcagttggtctgggacagaattcactctcaccatcagcagcctgcaggcttctgattttgcaacttattactgccaacagtatagcgcttatccgtacacttttggccaggggaccaaggtggagatcaaa

SEQ ID NO: 4627 - DNA, 321 bp, synthetic construct
  source 1..321: mol_type = other DNA
gaaatccagatgacccagtctccaccctccctgtctgcatctgtaggagacagcgtcaccatcacttgccgggcaagtcagagcattagtaggtatttacattggtatcagcagaaacccgggaaagcccctaaggttctgatctatgctgcatcctatttgcaaagtggggtcccttcaaggttcagtggcagtggatctgggacagatttcagtctcaccatcagcggtctgcagcctgaagatcttgcaacttactactgtcaacagagttacactaccccgctcactttcggcggagggaccaaggtggaaatcaaa

SEQ ID NO: 4628 - DNA, 324 bp, synthetic construct
  source 1..324: mol_type = other DNA
gaaatgacggtgacgcagtctccatcctccctgtctgcatctgtaggagacagagtcaccatcagttgccgggcaagccagtacattaataattatttaaattggtatcagcagaaaccagggaaagcccctaagctcctgatctatgctgcatccactttgcaaactggggtcccatcaaggttcagtggcagtggatctgggacagatttcagtctcaccatcagcagtctacaccctgaagattttgcaacttactactgtcagcagagttacaatacccctccgctcactttcggcggagggaccaaggtggaaatcaaa

SEQ ID NO: 4629 - DNA, 324 bp, synthetic construct
  source 1..324: mol_type = other DNA
gacatccgaatgacccagtctccttcctccctgtctgcatctgtaggagacagagtcaccatcacttgccgggcaagtcagagcattggcggatatctaaattggtatcagcagaaaacagggagagcccctaggctactgatctttgctgcatccagactgcaaagtggggtcccatcaaggttcagtggcagtggatctgggacagaattcactctcaccatcagcggtctgcaacctgacgattttgcaacttactactgtcaacagacttacattatgcctccgtggacgttcggccaagggaccaaggtggagatcaaa

SEQ ID NO: 4630 - DNA, 321 bp, synthetic construct
  source 1..321: mol_type = other DNA
gacatccagatgacccagtctccatcctccctgtctgcatctatcggagacagagtcaccatcacttgccgggcaagtcagaatattagtacctatttaaattggtatcagcaaaaaccagggacagccccaaacctcctgatttatgctgcagccagtttgcacagtggtgtcccatcaaggttcagtggcagtggatctgggacagatttcactctcaccatcagcagtctggaacgtgaagattttgcaacttactactgtcagcagagttacagtaccccgatcaccttcggcctagggacacgactggagattaaa

SEQ ID NO: 4631 - DNA, 342 bp, synthetic construct
  source 1..342: mol_type = other DNA
gacatcgtgatgacccagtctccactctctctgtccgtcacccctggtcagtcggcctccatctcctgcgagtccagtaagagcctcctgcatagtggtgatggaaagacctatttgtattggtatttgcagaggccaggccagccaccacaactcctgatctatgaggtttccaaacggttcgctggagtgccagataggttcactggcagcgggtcagggacggatttcacactgaaaatcagccgggtggaggctgaggatgttgggatttattactgcatgcagagtatacagcttcctccgttcacttttggccaggggaccaaggtggaaatcaaa

SEQ ID NO: 4632 - DNA, 324 bp, synthetic construct
  source 1..324: mol_type = other DNA
gaaatcacattgacgcagtctccaggcacactgtctttgtctccaggggaaagagccaccctctcctgcagggccagtgagagcgttagcagcgagcacctagcctggcaccagcagagacctggccaggctcccaggctcctcatctatggtgcatccaaaaggcccacgggcatcccagacaggttcagtggcagtgggtctgggacagacttcactctcaccatcagcagactggagcctgaagattttgcagtgtattactgtcaccagtttgctagcgcaccgatcaccttcggccaagggacacgactggagattaaa

SEQ ID NO: 4633 - DNA, 330 bp, synthetic construct
  source 1..330: mol_type = other DNA
cagcctgtgatgactcagcctccctccgcgtccgggtctcctggacaatcagtcaccatctcctgcactggaaccagcagtgacgttggtgattctaactatgtctcctggtaccaacaacacccaggcaacccccccaaactcataatttatgaggtcaataagcggccctcaggggtccctgatcgtttgtctggctccaagtctggcaacacggcctccctgaccgtctctgggctcctgcctgaggatgaggctcattattactgcagctcaaatgcaggcgtcaccgccctgatcttcggcggagggaccaaggtcaccgtccta

SEQ ID NO: 4634 - DNA, 324 bp, synthetic construct
  source 1..324: mol_type = other DNA
gaaattgtgatgacccagtctccatcctccctgtctgcatctgtaggagacagagtcaccatcacttgccgggcaagtcagaccattaacagctatttaaattggtatcagcataaaccagggaaagccccaaaactcctgatctatggtgcatccactttactaagtggggtcccatcaaggttcagtgggagtgaatctgggacagattacactctcaccatcaacggtctgcaacctgaagattttgcaacttactactgtcaacagacttacagtacacctccgtggacgttcgcccaagggaccaaggtggatatcaaa

SEQ ID NO: 4635 - DNA, 324 bp, synthetic construct
  source 1..324: mol_type = other DNA
gacatccaaatgacccagtctccatcctccctgtctgcatctgttggggacagagtcaccatcacttgccggacaagtctgaacattaagaactatttaaactggtatcagcagaagccagggaaagcccctaagctcctgatctatgctgcatccactttgcaaagtggggtcccatcaaggttcagaggtagtggttctgggacagatttcactctcaccatcagcggtctgcaaccagaggactttgcaacttacttctgtcaacagagttacgttacccccccgtggacttttggccaggggaccaaagtggaaatcaaa

SEQ ID NO: 4636 - DNA, 333 bp, synthetic construct
  source 1..333: mol_type = other DNA
cagtctgtgctgacgcagccgccctcggtgtcactggccccaggacagacggccaggattacctgtgggggagacaatattggaagttatcgtgtgcactggtaccagcggaagccaggccaggcccctatactggtcgtctatgatgatagcgaccggccctcagggatccctgagcgattctctggctccacctctgggaacacggccaccctgaccatcagcggggtcgaggccggggatgaggccgactattactgtcaggtgtgggatactagtagaagtactcatcatcggggagtcttcggagctgggaccaagctcaccgtccta

SEQ ID NO: 4637 - DNA, 318 bp, synthetic construct
  source 1..318: mol_type = other DNA
gatattgtgctgacccagtctccatcctccctgtctgcatctattggagacagagtcaccttcacttgccgggcaagtcagagcattaacaactatttaaattggtatcagcagaaaccagggaaagcccctaagctcctgatttatgctgcatccactttgcagagtggggtcccatcaaggttcgctggcagtggatccggaacagatttcactctcaccatcaccagtctgcaacctgaagattatgcaacttactactgccaacagagttacaggagccggacgttcggccaagggaccaaggtggagatcaaa

SEQ ID NO: 4638 - DNA, 321 bp, synthetic construct
  source 1..321: mol_type = other DNA
gaaattgtgttgacccagtctccaggcaccctgtctttgtctccaggggaaagagccaccctcgcctgcagggccagtcagagtgttaccagctccttagcctggttccagcagaaacctggccaggctcccaggctcctcgtctatgatgcatccaccagggccactggcatcccagacaggttcagtggcagtgggtctgggactgacttcactctcaccatcagcagactggagcgtgaagattttgcagtgtattactgtcagcagtttgctaggtcacctcgcacttttggccaggggaccaaggtggaaatcaaa

SEQ ID NO: 4639 - DNA, 321 bp, synthetic construct
  source 1..321: mol_type = other DNA
gacatcccggtgacccagtctccttccaccctgtctgcatctgttggagacagagtcaccatcacttgccgggccagtcagagtattaataataggttggcctggtatcagcagaaaccagggagagcccctaagctcctgatttctaaggcgtttaccttagaaagtggggtcccatcaaagttcagcggcagtggatctgggacagaattcacccttaccatcagcagcctgcagcctgatgattttgcaacttattattgtcaacagtataataggtatacgtggacgttcggcccagggaccaaagtggatatcaaa

SEQ ID NO: 4640 - DNA, 324 bp, synthetic construct
  source 1..324: mol_type = other DNA
gaaatcgggatgacccagtctccatcctccctgtctgcatctgtaggagacagagtcaccatcacttgccgggcaagtcagagcattagcagcagctatttaaattggtatcagcagaaaccagggaaagcccctaacctcctgatctatgctgcatccagtttggatgcaggggtcccatcaaggttcagtgccagtggatctgggacagatttcactctcaccatcagtagtctgcaacctgaagattttgcaacttactactgtcaacagagtcacagggcccccgccacttttggccaggggaccaaggtggagatcaaa

SEQ ID NO: 4641 - DNA, 318 bp, synthetic construct
  source 1..318: mol_type = other DNA
tcgtcagtgctgattcagccaccctcagtgtcagtgtctccgggacagacagccagtatcacgtgctcgggagacctattggcaaatacatatgctcggtggttccagcagaagccaggccaggcccctgttttgttcatttataaagacaatgagcggccctcagggatccctgagcgattctccggctccagctcagggaccacagtcaccttgaccatcagcggggcccaggttgacgatgaggctgtctattactgttactctgcggccggcaacaatcgagagttcggcggagggaccaagctcaccgtccta

SEQ ID NO: 4642 - DNA, 333 bp, synthetic construct
  source 1..333: mol_type = other DNA
cagtctgtgttgacgcagccgccctcagtgtctggggccccagggcagacggtcaccatctcctgcactgggagcagctccaacatcggggcaggtcatgatgtacactggtatcagcagcttccaggaacagcccccagactcctcatgtttgacaacaatcggccctcaggggtccctgaccgattctctggctccaagtctggcacctcagcctccctggccatcactgggctccaggctgaggatgaggctgattattactgccagtcctatgacagcagcctgagtatttattatgtcttcggaactgggaccaagctcaccgtccta

SEQ ID NO: 4643 - DNA, 324 bp, synthetic construct
  source 1..324: mol_type = other DNA
gacatccggttgacccagtctccatcctccctgtgcgcatctgtaggagacagagtcagcatcacttgccgggcgagtcagggcattagcaattctttagcctggtatcagcaaaaaccagggaaagcccctaaattcctgctatatggtgcatccactttggaaagtggggtcccatccaggttcagtggcagtggatgtgggacggatttcactctcaccatcagcagcctgcagcctgaagattttgcaatttattactgtcaacagtattatagtactcctccgaggacgttcggccaagggaccaaggtggaaatcaaa

SEQ ID NO: 4644 - DNA, 321 bp, synthetic construct
  source 1..321: mol_type = other DNA
gacatcccgatgacccagtctccatcctccctgtctgcatctgtaggagacagagtcaccatcacttgccaggcgagtcaggacattggcacctatttaagttggtatcaacagaaacccggaaaagcccctaaactcctgatctacgatgcatccaatttagaaacgggggtcccatcaaggttcagtggaagtggatctgggacaggctcgactttaaccatcagcggcctgcagcctgaggattttgcaacatattactgtcaacaatataaaagtttccctccgactttcggcggggggaccaaggtggaaatcaaa

SEQ ID NO: 4645 - DNA, 321 bp, synthetic construct
  source 1..321: mol_type = other DNA
gaaatcgagttgacccagtctccatcctccctgtctgcatctgtaggagacagagtcaccatcacttgccgggcgagtcacggcattactgattctttagcctggtatcagcagaaaccagggaaagcccctaggctcctgctctatgctgcatccagcttggaaactggggtcccatcccggttcagtggcagtggatttgggacggatttcactctcaccatcaccagcctgcagcctgaagattttgcaacttattactgtcaacagtattattctccccccaacgcttttggccaggggaccaaggtggagatcaaa

SEQ ID NO: 4646 - DNA, 321 bp, synthetic construct
  source 1..321: mol_type = other DNA
gacatccaggtgacccagtctccatcctccctgtctgcatctgtaggagacagagtcaccatcacttgccgggcgagtcacgacattagcaaatctttagcctggtatcagcagacattagggaaagcccctaagctcctgctctatgctgcctccacattggaaagtggggtcccatccaggttccgtggcagtggatctgggacggatttcactctcaccatcagcagcctccagcctgaagattttgcaacttattactgtcaacagtattatggttcccctcgaacgttcggccaagggaccaaagtggatatcaaa

SEQ ID NO: 4647 - DNA, 330 bp, synthetic construct
  source 1..330: mol_type = other DNA
tcctatgagctgatacagccaccctcagcgtctgggacccccgggcagagggtcaccatctcttgttctggaagcagctccaacatcgggagtaattttgtatattggtaccagcagctcccaggaacggcccccagactcctcatttatagggagaatcttcggccctcaggggtccctgaccgaatctctggctccaagtctggcacctcagtctccctggccatcagtgggctccgggccgaggatgaggctgactattactgtgcagcatgggatgacagcctgagtggagtggtcttcggcggagggaccaaggtcaccgtccta

SEQ ID NO: 4648 - DNA, 333 bp, synthetic construct
  source 1..333: mol_type = other DNA
cagtctgtgctgacgcagccgccctcagtgtctggggccccagggcagagggtcaccatctcctgcactgggaccacctccaacatcggggcaggttatgatgcacactggtaccagcaggttccagggtcagcccccaaactcatcatctatcgtaacaccaatcggccctcaggagtccctgaccgattctctggctccaagtctgacacctcggcctccctggccatcactgggctccaggctgaggatgaggctgattattactgccagtcctatgacagcagcctgactggtgtggtcttcggcggagggaccaagctcaccgtccta

SEQ ID NO: 4649 - DNA, 324 bp, synthetic construct
  source 1..324: mol_type = other DNA
gacatcccgatgacccagtctccatcctccctgtctgcatctgtaggagacagagtcagcttcacttgccgggcagctcagagcatcggcacctatttaaattggtatcaacagaaaccagggaaagcccctaagctcctgatctatgctgcatccactttgcacagtggcgtcccatcaaggttcagtggcagtggatctgggacagatttcactctcaccatcaacagtctgcaacctgaagattttgcaacttactactgtcaacagagttacgttaccccctcgatcaccttcggcccagggacacgactggagattaaa

SEQ ID NO: 4650 - DNA, 324 bp, synthetic construct
  source 1..324: mol_type = other DNA
gacatccagttgacccagtctccaggcagtctgtctttgtctccaggggaaagagccaccctcttctgcagggccagccagagtgttcgcagtagttatttagcctggtaccagcagaaacctggccaggctcccaggcttctcatctatggtccatccagtagggccaccggcatcccagccaggttcagtggcagtggatctgggacagacttcagtctcaccatcagcagactggaggctgaagatgttgcagtgtattattgtcagcagtatggtgactcaccgtggacgttcggccaagggaccaaggtggaaatcaaa

SEQ ID NO: 4651 - DNA, 321 bp, synthetic construct
  source 1..321: mol_type = other DNA
gaaattgtagtgacccagtctccatcctccctgtctgcctctgtaggagacagagtcaccatcatttgccgggcaagtcagagcattgacaactatttaaattggtatcagcagaaaccagggaaagcccctgagctcctgatctatgctgcatccggtttacacattggggtcccatcaaggttcagtggcagtggatctgggacagatttcactctcaccatcagcggtctgcagcctgaagattttgcaacttattactgtcaacagagtcacagtatcccgatcaccttcggccaagggacacgactggagattaaa

SEQ ID NO: 4652 - DNA, 321 bp, synthetic construct
  source 1..321: mol_type = other DNA
cagtctgtggtgacgcagccgccctcagtgtcagtgtctccgggacagacagccaggatcacctgctcaggagatttagtggaaaaaaaatatgttcggtggttccagcagaagccaggccaggcccctgtactggtgatttatagagaccgtgagcggccctcagggatccctgagcgattctccggctccaactcagggaccacggtcaccttgaccatcagcggggcccaggttgaggatgaggctgactatttctgttactctgcggctgacaacaatttgggggtgttcggcggagggaccaaggtcaccgtccta

SEQ ID NO: 4653 - DNA, 324 bp, synthetic construct
  source 1..324: mol_type = other DNA
tattatgagctgactcagccaccttcggtgtcagtggccccaggacagacggccaggattacctgtgggggaaaaaacattggaggtcaaagtgtgcagtggtaccagcagaagccaggccaggcccctgtgctggtcgtctatgatgatagcgaccggccctcagggatccctgagcgattatctggttccaagtctgggaccacggccaccctgaccatcaccagggtcgaagccggggatgaggccgactattcctgtcaggtgtgggatagtagtagtgatcatccaggcttcggcggagggaccaaggtgaccgtccta

SEQ ID NO: 4654 - DNA, 321 bp, synthetic construct
  source 1..321: mol_type = other DNA
gaaatcgcattgacgcagtctccagccaccctgtctttgtctccgggggaaagagccaccctctcctgcagggccagtcagaatgttagcaactacttaggttggtaccaacataaacctggccaggctcccaggctcctcatttatgatgcatccaggagggccactggcatcgcagccaggttcagtggcagtgggtctgggacagacttcactctcaccatcagcagcctagagcctgaagattttgtagtttattactgtcagcagcgtagcaactggccgctcactttcggcggagggaccaaggtggaaatcaaa

SEQ ID NO: 4655 - DNA, 324 bp, synthetic construct
  source 1..324: mol_type = other DNA
gaaatgacactcacgcagtctccatccttcctgtctgcatctgtaggagacagagtcgccatcacttgccgggccagtcagggcattagcagttttttagcctggtatcagcaaagaccagggaaagcccctaagctcctgatctttggtgcatccactttgcaaagtggggtcccattaaggttcagcggcagtggatctgtgacagaattcactctcacaatcagcggcctgcagcctgaagattctgcaacttattactgtcaacaccttgatagttaccctcggtacacttttggccaggggaccaaggtggagatcaaa

SEQ ID NO: 4656 - DNA, 324 bp, synthetic construct
  source 1..324: mol_type = other DNA
gacatcgggatgacccagtctccgtcctccctgtctgcatctgtaggagacagagtcaccatcacttgccgggcgagtcagggcattaccaattctttagcctggtatcagcaaagaccagggaaagccccaaccctccttctctatgctgcatccacactggaaagtggggtcccacccaggttcagtggcggtggatctgggacggttttcactctcaccatcagcagcctgcagcctgaagattttgcaacttattactgtcagcagtactatagtccccctccccggacgttcggccaagggaccaaggtggaaatcaaa

SEQ ID NO: 4657 - DNA, 324 bp, synthetic construct
  source 1..324: mol_type = other DNA
gacatccagatgacccagtctccatcctccctgcctgcatctgtgggagacagagtcaccatcacttgccgggcaagtcagatgattaggacctttttaaattggtatcagcagaagccagggaaagcccctaagctcctgatctatggtgcatccagtttgcaaagtggggtcccatcaaggttcagtggcactggatctgggacagatttcactctcaccatcagcagtctgcaacctgaagattttgcaatttactactgtcaacagagttacagtacccctccgtggacgttcggccaagggaccaaggtggaaatcaaa

SEQ ID NO: 4658 - DNA, 330 bp, synthetic construct
  source 1..330: mol_type = other DNA
cagtctgttctgactcagcctgcctccgtgtctgggtctcctggacagtcgatcaccatctcctgcactgggaccagcagtgacattggtgcttataactatgtctcctggtaccaacagtacccaggcaaagcccccaaactcataatttatgaggtcacttatcggccctcagggatttctggtcgcttctctggctccaagtctggtaacacggcctccctgaccatctctgggctccaggctgaggacgaggctgattattactgcagctcatatagaagtagcacttctccctcattcggcggtgggaccaagctcaccgtccta

SEQ ID NO: 4659 - DNA, 327 bp, synthetic construct
  source 1..327: mol_type = other DNA
gaaacgacactcacgcagtctccaggcacgctgtctgtgtttccaggggaaagagccaccctctcctgcagggccagtcagagtattagcgacagcagatatttagcctggtaccagcagaaacctggccaggctcccagactcctcatctatggtgcatccaccagggccactggcatcccagacaggttcagtggcagtgggtctgggacagacttcactctcaccgtcagcagactggagcctgaagattttgcagtttattactgtcagcactatggtagctcactgtggacgttcggccaagggaccaaggtggaaatcaaa

SEQ ID NO: 4660 - DNA, 330 bp, synthetic construct
  source 1..330: mol_type = other DNA
cagtctgtgctgacgcagccgccctcagcgtctgggacccccgggcagagggtcaccatctcctgttctgggcacttctccaacatcggagataatactgttaactggtaccagcaggtcccaggaacggcccccaaactcctcatacataataataatcagcggccctcaggggtccctgaccgcttctctggctccaagtctggcacctcagcctccctggccatcagtgggctccagtctgaggatgaggctgattattactgtgcagtatgggatgacagcctggatggtccggtgttcggcggagggaccaaggtgaccgtcctc

SEQ ID NO: 4661 - DNA, 321 bp, synthetic construct
  source 1..321: mol_type = other DNA
gaaatcacactgacccagtctccatcctccctgtcagcgtctgtaggagacagagtcaccatcacttgccgggcaagtcagaacattgtcggctatttaaattggtatcagcagaaaccagggaaagcccctgagctcctgatctatgctgcgtccactttgcaaagaggggtcccatcaaggttcagtggcagtggatctgagacagatttcactctcaccatcagcagtctgcaacctgaagatattgcaacctactactgtcaacagagtcacagtacccccttcactttcggccctgggaccaaggtggaaatcaaa

SEQ ID NO: 4662 - DNA, 321 bp, synthetic construct
  source 1..321: mol_type = other DNA
gacatcgagatgacccagtctccatcttccgtgtctgcatctgtaggagacagagtcaccatcacttgtcgggcgagtcaggatattcgcagccggttaggctggtatcagcagaaatcagggaaagcccctaaactcctgatctttgatgcatccagtttggaaagtggggtcccatcaaggttcagcggcagtggctatgggacagacttcactcttaccatcagcagcctgcagcctgaagattttgcaacttactattgtctacaggctaatagtttctctctcgctttcggccctgggaccaaggtggagatcaaa

SEQ ID NO: 4663 - DNA, 321 bp, synthetic construct
  source 1..321: mol_type = other DNA
gaaatccagttgacccagtctccatcctccctgtcagcatctttaggagacagagtcaccatcacttgccgggcaggtcacagcattaggaactatttaaattggtatcagcagaaaccagggacagcccctaagctcctgatctatgtttcatccagtttgcaaagtggggtcccatcaaggttcagtggcagtggatctgggacagatttcactctcaccatcagcagtctgcaacctgaggattctgcaacttactactgtcaacagagtttcagtcccccttacacttttggccaggggaccaaggtggatatcaaa

SEQ ID NO: 4664 - DNA, 321 bp, synthetic construct
  source 1..321: mol_type = other DNA
gacatccaggtgacccagtctccatcctccatgtctgcatctgtaggagacagagtcaccatcacttgtcgggcgagtcagggcattagcaattatttagcctggtttcagcagaaaccagggaaagtccctaagcgcctgatctatggtgcatccagtttgcaagcaggggtcgcattaaggttcagcggcagtggatctgggacagaattcactttcaccatcaccagcctgcagcctgaagattttgcaacatattactgtctacaacataatagttctcctatcaccttcggccaagggacccgagtggagattaaa

SEQ ID NO: 4665 - DNA, 321 bp, synthetic construct
  source 1..321: mol_type = other DNA
gaaatcgtgatgacgcagtctccatcctccctgtctgcatctgtaggagacagagtcgccatcacttgccaggcgagtcaggacattaggagctttttaaattggtatcagcataaaccagggaaagcccctaagctcctgatctacgctgcatccaatttggaaataggggtcccatcaaggttcagtggaagtggatctgggacagattttactttcaccatcagcagcctgcagcctgaagattttgcaacatattactgtcaacagtttgatattctcccctggacttttggccaggggaccaaggtggatatcaaa

SEQ ID NO: 4666 - DNA, 333 bp, synthetic construct
  source 1..333: mol_type = other DNA
tcgtatgagctgactcagccaccctcagtgtctggggccccagggctgagggtcaccatctcctgcactgggagcgactccaacatcggggcaggatatgatgtacactggtaccggcagcttccagggacagcccccaaactcctcatctatggtgacaataatcggccctcaggggtccctgaccgattctctggctccaagtctggcatctcagcctccctggccatcactggtctccaggctgaggatgaggctgattattactgccagtcctatgacagcagcctgagtggcagcgttttcggcggggggaccaagctcaccgtccta

SEQ ID NO: 4667 - DNA, 318 bp, synthetic construct
  source 1..318: mol_type = other DNA
gaaatgacactcacgcagtctcccccctccctggctgcatctgtaggagacagagtcaccatcacttgccgggccagtcagaatattaataactggttggcctggtatcagcagaaaccaggaaaagcccctaagctcctgatctttgatgcctccagtttggaaggtggggtcccatcaaggttcagcggcagtggatctgggacagaattcactctcaccatcagcagcctgcagcctgatgattttgcaacttactactgccagcagtataaaacttactcgacgttcggccaagggaccaaggtggatatcaaa

SEQ ID NO: 4668 - DNA, 315 bp, synthetic construct
  source 1..315: mol_type = other DNA
tactatgtgctgactcagccaccctcggtgtcagtggccccaggacagacggccagaattacctgtgggggaagcgacattggaagtaagggtgtgcactggtaccaacagaggccaggccaggcccctgtgctggtcgtcaatgatgataccgaccggccctcagggattcctgagcgattccttggctccaactctgggaacacggccaccctgaccatcagcagggtcgaggccggagatgaggccgactattactgtcaggtgtgggatgttggtgcggtgttcggcggagggaccaaggtcaccgtccta

SEQ ID NO: 4669 - DNA, 324 bp, synthetic construct
  source 1..324: mol_type = other DNA
gaaatgacactgacgcagtctccatcctacctgtctgcatctgcaggagacagagtcaccatcacttgccgggccagtcagggcattaacaattttttagcctggtatcaacaaaaaccagggaaagcccctaagctcctgatctatggtgcatccactttgcaaagtggggtcccattaagattcagcggcagtggatctgagacagaattcactctcacaatcagcagcctgcagccggaagattttgcaacttattactgtcaacaccttgatagttaccctcggtacacttttggccaggggaccaaggtggaaatcaaa

SEQ ID NO: 4670 - DNA, 321 bp, synthetic construct
  source 1..321: mol_type = other DNA
gacatccggatgacccagtctccatcctccctgtctacatctgtaggagaccgagtcaccatcacttgccgggcgagtcagggcattagcaattctttagcctggtatcagcagagaccagggagagcccctaaactcctgctctatggtgcatccacattggaaagtggggtcgcgtccaggttcagtggcagtggatctgggacggatttcactctcaccatcagcagcctgcagcctgaagattttgcaacttattactgtcaacagtactatgggccccctcacacttttggccaggggaccaaggtggagatcaaa

SEQ ID NO: 4671 - DNA, 324 bp, synthetic construct
  source 1..324: mol_type = other DNA
gaaattgtgatgacgcagtctccaggcaccctgtctttgtctccaggggaaagagccacactctcctgcagggccagtcagagtgttagcagcggccacctagcctggtaccagcagagacctggccaggctcccaggctcctcatctatggtacatccaacagggccactggcatccctgacaggttcagtggcagtgggtctgggacagacttcattctcaccatcagcagactggagtctgaagatattgcagtgtactattgtcagcaatccgttaacttcccgagaacgttcggccaagggaccaaggtggaaatcaaa

SEQ ID NO: 4672 - DNA, 318 bp, synthetic construct
  source 1..318: mol_type = other DNA
gaaatcgtggtgacgcagtctccatcctccctgtctgcatctgtaggagacagagtcaccatcacttgccgggcgagtcagggcattaccaattccttagcctggtatcagcagaaaccagggaaagcccctaagctcctactctattctgcatccacattggaaggtggggtcccatccaggttcagtggcagtggatctgggacggatttcattctcaccatcgacagcctgcagcctgaagattttgcaacttattactgtcaacagtattatattctccggacgttcggccaggggaccaaggtggagatcaaa

SEQ ID NO: 4673 - DNA, 333 bp, synthetic construct
  source 1..333: mol_type = other DNA
cagtctgtgttgacgcagccgccctcagtgtctggggccccagtgcagagagtcaccatctcctgcactgggagcaactccaacctcggggcaggttatgatgtacactggtatcagaaacttccagggacagcccccaaactcctcatctatggaaacaacaatcggccctcaggggtccctgaccgattctctggctccaagtctggcacctcagcctccctggccatcgctggtctccaggctgaggatgaggctgattatttctgccagtcctatgacagcagcctgagttcttcgctgttcggcggcgggaccaagctcaccgtccta

SEQ ID NO: 4674 - DNA, 321 bp, synthetic construct
  source 1..321: mol_type = other DNA
gacatcacgatgacccagtctccatcctccctgtctgcatctgtcggggacagagtcaccatcacttgccaggcgagtcacgacattagcgactatttaaattggtatcagcaaaaaccagggaaggcccctaagctcctgatctacgatgtgttaaatttgaaaacaggggtcccctcaaggttcagtggaagtggatctgggacacattttactttcaccatcagcagcctgcagcctgaagatattgcaacatattactgtcaacaatataatgatttcccgtacacttttggccaggggaccaaggtggagatcaaa

SEQ ID NO: 4675 - DNA, 324 bp, synthetic construct
  source 1..324: mol_type = other DNA
gacatccagttgacccagtctccatcctccctgtctgcatctgtaggagacagagtcaccatcacttgccgggcaagtcagtccattatgagatacttaaattggtatcagcagagaccagggaaggcccctaagctcctgatctatgctgcatccactttgcaaagtggggtcccatcaaggttcagtggcagtggatctgggacagatttcaggctcaccatcagcagtctgcaacctgaagactatgcaacttattactgtcaacagagttacagtagtcctccgtggacgttcggcccagggaccaaagtggaaatcaaa

SEQ ID NO: 4676 - DNA, 324 bp, synthetic construct
  source 1..324: mol_type = other DNA
gaaatccaattgacccagtctccatcctccctgtctgcatctataggagacagagtcatcatcacttgccgggcaagtcagaacattaacagctatttaaattggtatcagcagaaaccagggaaagcccctaagctcctgatctatgctgcatccagtttgcaaagtggggtcccatcaaggttcagtggcagtggatctaagacaaatttcactctcaccatcaccagtctgcaacctgaagattttgcaacttactactgtcaacagagttacagtatccccccaatcactttcggccctgggaccaaggtggatatcaaa

SEQ ID NO: 4677 - DNA, 327 bp, synthetic construct
  source 1..327: mol_type = other DNA
cagtctgtcctgactcagcctgcctccgtgtatgggtctcctggacagtcgatcaccatctcctgcactgcaaccagcagtgacgttggtagttataattatgtctcctggtaccaactgcacccaggcaaagcccccaaactcctcatttatgaggtcagtaatcggccctcaggagtttttaatcgcttctttggctccaagtctggcaacacggcctccctgaccatctctggacttcaggctgaggacgaggctgattattactgcagttcatatacacacgacagcacggtcttcggcggagggaccaagctcaccgtccta

SEQ ID NO: 4678 - DNA, 321 bp, synthetic construct
  source 1..321: mol_type = other DNA
gaaatccagttgacccagtctccatcctcactgtctgcatctgtaggagacagggtcaccatcacttgtcgggcgagtcaggccattggcaattatgtagcctggtttcagcagcaaccagggaaagcccctaagtcccttatagatgctgcatcaaatttgcaaggtggggtctcatcaagattcagcggcagtggatctggcacagatttcactctcaccatcagcagcctgcagcccgaagattttgcaacttattactgccaacagtacaaaacttaccccctcactttcggcggggggaccaaggtggaaatcaaa

SEQ ID NO: 4679 - DNA, 324 bp, synthetic construct
  source 1..324: mol_type = other DNA
gaaattgtgttgacacagtctccaggcaccctgtctttgtctccaggggaaagagccaccctgtcctgcagggccagtcagagtgttcgcagcgactacttagcctggtaccagctgaaacctggccaggctcccaggctcctcatttatactgtttccagcagggccactggcatccctgacaggttcagtggcagtgggtctgggacagacttcactctcaccatcagcagactggagcctgaagattttgcagtgtattactgtcagcagtatggtacctcaccctggacgttcggccaagggaccaaggtggaaatcaaa

SEQ ID NO: 4680 - DNA, 321 bp, synthetic construct
  source 1..321: mol_type = other DNA
gacatccagatgacccagtctccatcctcactgtctgcatctgtaggagacagagtcaccatcacttgtcgggcgagtcagggcattaggacttatttagcctggtttcagcagaaaccaggcgaagcccctaagtccctgatcgagggtgcatcaaatttgcaaagtggggtctcatcaaaattcagcggcagtggatctggcacagatttcactctcaccatcagcagcctgcagcctgaagattttgcaacttactactgccaacagtataaaagtttccccctcactttcggcggagggaccaaagtggaaatcaaa

SEQ ID NO: 4681 - DNA, 333 bp, synthetic construct
  source 1..333: mol_type = other DNA
cagtctgtgctgactcagcctccctccgcgtccgggtctcctggacagtcagtcaccatctcctgcactggaaccaacagtgacgttggtggtcataactctgtctcctggtaccaacaccacccaggcaaagcccccaaactcgtgatttttgaggtcaataagcggccctcaggggtccctgatcgcttctctggctccaagtctggcaacacggcctccctgaccgtctctgggctccaggctgacgatgaggctgattattactgcacctcatatgcagacaccggcgattgtgtgcttttcggcggagggaccaaggtcaccgtccta

SEQ ID NO: 4682 - DNA, 324 bp, synthetic construct
  source 1..324: mol_type = other DNA
gaaatgacactcacgcagtctccagccaccctgtctttgtctccaggtgaaagagccgacctctcttgcagggccagtcagagcgttagccgcaagttagcctggtatcaacagaaacctggccaggctcccaggctcctcatttatgatgcatccaccagggccactggcatcccagccaggttcactggcagtgggtctgggacagagttcactctcaccatcagcagcctgcagtctgaagattttgcaatttattactgtctgcagtataataattggcctcccctcactttcggcggagggaccaaggtggatatcaaa

SEQ ID NO: 4683 - DNA, 330 bp, synthetic construct
  source 1..330: mol_type = other DNA
cagtcaaaactgactcagccaccctcagcgtttgggacccccgggcagagggtcaccatctcttgttgtggaagcagctccaaccttggaagtaattgtgtaaactggtaccagcaactcccaagaacggcccccaaactcctcgtctatagtaataatcagcggccctcaggggtccctgaccgattctctggctccaagtccggcacctcagcctccctggccatcagtgggctccagtctgaggatgaggctgattattactgcgcaacatgggatgacagcgtgactggtccggtgttcggcggagggaccaagctccccgtctta

SEQ ID NO: 4684 - DNA, 321 bp, synthetic construct
  source 1..321: mol_type = other DNA
gacatcccaatgacccagtctccatcctccctgtctgcatctgttggagacagagtcaccatcacttgccgggcgagtcaggacattagcaattctttagcctggtatcagcagaaaccagggaaagcccctaagttcctcctctatgctgcatccgtattggaaagtggggtcccatccaggttcagtggccgtggatctgggaccaatttcactctcgccatcagcagcctgcagcctgaagattttgcaacttattactgtcaacattattatagtaatcctcggacttttggccaggggaccaaggtggagatcaaa

SEQ ID NO: 4685 - DNA, 324 bp, synthetic construct
  source 1..324: mol_type = other DNA
gacatccagatgacccagtctccatcctccctgtctgcatttgtaggagacagaatcagcatcacttgccgggcaagtcagagcattaacaattacctaaattggtatcagcacaaaccggggagagcccctaagctcctgatctatgctgcatccagtttgcaaagtggggtcccatcaaggttcagtggtagtggatctgggacagatttcactctcaccatcagcagtctgcaacctgaagattttgcaacttattactgtcaacagagttacactctccctggagccactttcggcggagggaccaaggtggagatcaaa

SEQ ID NO: 4686 - DNA, 321 bp, synthetic construct
  source 1..321: mol_type = other DNA
gaaattgtgatgacccagtctccagccaccctgtctgtgtctccaggggaaagagccaccctctcctgcagggccagtcagagtattagcagcaacttagcctggtaccagcagaaatttggccaggctcccaggctcctcatctatggtatatccaccggggccactggtaccccagccaggttcagaggcagtgggtctgggacagagttcactctcaccatcagcagcctgcagtctgaagattttgcagtttattactgtcagcagtataatcactggccgggcacgttcggccaagggaccaaggtggaaatcaaa

SEQ ID NO: 4687 - DNA, 333 bp, synthetic construct
  source 1..333: mol_type = other DNA
cagtctgtcttgacgcagccgccctcagtgtctggggccccaggacatagggtcaccatctcctgcactgggagcagctccaacatcggggcaggttatgatgtgcactggtaccagcagcttccaggaacagcccccaaactcctcatctatagtaataataatcggccctcaggggtccctgaccgaatctctggctccaggtctgacacctcagcctccctggccatcactggactccaggctgaggatgaggctgattatttctgccagtcctatgacagtaacgtgttcggtaaggtattgggcgaagggaccaagctgaccgtccta

SEQ ID NO: 4688 - DNA, 327 bp, synthetic construct
  source 1..327: mol_type = other DNA
cagcctgtgctgactcagcctgcctccgtgtctgggtctcctggacagtcgatcaccatctcctgcactggaaccagcagtgaccttggtaattttaactatgtctcctggtaccaacaacacccaggcaagggccccaaactcatgatttatgagttcagtaatcggccctcaggggtttctcatcgcttctctggctccaagtctggcaacacggcctccctgaccatctctgggctccagcctgaggacgaggctgattattactgcagctcatatacaaccgacagcgtcgttttcggcggagggaccaaggtcaccgtccta

SEQ ID NO: 4689 - DNA, 321 bp, synthetic construct
  source 1..321: mol_type = other DNA
gacatcgcgatgacccagtctccatcctccctgtctgcatctgtaggagacagagtcaccatcagttgtcgggcaagtcagagtattttcagctatttaaattggtatcaacagaaaccagggaaagcccctaagctcctgatctttggtgcatccactttgcaaagtggggtcccatcaaggttcagtggcagtggatctgggacagatttcactctcaccatcagcagtctgcaacctgaagatcttgcaacttactcctgtcaacagagttacagttcaatgtggacgttcggccaagggaccaaggtggaaatcaaa

SEQ ID NO: 4690 - DNA, 333 bp, synthetic construct
  source 1..333: mol_type = other DNA
cagtctgagctgactcagccaccctcaacgtctgggacccccgggcagagggtcaccatctcttgttctggaagcagctccaacatcggaggtaatgttgtgaactggtaccagcagctgccaggaacgacccccaaagtcctcatctataataataatcagcggccctcaggggtccctgaccgattctctggctccaagtctggcaccacagcctccctggccatcagtgggctccagtctgaggatgaggctgattattactgtgcagcatgggatgacagcctgaatggccccttggtattcggcggagggaccaagctcaccgtccta

SEQ ID NO: 4691 - DNA, 324 bp, synthetic construct
  source 1..324: mol_type = other DNA
gaaatgacgatcacgcagtctccatcctccctgtctgcatctgtaggagacagaatcaccatcacttgccgggcaagtcagagcattagaggacatttaaactggtatcagcacaaaccagggaaagcccctaagctcctgatctatgattcatccagtttgcaaagtggggtcccatcaaggttcagtggcagtggatctgggacagatttcactctcaccatcagcagtctgcagcctgaagattttgcaacttactactgtcaacagagttacagtacccctccgtggacgttcggccaagggaccaaggtggagatcaaa

SEQ ID NO: 4692 - DNA, 333 bp, synthetic construct
  source 1..333: mol_type = other DNA
cagtctgtcttgacgcagccgccctcagtgtctggggccccagggcagagggtcaccatctcctgcactgggagcaactccaacatcggggcaggttatgatgtacactggtaccggcaacttcctggaacagccccccaactcatcttctacgggaacaccaatcggccctcaggggtccctgaccgattctctgcctccaagtctggcacttcagcctccctggccatcactgggctccaggctgacgatgaggctgattattactgccagtcctatgacagcagcctgagtggtgtgatattcggcggagggaccaaggtcaccgtccta

SEQ ID NO: 4693 - DNA, 318 bp, synthetic construct
  source 1..318: mol_type = other DNA
gaaatcgtgatgacgcagtctccttccaccctgtctgcatctgtaggagacagagtcaccatcacttgccgggcccgtcagagtattagtaactggttggcctggtatcagaagaaaccagggaaagcccctacgctcctaatctataaggtatctactttagaaagtggggtcccatcaaggttcagcggcagtggatctgggacagaattcactctcaccatcagcagcctgcagcctgatgattttgcaacttattactgccaacagtctagtagttattacacttttggccaggggaccaaagtggatatcaaa

SEQ ID NO: 4694 - DNA, 324 bp, synthetic construct
  source 1..324: mol_type = other DNA
gacatccagatgacccagtctccatcctccctgtctgcatctgtaggagacagagtcaccatcacttgccgggcaagtcagaccattagtcgctatttaaattggtatcagcagagaccagggaaagcccctaagctcctgatctatggtgcatccactttgcaaagtggggtcccatcaaggttcagtggcactggatctgggacagatttcactctcaccattggcagtctgcaacctgaagattttgcaacttactactgtcaacagagttacagcagtccaccttggacattcggcccagggaccaaggtggatatcaaa

SEQ ID NO: 4695 - DNA, 321 bp, synthetic construct
  source 1..321: mol_type = other DNA
gacatcgtgctgacccagtctccatcttccgtgtccgcctctgtaggagacagagtcaccatcacttgtcgggcgagtcaggatattagcagttacttagcctggtatcagcagagaccagggaaagcccctaagctcctgatctttgctgcatccagtttggaaagtggggtcccatcaaggttcagcggcagtggatctaggacagatttcactctcaccatcagcagcctgcagcctgaagactttgcgacttattattgtcaacaggctcacagtttcccgtggacgttcggccaagggaccaaagtggatatcaaa

SEQ ID NO: 4696 - DNA, 324 bp, synthetic construct
  source 1..324: mol_type = other DNA
gaaatcccattgacccagtctccatcctccctgtctgcatctgtaggagacagagtcaccctcacttgccgggcaagtcagagcattgacaactatttaaattggtatcaacagaaaccagggaaagcccctaaactcctgatatatggtgcatccagtttgcaaagtggggtcccatcaaggttcagtggcagtggatctgggacagacttcactctcaccatcagcagtctgcaacctgaagattttgcaacctacctctgtcaacagagttacggtccccctccgaccaccttcggccaggggacacgactggagattaaa

SEQ ID NO: 4697 - DNA, 321 bp, synthetic construct
  source 1..321: mol_type = other DNA
gacatcgggatgacccagtctccatcctccctgtctgcatctgttggagacagagtcaccatcacttgtcgggcaagtcagaccattaacagctatttaaattggtatcagcaaaaaccagggacagcccctaaactcctgatctatgctgcatccagtttgcaaagtggggtcccatcaaggttcagtggcagtggatctgagacacatttcactctcaccatcaccaatctgcaacctgaagattttgcaacttactactgtcaacagactcacagtccccctcgggcgttcggccaagggaccaaggtggagatcaaa

SEQ ID NO: 4698 - DNA, 309 bp, synthetic construct
  source 1..309: mol_type = other DNA
gaaattgtgatgacacagtctccagccaccctgtctttgtctccaggggacagagccaccctctcctgcagggccagtcagagttttaataactacttagcctggtaccaacagaaacctggccaggctcccaggctcctcatctatgatgcatccaacagggccactggcatcccagccaggttcagtggcagtgggtctgggacagacttcactctcaccatcagcagcgtagagcctgaagattttgcaatttattactgtcaacatcgtagcaacttcggccaagggacacgactggagcttaaa

SEQ ID NO: 4699 - DNA, 321 bp, synthetic construct
  source 1..321: mol_type = other DNA
gaaatcccgatgacccagtctccatcctccctgtctgcatctgtaggagacagagtcaccatcacttgccgggcaagtcagagcatcagcggctatttaaattggtatcaacaaaaagcaggcaaagcccctaaactcctgatctatggtgcatcaagtttgcaaagtggggtcccagcaaggttcagtggcagtggatctgggacagatttcactctcaccatcaacactctgcaacctgacgactttgcaacttattactgtcaacagagttacgattatccgcggacgttcggccaagggaccaaagtggatatcaaa

SEQ ID NO: 4700 - DNA, 321 bp, synthetic construct
  source 1..321: mol_type = other DNA
gaaatcgtgatgacccagtctccatcgtccctgtctgcatctgtgggagacagggtcaccatcacttgccgggcaagtcagagcattcgcgactttttaaattggtatcagcagaaaccagggaaagcccctaaactcctaatctattctacatccaatttgcaaagtggggtcccatcaaggttcagtggcagtggatctgggacagatttcactctcaccatcagcagtctgcaacctgaagatttcgcaacttactactgtcaagagagctacacaacccctccggcttttgggcaggggaccaaagtggaaatcaaa

SEQ ID NO: 4701 - DNA, 333 bp, synthetic construct
  source 1..333: mol_type = other DNA
cagtctgagctgactcagccaccctcagcgtctgggacccccgggcagagggtctccatctcttgttctggaaccaactccaacatcggaggtaatactgtaaactggtatcagcagctcccaggaacggcccccaaactgctcatctataataattatcagcggccctcaggggtccctgaccgattctctggctccaagtctggcacctcagcctccctggccatcagtggactccagtctgaggatgaggctgaatattactgtgcaacatgggatgacagcctggatggtcataatgtcttcggaactgggaccaagctcaccgtccta

SEQ ID NO: 4702 - DNA, 333 bp, synthetic construct
  source 1..333: mol_type = other DNA
cagtttgtggtgacgcagccgccctcagtgtttggggccccagggcagagggtcaccatctcctgcactgggagcaactccaacatcggggcaggttatgatgttcactggtatcagcagcttccaggaacagcccccaaactcctcatctatgacaacaacaatcggccctcaggggtccctgaccgattctctggctccaagtttgacacctcagcctccctggccatcactgggctccaggctgaggatgaggctgattattactgccagtcctatgacagcagcctgagtgattcggtgttcggcggagggacccagctcaccgtccta

SEQ ID NO: 4703 - DNA, 321 bp, synthetic construct
  source 1..321: mol_type = other DNA
gaaatcacactgacccagtctccttccaccctgtctgcatctgtaggagacagagtcaccatcacttgccgggccagtcagagtattagtaggtggttggcctggtatcagcagaaaccagggaaatcccctaacctcctgatctataaggcgtctagtttacaaagtggggtcccagcaaggttcagcggcagtgcatctgggacagaattcactctcaccatcagccgcctgcagcctgacgattttgcaacttattactgccaacagtatgatacttatccgtggacgttcggccaggggaccaaggtggagatcaaa

SEQ ID NO: 4704 - DNA, 324 bp, synthetic construct
  source 1..324: mol_type = other DNA
gaaatcccaatgacccagtctccatccttcctgtctgcatctgtaggagacagagtcaccatcacttgccgggccagtcagggcattcccagttttttagcctggtatcagcaaaaaccagggaaagcccctaagctcctgatctctggtgtatccactttgcaaagtggggtcccattaaggttcagcggcagtggatctgggacagaattcactctcacaatcagcagcctgcagcctgaagattttgcaacttattactgtcaataccttgatacttaccctcggtacacttttggccaggggaccaaggtggatatcaaa

SEQ ID NO: 4705 - DNA, 324 bp, synthetic construct
  source 1..324: mol_type = other DNA
gaaatcgagttgacccagtctccatcccccctgtctgcatctgtaggagacagagtcaccatcacttgccgggcaagtcagagcataggcaagtatttaaattggtatcagcagaaaccagggagagcccctaagctcctgatttacgctacatcccgtttgcaaagtggggtcccatcaaggttcagtggcagtggatctgggacagatttcactctcaccatcagcagtctgcaacctgaagattttgcaacttattactgtcagcagagttacagtatgcctccgtggacgttcggccaagggaccaaggtggagatcaaa

SEQ ID NO: 4706 - DNA, 324 bp, synthetic construct
  source 1..324: mol_type = other DNA
gacatcacactgacccagtctccatcctccctgtctgcatctgtaggagaccgagtcaccatcacttgccgggcaagtcagagcattggcacctatttaaattggtatcagtggaaaccagggaaagcccctaagtttttgatctatgctgcatccagtttgcaaagtggggtcccatcaaggttcagtggcagtggatctgggacagagttcactctcaccatcagcagtctgcaacctgaagattttgcaacttactactgtcaacagagttacattaaccctcaggtcaccttcggccaagggacacgactggagattaaa

SEQ ID NO: 4707 - DNA, 330 bp, synthetic construct
  source 1..330: mol_type = other DNA
tcgtatgagctgactcagccactctcagcgtctgggacccccgggcagagggtcaccatctcttgttctggaggcagctccaacatcggaagttatcctgtgagctggtaccaccagctcccaggaacggcccccaaactcctcatctataataataatcagcggccctcaggggtccctgaccgattctctggctccaagtctggcacctcagcctccctggccatcagtgggctccagtctgaggatgaggctgattattactgtgcagcatgggatgacagcctgaatggttatgtcttcggaactgggaccaagctcaccgtccta

SEQ ID NO: 4708 - DNA, 324 bp, synthetic construct
  source 1..324: mol_type = other DNA
gaaacaacattgacccagtctccatcttccgtgtctgcatctgtaggagacacagtcaccatcacttgccgggcaagtcagagcattcacacgtatttaaattggtatcaacagaaaccagggaaagcccgtaaactcctgatatatgctgcatccagtttgcaaagtggggtcccatcaaggttcagtggcagtggatctgggacagatttcactctcaccatcagcagtctgcaacctgaagattttgcaacttattactgtcaacagagttacagtagtcctccgtggacgttcggccaagggaccaaagtggatatcaaa

SEQ ID NO: 4709 - DNA, 321 bp, synthetic construct
  source 1..321: mol_type = other DNA
gaaatgacaatcacgcagtctccagccaccctgtttgtgtctccaggggatagagccaccctctcctgcagggccagtcagagtgttagcagcaacttagcctggtaccagcagaaacctggccaggctcccaggctcctcatctatggtgcatccaccagggccactgatatcccagccaggttcagtggcagtgggtttggggcagagttcactctcaccatcagcagcctgcagtttgaagattttgcagtttattactgtcagcagtataataactggcctcgggcgttcggccaagggaccaaggtggaaatcaaa

SEQ ID NO: 4710 - DNA, 321 bp, synthetic construct
  source 1..321: mol_type = other DNA
gaaatgacaatgacgcagtctccatcctccctgtctgcatctgtaggagacagagtcaccatcacttgccaggctggtcaggacatttccaaccatttaagttggtatcagcaggaaccagggaaagcccctaagctcctgatctacgatgcatccaatttggaaacaggggtcccatcaaggttcactggaagtggatctgggacagattttactttcaccatcagcagcctgcagcctgaagatgttacaacatattactgtcaacagtatgaggatctccctccgactttcggcggagggaccaaagtggatatcaaa

SEQ ID NO: 4711 - DNA, 324 bp, synthetic construct
  source 1..324: mol_type = other DNA
tcgcatgagctgacacagccaccctcggtgtcagtgtccccaggacagacggccaggatcacctgctctggagatgccttgccaagccaatatgcttattggtaccaacagaagccaggccaggcccctctactaatgatctataaagacattgagaggccctcagggatccctgagcgattctctggctccagctcagggacaacagtcacgttgaccatcagtggagtccaggcagaagacgaggctgactatttctgtcaatcatcagacaatactggtacttatgtggtgttcggcggagggaccaagctgaccgtccta

SEQ ID NO: 4712 - DNA, 321 bp, synthetic construct
  source 1..321: mol_type = other DNA
gacatcgggatgacccagtctccatcctccctgtctgcagctgtaggagacagagtcaccatcacttgccgggcaagtcagaccattagcaactatttaaattggtatcagcagagaccagggaaaggccctaagctcctgatctatgttgcatccagtttgcaaagtggggtcccatcaaggttcagtggcagtagatctgggacagatttcactctcaccatcagcagtctgcaacctgaagattttgcaacttactactgtcaacagagttatagtacccctcccacttttggccaggggaccaaggtggagatcaaa

SEQ ID NO: 4713 - DNA, 324 bp, synthetic construct
  source 1..324: mol_type = other DNA
gaaattgtattgacacagtctccatcctccctgtctgcatctgtaggagacagagtcaccatcacttgccgggcaagtcagagcattacccggtatttaaattggtatcaacacaaaccagggaacgcccctaagctcctgatctatgctgcatccactttgcaaagtggggtcccatcaaggttcagtggcagtggatctggtacagatttcactctcaccatcaacagtctgcaacctgaagattttgcaacttactactgtcaacagagttacagtatgcctccgtggacgttcggccaagggaccaaggtggaaatcaaa

SEQ ID NO: 4714 - DNA, 324 bp, synthetic construct
  source 1..324: mol_type = other DNA
gacatccagatgacccagtctccatcctccctgtctgcatctgtaggagacagagtcaccatcacttgccgggcaagtcagagcattacccggtatttaaattggtatcaacacaaaccagggaacgcccctaagctcctgatctatgctgcatccactttgcaaagtggggtcccatcaaggttcagtggcagtggatctggtacagatttcactctcaccatcaacagtctgcaacctgaagattttgcaacttactactgtcaacagagttacagtatgcctccgtggacgttcggccaagggaccaaggtggaaatcaaa

SEQ ID NO: 4715 - DNA, 333 bp, synthetic construct
  source 1..333: mol_type = other DNA
cagtctgtcttgacgcagccgccctcagtgtctggggccccagggcagagggtcaccatcccctgcagtgggagcaactccaacatcggggcaggttatgatgtacactggtaccagcaacttccaggaacagcccccaaactcctcatttatagaaacaacaatcggccctcaggggtccctgaccgcttctctggctccaagtctgccacctcagcctccctggccatcactgggctccaggctgaggatgaggctgattattactgccagtcgtatgacagcagcctgagtggtgtggttttcggcgaagggaccaagctgaccgtccta

SEQ ID NO: 4716 - DNA, 324 bp, synthetic construct
  source 1..324: mol_type = other DNA
cagtatgtgctgacgcagccaccctcggtgtcagtgtccccaggacaaacggccaggatcacctgctctggagatgcactgccaagaaaatatgctcattggtaccagcagaagtcaggccaggcccctgtgttggtcatccatgaagacagggaacgaccctccggaatccctgagagattctctggctccagatcagggacagtggccaccttgactatcagtggggcccaggtggaggatgaggctgactactactgttactcaacagacagcagtggtactcaaggggtcttcggcggagggaccaagctcaccgtccta

SEQ ID NO: 4717 - DNA, 321 bp, synthetic construct
  source 1..321: mol_type = other DNA
gacatccggatgacccagtctccatcctccctgtctgcagctgtaggagacagagtcaccatcacttgccgggcaagtcagaccattagcaactatttaaattggtatcagcagagaccagggaaaggccctaagctcctgatctatgttgcatccagtttgcaaagtggggtcccatcaaggttcagtggcagtagatctgggacagatttcactctcaccatcagcagtctgcaacctgaagattttgcaacttactactgtcaacagagttatagtacccctcccacttttggccaggggaccaaagtggatatcaaa

SEQ ID NO: 4718 - DNA, 321 bp, synthetic construct
  source 1..321: mol_type = other DNA
gaaatgacactgacgcagtctccatcctccctgtctgcatatgtaggagacagagtcaccatcacttgccgggcaagtcagatcattaccgcctatttaaattggtatcagcagaaaccaggtaaagcccctaacctcctgatctatgctgcctccaatttgcaaagtggggtcccatcaaggttcagtggcagtggatctgggacagatttcactctcaccattagcagtctgcaacctgaagattttgcaacttactactgtcaacagagttacactaccccgtacacctttggccaggggaccaaggtggagatcaaa

SEQ ID NO: 4719 - DNA, 324 bp, synthetic construct
  source 1..324: mol_type = other DNA
gaaatcacactcacccagtctccatcctccctgtctgcatctgttggagacagagtcaccatcacttgccgggcaagtcagagcattagcacctatttaaattggtatcagcagaaaccagggaaagcccctcagctcctgatctatgctgtttccagtttgaaaagtggggtcccatcaaggttcagtggcagtgggtctgggacagacttcactctcaccatcagcagtctgcaacctgaggattctgcagcttactattgtcaacagagttacactacccccgcgctcactttcggcggagggaccaaggtggatatcaaa

SEQ ID NO: 4720 - DNA, 321 bp, synthetic construct
  source 1..321: mol_type = other DNA
gaaatcccggtgacccagtctccatcttctgtgtctgcatctgtaggagacagagtcaccatcacttgtcgggcgagtcaacattttagcaactggttagcctggtatcagctgaaaccagggaaagcccctaaactcctgatctatgctgcatccactttgcagagtggggtcccatcaaggttcagcggcagtgggtctgggacagatttcactctcactatcagcagcctgctgcctgaagattttgcaacttactattgtcaacaggctaacagtttcccgtacacttttggccaggggaccaaggtggaaatcaaa

SEQ ID NO: 4721 - DNA, 321 bp, synthetic construct
  source 1..321: mol_type = other DNA
gacatccggatgacccagtctccttccaccctgtctgcatctgtaggagacagagtcaccatcacttgccgggccagtcagagtattagtggctggttggcctggtctcagcagaaaccagggaaagcccctaagctcctgatctatggggcatctactttaggaagtggggtcccatcaaggttcagcggcagtggatttgggacagaattcactctcaccatcagcagcctgcagcctgatgattttgcaacttattactgccaacaatataaaagttattcctatacttttggccaggggaccaaggtggaaatcaaa

SEQ ID NO: 4722 - DNA, 330 bp, synthetic construct
  source 1..330: mol_type = other DNA
cagtttgttctgaatcagcctgcctccgtgtctgggtctcctggacagtcgatcaccatctcctgcactggaaccagcagtgacgttggtgattataactatgtctcctggtaccaacaccacccaggcaccgcccccaaactcatgatttatgaggtcactaatcggccctcaggggattctgatcgcttctctggctccaagtctggcaacacggcctccctgaccatctctggcctccaggctgaggacgaggctgattattactgcagctcatatacaagcagcaacactctcgtcttcggaactgggaccaagctcaccgtccta

SEQ ID NO: 4723 - DNA, 327 bp, synthetic construct
  source 1..327: mol_type = other DNA
gaaattgtgatgacgcagtctccaggctccctgtctttgtctccaggggaaagagccaccctctcctgcagggccagtcagagtattagcagaacctacttagcctggtaccagcagaaacctggccaggctcccaggctcctcatctatgctacatccaccagggccactggcatcccagacaggttcagtggcagtgggtctgggacagacttcactctcaccatcagcagactggagcctgaagattttgcagtgtattactgtcagcagtatggtagttcacctatgtatacttttggccaggggaccaaggtggatatcaaa

SEQ ID NO: 4724 - DNA, 321 bp, synthetic construct
  source 1..321: mol_type = other DNA
gaaatgccaatgacgcagtctccttccaccctgtctgcatctgtgggagacagagtcaccatcacttgccgggccagtcagagtattggtagcaggttggcctggtatcagcagaaaccagggaaagcccctagcctcttgatctataaggcatctagtttagaaagtggggtcccatcaaggttcagcggcagtggatctgggacagaattcactctcaccatcagcagcctgcagcctgatgatttggcaacttatttctgccaacagtataatagttactccctcactttcggcggagggaccaaggtggaaatcaaa

SEQ ID NO: 4725 - DNA, 321 bp, synthetic construct
  source 1..321: mol_type = other DNA
gacatccagttgacccagtctccatcctccctgtctgcatctgtgggagacagagtcaccatcacttgccaggcgagtcaggacataagcaactatttaaattggtatcagcaaaaaccagggaaagccccaaagctcctgatctacgatgcatccaattacgacacaggggtcccatcaaggttcagtgggactggatctgggacagattttactttcaccatcagcagcctgcagcctgaagatattgcaatatatttctgtcaacagtatgatagtctccccctcactttcggcggagggaccaaggtggagatcaaa

SEQ ID NO: 4726 - DNA, 336 bp, synthetic construct
  source 1..336: mol_type = other DNA
gacatccagttgacccagtctccagactccctggctgtgcctctgggcgagagggccaccatcaactgcaagtccagccagagtgttttctccagctccaacaataggaacaacttagcttggtaccagcagagaccaggacagcctcctaagttgctcatttactgggcatctacccgggaatccggggtccctgaccgcttcagtggcagcgggtctgggacagatttcactctcaccatcagcagcctgcaggctgaagatgtggcagtttattactgtcagcaatattatagttggtacagttttggccaggggaccaaggtggagatcaaa

SEQ ID NO: 4727 - DNA, 324 bp, synthetic construct
  source 1..324: mol_type = other DNA
gacatcacaatgacccagtctccatcctccctgtctgcatctgtaggagacagagtcaccatcacttgccgggcaagtcagaacattaacggctatttaaattggtatcagcaaaaaccagggaaaggccctaaggtcctgatctacgctgcatccactttgcaaagtggagtcccatcaaggttcagtggcagtggttctgggacagatttcactctcaccatcagcagtctgcaacctgaagattttgcaacttactactgtcaacagagttatgaatcccccccgtggacgttcggccaagggaccaaggtggatatcaaa

SEQ ID NO: 4728 - DNA, 324 bp, synthetic construct
  source 1..324: mol_type = other DNA
gaaatgacactgacccagtctccaggcaccctgtctttgtctccaggggaaagagccaccctctcctgcagggccagtcagagtgttggcagcggcttcttagcctggtaccagcagaaacctggccaggctcccaggctcctcatctatgctgcgtccggcagggcccctggcatcccagacaggttcagtggcagtggctctgggacagacttcactctcaccatcagcagactggagcctgaagattttgcagtgtattactgtcagcagtatggtagctcaccgtacacttttggccaggggaccaaagtggatatcaaa

SEQ ID NO: 4729 - DNA, 336 bp, synthetic construct
  source 1..336: mol_type = other DNA
aattatgtgctgactcagccaccctcagcgtctgggacccccgggcagagggtcaccatctcttgctctggaaacagatccaacataggagataattatgtatattggtaccagcagttcccaggaacggcccccaaactcctcatctataagaataatcagcggccctcaggggtccctgaccgattctctggctccaagtctggcacctcagcctccctggccatcagtgggctccggtccgaggatgaggctgattattactgtgcatcatggcataacggcctgagtggctctaattgggcgttcggcggagggaccaagctcaccgtccta

SEQ ID NO: 4730 - DNA, 324 bp, synthetic construct
  source 1..324: mol_type = other DNA
gacatcacactcacgcagtctccatcctccctgtctgcatctgtaggagacagagtcaccatcacttgccgggcaagtcagaacattaacagctatttaaattggtatcagcacagaccagggatagcccctaagctcctgatctatgctgcatccagtttgcatagtggggtcccatcaaggttcagtggcagtggatctgggacagatttcactctcaccatcagcagtctgcaacctgaagattttgcaacttactactgtcaacagagttacagtatctctccgtacacttttggccaggggaccaaggtggaaatcaaa

SEQ ID NO: 4731 - DNA, 321 bp, synthetic construct
  source 1..321: mol_type = other DNA
cagcatgtgctgactcagccaccctctttgtcagtggccccaggaaggacggccaggattacctgtggggggaacaacattggaactaagagtgtgcactggtaccaacagaggccaggccaggcccctgtgatggtcatctattatgatagtgaccggccctcagggatccctgagcgattctctggctccaactctgggaacacggccaccctgaccatcagcagggccgaagccggggatgaggccgactattactgtcaggtgtgggatagtcgtggtgtttatgtcttcggaactgggaccaaggtcaccgtccta

SEQ ID NO: 4732 - DNA, 321 bp, synthetic construct
  source 1..321: mol_type = other DNA
gacatccagttgacccagtctccatcctttctgtctgcatctgtaggagacagagtcaccatcacttgccgggccagtcagggctttggcagttatgtagcctggtatcagcaaaaaccagggaaagcccctaagctcctgacctatgctgcatcccctttgcaaagtggggtcccatcaagattcagcggcagtggatctgggacagaattcactctcacaatcagcagcctgcagcctgaagattttgcaacttatttctgtcaacaacttaatagttaccctatcactttcggcggagggaccaaggtggagatcaaa

SEQ ID NO: 4733 - DNA, 321 bp, synthetic construct
  source 1..321: mol_type = other DNA
gacatccgggtgacccagtctccatcctccctgtctgcatctgtaggagacagagtcaccatcacttgccgggcaagtcagggcattagaaatgatttagggtggtatcaacaacaccctgggaaagcccctaagctcctgatttctgctgcctccagtttagaaactggggtcccatcaaggttcagcggcagtggatctggcacagatttcactctcaccatcaccagcctgcagcctgaagattttgcaacttattactgtctacaagattacagtaacttctggacgttcggccaagggaccaaggtggagatcaaa

SEQ ID NO: 4734 - DNA, 327 bp, synthetic construct
  source 1..327: mol_type = other DNA
gaaatgacgatgacgcagtctccttccaccctgtctgcatctgtaggagacagagtcaccatcacttgccgggccagtcagagtattagtaactggttggcctggtatcagcagaaaccaggaaaagcccctaaactcctgatctatatgacatctcgtttagaaggtggggtcccatcaaggttcagcggcagtggatctgggacagaattcactctcaccatcagcagcctgcagcctgatgattttgcaacgtattactgtcagcactataatagttattctgagatgtacacttttggccaggggaccaaggtggaaatcaaa

SEQ ID NO: 4735 - DNA, 333 bp, synthetic construct
  source 1..333: mol_type = other DNA
cagcctgtggtgacgcagccgccctcagtgtctggggccccagggcagagggtcaccatctcctgcactgggaccaactccaacatcggggcgggttatgatgtacactggtaccagctgcttccaggaacaccccccaaactcctcatctatcgtaacaccaatcggccctcaggggtccctgaccgattctctggctccaagtctggcacctcagcctccctggccatcactgggctccaggctgaggatgaggctgattattactgccagtcctatgacagcagcctgagtggttcggtgttcggcggagggaccaagctgaccgtccta

SEQ ID NO: 4736 - DNA, 339 bp, synthetic construct
  source 1..339: mol_type = other DNA
gaaacgacactcacgcagtctccagactccctggctgtgtctctgggcgagagggccaccatcaactgcaagtccagccagagtgttttatccagctccaacaataggaactacttatcttggtaccagcacaaaccaggacagcctcctaagctgctcatttactgggcatctacccggcaatccggggtccctgaccgattcagtggcagcgggtctgggacagatttcactctcaccatcagcagcctgcaacctgaagatgtggcagtttattactgtcagcaatattatagttctccctacacttttggccaggggaccaaagtggatatcaaa

SEQ ID NO: 4737 - DNA, 333 bp, synthetic construct
  source 1..333: mol_type = other DNA
cagtctgtgttgactcagccgccctcagtgtctggggccccagggcagagggtcaccatctcctgcactggcagcaactccaacatcggggcaggttatgatgtacactggtatcagcagcttcccggatcagcccccaaactcctcatctatgataacgccaatcggccctcaggggtccctgaccgattctctggctccaagtctgacacctcagcctccctggccatcactggcctccaggctgaggatgaggctgattattactgccagtcctatgacagcagtcttattggttctgtcttcggaactgggaccaagctcaccgtccta

SEQ ID NO: 4738 - DNA, 324 bp, synthetic construct
  source 1..324: mol_type = other DNA
gacattgtgatgacccagtctccatcctccctgtctgcatctgtgggagacagagtcaccatcacttgccgggcaagtcagagcgttcgcacctatttaaattggtatcagcataaaccagggaaagcccctaaactcctgatctatggtgcatccagcttgcaaagtggggtcccatcaaggttcagtggcagtggatctgggacagatttcactctcaccatcaccagtctgcaacctgaagattttgcgacttactactgtcaacagagttacagtacccccccgctcactttcggcggagggaccaaggtggaaatcaaa

SEQ ID NO: 4739 - DNA, 324 bp, synthetic construct
  source 1..324: mol_type = other DNA
cagcatgtgctgactcagccaccctcggtgtcagtggccccaggacagacggccagggttacctgtgggggaaacaacgttgggagtacaagtgtgcactggtaccagcagaagccaggccaggcccctgtgttggtcgtctatggtgatagagaccggccctcagggatccctgagcgattctctggctccaagtctgggaacacggccaccctgaccatcagcagggtcgaagccggggatgaggccgactattattgtcaggtgtgggatagcagtactgatcattgggtgttcggcggagggaccaaggtcaccgtccta

SEQ ID NO: 4740 - DNA, 321 bp, synthetic construct
  source 1..321: mol_type = other DNA
gaaatcgtaatgacccagtctccatcctccctgtctgcatctgtaagagacagagtcaccatcacttgccgggcaagtcagagcattagcagccatttaagttggtatcagcagagaccagggaaagcccctaagctcctgatctatgctgcatccactttgcaaagtggggtcccatcaaggttcagtggcagtggatctgggacagatttcactctcaccatcaccagtctgcaacctgaagattttgcaacttactactgtcaacagagtttcagtacccctcccacttttggccaggggaccaaggtggatatcaaa

SEQ ID NO: 4741 - DNA, 321 bp, synthetic construct
  source 1..321: mol_type = other DNA
gaaattgtgttgacccagtctccatcctccctgtctgcatctgtaggagacagagtcaccatcacttgccgggcaagtcagagcattagcagctatttaaattggtttcagcagaaaccagggaaagcccctaagctcctgatctatgctgcatccactttgcaacgtggggtcccatcaaggttcagtggcagtgaatctgggacagatttcactctcaccatcagcagtctgcaaccggaagattttgcaaattacttctgtcaacagagttacagtagcccgctcactttcggcggagggaccaaggtggaaatcaaa

SEQ ID NO: 4742 - DNA, 327 bp, synthetic construct
  source 1..327: mol_type = other DNA
gaaatgacaatgacgcagtctccaggcaccctgtctgtgtctccaggggaaagagccaccctctcctgcagggccagtcagagtgttgacagcaacttagcctggtaccagcagaaacctggccaggctcccaggctcctcatctatgatgcatccaccagggccactggtatcccagccaggttcagtggcagtgggtctgggacagagttcattctcaccatcagcagcctgcagtctgaagattttgcagtttatttctgtcagcagtataatgactggcctccggggtacacttttggccaggggaccaaggtggaaatcaaa

SEQ ID NO: 4743 - DNA, 324 bp, synthetic construct
  source 1..324: mol_type = other DNA
cagtctgtgctgactcagcccccctcggtgtcagtggccccaggacagacggccaggattacctgtgggggaaacaacattggaagtagaagtgtgcactggtaccagcagaagccaggccacgcccctgtgctggtcgtctatactaatagcgaccggccctcagggatccctgagcgattctctggctccaactctgggaacacggccaccctgaccatcagcagggtcgacgccggggatgaggccgactattactgtcaggtgtgggatagtgctagtgatcaggtggtattcggcggagggaccaagctcaccgtccta

SEQ ID NO: 4744 - DNA, 324 bp, synthetic construct
  source 1..324: mol_type = other DNA
gaaattgtgatgacccagtctccatcttccctgtctgcatctgttggagacagagtcaccatcacttgtcgggcaagtcagagcattaccacctatttaaattggtatcaacagaatccagggaaagcccctaacctcctgatctatgctgcatccaggttgcagagtggggtcccatcaaggttcagtggcagtggatctgggacaaatttcactctcacgatcagcagcctgcaacccgaagattttgcaacttactactgtcaacagagttacaatattcctcaactcactttcggcggagggaccaaggtggatatcaaa

SEQ ID NO: 4745 - DNA, 321 bp, synthetic construct
  source 1..321: mol_type = other DNA
gaaatgacaatgacgcagtctccatcctccctgtctgcatctgttggcgacagagtcaccatcgcttgccgggcaagtcagagcatcagcaactatttaaattggtatcagcagaaaccagggaaagcccctaaactcctcatctttgatgctaccagtttgcaaagtggggtcccatcaaggttcagtggcagtggatctgggacagatttcactctcaccatcagcagtctgcaacctgaagattttgcaacttactcctgtcaacagagttacactacctgggtcacttttggccaggggaccaaggtggaaatcaaa

SEQ ID NO: 4746 - DNA, 324 bp, synthetic construct
  source 1..324: mol_type = other DNA
gaaatgacactgacgcagtctccaggtaccctgtctgtgtctccaggggaaagagccaccctctcttgcagggccagtcagagtattagcagcaacttagcctggtaccagcagaaacctggccaggctcccaggctcctcatctttggtgcatccgccagggccactggtgtcccagccaggttcagtggcagtgggtctgggacagagttcactctcaccatcagcagcctgcagtctgaagattttgcagtttattactgtcagcactattatgactggcctccgtacacttttggccaggggaccaaggtggaaatcaaa

SEQ ID NO: 4747 - DNA, 321 bp, synthetic construct
  source 1..321: mol_type = other DNA
gacatccagatgacccagtctccatcctccctgtctgcatctgtgggagacagcgtcaccatcacttgccgggcgagtcaggacatcagcaattttttagcctggtatcagcagaaaccagggaaagttcctaggctcctgatctatgctgcatccactttgcaatcaggggtcccatctcggttcagtggcagtagatctgggacagatttcactctcaccatcaccagcctgcagcctgaagatgttgcaacttattactgtcaaaagtattacaatgtcccttggacgttcggccaagggaccaaagtggatatcaaa

SEQ ID NO: 4748 - DNA, 321 bp, synthetic construct
  source 1..321: mol_type = other DNA
gacatccagatgacccagtctccatcctccctgtctgcatctgtaggagacagagtcaccatcacttgccgggcaagtcagagcattagcgactatttaaattggtatcaacaaaaaccagggagagcccctaagctcctcatctatgctgcatccagttttcaaagtggggtcccattaaggttcactggcagtggatctgggacagatttcactctcaccatcagcagtctgcaacctgaagattttgcaacttactactgtcaacagagttacagtatcccgctcactttcggcggagggaccaaggtggaaatcaaa

SEQ ID NO: 4749 - DNA, 324 bp, synthetic construct
  source 1..324: mol_type = other DNA
tcgtatgagctgacgcagccaccctcagtgtcagtggccccaggaaagacggccaggattacctgtgggggaaacaacattggaagtaaaagtgtgtactggtaccaacagaagccaggccaggcccctgtgctggtcatctactatcatagcgaccggccctcagggttccctgagcgattctctggcttcaactctgggagcacggccaccctgaccatcagcggggtcgaagccggggatgaggccgactattactgtcaggtctgggatagtggtaacaatcacgtggttttcggcggaggcaccaaggtcaccgtccta

SEQ ID NO: 4750 - DNA, 321 bp, synthetic construct
  source 1..321: mol_type = other DNA
gaaatcgtgttgacccagtctccatcctccctgtctgcatctgtaggagacagagtcaccatcacttgccaggcgagtcaggacattgacaactttttaaattggtatcagcaaaaaccagggaaagcccctaaactcctgatcttcgatgtatcgaatttggaaacaggggtcccatcaaggttcagtggcagtggatctgggacagattttactttcaccatcagcagcctgcagcctgaagattttgcaacatattactgtcaacactatgataatctcaaattcactttcggccctgggaccaaggtggagatcaaa

SEQ ID NO: 4751 - DNA, 333 bp, synthetic construct
  source 1..333: mol_type = other DNA
cagtctgtcttgacgcagccgccctcagtgtctggggccccagggcagagggtcaccatctcctgcactgggaccaactccaacatcggggcaggttatgatgtacactggtaccagcgacttccaggaacagcccccaaactcctcatctatgttaacaacaatcggccctcaggggtccctgaccgattctctggctccaagtctggcacctcagcctccctggccatcactgggctccaggctgaggatgaggctgattattactgccagtcctatgacagcagcctgagttcttcgctattcggcggaggcacccagctgaccgtcctc

SEQ ID NO: 4752 - DNA, 333 bp, synthetic construct
  source 1..333: mol_type = other DNA
cagtctgtgctgacgcagccgccctcagtgtctggggcccccgggcagagggtcaccatctcctgcactgggagcgactccaacatcggggcaggttatgatgtacactggtaccagcagcttccaggaacagcccccaaactcctcatctatattaataccaatcggccctcaggggtccctgaccgattctctggctccaagtctggcacctcagcctccctggccatcactgggctcctggctgaggatgaggctgattattactgccagtcctatgacagcagcctgagtgactcggtattcggcggagggaccaagctcaccgtccta

SEQ ID NO: 4753 - DNA, 324 bp, synthetic construct
  source 1..324: mol_type = other DNA
gaaacgacactcacgcagtctccaggcaccctgtctttgtctccaggggaaagagccaccctctcctgcagggccagtcagagtgtaagaagtggttacttagcctggtaccaacagaaacctggccaggctcccaggctcctcatctatggttcatccagcagggccactggcatcccagacaggttcagtgccagtgggtctgggacagacttcactctcaccatcagcagactggagcctgaagattttgcagtgtatttctgtcagcagtatggtacctcaccgtggacgttcggccaagggaccaaagtggatatcaaa

SEQ ID NO: 4754 - DNA, 327 bp, synthetic construct
  source 1..327: mol_type = other DNA
gaaattgtgatgacgcagtctccttccaccctgtctgcatctgtaggagacagagtcaccatcacttgccgggccagtcagactattagtagctggttggcctggtatcagcagaaaccagggaaagcccctaagctcctgatctatatgacatctcgtttagaaagtggggtcccatcaaggttcagcggcagtggatttgggacagaattcactctcaccatcagcagcctgcagcctgatgattttgcaacgtattactgccaacactataatagttattttgagatgtacacttttggccaggggaccaaggtggaaatcaaa

SEQ ID NO: 4755 - DNA, 324 bp, synthetic construct
  source 1..324: mol_type = other DNA
gaaacgacactcacgcagtctccaggcaccctgtatttgtctccaggggaaagagccaccctctcctgcagggccagtctgagtgttagcgccggctacttagcctggtaccggcagaaacctggccaggctcccaggctcctcatctatggtgcatccagcagggccactggcatcccagacaggttcagtggcagtgggtctgggacagacttcactctcaccatcagcagactggagcctgaagattttgcagtgtattattgtcagcagtatggaacctcaccgatcaccttcggccaagggacacgactggagattaaa

SEQ ID NO: 4756 - DNA, 336 bp, synthetic construct
  source 1..336: mol_type = other DNA
gaaatgacactcacgcagtctccactctcctcacatgtcacccttggacagccggcctccatctcctgcaggtctagtgaaagcctcgtacacagtgatggaaacacctacttgaattggcttcagcagaggccaggccagcctccaagactcctaatctataagatttctaagcggttctctggggtcccagacagattcattggcagtggggcagggaccgatttcacactgaaaatcagcagggtggaagctgaggatgtcggggtttattactgcacgcaagctacagagtttcctcaaacttttggccaggggaccaaggtggagatcaaa

SEQ ID NO: 4757 - DNA, 321 bp, synthetic construct
  source 1..321: mol_type = other DNA
gaaatcccgatgacccagtctccatcctccctgtctgcatctgtaggagacagagtcaccatcacttgccgggcaagtcagagtattagtagttatttaaattggtatcaacaaaaaggagggaaggcccctaaactcctgatttatgctgcatccagtttggaaagtggggtcccagcaaggttcagtggcagtggatctggcacagatttcactctcaccatcagaagtctgcaacctgaagattttgcaacttactactgtcaacagagttacactacgcctcggacgttcggccaagggaccaaggtggagatcaaa

SEQ ID NO: 4758 - DNA, 318 bp, synthetic construct
  source 1..318: mol_type = other DNA
gacatccaaatgacacagtctccatcctccctgtctgcatctgtaggagacagagtcaccgtcacttgccgggcaagtcagagtataagcacctttttaaattggtatcaacaaaaaccagggaaagcccctaagctcctgatctatgctgcatccagtttgcaaagtggggtcccatcaaggttcagtggcagtggatctgggacagatttcactctcaccatcagcggtctgcaacctgaagattttgcaatttattactgtcagcagagttacagtaccccttccttcggccaagggacacgactggagattaaa

SEQ ID NO: 4759 - DNA, 321 bp, synthetic construct
  source 1..321: mol_type = other DNA
gatatcgggatgacgcagtctccttccaccctggctgcatctgtaggagacagagtcaccattacttgccgggccagtcagagtattagtacctggttggcctggtatcagcagaaagcagggaaagccccgaacctcctgatctataaggcgtctactttagaaagtggggtcccatcaaggttcagcggcagtggatctgggacagaattcactctcaccatcagcagcctgcagcctgatgattttgcgacttattactgccaacagtataataattaccctatcaccttcggccaggggacacgactggagattaaa

SEQ ID NO: 4760 - DNA, 327 bp, synthetic construct
  source 1..327: mol_type = other DNA
gaaacgacactgacgcagtctccaggcaccctgtctttgtctccaggggaaagagccaccctctcctgcagggccagtcagagtgttagcaccacctacttagcctggtaccaacagaaacctggccaggctcccaggctcctcatctatggtgcatccaatagggccactggcatcccagacaggttcagtggcggtgggtctgggacagacttcactctcaccatcagcagactggagcctgaagattttgcagtgtattactgtcagcagtatcgtagcccacctcggctcactttcggcggagggaccaaggtggaaatcaaa

SEQ ID NO: 4761 - DNA, 318 bp, synthetic construct
  source 1..318: mol_type = other DNA
gaaacgacactcacgcagtctccagccaccctgtctttgtctccaggggaaagagccaccctctcctgcagggccagtcagagtgttagcgactacttagcctggtaccaacagaaacctggccaggctcccaggctcttcatttctgatgcatccaacagggccgctggcatcccagccaggttcagtggcagtgggtctgggacagacttcactctcaccatcagcagtctagagcctgaagatttcgcagtttattactgtcagcaacgtcacaaccgcctcactttcggcggagggaccaaggtggagatcaaa

SEQ ID NO: 4762 - DNA, 324 bp, synthetic construct
  source 1..324: mol_type = other DNA
gaaatcccgatgacccagtctccatcctccctgtctgcatctgtaggagacagagtcaccatcacttgccgggcaagtcagagcattagcaggttttttaattggtatcagcagaaaccagggaaagcccctaaactcctgatctataatgcatccagtttgcaaagtggggtcccatcaaggttcagcggcagtggatctgggacagatttcacgctcaccatcagcagtctgcaacctgaagattttgcaacttactactgtcaacagagttacaatacccctccgtggacgttcggccaagggaccaaggtggatatcaaa

SEQ ID NO: 4763 - DNA, 333 bp, synthetic construct
  source 1..333: mol_type = other DNA
cagtctgtcctgacgcagccgccctcagtgtctgcggccccagggcagagggtcaccatctcctgcactgggagcaactccaacatcggggcaggttatgatgtacactggtaccagcaacttccaggaacagcccccaaactcctcatctatgataacatcaatcggccctcaggggtccctgaccgattctctggctccaagtctgacacctcagcctccctggccatcactgggctccaggctgaggatgaggctgattattactgccagtcctatgacagcagcctgagtgattctgtcttcggagctgggaccaagctcaccgtccta

SEQ ID NO: 4764 - DNA, 321 bp, synthetic construct
  source 1..321: mol_type = other DNA
gacatccagatgacccagtctccatcctccctgtctgcatctgtcggagacagagtcaccatcacttgccgggcaagccagaccgttagcaagtatttaaattggtatcagcagaaaccagggaaagcccctaagctcctaatctatgctgcatccagtttgcaaagtggggtcccatcaaggttcagtggcagtggatctgggacagatttcactctcaccatcagcagtctgctacctgaagattttgcaacttactactgtcaacagagttacagtacccctcggacttttggccaggggaccaaggtggaaatcaaa

SEQ ID NO: 4765 - DNA, 330 bp, synthetic construct
  source 1..330: mol_type = other DNA
cagtctgtgctgactcagcctccctccgcgtccgggtctcctggacagtcagtcaccatctcctgcactggaagcagcagtgacgttggtggttacaactatgtctcctggtaccaacaacacccaggcaaagcccccaaactcatcatttttgaggtcactaagcggccctcaggggtccctgatcgtttctctggctccaagtctggcaacacggcctccctgaccgtctctgggctccaggctgaggatgaggctaattattactgcagctcatatgcaggcagcaacattgtggtattcggcggagggaccaagctcaccgtccta

SEQ ID NO: 4766 - DNA, 309 bp, synthetic construct
  source 1..309: mol_type = other DNA
gaaatcccaatgacccagtctccatcctccctgtctgcatctgtaggagacagagtcaccatcacttgccaggcgagtcagcacataaacaactatttaaattggtatcagcagaaaccagggaaagcccctaagctcctgatctccgatgcatccaatttggaaacaggggtcccatcaagattcagtggaagtagatctgggacagattttagtttcaccatcagcagcctgcagcctgaagatattgcaacatattactgtcaacactcaaggactttcggccctgggaccaaggtggaaatcaaa

SEQ ID NO: 4767 - DNA, 333 bp, synthetic construct
  source 1..333: mol_type = other DNA
cagtctgtgctgactcagccaccctcagcgtctgggacccccgggcagagggtcaccatctcttgctctggaagcaactccaacatcggaagtaatactgtaagctggtaccagaagctcccaggaacggcccccaaactcctcatctctactaataatcagcggccctcaggggtccctgaccgattctctggctccaagtctggcacctcagcctccctggccatcagtgggctccagtctgaggatgaggctgattattactgtgcagcatgggatgacagcctgagtggtcatgtggtattcggcggagggaccaaggtcaccgtccta

SEQ ID NO: 4768 - DNA, 321 bp, synthetic construct
  source 1..321: mol_type = other DNA
gacatccggatgacccagtctccatcctccctgtctgcatctgtaggagacagagtcaccatcacttgccaggcgagtcaggacattaccacctatttaaattggtatcagcagaaaccagggaaagcccctaagctcctgatctacgatgcatccagtttggaatcaggggtcccatcaaggttcagtggaagtggatctgggacagattttactttcaccatcagcagactgcagcctgaagatattgcaacatattactgtcaacaatatgataatctcccgtacacttttggccaggggaccaaggtggatatcaaa

SEQ ID NO: 4769 - DNA, 330 bp, synthetic construct
  source 1..330: mol_type = other DNA
tcgtatgagctgactcagccaccctcagcgtctgggacccccgggcagagggtcaccatctcttgttctggaagcagctccaacatcggaagtaatactgtgaactggtaccagcagctcccaggaacggcccccaaactcttcatttataataagaatcggcggccctcaggggtccctgaccgattctctgcctccaagtctggcacctctgcctccctggccatcagtgggctccagtctgaggatgaggctgattattactgtgcagcctgggatgacagcctgaatggtgtggtgttcggcggagggaccaagctcaccgtccta

SEQ ID NO: 4770 - DNA, 333 bp, synthetic construct
  source 1..333: mol_type = other DNA
cagtctgtgttgacgcagccgccctcagtgtctggggcccctgggcagagggtcaccatctcctgcactgggagcaactccaacatcggggcaggctatgatgtacactggtaccagcaacttccagggacagcccccaaactcctcatctctgttaacagcaatcggccctcaggggtccctgaccgattctctggctccaggtctggcacctcagccttcctggccatcactgggctccaggctgaggatgaggctgattattactgccagtcctatgacagcagtctcagtggttcgctattcggcggaggcaccaagctgaccgtccta

SEQ ID NO: 4771 - DNA, 324 bp, synthetic construct
  source 1..324: mol_type = other DNA
gaaatcccgatgacccagtctccatcctccctgtctgcatcagtaggagacagagtcaccatcacttgccgggcaagtcagagcattagcagctatttaaattggtatcagcagaaaccagggaaagcccctaagctcctgatctatgctgcatccaaattgcacggtggggtcccatcaaggttcagaggcagtggatctgggacagatttcactctcaccatcagcagtctgcaacctgaagattttgcaacttactactgtcaacagagttacagctcccctccgtggacgttcggcccagggaccaaggtggatatcaaa

SEQ ID NO: 4772 - DNA, 333 bp, synthetic construct
  source 1..333: mol_type = other DNA
cagtctgtgttgacgcagccgccctcagtgtctggggccccagggcagagggtcaccatctcctgcactgggagcaactccaacatcggggcaggttatgatgtgcactggtaccagcagcttccaggaagagcccccaaactcctcatctatgttaacaacaatcggccctcaggggtccctgaccgattctctggctccaagtctgacacctccgcctccctggccatcactgggctccaggctgaggatgaggctgactattactgccagtcctatgacagcagcctgagtgcctcggttttcggcggagggaccaaggtcaccgtccta

SEQ ID NO: 4773 - DNA, 324 bp, synthetic construct
  source 1..324: mol_type = other DNA
gaaatgacactgacccagtctccatcctccctgtctgcatctgtaggagacagagtcacaatcacttgccgggcaagtcagagcattagcagctatttacattggtatcagcagaaaccagggaaagcccctaagctcctgatctatgctgcatccactttgcacactggggtcccatcaaggttcagtggcggtggatctgggacagatttcactctcaccatcagcagtctgcaacctgaagattttgcaacttactactgtcaacagagttacagtaaccctcaggtcaccttcggccaagggacacgactggagattaaa

SEQ ID NO: 4774 - DNA, 321 bp, synthetic construct
  source 1..321: mol_type = other DNA
gacattgtgatgacccagtctccatcctccctgtctgcgtctgtaggagacagagtcaccatcacttgccgggcaagtcagagcgttagcaactatttaaattggtatcagcagaaaccagggaaagcccctaacctcctgatctatgctgcatccagtttgcaaagtggggtcccatcaaggttcagtggcagtggatctgggacagacttcactctcaccatcaccagtctgcaacctgaagattttgcaacttaccactgtcagcagagttacactaccccgtacacttttggccaggggaccaaggtggaaatcaaa

SEQ ID NO: 4775 - DNA, 318 bp, synthetic construct
  source 1..318: mol_type = other DNA
gatattgtgatgacccagtctccttccaccctgtctgcatctgtaggagacagagtcaccatcacttgccgggccagtcagagtattagtaactggttggcctggtatcagcagaaaccagggaaagtccctaaactcctgatctctagggcgtctagtttagaaagtggggtcccatcaaggttcagcggcagtagatctgggacagaattcactctcaccatcagcagcctgcagcctgatgattttgcaacttattactgccaacagagtaatagtccgtggacgttcggccaagggaccaaggtggagatcaaa

SEQ ID NO: 4776 - DNA, 321 bp, synthetic construct
  source 1..321: mol_type = other DNA
gaaatccggttgacccagtctccatcctccctgtctgcatctgtaagagacagagtcaccatcacttgccgggcaagtcagagcattagcagccatttaagttggtatcagcagagaccagggaaagcccctaagctcctgatctatgctgcatccagtttgcaaactggggtcccatcaaggttcagtggcagtggatctgggacagatttcactctcaccatcagcagtctgcaacctgaagattttgcaacttactactgtcaacagagtttcagtacccctcccacttttggccaggggaccaaggtggatatcaaa

SEQ ID NO: 4777 - DNA, 321 bp, synthetic construct
  source 1..321: mol_type = other DNA
gacatccggatgacccagtctccttccaccctgtctgcatctgtaggagacagagtcaccatcacttgccgggccagtcagagtattagtacctggttggcctggtatcagcagaaaccagggaaagcccctaatgtcctgatctataaggcgtctactttaaaaagtggggtcccatcaaggttcagcggcagtggatctgggacagaattcactctcaccatcagcagcctgcagcctgatgattttgcaacttattactgccaacagtataatacttattctgaagcgttcggccaagggaccaaggtggagatcaaa

SEQ ID NO: 4778 - DNA, 321 bp, synthetic construct
  source 1..321: mol_type = other DNA
gagattgtgatgacccagtctccatcctccctgtctgcatctgtaggagacagagtcaccatcacttgccaggcgagtcaggacattagaaactatttaaattggtatcagcagaaaccagggaaagcccctaaggtgctgatctacgatgcatccaatttggaagcaggggtcccatcaagattcagtggaagtggatctgggacagatttttctttcaccatcagcagcctgcagcctgaagatattgcaacatattactgtcaacagtatgataatcttccgctcactttcggcggagggaccaaggtggagatcaaa

SEQ ID NO: 4779 - DNA, 318 bp, synthetic construct
  source 1..318: mol_type = other DNA
gaaatcacaatgacccagtctccatcctccctgtctgcatctgtaggagacagagtcaccatcacttgccaggcgagtcaggacattaggaactatttaaattggtatcagcagaaaccagggaaagcccctaaggtcctgatctacgctgcatccgatttggaaacaggggtcccgtcaaggttcagtggaagtggatctgggacagattttactctcaccatcagcagcctgcagcctgaagatattgcaacatattactgtcaacagtatgataatctttacacttttggccaggggaccaaggtggaaatcaaa

SEQ ID NO: 4780 - DNA, 321 bp, synthetic construct
  source 1..321: mol_type = other DNA
gacatcccgatgacccagtctccatcctccctgtctgcatctgtaggagacagagtcaccatcacttgccgggcaagtcagagcattaacagctatttaaattggtatcagcagaaaccagggaaagcccctaagttcctgatctatgctgcctccactcttcaaagtggggtcccatcacgcttcagtggcagtggatctgagacacatttcactctcaccatcagcagtctgcaacctgaagattttgcaacttactactgtcaacagacttacattccccctcgaacgttcggccaagggaccaaggtggaaatcaaa

SEQ ID NO: 4781 - DNA, 345 bp, synthetic construct
  source 1..345: mol_type = other DNA
gacatcccgatgacccagtctccagactccctggctgtgtctctgggcgagagggccaccatcaactgcaagaccagccagagtgttttagacaggtccgacaataggaactacttagcttggtaccagcagaaaccaggacagcctcctaagctgctcatttactgggcatctacgcgggaatccggggtccctgaccgattcagtggcagcgggtctgggacagatttcactctcaccatcagcagcctgcaggctgaagatgtggcagtttattactgtcaacaatgttctgttactcctccgatgtgcagttttggccaggggaccaaggtggaaatcaaa

SEQ ID NO: 4782 - DNA, 321 bp, synthetic construct
  source 1..321: mol_type = other DNA
gacatccagatgacccagtctccatcctccctgtctgcatctgtaggagacagagtcaccatcacttgccgggcaagtcagaacattaacacctatttaaattggtatcagcagaaaccagggaaagcccctaaggtcctgatctatgctgcatccagtttgcaaagtggggtcccgtcaaggttcactggcagtggatctgggacagatttcactctcaccatcagcagtctgcaacctgaagattttgcaacttactactgtcaacagagttacagttcccctcggacgttcggccaagggaccaaggtggaaatcaaa

SEQ ID NO: 4783 - DNA, 321 bp, synthetic construct
  source 1..321: mol_type = other DNA
gacatcacactgacgcagtctccatcctccctgtctgcatctgtaggagacagagtcaccttcacttgccaggcgagtcaggacattaacaactttttaaattggtatcaacaaaaaccagggaaagcccctaaactcctgatcttcgatgtatcgaatttggaaacaggggtcccatcaagattcagtggcagtggatctgggacagattttactttcaccatcagcagcctgcagcctgaagatattgcaacatattactgtcaacactatgataatctcaaattcactttcggccctgggaccaaggtggaaatcaaa

SEQ ID NO: 4784 - DNA, 321 bp, synthetic construct
  source 1..321: mol_type = other DNA
gaaattgtgatgacccagtctccatcctccctgtctgcatctgtaggagacagagtcaccatcacttgccgggcaagtcagagcatttacaactacttaaattggtatcagcagaaaccagggaaagcccctaagctcctgatctatggtgcatccagtttgcaaagtggggtcccatcaaggatcagtggcagtggatctgggacagatttcactctcaccatcagcagtctgcaacctgaagattttgcaacttactactgtcaacagagttacagtaccccgggcactttcggcggagggaccaaggtggatatcaaa

SEQ ID NO: 4785 - DNA, 324 bp, synthetic construct
  source 1..324: mol_type = other DNA
gaaattgtgttgacccagtctccaggcaccctgtctttgtctccaggggaaagagccaccctctcctgcagggccagtcagagtgttagcagcaactacttagcctggtaccagcagaaacctggccaggctcccaggctcctcatctctgatgcatccagcagggccgctggcatcccagacaggttcagtggcagtgggtctgggacagacttcactctcaccatcggcagactggagcctgaagattttgcagtgtattactgtcagcagtatggtagctcacctggcagttttggccaggggaccaaggtggaaatcaaa

SEQ ID NO: 4786 - DNA, 339 bp, synthetic construct
  source 1..339: mol_type = other DNA
gacatgacactcacgcagtctccagactccctggctgtgtctctgggcgagagggccaccatcaactgcaagtccagccagagtgttttatccagctccaacaataagaactacttaacttggtaccagcaaaaaccgggacggcctcctaagctgctcatttactgggcttccacccgggaatccggggtccctgaccgattcagtggcggcgggtctgggacagatttcactctctccatcagcagtctgcaggctgaggatgtggcagtttattactgtcagcaatcttatagtcctccgtacacttttggccaggggaccaaggtggaaatcaaa

SEQ ID NO: 4787 - DNA, 321 bp, synthetic construct
  source 1..321: mol_type = other DNA
gaaattgtgatgacccagtctccatcctccctgtctgcatctgtaggagacagagtcaccatcacttgccaggcgagtcaggacattttcaactatttaacttggtatcaacagaagccagggaaagcccctaagctcctgatctacgatgcatccaatttggaaacaggggtcccatcaaggttcagtggaagtggatctgggacagattttactttaaccatcagcagcctgcagcctgaagatattgcaacatattcctgtcaacagtattataatctccctccgactttcggcggagggaccaaggtggagatcaaa

SEQ ID NO: 4788 - DNA, 324 bp, synthetic construct
  source 1..324: mol_type = other DNA
cagcatgtgctgactcagccaccctcggtgtcagtggccccaggacagacggccagcatcacctgtggggtaaacaactttggaagtaaaagtgtaccctggtaccagcagaagccaggccaggcccctgtcctggtcgtctatgatgatagcgaccggccctcagggatccctgagcgattctctggctccaactctgggaacacggccaccctgaccatcagcagggtcgaagtcggggatgaggccgactattactgtcaggtgtgggatagtactagtgatcattgggtgttcggcggagggaccaagctcaccgtccta

SEQ ID NO: 4789 - DNA, 333 bp, synthetic construct
  source 1..333: mol_type = other DNA
cagtctgtcttgacgcagccgccctcagtgtctggggccccagggcagagggtcaccatctcctgcactgggagcaactccaacatcggggcaggttatgatgtacactggtaccagcagcttccaggaacagcccccacactcctcatctctattaacagcaatcggccctcaggggtccctgaccgattctctggctccaagtctggcacctcagcctccctggccatcactgggctccaggctgaggatgaggctgattattactgccagtcctatgacagcagcctgagtggttcggtattcggcggagggaccaaggtcaccgtccta

SEQ ID NO: 4790 - DNA, 321 bp, synthetic construct
  source 1..321: mol_type = other DNA
gacatcccactcacccagtctccatcttccgtgtctgcatctgtgggagacagagtcaccatcacttgtcgggcgagtcaggatattagcggctggttagcctggtatcagcagaaaccagggaaagcccctaggctcctgatctatgctgcaaccactttgcaaagtggggtcccatcaaggttcagcggcagtggctctgggacagatttcactctcaccatcagcagcctgcagcctgaagattttgcaacttactattgtcaacaggctaacactttcccccggacgttcggccaagggaccaaggtggatatcaaa

SEQ ID NO: 4791 - DNA, 321 bp, synthetic construct
  source 1..321: mol_type = other DNA
gacatcccggtgacccagtctccatcctccctgtctgcatctgtaggagacagagtcaccatcacttgccgggcaagtcagagcattagcagctttttaaattggtatcaacacaaaccagggaaagcccctaagctcctgatctatgctgtatccagtttgcaaagtggggtcccatcaaggttcagtggcagtgaatatgggacagatttcactctcaccatcagcagtttgcaacctgaagattttgcaacttactactgtcaacaaaattacaattcccccctcactttcggcggagggaccaaggtggagatcaaa

SEQ ID NO: 4792 - DNA, 333 bp, synthetic construct
  source 1..333: mol_type = other DNA
cagtctgtgttgacgcagccgccctcagtgtctggggccccagggcagagggtcaccatctcctgcactgggagcaactccaacatcggggcaggttatgatgtacactggtaccagcaacttccaggaacagcccccaaactcctcatctatgataacaccaatcggccctcaggggtccctgaccgattctctggctccaagtctggcacctcagcctccctgaccatcactgggctccaggctgaggatgaggctgattactactgccagtcctatgacagcagcctgattggttcgctgttcggcggaggcacccagctgaccgtcctc

SEQ ID NO: 4793 - DNA, 324 bp, synthetic construct
  source 1..324: mol_type = other DNA
gacatccagatgacccagtctccatcctccctgtctgcgtctgttggcgacagagtcaccatcacttgccgggcaagtcagagcattagcagatatttaaattggtatcagcagaaaccagggaaagcccctaagctcctgatctatgctgcatttattttgcaaagtggggtcccatcaaggttcagtggcagtggatctggaacagatttcactctcaccatcagcagtctgcaacctgaagattttgcaacttattactgtcaacagagttacagtgcccctccgtggacgttcggccgagggaccaaggtggatatcaaa

SEQ ID NO: 4794 - DNA, 318 bp, synthetic construct
  source 1..318: mol_type = other DNA
gacatccgggtgacccagtctccatcctccctgtctgcatctgtaggagacagagtcaccatcacttgccgggcgagtcaggccattagcaattctttagcctggtatcagcagaaaccaggtaaagccccgaaactccttctctatgctgcatccacattggaaagtggggtcccacccaggttcagtggcagtgggtctgggacggatttcactctcaccatcagcagcctgcagcctgaagattttgcaacttattactgtcaacagtactatactttccggacgttcggccaagggaccaaagtggatatcaaa

SEQ ID NO: 4795 - DNA, 330 bp, synthetic construct
  source 1..330: mol_type = other DNA
gaaattgtgatgacccagtctccagccaccctgtctttgtctccaggggaaagagccaccctctcctgcagggccagtcagagtgttaccaactacttagcctggtaccaacagaaacctggccaggctcccaggctcctcatctatgatacatccaacagggccattggcatcccagccaggttcagtggcagtgggtctgggacagacttcactctcaccatcagcagcctagagcctgaagattttgcagtttattactgtcaactacgtaacaactggcctccgggagcgctcactttcggcggagggaccaaggtggaaatcaaa

SEQ ID NO: 4796 - DNA, 318 bp, synthetic construct
  source 1..318: mol_type = other DNA
gacatcacaatgacgcagactccagccaccctgtctgtgtctccaggggaaagagccaccctctcctgcagggccagtcagagtgttagcggcaacttagcctggtaccagcagaaacctggccaggctcccaggctcctcatctatggtgcaaccaccagggcctctggtatcccagccaggttcagtggcagtgagtctgggacagagttcactctcaccatcagcagcctacagtctgaagattttgcagtttattactgtcaacaatataataactggctcactttcggcggagggaccaaggtggaaatcaaa

SEQ ID NO: 4797 - DNA, 324 bp, synthetic construct
  source 1..324: mol_type = other DNA
gaaacggcactgacgcagtctccaggcaccctgtctttgtctccgggggaaagagccaccctctcctgcagggccagtgagagtgttagcagcggctacttagcctggtaccagcagaaacctggccaggctcccaggctcctcatctttggtgccgccagcagggccactggcatcccagacaggttcagtggcagtgggtctgggacagacttcactctcaccatcagcagactggagcctgaagattttgcagtatattactgtcagcagtatcataactcacctcggacgttcggccaagggaccaaggtggaaatcaaa

SEQ ID NO: 4798 - DNA, 321 bp, synthetic construct
  source 1..321: mol_type = other DNA
gaaatcggaatgacccagtctccatcctccctgtctgcatctgtaggagacagagtcaccatcacttgccgggcaagtcagagcattagcagctatttaaattggtatcagcagaaaccagggaaagcccctaaacttttaatctatactgcatccagtttgcaaagtggggtcccatcaaggttcagtggcagtggatgtgggacagatttcactctcaccatcagcagtgtgcaacgtgaagattttgctacttactactgtcaacagagttacagtacccctctaacgttcggccaagggaccaaggtggaaatcaaa

SEQ ID NO: 4799 - DNA, 324 bp, synthetic construct
  source 1..324: mol_type = other DNA
gaaatgacactcacgcagtctccatcctccctgtctgcatctgttggagacagagtcaccatcacttgccgggcaagtcagaccattaacagatatttaaattggtatcagcagaaaccagggaaagcccctaagctcctgatctatgctgcatccactttgcaaagtggggtcccatcaaggttcagtggcagtggatctgggacagatttcactctcaccatcagcagtctccaacctgaagattttgcaacttactactgtcaacagagttatgttctccccatgtacacttttggccaggggaccaaggtggagatcaaa

SEQ ID NO: 4800 - DNA, 321 bp, synthetic construct
  source 1..321: mol_type = other DNA
gacatcgtgttgacccagtctccatcctccctgcctgcatctgtaggagacagagtcaccatcacttgccgggcaagtcagagcattagcagttatttaaattggtatcagcaaaaaccagggaaagcccctaagctcctgatttatggtgcatccagtttgcatactggggtcccatcaaggttcagtggcagtggatctgggacagatttcactctcaccatcagcagtctgcaacctgaagattttgcaacttactactgtcaacagagttacagtacccctcggacttttggccaggggaccaaggtggatatcaaa

SEQ ID NO: 4801 - DNA, 324 bp, synthetic construct
  source 1..324: mol_type = other DNA
gaaattgtgttgacgcagtctccatcctccctgtctgcatctgtaggagacagagtcaccatcacttgccgggcaagtcagagcattgggacctatttaaattggtatcagcagaaaccggggaaagcccctaagctcctgatctatactgcatccagtttgcaaagtggggtcccatcaaggttcagtggcagtggatctgggacagatttcactctcaccatcagcagtctgcaacctgaagattttgcaacttactactgtcaacagagttacaatacccctccgtggacgttcggccaagggaccaaggtggagatcaaa

SEQ ID NO: 4802 - DNA, 324 bp, synthetic construct
  source 1..324: mol_type = other DNA
gacatccagatgacccagtctccatcctccctgtctgcatctgtaggagacagagtcaccattacttgccgggcaagtcagaccattagcacctatttaaattggtatcagcagaaaccagggaaagcccctaagctcctgatctatgctggatccactttgcaaagtggggtcccatcaaggttcagtggcagtggatctgggacagatttcactctcaccatcagcagtctgcaacctgaggattttgcaacttactactgtcaacagagtgacactacccctcagatcactttcggcggagggaccaaggtggaaatcaaa

SEQ ID NO: 4803 - DNA, 324 bp, synthetic construct
  source 1..324: mol_type = other DNA
gacatcacattgacgcagtctccttccaccctgtctgcatctgtaggagccagagtcaccatcacttgccgggccagtcagagtattaatacctggttggcctggtatcagcagaaaccagggaacgcccctaaactcctgatctatgatgcctcctctttggaaagtggggtcccttcaagattcagcggcagtggatctgggacagaattcactctcaccatcagcagcctgcagcctgatgattttgcaacttattactgccaacagtatcatagtttttctccgctcactttcggcggagggaccaaggtggaaatcaaa

SEQ ID NO: 4804 - DNA, 336 bp, synthetic construct
  source 1..336: mol_type = other DNA
gaaattgtgatgacgcagtctccactctccctgcccgtcacccctggagagccggcctccatctcctgcaggtatactcagagcctcctgcttagtaatggatacaactacttggattggtacctgcagaagccagggcagtctccacaactcctgatctatttgggttctcatcgggcctccggggtccctgacaggttcagtggcagtggatcaggcacagattttacactgaaaatcagcagagtggaggctgaggatgttggggtttattactgcatgcaagctctacaaactcctcagacgttcggccaagggaccaaagtggatatcaaa

SEQ ID NO: 4805 - DNA, 324 bp, synthetic construct
  source 1..324: mol_type = other DNA
gacatccagatgacccagtctccatcttccctgtctgcatctgtaggagacagaatcaccatcacttgtcgggcaagtcagagcattagcacctatttaaattggtatcagcagaaaccagggaaagcccctaacctcctgatctatgctgcatccagtttgcaaagtggggtcccatcaaggttcagtggcagtggatctgggacagatttcactctcaccatcagcagcctgcaacccgaagattttgcaatttactactgtcaacagagttacaatattcctcaactcactttcggcggagggaccaaggtggaaatcaaa

SEQ ID NO: 4806 - DNA, 333 bp, synthetic construct
  source 1..333: mol_type = other DNA
cagcctgtgctgactcagccgccctcagtgtctggggccccagggcagagggtcaccatctcctgcactgggagcaactccaacatcggggcaggttatgatgtacactggtaccagcaacttccaggaacagcccccaaactcctcatctttgttaacagcaatcggccctcaggggtccctgaccgattctctggctccaagtctgacacctcagcctccctggccatcactgggctccaggctgaggatgaggctgattattactgccagtcttatgacagcagcctgagtggtgtggtcttcggcggagggaccaaggtcaccgtccta

SEQ ID NO: 4807 - DNA, 333 bp, synthetic construct
  source 1..333: mol_type = other DNA
cagtctgtggtgacgcagccgccctcagtgtctggagccccagggcagagggtcaccatctcctgcactgggagcaactccaacatcggggcaggttatgatgtacactggtaccagcagcttccaggaacagcccccaaactcctcatctatgataacaacaatcgcccctcaggggtccctgaccgattctctggctccaagtctgacacctcagcctccctggccatcactgggctccaggctgaggatgaggctgattattactgccagtcctatgatagcagcctgattggttctgtcttcggaactgggaccaagctcaccgtccta

SEQ ID NO: 4808 - DNA, 333 bp, synthetic construct
  source 1..333: mol_type = other DNA
cagtctgtggtgacgcagccgccctcagtgtctggggccccagggcagagagtcaccatctcctgcactgggagcaactccaacatcggggcaggctatgatgtacactggtaccagcagcttccaggaacagcccccaaactcctcatctctgttaacaacaatcggccctcaggggtccctgaccgattctctggctccaagtctggcacctcagcctccctggccatcactgggctccaggctgaggatgaggctgattattactgccagtcctatgacagcagtctgagtggttcggtattcggcggagggaccaagctcaccgtccta

SEQ ID NO: 4809 - DNA, 333 bp, synthetic construct
  source 1..333: mol_type = other DNA
cagtctgttctgactcagccgccctcagtgtctggggccccagggcagagggtcaccatctcctgcactgggagcaactccaacatcggggcaggttatgatgtacactggtaccagcagcttccaggaacagcccccaaactcctcatctatattaacaccaatcggccctcaggggtccctgaccgattctctggctccaagtctggcacctcagcctccctggccatcactgggctccaggctgaggatgaggctgattattactgccagtcgtatgacagcagtctgagtggttcggtgttcggcggagggaccaagctcaccgtccta

SEQ ID NO: 4810 - DNA, 318 bp, synthetic construct
  source 1..318: mol_type = other DNA
gacatgacgatgacgcagtctccatccttcctgtctgcatctgtaggagacagagtcaccatcacttgccgggccagtcagggcattagcagttatgtagcctggtatcagcaaaaaccagggaaagcccctaagctcctgatgtatgctgcatccagtttgcagggtggggtcccatcaaggttcagcggcagtggatctgggacagaattcactctcacaatcagcagcctgcagcctgaagattttgcaacttattactgtcaacagcttagtggttacttcactttcggcggagggaccaaggtggaaatcaaa

SEQ ID NO: 4811 - DNA, 324 bp, synthetic construct
  source 1..324: mol_type = other DNA
tcgtatgtgctgactcagccaccctcggtgtcggtggccccaggacagacggccaggattacctgtggggaagacggcattggaagtaaaagtgtacactggtaccagcagaagccaggccaggcccctgtgctggtcgtctatgatgatagcgaccggccctcagggatccctgagcgattctctggctccaactctgggaacacggccaccctgaccatcagcagggtcgaagccggggatgaggccgactattactgtcaggtgtggggttttagtggtgatcactgggtgttcggcggagggaccaagctcaccgtccta

SEQ ID NO: 4812 - DNA, 333 bp, synthetic construct
  source 1..333: mol_type = other DNA
tcgtctgagctgagtcagcagccctcagtgtctggggccccagggcagagggtcatcatctcctgcactgggagcaactccaacatcggggcaggttatgatgtacactggtaccagcagcttccaggaacagcccccaaactcctcatctatggtaacaccaatcggccctcaggggtccctgaccggttctctggctccaagtctgacacctcagcctccctggccatcactgggctccaggctgaggatgaggctgattattactgccagtcctatgacagcggcctgactggttcgcttttcggcggagggaccaagctcaccgtccta

SEQ ID NO: 4813 - DNA, 333 bp, synthetic construct
  source 1..333: mol_type = other DNA
cagtcagggctgactcagccgccctcagtgtctggagccccagggcagagggtcaccatctcctgcactgggagcaactccaacatcggggcaggttatgatgtacactggtaccaacaacttccaggaacagcccccaaactcctcatctctgttaacagcaatcggccctcaggggtccctgaccgattctctggctccaagtctggcacctcagcctccctggccatcactgggctccaggctgaggatgaggctgcttattactgccagtcctatgacagcagcctgagtgattcggtgttcggcggagggaccaaggtcaccgtccta

SEQ ID NO: 4814 - DNA, 318 bp, synthetic construct
  source 1..318: mol_type = other DNA
tcgcatgtgctgactcagccaccctcggtgtcggtgtctccaagacagacggccaggatcacctgctctggagatgcatttccaaaccaatatgcttattggtaccaacagaagccaggccaggcccctgtgttagtgatatataaagacaatgagaggccctcagggatccctgagcgattctctggctccagttcagggacaacagtcacgttgaccatcagtggagtccaggcagaagacgaggctgactattactgtcaaacagcagacagcagtcgtgtggtattcggcggagggaccaagctcaccgtccta

SEQ ID NO: 4815 - DNA, 330 bp, synthetic construct
  source 1..330: mol_type = other DNA
cagcctatgctgactcagccccactctgtgtcggagtctccggggaagacggttaccatctcctgcacccgcaacagtggcagcattgccagcaactatgtgcagtggtaccagcagcgcccgggcagtgcccccaccactgtgatctttgaagataaacaaagaccctctggtgtccctgatcggttctctggctccatcgacagctcctccaactctgcctccctcaccatctctggactgaagactgaggacgaagctgactactactgtcagtcttctcataacagtaagggggtgttcggcggagggaccaagctcaccgtccta

SEQ ID NO: 4816 - DNA, 324 bp, synthetic construct
  source 1..324: mol_type = other DNA
gaaattgagatgacgcagtctccatcctccctgtttgcatctgtaggagacagagtcaccatcacttgccgggcgagtcagggtattagcaattctttagcctggtatcagcagaaaccagggaaagcccctaagctcctgctctatgctgcatccacattggaaagtggggtcccttccaggttcagtggcagtggatctgggacggatttcactctcaccatcagcagcctgcagcctgaagatttttcaacttattactgtcaacagtattatagtaacctcgggaggacgttcggccaagggaccaaggtggatatcaaa

SEQ ID NO: 4817 - DNA, 327 bp, synthetic construct
  source 1..327: mol_type = other DNA
gaaatccagatgacccagtctccatcctccctgtctgcatctataggagacagagtcaccatcacttgccgggcaagtcagagcattagcagatatttaaattggtatcaacaaaaacctgggaaagcccctgagctcctgatctatgctgcatccagtttgcaaagtggggtcccatcaaggttcagtggcagtggatctgggacagatttcactctcaccatcagcagtctgcaccctgaagattttgcaacttactactgtcaacagagttacagtcaccctccggagggcagttttggccaggggaccaaggtggaaatcaaa

SEQ ID NO: 4818 - DNA, 321 bp, synthetic construct
  source 1..321: mol_type = other DNA
gacatgcggatgacccagtctccatcttccctgtctgcatctgtaggagacagagtcaccatcacttgccgggcgagtcagggcataagcaattatttagcctggtatcagcagaaaccagggaaagttcctaagctcctgatccatggtgcatccactttgcaatcgggggtctcatataggttcagtggcagtggatctgggacagatttcactctcaccatcagcagcctgcagcctgaagatgttgcaacttattactgtcaaaagtacaacactgccccgtgcacgttcggccaagggaccaaggtggagatcaaa

SEQ ID NO: 4819 - DNA, 324 bp, synthetic construct
  source 1..324: mol_type = other DNA
gaaatccggttgacccagtctccatcctccctgcctgcatctgtaggagacagagtcaccatcacttgccgggcgagtcaggacattagcaattctttagcctggtatcagcagaaaccagggaaagcccctaagctcctgctctatgctgcatccacattggaaagtggggtcccatccaggttcagtggcagtgcatctgggacggattacactctcaccatcagcagcctgcagcctgaagattttgcaacttattactgtcaacagtattatagtacccctccgttcacttttggccaggggaccaaggtggagatcaaa

SEQ ID NO: 4820 - DNA, 330 bp, synthetic construct
  source 1..330: mol_type = other DNA
cagcatgtgctgactcagccaccctcagcgtctgggacccccgggcagagggtcaccatctcttgttctggaagcagctccaacatcggaagtaattctgtaaactggtaccagcagctcccaggaacggcccccaaacccctcatctatattaataatcggcggccctcaggggtccctgaccgattctctggctccaagtctggcacctcagcctccctggccatcagtgggctccagtctgaggatgaggctgattattactgtgcatcatgggatgacagcctgaatggtttggttttcggcggagggaccaagctcaccgtccta

SEQ ID NO: 4821 - DNA, 321 bp, synthetic construct
  source 1..321: mol_type = other DNA
gacatccagatgacgcagtctccttccaccctgtctgcatctgtaggagacagagtcgccatcacttgccgggccagtcagagtattagtaggtggttggcctggtatcagcagaaaccagggaaagcccctaacctcctgatttataaggcgtctactttagaaagtggggtcccatcaaggttcagcggcagtggatctgggacagaattcactctcaccatcagcagcctgcagcctgatgattttgcaacttattactgccaacagtataatagtttttcgtggacgttcggccaagggaccaaggtggaaatcaaa

SEQ ID NO: 4822 - DNA, 333 bp, synthetic construct
  source 1..333: mol_type = other DNA
cagtctgtgctgacgcagccgccctcagtgtctggggccccagggcagagggtcaccatctcctgcactgggagcggctccaacatcggggcaggttatgatgtacactggtatcagcagcttccaggaacagcccccaaactcctcatctttcgtaactccaatcggccctcaggggtccctgaccgattctctggctccatgtctggcacctcagcctccctggccatcactgggctccaggctgaggatgaggctgattattactgccagtcgtatgacagcagcctgagtggatcgatcttcggaactgggaccaagctcaccgtccta

SEQ ID NO: 4823 - DNA, 327 bp, synthetic construct
  source 1..327: mol_type = other DNA
gaaacgacactcacgcagtctccagccaccctgtctgtgtctccaggggaaagagccactctctcctgcagggccagtcagactatttccaacaacttagcctggtaccagcagaaacctggccaggctcccaggctcctcatctatggtgcatctaccagggccactggtatcccagccaggttcagtggcagtgggtctgggacagagttcactctcaccatcagcagcctgcagtctgaagattctgcagtttattactgtcaacactatgataactggcctccggaatacacttttggccaggggaccaaggtggagatcaaa

SEQ ID NO: 4824 - DNA, 333 bp, synthetic construct
  source 1..333: mol_type = other DNA
cagtctgtggtgacgcagccgccctcagtgtctggggccccagggcagagggtcaccatctcctgcactgggagcaactccaacatcggggcaggttatgatgtacactggtaccagcaacttccaggaacagcccccaaactcctcatctatagaaacaccaatcggccctcaggggtccctgaccgattctctgggtccaagtctggcacctcagcctccctggccattactgggctccaggctgaggatgaggctgattattactgccagtcctatgacagcagcctgactggttcgctattcggcggagggaccaagctcaccgtccta

SEQ ID NO: 4825 - DNA, 333 bp, synthetic construct
  source 1..333: mol_type = other DNA
cagtcagtggtgacgcagccgccctcagtgtctggggccccagggcagagggtcaccatctcctgcactgggagcaactccaacatcggggcaggttatgatgtacactggtaccagcagcttccaggaacagcccccaaactcctcatctatagaaacaccaatcggccctcaggggtccctgaccgattctctgggtccaagtctggcacctcagcctccctggccatcactgggctccaggctgaggatgaggctgattattactgccagtcctatgacagcagcctgactggttcgctgttcggcggaggcacccagctgaccgtcctc

SEQ ID NO: 4826 - DNA, 333 bp, synthetic construct
  source 1..333: mol_type = other DNA
cagtctgtcctgactcagccgccctcagtatctggggccccagggcagagggtcaccatctcctgcactgggagcaactccaacatcggagcaggttatgatatacactggtaccagcagcttccaggaacagcccccaaactcctcatctatggtaacaccaatcggccctcaggggtccctgaccgattctctggctccaagtctgacacctcagcctccctggccatcactgggctccaggctgaggatgaggctgattattactgccagtcttatgacagcagcctgagtggtgtgctattcggcggagggaccaagctcaccgtccta

SEQ ID NO: 4827 - DNA, 324 bp, synthetic construct
  source 1..324: mol_type = other DNA
gaaatgacactcacgcagtctccagccaccctgtctgtgtctccaggggaaagagccaccctcttctgcagggccagtcagagtgttagcagcagcttagcctggtaccagcagaaacctggccaggctcccaggctcctcatccatggtgcatccaccagggccactggtatcccagccaggttcagtggcagtgggtctgggacagagttcactctcaccatcagcagcctgcagtctgaagatgttgcagtttattactgtcagcagtataataagtggcctccgatcaccttcggccaagggacacgactggagattaaa

SEQ ID NO: 4828 - DNA, 333 bp, synthetic construct
  source 1..333: mol_type = other DNA
cagtctgtcgtgacgcagccgccctcagtgtctggggccccagggcagagggtcaccatctcctgcgctgggagcggctccaacatcggggcaggttacgatgtgcactggtaccagcaacttccaggaacagcccccaaactcctcatctatggtaacaacaatcggccctcaggggtccctgaccgattctctggctccaagtctgccacctcagcctccctggccatcactggactccaggctgaggatgaggctgattattactgccagtcctatgacagcagcctgagtgatgtgatattcggcggagggaccaagctcaccgtccta

SEQ ID NO: 4829 - DNA, 321 bp, synthetic construct
  source 1..321: mol_type = other DNA
gaaatgacactcacgcagtctccaccctccctgtctgcatctgtaggagacagagtcagcatcacttgccgggcaagtcagagcattggcagctatttaaattggtatcagcagaaaccagggaaagcccctaagctcctgatctatgctacatccagtttgcaaagtggggtcccctcaaggttcagtggcagtggatctgggacggatttcactctcaccatcagcagtctgcaacctgaagattttgcaacttactactgtcaacagagttccagtaattttcccactttcggccctgggaccaaggtggatatcaaa

SEQ ID NO: 4830 - DNA, 333 bp, synthetic construct
  source 1..333: mol_type = other DNA
cagtctgtgttgacgcagccgccctcagtgtctggggccccagggcagagggtcaccatctcctgcactgggagcagctccaacatcggggcaggttctgatgtacactggtaccagcagcttccaggaacagcccccaaactcctcatctatactaacaccaatcggccctcaggggtccctgaccgattctctggctccaagtccggcacctcagcctccctggccatcacggggctccaggctgaggatgaggctgattattactgccagtcctatgacaccagcttgagtggggtggttttcggcggagggaccaagctcaccgtccta

SEQ ID NO: 4831 - DNA, 327 bp, synthetic construct
  source 1..327: mol_type = other DNA
cagcctgtgctgactcagcccccctcggtgtcagtgtccccaggacagacggccaggatcacctgctctggagaagcattgccaatgcaatatacttattggtaccagcagaagccaggccaggcccctgtattggtgatatataaagacactgagaggccctcagggatccctgagcgattctctggctccagctcagggacaacagtcacgttgaccatcagtggagtccaggcagaagacgaggctgactattactgtcaatcagcggacaccagtggtaattatcggggggttttcggcggagggaccaagctcaccgtccta

SEQ ID NO: 4832 - DNA, 324 bp, synthetic construct
  source 1..324: mol_type = other DNA
gaaacgacactcacgcagtctccaggcaccctgtctttgtctccaggggaaagagccaccctctcctgcagggccagtcagagtgttagcagcggctacttagcctggtaccagcagaaacctggccaggctcccagtctcctcatctatggtgcctccagcagggcctctggcatcccagacaggttcagtggcagtgggtctgggacagacttcactctcaccatcaccagactggagcctgaagattttgcagtatattactgtcagcagtatgctttctcacctctcactttcggcggagggaccaaggtggaaatcaaa

SEQ ID NO: 4833 - DNA, 330 bp, synthetic construct
  source 1..330: mol_type = other DNA
cagtttgtgctgactcagcccccctccgcgtccgggtctcctggacagtcagtcaccatctcctgcactggaaccagcagtgacattggtggttataactatgtctcctggtaccaacaacacccaggcaaagcccccaaactcatggcttatgaggtcaataagcggccctcaggggtccctgatcgcttctctggctccaagtctggcaacacggcctccctgaccgtctctgggctccaggctgaggatgaggctgattattattgcagctcatatgccggcagcaacactgtggttttcggcggagggaccaagctcaccgtccta

SEQ ID NO: 4834 - DNA, 321 bp, synthetic construct
  source 1..321: mol_type = other DNA
gaaatcggggtgacccagtctccttccaccctgtctgcatctgtaggagacagagtcaccatcacttgccgggccagtcagagtattagtacctggttggcctggtatcagcagaaaccagggaaagcccctaacctcctgatctataaggcgtctcttttggaaagtggggtcccatcaaggttcagcggcagtggatctgggacagaattcactctcaccatcagcagcctgcagcctgatgattttgcaacttattactgccaactgtataatagtgattcgtggacgttcggccaagggaccaaggtggaaatcaaa

SEQ ID NO: 4835 - DNA, 321 bp, synthetic construct
  source 1..321: mol_type = other DNA
gacatcgtgttgacccagtctccatcctccctgtctgcatctgtaggagacagagtcaccatcacttgccaggcgactcaggacattaacaactctttaaattggtatcagcagaaaccagggaaagcccctaggctcctgatctacgatgcatccaatttggaaacaggggtcccatcaaggttcagtggaagtggatctgggacagattttactttcaccatcagcagcctgcagcctgaggatattgcaacatattactgtcaacagtatgacattttcgggttcactttcggccctgggaccaaagtggatatcaaa

SEQ ID NO: 4836 - DNA, 321 bp, synthetic construct
  source 1..321: mol_type = other DNA
gaaatgacactcacgcagtctccagccaccctgtctgtgtctccaggggaaagagccaccctctcctgcagggccagtcagagtattagcaccaccttagcctggtaccagcagaaacctggccaggctcccagactcctcatgtatggtgcatccaccagggccacaggtattccagccaggttcagtggcagtgggtctgggacagagttcactctcaccatcagcagcctgcagtctgaagattttgcagtttattactgtcagcactataataactggactccgacgttcggccaagggaccaaggtggaaatcaaa

SEQ ID NO: 4837 - DNA, 324 bp, synthetic construct
  source 1..324: mol_type = other DNA
gacatccagatgacccagtctccatcctccctgtctgcatctgtaggagacagagtcaccatcacttgccgggcaagtcagagcattaggagctatttaaattggtatcagcagaaaccagggaaagcccctaagctcctgatctatgatgcatccagtttgcaaagtggggtcccatcaaggttctttggcagtggatctgggacagatttcactctcaccatcagcagtctgcaacctgaagattttgcaacttactactgtcaacagagttacaatacccccccgtggacgttcggccaagggaccaaggtggagatcaaa

SEQ ID NO: 4838 - DNA, 333 bp, synthetic construct
  source 1..333: mol_type = other DNA
cagtctgtgttgacgcagccgccctcagtgtctggggccccagggcagagggtcaccatctcctgcactgggagcaactccaacatcggggcaggttatgatgtacactggtaccagcagtttccaggaacagcccccaaactcctcatctttcgtaacagcaatcgaccctcaggggtccctgaccgattctctggctccaagtctggcacctcagcctccctggccatcactgggctccaggctgaggatgaggctgattattactgccagtcctatgacagcggcctgagtggttcggtattcggcggagggaccaagctgaccgtccta

SEQ ID NO: 4839 - DNA, 333 bp, synthetic construct
  source 1..333: mol_type = other DNA
cagtctgtgctgactcagccgccctcagtgtctggggccccagggcagagggtcaccatctcctgcactgggagcaactccaacatcggggcaggttatgatgtgcactggtaccagcagcttccaggaacagcccccaaactcctcatctatcgtaacaccaatcggccctcaggggtccctgaccgattctctggctccaagtctggcgcctcagcctccctggccatcactgggctccaggctgaggatgaggctgattattactgccagtcctatgacagcagcctgagtggttcggtgttcggcggagggaccaaggtcaccgtccta

SEQ ID NO: 4840 - DNA, 324 bp, synthetic construct
  source 1..324: mol_type = other DNA
gacatcgcgatgacccagtctccatcctccctgtctgcatctgtaggagacagagtcaccttcacttgccgggcaagtcagagcattggcatctatttaaattggtatcagcagaaaccagggaaagcccctaaactcctgatctatgctgcatccactttgcaaagtggggtcccgtcaaggttcagtggcagtggatctgggacagatttcactctcaccatcagcagtctgcaacctgaagattttgcaacttactactgtcaacagagttacacaacccccacgtggacgttcggccaagggaccaaagtggatatcaaa

SEQ ID NO: 4841 - DNA, 339 bp, synthetic construct
  source 1..339: mol_type = other DNA
cagtctgtcctgacgcagccgccctcagtgtctggggccccagggcagagggtcatcatctcctgcactgggagcgactccaacatcggggcaggttatgatgtacactggtaccagcagcttgcaggaacagcccccaaactcctcatctatggtaacagtaatcggccctcaggggtccctgaccgattctctggctccaagtctggcacctcagcctccctggccatcactgggctccaggctgaggatgaggctgattattactgccagtcctttgacagcagcctgagtggtcccaattatgtcttcggaactgggaccaagctcaccgtccta

SEQ ID NO: 4842 - DNA, 333 bp, synthetic construct
  source 1..333: mol_type = other DNA
aattttatgctgactcagccccactctgtgtcggagtctccggggaagacggtaaccatctcctgcacccgcagcagtggcggcattgtcaacaactatgtgcagtggtaccagcagcgcccgggcagttcccccaccactgtgatctatgaggataaccaaagaccctctggggtccctgatcggttctctggctccatcgacagctcctccaactctgcctccctcaccatctctggactgaagactgaggacgaggctgtctactactgtcagtcttatgatactagcaatcatggggtgttcggcggcgggaccaagctcaccgtccta

SEQ ID NO: 4843 - DNA, 321 bp, synthetic construct
  source 1..321: mol_type = other DNA
gaaatgacaatgacgcagtctccagccaccctgtctgtgtctccaggggaaagagccaccctctcctgcagggccagtcagagtattagcaccaccttagcctggtaccagcagaaacctggccaggctcccagactcctcatgtatggtgcatccaccagggccacaggtatcccagccaggttcagtggcagtgggtctgggacagagttcactctcaccatcagcagcctgcagtctgaagattttgcagtttattactgtcagcagtataataattggactccgacgttcggccaagggaccaaggtggagatcaaa

SEQ ID NO: 4844 - DNA, 321 bp, synthetic construct
  source 1..321: mol_type = other DNA
gaaatgacactcacgcagtctccatcctccctgtctgcatctgtaggagacagagtcaccatcacttgccggccaagtcagagcattagcagttttttaaattggtatcagcagaaaccagggagagcccctaagctcctgatctatgctgcatccagtttgcaaagtggggtcccatcaaggttcagtggcagtgaatctgggacagatttcactctcaccatcagcagtctccaacctgaagattttgcaacttactactgtcagcagaattacaattcccccctcactttcggcggtgggaccaaagtggagatcaaa

SEQ ID NO: 4845 - DNA, 330 bp, synthetic construct
  source 1..330: mol_type = other DNA
cagtctgtggtgactcaggagccatcgttctcagtgtcccctggagggacagtcacactcacttgtggcttgagctctggctcagtctctactagttactaccccagctggtaccggcagaccccaggccaggctccacgcacgctcatctacaacacaaagactcgctcttctggggtccctgatcgcttctctggctccatccttgggaacaaagctgccctcaccatcacgggggcccaggcagatgatgaatctgattatcactgtatgctatatatgggtagtggcatttgggtgttcggcggagggaccaagctcaccgtccta

SEQ ID NO: 4846 - DNA, 324 bp, synthetic construct
  source 1..324: mol_type = other DNA
tcgtatgagctgactcagccaccctcggtgtcagtggccccaggacagacggccaggattacctgtgggggaaacaacattggaagtaaaagtgtgcactggtaccagctgaaggcaggccaggcccctgtgctggtcgtctatgatgatagcgaccggccctcagggatcccggagcgattctctggctccaagtctgggaacacggccaccctgatcatcagcagggtcgaagccggggatgaggccgactattactgtcacgtgtgggatagtagtagtgatcattgggtattcggcggagggaccaagctcaccgtcgta

SEQ ID NO: 4847 - DNA, 324 bp, synthetic construct
  source 1..324: mol_type = other DNA
tcgtatgagctgactcagccaccctcggtgtcagtggccccaggacagacggccaggattccctgtgggggaaacaacattggaagtaaaagtgtgcactggtaccagcagaagccaggccaggcccctgtgctggtcgtctatgatgatcgcgaccggccctcagggatccctgagcgattctctggctccagctctgggaacacggccaccctgaccctcagcagggtcgaagccggggatgaggccgactattactgtcaggtgtgggatagtagtagtgatcttgtgatattcggcggagggaccaaggtcaccgtccta

SEQ ID NO: 4848 - DNA, 318 bp, synthetic construct
  source 1..318: mol_type = other DNA
tattatgagctgactcagccaccctcggtgtcggtgtccccaggacagacggccaggatcacctgctctggagatacattgccaacacaatatgcttattggtaccagcagaagccaggccaggcccctgtgttggtgatatataaagacagtgagaggccctcagggatccctgagcgattctctggctccacctcagggacaacagtcacgttgaccatcagtggagtccaggcagaagacgaggctgactattactgtcaatcagcagacagcagtgatatccgattcggcggagggaccaagctcaccgtccta

SEQ ID NO: 4849 - DNA, 321 bp, synthetic construct
  source 1..321: mol_type = other DNA
gacatcccggtgacgcagtctccgtcctccctgtctgcatctgtaggagacagagtcaccatcacttgccgggcaagtcagagcattagcagctttttaaactggtatcagcagaaaccagggaaagcccctaagctcctgatctatgctgtgtccagtttgcaaagtggggtcccatcaaggttcagtggcagtgaatctgggacagatttcactctcaccatcagcagtctgcaacctgaagattttgcaacttactactgtcaacagaattacaattcccccctcactttcggcggggggaccaaagtggatatcaaa

SEQ ID NO: 4850 - DNA, 330 bp, synthetic construct
  source 1..330: mol_type = other DNA
aattttatgctgactcagccccactctgtgtcggagtctccggggaagacagtaaccatctcctgcacccgcagcagtggcagcattgccagcaactatgtgcagtggtaccagcagcgcccgggcagttcaccttccactgttatctatgaggataaccaaagaccctctggggtccctgatcggttctctggctccatcgacagctcctccaactctgcctccctcaccatctctggactgcagactgacgacgaggctgactactactgtcagtcttatgatagcagcctttgggtgttcggcggagggaccaagctcaccgtccta

SEQ ID NO: 4851 - DNA, 324 bp, synthetic construct
  source 1..324: mol_type = other DNA
gaaacgacactcacgcagtctccaggcaccctgtctttgtctccaggggaaagagccaccttctcctgcagggccagtcagagtgttagcagcagccacttagcctggtaccagcagaaacctggccaggctcccaggctcctcatctatggtgcatccagcagggccactggcatcccagacaggttcagtgggagtgggtcagggacagacttcactctcaccatcagcagactggagcctgaagatgttgcagtgtattactgtcagcagtatcgtagctcaccgtggacgttcggccaagggaccaaagtggatatcaaa

SEQ ID NO: 4852 - DNA, 321 bp, synthetic construct
  source 1..321: mol_type = other DNA
gaaacgacactcacccagtctccaggcaccctatctttgtctccaggtgaaagagtcaccctctcctgcagggccagtcagagtgttagcagcagctacttagcctggtaccagcagaaacctggccaggctcccaggctcctcatctctggtgcatccagcagggcccctggcattccagacaggttcagtggcagtgggtctgggacagacttcactctcaccatcagcagactggagcctgaagattttgcagtgtattactgtcagcagtatgttacctcacccacttttggccaggggaccaaggtggagatcaaa

SEQ ID NO: 4853 - DNA, 324 bp, synthetic construct
  source 1..324: mol_type = other DNA
gaaatcccaatgacccagtctccatcctccctgtctgcatctgtaggagacagagtcaccatcacttgccgggcaagtcagagcattagcacctatttaaattggtatcagcagaaaccagggaaagcccctaaactcctgatctatgctgcttccagtttgcatagtggggtcccatcaaggttcagtggcagtggatcagggacagatttcactctcaccatcagcagtctgcaacctgaagatcttgcaacttactactgtcaacagagttacagtacccctccgctcactttcggcggagggaccaaggtggagatcaaa

SEQ ID NO: 4854 - DNA, 327 bp, synthetic construct
  source 1..327: mol_type = other DNA
gaaatggcactcacgcagtctccagccaccctgtctttgtctccaggggaaggagccaccctctcctgcagggccagtcagagtgttagcacctacttagcctggtaccaacagaaacctggccaggctcccaggctcctcatctatggtgcatccaacagggccactggcatcccagccaggttcagtggcagtgggtctgggacagacttcactctcaccatcagcagcctagagcctgaagattttgcagtttattactgtcagcagcgtaccaactggcctcggatgtacacttttggccaggggaccaaggtggagatcaaa

SEQ ID NO: 4855 - DNA, 330 bp, synthetic construct
  source 1..330: mol_type = other DNA
tcgtatgagctgacgcagccaccctcggtgtcagtggccccaggacagacggccaggattacctgtgggggaaatgagattggaagtaaaagtgtgcactggtaccagcagaagccaggccaggcccctgtgctggtcgtcaatgatgatagcgaccggccctcagggatccctgagcgattctctggctccaactctggaaacacggccaccctgaccatcagcagggtcgaagccggggatgaggccgactattactgtcaggtgtgggatagtattagtcatcattttaattgggtgttcggcggagggaccaagctcaccgtccta

SEQ ID NO: 4856 - DNA, 321 bp, synthetic construct
  source 1..321: mol_type = other DNA
gaaatccagttgacccagtctccatcctccctgtctgcatctgtaggagacagagtcaccatcacttgccaggcgagtcaggacattaccaactatttaaattggtatcagcagaaaccagggaaagcccctaagctcctgatctacgatgcatccaatttcgaaacaggggtcccatcaaggttcagtggaagtggatctgggacagattttactttcaccatcagcagcctgcagcctgaagatattgcaatatattactgtcaacagtttgatagtctccccctcactttcggcggagggaccaaggtggaaatcaaa

SEQ ID NO: 4857 - DNA, 324 bp, synthetic construct
  source 1..324: mol_type = other DNA
gaaatccggatgacccagtctccatcctccctgtctgcatctgtaggagacagagtcaccatcacttgccgggcaagtcagagcattagcagctatttaaattggtatcagcagaaaccagggaaagcccctaagctcctgatttatgctgcatccactttgcaaagtggggtcccatcaagattcagtggcagtggatttgggacagatttcactctcaccatcagcagtctgcaacctgaagattttgcaacttaccactgtcaacagagttacattatgccaccctggacgttcggccaagggaccaaggtggaaatcaaa

SEQ ID NO: 4858 - DNA, 324 bp, synthetic construct
  source 1..324: mol_type = other DNA
gacatccagatgacccagtctccatcctccctgtctgcatctgtaggagacagagtcaccatcacttgtcgggcaagtcagaggattagcagttatttaaattggtatcagcaaaaagtagggaaggcccctaagctcctgatctatgctgcatccagtttgcaaagtggggtcccatcaaggttcagtggcagtggatctgggacagatttcactctcaccatcagcagtctgcaacctgaagattttgccacttactactgtcaacagagttacgttatgcccccgtggacgttcggccaagggaccaaggtggaaatcaaa

SEQ ID NO: 4859 - DNA, 330 bp, synthetic construct
  source 1..330: mol_type = other DNA
cagtctgtgctgactcagcccccctcagcgtctgggacccccgggcagagggtcaccatctcttgttctggaagcagctccaacatcggaagtaattctgtaaactggtaccagcaactcccaagaacggcccccaaactcctcgtctatagtaataatcagcggccctcaggggtccctgaccgattctctggctccaagtctggcacctcagcctccctggccatcagtgggctccagtctgaggatgaggctgattattactgcgcaacatgggatgacagcctgactggtccggtgttcggcggagggaccaaggtcaccgtccta

SEQ ID NO: 4860 - DNA, 327 bp, synthetic construct
  source 1..327: mol_type = other DNA
gaaacgacactcacgcagtctccagccaccctgtctttgtctccaggggaaagagccaccctctcctgcagggccagtcagagtgttagcaactacttagcctggtaccaacagaaacctggccaggctcccaggctcctcatctatgatgcttccaacagggccactggcatcccaggcaggttcagtggcagtgggtctgggacagacttcactctcaccatcagcggcctagagcctgaagactttgcagtttattactgtcagctgcgtagcaactggcctccgcgcctctctttcggcggagggaccaaggtggaaatcaaa

SEQ ID NO: 4861 - DNA, 339 bp, synthetic construct
  source 1..339: mol_type = other DNA
gacatcgtgatgacccagtctccagactccctggctgtgtctctgggcgagagggccaccatcaactgcaagtccagccagagtgttttatacagctccaacagtcagaattacttagcttggtaccagcagaaaccaggacagcctcctaaactgctcctttactgggcatctacccgggaatccggggtccctgaccgattcagtggcagcgggtctgggacagatttcactctcaccatcagcagcctgcaggctgaagatgtggcggtttattactgtcagcaatattatagtactcctctgacgttcggccaagggaccaaagtggatatcaaa

SEQ ID NO: 4862 - DNA, 324 bp, synthetic construct
  source 1..324: mol_type = other DNA
gaaatgacactgacgcagtctccaggcaccctgtctttgtctccaggggaaagagccaccctctcctgcagggccagtcagagtgttagtagcacctacttagcctggtaccagcagaaagctggccaggctcccaggctcctcatctatggtgcatccagcagggccactgggatcccagacaggttcagtggcagtggggctgggacagacttcactctcacgatcagtagactggagcctgaagattttgcagtgtattactgtcagcaatatggttacgcaccgtggacgttcggccaagggaccaaggtggaaatcaaa

SEQ ID NO: 4863 - DNA, 318 bp, synthetic construct
  source 1..318: mol_type = other DNA
gaaatcgtgttgacccagtctccttccaccctgtctgcatctgtaggagacagagtcaccatcacttgccgggccagtcagagtattagtagctggttggcctggtatcagcagaaaccagggaaagcccctaaggtcctgatctataaggcaactaatttagaaagtggggtcccatcaaggttcagcggcagtggatctgggacagaattcactctcaccatcagcagcctgcagcctgatgattttgcaacctattactgccaacagtataatagttattacacttttggccaggggaccaaagtggaaatcaaa

SEQ ID NO: 4864 - DNA, 321 bp, synthetic construct
  source 1..321: mol_type = other DNA
gaaatcgtgttgacccagtctccctccaccctgtctgcatctgtaggagacagagtcaccatcacttgccgggccagtcagagtattagtagttggttggcctggtatcagcagaaacctgggaaggcccctaacctcctgatctataaggcgtctagtttagaaaatggggtcccatcaaggttcagcggcagtggatctgggacagaattcactctcaccatcaccagcctgcagcctgatgattttgcaacttattactgccaacagtataatagttttccgtacacttttggccaggggaccaaggtggaaatcaaa

SEQ ID NO: 4865 - DNA, 321 bp, synthetic construct
  source 1..321: mol_type = other DNA
gaaatgacaatgacgcagtctccttccaccgtgtctgcatctgtaggagacagagtcaccatcacttgccgggccagtcagagtattagtaactggttggcctggtatcaacaaaaaccagggagagcccctaaactcctgatctataaggcgtctagtttagaaagtggggtcccatcaaggttcagtggcagtggatctgggacagaattcactctcaccatcagcagcctgcagcctgatgattttgcaacttattactgccaacagtatagcagttatccaaggacgttcggccaagggaccaaggtggagatcaaa

SEQ ID NO: 4866 - DNA, 324 bp, synthetic construct
  source 1..324: mol_type = other DNA
gaaatccaaatgacccagtctccttcctccctgtctgcatctgtaggagacagagtcaccatcacttgccaggcgagtcaggacattagcaactctttacattggtatcagcagaaaccagggaaagcccctaagctcctgatctacgatgcatccaatttggaaacaggtgtcccatcaaggttcagtggaagtggatctgggacagattttactctcaccatcagcagcctgcagcctgaagatattgcaacatattactgtcaacagtatgataatctcccttcgtatacttttggccaggggaccaaggtggagatcaaa

SEQ ID NO: 4867 - DNA, 324 bp, synthetic construct
  source 1..324: mol_type = other DNA
gaaatcgcaatgacccagtctccatcctccctgtctgcatctgtaggagacagagtcaccatcacttgccgggcgagtcagggtattagcaattctttagcctggtatcagcagaaaccagggaaagcccctaagctcctgctctatgctgcatccacattggaaagtggggtcccttccaggttcagtggcagtggatctgggacggatttcactctcaccatcagcagcctgcagcctgaagatttttcaacttattactgtcaacagtattatagtaacctcgggaggacgttcggccaagggaccaaggtggatatcaaa

SEQ ID NO: 4868 - DNA, 330 bp, synthetic construct
  source 1..330: mol_type = other DNA
tcgtatgagctgactcagccaccctcagcgtctgggacccccgggcagagggtcaccatctcttgttctggaagcagctccaacatcggaagtaatactttaaactggtaccagcagctcccaggaacggcccccaaactcctcatctataataataatcagcggccctcaggggtccctgaccgattctctggctccaagtctggcacctcagcctccctggccatcagggggctccagtctgaggatgaggctgattattactgtgcagcatgggatgacagcctgaatggttatgtcttcggaactgggaccaagctcaccgtccta

SEQ ID NO: 4869 - DNA, 321 bp, synthetic construct
  source 1..321: mol_type = other DNA
gacatccagatgacccagtctccatcctccctgtctgcatctgtaggagacagagtcaccatcacttgccgggcaagtcagcgcattagcagctatttaaattggtatcagcagaaaccagggaaagcccctaagctcctgatctatgctgcatccactttgcacagtggggtcccatcaaggttcagtggcagtggatctgggacagatttcactctcaccatcagcagtctgcaacctgaagattttgcaacttactactgtcaacagagttacagtaccccgatcaccttcggcccagggacacgactggagattaaa

SEQ ID NO: 4870 - DNA, 330 bp, synthetic construct
  source 1..330: mol_type = other DNA
tcgtatgagctgacgcagccaccctcggtgtcagtggccccagggcagacggccaggattacctgtgggggaaacgacattggaagtaaaaatgtgcactggtaccaacagaagccaggccaggcccctgtgttggtcgtctatgatgatagcgaccggccctcagggatccctgagcgattctctggctccaactctgggaacacggccaccctgaccatcagcagggtcgaaggcggggatgaggccgactattactgtcagctgtgggatagtactggtgatcatccggaggtgttattcggcggagggaccaagctcaccgtccta

SEQ ID NO: 4871 - DNA, 336 bp, synthetic construct
  source 1..336: mol_type = other DNA
gaaattgtgatgactcagtctccactctccctgcccgtcacccctggagagccggcctccatctcctgcaggtctagtcagagcctcctgcatagtaatggacacaactatttggattggtacctgcagaagccagggcagtctccacaactcctgatctatttggcttctaatcgggcctccggggtccctgacaggttcagtggcagtggatcaggcacagattttacactgagaatcagcagagtggaggctgaggatgttggggtttattactgcatgcaagctctacaaactccgatcaccttcggccaagggacacgactggagattaaa

SEQ ID NO: 4872 - DNA, 318 bp, synthetic construct
  source 1..318: mol_type = other DNA
gaaatgacactcacgcagtctccagccaccctgtctgtgtctccagggggaagagccaccctctcctgcagggccagtcagagtgttagcaacaacttagcctggtaccagcagaaacctggccaggctcccaggctcctcatctatggtgcatccaccagggccactggtatcccagccaggttcagtggcagcgggtctgggacagagttcactctcaccatcagcagcctgcaggctgaagactttgcagtttattactgtcagcagtataatatccagtggacgttcggccaagggaccaaggtggaaatcaaa

SEQ ID NO: 4873 - DNA, 333 bp, synthetic construct
  source 1..333: mol_type = other DNA
cagtctgtgctgacgcagccgccctcagtgtctggggccccagggcagagggtcaccatctcctgcactgggagcaactccaacatcggggcaggttatgatgtacactggtaccagcagcttccaggaacagcccccaaactcctcatctatggtaacaccaatcgtccctcaggggtccctgaccgattctctggctccaggtctggcacctcagcctccctggccatcactgggctccaggctgaggatgaggctgattattactgccagtcttatgacagcagcctgagtactgtgttcttcggcggagggaccaagctcaccgtccta

SEQ ID NO: 4874 - DNA, 324 bp, synthetic construct
  source 1..324: mol_type = other DNA
gaaatgacgctgacgcagtctccaggcaccctgtctgtgtctccaggaaaacgagccaccctctcctgcagggccagtcagagtgttagcagcaacttagcctggtaccagcagaaacctggccaggctcccaggctcttcatttatggtgcatccaccagggccactggtatcccagccaggttcagtggcagtgggtctgggacagagttcactctcaccatcagcagcctgcagtctgaagattttgcagtttattactgtcagcagtatcatagctggcctttattcactttcggccctgggaccaaggtggaaatcaaa

SEQ ID NO: 4875 - DNA, 321 bp, synthetic construct
  source 1..321: mol_type = other DNA
gaaatcgtaatgacgcagtctccagccaccctgtctgtgtctccaggggaaagagtcaccctctcctgcagggccagtcagagtgttagaagcaacttagcctggtaccaacaaaaacctggccaggctcccaggctcctcatttacggtgcatccaccagggccactggtatcccagccaggttcagtggcagtgggtctgggacagagttcactctcaccatcagcagcctgcagtctgaagattttgcagtttatttctgtcaccagtatactcactggcctctcactttcggccctgggaccaaagtggagatcaaa

SEQ ID NO: 4876 - DNA, 333 bp, synthetic construct
  source 1..333: mol_type = other DNA
cagtctgtgatgactcagccgccctcagtgtctggggccccagggcagagggtcaccatctcctgcactgggagcaactccaacatcggggcaggctatgatgtacactggtaccagcagcttccaggaacagcccccaaactcctcatctctgttaacagcaatcggccctcaggggtccctgaccgattttctggctccaagtctggcacttcagcctccctggccatcactgggctccaggctgaggatgaggctgattattactgccagtcctatgacagcgccctgagtggttcggtattcggcggagggaccaagctgaccgtccta

SEQ ID NO: 4877 - DNA, 324 bp, synthetic construct
  source 1..324: mol_type = other DNA
gaaatcacgatgacccagtctccatcctccctgtctgcatctgtaggagacagagtcaccatcacttgccgggcaagtcagagcattagcacctatttaaattggtatcagcagaaaccagggaaagcccctaagctcctgatctatgctgcatccagtttgcaaagtatggtcccatcaaggttcagtggcagtggatctgggacagatttcactctcaccatcagcagtctgcaacctgaagattttgctacttactactgtcaacacagttacagtacgcctccgtggaccttcggccaagggaccaaggtggaaatcaaa

SEQ ID NO: 4878 - DNA, 324 bp, synthetic construct
  source 1..324: mol_type = other DNA
gacatccggatgacccagtctccatcttccctgtctgcatctgtaggagacagagtcaccatcacttgccgggcaagtcagaccattagcagctatttaaattggtatcagcagaaaccagggaaagcccctaagctcctgatctatggtgcatccagtttgcaaagtggggtcccatcaaggttcagtggcagtggctctgggacagatttcactctcaccatcagcagtctgcaagctgaagattttgcaacttactactgtcaacagagttacactatgcctccgatcaccttcggccctgggaccaaagtggatatcaaa

SEQ ID NO: 4879 - DNA, 324 bp, synthetic construct
  source 1..324: mol_type = other DNA
gacatccagatgacccagtctccatcctccctgtctgcatctgtaggagacagagtcaccatcacttgccgggcaagtcagagcattaggagctatttaaattggtatcagcagaaaccagggaaagcccctaacctcctgatctatgatgcatccagtttgcaaagtggagtcccatcaaggttcagtggcagtggatctgggacagatttcactctcaccatcagcagtctgcaacctgaagattttgcaacttactactgtcaacagagttacaatacccccccgtggacgttcggccgagggaccaaggtggaaatcaaa

SEQ ID NO: 4880 - DNA, 330 bp, synthetic construct
  source 1..330: mol_type = other DNA
cagcctgtgctgacgcagccaccctcggtgtcagtggccccgggacagacggccaggattacctgtgggggagacaacattgggagcaaaggtgttcactggtaccagcagaagccaggccaggcccctgtgttggtcgtctatgatgatagcgaccggccctcagggatccctgagcgattctctggctccaactcggggaacacggccaccctgaccatcagcagggtcgaagccggggatgaggccgactacttctgtcaggtgtgggatagtacgagtgatcatccggcttatgtcttcggaactgggaccaaggtcaccgtccta

SEQ ID NO: 4881 - DNA, 327 bp, synthetic construct
  source 1..327: mol_type = other DNA
gaaatgacactcacccagtctccagccaccctgtctttgtctccaggggaaagagccaccctctcctgcagggccagtcagagtcttagcggctacttagcctggtaccaacagaaacctggccaggctcccaggctcctcatctatgatgcatccaacagggccactggcatcccagccaggttcagtggcagtgggtctgggacagacttcactctcaccatcagcagcctagagcctgaagattttgcactttattactgtcaacagcgtagcagctggcctcggttgtacacttttggccaggggaccaaggtggagatcaaa

SEQ ID NO: 4882 - DNA, 321 bp, synthetic construct
  source 1..321: mol_type = other DNA
gacatccagatgacccagtctccatcctccctgtctgcatctgtaggagacagagtcaccatcacttgccgggcgagtcagggcattagctattctttagcctggtatcagcagaaaccagggaaagcccctaagctcctggtctatgttgcatccagattggaaagtggcgtcccatccaggttcagtggcagtggatctgggacagattacactctcaccatcagcagcctgcagcctgaagattttgcaacttattactgtcaacagtattataatacccccgtgacgttcggccaagggaccaaggtggaaatcaaa

SEQ ID NO: 4883 - DNA, 318 bp, synthetic construct
  source 1..318: mol_type = other DNA
gaaatccaattgacccagtctccttccaccctgtctgcatctgtaggagacagagtcaccatcacttgccgggccagtcagagtattagtagctggttggcctggtatcagcagaaaccagggaaagcccctaagctcctgatctatgaggcgtctagtttagatactggggtcccatcaaggttcagcggcagtggatctgggacagaattcactctcaccatcagcagcctgcagcctgatgattttgcaacttattactgccaacagtataatagttatctcactttcggcggagggaccaaggtggatatcaaa

SEQ ID NO: 4884 - DNA, 333 bp, synthetic construct
  source 1..333: mol_type = other DNA
cagccagggctgactcagccaccctcagtgtctggggccccagggcagagggtcaccatctcctgcactgggagcaactccaacatcggggcaggttatgatgtacactggtaccagcagcttccaggaacagcccccaaactcctcatctatgataacatcaatcggccctcaggggtccctgaccgattctctggctccaagtctggcacctcagcctccctggccatcactgggctccaggctgaggatgaggctgattattactgccagtcctatgacagcagcctcattggttctgtcttcggaactgcgaccaaggtcaccgtccta

SEQ ID NO: 4885 - DNA, 321 bp, synthetic construct
  source 1..321: mol_type = other DNA
gaaatcccaatgacacagtctccaggcaccctgtctttgtctccaggggaaagagccaccctctcctgcagggccagtcagagtgttagcagctacttagcctggtaccaacagaaacctggccaggctcccaggctcctcatctatggtgcatccagcagggccactggcatcccagacaggttcagtggcagtgggtctgggacagacttcactctcaccatcagcagactggagcctgaagattttgcagtgtattactgtcagcagtatggtagctcaccgaggacgttcggccaagggaccaaagtggatatcaaa

SEQ ID NO: 4886 - DNA, 321 bp, synthetic construct
  source 1..321: mol_type = other DNA
gaaatcgtgatgacccagtctccatcctcactgtctgcatctgtaggagacagagtcaccatcacttgtcgggcgagtcagggcattaacaattttttagcctggtttcagcagaaaccagggaaagcccctaagtccctgatctatgctgcatccagtttgcaaaatggggtcccatcaaagttcagcggcagtggatctgggacagatttcactctcaccatcagcagcctgcagcctgaagattttgcaacttattactgccaacagtatcatagttaccctcagacgttcggccaagggaccaaagtggatatcaaa

SEQ ID NO: 4887 - DNA, 348 bp, synthetic construct
  source 1..348: mol_type = other DNA
cagcctgtgctgactcagccaccttcctcctccgcatctcctggagaatccgccagactcacctgcaccttgcccagtgacatcaatgttggtagttacaacgtgtactggtaccagcagaagccagggcgccctcccaggtatctcctgtactactactcagactcagataagggccagggctctggagtccccagccgcttctctggatccaaagatgcttcagccaatacagggattttactcatctccgggctccagtctgaggatgaggctgactattactgtatgatttggccaagcaatcttctaggggtgttcggcggagggaccaagctcaccgtccta

SEQ ID NO: 4888 - DNA, 333 bp, synthetic construct
  source 1..333: mol_type = other DNA
cagtctgtgttgacgcagccgccctcagtgtctggggccccagggcagagggtcaccatctcctgcactgggagcaactccaacatcggggcaggttatgatgtacactggtaccagcaacttccaggaacagcccccaaactcctcatctatggtaacaacaatcggccctcaggggtccctgaccgattctctggctccaagtctgtcacctcagcctccctggccatcactgggctccaggctgaggatgaggctgattattactgccagtcctatgacagcagcctgagtgattcggtgttcggcggagggaccaagctgaccgtccta

SEQ ID NO: 4889 - DNA, 321 bp, synthetic construct
  source 1..321: mol_type = other DNA
gacatccggatgacccagtctccatccttcctgtctgcatctgtaggagacagagtcaccatcacttgccgggccagtcaggacattagcagttatttagcctggtatcagcaaaaacgagggaaagcccctaaggtcctgatctatgctgcatccactttgcaaagtggggtcccatcaaggttcagcggcagtggatctgggacagaattcactctcacaatcagcagcctgcagcctgaagattttgcaacttattactgtcaacaacttaatagttaccctctcaccttcggccaagggacacgactggagattaaa

SEQ ID NO: 4890 - DNA, 321 bp, synthetic construct
  source 1..321: mol_type = other DNA
gacatccagatgacccagtctccatcttccgtgtctgcatctgtcggagacagagtcaccatcacttgtcgggcgagtcagggtattagcggctggttagcctggtatcagcagaaaccagggaaagcccctaagctcctcatctatgctgcaaccactttgcaaagtggggtcccatcaaggttcagcggcagtggatctgggacagatttcactctcaccatcagcagcctgcagcctgaagattttgcaacttactattgccaacaggctaacagtttcccccggacgttcggccaagggaccaaggtggagatcaaa

SEQ ID NO: 4891 - DNA, 324 bp, synthetic construct
  source 1..324: mol_type = other DNA
tcgtatgtgctgactcagccaccctcagtgtcagtggccccaggaaagacggccaagattacctgtgggggaaacaacattggaagtaaacatgtgcactggtaccagcagaagccaggccaggcccctgtgctggtcatctattatgatagcgaccggccctcagggatccctgagcgattctctggctccaactctgggaacacggccaccctgaccatcagcagggtcgaagccggggatgaggccgactattactgtcaggtgtgggatagtaatagtgatcatcgtgtgttcggcggagggaccaaggtcaccgtccta

SEQ ID NO: 4892 - DNA, 324 bp, synthetic construct
  source 1..324: mol_type = other DNA
gaaatgacaatgacgcagtctccaggcaccctgtctttgtctccaggggaaagagccaccctctcctgcagggccagtcagagtgttagcagcagctttttagcctggtaccagcacaaacctggccaggctcccaggctcctcatctatggtgcatccagcagggccactggcatcccagacaggttcagtggcagtgggtctgggacagacttcactctcaccatcagcagactggagcctgaagattttgcagtgtattactgtcagcagtatgatagctcacctctcactttcggcggagggaccaaagtggagatcaaa

SEQ ID NO: 4893 - DNA, 321 bp, synthetic construct
  source 1..321: mol_type = other DNA
gaaatccaaatgacccagtctccatccgtcctgtctgcatctgtaggagacagagtcaccatcacttgccgggccagtcagggcattagcagtcatttagcctggtatcagcaaaaaccagggaaagcccctaaactcctgatctatgctgcatccactttgcaaagtggggtcccagcaaggttcagcggcagtggatctgggacagaattcactctcacgatcagcagcctgcagcctgaagattttgcaacttattactgtcaacagcttaatagtcacccgtgcagttttggccaggggaccaaggtggaaatcaaa

SEQ ID NO: 4894 - DNA, 321 bp, synthetic construct
  source 1..321: mol_type = other DNA
gacatccagatgacccagtctccatcctccctgtctgcatctgtaggagacagagtcaccatcacttgccgggcaagtcagagcattagcacctatttaaattggtatcagcagaaaccagggaaagcccctaaactcctgatctatgctgcatccagtttgcaaagtggggtcccatctaggttcagtggcagtggatctgggacagatttcactctcaccatcagcagtctgcaacctgaagattttacaacttactactgtcaacagagttccacaacgccgatcaccttcggccacgggacacgactggagattaaa

SEQ ID NO: 4895 - DNA, 318 bp, synthetic construct
  source 1..318: mol_type = other DNA
gaaacgacactcacgcagtctccatcctccctgtctgcatctgtaggagacagagtcaccatcacttgccgggcgagtcagggcattagcaattctttagcctggtatcagcagaaaccagggaaagcccctaagctcctgctctatgctgcatccacattggaaagtggggtcccatccaggttcagtggcagtggatctgggacggatttcactctcaccatcagcagcctgcagcctgaagattttgcaacttattactgtcaacagtattatactactcggacgttcggccaagggaccaaggtggaaatcaaa

SEQ ID NO: 4896 - DNA, 321 bp, synthetic construct
  source 1..321: mol_type = other DNA
gatattgtgatgacccagtctccatcctccctgtctgcatctgtaggagacagagtcaccatcacttgccaggcgagtcaggacattaacaactatttaaattggtatcaacagaaaccagggaaagcccctaagctcctgatctacgatgcatccaatttggagacaggggtcccatcaaggttcagtggaagtggatctgggacagactttactttcaccatcagcagcctgcagcctgaagatagtgcaacatattactgtcaccagtatgataatctccctaggacgttcggccaagggaccaaggtggaaatcaaa

SEQ ID NO: 4897 - DNA, 321 bp, synthetic construct
  source 1..321: mol_type = other DNA
gaaatcgtgatgacccagtctccatcctcactgtctgcatctgttggagacagagtcaccatcacttgtcgggcgagtcagggcattaggaattatttagcctggtttcagcagaaaccagggaaagcccctaagtccctgatctatggtgcatccagtttgcaaagcggggtcccatcaaagttcagcggcagtggatctgggacagatttcactctcaccatcagcagcctgcagcctgaagactttgcaacttattactgccaacagtataatgattacccgatcaccttcggccaagggacacgactggagattaaa

SEQ ID NO: 4898 - DNA, 336 bp, synthetic construct
  source 1..336: mol_type = other DNA
gaaattgcgatgacccagtctccactctccctgcccgtcacccctggagagccggcctccatctcctgcaggtctagtcagagcctcctgcatagtaatggatacaactatttggattggtacctgctgaagccagggcagtctccacaactcctgatctatttgggttctaatcgggcctccggggtccctgacaggttcagtggcagtggatcaggcacagatttttcactgaaaatcagcagagtggaggctgaggatgttggggtttattactgcatgcaagctctacaaactcccctcactttcggcggagggaccaaggtggagatcaaa

SEQ ID NO: 4899 - DNA, 324 bp, synthetic construct
  source 1..324: mol_type = other DNA
gaaatcccaatgacgcagtctccatcctccctgtctgcatctgttggagacagagtcaccatcacttgccgggcaagtcagagcattaacacctatttaaattggtatcagcagaaaccagggaaagcccctaaactcctgatctatgctgcatccagtttgcaaagtggggtcccatcaaggttcagtggcagtggatctgggacagatttcactctcaccatcagcagtctgcaacctgaagattttgcaacttactactgtctacagagttacaatacccctccgtggacgttcggccaagggaccaaggtggaaatcaaa

SEQ ID NO: 4900 - DNA, 324 bp, synthetic construct
  source 1..324: mol_type = other DNA
gaaatgacactcacgcagtctccagccaccctgtctgtgtctccgggggaaagagccaccctctcctgcagggccagtcagagtgttagcagcaaattagcctggtaccagcagaaacctggccaggctcccaggctcctcatctatggtgcatccaccagggccactggtatcccagccaggttcagtggcagtgggtctgggacagagttcactctcaccatcagcagcctgcagtttgaagattttgcggtttattactgtcagcagtataataacttgcctccgtggacattcggccaagggaccaaggtggaaatcaaa

SEQ ID NO: 4901 - DNA, 318 bp, synthetic construct
  source 1..318: mol_type = other DNA
gacatccagatgacccagtctccttccaccctgtctgcatctgttggagacagagtcaccatcacttgccgggccagtcagagtattaatagctggttggcctggtatcagcagaaaccagggaaagcccctaaactcctgatctatgatgcctccactttggaaagtggggtcccatcaaggttcagcggcagtggatctgggacagaattcactctcaccatcagcagcctgcagcctgatgatttcgcaacttattactgccaacagtataaaaattattggacgttcggccaagggaccaaggtggaaatcaaa

SEQ ID NO: 4902 - DNA, 321 bp, synthetic construct
  source 1..321: mol_type = other DNA
gacatccggttgacccagtctccgtccttcctgtctgcatctgtaggagacagcgtcaccatcacttgccgggccagtcagggcattagcagttatttagcctggtatcagcaaaaaccagggagagcccctaagctcctgatctatgctgcatccactttgcaaagtggagtcccatcaaggttcagcggcagtggatctgggacagaattcactctcacaatcagcagcctgcagcctgaagattttgctacttattactgtcaacaacttaatagtgacctcttcactttcggccctgggaccaaggtggagatcaaa

SEQ ID NO: 4903 - DNA, 336 bp, synthetic construct
  source 1..336: mol_type = other DNA
cagtctgtgctgacgcagccgccctcagtgtctggggccccagggcagagggtcaccatctcctgcactgggagcagctccaacatcggggcaggttatgatgtacattggtaccagcaacttccaggaacagcccccaaactcctcatctatagtaacaacaatcggccctcaggggtccctgaccgattctctggctccaagtctggcacctcagcctccctggccatcactggactccaggctgaggatgaggctgattattactgccagtcctatgacagcagcctgagtggctatgtggtattcggcggagggaccaagctcaccgtccta

SEQ ID NO: 4904 - DNA, 339 bp, synthetic construct
  source 1..339: mol_type = other DNA
gacatcccggtgacccagtctccagactccctggctgtgtctctgggcgagagggccaccatcaactgcaagtccagccagagtgttttatacagctccaacaataagaactacttagcttggtaccagcagaaaccaggacagcctcctaggctgctcatttactgggcatctacccgggaatccggggtccctgaccgattcagtggcagcgggtctgggacagatttcactctcaccatccgcagcctgcaggctgaagatgtggcagtttattactgtcagcaatattataataccccgctcactttcggcggagggaccaaggtggaaatcaaa

SEQ ID NO: 4905 - DNA, 339 bp, synthetic construct
  source 1..339: mol_type = other DNA
gacatccaggtgacccagtctccagactccctggctgtgtctctgggcgagagggccaccatcaactgcaagtccagccagagtgttttatacagctccaacaataagaactacttagcttggtaccagcagaaaccaggacagcctcctaggctgctcatttactgggcatctacccgggaatccggggtccctgaccgattcagtggcagcgggtctgggacagatttcactctcaccatccgcagcctgcaggctgaagatgtggcagtttattactgtcagcaatattataataccccgctcactttcggcggagggaccaaagtggatatcaaa

SEQ ID NO: 4906 - DNA, 321 bp, synthetic construct
  source 1..321: mol_type = other DNA
tcgtatgtgctgacacagccaccctcagtgtccgtgtccccaggacagacagccagcatcacctgctctggagataaattgggggataaatatgcttgctggtatcagcagaagccaggccagtcccctgtactggtcatctatcaagataccaagcggccctcagggatccctgagcgattctctggctccaactctgggaacacagccactctgaccatcagcgggacccagcctatggatgaggctgactattactgtcaggcgtgggacagcagtaatcattatgtcttcggagctgggaccaaggtcaccgtccta

SEQ ID NO: 4907 - DNA, 330 bp, synthetic construct
  source 1..330: mol_type = other DNA
cagtatgtgctgactcagccaccctcagcgtctgggacccccgtgcagagggtcaccatctcttgttctggaagcagctccaacatcggaagtaatactgttaactggtaccagcagctcccaggaacggcccccaaactcctcatctataataataatcagcggccctcaggggtccctgaccgattctctggctccaagtctggcacctcagcctccctggccatcagtgggctccagtctgaggatgaggctgattattactgtgcagcatgggatgacagcctgaatggtgtgctattcggcggagggaccaagctcaccgtccta

SEQ ID NO: 4908 - DNA, 321 bp, synthetic construct
  source 1..321: mol_type = other DNA
gacatccggatgacccagtctccatccttcctgtctgcatctgtaggagacagagtcaccatcacttgccgggccagtcagggcattagcaattatttagcctggtatcagcacaaaccagggaaagcccctaagctcctgatctatgctgcatccactttgcaaagtggggtcccatcaaggttcagcggcagtggatctgggacagaattcactctcacaatcagcagcctgcagcctgaagattttgcaacttattactgtcaacagcttaatagttaccctcggacgttcggccaagggaccaaggtggatatcaaa

SEQ ID NO: 4909 - DNA, 330 bp, synthetic construct
  source 1..330: mol_type = other DNA
aagtttatgctgactcagccccactctgtgtcggagtctccggggaagacggtaaccatctcctgcaccggcagcagtggctacattgccagcaactatgtgcagtggtaccagcagcgcccgggcagtgcccccaccactgtgatctatgaggataaccaaagaccctctggggtccctgatcggttctctggctccatcgacagctcctccaattctgcctccctcaccatctctggactgaagactgaggacgaggctgactactactgtcagtcttatgataacaccaattgggtgttcggcggagggaccaagctcaccgtccta

SEQ ID NO: 4910 - DNA, 324 bp, synthetic construct
  source 1..324: mol_type = other DNA
gatattgtgatgacgcagtctccatccctcctgtctgcatctgtaggagacagagtcaccatcacttgccgggccagtcagggcattagcagttatttagcctggtatcagcaaaaaccagggaaagcccctaagctcctgatctatgctgcatccactttgcaaagtggggtcccattaaggttcagcggcagtggatctgggacagaattcactctcacaatcagcagcctgcagcctgaagattttgcaacttattactgtcaacagcttaatagttaccctcggtacacttttggccaggggaccaaggtggatatcaaa

SEQ ID NO: 4911 - DNA, 318 bp, synthetic construct
  source 1..318: mol_type = other DNA
gaaatcgtgatgacccagtctccttccaccctgtctgcatctgctggagacagagtcaccatcacttgccgggccagtcagagtattagtagctggttggcctggtatcagcagaaaccaggaaaagcccctaaactcctgatctataaggcgtctagtttagaaagtggggtcccatcaaggttcagcggcagtggatctgggacagaattcactctcaccatcagcagcctgcagcctgatgattttgcaacttattactgccaacagtataatagttatttcactttcggccctgggaccaaggtggaaatcaaa

SEQ ID NO: 4912 - DNA, 327 bp, synthetic construct
  source 1..327: mol_type = other DNA
gaaacgacactcacgcagtctccagccaccctgtctgtgtctccaggggaaagagccaccctctcctgcagggccagtcagagtgttagcagcaacttagcctggtaccagcagaagcctggccaggctcccagggtcctcatctatggtgcatccaccagggccactggtatcccagccaggttcagtggcagtgggtctgggacagagttcactctcaccatcagcagcctgcagtctgaagattctgcagtttattactgtcagcagtatgataactggcctcccatgtggacgttcggccaagggaccaaggtggaaatcaaa

SEQ ID NO: 4913 - DNA, 321 bp, synthetic construct
  source 1..321: mol_type = other DNA
gaaattgtgatgacgcagtctccagccaccctgtctgtgtctccgggggaaagagccaccctctcctgcagggccagtcagagtattagcagcaacctagcctggtaccagcagaaacctggccaggctcccaggctcctcatctctggtgcctccaccagggccactggtatcccagccaggttcagtggcagtgggtctgggacagagttcactctcaccatcagcagcctgcagtctgaagattttgcagtttattactgtcagcagcataattcctggccggccaccttcggccaagggacacgactggagattaaa

SEQ ID NO: 4914 - DNA, 321 bp, synthetic construct
  source 1..321: mol_type = other DNA
gaaatgacgctgacgcagtctccatcctccctgtctgcatctgtaggagacagagtcaccatcacttgccgggcaagtcagagcattagcagttatttaaattggtatcagcaaaaactggggaaagcccctaagctcctgatctacgctgcatccagtttgcaaagtggggtcccatcaaggttcagtggcagtggatctgggacagatttcactctcaccatcagcagtctgcaacctgaagattttgcaacttactactgtcaacagagttacagtaccccgtacacttttggccaggggaccaaagtggatatcaaa

SEQ ID NO: 4915 - DNA, 321 bp, synthetic construct
  source 1..321: mol_type = other DNA
gaaatccgaatgacccagtctccttctaccctgtctgcatctgtaggagacagagtcaccatcacttgccgggccagtcagagtattagtagctggttggcctggtatcagcagaaaccggggaaagcccctaatctcctgatctataaggcgtctattttagaaagtggggtcccatcaaggttcagcggcagtggatctgggacagaattcactctcaccatcagcagcctgcagcctgatgattttgcaacttattactgccaacagtatgacagttattcagggacgttcggccaagggaccaaggtggaaatcaaa

SEQ ID NO: 4916 - DNA, 336 bp, synthetic construct
  source 1..336: mol_type = other DNA
cagtctgtgttgacgcagccgccctcagtgtctggggccccagggcagagggtcaccatctcctgcactgggagcagctccaacatcggggcaggttttgatgtacattggtaccagcaggttccaggaacagcccccaaactcctcatctatggtaacagcaatcggccctcaggcgtccctgaccgattctctggctccaagtccggcacctcagcctccctggccatcactgggctccaggctgaggatgaggctgattattactgccagtcctatgacagcagcctgagtggctttgtcatattcggcggaggcaccaagctcaccgtccta

SEQ ID NO: 4917 - DNA, 324 bp, synthetic construct
  source 1..324: mol_type = other DNA
gaaatcacaatgacccagtctccatcctccctgtctgcatctgtaggagacagagtcaccatcacttgccgggcaagtcagagcattagcacctatttaaactggtatcagcagaaaccagggaaagcccctaagctcctgatctatgctgcatccagtttgcaaagtggggtcccatcaaggttcagtggcagtggatctgggacagatttcactctcaccatcagcagtctgcaacctgaagattttgcaagttactattgtcaacagagttacagtaaccccatgtacacttttggccaggggaccaaggtggaaatcaaa

SEQ ID NO: 4918 - DNA, 324 bp, synthetic construct
  source 1..324: mol_type = other DNA
gaaatgacactcacgcagtctccaggcaccctgtctgtgtctccaggggaaagagccaccctctcctgcagggccagtcagagtgttagcagcaagttagcctggtaccagcagaaacctggccaggctcccaggctcctcatctatggtgcatccaccagggccactggtatcccagccaggttcagtggcagtgggtctgggacagagttcactctcaccatcagcagcctgcagtctgaagattttgcagtttattactgtcagcagtataataactggcctccgctcactttcggcggagggaccaaggtggagatcaaa

SEQ ID NO: 4919 - DNA, 333 bp, synthetic construct
  source 1..333: mol_type = other DNA
cagtctgtgctgactcagcctgcctccgtgtctgggtctcctggacagtcgatcaccatctcctgcactggaaccagcagtgacgttggtggtcataactatgtctcctggtaccaacagcacccaggcaaagcccccaaactcatgatttatgaggtcagtaatcggccctcaggggtttctaatcgcttctctggctccaagtctggcaacacggcctccctgaccatctctgggctccaggctgaggacgaggctgattattcctgcagttcatatgcaagcagtacctctcctgtggttttcggcggagtgaccaagctcaccgtccta

SEQ ID NO: 4920 - DNA, 321 bp, synthetic construct
  source 1..321: mol_type = other DNA
gacatccggatgacccagtctccttccaccctgtctgcatctgtaggagacagagtcaccatcacttgccgggccagtcagagtattagtacctggttggcctggtatcagcagaaaccagggaaagcccctaagctcctgatctataaggcgtctagtttagaaagtggggacccatcaaggttcagcggcagtggatctgggacagaattcactctcaccatcagcagcctgcaacctgatgattttgcaacttattactgccaacagtatagtacttacccgtacacttttggccaggggaccaaggtggagatcaaa

SEQ ID NO: 4921 - DNA, 330 bp, synthetic construct
  source 1..330: mol_type = other DNA
aattttatgctgactcagccccactctgtgtcggagtctccggggaagacggtaaccatctcctgcacccgcagcagtggcagcattgccagcagctatgtgcagtggtaccagcagcgcccgggcagttcccccaccactgtgatctatgacgataaccaaagaccctctggggtccctgatcggttctctggctccatcgacagctcctccaactctgcctccctcaccatctctggactgaagactgaggacgaggctgactactactgtcagtctcatgattctagcactgtgatattcggcggagggaccaagctcaccgtccta

SEQ ID NO: 4922 - DNA, 321 bp, synthetic construct
  source 1..321: mol_type = other DNA
gaaatgacactcacgcagtctccatcctccctgtctgcatctgtaggagacagggtcaccatcacttgccaggcgagtcaggccattagcaactatttaaattggtatcagcagaaaccagggaaagcccctaaactcctgatctacgatgcatccaatttggaaacaggggtcccatcgaggttcagtggaagtggatctgggacagattttactttcaccatcagcagcctgcagcctgaagatattgcaacatatttctgtcaacagtatgataatctccctttcactttcggccctgggaccaaggtggatatcaaa

SEQ ID NO: 4923 - DNA, 324 bp, synthetic construct
  source 1..324: mol_type = other DNA
gaaattggggtgacgcagtctccatcctccctgtctgcatctgtaggagacagagtcaccatcacctgccgggcaagtcagagcattagcagctatttaaattggtatcagcagaagccagggaaagcccctaaactcctgatttatgctgcatccagtttgcaaagtggggtcccatcaaggttcagtggcagtggatttgggacagatttcactttcaccatcagcagtttacaacctgaggattttgcaacttactattgtcaacagagttacagaaccccccccctcactttcggccctgggaccaaggtggaaatcaaa

SEQ ID NO: 4924 - DNA, 339 bp, synthetic construct
  source 1..339: mol_type = other DNA
gatattgtgctgacgcagtctccagactccctggctgtgtctctgggcgagagggccaccatcaactgcaagtccagccagagtgttttatatagttccaacaatgagaactacttaggttggtaccagcagaaaccaggacagcctcctaagttgctcatttactgggcatctacccgggaatccggggtccctgaccgattcagtggcagcgggtctgggacagatttcactctcaccatcagcagcctgcaggctgaagatgtggcagtttattactgtcagcaatattatagtactcccctcactttcggccctgggaccaaggtggagatcaaa

SEQ ID NO: 4925 - DNA, 324 bp, synthetic construct
  source 1..324: mol_type = other DNA
gaaatggcactgacgcagtctccaggcaccctgtctttgtctccaggggaaagagccaccctctcctgcagggccagtcagagtgttagcagcagcttcttagcatggtaccagcagaaacctggccaggctcccaggctcctcatctatgctgcatccagcagggccactggcatcccagacaggttcagtggcagtgggtctgggacagacttcactctcaccatcagcagactggagcctgaagattttgcagtgtattactgtcaccagtatggttactcaccgtggacgttcggccaagggaccaaagtggatatcaaa

SEQ ID NO: 4926 - DNA, 321 bp, synthetic construct
  source 1..321: mol_type = other DNA
gacatcgggatgacccagtctccatcctccctgtctgcatctgtaggagacagagtcaccatcacttgccaggcgagtcaggacattagcaactctttaaattggtatcagcagaaaccagggaaagcccctaagcgcctgatctacgatgcatccaatttggaaacaggggtcccatcaaggttcagtggaagtggatctgggacagattttactttcaccatcagcagcctgcagcctgaagatattgcaacatattactgtcaacagtttgataatctcccgatcaccttcggccaagggacacgactggagattaaa

SEQ ID NO: 4927 - DNA, 327 bp, synthetic construct
  source 1..327: mol_type = other DNA
cagtctgtgctgactcagccaccctcggtgtcagtggccccaggacagacggccaggattacctgtgggggaaacaacattggaagtaaaagtgtgcactggtaccagcagaagccaggccaggcccctgtgctggtcgtcaatgatgatagcgaccggccctcagggatccctgagcgattctctggctccaactctgggaacacggccaccctgaccatcagcagggtcgcagccggggatgaggccgactattactgtcaggtgtgggatagtaatagtgatcatcattatgtcttcggaactgggaccaagctcaccgtccta

SEQ ID NO: 4928 - DNA, 339 bp, synthetic construct
  source 1..339: mol_type = other DNA
gacatccgagtgacgcagtctccagactccctggctgtgtctctgggcgagagggccaccatcaactgcaagtccagccagagtgttttatacagctccaacaataagaacttcttagcttggtaccagcagaaaccaggacagcctcctaagctgctcatttattgggcatctacccgggaatccggggtccctgaccgattcagtggcagcgggtctgggacagatttcactctcaccatcagcagcctgcaggctgaagatgtggcagtttattactgtcagcaatattacagtactccgtggacgttcggccaagggaccaaggtggaaatcaaa

SEQ ID NO: 4929 - DNA, 318 bp, synthetic construct
  source 1..318: mol_type = other DNA
gaaattgtgttgacgcagtctccagccaccctgtctttgtctccaggggaaagagccaccctgtcctgcagggccagtcagagtgttagcacctacttagcctggtaccaacagaaacctggccaggctcccaggctcctcatctatgatgcatccaacagggccactggcatcccggccaggttcagtggcagtgggtctgggacagacttcactctcaccatcagcagcctagagcctgaagattttgcagtttattactgtcagcagcgtgacaactgggtctctttcggcggagggaccaaggtggaaatcaaa

SEQ ID NO: 4930 - DNA, 339 bp, synthetic construct
  source 1..339: mol_type = other DNA
gacatccagatgacccagtctccagactccctggctgtgtctctgggcgagagggccaccatcaactgcaagtccagccagagtgttttatacagctccaacaataacaactacttagcttggtaccagcagaaaccaggacagcctcctaagctgctcatttactgggcatctacccgggaatccggggtccctgaccgattcagtggcagcgggtctgggaccgatttcactctcaccatcagcagcctgcaggctgaggatgttgcagtttattactgtcagcaatattatagtactccgctcactttcggcggagggaccaaggtggaaatcaaa

SEQ ID NO: 4931 - DNA, 324 bp, synthetic construct
  source 1..324: mol_type = other DNA
gaaattgtgatgactcagtctccagccaccctgtctgtgtctccaggggaaagagccaccctctcctgcagggccagtcagagtgttagcagcagcttagcctggtaccagcagaaacctggccaggctcccaggctcctcatctatggtgcatccaccagggccactggtatcccagccaggttcagtggcagtgggtctgggacagagttcactctcaccatcagtagcctgcagtctgaagattttgcagtttattactgtcagcagtataataagtggcctcggtacacttttggccaggggaccaaggtggatatcaaa

SEQ ID NO: 4932 - DNA, 321 bp, synthetic construct
  source 1..321: mol_type = other DNA
gacatccggatgacccagtctccatcttccctgtctgcatctgtaggagacagagtcaccatcacctgccaggcgagtcaggacataagcaactatttaaattggtatcagcaaaaaccagggaaagcccctaagctcctgatctacgatgcatccaatttggaaacaggggtcccatcacggttcagtggaagtggatctgggacagattttagtttcaccatcagcagcctgcagcctgaagatattgcaacatattactgtcaacagtatcatagtctcccgatcactttcggccctgggaccaaggtggatatcaaa

SEQ ID NO: 4933 - DNA, 327 bp, synthetic construct
  source 1..327: mol_type = other DNA
gaaatgacactgacgcagtctccagccaccctgtctttgtctccaggggaaagagccactctctcctgcagggccagtcagagcgttcgcagctacttagcctggtaccaacagaaacctggccaggctcccaggctcctcatctatgatgcctccaacagggccactggcatcccagccaggttcagtggcagtgggtctgggacagacttcactctcaccatcagcagcctagagcctgaagattttgcagtttattactgtcagcagcgtagcaactggccccgcacactcactttcggcggagggaccaaggtggaaatcaaa

SEQ ID NO: 4934 - DNA, 321 bp, synthetic construct
  source 1..321: mol_type = other DNA
gaaattgtgctgacgcagtctccaggcaccctgtctttgtctccaggggaaagagccaccctctcctgcagggccagtcagagtgttagcagctacttagcctggtaccaacaaaaacctggccaggctcccaggctcctcatctatgatgcgtccaacagggccactggcatcccagccaggttcagtggcagtgggtctgggacagacttcactctcaccatcagcagcctggagcctgaagattttgcagtttattactgtcagcagcgtggcaactggccggggactttcggcggagggaccaaggtggaaatcaaa

SEQ ID NO: 4935 - DNA, 324 bp, synthetic construct
  source 1..324: mol_type = other DNA
gacatcccgatgacccagtctccatcctccctgtctgcatctgtaggagacagagtcaccatcacttgccgggcaagtcagagaataagcagctatttaaattggtatcagcagaaaccagggaaagcccctaagctcctgatctatgctgcatccagtttgcaaagtggggtcccatcaaggttcagtggcagtggatctgggacagatttcactctcaccatcagcagtctgcaacctgaagattttgcaacttactactgtcaacagagttacagtacccctccggtcactttcggcggagggaccaaggtggaaatcaaa

SEQ ID NO: 4936 - DNA, 324 bp, synthetic construct
  source 1..324: mol_type = other DNA
gaaatcccgatgacccagtctccatcctccctgtctgcatctgtaggagacagagtcaccatcacttgccgggcaagtcagagaataagcagctatttaaattggtatcagcagaaaccagggaaagcccctaagctcctgatctatgctgcatccagtttgcaaagtggggtcccatcaaggttcagtggcagtggatctgggacagatttcactctcaccatcagcagtctgcaacctgaagattttgcaacttactactgtcaacagagttacagtacccctccggtcactttcggcggagggaccaaggtggatatcaaa

SEQ ID NO: 4937 - DNA, 324 bp, synthetic construct
  source 1..324: mol_type = other DNA
gacatcgagatgacccagtctccatcttccgtgtctgcatctgtgggagacagagtcaccatcacttgtcgggcgagtcagggtattagcaactggttagcctggtatcagcagaaaccagggaaagcccctaaactcctgatctatgctgcatccagtttgcaaagtggggtcccatcaaggttcagcggcagtggatctgggacagatttcactctcaccatcagcagcctgcagcctgaagattttgcaacttactattgtcaacagactatcagttttccggcgatcaccttcggccaagggacacgactggagattaaa

SEQ ID NO: 4938 - DNA, 321 bp, synthetic construct
  source 1..321: mol_type = other DNA
gacatccagatgacccagtctccatcctccctgtctgcatctgtaggagacagagtcaccatcgcttgccaggcgagtcaggacattagcaactatttaaattggtatcagcaaaaaccagggaaagcccctaagctcctgatctacgatgcatccaatttggaaacaggggtcccatcaaggttcagtggaagtggatctgggacagattttactttcaccatcagcagcctgcagcctgaagatattgcaacatattactgtcaacagcatgataatgtccctctcaccttcggccaagggacacgactggagattaaa

SEQ ID NO: 4939 - DNA, 321 bp, synthetic construct
  source 1..321: mol_type = other DNA
gacatcccaatgacccagtctccatccttcctgtctgcatctgtaggagacagagtcaccatcacttgccgggccagtcagggcattagcagttatttagcctggtatcagcaaaaaccagggaaagcccctaagctcctgatctatactgcatccactttgcaaagtggggtcccatcaaggttcagcggcagtggatctgggacagaattcactctcacaatcagcagcctgcagcctgaagattttgcaacttattactgtcaacagcttaataatcaccctccggccttcggccaagggacacgactggagattaaa

SEQ ID NO: 4940 - DNA, 321 bp, synthetic construct
  source 1..321: mol_type = other DNA
gaaatcccactgacccagtctccagccaccctgtctttgtctccaggggaaagagccaccctctcctgcagggccagtcagagtgttagcaactacttagcctggtaccaacagaaacctggccaggctcccaggctcctcatctatgatgcatccaacagggccactggcatcccagccaggttcagtggcagtgggtctgggacagacttcactctcaccatcagcagcctagagcctgaagattttgcagtttattactgtcagcagcgtagcaagtggcggtacacttttggccaggggaccaaggtggaaatcaaa

SEQ ID NO: 4941 - DNA, 336 bp, synthetic construct
  source 1..336: mol_type = other DNA
gacatccggatgacccagtctccactctccctgcccgtcacccctggagagccggcctccatctcctgcaggtctagtcagagcctcctgcatagtaatggacacaactatttggattggtacctgcagaagccagggcagtctccacagctcctgatctatttgggttctaatcgggcctccggggtccctgacaggttcagtggcagtggatcaggcacagattttacactgaaaatcagcagagtggaggctgaggatgttggggtttattactgcatgcaagctctacaaagtcctccggccttcggccaagggacacgactggagattaaa

SEQ ID NO: 4942 - DNA, 330 bp, synthetic construct
  source 1..330: mol_type = other DNA
aatcttatgctgactcagccccactctgtgtcggagtctccggggaagacggtaaccatctcctgcaccggcagcagtggcagcattgccagcaactatgtgcagtggtaccagcagcgcccgggcagtgcccccaccactgtgatctatgaggatgaccaaagaccctctggggtccctgatcggttctctggctccatcgacagctcctccaactctgcctccctcaccatctctggactgaagactgaggacgaggctgactactactgtcagtcttatgatagcagccgggtggtattcggcggagggaccaagctcaccgtccta

SEQ ID NO: 4943 - DNA, 324 bp, synthetic construct
  source 1..324: mol_type = other DNA
gaaattgtattgacgcagtctccagccaccctgtctgtgtctccaggggaaagagccaccctctcctgcagggccagtcagagtgttagcagcaacttagcctggtaccagcagaaacctggccaggctcccaggctcctcatctatggtgcatccaccagggccactggtatcccagccaggttcagtggcagtgggtctgggacagagttcactctcaccatcagcagcctgcagtctgaagattttgcactttattactgtcagcagtataataactggcctccgctcactttcggcggagggaccaaagtggatatcaaa

SEQ ID NO: 4944 - DNA, 327 bp, synthetic construct
  source 1..327: mol_type = other DNA
gaaattgtgctgacacagtctccagccaccctgtctttgtctccaggggaaagagccaccctctcctgcagggccagtcagagtgttagcagctacttagcctggtaccaacagaaacctggccaggctcccaggctcctcatctatgatgcatccaacagggccactggcatcccagccaggttcagtggcagtgggtctgggacagacttcaatctcaccatcagcagcctagagcctgaggattttgcagtttattactgtcagcagcgtagcatctggcctccgccattcactttcggccctgggaccaaggtggaaatcaaa

SEQ ID NO: 4945 - DNA, 321 bp, synthetic construct
  source 1..321: mol_type = other DNA
gaaattgtgttgacgcagtctccagccaccctgtctttgtctccaggggaaagagccaccctctcctgcagggccagtcagagtgttagcagctacttagcctggtaccaacagaaacctggccaggctcccagggtcctcatctatgatgcatccaacagggccactggcatcccagccaggttcagtggcagtgggtctgggacagacttcactctcaccatcagcagcctagagcctgaagattttgcagtttattactgtcagcagcgtagcaactggcggtacacttttggccaggggaccaaggtggaaatcaaa

SEQ ID NO: 4946 - DNA, 324 bp, synthetic construct
  source 1..324: mol_type = other DNA
gaaatcccgatgacccagtctccatcctccctgtctgcatctgtaggagacagagtcaccatcacttgccgggcaagtcagagcattagcagctatttaaattggtatcagcagaaaccagggaaagcccctaagctcctgatctatgctgcatccggtttgcaaagtggggtcccatcaaggttcagtggcagtggatctgggacagatttcactctcaccatcagcagtctgcaacctgaagattttgcaacttactactgtcaacagagttacactaaccccatgtacacttttggccaggggaccaaggtggaaatcaaa

SEQ ID NO: 4947 - DNA, 339 bp, synthetic construct
  source 1..339: mol_type = other DNA
gaaatgacactgacgcagtctccactctccctgcccgtcacccctggagagccggcctccatctcctgcaggtctagtcagagcctcctgcatagtaatggatacaactatttggattggtacctgcagaagccagggcagtctccacagctcctgatctatttgggttctaatcgggcctccggggtccctgacaggttcagtggcagtggatcaggcacagattttacactgaaaatcagcagagtggaggctggggatgttggggtttattactgcatgcaagctctacaaactcctccgtacggttttggccaggggaccaaggtggatatcaaa

SEQ ID NO: 4948 - DNA, 324 bp, synthetic construct
  source 1..324: mol_type = other DNA
cagtctgtcctgactcagcctgcctccgtgtctgggtctcctggacagtcgatcaccatctcctgcactggaaccagcagtgatgttgggagttataaccttgtctcctggtaccaacagcacccaggcaaagcccccaaactcatgatttatgaggtcactaagcggccctcaggggtttctaatcgcttctctggctccaagtctggcaacacggcctccctgacaatctctgggctccaggctgaggacgaggctgattattactgctgctcatatgcaggtatttatgtcttcggaactgggaccaagctcaccgtccta

SEQ ID NO: 4949 - DNA, 342 bp, synthetic construct
  source 1..342: mol_type = other DNA
gaaattgtgatgacgcagtctccagactccctggctgtgtctctgggcgagagggccaccatcaactgcaagtccagccagagtgttttatacagctccaacaataagaacaacttagcttggtaccagcagaaaccaggacagcctcctaagctgctcatttactgggcatctacccgggaatccggggtccctgaccgattcagtggcagcgggtctgggacagatttcactctcaccatcagcagcctgcaggctgaagatgtggcagtttattactgtcagcaatattatagtacttgggcgctcactttcggcggagggaccaaggtggaaatcaaa

SEQ ID NO: 4950 - DNA, 339 bp, synthetic construct
  source 1..339: mol_type = other DNA
gacatccagatgacccagtctccagactccctggctgtgtctctgggcgagagggccaccatcaactgcaagtccagccagagtgttttatacagctccaacaataagaactacttagcttggtaccagcagaaaccaggacagcctcctcagctactcatttactgggcatctacccgggaatccggggtccctgaccgattcagtggcagcgggtctgggacagatttcactctcaccatcagcagcctgcaggctgaagatgtggcagtttattactgtcagcaatattatagtactcctctcactttcggcggagggaccaaggtggaaatcaaa

SEQ ID NO: 4951 - DNA, 324 bp, synthetic construct
  source 1..324: mol_type = other DNA
gaaacgacactcacgcagtctccaggcaccctgtctttgtctccaggggaaagagccaccctctcctgcagggccagtctgagtgttagcagcagctacttagcctggtaccagcagaaacctggccaggctcccaggctcctcatctatggtgcatccagcagggccactggcatcccagacaggttcagtggcagtgggtctgggacagacttcactctcaccatcagcagactggagcctgaagattttgcagtgtattactgtcagcagtatggtagctcaccgctcactttcggcggagggaccaaggtggagatcaaa

SEQ ID NO: 4952 - DNA, 324 bp, synthetic construct
  source 1..324: mol_type = other DNA
gaaattgtattgacacagtctccagccaccctgtctgtgtctccaggggaaagagccaccctctcctgcagggccagtcagagtgttagcagcaatttagcctggtaccagcagaaacctggccaggctcccaggctcctcatctatggtgcatccaccagggccactggtatcccagccaggttcagtggcagtgggtctgggacagagttcactctcaccatcagcagcctgcagtctgaagattttgcagtttattactgtcagcagtatcataattggcctccgctcactttcggcggagggaccaacgtggatatcaaa

SEQ ID NO: 4953 - DNA, 315 bp, synthetic construct
  source 1..315: mol_type = other DNA
cagcatgtgctgactcagccaccctcagtgtcagtggccccaggaaagacggccaggattacctgtgggggaaacaacattggaagtaaaagtgtgcactggtaccagcagaagccaggccaggcccctgtgctggtcatctattatgatagcgaccggccctcagggatccctgagcgattctctggctccaactctgggaacacggccaccctgaccatcagcagggtcgaagccggggatgaggccgactattactgtcaggtgtgggatagtagttgggtgttcggcggagggaccaaggtcaccgtccta

SEQ ID NO: 4954 - DNA, 321 bp, synthetic construct
  source 1..321: mol_type = other DNA
gaaatcacaatgacgcagtctccagccaccctgtctgtgtctccaggggaaagagccaccctctcctgcagggccagtcagagtgtcagcagcaacttagcctggtaccagcagaaacctggccaggctcccaggctcctcatctatggtgcatccaccagggccactggtatcccagccaggttcagtggcagtgggtctgggacagagttcactctcaccatcagcagcctgcagtctgaagattttgcagtttattactgtcagcagtataataactggcctcgaacgttcggccaagggaccaaggtggagatcaaa

SEQ ID NO: 4955 - DNA, 321 bp, synthetic construct
  source 1..321: mol_type = other DNA
gaaatgacactcacgcagtctccagccaccctgtctgtgtctccaggggaaagagccaccctctcctgcagggccagtcagagtgttagcagcaacttagcctggtaccagcagaaacctggccaggctcccaggctcctcatctatggtgcatccaccagggccactggtatcccagccaggttcagtggcagtgggtctgggacagagttcactctcaccatcagcagcctgcagtctgaagattttgcagtttattactgtcagcagtataataactggccttggacgttcggccaagggaccaaggtggatatcaaa

SEQ ID NO: 4956 - DNA, 321 bp, synthetic construct
  source 1..321: mol_type = other DNA
gaaatgacactgacgcagtctccagccaccctgtctttgtctccaggggaaagagccaccctctcctgcagggccagtcagagtgttagcagctacttagcctggtaccaacagaaacctggccaggctcccaggctcctcatctatgatgcatccaacagggccactggcatcccagccaggttcagtggcagtgggtctgggacagacttcactctcaccatcagcagcctagagcctgaagattttgcagtttattactgtcagcagcgtagcaactggccggggactttcggcggagggaccaaggtggaaatcaaa

SEQ ID NO: 4957 - DNA, 324 bp, synthetic construct
  source 1..324: mol_type = other DNA
gaaattgtgatgacgcagtctccatcctccctgtctgcatctgtaggagacagagtcaccatcacttgccgggcaagtcagagcattagcagctatttaaattggtatcagcagaaaccagggaaagcccctaagctcctgatctatgctgcatccagtttgcaaagtggggtcccatcaaggttcagtggcagtggatctgggacagatttcactctcaccatcagcagtctgcaacctgaagatttcgcaacttactactgtcaacagagttacagtaaccctccagtaaccttcggccaagggacacgactggagattaaa

SEQ ID NO: 4958 - DNA, 330 bp, synthetic construct
  source 1..330: mol_type = other DNA
cagtatgtgctgactcagccaccctcggtgtcagtggccccaggacagacggccaggattacctgtgggggaaacaacattggaagtaaaagtgtgcactggtaccagcagaagccaggccaggcccctgtgctggtcgtctatgatgatagcgaccggccctcagggatccctgagcgattctctggctccaactctgggaacacggccaccctgaccatcagcagggtcgaagccggggatgaggccgactattactgtcagctgtgggatggtagtagtgatcatccggaggtggtattcggcggagggaccaagctcaccgtccta

SEQ ID NO: 4959 - DNA, 321 bp, synthetic construct
  source 1..321: mol_type = other DNA
gaaatcacactgacccagtctccatcttccgtgtctgcatctgtaggagacagagtcaccatcacttgtcgggcgagtcagggtattagcagctggttagcctggtatcagcagaaaccagggaaagcccctaagctcctgatctatgctgcatccagtttgcaaagtggggtcccatcaaggttcagcggcagtggatctgggacagatttcactctcaccatcagcagcctgcagcctgaagattttgcaacttactattgtcaacaggctaacagtttccctctcactttcggcggagggaccaaagtggatatcaaa

SEQ ID NO: 4960 - protein, 107 aa, synthetic construct
DTLMKQSPSSLLASVGDAVISSSAASKSSGSYLTWYQQKPGQAPRVLIYGASSRASGVPDRFSGSGSGTDFTLTISRLQPEDFATYFCQQSDSSPFTFGRGTKVEIK

SEQ ID NO: 4961 - protein, 118 aa, synthetic construct
SYELTQPPSVSVAPGQTASITCGGNNIGSKGVHWYQQKPGQAPVLVVYDDSDRPSGVYDDSDRPSGIPERFSGSNSGNTATLTISRVEAGDEADYYCQVWDSNSDLVVFGGGTKLTVL

SEQ ID NO: 4962 - protein, 107 aa, synthetic construct
DIQMTQSPSSLSASVGDRVTITCRSSQYVSNFLNWYQLKPGKAPMLLIYSASSLQDGVPSRFSGGGSGTDFTLTITNVEPADFATYSCQQTFGHPWTFGQGTKVEIK

SEQ ID NO: 4963 - protein, 111 aa, synthetic construct
DITVTQSPSSLSTSVGDRVTITCRANESISTFLSWYQLKPGKAPKLLIYAASSLPSTLQSGVPSRFSGSGSGTDFTLTISSLQPEDFATYFCQQSYSFPWTFGQGTKVEIK

SEQ ID NO: 4964 - protein, 109 aa, synthetic construct
PSEVTQEPSLTVSPGGTVTLTCGSSTGPVTTGHWPFWFQQRPGQAPRTLFCDTNYRQSWTPARFSGSLVGGKAALTLSGAQPEDEAVYYCLLDYTYFRIFGGGTKLTVL

SEQ ID NO: 4965 - protein, 110 aa, synthetic construct
DIQMTQTPSTLSASVGDRVTITCRASQSIDTWLAWYQQKPGKAPELLIYDVSSLKRGERGVPSRFSGSGSGTEFTLTISRLQPDDLATYYCQQYNSYPWTFGQGTKVEIK

SEQ ID NO: 4966 - protein, 107 aa, synthetic construct
ETTIKQSPSSLSALVGDRVTITCRASQSISRFLKWYQQKPGKAHKLMIHDVSTLQSGVPSRFSGSGCGTDFTLTISSLQPEDFATYYCQHYHSYPLTFGGGTKVEIK

SEQ ID NO: 4967 - protein, 108 aa, synthetic construct
EMTLTQSPATLSLSPGERATLSCRASQNINIYLAWYQQKPGQAPRLLIFGASTRASGIPDRFSGSGSGTDFTLTVRRLEPEDFAVYFCHQYSDSPPLTFGGGTKVEIK

SEQ ID NO: 4968 - protein, 107 aa, synthetic construct
EMAMTQSPSSMSASVGDRVTITCQASQDITDYLNWYQQKPGSAPKLLIYTAANLEAGVSSRFSGSGSGTHFTFTISGLQPEDVATYYCQQYNDFPYTFGQGTKVEIK

SEQ ID NO: 4969 - protein, 110 aa, synthetic construct
QSALTQPASVSGSAGQSITISCTGASGDIDTYNYVSWYQQEPGKAPKLMIYGVSNRPSGVSDRFSGSKSANTASLTISGLQPEDEADYYCSSYTRSNTVKFGGGTKLTVL

SEQ ID NO: 4970 - protein, 111 aa, synthetic construct
QSVLTQPPSVSGAPGRGVTISCTGSTSNIGGGYDVHWYQQLPGEAPKLLIYLNNNRPSGVPDRFSGSKSGTSASLAITGLQPVDEADYYCQSYDSSLSVWVFGGGTKLTVL

SEQ ID NO: 4971 - protein, 108 aa, synthetic construct
EIQMTQSPSSLSASVGDRVTITCRASQDISTYVNWYQQKPGGAPKLLIYAASTLQTGVPSRFTGSGSGTHFTLTITSLQPEDFATYSCQQTYSTHMSTFGQGTKVEIK

SEQ ID NO: 4972 - protein, 111 aa, synthetic construct
QSVLTQPPSVSGAPGQRVTISCTGSSSNIGTGYDVHWYQVLPGSAPKLLIYGYTKRPSGVPARFSGSRSGSSASLVITGLQAEDEADYYCQSYDNSLSASVFGGGTKLTVL

SEQ ID NO: 4973 - protein, 107 aa, synthetic construct [sequence omitted]

SEQ ID NO: 4974 - protein, 108 aa, synthetic construct
EIMLTQSPGTLSLSPGERATLSRRARQSVGSGFLAWYQQKPGQAPRLLIYAGSGRAPGIPDRFSGSGFGTDFTLTLSRLEPEDFAVYYCQQYGSSPYTFGQGTKVDIK

SEQ ID NO: 4975 - protein, 108 aa, synthetic construct
DIRLTQSPSSLSASVGDRVTITCRASQNIATFLNWYQKKPGKALKLLIYAASTLQSVVPPRFSGSGSGTDFTLTISSLQPDDFATYYCQQSYNTLSITFGQGTRLEIK

SEQ ID NO: 4976 - protein, 108 aa, synthetic construct
DIRLTQSPSSLSASVGDRVTITCRASQTVNSYLNWYQQRPGKAPKLLIYAASTLETGVPSRFTGSGSGTDFTLTISGLQPEDFATYYCQQSYSTLELTFGGGTKVDIK

SEQ ID NO: 4977 - protein, 110 aa, synthetic construct
SYELTQPPSVSVAPGQTASITCGGNNIADQIVHWYQQKPGQAPVLVVFDDRERPSGIPERFSGSHSGNTATLTISRVEAGDEGDYYCQVWDRSGHHPVFVFGTGTKVTVL

SEQ ID NO: 4978 - protein, 107 aa, synthetic construct
EIPMTQSPATLSLAPGDRATLSCRASQSVGTYLGWYQQRPGQAPRLLIFDASHRATDIPARFSGSGSGTNFTLTISSLEPEDFVVYYCHQRRNWPPTFGQGTKVEIK

SEQ ID NO: 4979 - protein, 110 aa, synthetic construct
SLFLTQPASVSGSPGQSITISCTGASSDVGGYNFVSWYQQHPGKTPKLILYEVFNRPSGVSSRFSGSKSGSTASLTISGLQDEDEADYYCCSYTSRSTYVFGTGTKVTVL

SEQ ID NO: 4980 - protein, 107 aa, synthetic construct
EIPMTQSPSTLSASVGDRVTITCRASQSIGPWLAWYQQKPGKAPELLIYKASSIETGVPSRFSGSWSGTEFTLTISSLQASDFATYYCQQYSAYPYTFGQGTKVEIK

SEQ ID NO: 4981 - protein, 107 aa, synthetic construct
EIQMTQSPPSLSASVGDSVTITCRASQSISRYLHWYQQKPGKAPKVLIYAASYLQSGVPSRFSGSGSGTDFSLTISGLQPEDLATYYCQQSYTTPLTFGGGTKVEIK

SEQ ID NO: 4982 - protein, 108 aa, synthetic construct
EMTVTQSPSSLSASVGDRVTISCRASQYINNYLNWYQQKPGKAPKLLIYAASTLQTGVPSRFSGSGSGTDFSLTISSLHPEDFATYYCQQSYNTPPLTFGGGTKVEIK

SEQ ID NO: 4983 - protein, 108 aa, synthetic construct
DIRMTQSPSSLSASVGDRVTITCRASQSIGGYLNWYQQKTGRAPRLLIFAASRLQSGVPSRFSGSGSGTEFTLTISGLQPDDFATYYCQQTYIMPPWTFGQGTKVEIK

SEQ ID NO: 4984 - protein, 107 aa, synthetic construct
DIQMTQSPSSLSASIGDRVTITCRASQNISTYLNWYQQKPGTAPNLLIYAAASLHSGVPSRFSGSGSGTDFTLTISSLEREDFATYYCQQSYSTPITFGLGTRLEIK

SEQ ID NO: 4985 - protein, 114 aa, synthetic construct
DIVMTQSPLSLSVTPGQSASISCESSKSLLHSGDGKTYLYWYLQRPGQPPQLLIYEVSKRFAGVPDRFTGSGSGTDFTLKISRVEAEDVGIYYCMQSIQLPPFTFGQGTKVEIK

SEQ ID NO: 4986 - protein, 108 aa, synthetic construct
EITLTQSPGTLSLSPGERATLSCRASESVSSEHLAWHQQRPGQAPRLLIYGASKRPTGIPDRFSGSGSGTDFTLTISRLEPEDFAVYYCHQFASAPITFGQGTRLEIK

SEQ ID NO: 4987 - protein, 110 aa, synthetic construct
QPVMTQPPSASGSPGQSVTISCTGTSSDVGDSNYVSWYQQHPGNPPKLIIYEVNKRPSGVPDRLSGSKSGNTASLTVSGLLPEDEAHYYCSSNAGVTALIFGGGTKVTVL

SEQ ID NO: 4988 - protein, 108 aa, synthetic construct
EIVMTQSPSSLSASVGDRVTITCRASQTINSYLNWYQHKPGKAPKLLIYGASTLLSGVPSRFSGSESGTDYTLTINGLQPEDFATYYCQQTYSTPPWTFAQGTKVDIK

SEQ ID NO: 4989 - protein, 108 aa, synthetic construct
DIQMTQSPSSLSASVGDRVTITCRTSLNIKNYLNWYQQKPGKAPKLLIYAASTLQSGVPSRFRGSGSGTDFTLTISGLQPEDFATYFCQQSYVTPPWTFGQGTKVEIK

SEQ ID NO: 4990 - protein, 111 aa, synthetic construct
QSVLTQPPSVSLAPGQTARITCGGDNIGSYRVHWYQRKPGQAPILVVYDDSDRPSGIPERFSGSTSGNTATLTISGVEAGDEADYYCQVWDTSRSTHHRGVFGAGTKLTVL

SEQ ID NO: 4991 - protein, 106 aa, synthetic construct
DIVLTQSPSSLSASIGDRVTFTCRASQSINNYLNWYQQKPGKAPKLLIYAASTLQSGVPSRFAGSGSGTDFTLTITSLQPEDYATYYCQQSYRSRTFGQGTKVEIK

SEQ ID NO: 4992 - protein, 107 aa, synthetic construct
EIVLTQSPGTLSLSPGERATLACRASQSVTSSLAWFQQKPGQAPRLLVYDASTRATGIPDRFSGSGSGTDFTLTISRLEREDFAVYYCQQFARSPRTFGQGTKVEIK

SEQ ID NO: 4993 - protein, 107 aa, synthetic construct
DIPVTQSPSTLSASVGDRVTITCRASQSINNRLAWYQQKPGRAPKLLISKAFTLESGVPSKFSGSGSGTEFTLTISSLQPDDFATYYCQQYNRYTWTFGPGTKVDIK

SEQ ID NO: 4994 - protein, 108 aa, synthetic construct
EIGMTQSPSSLSASVGDRVTITCRASQSISSSYLNWYQQKPGKAPNLLIYAASSLDAGVPSRFSASGSGTDFTLTISSLQPEDFATYYCQQSHRAPATFGQGTKVEIK

SEQ ID NO: 4995 - protein, 106 aa, synthetic construct
SSVLIQPPSVSVSPGQTASITCSGDLLANTYARWFQQKPGQAPVLFIYKDNERPSGIPERFSGSSSGTTVTLTISGAQVDDEAVYYCYSAAGNNREFGGGTKLTVL

SEQ ID NO: 4996 - protein, 111 aa, synthetic construct
QSVLTQPPSVSGAPGQTVTISCTGSSSNIGAGHDVHWYQQLPGTAPRLLMFDNNRPSGVPDRFSGSKSGTSASLAITGLQAEDEADYYCQSYDSSLSIYYVFGTGTKLTVL

SEQ ID NO: 4997 - protein, 108 aa, synthetic construct
DIRLTQSPSSLCASVGDRVSITCRASQGISNSLAWYQQKPGKAPKFLLYGASTLESGVPSRFSGSGCGTDFTLTISSLQPEDFAIYYCQQYYSTPPRTFGQGTKVEIK

SEQ ID NO: 4998 - protein, 107 aa, synthetic construct
DIPMTQSPSSLSASVGDRVTITCQASQDIGTYLSWYQQKPGKAPKLLIYDASNLETGVPSRFSGSGSGTGSTLTISGLQPEDFATYYCQQYKSFPPTFGGGTKVEIK

SEQ ID NO: 4999 - protein, 107 aa, synthetic construct
EIELTQSPSSLSASVGDRVTITCRASHGITDSLAWYQQKPGKAPRLLLYAASSLETGVPSRFSGSGFGTDFTLTITSLQPEDFATYYCQQYYSPPNAFGQGTKVEIK

SEQ ID NO: 5000 - protein, 107 aa, synthetic construct
DIQVTQSPSSLSASVGDRVTITCRASHDISKSLAWYQQTLGKAPKLLLYAASTLESGVPSRFRGSGSGTDFTLTISSLQPEDFATYYCQQYYGSPRTFGQGTKVDIK

SEQ ID NO: 5001 - protein, 110 aa, synthetic construct
SYELIQPPSASGTPGQRVTISCSGSSSNIGSNFVYWYQQLPGTAPRLLIYRENLRPSGVPDRISGSKSGTSVSLAISGLRAEDEADYYCAAWDDSLSGVVFGGGTKVTVL

SEQ ID NO: 5002 - protein, 111 aa, synthetic construct
QSVLTQPPSVSGAPGQRVTISCTGTTSNIGAGYDAHWYQQVPGSAPKLIIYRNTNRPSGVPDRFSGSKSDTSASLAITGLQAEDEADYYCQSYDSSLTGVVFGGGTKLTVL

SEQ ID NO: 5003 - protein, 108 aa, synthetic construct
DIPMTQSPSSLSASVGDRVSFTCRAAQSIGTYLNWYQQKPGKAPKLLIYAASTLHSGVPSRFSGSGSGTDFTLTINSLQPEDFATYYCQQSYVTPSITFGPGTRLEIK

SEQ ID NO: 5004 - protein, 108 aa, synthetic construct
DIQLTQSPGSLSLSPGERATLFCRASQSVRSSYLAWYQQKPGQAPRLLIYGPSSRATGIPARFSGSGSGTDFSLTISRLEAEDVAVYYCQQYGDSPWTFGQGTKVEIK

SEQ ID NO: 5005 - protein, 107 aa, synthetic construct
EIVVTQSPSSLSASVGDRVTIICRASQSIDNYLNWYQQKPGKAPELLIYAASGLHIGVPSRFSGSGSGTDFTLTISGLQPEDFATYYCQQSHSIPITFGQGTRLEIK

SEQ ID NO: 5006 - protein, 107 aa, synthetic construct
QSVVTQPPSVSVSPGQTARITCSGDLVEKKYVRWFQQKPGQAPVLVIYRDRERPSGIPERFSGSNSGTTVTLTISGAQVEDEADYFCYSAADNNLGVFGGGTKVTVL

SEQ ID NO: 5007 - protein, 108 aa, synthetic construct
YYELTQPPSVSVAPGQTARITCGGKNIGGQSVQWYQQKPGQAPVLVVYDDSDRPSGIPERLSGSKSGTTATLTITRVEAGDEADYSCQVWDSSSDHPGFGGGTKVTVL

SEQ ID NO: 5008 - protein, 107 aa, synthetic construct
EIALTQSPATLSLSPGERATLSCRASQNVSNYLGWYQHKPGQAPRLLIYDASRRATGIAARFSGSGSGTDFTLTISSLEPEDFVVYYCQQRSNWPLTFGGGTKVEIK

SEQ ID NO: 5009 - protein, 108 aa, synthetic construct
EMTLTQSPSFLSASVGDRVAITCRASQGISSFLAWYQQRPGKAPKLLIFGASTLQSGVPLRFSGSGSVTEFTLTISGLQPEDSATYYCQHLDSYPRYTFGQGTKVEIK

SEQ ID NO: 5010 - protein, 108 aa, synthetic construct
DIGMTQSPSSLSASVGDRVTITCRASQGITNSLAWYQQRPGKAPTLLLYAASTLESGVPPRFSGGGSGTVFTLTISSLQPEDFATYYCQQYYSPPPRTFGQGTKVEIK

SEQ ID NO: 5011 - protein, 108 aa, synthetic construct
DIQMTQSPSSLPASVGDRVTITCRASQMIRTFLNWYQQKPGKAPKLLIYGASSLQSGVPSRFSGTGSGTDFTLTISSLQPEDFAIYYCQQSYSTPPWTFGQGTKVEIK

SEQ ID NO: 5012 - protein, 110 aa, synthetic construct
QSVLTQPASVSGSPGQSITISCTGTSSDIGAYNYVSWYQQYPGKAPKLIIYEVTYRPSGISGRFSGSKSGNTASLTISGLQAEDEADYYCSSYRSSTSPSFGGGTKLTVL

SEQ ID NO: 5013 - protein, 109 aa, synthetic construct
ETTLTQSPGTLSVFPGERATLSCRASQSISDSRYLAWYQQKPGQAPRLLIYGASTRATGIPDRFSGSGSGTDFTLTVSRLEPEDFAVYYCQHYGSSLWTFGQGTKVEIK

SEQ ID NO: 5014 - protein, 110 aa, synthetic construct
QSVLTQPPSASGTPGQRVTISCSGHFSNIGDNTVNWYQQVPGTAPKLLIHNNNQRPSGVPDRFSGSKSGTSASLAISGLQSEDEADYYCAVWDDSLDGPVFGGGTKVTVL

SEQ ID NO: 5015 - protein, 107 aa, synthetic construct
EITLTQSPSSLSASVGDRVTITCRASQNIVGYLNWYQQKPGKAPELLIYAASTLQRGVPSRFSGSGSETDFTLTISSLQPEDIATYYCQQSHSTPFTFGPGTKVEIK

SEQ ID NO: 5016 - protein, 107 aa, synthetic construct
DIEMTQSPSSVSASVGDRVTITCRASQDIRSRLGWYQQKSGKAPKLLIFDASSLESGVPSRFSGSGYGTDFTLTISSLQPEDFATYYCLQANSFSLAFGPGTKVEIK

SEQ ID NO: 5017 - protein, 107 aa, synthetic construct
EIQLTQSPSSLSASLGDRVTITCRAGHSIRNYLNWYQQKPGTAPKLLIYVSSSLQSGVPSRFSGSGSGTDFTLTISSLQPEDSATYYCQQSFSPPYTFGQGTKVDIK

SEQ ID NO: 5018 - protein, 107 aa, synthetic construct
DIQVTQSPSSMSASVGDRVTITCRASQGISNYLAWFQQKPGKVPKRLIYGASSLQAGVALRFSGSGSGTEFTFTITSLQPEDFATYYCLQHNSSPITFGQGTRVEIK

SEQ ID NO: 5019 - protein, 107 aa, synthetic construct
EIVMTQSPSSLSASVGDRVAITCQASQDIRSFLNWYQHKPGKAPKLLIYAASNLEIGVPSRFSGSGSGTDFTFTISSLQPEDFATYYCQQFDILPWTFGQGTKVDIK

SEQ ID NO: 5020 - protein, 111 aa, synthetic construct
SYELTQPPSVSGAPGLRVTISCTGSDSNIGAGYDVHWYRQLPGTAPKLLIYGDNNRPSGVPDRFSGSKSGISASLAITGLQAEDEADYYCQSYDSSLSGSVFGGGTKLTVL

SEQ ID NO: 5021 - protein, 106 aa, synthetic construct
EMTLTQSPPSLAASVGDRVTITCRASQNINNWLAWYQQKPGKAPKLLIFDASSLEGGVPSRFSGSGSGTEFTLTISSLQPDDFATYYCQQYKTYSTFGQGTKVDIK

SEQ ID NO: 5022 - protein, 105 aa, synthetic construct
YYVLTQPPSVSVAPGQTARITCGGSDIGSKGVHWYQQRPGQAPVLVVNDDTDRPSGIPERFLGSNSGNTATLTISRVEAGDEADYYCQVWDVGAVFGGGTKVTVL

SEQ ID NO: 5023 - protein, 108 aa, synthetic construct
EMTLTQSPSYLSASAGDRVTITCRASQGINNFLAWYQQKPGKAPKLLIYGASTLQSGVPLRFSGSGSETEFTLTISSLQPEDFATYYCQHLDSYPRYTFGQGTKVEIK

SEQ ID NO: 5024 - protein, 107 aa, synthetic construct
DIRMTQSPSSLSTSVGDRVTITCRASQGISNSLAWYQQRPGRAPKLLLYGASTLESGVASRFSGSGSGTDFTLTISSLQPEDFATYYCQQYYGPPHTFGQGTKVEIK

SEQ ID NO: 5025 - protein, 108 aa, synthetic construct
EIVMTQSPGTLSLSPGERATLSCRASQSVSSGHLAWYQQRPGQAPRLLIYGTSNRATGIPDRFSGSGSGTDFILTISRLESEDIAVYYCQQSVNFPRTFGQGTKVEIK

SEQ ID NO: 5026 - protein, 106 aa, synthetic construct
EIVVTQSPSSLSASVGDRVTITCRASQGITNSLAWYQQKPGKAPKLLLYSASTLEGGVPSRFSGSGSGTDFILTIDSLQPEDFATYYCQQYYILRTFGQGTKVEIK

SEQ ID NO: 5027 - protein, 111 aa, synthetic construct
QSVLTQPPSVSGAPVQRVTISCTGSNSNLGAGYDVHWYQKLPGTAPKLLIYGNNNRPSGVPDRFSGSKSGTSASLAIAGLQAEDEADYFCQSYDSSLSSSLFGGGTKLTVL

SEQ ID NO: 5028 - protein, 107 aa, synthetic construct
DITMTQSPSSLSASVGDRVTITCQASHDISDYLNWYQQKPGKAPKLLIYDVLNLKTGVPSRFSGSGSGTHFTFTISSLQPEDIATYYCQQYNDFPYTFGQGTKVEIK

SEQ ID NO: 5029 - protein, 108 aa, synthetic construct
DIQLTQSPSSLSASVGDRVTITCRASQSIMRYLNWYQQRPGKAPKLLIYAASTLQSGVPSRFSGSGSGTDFRLTISSLQPEDYATYYCQQSYSSPPWTFGPGTKVEIK

SEQ ID NO: 5030 - protein, 108 aa, synthetic construct
EIQLTQSPSSLSASIGDRVIITCRASQNINSYLNWYQQKPGKAPKLLIYAASSLQSGVPSRFSGSGSKTNFTLTITSLQPEDFATYYCQQSYSIPPITFGPGTKVDIK

SEQ ID NO: 5031 - protein, 109 aa, synthetic construct
QSVLTQPASVYGSPGQSITISCTATSSDVGSYNYVSWYQLHPGKAPKLLIYEVSNRPSGVFNRFFGSKSGNTASLTISGLQAEDEADYYCSSYTHDSTVFGGGTKLTVL

SEQ ID NO: 5032 - protein, 107 aa, synthetic construct
EIQLTQSPSSLSASVGDRVTITCRASQAIGNYVAWFQQQPGKAPKSLIDAASNLQGGVSSRFSGSGSGTDFTLTISSLQPEDFATYYCQQYKTYPLTFGGGTKVEIK

SEQ ID NO: 5033 - protein, 108 aa, synthetic construct
EIVLTQSPGTLSLSPGERATLSCRASQSVRSDYLAWYQLKPGQAPRLLIYTVSSRATGIPDRFSGSGSGTDFTLTISRLEPEDFAVYYCQQYGTSPWTFGQGTKVEIK

SEQ ID NO: 5034 - protein, 107 aa, synthetic construct
DIQMTQSPSSLSASVGDRVTITCRASQGIRTYLAWFQQKPGEAPKSLIEGASNLQSGVSSKFSGSGSGTDFTLTISSLQPEDFATYYCQQYKSFPLTFGGGTKVEIK

SEQ ID NO: 5035 - protein, 111 aa, synthetic construct
QSVLTQPPSASGSPGQSVTISCTGTNSDVGGHNSVSWYQHHPGKAPKLVIFEVNKRPSGVPDRFSGSKSGNTASLTVSGLQADDEADYYCTSYADTGDCVLFGGGTKVTVL

SEQ ID NO: 5036 - protein, 108 aa, synthetic construct
EMTLTQSPATLSLSPGERADLSCRASQSVSRKLAWYQQKPGQAPRLLIYDASTRATGIPARFTGSGSGTEFTLTISSLQSEDFAIYYCLQYNNWPPLTFGGGTKVDIK

SEQ ID NO: 5037 - protein, 110 aa, synthetic construct
QSKLTQPPSAFGTPGQRVTISCCGSSSNLGSNCVNWYQQLPRTAPKLLVYSNNQRPSGVPDRFSGSKSGTSASLAISGLQSEDEADYYCATWDDSVTGPVFGGGTKLPVL

SEQ ID NO: 5038 - protein, 107 aa, synthetic construct
DIPMTQSPSSLSASVGDRVTITCRASQDISNSLAWYQQKPGKAPKFLLYAASVLESGVPSRFSGRGSGTNFTLAISSLQPEDFATYYCQHYYSNPRTFGQGTKVEIK

SEQ ID NO: 5039 - protein, 108 aa, synthetic construct
DIQMTQSPSSLSAFVGDRISITCRASQSINNYLNWYQHKPGRAPKLLIYAASSLQSGVPSRFSGSGSGTDFTLTISSLQPEDFATYYCQQSYTLPGATFGGGTKVEIK

SEQ ID NO: 5040 - protein, 107 aa, synthetic construct
EIVMTQSPATLSVSPGERATLSCRASQSISSNLAWYQQKFGQAPRLLIYGISTGATGTPARFRGSGSGTEFTLTISSLQSEDFAVYYCQQYNHWPGTFGQGTKVEIK

SEQ ID NO: 5041 - protein, 111 aa, synthetic construct
QSVLTQPPSVSGAPGHRVTISCTGSSSNIGAGYDVHWYQQLPGTAPKLLIYSNNNRPSGVPDRISGSRSDTSASLAITGLQAEDEADYFCQSYDSNVFGKVLGEGTKLTVL

SEQ ID NO: 5042 - protein, 109 aa, synthetic construct
QPVLTQPASVSGSPGQSITISCTGTSSDLGNFNYVSWYQQHPGKGPKLMIYEFSNRPSGVSHRFSGSKSGNTASLTISGLQPEDEADYYCSSYTTDSVVFGGGTKVTVL

SEQ ID NO: 5043 - protein, 107 aa, synthetic construct
DIAMTQSPSSLSASVGDRVTISCRASQSIFSYLNWYQQKPGKAPKLLIFGASTLQSGVPSRFSGSGSGTDFTLTISSLQPEDLATYSCQQSYSSMWTFGQGTKVEIK

SEQ ID NO: 5044 - protein, 111 aa, synthetic construct
QSELTQPPSTSGTPGQRVTISCSGSSSNIGGNVVNWYQQLPGTTPKVLIYNNNQRPSGVPDRFSGSKSGTTASLAISGLQSEDEADYYCAAWDDSLNGPLVFGGGTKLTVL

SEQ ID NO: 5045 - protein, 108 aa, synthetic construct
EMTITQSPSSLSASVGDRITITCRASQSIRGHLNWYQHKPGKAPKLLIYDSSSLQSGVPSRFSGSGSGTDFTLTISSLQPEDFATYYCQQSYSTPPWTFGQGTKVEIK

SEQ ID NO: 5046 - protein, 111 aa, synthetic construct
QSVLTQPPSVSGAPGQRVTISCTGSNSNIGAGYDVHWYRQLPGTAPQLIFYGNTNRPSGVPDRFSASKSGTSASLAITGLQADDEADYYCQSYDSSLSGVIFGGGTKVTVL

SEQ ID NO: 5047 - protein, 106 aa, synthetic construct
EIVMTQSPSTLSASVGDRVTITCRARQSISNWLAWYQKKPGKAPTLLIYKVSTLESGVPSRFSGSGSGTEFTLTISSLQPDDFATYYCQQSSSYYTFGQGTKVDIK

SEQ ID NO: 5048 - protein, 108 aa, synthetic construct
DIQMTQSPSSLSASVGDRVTITCRASQTISRYLNWYQQRPGKAPKLLIYGASTLQSGVPSRFSGTGSGTDFTLTIGSLQPEDFATYYCQQSYSSPPWTFGPGTKVDIK

SEQ ID NO: 5049 - protein, 107 aa, synthetic construct
DIVLTQSPSSVSASVGDRVTITCRASQDISSYLAWYQQRPGKAPKLLIFAASSLESGVPSRFSGSGSRTDFTLTISSLQPEDFATYYCQQAHSFPWTFGQGTKVDIK

SEQ ID NO: 5050 - protein, 108 aa, synthetic construct
EIPLTQSPSSLSASVGDRVTLTCRASQSIDNYLNWYQQKPGKAPKLLIYGASSLQSGVPSRFSGSGSGTDFTLTISSLQPEDFATYLCQQSYGPPPTTFGQGTRLEIK

SEQ ID NO: 5051 - protein, 107 aa, synthetic construct
DIGMTQSPSSLSASVGDRVTITCRASQTINSYLNWYQQKPGTAPKLLIYAASSLQSGVPSRFSGSGSETHFTLTITNLQPEDFATYYCQQTHSPPRAFGQGTKVEIK

SEQ ID NO: 5052 - protein, 103 aa, synthetic construct
EIVMTQSPATLSLSPGDRATLSCRASQSFNNYLAWYQQKPGQAPRLLIYDASNRATGIPARFSGSGSGTDFTLTISSVEPEDFAIYYCQHRSNFGQGTRLELK

SEQ ID NO: 5053 - protein, 107 aa, synthetic construct
EIPMTQSPSSLSASVGDRVTITCRASQSISGYLNWYQQKAGKAPKLLIYGASSLQSGVPARFSGSGSGTDFTLTINTLQPDDFATYYCQQSYDYPRTFGQGTKVDIK

SEQ ID NO: 5054 - protein, 107 aa, synthetic construct
EIVMTQSPSSLSASVGDRVTITCRASQSIRDFLNWYQQKPGKAPKLLIYSTSNLQSGVPSRFSGSGSGTDFTLTISSLQPEDFATYYCQESYTTPPAFGQGTKVEIK

SEQ ID NO: 5055 - protein, 111 aa, synthetic construct
QSELTQPPSASGTPGQRVSISCSGTNSNIGGNTVNWYQQLPGTAPKLLIYNNYQRPSGVPDRFSGSKSGTSASLAISGLQSEDEAEYYCATWDDSLDGHNVFGTGTKLTVL

SEQ ID NO: 5056 - protein, 111 aa, synthetic construct
QFVVTQPPSVFGAPGQRVTISCTGSNSNIGAGYDVHWYQQLPGTAPKLLIYDNNNRPSGVPDRFSGSKFDTSASLAITGLQAEDEADYYCQSYDSSLSDSVFGGGTQLTVL

SEQ ID NO: 5057 - protein, 107 aa, synthetic construct
EITLTQSPSTLSASVGDRVTITCRASQSISRWLAWYQQKPGKSPNLLIYKASSLQSGVPARFSGSASGTEFTLTISRLQPDDFATYYCQQYDTYPWTFGQGTKVEIK

SEQ ID NO: 5058 - protein, 108 aa, synthetic construct
EIPMTQSPSFLSASVGDRVTITCRASQGIPSFLAWYQQKPGKAPKLLISGVSTLQSGVPLRFSGSGSGTEFTLTISSLQPEDFATYYCQYLDTYPRYTFGQGTKVDIK

SEQ ID NO: 5059 - protein, 108 aa, synthetic construct
EIELTQSPSPLSASVGDRVTITCRASQSIGKYLNWYQQKPGRAPKLLIYATSRLQSGVPSRFSGSGSGTDFTLTISSLQPEDFATYYCQQSYSMPPWTFGQGTKVEIK

SEQ ID NO: 5060 - protein, 108 aa, synthetic construct
DITLTQSPSSLSASVGDRVTITCRASQSIGTYLNWYQWKPGKAPKFLIYAASSLQSGVPSRFSGSGSGTEFTLTISSLQPEDFATYYCQQSYINPQVTFGQGTRLEIK

SEQ ID NO: 5061 - protein, 110 aa, synthetic construct
SYELTQPLSASGTPGQRVTISCSGGSSNIGSYPVSWYHQLPGTAPKLLIYNNNQRPSGVPDRFSGSKSGTSASLAISGLQSEDEADYYCAAWDDSLNGYVFGTGTKLTVL

SEQ ID NO: 5062 - protein, 108 aa, synthetic construct
ETTLTQSPSSVSASVGDTVTITCRASQSIHTYLNWYQQKPGKARKLLIYAASSLQSGVPSRFSGSGSGTDFTLTISSLQPEDFATYYCQQSYSSPPWTFGQGTKVDIK

SEQ ID NO: 5063 - protein, 107 aa, synthetic construct
EMTITQSPATLFVSPGDRATLSCRASQSVSSNLAWYQQKPGQAPRLLIYGASTRATDIPARFSGSGFGAEFTLTISSLQFEDFAVYYCQQYNNWPRAFGQGTKVEIK

SEQ ID NO: 5064 - protein, 107 aa, synthetic construct
EMTMTQSPSSLSASVGDRVTITCQAGQDISNHLSWYQQEPGKAPKLLIYDASNLETGVPSRFTGSGSGTDFTFTISSLQPEDVTTYYCQQYEDLPPTFGGGTKVDIK

SEQ ID NO: 5065 - protein, 108 aa, synthetic construct
SHELTQPPSVSVSPGQTARITCSGDALPSQYAYWYQQKPGQAPLLMIYKDIERPSGIPERFSGSSSGTTVTLTISGVQAEDEADYFCQSSDNTGTYVVFGGGTKLTVL

SEQ ID NO: 5066 - protein, 107 aa, synthetic construct
DIGMTQSPSSLSAAVGDRVTITCRASQTISNYLNWYQQRPGKGPKLLIYVASSLQSGVPSRFSGSRSGTDFTLTISSLQPEDFATYYCQQSYSTPPTFGQGTKVEIK

SEQ ID NO: 5067 - protein, 108 aa, synthetic construct
EIVLTQSPSSLSASVGDRVTITCRASQSITRYLNWYQHKPGNAPKLLIYAASTLQSGVPSRFSGSGSGTDFTLTINSLQPEDFATYYCQQSYSMPPWTFGQGTKVEIK

SEQ ID NO: 5068 - protein, 108 aa, synthetic construct
DIQMTQSPSSLSASVGDRVTITCRASQSITRYLNWYQHKPGNAPKLLIYAASTLQSGVPSRFSGSGSGTDFTLTINSLQPEDFATYYCQQSYSMPPWTFGQGTKVEIK

SEQ ID NO: 5069 - protein, 111 aa, synthetic construct
QSVLTQPPSVSGAPGQRVTIPCSGSNSNIGAGYDVHWYQQLPGTAPKLLIYRNNNRPSGVPDRFSGSKSATSASLAITGLQAEDEADYYCQSYDSSLSGVVFGEGTKLTVL

SEQ ID NO: 5070 - protein, 108 aa, synthetic construct
QYVLTQPPSVSVSPGQTARITCSGDALPRKYAHWYQQKSGQAPVLVIHEDRERPSGIPERFSGSRSGTVATLTISGAQVEDEADYYCYSTDSSGTQGVFGGGTKLTVL

SEQ ID NO: 5071 - protein, 107 aa, synthetic construct
DIRMTQSPSSLSAAVGDRVTITCRASQTISNYLNWYQQRPGKGPKLLIYVASSLQSGVPSRFSGSRSGTDFTLTISSLQPEDFATYYCQQSYSTPPTFGQGTKVDIK

SEQ ID NO: 5072 - protein, 107 aa, synthetic construct
EMTLTQSPSSLSAYVGDRVTITCRASQIITAYLNWYQQKPGKAPNLLIYAASNLQSGVPSRFSGSGSGTDFTLTISSLQPEDFATYYCQQSYTTPYTFGQGTKVEIK

SEQ ID NO: 5073 - protein, 108 aa, synthetic construct
EITLTQSPSSLSASVGDRVTITCRASQSISTYLNWYQQKPGKAPQLLIYAVSSLKSGVPSRFSGSGSGTDFTLTISSLQPEDSAAYYCQQSYTTPALTFGGGTKVDIK

SEQ ID NO: 5074 - protein, 107 aa, synthetic construct
EIPVTQSPSSVSASVGDRVTITCRASQHFSNWLAWYQLKPGKAPKLLIYAASTLQSGVPSRFSGSGSGTDFTLTISSLLPEDFATYYCQQANSFPYTFGQGTKVEIK

SEQ ID NO: 5075 - protein, 107 aa, synthetic construct
DIRMTQSPSTLSASVGDRVTITCRASQSISGWLAWSQQKPGKAPKLLIYGASTLGSGVPSRFSGSGFGTEFTLTISSLQPDDFATYYCQQYKSYSYTFGQGTKVEIK

SEQ ID NO: 5076 - protein, 110 aa, synthetic construct
QFVLNQPASVSGSPGQSITISCTGTSSDVGDYNYVSWYQHHPGTAPKLMIYEVTNRPSGDSDRFSGSKSGNTASLTISGLQAEDEADYYCSSYTSSNTLVFGTGTKLTVL

SEQ ID NO: 5077 - protein, 109 aa, synthetic construct
EIVMTQSPGSLSLSPGERATLSCRASQSISRTYLAWYQQKPGQAPRLLIYATSTRATGIPDRFSGSGSGTDFTLTISRLEPEDFAVYYCQQYGSSPMYTFGQGTKVDIK

SEQ ID NO: 5078 - protein, 107 aa, synthetic construct
EMPMTQSPSTLSASVGDRVTITCRASQSIGSRLAWYQQKPGKAPSLLIYKASSLESGVPSRFSGSGSGTEFTLTISSLQPDDLATYFCQQYNSYSLTFGGGTKVEIK

SEQ ID NO: 5079 - protein, 107 aa, synthetic construct
DIQLTQSPSSLSASVGDRVTITCQASQDISNYLNWYQQKPGKAPKLLIYDASNYDTGVPSRFSGTGSGTDFTFTISSLQPEDIAIYFCQQYDSLPLTFGGGTKVEIK

SEQ ID NO: 5080 - protein, 112 aa, synthetic construct
DIQLTQSPDSLAVPLGERATINCKSSQSVFSSSNNRNNLAWYQQRPGQPPKLLIYWASTRESGVPDRFSGSGSGTDFTLTISSLQAEDVAVYYCQQYYSWYSFGQGTKVEIK

SEQ ID NO: 5081 - protein, 108 aa, synthetic construct
DITMTQSPSSLSASVGDRVTITCRASQNINGYLNWYQQKPGKGPKVLIYAASTLQSGVPSRFSGSGSGTDFTLTISSLQPEDFATYYCQQSYESPPWTFGQGTKVDIK

SEQ ID NO: 5082 - protein, 108 aa, synthetic construct
EMTLTQSPGTLSLSPGERATLSCRASQSVGSGFLAWYQQKPGQAPRLLIYAASGRAPGIPDRFSGSGSGTDFTLTISRLEPEDFAVYYCQQYGSSPYTFGQGTKVDIK

SEQ ID NO: 5083 - protein, 112 aa, synthetic construct
NYVLTQPPSASGTPGQRVTISCSGNRSNIGDNYVYWYQQFPGTAPKLLIYKNNQRPSGVPDRFSGSKSGTSASLAISGLRSEDEADYYCASWHNGLSGSNWAFGGGTKLTVL

SEQ ID NO: 5084 - protein, 108 aa, synthetic construct
DITLTQSPSSLSASVGDRVTITCRASQNINSYLNWYQHRPGIAPKLLIYAASSLHSGVPSRFSGSGSGTDFTLTISSLQPEDFATYYCQQSYSISPYTFGQGTKVEIK

SEQ ID NO: 5085 - protein, 107 aa, synthetic construct
QHVLTQPPSLSVAPGRTARITCGGNNIGTKSVHWYQQRPGQAPVMVIYYDSDRPSGIPERFSGSNSGNTATLTISRAEAGDEADYYCQVWDSRGVYVFGTGTKVTVL

SEQ ID NO: 5086 - protein, 107 aa, synthetic construct
DIQLTQSPSFLSASVGDRVTITCRASQGFGSYVAWYQQKPGKAPKLLTYAASPLQSGVPSRFSGSGSGTEFTLTISSLQPEDFATYFCQQLNSYPITFGGGTKVEIK

SEQ ID NO: 5087 - protein, 107 aa, synthetic construct
DIRVTQSPSSLSASVGDRVTITCRASQGIRNDLGWYQQHPGKAPKLLISAASSLETGVPSRFSGSGSGTDFTLTITSLQPEDFATYYCLQDYSNFWTFGQGTKVEIK

SEQ ID NO: 5088 - protein, 109 aa, synthetic construct
EMTMTQSPSTLSASVGDRVTITCRASQSISNWLAWYQQKPGKAPKLLIYMTSRLEGGVPSRFSGSGSGTEFTLTISSLQPDDFATYYCQHYNSYSEMYTFGQGTKVEIK

SEQ ID NO: 5089 - protein, 111 aa, synthetic construct
QPVVTQPPSVSGAPGQRVTISCTGTNSNIGAGYDVHWYQLLPGTPPKLLIYRNTNRPSGVPDRFSGSKSGTSASLAITGLQAEDEADYYCQSYDSSLSGSVFGGGTKLTVL

SEQ ID NO: 5090 - protein, 113 aa, synthetic construct
ETTLTQSPDSLAVSLGERATINCKSSQSVLSSSNNRNYLSWYQHKPGQPPKLLIYWASTRQSGVPDRFSGSGSGTDFTLTISSLQPEDVAVYYCQQYYSSPYTFGQGTKVDIK

SEQ ID NO: 5091 - protein, 111 aa, synthetic construct
QSVLTQPPSVSGAPGQRVTISCTGSNSNIGAGYDVHWYQQLPGSAPKLLIYDNANRPSGVPDRFSGSKSDTSASLAITGLQAEDEADYYCQSYDSSLIGSVFGTGTKLTVL

SEQ ID NO: 5092 - protein, 108 aa, synthetic construct
DIVMTQSPSSLSASVGDRVTITCRASQSVRTYLNWYQHKPGKAPKLLIYGASSLQSGVPSRFSGSGSGTDFTLTITSLQPEDFATYYCQQSYSTPPLTFGGGTKVEIK

SEQ ID NO: 5093 - protein, 108 aa, synthetic construct
QHVLTQPPSVSVAPGQTARVTCGGNNVGSTSVHWYQQKPGQAPVLVVYGDRDRPSGIPERFSGSKSGNTATLTISRVEAGDEADYYCQVWDSSTDHWVFGGGTKVTVL

SEQ ID NO: 5094 - protein, 107 aa, synthetic construct
EIVMTQSPSSLSASVRDRVTITCRASQSISSHLSWYQQRPGKAPKLLIYAASTLQSGVPSRFSGSGSGTDFTLTITSLQPEDFATYYCQQSFSTPPTFGQGTKVDIK

SEQ ID NO: 5095 - protein, 107 aa, synthetic construct
EIVLTQSPSSLSASVGDRVTITCRASQSISSYLNWFQQKPGKAPKLLIYAASTLQRGVPSRFSGSESGTDFTLTISSLQPEDFANYFCQQSYSSPLTFGGGTKVEIK

SEQ ID NO: 5096 - protein, 109 aa, synthetic construct
EMTMTQSPGTLSVSPGERATLSCRASQSVDSNLAWYQQKPGQAPRLLIYDASTRATGIPARFSGSGSGTEFILTISSLQSEDFAVYFCQQYNDWPPGYTFGQGTKVEIK

SEQ ID NO: 5097 - protein, 108 aa, synthetic construct
QSVLTQPPSVSVAPGQTARITCGGNNIGSRSVHWYQQKPGHAPVLVVYTNSDRPSGIPERFSGSNSGNTATLTISRVDAGDEADYYCQVWDSASDQVVFGGGTKLTVL

SEQ ID NO: 5098 - protein, 108 aa, synthetic construct
EIVMTQSPSSLSASVGDRVTITCRASQSITTYLNWYQQNPGKAPNLLIYAASRLQSGVPSRFSGSGSGTNFTLTISSLQPEDFATYYCQQSYNIPQLTFGGGTKVDIK

SEQ ID NO: 5099 - protein, 107 aa, synthetic construct
EMTMTQSPSSLSASVGDRVTIACRASQSISNYLNWYQQKPGKAPKLLIFDATSLQSGVPSRFSGSGSGTDFTLTISSLQPEDFATYSCQQSYTTWVTFGQGTKVEIK

SEQ ID NO: 5100 - protein, 108 aa, synthetic construct
EMTLTQSPGTLSVSPGERATLSCRASQSISSNLAWYQQKPGQAPRLLIFGASARATGVPARFSGSGSGTEFTLTISSLQSEDFAVYYCQHYYDWPPYTFGQGTKVEIK

SEQ ID NO: 5101 - protein, 107 aa, synthetic construct
DIQMTQSPSSLSASVGDSVTITCRASQDISNFLAWYQQKPGKVPRLLIYAASTLQSGVPSRFSGSRSGTDFTLTITSLQPEDVATYYCQKYYNVPWTFGQGTKVDIK

SEQ ID NO: 5102 - protein, 107 aa, synthetic construct
DIQMTQSPSSLSASVGDRVTITCRASQSISDYLNWYQQKPGRAPKLLIYAASSFQSGVPLRFTGSGSGTDFTLTISSLQPEDFATYYCQQSYSIPLTFGGGTKVEIK

SEQ ID NO: 5103 - protein, 108 aa, synthetic construct
SYELTQPPSVSVAPGKTARITCGGNNIGSKSVYWYQQKPGQAPVLVIYYHSDRPSGFPERFSGFNSGSTATLTISGVEAGDEADYYCQVWDSGNNHVVFGGGTKVTVL

SEQ ID NO: 5104 - protein, 107 aa, synthetic construct
EIVLTQSPSSLSASVGDRVTITCQASQDIDNFLNWYQQKPGKAPKLLIFDVSNLETGVPSRFSGSGSGTDFTFTISSLQPEDFATYYCQHYDNLKFTFGPGTKVEIK

SEQ ID NO: 5105 - protein, 111 aa, synthetic construct
QSVLTQPPSVSGAPGQRVTISCTGTNSNIGAGYDVHWYQRLPGTAPKLLIYVNNNRPSGVPDRFSGSKSGTSASLAITGLQAEDEADYYCQSYDSSLSSSLFGGGTQLTVL

SEQ ID NO: 5106 - protein, 111 aa, synthetic construct
QSVLTQPPSVSGAPGQRVTISCTGSDSNIGAGYDVHWYQQLPGTAPKLLIYINTNRPSGVPDRFSGSKSGTSASLAITGLLAEDEADYYCQSYDSSLSDSVFGGGTKLTVL

SEQ ID NO: 5107 - protein, 108 aa, synthetic construct
ETTLTQSPGTLSLSPGERATLSCRASQSVRSGYLAWYQQKPGQAPRLLIYGSSSRATGIPDRFSASGSGTDFTLTISRLEPEDFAVYFCQQYGTSPWTFGQGTKVDIK

SEQ ID NO: 5108 - protein, 109 aa, synthetic construct
EIVMTQSPSTLSASVGDRVTITCRASQTISSWLAWYQQKPGKAPKLLIYMTSRLESGVPSRFSGSGFGTEFTLTISSLQPDDFATYYCQHYNSYFEMYTFGQGTKVEIK

SEQ ID NO: 5109 - protein, 108 aa, synthetic construct
ETTLTQSPGTLYLSPGERATLSCRASLSVSAGYLAWYRQKPGQAPRLLIYGASSRATGIPDRFSGSGSGTDFTLTISRLEPEDFAVYYCQQYGTSPITFGQGTRLEIK

SEQ ID NO: 5110 - protein, 112 aa, synthetic construct
EMTLTQSPLSSHVTLGQPASISCRSSESLVHSDGNTYLNWLQQRPGQPPRLLIYKISKRFSGVPDRFIGSGAGTDFTLKISRVEAEDVGVYYCTQATEFPQTFGQGTKVEIK

SEQ ID NO: 5111 - protein, 107 aa, synthetic construct
EIPMTQSPSSLSASVGDRVTITCRASQSISSYLNWYQQKGGKAPKLLIYAASSLESGVPARFSGSGSGTDFTLTIRSLQPEDFATYYCQQSYTTPRTFGQGTKVEIK

SEQ ID NO: 5112 - protein, 106 aa, synthetic construct
DIQMTQSPSSLSASVGDRVTVTCRASQSISTFLNWYQQKPGKAPKLLIYAASSLQSGVPSRFSGSGSGTDFTLTISGLQPEDFAIYYCQQSYSTPSFGQGTRLEIK

SEQ ID NO: 5113 - protein, 107 aa, synthetic construct
DIGMTQSPSTLAASVGDRVTITCRASQSISTWLAWYQQKAGKAPNLLIYKASTLESGVPSRFSGSGSGTEFTLTISSLQPDDFATYYCQQYNNYPITFGQGTRLEIK

SEQ ID NO: 5114 - protein, 109 aa, synthetic construct
ETTLTQSPGTLSLSPGERATLSCRASQSVSTTYLAWYQQKPGQAPRLLIYGASNRATGIPDRFSGGGSGTDFTLTISRLEPEDFAVYYCQQYRSPPRLTFGGGTKVEIK

SEQ ID NO: 5115 - protein, 106 aa, synthetic construct
ETTLTQSPATLSLSPGERATLSCRASQSVSDYLAWYQQKPGQAPRLFISDASNRAAGIPARFSGSGSGTDFTLTISSLEPEDFAVYYCQQRHNRLTFGGGTKVEIK

SEQ ID NO: 5116 - protein, 108 aa, synthetic construct
EIPMTQSPSSLSASVGDRVTITCRASQSISRFFNWYQQKPGKAPKLLIYNASSLQSGVPSRFSGSGSGTDFTLTISSLQPEDFATYYCQQSYNTPPWTFGQGTKVDIK

SEQ ID NO: 5117 - protein, 111 aa, synthetic construct
QSVLTQPPSVSAAPGQRVTISCTGSNSNIGAGYDVHWYQQLPGTAPKLLIYDNINRPSGVPDRFSGSKSDTSASLAITGLQAEDEADYYCQSYDSSLSDSVFGAGTKLTVL

SEQ ID NO: 5118 - protein, 107 aa, synthetic construct
DIQMTQSPSSLSASVGDRVTITCRASQTVSKYLNWYQQKPGKAPKLLIYAASSLQSGVPSRFSGSGSGTDFTLTISSLLPEDFATYYCQQSYSTPRTFGQGTKVEIK

SEQ ID NO: 5119 - protein, 110 aa, synthetic construct
QSVLTQPPSASGSPGQSVTISCTGSSSDVGGYNYVSWYQQHPGKAPKLIIFEVTKRPSGVPDRFSGSKSGNTASLTVSGLQAEDEANYYCSSYAGSNIVVFGGGTKLTVL

SEQ ID NO: 5120 - protein, 103 aa, synthetic construct
EIPMTQSPSSLSASVGDRVTITCQASQHINNYLNWYQQKPGKAPKLLISDASNLETGVPSRFSGSRSGTDFSFTISSLQPEDIATYYCQHSRTFGPGTKVEIK

SEQ ID NO: 5121 - protein, 111 aa, synthetic construct
QSVLTQPPSASGTPGQRVTISCSGSNSNIGSNTVSWYQKLPGTAPKLLISTNNQRPSGVPDRFSGSKSGTSASLAISGLQSEDEADYYCAAWDDSLSGHVVFGGGTKVTVL

SEQ ID NO: 5122 - protein, 107 aa, synthetic construct
DIRMTQSPSSLSASVGDRVTITCQASQDITTYLNWYQQKPGKAPKLLIYDASSLESGVPSRFSGSGSGTDFTFTISRLQPEDIATYYCQQYDNLPYTFGQGTKVDIK

SEQ ID NO: 5123 - protein, 110 aa, synthetic construct
SYELTQPPSASGTPGQRVTISCSGSSSNIGSNTVNWYQQLPGTAPKLFIYNKNRRPSGVPDRFSASKSGTSASLAISGLQSEDEADYYCAAWDDSLNGVVFGGGTKLTVL

SEQ ID NO: 5124 - protein, 111 aa, synthetic construct
QSVLTQPPSVSGAPGQRVTISCTGSNSNIGAGYDVHWYQQLPGTAPKLLISVNSNRPSGVPDRFSGSRSGTSAFLAITGLQAEDEADYYCQSYDSSLSGSLFGGGTKLTVL

SEQ ID NO: 5125 - protein, 108 aa, synthetic construct
EIPMTQSPSSLSASVGDRVTITCRASQSISSYLNWYQQKPGKAPKLLIYAASKLHGGVPSRFRGSGSGTDFTLTISSLQPEDFATYYCQQSYSSPPWTFGPGTKVDIK

SEQ ID NO: 5126 - protein, 111 aa, synthetic construct
QSVLTQPPSVSGAPGQRVTISCTGSNSNIGAGYDVHWYQQLPGRAPKLLIYVNNNRPSGVPDRFSGSKSDTSASLAITGLQAEDEADYYCQSYDSSLSASVFGGGTKVTVL

SEQ ID NO: 5127 - protein, 108 aa, synthetic construct
EMTLTQSPSSLSASVGDRVTITCRASQSISSYLHWYQQKPGKAPKLLIYAASTLHTGVPSRFSGGGSGTDFTLTISSLQPEDFATYYCQQSYSNPQVTFGQGTRLEIK

SEQ ID NO: 5128 - protein, 107 aa, synthetic construct
DIVMTQSPSSLSASVGDRVTITCRASQSVSNYLNWYQQKPGKAPNLLIYAASSLQSGVPSRFSGSGSGTDFTLTITSLQPEDFATYHCQQSYTTPYTFGQGTKVEIK

SEQ ID NO: 5129 - protein, 106 aa, synthetic construct
DIVMTQSPSTLSASVGDRVTITCRASQSISNWLAWYQQKPGKVPKLLISRASSLESGVPSRFSGSRSGTEFTLTISSLQPDDFATYYCQQSNSPWTFGQGTKVEIK

SEQ ID NO: 5130 - protein, 107 aa, synthetic construct
EIRLTQSPSSLSASVRDRVTITCRASQSISSHLSWYQQRPGKAPKLLIYAASSLQTGVPSRFSGSGSGTDFTLTISSLQPEDFATYYCQQSFSTPPTFGQGTKVDIK

SEQ ID NO: 5131 - protein, 107 aa, synthetic construct
DIRMTQSPSTLSASVGDRVTITCRASQSISTWLAWYQQKPGKAPNVLIYKASTLKSGVPSRFSGSGSGTEFTLTISSLQPDDFATYYCQQYNTYSEAFGQGTKVEIK

SEQ ID NO: 5132 - protein, 107 aa, synthetic construct
EIVMTQSPSSLSASVGDRVTITCQASQDIRNYLNWYQQKPGKAPKVLIYDASNLEAGVPSRFSGSGSGTDFSFTISSLQPEDIATYYCQQYDNLPLTFGGGTKVEIK

SEQ ID NO: 5133 - protein, 106 aa, synthetic construct
EITMTQSPSSLSASVGDRVTITCQASQDIRNYLNWYQQKPGKAPKVLIYAASDLETGVPSRFSGSGSGTDFTLTISSLQPEDIATYYCQQYDNLYTFGQGTKVEIK

SEQ ID NO: 5134 - protein, 107 aa, synthetic construct
DIPMTQSPSSLSASVGDRVTITCRASQSINSYLNWYQQKPGKAPKFLIYAASTLQSGVPSRFSGSGSETHFTLTISSLQPEDFATYYCQQTYIPPRTFGQGTKVEIK

SEQ ID NO: 5135 - protein, 115 aa, synthetic construct
DIPMTQSPDSLAVSLGERATINCKTSQSVLDRSDNRNYLAWYQQKPGQPPKLLIYWASTRESGVPDRFSGSGSGTDFTLTISSLQAEDVAVYYCQQCSVTPPMCSFGQGTKVEIK

SEQ ID NO: 5136 - protein, 107 aa, synthetic construct
DIQMTQSPSSLSASVGDRVTITCRASQNINTYLNWYQQKPGKAPKVLIYAASSLQSGVPSRFTGSGSGTDFTLTISSLQPEDFATYYCQQSYSSPRTFGQGTKVEIK

SEQ ID NO: 5137 - protein, 107 aa, synthetic construct
DITLTQSPSSLSASVGDRVTFTCQASQDINNFLNWYQQKPGKAPKLLIFDVSNLETGVPSRFSGSGSGTDFTFTISSLQPEDIATYYCQHYDNLKFTFGPGTKVEIK

SEQ ID NO: 5138 - protein, 107 aa, synthetic construct
EIVMTQSPSSLSASVGDRVTITCRASQSIYNYLNWYQQKPGKAPKLLIYGASSLQSGVPSRISGSGSGTDFTLTISSLQPEDFATYYCQQSYSTPGTFGGGTKVDIK

SEQ ID NO: 5139 - protein, 108 aa, synthetic construct
EIVLTQSPGTLSLSPGERATLSCRASQSVSSNYLAWYQQKPGQAPRLLISDASSRAAGIPDRFSGSGSGTDFTLTIGRLEPEDFAVYYCQQYGSSPGSFGQGTKVEIK

SEQ ID NO: 5140 - protein, 113 aa, synthetic construct
DMTLTQSPDSLAVSLGERATINCKSSQSVLSSSNNKNYLTWYQQKPGRPPKLLIYWASTRESGVPDRFSGGGSGTDFTLSISSLQAEDVAVYYCQQSYSPPYTFGQGTKVEIK

SEQ ID NO: 5141 - protein, 107 aa, synthetic construct
EIVMTQSPSSLSASVGDRVTITCQASQDIFNYLTWYQQKPGKAPKLLIYDASNLETGVPSRFSGSGSGTDFTLTISSLQPEDIATYSCQQYYNLPPTFGGGTKVEIK

SEQ ID NO: 5142 - protein, 111 aa, synthetic construct
QSVLTQPPSVSGAPGQRVTISCTGSNSNIGAGYDVHWYQQLPGTAPTLLISINSNRPSGVPDRFSGSKSGTSASLAITGLQAEDEADYYCQSYDSSLSGSVFGGGTKVTVL

SEQ ID NO: 5143 - protein, 107 aa, synthetic construct
DIPLTQSPSSVSASVGDRVTITCRASQDISGWLAWYQQKPGKAPRLLIYAATTLQSGVPSRFSGSGSGTDFTLTISSLQPEDFATYYCQQANTFPRTFGQGTKVDIK

SEQ ID NO: 5144 - protein, 107 aa, synthetic construct
DIPVTQSPSSLSASVGDRVTITCRASQSISSFLNWYQHKPGKAPKLLIYAVSSLQSGVPSRFSGSEYGTDFTLTISSLQPEDFATYYCQQNYNSPLTFGGGTKVEIK

SEQ ID NO: 5145 - protein, 111 aa, synthetic construct
QSVLTQPPSVSGAPGQRVTISCTGSNSNIGAGYDVHWYQQLPGTAPKLLIYDNTNRPSGVPDRFSGSKSGTSASLTITGLQAEDEADYYCQSYDSSLIGSLFGGGTQLTVL

SEQ ID NO: 5146 - protein, 108 aa, synthetic construct
DIQMTQSPSSLSASVGDRVTITCRASQSISRYLNWYQQKPGKAPKLLIYAAFILQSGVPSRFSGSGSGTDFTLTISSLQPEDFATYYCQQSYSAPPWTFGRGTKVDIK

SEQ ID NO: 5147 - protein, 106 aa, synthetic construct
DIRVTQSPSSLSASVGDRVTITCRASQAISNSLAWYQQKPGKAPKLLLYAASTLESGVPPRFSGSGSGTDFTLTISSLQPEDFATYYCQQYYTFRTFGQGTKVDIK

SEQ ID NO: 5148 - protein, 110 aa, synthetic construct
EIVMTQSPATLSLSPGERATLSCRASQSVTNYLAWYQQKPGQAPRLLIYDTSNRAIGIPARFSGSGSGTDFTLTISSLEPEDFAVYYCQLRNNWPPGALTFGGGTKVEIK

SEQ ID NO: 5149 - protein, 106 aa, synthetic construct
DITMTQTPATLSVSPGERATLSCRASQSVSGNLAWYQQKPGQAPRLLIYGATTRASGIPARFSGSESGTEFTLTISSLQSEDFAVYYCQQYNNWLTFGGGTKVEIK

SEQ ID NO: 5150 - protein, 108 aa, synthetic construct
ETALTQSPGTLSLSPGERATLSCRASESVSSGYLAWYQQKPGQAPRLLIFGAASRATGIPDRFSGSGSGTDFTLTISRLEPEDFAVYYCQQYHNSPRTFGQGTKVEIK

SEQ ID NO: 5151 - protein, 107 aa, synthetic construct
EIGMTQSPSSLSASVGDRVTITCRASQSISSYLNWYQQKPGKAPKLLIYTASSLQSGVPSRFSGSGCGTDFTLTISSVQREDFATYYCQQSYSTPLTFGQGTKVEIK

SEQ ID NO: 5152 - protein, 108 aa, synthetic construct
EMTLTQSPSSLSASVGDRVTITCRASQTINRYLNWYQQKPGKAPKLLIYAASTLQSGVPSRFSGSGSGTDFTLTISSLQPEDFATYYCQQSYVLPMYTFGQGTKVEIK

SEQ ID NO: 5153 - protein, 107 aa, synthetic construct
DIVLTQSPSSLPASVGDRVTITCRASQSISSYLNWYQQKPGKAPKLLIYGASSLHTGVPSRFSGSGSGTDFTLTISSLQPEDFATYYCQQSYSTPRTFGQGTKVDIK

SEQ ID NO: 5154 - protein, 108 aa, synthetic construct
EIVLTQSPSSLSASVGDRVTITCRASQSIGTYLNWYQQKPGKAPKLLIYTASSLQSGVPSRFSGSGSGTDFTLTISSLQPEDFATYYCQQSYNTPPWTFGQGTKVEIK

SEQ ID NO: 5155 - protein, 108 aa, synthetic construct
DIQMTQSPSSLSASVGDRVTITCRASQTISTYLNWYQQKPGKAPKLLIYAGSTLQSGVPSRFSGSGSGTDFTLTISSLQPEDFATYYCQQSDTTPQITFGGGTKVEIK

SEQ ID NO: 5156 - protein, 108 aa, synthetic construct
DITLTQSPSTLSASVGARVTITCRASQSINTWLAWYQQKPGNAPKLLIYDASSLESGVPSRFSGSGSGTEFTLTISSLQPDDFATYYCQQYHSFSPLTFGGGTKVEIK

SEQ ID NO: 5157 - protein, 112 aa, synthetic construct
EIVMTQSPLSLPVTPGEPASISCRYTQSLLLSNGYNYLDWYLQKPGQSPQLLIYLGSHRASGVPDRFSGSGSGTDFTLKISRVEAEDVGVYYCMQALQTPQTFGQGTKVDIK

SEQ ID NO: 5158 - protein, 108 aa, synthetic construct
DIQMTQSPSSLSASVGDRITITCRASQSISTYLNWYQQKPGKAPNLLIYAASSLQSGVPSRFSGSGSGTDFTLTISSLQPEDFAIYYCQQSYNIPQLTFGGGTKVEIK

SEQ ID NO: 5159 - protein, 111 aa, synthetic construct
QPVLTQPPSVSGAPGQRVTISCTGSNSNIGAGYDVHWYQQLPGTAPKLLIFVNSNRPSGVPDRFSGSKSDTSASLAITGLQAEDEADYYCQSYDSSLSGVVFGGGTKVTVL

SEQ ID NO: 5160 - protein, 111 aa, synthetic construct
QSVVTQPPSVSGAPGQRVTISCTGSNSNIGAGYDVHWYQQLPGTAPKLLIYDNNNRPSGVPDRFSGSKSDTSASLAITGLQAEDEADYYCQSYDSSLIGSVFGTGTKLTVL

SEQ ID NO: 5161 - protein, 111 aa, synthetic construct
QSVVTQPPSVSGAPGQRVTISCTGSNSNIGAGYDVHWYQQLPGTAPKLLISVNNNRPSGVPDRFSGSKSGTSASLAITGLQAEDEADYYCQSYDSSLSGSVFGGGTKLTVL

SEQ ID NO: 5162 - protein, 111 aa, synthetic construct
QSVLTQPPSVSGAPGQRVTISCTGSNSNIGAGYDVHWYQQLPGTAPKLLIYINTNRPSGVPDRFSGSKSGTSASLAITGLQAEDEADYYCQSYDSSLSGSVFGGGTKLTVL

SEQ ID NO: 5163 - protein, 106 aa, synthetic construct
DMTMTQSPSFLSASVGDRVTITCRASQGISSYVAWYQQKPGKAPKLLMYAASSLQGGVPSRFSGSGSGTEFTLTISSLQPEDFATYYCQQLSGYFTFGGGTKVEIK

SEQ ID NO: 5164 - protein, 108 aa, synthetic construct
SYVLTQPPSVSVAPGQTARITCGEDGIGSKSVHWYQQKPGQAPVLVVYDDSDRPSGIPERFSGSNSGNTATLTISRVEAGDEADYYCQVWGFSGDHWVFGGGTKLTVL

SEQ ID NO: 5165 - protein, 111 aa, synthetic construct
SSELSQQPSVSGAPGQRVIISCTGSNSNIGAGYDVHWYQQLPGTAPKLLIYGNTNRPSGVPDRFSGSKSDTSASLAITGLQAEDEADYYCQSYDSGLTGSLFGGGTKLTVL

SEQ ID NO: 5166 - protein, 111 aa, synthetic construct
QSGLTQPPSVSGAPGQRVTISCTGSNSNIGAGYDVHWYQQLPGTAPKLLISVNSNRPSGVPDRFSGSKSGTSASLAITGLQAEDEAAYYCQSYDSSLSDSVFGGGTKVTVL

SEQ ID NO: 5167 - protein, 106 aa, synthetic construct
SHVLTQPPSVSVSPRQTARITCSGDAFPNQYAYWYQQKPGQAPVLVIYKDNERPSGIPERFSGSSSGTTVTLTISGVQAEDEADYYCQTADSSRVVFGGGTKLTVL

SEQ ID NO: 5168 - protein, 110 aa, synthetic construct
QPMLTQPHSVSESPGKTVTISCTRNSGSIASNYVQWYQQRPGSAPTTVIFEDKQRPSGVPDRFSGSIDSSSNSASLTISGLKTEDEADYYCQSSHNSKGVFGGGTKLTVL

SEQ ID NO: 5169 - protein, 108 aa, synthetic construct
EIEMTQSPSSLFASVGDRVTITCRASQGISNSLAWYQQKPGKAPKLLLYAASTLESGVPSRFSGSGSGTDFTLTISSLQPEDFSTYYCQQYYSNLGRTFGQGTKVDIK

SEQ ID NO: 5170 - protein, 109 aa, synthetic construct
EIQMTQSPSSLSASIGDRVTITCRASQSISRYLNWYQQKPGKAPELLIYAASSLQSGVPSRFSGSGSGTDFTLTISSLHPEDFATYYCQQSYSHPPEGSFGQGTKVEIK

SEQ ID NO: 5171 - protein, 107 aa, synthetic construct
DMRMTQSPSSLSASVGDRVTITCRASQGISNYLAWYQQKPGKVPKLLIHGASTLQSGVSYRFSGSGSGTDFTLTISSLQPEDVATYYCQKYNTAPCTFGQGTKVEIK

SEQ ID NO: 5172 - protein, 108 aa, synthetic construct
EIRLTQSPSSLPASVGDRVTITCRASQDISNSLAWYQQKPGKAPKLLLYAASTLESGVPSRFSGSASGTDYTLTISSLQPEDFATYYCQQYYSTPPFTFGQGTKVEIK

SEQ ID NO: 5173 - protein, 110 aa, synthetic construct
QHVLTQPPSASGTPGQRVTISCSGSSSNIGSNSVNWYQQLPGTAPKPLIYINNRRPSGVPDRFSGSKSGTSASLAISGLQSEDEADYYCASWDDSLNGLVFGGGTKLTVL

SEQ ID NO: 5174 - protein, 107 aa, synthetic construct
DIQMTQSPSTLSASVGDRVAITCRASQSISRWLAWYQQKPGKAPNLLIYKASTLESGVPSRFSGSGSGTEFTLTISSLQPDDFATYYCQQYNSFSWTFGQGTKVEIK

SEQ ID NO: 5175 - protein, 111 aa, synthetic construct
QSVLTQPPSVSGAPGQRVTISCTGSGSNIGAGYDVHWYQQLPGTAPKLLIFRNSNRPSGVPDRFSGSMSGTSASLAITGLQAEDEADYYCQSYDSSLSGSIFGTGTKLTVL

SEQ ID NO: 5176 - protein, 109 aa, synthetic construct
ETTLTQSPATLSVSPGERATLSCRASQTISNNLAWYQQKPGQAPRLLIYGASTRATGIPARFSGSGSGTEFTLTISSLQSEDSAVYYCQHYDNWPPEYTFGQGTKVEIK

SEQ ID NO: 5177 - protein, 111 aa, synthetic construct
QSVVTQPPSVSGAPGQRVTISCTGSNSNIGAGYDVHWYQQLPGTAPKLLIYRNTNRPSGVPDRFSGSKSGTSASLAITGLQAEDEADYYCQSYDSSLTGSLFGGGTKLTVL

SEQ ID NO: 5178 - protein, 111 aa, synthetic construct
QSVVTQPPSVSGAPGQRVTISCTGSNSNIGAGYDVHWYQQLPGTAPKLLIYRNTNRPSGVPDRFSGSKSGTSASLAITGLQAEDEADYYCQSYDSSLTGSLFGGGTQLTVL

SEQ ID NO: 5179 - protein, 111 aa, synthetic construct
QSVLTQPPSVSGAPGQRVTISCTGSNSNIGAGYDIHWYQQLPGTAPKLLIYGNTNRPSGVPDRFSGSKSDTSASLAITGLQAEDEADYYCQSYDSSLSGVLFGGGTKLTVL

SEQ ID NO: 5180 - protein, 108 aa, synthetic construct
EMTLTQSPATLSVSPGERATLFCRASQSVSSSLAWYQQKPGQAPRLLIHGASTRATGIPARFSGSGSGTEFTLTISSLQSEDVAVYYCQQYNKWPPITFGQGTRLEIK

SEQ ID NO: 5181 - protein, 111 aa, synthetic construct
QSVVTQPPSVSGAPGQRVTISCAGSGSNIGAGYDVHWYQQLPGTAPKLLIYGNNNRPSGVPDRFSGSKSATSASLAITGLQAEDEADYYCQSYDSSLSDVIFGGGTKLTVL

SEQ ID NO: 5182 - protein, 107 aa, synthetic construct
EMTLTQSPPSLSASVGDRVSITCRASQSIGSYLNWYQQKPGKAPKLLIYATSSLQSGVPSRFSGSGSGTDFTLTISSLQPEDFATYYCQQSSSNFPTFGPGTKVDIK

SEQ ID NO: 5183 - protein, 111 aa, synthetic construct
QSVLTQPPSVSGAPGQRVTISCTGSSSNIGAGSDVHWYQQLPGTAPKLLIYTNTNRPSGVPDRFSGSKSGTSASLAITGLQAEDEADYYCQSYDTSLSGVVFGGGTKLTVL

SEQ ID NO: 5184 - protein, 109 aa, synthetic construct
QPVLTQPPSVSVSPGQTARITCSGEALPMQYTYWYQQKPGQAPVLVIYKDTERPSGIPERFSGSSSGTTVTLTISGVQAEDEADYYCQSADTSGNYRGVFGGGTKLTVL

SEQ ID NO: 5185 - protein, 108 aa, synthetic construct
ETTLTQSPGTLSLSPGERATLSCRASQSVSSGYLAWYQQKPGQAPSLLIYGASSRASGIPDRFSGSGSGTDFTLTITRLEPEDFAVYYCQQYAFSPLTFGGGTKVEIK

SEQ ID NO: 5186 - protein, 110 aa, synthetic construct
QFVLTQPPSASGSPGQSVTISCTGTSSDIGGYNYVSWYQQHPGKAPKLMAYEVNKRPSGVPDRFSGSKSGNTASLTVSGLQAEDEADYYCSSYAGSNTVVFGGGTKLTVL

SEQ ID NO: 5187 - protein, 107 aa, synthetic construct
EIGVTQSPSTLSASVGDRVTITCRASQSISTWLAWYQQKPGKAPNLLIYKASLLESGVPSRFSGSGSGTEFTLTISSLQPDDFATYYCQLYNSDSWTFGQGTKVEIK

SEQ ID NO: 5188 - protein, 107 aa, synthetic construct
DIVLTQSPSSLSASVGDRVTITCQATQDINNSLNWYQQKPGKAPRLLIYDASNLETGVPSRFSGSGSGTDFTFTISSLQPEDIATYYCQQYDIFGFTFGPGTKVDIK

SEQ ID NO: 5189 - protein, 107 aa, synthetic construct
EMTLTQSPATLSVSPGERATLSCRASQSISTTLAWYQQKPGQAPRLLMYGASTRATGIPARFSGSGSGTEFTLTISSLQSEDFAVYYCQHYNNWTPTFGQGTKVEIK

SEQ ID NO: 5190 - protein, 108 aa, synthetic construct
DIQMTQSPSSLSASVGDRVTITCRASQSIRSYLNWYQQKPGKAPKLLIYDASSLQSGVPSRFFGSGSGTDFTLTISSLQPEDFATYYCQQSYNTPPWTFGQGTKVEIK

SEQ ID NO: 5191 - protein, 111 aa, synthetic construct
QSVLTQPPSVSGAPGQRVTISCTGSNSNIGAGYDVHWYQQFPGTAPKLLIFRNSNRPSGVPDRFSGSKSGTSASLAITGLQAEDEADYYCQSYDSGLSGSVFGGGTKLTVL

SEQ ID NO: 5192 - protein, 111 aa, synthetic construct
QSVLTQPPSVSGAPGQRVTISCTGSNSNIGAGYDVHWYQQLPGTAPKLLIYRNTNRPSGVPDRFSGSKSGASASLAITGLQAEDEADYYCQSYDSSLSGSVFGGGTKVTVL

SEQ ID NO: 5193 - protein, 108 aa, synthetic construct
DIAMTQSPSSLSASVGDRVTFTCRASQSIGIYLNWYQQKPGKAPKLLIYAASTLQSGVPSRFSGSGSGTDFTLTISSLQPEDFATYYCQQSYTTPTWTFGQGTKVDIK

SEQ ID NO: 5194 - protein, 113 aa, synthetic construct
QSVLTQPPSVSGAPGQRVIISCTGSDSNIGAGYDVHWYQQLAGTAPKLLIYGNSNRPSGVPDRFSGSKSGTSASLAITGLQAEDEADYYCQSFDSSLSGPNYVFGTGTKLTVL

SEQ ID NO: 5195 - protein, 111 aa, synthetic construct
NFMLTQPHSVSESPGKTVTISCTRSSGGIVNNYVQWYQQRPGSSPTTVIYEDNQRPSGVPDRFSGSIDSSSNSASLTISGLKTEDEAVYYCQSYDTSNHGVFGGGTKLTVL

SEQ ID NO: 5196 - protein, 107 aa, synthetic construct
EMTMTQSPATLSVSPGERATLSCRASQSISTTLAWYQQKPGQAPRLLMYGASTRATGIPARFSGSGSGTEFTLTISSLQSEDFAVYYCQQYNNWTPTFGQGTKVEIK

SEQ ID NO: 5197 - protein, 107 aa, synthetic construct
EMTLTQSPSSLSASVGDRVTITCRPSQSISSFLNWYQQKPGRAPKLLIYAASSLQSGVPSRFSGSESGTDFTLTISSLQPEDFATYYCQQNYNSPLTFGGGTKVEIK

SEQ ID NO: 5198 - protein, 110 aa, synthetic construct
QSVVTQEPSFSVSPGGTVTLTCGLSSGSVSTSYYPSWYRQTPGQAPRTLIYNTKTRSSGVPDRFSGSILGNKAALTITGAQADDESDYHCMLYMGSGIWVFGGGTKLTVL

SEQ ID NO: 5199 - protein, 108 aa, synthetic construct
SYELTQPPSVSVAPGQTARITCGGNNIGSKSVHWYQLKAGQAPVLVVYDDSDRPSGIPERFSGSKSGNTATLIISRVEAGDEADYYCHVWDSSSDHWVFGGGTKLTVV

SEQ ID NO: 5200 - protein, 108 aa, synthetic construct
SYELTQPPSVSVAPGQTARIPCGGNNIGSKSVHWYQQKPGQAPVLVVYDDRDRPSGIPERFSGSSSGNTATLTLSRVEAGDEADYYCQVWDSSSDLVIFGGGTKVTVL

SEQ ID NO: 5201 - protein, 106 aa, synthetic construct
YYELTQPPSVSVSPGQTARITCSGDTLPTQYAYWYQQKPGQAPVLVIYKDSERPSGIPERFSGSTSGTTVTLTISGVQAEDEADYYCQSADSSDIRFGGGTKLTVL

SEQ ID NO: 5202 - protein, 107 aa, synthetic construct
DIPVTQSPSSLSASVGDRVTITCRASQSISSFLNWYQQKPGKAPKLLIYAVSSLQSGVPSRFSGSESGTDFTLTISSLQPEDFATYYCQQNYNSPLTFGGGTKVDIK

SEQ ID NO: 5203 - protein, 110 aa, synthetic construct
NFMLTQPHSVSESPGKTVTISCTRSSGSIASNYVQWYQQRPGSSPSTVIYEDNQRPSGVPDRFSGSIDSSSNSASLTISGLQTDDEADYYCQSYDSSLWVFGGGTKLTVL

SEQ ID NO: 5204 - protein, 108 aa, synthetic construct
ETTLTQSPGTLSLSPGERATFSCRASQSVSSSHLAWYQQKPGQAPRLLIYGASSRATGIPDRFSGSGSGTDFTLTISRLEPEDVAVYYCQQYRSSPWTFGQGTKVDIK

SEQ ID NO: 5205 - protein, 107 aa, synthetic construct
ETTLTQSPGTLSLSPGERVTLSCRASQSVSSSYLAWYQQKPGQAPRLLISGASSRAPGIPDRFSGSGSGTDFTLTISRLEPEDFAVYYCQQYVTSPTFGQGTKVEIK

SEQ ID NO: 5206 - protein, 108 aa, synthetic construct
EIPMTQSPSSLSASVGDRVTITCRASQSISTYLNWYQQKPGKAPKLLIYAASSLHSGVPSRFSGSGSGTDFTLTISSLQPEDLATYYCQQSYSTPPLTFGGGTKVEIK

SEQ ID NO: 5207 - protein, 109 aa, synthetic construct
EMALTQSPATLSLSPGEGATLSCRASQSVSTYLAWYQQKPGQAPRLLIYGASNRATGIPARFSGSGSGTDFTLTISSLEPEDFAVYYCQQRTNWPRMYTFGQGTKVEIK

SEQ ID NO: 5208 - protein, 110 aa, synthetic construct
SYELTQPPSVSVAPGQTARITCGGNEIGSKSVHWYQQKPGQAPVLVVNDDSDRPSGIPERFSGSNSGNTATLTISRVEAGDEADYYCQVWDSISHHFNWVFGGGTKLTVL

SEQ ID NO: 5209 - protein, 107 aa, synthetic construct
EIQLTQSPSSLSASVGDRVTITCQASQDITNYLNWYQQKPGKAPKLLIYDASNFETGVPSRFSGSGSGTDFTFTISSLQPEDIAIYYCQQFDSLPLTFGGGTKVEIK

SEQ ID NO: 5210 - protein, 108 aa, synthetic construct
EIRMTQSPSSLSASVGDRVTITCRASQSISSYLNWYQQKPGKAPKLLIYAASTLQSGVPSRFSGSGFGTDFTLTISSLQPEDFATYHCQQSYIMPPWTFGQGTKVEIK

SEQ ID NO: 5211 - protein, 108 aa, synthetic construct
DIQMTQSPSSLSASVGDRVTITCRASQRISSYLNWYQQKVGKAPKLLIYAASSLQSGVPSRFSGSGSGTDFTLTISSLQPEDFATYYCQQSYVMPPWTFGQGTKVEIK

SEQ ID NO: 5212 - protein, 110 aa, synthetic construct
QSVLTQPPSASGTPGQRVTISCSGSSSNIGSNSVNWYQQLPRTAPKLLVYSNNQRPSGVPDRFSGSKSGTSASLAISGLQSEDEADYYCATWDDSLTGPVFGGGTKVTVL

SEQ ID NO: 5213 - protein, 109 aa, synthetic construct
ETTLTQSPATLSLSPGERATLSCRASQSVSNYLAWYQQKPGQAPRLLIYDASNRATGIPGRFSGSGSGTDFTLTISGLEPEDFAVYYCQLRSNWPPRLSFGGGTKVEIK

SEQ ID NO: 5214 - protein, 113 aa, synthetic construct
DIVMTQSPDSLAVSLGERATINCKSSQSVLYSSNSQNYLAWYQQKPGQPPKLLLYWASTRESGVPDRFSGSGSGTDFTLTISSLQAEDVAVYYCQQYYSTPLTFGQGTKVDIK

SEQ ID NO: 5215 - protein, 108 aa, synthetic construct
EMTLTQSPGTLSLSPGERATLSCRASQSVSSTYLAWYQQKAGQAPRLLIYGASSRATGIPDRFSGSGAGTDFTLTISRLEPEDFAVYYCQQYGYAPWTFGQGTKVEIK

SEQ ID NO: 5216 - protein, 106 aa, synthetic construct
EIVLTQSPSTLSASVGDRVTITCRASQSISSWLAWYQQKPGKAPKVLIYKATNLESGVPSRFSGSGSGTEFTLTISSLQPDDFATYYCQQYNSYYTFGQGTKVEIK

SEQ ID NO: 5217 - protein, 107 aa, synthetic construct
EIVLTQSPSTLSASVGDRVTITCRASQSISSWLAWYQQKPGKAPNLLIYKASSLENGVPSRFSGSGSGTEFTLTITSLQPDDFATYYCQQYNSFPYTFGQGTKVEIK

SEQ ID NO: 5218 - protein, 107 aa, synthetic construct
EMTMTQSPSTVSASVGDRVTITCRASQSISNWLAWYQQKPGRAPKLLIYKASSLESGVPSRFSGSGSGTEFTLTISSLQPDDFATYYCQQYSSYPRTFGQGTKVEIK

SEQ ID NO: 5219 - protein, 108 aa, synthetic construct
EIQMTQSPSSLSASVGDRVTITCQASQDISNSLHWYQQKPGKAPKLLIYDASNLETGVPSRFSGSGSGTDFTLTISSLQPEDIATYYCQQYDNLPSYTFGQGTKVEIK

SEQ ID NO: 5220 - protein, 108 aa, synthetic construct
EIAMTQSPSSLSASVGDRVTITCRASQGISNSLAWYQQKPGKAPKLLLYAASTLESGVPSRFSGSGSGTDFTLTISSLQPEDFSTYYCQQYYSNLGRTFGQGTKVDIK

SEQ ID NO: 5221 - protein, 110 aa, synthetic construct
SYELTQPPSASGTPGQRVTISCSGSSSNIGSNTLNWYQQLPGTAPKLLIYNNNQRPSGVPDRFSGSKSGTSASLAIRGLQSEDEADYYCAAWDDSLNGYVFGTGTKLTVL

SEQ ID NO: 5222 - protein, 107 aa, synthetic construct
DIQMTQSPSSLSASVGDRVTITCRASQRISSYLNWYQQKPGKAPKLLIYAASTLHSGVPSRFSGSGSGTDFTLTISSLQPEDFATYYCQQSYSTPITFGPGTRLEIK

SEQ ID NO: 5223 - protein, 110 aa, synthetic construct
SYELTQPPSVSVAPGQTARITCGGNDIGSKNVHWYQQKPGQAPVLVVYDDSDRPSGIPERFSGSNSGNTATLTISRVEGGDEADYYCQLWDSTGDHPEVLFGGGTKLTVL

SEQ ID NO: 5224 - protein, 112 aa, synthetic construct
EIVMTQSPLSLPVTPGEPASISCRSSQSLLHSNGHNYLDWYLQKPGQSPQLLIYLASNRASGVPDRFSGSGSGTDFTLRISRVEAEDVGVYYCMQALQTPITFGQGTRLEIK

SEQ ID NO: 5225 - protein, 106 aa, synthetic construct
EMTLTQSPATLSVSPGGRATLSCRASQSVSNNLAWYQQKPGQAPRLLIYGASTRATGIPARFSGSGSGTEFTLTISSLQAEDFAVYYCQQYNIQWTFGQGTKVEIK

SEQ ID NO: 5226 - protein, 111 aa, synthetic construct
QSVLTQPPSVSGAPGQRVTISCTGSNSNIGAGYDVHWYQQLPGTAPKLLIYGNTNRPSGVPDRFSGSRSGTSASLAITGLQAEDEADYYCQSYDSSLSTVFFGGGTKLTVL

SEQ ID NO: 5227 - protein, 108 aa, synthetic construct
EMTLTQSPGTLSVSPGKRATLSCRASQSVSSNLAWYQQKPGQAPRLFIYGASTRATGIPARFSGSGSGTEFTLTISSLQSEDFAVYYCQQYHSWPLFTFGPGTKVEIK

SEQ ID NO: 5228 - protein, 107 aa, synthetic construct
EIVMTQSPATLSVSPGERVTLSCRASQSVRSNLAWYQQKPGQAPRLLIYGASTRATGIPARFSGSGSGTEFTLTISSLQSEDFAVYFCHQYTHWPLTFGPGTKVEIK

SEQ ID NO: 5229 - protein, 111 aa, synthetic construct
QSVMTQPPSVSGAPGQRVTISCTGSNSNIGAGYDVHWYQQLPGTAPKLLISVNSNRPSGVPDRFSGSKSGTSASLAITGLQAEDEADYYCQSYDSALSGSVFGGGTKLTVL

SEQ ID NO: 5230 - protein, 108 aa, synthetic construct
EITMTQSPSSLSASVGDRVTITCRASQSISTYLNWYQQKPGKAPKLLIYAASSLQSMVPSRFSGSGSGTDFTLTISSLQPEDFATYYCQHSYSTPPWTFGQGTKVEIK

SEQ ID NO: 5231 - protein, 108 aa, synthetic construct
DIRMTQSPSSLSASVGDRVTITCRASQTISSYLNWYQQKPGKAPKLLIYGASSLQSGVPSRFSGSGSGTDFTLTISSLQAEDFATYYCQQSYTMPPITFGPGTKVDIK

SEQ ID NO: 5232 - protein, 108 aa, synthetic construct
DIQMTQSPSSLSASVGDRVTITCRASQSIRSYLNWYQQKPGKAPNLLIYDASSLQSGVPSRFSGSGSGTDFTLTISSLQPEDFATYYCQQSYNTPPWTFGRGTKVEIK

SEQ ID NO: 5233 - protein, 110 aa, synthetic construct
QPVLTQPPSVSVAPGQTARITCGGDNIGSKGVHWYQQKPGQAPVLVVYDDSDRPSGIPERFSGSNSGNTATLTISRVEAGDEADYFCQVWDSTSDHPAYVFGTGTKVTVL

SEQ ID NO: 5234 - protein, 109 aa, synthetic construct
EMTLTQSPATLSLSPGERATLSCRASQSLSGYLAWYQQKPGQAPRLLIYDASNRATGIPARFSGSGSGTDFTLTISSLEPEDFALYYCQQRSSWPRLYTFGQGTKVEIK

SEQ ID NO: 5235 - protein, 107 aa, synthetic construct
DIQMTQSPSSLSASVGDRVTITCRASQGISYSLAWYQQKPGKAPKLLVYVASRLESGVPSRFSGSGSGTDYTLTISSLQPEDFATYYCQQYYNTPVTFGQGTKVEIK

SEQ ID NO: 5236 - protein, 106 aa, synthetic construct
EIQLTQSPSTLSASVGDRVTITCRASQSISSWLAWYQQKPGKAPKLLIYEASSLDTGVPSRFSGSGSGTEFTLTISSLQPDDFATYYCQQYNSYLTFGGGTKVDIK

SEQ ID NO: 5237 - protein, 111 aa, synthetic construct
QPGLTQPPSVSGAPGQRVTISCTGSNSNIGAGYDVHWYQQLPGTAPKLLIYDNINRPSGVPDRFSGSKSGTSASLAITGLQAEDEADYYCQSYDSSLIGSVFGTATKVTVL

SEQ ID NO: 5238 - protein, 107 aa, synthetic construct
EIPMTQSPGTLSLSPGERATLSCRASQSVSSYLAWYQQKPGQAPRLLIYGASSRATGIPDRFSGSGSGTDFTLTISRLEPEDFAVYYCQQYGSSPRTFGQGTKVDIK

SEQ ID NO: 5239 - protein, 107 aa, synthetic construct
EIVMTQSPSSLSASVGDRVTITCRASQGINNFLAWFQQKPGKAPKSLIYAASSLQNGVPSKFSGSGSGTDFTLTISSLQPEDFATYYCQQYHSYPQTFGQGTKVDIK

SEQ ID NO: 5240 - protein, 116 aa, synthetic construct
QPVLTQPPSSSASPGESARLTCTLPSDINVGSYNVYWYQQKPGRPPRYLLYYYSDSDKGQGSGVPSRFSGSKDASANTGILLISGLQSEDEADYYCMIWPSNLLGVFGGGTKLTVL

SEQ ID NO: 5241 - protein, 111 aa, synthetic construct
QSVLTQPPSVSGAPGQRVTISCTGSNSNIGAGYDVHWYQQLPGTAPKLLIYGNNNRPSGVPDRFSGSKSVTSASLAITGLQAEDEADYYCQSYDSSLSDSVFGGGTKLTVL

SEQ ID NO: 5242 - protein, 107 aa, synthetic construct
DIRMTQSPSFLSASVGDRVTITCRASQDISSYLAWYQQKRGKAPKVLIYAASTLQSGVPSRFSGSGSGTEFTLTISSLQPEDFATYYCQQLNSYPLTFGQGTRLEIK

SEQ ID NO: 5243 - protein, 107 aa, synthetic construct
DIQMTQSPSSVSASVGDRVTITCRASQGISGWLAWYQQKPGKAPKLLIYAATTLQSGVPSRFSGSGSGTDFTLTISSLQPEDFATYYCQQANSFPRTFGQGTKVEIK

SEQ ID NO: 5244 - protein, 108 aa, synthetic construct
SYVLTQPPSVSVAPGKTAKITCGGNNIGSKHVHWYQQKPGQAPVLVIYYDSDRPSGIPERFSGSNSGNTATLTISRVEAGDEADYYCQVWDSNSDHRVFGGGTKVTVL

SEQ ID NO: 5245 - protein, 108 aa, synthetic construct
EMTMTQSPGTLSLSPGERATLSCRASQSVSSSFLAWYQHKPGQAPRLLIYGASSRATGIPDRFSGSGSGTDFTLTISRLEPEDFAVYYCQQYDSSPLTFGGGTKVEIK

SEQ ID NO: 5246 - protein, 107 aa, synthetic construct
EIQMTQSPSVLSASVGDRVTITCRASQGISSHLAWYQQKPGKAPKLLIYAASTLQSGVPARFSGSGSGTEFTLTISSLQPEDFATYYCQQLNSHPCSFGQGTKVEIK

SEQ ID NO: 5247 - protein, 107 aa, synthetic construct
DIQMTQSPSSLSASVGDRVTITCRASQSISTYLNWYQQKPGKAPKLLIYAASSLQSGVPSRFSGSGSGTDFTLTISSLQPEDFTTYYCQQSSTTPITFGHGTRLEIK

SEQ ID NO: 5248 - protein, 106 aa, synthetic construct
ETTLTQSPSSLSASVGDRVTITCRASQGISNSLAWYQQKPGKAPKLLLYAASTLESGVPSRFSGSGSGTDFTLTISSLQPEDFATYYCQQYYTTRTFGQGTKVEIK

SEQ ID NO: 5249 - protein, 107 aa, synthetic construct
DIVMTQSPSSLSASVGDRVTITCQASQDINNYLNWYQQKPGKAPKLLIYDASNLETGVPSRFSGSGSGTDFTFTISSLQPEDSATYYCHQYDNLPRTFGQGTKVEIK

SEQ ID NO: 5250 - protein, 107 aa, synthetic construct
EIVMTQSPSSLSASVGDRVTITCRASQGIRNYLAWFQQKPGKAPKSLIYGASSLQSGVPSKFSGSGSGTDFTLTISSLQPEDFATYYCQQYNDYPITFGQGTRLEIK

SEQ ID NO: 5251 - protein, 112 aa, synthetic construct
EIAMTQSPLSLPVTPGEPASISCRSSQSLLHSNGYNYLDWYLLKPGQSPQLLIYLGSNRASGVPDRFSGSGSGTDFSLKISRVEAEDVGVYYCMQALQTPLTFGGGTKVEIK

SEQ ID NO: 5252 - protein, 108 aa, synthetic construct
EIPMTQSPSSLSASVGDRVTITCRASQSINTYLNWYQQKPGKAPKLLIYAASSLQSGVPSRFSGSGSGTDFTLTISSLQPEDFATYYCLQSYNTPPWTFGQGTKVEIK

SEQ ID NO: 5253 - protein, 108 aa, synthetic construct
EMTLTQSPATLSVSPGERATLSCRASQSVSSKLAWYQQKPGQAPRLLIYGASTRATGIPARFSGSGSGTEFTLTISSLQFEDFAVYYCQQYNNLPPWTFGQGTKVEIK

SEQ ID NO: 5254 - protein, 106 aa, synthetic construct
DIQMTQSPSTLSASVGDRVTITCRASQSINSWLAWYQQKPGKAPKLLIYDASTLESGVPSRFSGSGSGTEFTLTISSLQPDDFATYYCQQYKNYWTFGQGTKVEIK

SEQ ID NO: 5255 - protein, 107 aa, synthetic construct
DIRLTQSPSFLSASVGDSVTITCRASQGISSYLAWYQQKPGRAPKLLIYAASTLQSGVPSRFSGSGSGTEFTLTISSLQPEDFATYYCQQLNSDLFTFGPGTKVEIK

SEQ ID NO: 5256 - protein, 112 aa, synthetic construct
QSVLTQPPSVSGAPGQRVTISCTGSSSNIGAGYDVHWYQQLPGTAPKLLIYSNNNRPSGVPDRFSGSKSGTSASLAITGLQAEDEADYYCQSYDSSLSGYVVFGGGTKLTVL

SEQ ID NO: 5257 - protein, 113 aa, synthetic construct
DIPVTQSPDSLAVSLGERATINCKSSQSVLYSSNNKNYLAWYQQKPGQPPRLLIYWASTRESGVPDRFSGSGSGTDFTLTIRSLQAEDVAVYYCQQYYNTPLTFGGGTKVEIK

SEQ ID NO: 5258 - protein, 113 aa, synthetic construct
DIQVTQSPDSLAVSLGERATINCKSSQSVLYSSNNKNYLAWYQQKPGQPPRLLIYWASTRESGVPDRFSGSGSGTDFTLTIRSLQAEDVAVYYCQQYYNTPLTFGGGTKVDIK

SEQ ID NO: 5259 - protein, 107 aa, synthetic construct
SYVLTQPPSVSVSPGQTASITCSGDKLGDKYACWYQQKPGQSPVLVIYQDTKRPSGIPERFSGSNSGNTATLTISGTQPMDEADYYCQAWDSSNHYVFGAGTKVTVL

SEQ ID NO: 5260 - protein, 110 aa, synthetic construct
QYVLTQPPSASGTPVQRVTISCSGSSSNIGSNTVNWYQQLPGTAPKLLIYNNNQRPSGVPDRFSGSKSGTSASLAISGLQSEDEADYYCAAWDDSLNGVLFGGGTKLTVL

SEQ ID NO: 5261 - protein, 107 aa, synthetic construct
DIRMTQSPSFLSASVGDRVTITCRASQGISNYLAWYQHKPGKAPKLLIYAASTLQSGVPSRFSGSGSGTEFTLTISSLQPEDFATYYCQQLNSYPRTFGQGTKVDIK

SEQ ID NO: 5262 - protein, 110 aa, synthetic construct
KFMLTQPHSVSESPGKTVTISCTGSSGYIASNYVQWYQQRPGSAPTTVIYEDNQRPSGVPDRFSGSIDSSSNSASLTISGLKTEDEADYYCQSYDNTNWVFGGGTKLTVL

SEQ ID NO: 5263 - protein, 108 aa, synthetic construct
DIVMTQSPSLLSASVGDRVTITCRASQGISSYLAWYQQKPGKAPKLLIYAASTLQSGVPLRFSGSGSGTEFTLTISSLQPEDFATYYCQQLNSYPRYTFGQGTKVDIK

SEQ ID NO: 5264 - protein, 106 aa, synthetic construct
EIVMTQSPSTLSASAGDRVTITCRASQSISSWLAWYQQKPGKAPKLLIYKASSLESGVPSRFSGSGSGTEFTLTISSLQPDDFATYYCQQYNSYFTFGPGTKVEIK

SEQ ID NO: 5265 - protein, 109 aa, synthetic construct
ETTLTQSPATLSVSPGERATLSCRASQSVSSNLAWYQQKPGQAPRVLIYGASTRATGIPARFSGSGSGTEFTLTISSLQSEDSAVYYCQQYDNWPPMWTFGQGTKVEIK

SEQ ID NO: 5266 - protein, 107 aa, synthetic construct
EIVMTQSPATLSVSPGERATLSCRASQSISSNLAWYQQKPGQAPRLLISGASTRATGIPARFSGSGSGTEFTLTISSLQSEDFAVYYCQQHNSWPATFGQGTRLEIK

SEQ ID NO: 5267 - protein, 107 aa, synthetic construct
EMTLTQSPSSLSASVGDRVTITCRASQSISSYLNWYQQKLGKAPKLLIYAASSLQSGVPSRFSGSGSGTDFTLTISSLQPEDFATYYCQQSYSTPYTFGQGTKVDIK

SEQ ID NO: 5268 - protein, 107 aa, synthetic construct
EIRMTQSPSTLSASVGDRVTITCRASQSISSWLAWYQQKPGKAPNLLIYKASILESGVPSRFSGSGSGTEFTLTISSLQPDDFATYYCQQYDSYSGTFGQGTKVEIK

SEQ ID NO: 5269 - protein, 112 aa, synthetic construct
QSVLTQPPSVSGAPGQRVTISCTGSSSNIGAGFDVHWYQQVPGTAPKLLIYGNSNRPSGVPDRFSGSKSGTSASLAITGLQAEDEADYYCQSYDSSLSGFVIFGGGTKLTVL

SEQ ID NO: 5270 - protein, 108 aa, synthetic construct
EITMTQSPSSLSASVGDRVTITCRASQSISTYLNWYQQKPGKAPKLLIYAASSLQSGVPSRFSGSGSGTDFTLTISSLQPEDFASYYCQQSYSNPMYTFGQGTKVEIK

SEQ ID NO: 5271 - protein, 108 aa, synthetic construct
EMTLTQSPGTLSVSPGERATLSCRASQSVSSKLAWYQQKPGQAPRLLIYGASTRATGIPARFSGSGSGTEFTLTISSLQSEDFAVYYCQQYNNWPPLTFGGGTKVEIK

SEQ ID NO: 5272 - protein, 111 aa, synthetic construct
QSVLTQPASVSGSPGQSITISCTGTSSDVGGHNYVSWYQQHPGKAPKLMIYEVSNRPSGVSNRFSGSKSGNTASLTISGLQAEDEADYSCSSYASSTSPVVFGGVTKLTVL

SEQ ID NO: 5273 - protein, 107 aa, synthetic construct
DIRMTQSPSTLSASVGDRVTITCRASQSISTWLAWYQQKPGKAPKLLIYKASSLESGDPSRFSGSGSGTEFTLTISSLQPDDFATYYCQQYSTYPYTFGQGTKVEIK

SEQ ID NO: 5274 - protein, 110 aa, synthetic construct
NFMLTQPHSVSESPGKTVTISCTRSSGSIASSYVQWYQQRPGSSPTTVIYDDNQRPSGVPDRFSGSIDSSSNSASLTISGLKTEDEADYYCQSHDSSTVIFGGGTKLTVL

SEQ ID NO: 5275 - protein, 107 aa, synthetic construct
EMTLTQSPSSLSASVGDRVTITCQASQAISNYLNWYQQKPGKAPKLLIYDASNLETGVPSRFSGSGSGTDFTFTISSLQPEDIATYFCQQYDNLPFTFGPGTKVDIK

SEQ ID NO: 5276 - protein, 108 aa, synthetic construct
EIGVTQSPSSLSASVGDRVTITCRASQSISSYLNWYQQKPGKAPKLLIYAASSLQSGVPSRFSGSGFGTDFTFTISSLQPEDFATYYCQQSYRTPPLTFGPGTKVEIK

SEQ ID NO: 5277 - protein, 113 aa, synthetic construct
DIVLTQSPDSLAVSLGERATINCKSSQSVLYSSNNENYLGWYQQKPGQPPKLLIYWASTRESGVPDRFSGSGSGTDFTLTISSLQAEDVAVYYCQQYYSTPLTFGPGTKVEIK

SEQ ID NO: 5278 - protein, 108 aa, synthetic construct
EMALTQSPGTLSLSPGERATLSCRASQSVSSSFLAWYQQKPGQAPRLLIYAASSRATGIPDRFSGSGSGTDFTLTISRLEPEDFAVYYCHQYGYSPWTFGQGTKVDIK

SEQ ID NO: 5279 - protein, 107 aa, synthetic construct
DIGMTQSPSSLSASVGDRVTITCQASQDISNSLNWYQQKPGKAPKRLIYDASNLETGVPSRFSGSGSGTDFTFTISSLQPEDIATYYCQQFDNLPITFGQGTRLEIK

SEQ ID NO: 5280 - protein, 109 aa, synthetic construct
QSVLTQPPSVSVAPGQTARITCGGNNIGSKSVHWYQQKPGQAPVLVVNDDSDRPSGIPERFSGSNSGNTATLTISRVAAGDEADYYCQVWDSNSDHHYVFGTGTKLTVL

SEQ ID NO: 5281 - protein, 113 aa, synthetic construct
DIRVTQSPDSLAVSLGERATINCKSSQSVLYSSNNKNFLAWYQQKPGQPPKLLIYWASTRESGVPDRFSGSGSGTDFTLTISSLQAEDVAVYYCQQYYSTPWTFGQGTKVEIK

SEQ ID NO: 5282 - protein, 106 aa, synthetic construct
EIVLTQSPATLSLSPGERATLSCRASQSVSTYLAWYQQKPGQAPRLLIYDASNRATGIPARFSGSGSGTDFTLTISSLEPEDFAVYYCQQRDNWVSFGGGTKVEIK

SEQ ID NO: 5283 - protein, 113 aa, synthetic construct
DIQMTQSPDSLAVSLGERATINCKSSQSVLYSSNNNNYLAWYQQKPGQPPKLLIYWASTRESGVPDRFSGSGSGTDFTLTISSLQAEDVAVYYCQQYYSTPLTFGGGTKVEIK

SEQ ID NO: 5284 - protein, 108 aa, synthetic construct
EIVMTQSPATLSVSPGERATLSCRASQSVSSSLAWYQQKPGQAPRLLIYGASTRATGIPARFSGSGSGTEFTLTISSLQSEDFAVYYCQQYNKWPRYTFGQGTKVDIK

SEQ ID NO: 5285 - protein, 107 aa, synthetic construct
DIRMTQSPSSLSASVGDRVTITCQASQDISNYLNWYQQKPGKAPKLLIYDASNLETGVPSRFSGSGSGTDFSFTISSLQPEDIATYYCQQYHSLPITFGPGTKVDIK

SEQ ID NO: 5286 - protein, 109 aa, synthetic construct
EMTLTQSPATLSLSPGERATLSCRASQSVRSYLAWYQQKPGQAPRLLIYDASNRATGIPARFSGSGSGTDFTLTISSLEPEDFAVYYCQQRSNWPRTLTFGGGTKVEIK

SEQ ID NO: 5287 - protein, 107 aa, synthetic construct
EIVLTQSPGTLSLSPGERATLSCRASQSVSSYLAWYQQKPGQAPRLLIYDASNRATGIPARFSGSGSGTDFTLTISSLEPEDFAVYYCQQRGNWPGTFGGGTKVEIK

SEQ ID NO: 5288 - protein, 108 aa, synthetic construct
DIPMTQSPSSLSASVGDRVTITCRASQRISSYLNWYQQKPGKAPKLLIYAASSLQSGVPSRFSGSGSGTDFTLTISSLQPEDFATYYCQQSYSTPPVTFGGGTKVEIK

SEQ ID NO: 5289 - protein, 108 aa, synthetic construct
EIPMTQSPSSLSASVGDRVTITCRASQRISSYLNWYQQKPGKAPKLLIYAASSLQSGVPSRFSGSGSGTDFTLTISSLQPEDFATYYCQQSYSTPPVTFGGGTKVDIK

SEQ ID NO: 5290 - protein, 108 aa, synthetic construct
DIEMTQSPSSVSASVGDRVTITCRASQGISNWLAWYQQKPGKAPKLLIYAASSLQSGVPSRFSGSGSGTDFTLTISSLQPEDFATYYCQQTISFPAITFGQGTRLEIK

SEQ ID NO: 5291 - protein, 107 aa, synthetic construct
DIQMTQSPSSLSASVGDRVTIACQASQDISNYLNWYQQKPGKAPKLLIYDASNLETGVPSRFSGSGSGTDFTFTISSLQPEDIATYYCQQHDNVPLTFGQGTRLEIK

SEQ ID NO: 5292 - protein, 107 aa, synthetic construct
DIPMTQSPSFLSASVGDRVTITCRASQGISSYLAWYQQKPGKAPKLLIYTASTLQSGVPSRFSGSGSGTEFTLTISSLQPEDFATYYCQQLNNHPPAFGQGTRLEIK

SEQ ID NO: 5293 - protein, 107 aa, synthetic construct
EIPLTQSPATLSLSPGERATLSCRASQSVSNYLAWYQQKPGQAPRLLIYDASNRATGIPARFSGSGSGTDFTLTISSLEPEDFAVYYCQQRSKWRYTFGQGTKVEIK

SEQ ID NO: 5294 - protein, 112 aa, synthetic construct
DIRMTQSPLSLPVTPGEPASISCRSSQSLLHSNGHNYLDWYLQKPGQSPQLLIYLGSNRASGVPDRFSGSGSGTDFTLKISRVEAEDVGVYYCMQALQSPPAFGQGTRLEIK

SEQ ID NO: 5295 - protein, 110 aa, synthetic construct
NLMLTQPHSVSESPGKTVTISCTGSSGSIASNYVQWYQQRPGSAPTTVIYEDDQRPSGVPDRFSGSIDSSSNSASLTISGLKTEDEADYYCQSYDSSRVVFGGGTKLTVL

SEQ ID NO: 5296 - protein, 108 aa, synthetic construct
EIVLTQSPATLSVSPGERATLSCRASQSVSSNLAWYQQKPGQAPRLLIYGASTRATGIPARFSGSGSGTEFTLTISSLQSEDFALYYCQQYNNWPPLTFGGGTKVDIK

SEQ ID NO: 5297 - protein, 109 aa, synthetic construct
EIVLTQSPATLSLSPGERATLSCRASQSVSSYLAWYQQKPGQAPRLLIYDASNRATGIPARFSGSGSGTDFNLTISSLEPEDFAVYYCQQRSIWPPPFTFGPGTKVEIK

SEQ ID NO: 5298 - protein, 107 aa, synthetic construct
EIVLTQSPATLSLSPGERATLSCRASQSVSSYLAWYQQKPGQAPRVLIYDASNRATGIPARFSGSGSGTDFTLTISSLEPEDFAVYYCQQRSNWRYTFGQGTKVEIK

SEQ ID NO: 5299 - protein, 108 aa, synthetic construct
EIPMTQSPSSLSASVGDRVTITCRASQSISSYLNWYQQKPGKAPKLLIYAASGLQSGVPSRFSGSGSGTDFTLTISSLQPEDFATYYCQQSYTNPMYTFGQGTKVEIK

SEQ ID NO: 5300 - protein, 113 aa, synthetic construct
EMTLTQSPLSLPVTPGEPASISCRSSQSLLHSNGYNYLDWYLQKPGQSPQLLIYLGSNRASGVPDRFSGSGSGTDFTLKISRVEAGDVGVYYCMQALQTPPYGFGQGTKVDIK

SEQ ID NO: 5301 - protein, 108 aa, synthetic construct
QSVLTQPASVSGSPGQSITISCTGTSSDVGSYNLVSWYQQHPGKAPKLMIYEVTKRPSGVSNRFSGSKSGNTASLTISGLQAEDEADYYCCSYAGIYVFGTGTKLTVL

SEQ ID NO: 5302 - protein, 114 aa, synthetic construct
EIVMTQSPDSLAVSLGERATINCKSSQSVLYSSNNKNNLAWYQQKPGQPPKLLIYWASTRESGVPDRFSGSGSGTDFTLTISSLQAEDVAVYYCQQYYSTWALTFGGGTKVEIK

SEQ ID NO: 5303 - protein, 113 aa, synthetic construct
DIQMTQSPDSLAVSLGERATINCKSSQSVLYSSNNKNYLAWYQQKPGQPPQLLIYWASTRESGVPDRFSGSGSGTDFTLTISSLQAEDVAVYYCQQYYSTPLTFGGGTKVEIK

SEQ ID NO: 5304 - protein, 108 aa, synthetic construct
ETTLTQSPGTLSLSPGERATLSCRASLSVSSSYLAWYQQKPGQAPRLLIYGASSRATGIPDRFSGSGSGTDFTLTISRLEPEDFAVYYCQQYGSSPLTFGGGTKVEIK

SEQ ID NO: 5305 - protein, 108 aa, synthetic construct
EIVLTQSPATLSVSPGERATLSCRASQSVSSNLAWYQQKPGQAPRLLIYGASTRATGIPARFSGSGSGTEFTLTISSLQSEDFAVYYCQQYHNWPPLTFGGGTNVDIK

SEQ ID NO: 5306 - protein, 105 aa, synthetic construct
QHVLTQPPSVSVAPGKTARITCGGNNIGSKSVHWYQQKPGQAPVLVIYYDSDRPSGIPERFSGSNSGNTATLTISRVEAGDEADYYCQVWDSSWVFGGGTKVTVL

SEQ ID NO: 5307 - protein, 107 aa, synthetic construct
EITMTQSPATLSVSPGERATLSCRASQSVSSNLAWYQQKPGQAPRLLIYGASTRATGIPARFSGSGSGTEFTLTISSLQSEDFAVYYCQQYNNWPRTFGQGTKVEIK

SEQ ID NO: 5308 - protein, 107 aa, synthetic construct
EMTLTQSPATLSVSPGERATLSCRASQSVSSNLAWYQQKPGQAPRLLIYGASTRATGIPARFSGSGSGTEFTLTISSLQSEDFAVYYCQQYNNWPWTFGQGTKVDIK

SEQ ID NO: 5309 - protein, 107 aa, synthetic construct
EMTLTQSPATLSLSPGERATLSCRASQSVSSYLAWYQQKPGQAPRLLIYDASNRATGIPARFSGSGSGTDFTLTISSLEPEDFAVYYCQQRSNWPGTFGGGTKVEIK

SEQ ID NO: 5310 - protein, 108 aa, synthetic construct
EIVMTQSPSSLSASVGDRVTITCRASQSISSYLNWYQQKPGKAPKLLIYAASSLQSGVPSRFSGSGSGTDFTLTISSLQPEDFATYYCQQSYSNPPVTFGQGTRLEIK

SEQ ID NO: 5311 - protein, 110 aa, synthetic construct
QYVLTQPPSVSVAPGQTARITCGGNNIGSKSVHWYQQKPGQAPVLVVYDDSDRPSGIPERFSGSNSGNTATLTISRVEAGDEADYYCQLWDGSSDHPEVVFGGGTKLTVL

SEQ ID NO: 5312 - protein, 107 aa, synthetic construct
EITLTQSPSSVSASVGDRVTITCRASQGISSWLAWYQQKPGKAPKLLIYAASSLQSGVPSRFSGSGSGTDFTLTISSLQPEDFATYYCQQANSFPLTFGGGTKVDIK

SEQ ID NO: 5313 - protein, 26 aa, synthetic construct
QVQLVQSGAEVKKPGESLKISCKISG

SEQ ID NO: 5314 - protein, 26 aa, synthetic construct
QVQLQQSGPGLVKPSETLSLTCSVSG

SEQ ID NO: 5315 - protein, 26 aa, synthetic construct
QVQLLESGGGLVQPGGSLRLSCAISG

SEQ ID NO: 5316 - protein, 26 aa, synthetic construct
QVQLQQWGAGLLKPSETLSLTCAFSG

SEQ ID NO: 5317 - protein, 26 aa, synthetic construct
EVQLQESGGGLVQPGGSLRLSCAASG

SEQ ID NO: 5318 - protein, 26 aa, synthetic construct
EVQLVQSGAEVRKPGASVKVSCKTVG

SEQ ID NO: 5319 - protein, 26 aa, synthetic construct
EVQLLESGPGLVKPSETLSLICSISG

SEQ ID NO: 5320 - protein, 26 aa, synthetic construct
EVQLVQSGAEVKKPGASVKVSCKASG

SEQ ID NO: 5321 - protein, 26 aa, synthetic construct
EVQLVESGGGLVQPGRSLRLSCAASG

SEQ ID NO: 5322 - protein, 26 aa, synthetic construct
QVPLKESGPALVKPTQTLTLTCTFSG

SEQ ID NO: 5323 - protein, 26 aa, synthetic construct
QVPLVESGGGLVQPGRSLRLSCAASG

SEQ ID NO: 5324 - protein, 26 aa, synthetic construct
EVQLLESGGGLVQPGRSLRLSCAASG

SEQ ID NO: 5325 - protein, 26 aa, synthetic construct
EVQLVESGGGFVKPGGSLRLSCAASG

SEQ ID NO: 5326 - protein, 26 aa, synthetic construct
EVQLVESGGRAVQPGGSLRLSCGASG

SEQ ID NO: 5327 - protein, 26 aa, synthetic construct
EVQLVQSGGGVVQPGRSLRLSCVASG

SEQ ID NO: 5328 - protein, 26 aa, synthetic construct
EVQLVESGGGVVQPGRSLSLSCAASG

SEQ ID NO: 5329 - protein, 26 aa, synthetic construct
EVQLVESGPGVVRPSETLSLTCAVSG

SEQ ID NO: 5330 - protein, 26 aa, synthetic construct
EVQLKESGGGVVQPGGSLRLSCGASG

SEQ ID NO: 5331 - protein, 26 aa, synthetic construct
QVQLQQSGGGFVKPGGSLRLSCATSG

SEQ ID NO: 5332 - protein, 26 aa, synthetic construct
EVQLVESGGGLVQPGGSLRLSCAASG

SEQ ID NO: 5333 - protein, 26 aa, synthetic construct
EVQLVESGGGLVQPGGSLRLSCVASG

SEQ ID NO: 5334 - protein, 26 aa, synthetic construct
QVQLKQSGGGLIQPGGSLRLSCAASG

SEQ ID NO: 5335 - protein, 26 aa, synthetic construct
EVQLLESGPGLVKPSETLSLTCTVSG

SEQ ID NO: 5336 - protein, 26 aa, synthetic construct
EVQLVESGGDLVQPGGSLRLSCVASG

SEQ ID NO: 5337 - protein, 26 aa, synthetic construct
QVQLVQSGAEVKKPGSSVKVSCRASG

SEQ ID NO: 5338 - protein, 26 aa, synthetic construct
EVQLVESGGGVVQPGRSLRLSCAASG

SEQ ID NO: 5339 - protein, 26 aa, synthetic construct
EVQLVQSGPAVKKPGSSVKVSCKASG

SEQ ID NO: 5340 - protein, 26 aa, synthetic construct
EVQLLESAPGLVKPSGTLSLTCAVSG

SEQ ID NO: 5341 - protein, 26 aa, synthetic construct
EVQLLESGTEVKKPGASVKVSCKALG

SEQ ID NO: 5342 - protein, 26 aa, synthetic construct
EVQLVESGPEVKKPGESLTISCKASG

SEQ ID NO: 5343 - protein, 26 aa, synthetic construct
EVQLVQSGAEVKKPGASVKVSCKTSG

SEQ ID NO: 5344 - protein, 26 aa, synthetic construct
EVQLVESGGGVVQPGKSLRLSCVASG

SEQ ID NO: 5345 - protein, 26 aa, synthetic construct
QVQLVESGPGLVKPSETLSLTCTVSD

SEQ ID NO: 5346 - protein, 26 aa, synthetic construct
EVQLLESGPGLVKPSQTLSLTCTVSG

SEQ ID NO: 5347 - protein, 26 aa, synthetic construct
EVQLVESGPGLVKPSGTLSLTCAVSG

SEQ ID NO: 5348 - protein, 26 aa, synthetic construct
PGARCCSLGDVWSSWEVPATLLCSSG

SEQ ID NO: 5349 - protein, 26 aa, synthetic construct
QVQLQQSGAEVKEPGSSVKVSCMASG

SEQ ID NO: 5350 - protein, 26 aa, synthetic construct
EVQLVQSGGGVVQPGRSLRLSCAASG

SEQ ID NO: 5351 - protein, 26 aa, synthetic construct
QVQLVQSGPEVKKPGTSVKVPCKASG

SEQ ID NO: 5352 - protein, 26 aa, synthetic construct
QVQLVESGGSLVKPGGSLRLSCAASG

SEQ ID NO: 5353 - protein, 26 aa, synthetic construct
EVQLLESGGGLVQPGGSLRLSCAATG

SEQ ID NO: 5354 - protein, 26 aa, synthetic construct
EVQLLETGGGLIQPGGSLRLSCAASE

SEQ ID NO: 5355 - protein, 26 aa, synthetic construct
EVQLLESGGGLVQPGGSLRLSCAASG

SEQ ID NO: 5356 - protein, 26 aa, synthetic construct
QVQLVQSGAEVKKPGASVKLSCKASG

SEQ ID NO: 5357 - protein, 26 aa, synthetic construct
QVTLKECGPALVKPTQTLTLTCTFSG

SEQ ID NO: 5358 - protein, 26 aa, synthetic construct
EVQLVQSGAEVKKPGSSVKVSCKASG

SEQ ID NO: 5359 - protein, 26 aa, synthetic construct
QVQLLESGPGLVKPSGTLSLTCAVSG

SEQ ID NO: 5360 - protein, 26 aa, synthetic construct
QVQLAQSGAEVKKPGESLKISCKGSG

SEQ ID NO: 5361 - protein, 26 aa, synthetic construct
QVTLKESGPALVKPTQTLTLTCTFSG

SEQ ID NO: 5362 - protein, 26 aa, synthetic construct
EVQLVESGGGLIQPGGSLRLSCAASG

SEQ ID NO: 5363 - protein, 26 aa, synthetic construct
QVQLQESGPGLVEPSQTLSLTCTVSG

SEQ ID NO: 5364 - protein, 26 aa, synthetic construct
QVQLVQSGAEVKKPGASAKVSCRASG

SEQ ID NO: 5365 - protein, 26 aa, synthetic construct
EVQLLESGPGLVKPSGTLSLTCAVSG

SEQ ID NO: 5366 - protein, 26 aa, synthetic construct
EVQLVESGAEVRKPGASVKVSCRASG

SEQ ID NO: 5367 - protein, 26 aa, synthetic construct
QVQLVQSGAEMRKPGSSVKVSCQASG

SEQ ID NO: 5368 - protein, 26 aa, synthetic construct
QVQLMESGPTLVKPTQTLTLTCSFSG

SEQ ID NO: 5369 - protein, 26 aa, synthetic construct
QVQLVQSGGGVVQPGRSLRLSCPVSG

SEQ ID NO: 5370 - protein, 26 aa, synthetic construct
QVQLVQSGPEVKKPGTSVKVSCKTSG

SEQ ID NO: 5371 - protein, 26 aa, synthetic construct
QVQLVQSGGGVVQPGRSLRLSCLASG

SEQ ID NO: 5372 - protein, 26 aa, synthetic construct
RSTLKESGGGLVQPGRSLRLSCAASG

SEQ ID NO: 5373 - protein, 26 aa, synthetic construct
EVQLLESGGGVVQPGRSLRLSCAASG

SEQ ID NO: 5374 - protein, 26 aa, synthetic construct
QVTLKESGPALVKPKQTLTLTCTFSG

SEQ ID NO: 5375 - protein, 26 aa, synthetic construct
EVQLLESGAQVKKPGESLKISCKGSG

SEQ ID NO: 5376 - protein, 26 aa, synthetic construct
EVQLLESGGGVVQPGRSLRLSCVGSG

SEQ ID NO: 5377 - protein, 26 aa, synthetic construct
EVQLMESGAEVKKPGASVKVSCKASG

SEQ ID NO: 5378 - protein, 26 aa, synthetic construct
EVQLLESGAEVKKPGASAKISCTASG

SEQ ID NO: 5379 - protein, 26 aa, synthetic construct
EVQLVESGGGLVQPGGSLRLSCTASG

SEQ ID NO: 5380 - protein, 26 aa, synthetic construct
EVQLLESGPGLVKPSETLSLTCSVSG

SEQ ID NO: 5381 - protein, 26 aa, synthetic construct
EVQLVESGPGLVKPSGTLSLTCSVSG

SEQ ID NO: 5382 - protein, 26 aa, synthetic construct
EVQLVQSGAEVKKPGESLTISCKASG

SEQ ID NO: 5383 - protein, 26 aa, synthetic construct
EVQLLETGGGLMQPGGSLRLSCAASG

SEQ ID NO: 5384 - protein, 26 aa, synthetic construct
EAQLVESGGSLVQPGRSLRLSCAASG

SEQ ID NO: 5385 - protein, 26 aa, synthetic construct
EVQLVESGAEVKKPGASVKVSCKASG

SEQ ID NO: 5386 - protein, 26 aa, synthetic construct
EVQLVESGGKLVQPGGSLRLSCAASG

SEQ ID NO: 5387 - protein, 26 aa, synthetic construct
EVQLVESGGGVVQPGRSLRLSCATSG

SEQ ID NO: 5388 - protein, 26 aa, synthetic construct
QVQLVQSGAEVKKPGESLKISCKTSG

SEQ ID NO: 5389 - protein, 26 aa, synthetic construct
EVQLLESGAEVKKPGESLKISCQDSG

SEQ ID NO: 5390 - protein, 26 aa, synthetic construct
PGAAGGVGPGLVKTSQTLSLTCTVSG

SEQ ID NO: 5391 - protein, 26 aa, synthetic construct
QVQLVQSGGGLAQPGGSLRLSCAASG

SEQ ID NO: 5392 - protein, 26 aa, synthetic construct
EVQLLESGGGVVQPGRSLRLSCAVSG

SEQ ID NO: 5393 - protein, 26 aa, synthetic construct
EVQLLESGGGLVQPGGSLRLSCSASG

SEQ ID NO: 5394 - protein, 26 aa, synthetic construct
QVQLQQWGTGLLKPSETLSLTCAVYG

SEQ ID NO: 5395 - protein, 26 aa, synthetic construct
EVQLLESGGGLVKPGGSLRLSCAATG

SEQ ID NO: 5396 - protein, 26 aa, synthetic construct
QVQLLESGPGLVKPSETLSLTCTVSG

SEQ ID NO: 5397 - protein, 26 aa, synthetic construct
EVQLVQSGAEVKKPGESLKISCKGSG

SEQ ID NO: 5398 - protein, 26 aa, synthetic construct
QVQLVQSGAEVKKHGASVKVSCKASG

SEQ ID NO: 5399 - protein, 26 aa, synthetic construct
QVQLVQSGPGLVKPSQTLSLTCTVSG

SEQ ID NO: 5400 - protein, 26 aa, synthetic construct
RCTLVQSGGDLVQPGGSLRLSCEASG

SEQ ID NO: 5401 - protein, 26 aa, synthetic construct
EVQLVESGGGLVQSGGSLRLSCAASG

SEQ ID NO: 5402 - protein, 26 aa, synthetic construct
EVQLVESGAEVKKPGSSVKVSCKASG

SEQ ID NO: 5403 - protein, 26 aa, synthetic construct
EVQLLESGDEVKKPWASVTVSCKASG

SEQ ID NO: 5404 - protein, 26 aa, synthetic construct
RGAAAGVGPRTGEASGTLSLTCAVSG

SEQ ID NO: 5405 - protein, 26 aa, synthetic construct
QVQLVQSGGGLVQPGGSLRLSCTASG

SEQ ID NO: 5406 - protein, 26 aa, synthetic construct
EVQLLESGGGLVKPGGSLRLSCAASG

SEQ ID NO: 5407 - protein, 26 aa, synthetic construct
RCSCWSPGGGLIQRGGSLRLSCVASG

SEQ ID NO: 5408 - protein, 26 aa, synthetic construct
QVQLQQSGAEVKKPGSSVKVSCRASG

SEQ ID NO: 5409 - protein, 26 aa, synthetic construct
QVQLQQSGPGLVKPSDTLSLTCAVSG

SEQ ID NO: 5410 - protein, 26 aa, synthetic construct
QVQLVQSGGEVKKPGSSVKVSCKASG

SEQ ID NO: 5411 - protein, 26 aa, synthetic construct
EVQLVQSGAEVRKPGESLKISCKASG

SEQ ID NO: 5412 - protein, 26 aa, synthetic construct
EVQLLESGGGLVQPGRSLRLSCAAAG

SEQ ID NO: 5413 - protein, 26 aa, synthetic construct
RCTLVESGGGVVQPGRSLRLSCAASG

SEQ ID NO: 5414 - protein, 26 aa, synthetic construct
QVTLKESGPTLVKPTQTLTLTCSFSG

SEQ ID NO: 5415 - protein, 26 aa, synthetic construct
EVQLVESGGGLVQPGRSLRLSCITSG

SEQ ID NO: 5416 - protein, 26 aa, synthetic construct
QVQLLESGGGLVQPGRSLRLTCAASG

SEQ ID NO: 5417 - protein, 26 aa, synthetic construct
EVQLLESGGGLIQRGGSLRLSCAASG

SEQ ID NO: 5418 - protein, 26 aa, synthetic construct
EVQLVESGGGFVQAGQSLRLSCTASG

SEQ ID NO: 5419 - protein, 26 aa, synthetic construct
RSSWCSLGAEVKKPGASVKVSCKASG

SEQ ID NO: 5420 - protein, 26 aa, synthetic construct
EVQLVESGGGVVQPGRSLRLSCTASG

SEQ ID NO: 5421 - protein, 26 aa, synthetic construct
EVQLVESGGGVVQPGRSLRLACTASG

SEQ ID NO: 5422 - protein, 26 aa, synthetic construct
RYQLVQSGAEVKKPGSSVKISCQASG

SEQ ID NO: 5423 - protein, 26 aa, synthetic construct
QVQLVQSGAEVKKPGASVQVSCKASG

SEQ ID NO: 5424 - protein, 26 aa, synthetic construct
EVQLVESGSEVKKPGSSVKVSCKASG

SEQ ID NO: 5425 - protein, 26 aa, synthetic construct
EVQLVESGGGVVQPGGSLRLSCLGYG

SEQ ID NO: 5426 - protein, 26 aa, synthetic construct
QVQLQQWGAGLLKPSENLSLTCGVSG

SEQ ID NO: 5427 - protein, 26 aa, synthetic construct
QVQLVQSGVEVKKPGASVMLSCKASG

SEQ ID NO: 5428 - protein, 26 aa, synthetic construct
EVQLVESGGGVVQPGRSLRLSCAAFG

SEQ ID NO: 5429 - protein, 26 aa, synthetic construct
EVQLQQSGAGLLKPSETLSLTCGVFG

SEQ ID NO: 5430 - protein, 26 aa, synthetic construct
EVQLLESGAEVKKPGESLRISCKGSG

SEQ ID NO: 5431 - protein, 26 aa, synthetic construct
QVQLVQSGAEVRKPGESLKISCKASG

SEQ ID NO: 5432 - protein, 26 aa, synthetic construct
QVQLVESGGDLVQPGGSLRLSCAVSG

SEQ ID NO: 5433 - protein, 26 aa, synthetic construct
EVQLVESGPGLVKPSGTLSLTCTVSG

SEQ ID NO: 5434 - protein, 26 aa, synthetic construct
EVQLLESGAEVRKPGSSVRVSCKASG

SEQ ID NO: 5435 - protein, 26 aa, synthetic construct
QVQLVQSGGGLVQPGRSLRLSCAGSG

SEQ ID NO: 5436 - protein, 26 aa, synthetic construct
EVQLVESGPGLVKPSQTLSLTCTVSG

SEQ ID NO: 5437 - protein, 26 aa, synthetic construct
EVQLLESGAEVKKPGESLRISCKGSE

SEQ ID NO: 5438 - protein, 26 aa, synthetic construct
QVQLVQSGAEVKKPGSSVKVSCKPSG

SEQ ID NO: 5439 - protein, 26 aa, synthetic construct
QVQLQQSGGGLVRPGGSRRLSCAASG

SEQ ID NO: 5440 - protein, 26 aa, synthetic construct
QVQLVQSGAEMKKPGSSVKVSCKASG

SEQ ID NO: 5441 - protein, 26 aa, synthetic construct
EVQLVETGPGLVKPSQTLSLTCSVSG

SEQ ID NO: 5442 - protein, 26 aa, synthetic construct
EVQLVESGGDLVQPGGSLRLSCAASG

SEQ ID NO: 5443 - protein, 26 aa, synthetic construct
RCTLVQSGGGLVQPGGSLRLSCTASE

SEQ ID NO: 5444 - protein, 26 aa, synthetic construct
QVQLVQSGAEVKKPGTSVKVSCKSAG

SEQ ID NO: 5445 - protein, 26 aa, synthetic construct
EVQLVESGAEVKKPGESLKISCTGSG

SEQ ID NO: 5446 - protein, 26 aa, synthetic construct
RCTLKQSGGGVVQPGRSLRLSCAASG

SEQ ID NO: 5447 - protein, 26 aa, synthetic construct
QVQLEQSGAEVKKPGSSVKVSCKASG

SEQ ID NO: 5448 - protein, 26 aa, synthetic construct
QVQLLESGAEVKKPGSSVKVSCKASG

SEQ ID NO: 5449 - protein, 26 aa, synthetic construct
QVQLLESGPGLVKPSETLSLTCSVSG

SEQ ID NO: 5450 - protein, 26 aa, synthetic construct
QVQLVESGAEVKKPGASVKISCKASG

SEQ ID NO: 5451 - protein, 26 aa, synthetic construct
QVQLVQSGAEVKEPGSSVKVSCKASG

SEQ ID NO: 5452 - protein, 26 aa, synthetic construct
QVQLVESGAEVKKHGSSVKVSCKASA

SEQ ID NO: 5453 - protein, 26 aa, synthetic construct
EVQLLESGPGLVKPSETLSLSCTVSG

SEQ ID NO: 5454 - protein, 26 aa, synthetic construct
QVQLLESGGRVVRPGGSLRLSCAASG

SEQ ID NO: 5455 - protein, 26 aa, synthetic construct
EVQLVESGAEVKKPGASVRVSCKASG

SEQ ID NO: 5456 - protein, 26 aa, synthetic construct
QVQLVQSGAELKKPGSSVKVSCKASG

SEQ ID NO: 5457 - protein, 26 aa, synthetic construct
QVQLVQSGAEVKKPGSSVKVSCMASG

SEQ ID NO: 5458 - protein, 26 aa, synthetic construct
EVQLLESGGGVIQPGRSLRLSCAASG

SEQ ID NO: 5459 - protein, 26 aa, synthetic construct
EVQLVESGAEVKKPGSSLKVSCKASG

SEQ ID NO: 5460 - protein, 26 aa, synthetic construct
EVQLVETGGDLIQPGGSLRLSCAASG

SEQ ID NO: 5461 - protein, 26 aa, synthetic construct
EVQLLESGSEVKKPGSSVKVSCQASG

SEQ ID NO: 5462 - protein, 26 aa, synthetic construct
EVQLVQSGGGLVQPGGSLRLSCAASR

SEQ ID NO: 5463 - protein, 26 aa, synthetic construct
EVQLVQSGGGLVQPGRSLRLSCAASG

SEQ ID NO: 5464 - protein, 26 aa, synthetic construct
QITPKESGLTLVKPTQTLTLTCTFSG

SEQ ID NO: 5465 - protein, 26 aa, synthetic construct
QVQLVQSGPEVKMPGTSVTVSCKASG

SEQ ID NO: 5466 - protein, 26 aa, synthetic construct
EVQLLESGGGLVQPGGSMRISCAASG

SEQ ID NO: 5467 - protein, 26 aa, synthetic construct
EVQLLESGGAVVQPGGSLRLSCAASG

SEQ ID NO: 5468 - protein, 26 aa, synthetic construct
QVQLVQSGTEVKKPGASVKVSCKASG

SEQ ID NO: 5469 - protein, 26 aa, synthetic construct
EVQLVQSETEVKKPGASVKVSCKASG

SEQ ID NO: 5470 - protein, 26 aa, synthetic construct
EVQLLESGGGLIQPGGSLRLSCVASG

SEQ ID NO: 5471 - protein, 26 aa, synthetic construct
QAQLLESGPGLVKPSETLSLTCTVSG

SEQ ID NO: 5472 - protein, 26 aa, synthetic construct
QVQLVESGAEVKKPGASVRVSCKASG

SEQ ID NO: 5473 - protein, 26 aa, synthetic construct
EVQLLESGGGLAQPGGSLRLSCAASG

SEQ ID NO: 5474 - protein, 26 aa, synthetic construct
EVQLLESGAEVKKPGASVKVSCKASG

SEQ ID NO: 5475 - protein, 26 aa, synthetic construct
QVQLVQSGAEVKRPGESLKISCQGSG

SEQ ID NO: 5476 - protein, 26 aa, synthetic construct
RCPLMESGAAVRKPGASVKVSCKASG

SEQ ID NO: 5477 - protein, 26 aa, synthetic construct
EVQLLETGGGLIQPGGSLRLSCAASG

SEQ ID NO: 5478 - protein, 26 aa, synthetic construct
EVQLLESGGGLVKPGGSLRLSCVASG

SEQ ID NO: 5479 - protein, 26 aa, synthetic construct
EVQLVQSGAEVKKPGESLKISCKTSG

SEQ ID NO: 5480 - protein, 26 aa, synthetic construct
EVQLVESGGGLAQPGGSLRLSCAASG

SEQ ID NO: 5481 - protein, 26 aa, synthetic construct
QVQLVESGGGMVQPGRSLRLSCAASG

SEQ ID NO: 5482 - protein, 26 aa, synthetic construct
EVQLVESGPGLVKASETLSLACTVSG

SEQ ID NO: 5483 - protein, 26 aa, synthetic construct
EVQLVESGGGLIQPGGSLRLSCAASE

SEQ ID NO: 5484 - protein, 26 aa, synthetic construct
QVQLVQSGGGVVRPGGSLRLSCAASG

SEQ ID NO: 5485 - protein, 26 aa, synthetic construct
QVQLLESGPGLVKPSETLSLTCGVSG

SEQ ID NO: 5486 - protein, 26 aa, synthetic construct
RGAAGGVWGRLGTARGSLRLSCAASG

SEQ ID NO: 5487 - protein, 26 aa, synthetic construct
EVQLVESGGGLVQTGGSLRLSCASSG

SEQ ID NO: 5488 - protein, 26 aa, synthetic construct
LGAAGAVWGRLGPAGGSLRISCAASG

SEQ ID NO: 5489 - protein, 26 aa, synthetic construct
EVQLLESGPGLVKPSQTLSLTCSVSG

SEQ ID NO: 5490 - protein, 26 aa, synthetic construct
EVQLLESGGGVVQPGRSLRLSCATSG

SEQ ID NO: 5491 - protein, 26 aa, synthetic construct
LGAVGESGPGLVKPSQTLSLTCTVSG

SEQ ID NO: 5492 - protein, 26 aa, synthetic construct
PVQLLESGPGLVKPSETLSLTCTVSG

SEQ ID NO: 5493 - protein, 26 aa, synthetic construct
QVQLVQSGAEVKEPGESLRISCKGSG

SEQ ID NO: 5494 - protein, 26 aa, synthetic construct
EVQLLESGAEVKKPGASVKVSCKTSG

SEQ ID NO: 5495 - protein, 26 aa, synthetic construct
EVQLVETGGGLIQPGESLRLSCAASE

SEQ ID NO: 5496 - protein, 26 aa, synthetic construct
EVQLLQSGAEVKKPGSSVKVSCKASG

SEQ ID NO: 5497 - protein, 26 aa, synthetic construct
QVQLVESGAEVKKPGASVKVSCKASG

SEQ ID NO: 5498 - protein, 26 aa, synthetic construct
EVQLVESGGGVVQLGRSLRLSCAASG

SEQ ID NO: 5499 - protein, 26 aa, synthetic construct
QVQLKQSGPTLVKPTQTLTLTCTFSG

SEQ ID NO: 5500 - protein, 26 aa, synthetic construct
EVQLVESGGGLVKPGGSLRLSCAASG

SEQ ID NO: 5501 - protein, 26 aa, synthetic construct
EVQLLESGGGVVQPGTSLRLSCAASG

SEQ ID NO: 5502 - protein, 26 aa, synthetic construct
EVQLQQWGAGLLKPSETLSRTCAVYG

SEQ ID NO: 5503 - protein, 26 aa, synthetic construct
QVQLQQWGAGLLKPSETLSLTCAVYD

SEQ ID NO: 5504 - protein, 28 aa, synthetic construct
QVQLQQSGPGLGLVKPSETLPLTCTVSG

SEQ ID NO: 5505 - protein, 26 aa, synthetic construct
EVQLVGVWGRRGPAGRSLRLSCAASG

SEQ ID NO: 5506 - protein, 26 aa, synthetic construct
EVQLLESGPGLVKLSETLSLTCKVSG

SEQ ID NO: 5507 - protein, 26 aa, synthetic construct
EVQLVQSGAEVRKPGASVKVSCKASG

SEQ ID NO: 5508 - protein, 26 aa, synthetic construct
EVQLVESGGGVVQPGRSLRVSCAASG

SEQ ID NO: 5509 - protein, 26 aa, synthetic construct
EVQLLESGPGLVRPSQTLSLTCTVSG

SEQ ID NO: 5510 - protein, 26 aa, synthetic construct
QVQLVESGAEVKKPGASVTVSCKAPA

SEQ ID NO: 5511 - protein, 26 aa, synthetic construct
EVQLLESGSGLVKPSQTLSLTCAVSG

SEQ ID NO: 5512 - protein, 26 aa, synthetic construct
QVQLVQSGAAVKKPGASVKVSCQASG

SEQ ID NO: 5513 - protein, 26 aa, synthetic construct
RSSWWQSGGGLVQPGGPLRLSCAASG

SEQ ID NO: 5514 - protein, 26 aa, synthetic construct
QVQLVESGGGLIQPGGSLRLSCAASE

SEQ ID NO: 5515 - protein, 9 aa, synthetic construct
YSFTTYWIG

SEQ ID NO: 5516 - protein, 11 aa, synthetic construct
ASVSGEGNYWT

SEQ ID NO: 5517 - protein, 9 aa, synthetic construct
GTFSSYGIS

SEQ ID NO: 5518 - protein, 9 aa, synthetic construct
LIISDHYID

SEQ ID NO: 5519 - protein, 9 aa, synthetic construct
GSVNGDYWS

SEQ ID NO: 5520 - protein, 9 aa, synthetic construct
FTFSDHFMD

SEQ ID NO: 5521 - protein, 9 aa, synthetic construct
YTFPAYSIH

SEQ ID NO: 5522 - protein, 9 aa, synthetic construct
GSISSHYWS

SEQ ID NO: 5523 - protein, 9 aa, synthetic construct
YPFTGRYMH

SEQ ID NO: 5524 - protein, 11 aa, synthetic construct
FSLATSGMRVS

SEQ ID NO: 5525 - protein, 9 aa, synthetic construct
FTFNYAWMT

SEQ ID NO: 5526 - protein, 9 aa, synthetic construct
FTFRTYDFY

SEQ ID NO: 5527 - protein, 9 aa, synthetic construct
FTFGNFAVH

SEQ ID NO: 5528 - protein, 9 aa, synthetic construct
FTFRHFALH

SEQ ID NO: 5529 - protein, 9 aa, synthetic construct
FTLSSFSMN

SEQ ID NO: 5530 - protein, 9 aa, synthetic construct
FSFNHAWMS

SEQ ID NO: 5531 - protein, 9 aa, synthetic construct
FRFSNYDMH

SEQ ID NO: 5532 - protein, 9 aa, synthetic construct
FTFSSDDMH

SEQ ID NO: 5533 - protein, 9 aa, synthetic construct
ASISTYYWG

SEQ ID NO: 5534 - protein, 9 aa, synthetic construct
GTFSNFAIN

SEQ ID NO: 5535 - protein, 9 aa, synthetic construct
ITFNNDDIH

SEQ ID NO: 5536 - protein, 9 aa, synthetic construct
FTFSRFDMH

SEQ ID NO: 5537 - protein, 9 aa, synthetic construct
FTFGNYAMH

SEQ ID NO: 5538 - protein, 9 aa, synthetic construct
GAFSIHGIT

SEQ ID NO: 5539 - protein, 10 aa, synthetic construct
DSISSGYWWS

SEQ ID NO: 5540 - protein, 9 aa, synthetic construct
YTFTNNYIH

SEQ ID NO: 5541 - protein, 9 aa, synthetic construct
YSFISYWIT

SEQ ID NO: 5542 - protein, 9 aa, synthetic construct
YAFINYGIS

SEQ ID NO: 5543 - protein, 9 aa, synthetic construct
FTFSRHGMH

SEQ ID NO: 5544 - protein, 11 aa, synthetic construct
DSISSSNSYWA

SEQ ID NO: 5545 - protein, 11 aa, synthetic construct
DSISRGGYYWS

SEQ ID NO: 5546 - protein, 10 aa, synthetic construct
GSISGSNWWA

SEQ ID NO: 5547 - protein, 9 aa, synthetic construct
GTFSSSPIS

SEQ ID NO: 5548 - protein, 9 aa, synthetic construct
FTFSNYAFY

SEQ ID NO: 5549 - protein, 9 aa, synthetic construct
FNFDLSAVQ

SEQ ID NO: 5550 - protein, 9 aa, synthetic construct
FPFSTYPMH

SEQ ID NO: 5551 - protein, 9 aa, synthetic construct
FPFSNAWMT

SEQ ID NO: 5552 - protein, 9 aa, synthetic construct
FTFEDYGMH

SEQ ID NO: 5553 - protein, 9 aa, synthetic construct
FPFITYEMN

SEQ ID NO: 5554 - protein, 9 aa, synthetic construct
FIFTNYWIS

SEQ ID NO: 5555 - protein, 9 aa, synthetic construct
FTFSTSDMH

SEQ ID NO: 5556 - protein, 9 aa, synthetic construct
YTFTSYFIH

SEQ ID NO: 5557 - protein, 11 aa, synthetic construct
FSLNTGGICVS

SEQ ID NO: 5558 - protein, 9 aa, synthetic construct
GTARTYAIS

SEQ ID NO: 5559 - protein, 10 aa, synthetic construct
GSISSSNWWT

SEQ ID NO: 5560 - protein, 9 aa, synthetic construct
YSFDTKWIA

SEQ ID NO: 5561 - protein, 11 aa, synthetic construct
FSLTTSGMSVT

SEQ ID NO: 5562 - protein, 9 aa, synthetic construct
VTVSRNYMS

SEQ ID NO: 5563 - protein, 11 aa, synthetic construct
GSISGAPYYWT

SEQ ID NO: 5564 - protein, 9 aa, synthetic construct
GTFSSYGLT

SEQ ID NO: 5565 - protein, 11 aa, synthetic construct
GSIGSNSFYLT

SEQ ID NO: 5566 - protein, 9 aa, synthetic construct
YTFTDYYIH

SEQ ID NO: 5567 - protein, 9 aa, synthetic construct
IIVSWNYMT

SEQ ID NO: 5568 - protein, 10 aa, synthetic construct
ASMNSRNWWA

SEQ ID NO: 5569 - protein, 9 aa, synthetic construct
YTFSNHYIH

SEQ ID NO: 5570 - protein, 10 aa, synthetic construct
DSITSHSWWS

SEQ ID NO: 5571 - protein, 9 aa, synthetic construct
DSINSFYWA

SEQ ID NO: 5572 - protein, 9 aa, synthetic construct
FTFENYDMH

SEQ ID NO: 5573 - protein, 11 aa, synthetic construct
FSLNTAGVGLA

SEQ ID NO: 5574 - protein, 9 aa, synthetic construct
FTFRIYAFH

SEQ ID NO: 5575 - protein, 9 aa, synthetic construct
FTFITSAVQ

SEQ ID NO: 5576 - protein, 9 aa, synthetic construct
FTFSRFSMH

SEQ ID NO: 5577 - protein, 9 aa, synthetic construct
FSFSDYGMH

SEQ ID NO: 5578 - protein, 10 aa, synthetic construct
GSISSRNWWS

SEQ ID NO: 5579 - protein, 9 aa, synthetic construct
FTFSNSDMH

SEQ ID NO: 5580 - protein, 9 aa, synthetic construct
YRFTSYGIS

SEQ ID NO: 5581 - protein, 11 aa, synthetic construct
FSFSTSGVGVA

SEQ ID NO: 5582 - protein, 9 aa, synthetic construct
YSFISNWIG

SEQ ID NO: 5583 - protein, 9 aa, synthetic construct
YTFTGYYMH

SEQ ID NO: 5584 - protein, 9 aa, synthetic construct
YTFINYYIH

SEQ ID NO: 5585 - protein, 9 aa, synthetic construct
FVFSNDDMH

SEQ ID NO: 5586 - protein, 11 aa, synthetic construct
GSLISGGYYWN

SEQ ID NO: 5587 - protein, 11 aa, synthetic construct
GSVSSGSYYWN

SEQ ID NO: 5588 - protein, 9 aa, synthetic construct
FTVSDYYMS

SEQ ID NO: 5589 - protein, 9 aa, synthetic construct
FTFEDYTMH

SEQ ID NO: 5590 - protein, 9 aa, synthetic construct
HTFTLHYMH

SEQ ID NO: 5591 - protein, 9 aa, synthetic construct
FSFGTYDMH

SEQ ID NO: 5592 - protein, 9 aa, synthetic construct
FPFSSYDMH

SEQ ID NO: 5593 - protein, 9 aa, synthetic construct
DYFSTYWIG

SEQ ID NO: 5594 - protein, 11 aa, synthetic construct
ASISRSGFYWN

SEQ ID NO: 5595 - protein, 11 aa, synthetic construct
GSLSSGGYYWN

SEQ ID NO: 5596 - protein, 9 aa, synthetic construct
FSFSTYSMH

SEQ ID NO: 5597 - protein, 9 aa, synthetic construct
FIFSSYDMH

SEQ ID NO: 5598 - protein, 9 aa, synthetic construct
GTFSSQTIS

SEQ ID NO: 5599 - protein, 9 aa, synthetic construct
FNFRSYGMH

SEQ ID NO: 5600 - protein, 9 aa, synthetic construct
GSFSGKYWS

SEQ ID NO: 5601 - protein, 9 aa, synthetic construct
FTFSNAWMN

SEQ ID NO: 5602 - protein, 9 aa, synthetic construct
VSISDYYWS

SEQ ID NO: 5603 - protein, 9 aa, synthetic construct
FTFSSYAMS

SEQ ID NO: 5604 - protein, 9 aa, synthetic construct
YSFTNYWIG

SEQ ID NO: 5605 - protein, 9 aa, synthetic construct
NTFTNNYIQ

SEQ ID NO: 5606 - protein, 11 aa, synthetic construct
GSIRSVYYYWT

SEQ ID NO: 5607 - protein, 9 aa, synthetic construct
FTFSSYVMT

SEQ ID NO: 5608 - protein, 9 aa, synthetic construct
FTFTSDDMH

SEQ ID NO: 5609 - protein, 9 aa, synthetic construct
GPFSKYAMN

SEQ ID NO: 5610 - protein, 9 aa, synthetic construct
YSFTTYYIH

SEQ ID NO: 5611 - protein, 10 aa, synthetic construct
ASISSSNWWS

SEQ ID NO: 5612 - protein, 9 aa, synthetic construct
FSFSLFAMN

SEQ ID NO: 5613 - protein, 9 aa, synthetic construct
LTVSSNYMT

SEQ ID NO: 5614 - protein, 9 aa, synthetic construct
FTVSANYMT

SEQ ID NO: 5615 - protein, 9 aa, synthetic construct
GTFSTYTVT

SEQ ID NO: 5616 - protein, 10 aa, synthetic construct
YSIRSDDYWG

SEQ ID NO: 5617 - protein, 9 aa, synthetic construct
GTFGSDSIS

SEQ ID NO: 5618 - protein, 9 aa, synthetic construct
IIVSSNYMS

SEQ ID NO: 5619 - protein, 9 aa, synthetic construct
YTFSTYWIG

SEQ ID NO: 5620 - protein, 9 aa, synthetic construct
FIFNDYAMH

SEQ ID NO: 5621 - protein, 9 aa, synthetic construct
FTFSSDDIY

SEQ ID NO: 5622 - protein, 11 aa, synthetic construct
FSLSTNGVGVA

SEQ ID NO: 5623 - protein, 9 aa, synthetic construct
YTFTGHYMY

SEQ ID NO: 5624 - protein, 9 aa, synthetic construct
FTFGDHAMN

SEQ ID NO: 5625 - protein, 11 aa, synthetic construct
GSISSRSYYWD

SEQ ID NO: 5626 - protein, 9 aa, synthetic construct
FTFINYGMH

SEQ ID NO: 5627 - protein, 9 aa, synthetic construct
GTFSSNPFS

SEQ ID NO: 5628 - protein, 9 aa, synthetic construct
FTVSTNYMS

SEQ ID NO: 5629 - protein, 11 aa, synthetic construct
GSISSGAYYWT

SEQ ID NO: 5630 - protein, 9 aa, synthetic construct
VNLKEYSMG

SEQ ID NO: 5631 - protein, 11 aa, synthetic construct
DSIASGGYYWT

SEQ ID NO: 5632 - protein, 9 aa, synthetic construct
YTFTTYYIH

SEQ ID NO: 5633 - protein, 9 aa, synthetic construct
FTFSRYGMH

SEQ ID NO: 5634 - protein, 9 aa, synthetic construct
VSFSSSGMH

SEQ ID NO: 5635 - protein, 9 aa, synthetic construct
YTFISQYIH

SEQ ID NO: 5636 - protein, 9 aa, synthetic construct
GSFSNFAFN

SEQ ID NO: 5637 - protein, 9 aa, synthetic construct
VTFDGSAMH

SEQ ID NO: 5638 - protein, 9 aa, synthetic construct
GSFNTFFWT

SEQ ID NO: 5639 - protein, 9 aa, synthetic construct
GSFSTFAIS

SEQ ID NO: 5640 - protein, 9 aa, synthetic construct
YTFSNYYIL

SEQ ID NO: 5641 - protein, 9 aa, synthetic construct
GPFGSSPIS

SEQ ID NO: 5642 - protein, 9 aa, synthetic construct
FTLSNDDIH

SEQ ID NO: 5643 - protein, 9 aa, synthetic construct
GSFNSHSIS

SEQ ID NO: 5644 - protein, 9 aa, synthetic construct
FTFSTYAMH

SEQ ID NO: 5645 - protein, 9 aa, synthetic construct
GSFSGNYWS

SEQ ID NO: 5646 - protein, 9 aa, synthetic construct
YSFTTYWIT

SEQ ID NO: 5647 - protein, 9 aa, synthetic construct
FTVSNNYMS

SEQ ID NO: 5648 - protein, 9 aa, synthetic construct
FTFNKYGMH

SEQ ID NO: 5649 - protein, 9 aa, synthetic construct
FTFRIYGMH

SEQ ID NO: 5650 - protein, 10 aa, synthetic construct
GSISSSNWWS

SEQ ID NO: 5651 - protein, 10 aa, synthetic construct
ASISSTNWWS

SEQ ID NO: 5652 - protein, 9 aa, synthetic construct
GAFSIYAIS

SEQ ID NO: 5653 - protein, 11 aa, synthetic construct
VSISSGGYYWN

SEQ ID NO: 5654 - protein, 9 aa, synthetic construct
FTFSSYAMN

SEQ ID NO: 5655 - protein, 9 aa, synthetic construct
ASISSYYWS

SEQ ID NO: 5656 - protein, 9 aa, synthetic construct
YSFSSYWIS

SEQ ID NO: 5657 - protein, 9 aa, synthetic construct
SSFTHHPIA

SEQ ID NO: 5658 - protein, 9 aa, synthetic construct
FTFSNYDIH

SEQ ID NO: 5659 - protein, 10 aa, synthetic construct
ASLSGINWWS

SEQ ID NO: 5660 - protein, 9 aa, synthetic construct
FSINTYGIH

SEQ ID NO: 5661 - protein, 9 aa, synthetic construct
GILNTYSIS

SEQ ID NO: 5662 - protein, 9 aa, synthetic construct
GTFSNYGIN

SEQ ID NO: 5663 - protein, 11 aa, synthetic construct
GSIKSGGYYWS

SEQ ID NO: 5664 - protein, 9 aa, synthetic construct
FTFRTYDMH

SEQ ID NO: 5665 - protein, 9 aa, synthetic construct
VIVSRNYMA

SEQ ID NO: 5666 - protein, 9 aa, synthetic construct
GTISRSAIT

SEQ ID NO: 5667 - protein, 9 aa, synthetic construct
FSFTDYWIG

SEQ ID NO: 5668 - protein, 9 aa, synthetic construct
FTFSNDDIY

SEQ ID NO: 5669 - protein, 9 aa, synthetic construct
DSFSSYTVN

SEQ ID NO: 5670 - protein, 9 aa, synthetic construct
GPFSSSPIS

SEQ ID NO: 5671 - protein, 9 aa, synthetic construct
GTFDSYTIS

SEQ ID NO: 5672 - protein, 9 aa, synthetic construct
GSISSNYWS

SEQ ID NO: 5673 - protein, 9 aa, synthetic construct
YTFSNYYVH

SEQ ID NO: 5674 - protein, 9 aa, synthetic construct
GAFSSYSIS

SEQ ID NO: 5675 - protein, 9 aa, synthetic construct
GSTRNYYWT

SEQ ID NO: 5676 - protein, 9 aa, synthetic construct
FTFGSYGMH

SEQ ID NO: 5677 - protein, 10 aa, synthetic construct
GSISGPNWWS

SEQ ID NO: 5678 - protein, 9 aa, synthetic construct
FTFDDFAMS

SEQ ID NO: 5679 - protein, 11 aa, synthetic construct
GSISRTTYYWG

SEQ ID NO: 5680 - protein, 9 aa, synthetic construct
YSFTNYYIH

SEQ ID NO: 5681 - protein, 9 aa, synthetic construct
HTFSTYYIH

SEQ ID NO: 5682 - protein, 9 aa, synthetic construct
GSFSSYTIS

SEQ ID NO: 5683 - protein, 9 aa, synthetic construct
YTFTSFGVN

SEQ ID NO: 5684 - protein, 9 aa, synthetic construct
GTFSSYTVS

SEQ ID NO: 5685 - protein, 9 aa, synthetic construct
GTFSSNTVS

SEQ ID NO: 5686 - protein, 9 aa, synthetic construct
FIFSDYGIH

SEQ ID NO: 5687 - protein, 9 aa, synthetic construct
YSFISHWIA

SEQ ID NO: 5688 - protein, 9 aa, synthetic construct
FNVSRNYMN

SEQ ID NO: 5689 - protein, 11 aa, synthetic construct
GSISSGAYYWS

SEQ ID NO: 5690 - protein, 9 aa, synthetic construct
GTFSNSAIN

SEQ ID NO: 5691 - protein, 9 aa, synthetic construct
FSVRTNYMS

SEQ ID NO: 5692 - protein, 9 aa, synthetic construct
FTFDDHAMH

SEQ ID NO: 5693 - protein, 9 aa, synthetic construct
FTFSSYAIH

SEQ ID NO: 5694 - protein, 9 aa, synthetic construct
GTFSSHSIT

SEQ ID NO: 5695 - protein, 11 aa, synthetic construct
GSISSGGYYWG

SEQ ID NO: 5696 - protein, 9 aa, synthetic construct
FTFSSYWMH

SEQ ID NO: 5697 - protein, 9 aa, synthetic construct
FTFSDYGMH

SEQ ID NO: 5698 - protein, 9 aa, synthetic construct
FTFNDYAMH

SEQ ID NO: 5699 - protein, 9 aa, synthetic construct
FTFAVSSVQ

SEQ ID NO: 5700 - protein, 9 aa, synthetic construct
FTFSRYSMH

SEQ ID NO: 5701 - protein, 9 aa, synthetic construct
FAFHDYSMH

SEQ ID NO: 5702 - protein, 9 aa, synthetic construct
YTFSDHYMH

SEQ ID NO: 5703 - protein, 9 aa, synthetic construct
YNFVNYGIS

SEQ ID NO: 5704 - protein, 11 aa, synthetic construct
GSISSVYYYWT

SEQ ID NO: 5705 - protein, 9 aa, synthetic construct
FTLSSVDMH

SEQ ID NO: 5706 - protein, 9 aa, synthetic construct
YTFTSQYVH

SEQ ID NO: 5707 - protein, 9 aa, synthetic construct
DSISGYYWS

SEQ ID NO: 5708 - protein, 9 aa, synthetic construct
DTFTRHSIS

SEQ ID NO: 5709 - protein, 9 aa, synthetic construct
HTFANYYIH

SEQ ID NO: 5710 - protein, 9 aa, synthetic construct
FTLSSFSLN

SEQ ID NO: 5711 - protein, 9 aa, synthetic construct
YTFSHYYIH

SEQ ID NO: 5712 - protein, 9 aa, synthetic construct
FTVSVNYMT

SEQ ID NO: 5713 - protein, 9 aa, synthetic construct
FTFSRYSMD

SEQ ID NO: 5714 - protein, 9 aa, synthetic construct
YTFTSHDIN

SEQ ID NO: 5715 - protein, 9 aa, synthetic construct
FSVSVNYMS

SEQ ID NO: 5716 - protein, 9 aa, synthetic construct
FTFSSYNMN

SEQ ID NO: 5717 - protein, 9 aa, synthetic construct
FTFHDYAMH

SEQ ID NO: 5718 - protein, 9 aa, synthetic construct
GTFSSSTIS

SEQ ID NO: 5719 - protein, 10 aa, synthetic construct
GSISTSDWWS

SEQ ID NO: 5720 - protein, 9 aa, synthetic construct
FNFSNYGMH

SEQ ID NO: 5721 - protein, 9 aa, synthetic construct
FTFSRYGMY

SEQ ID NO: 5722 - protein, 9 aa, synthetic construct
GTFSSDSIS

SEQ ID NO: 5723 - protein, 9 aa, synthetic construct
FTFSSYDIH

SEQ ID NO: 5724 - protein, 9 aa, synthetic construct
FTFGDYGMN

SEQ ID NO: 5725 - protein, 10 aa, synthetic construct
YSISSGYYWG

SEQ ID NO: 5726 - protein, 9 aa, synthetic construct
GSISSYYWT

SEQ ID NO: 5727 - protein, 9 aa, synthetic construct
YSFTHYWIG

SEQ ID NO: 5728 - protein, 9 aa, synthetic construct
FTFSSFPMS

SEQ ID NO: 5729 - protein, 9 aa, synthetic construct
FTFANYYMT

SEQ ID NO: 5730 - protein, 11 aa, synthetic construct
GSVGSGDFYWN

SEQ ID NO: 5731 - protein, 9 aa, synthetic construct
FPFNTHGLN

SEQ ID NO: 5732 - protein, 11 aa, synthetic construct
HSIISGSYYSS

SEQ ID NO: 5733 - protein, 9 aa, synthetic construct
DTFSNYAIT

SEQ ID NO: 5734 - protein, 9 aa, synthetic construct
IIVSRNYMN

SEQ ID NO: 5735 - protein, 9 aa, synthetic construct
GSIGTSYWS

SEQ ID NO: 5736 - protein, 9 aa, synthetic construct
FTFTNCAMG

SEQ ID NO: 5737 - protein, 9 aa, synthetic construct
YSFTSHWIG

SEQ ID NO: 5738 - protein, 9 aa, synthetic construct
YTFTNHYMH

SEQ ID NO: 5739 - protein, 9 aa, synthetic construct
FTFSAYWMT

SEQ ID NO: 5740 - protein, 9 aa, synthetic construct
IIVSRNYMS

SEQ ID NO: 5741 - protein, 9 aa, synthetic construct
FTFSNYAMS

SEQ ID NO: 5742 - protein, 9 aa, synthetic construct
YTFSSFGVS

SEQ ID NO: 5743 - protein, 9 aa, synthetic construct
GSFSNYGIS

SEQ ID NO: 5744 - protein, 9 aa, synthetic construct
YRFNIYGIT

SEQ ID NO: 5745 - protein, 9 aa, synthetic construct
FTFSDYNMH

SEQ ID NO: 5746 - protein, 11 aa, synthetic construct
FSLSTYGVGVG

SEQ ID NO: 5747 - protein, 9 aa, synthetic construct
FTFSTYTMN

SEQ ID NO: 5748 - protein, 9 aa, synthetic construct
FTFRSYAMH

SEQ ID NO: 5749 - protein, 9 aa, synthetic construct
GSFSSDAIN

SEQ ID NO: 5750 - protein, 9 aa, synthetic construct
GTFSSYAIN

SEQ ID NO: 5751 - protein, 9 aa, synthetic construct
FTFDDYALH

SEQ ID NO: 5752 - protein, 9 aa, synthetic construct
YDFSNLWIG

SEQ ID NO: 5753 - protein, 9 aa, synthetic construct
ESFRDYFWN

SEQ ID NO: 5754 - protein, 9 aa, synthetic construct
FTFSSYEIH

SEQ ID NO: 5755 - protein, 9 aa, synthetic construct
FTFSHYGMH

SEQ ID NO: 5756 - protein, 9 aa, synthetic construct
YTFTTYYVH

SEQ ID NO: 5757 - protein, 9 aa, synthetic construct
GSFSNYYWS

SEQ ID NO: 5758 - protein, 9 aa, synthetic construct
FTFRRSVMH

SEQ ID NO: 5759 - protein, 9 aa, synthetic construct
FTFGSYVMH

SEQ ID NO: 5760 - protein, 9 aa, synthetic construct
VTVSANYMR

SEQ ID NO: 5761 - protein, 9 aa, synthetic construct
YTFTNYYIH

SEQ ID NO: 5762 - protein, 11 aa, synthetic construct
GSISSGDYYWS

SEQ ID NO: 5763 - protein, 9 aa, synthetic construct
YTFTSYYIH

SEQ ID NO: 5764 - protein, 11 aa, synthetic construct
GSISSDDYSWN

SEQ ID NO: 5765 - protein, 9 aa, synthetic construct
FTFSGYAMH

SEQ ID NO: 5766 - protein, 9 aa, synthetic construct
FTFNNFAFH

SEQ ID NO: 5767 - protein, 11 aa, synthetic construct
GSISSDIYYWS

SEQ ID NO: 5768 - protein, 11 aa, synthetic construct
GSISSGGYYWS

SEQ ID NO: 5769 - protein, 9 aa, synthetic construct
FTFSSYALS

SEQ ID NO: 5770 - protein, 9 aa, synthetic construct
FTFSSFAMS

SEQ ID NO: 5771 - protein, 9 aa, synthetic construct
GSISNYYWS

SEQ ID NO: 5772 - protein, 9 aa, synthetic construct
YTFTTYYMH

SEQ ID NO: 5773 - protein, 14 aa, synthetic construct
WIRQPPGKRLESIA

SEQ ID NO: 5774 - protein, 14 aa, synthetic construct
WIRQPPGKGLELIG

SEQ ID NO: 5775 - protein, 14 aa, synthetic construct
WVRQVPGQRLEWLG

SEQ ID NO: 5776 - protein, 14 aa, synthetic construct
WVRRAPGKGLEWVS

SEQ ID NO: 5777 - protein, 14 aa, synthetic construct
WVRQAPGGGLEWVG

SEQ ID NO: 5778 - protein, 14 aa, synthetic construct
WVRQTPGKGLEWVA

SEQ ID NO: 5779 - protein, 14 aa, synthetic construct
WVRLPPGKGLQWIG

SEQ ID NO: 5780 - protein, 14 aa, synthetic construct
WVRQAIGKGLEWLS

SEQ ID NO: 5781 - protein, 14 aa, synthetic construct
WVRQPAGKGLEWVS

SEQ ID NO: 5782 - protein, 14 aa, synthetic construct
WVRQAPGKGLELVS

SEQ ID NO: 5783 - protein, 14 aa, synthetic construct
WVRQGPGKGLEWVS

SEQ ID NO: 5784 - protein, 14 aa, synthetic construct
WFRQGTGKGLEWVS

SEQ ID NO: 5785 - protein, 14 aa, synthetic construct
WVRQAPDKGLEWVA

SEQ ID NO: 5786 - protein, 14 aa, synthetic construct
WVRQAPGQGLEWLG

SEQ ID NO: 5787 - protein, 14 aa, synthetic construct
WVRQPPLKGLEWIG

SEQ ID NO: 5788 - protein, 14 aa, synthetic construct
WIRQHPGRGLEWIG

SEQ ID NO: 5789 - protein, 14 aa, synthetic construct
WVRQARGQRLEWIG

SEQ ID NO: 5790 - protein, 14 aa, synthetic construct
WVRQAPGRGLEWVA

SEQ ID NO: 5791 - protein, 14 aa, synthetic construct
WVRQAPGKGLEWIG

SEQ ID NO: 5792 - protein, 14 aa, synthetic construct
WVRQAPGKGLDWVS

SEQ ID NO: 5793 - protein, 14 aa, synthetic construct
WVRQVTGKHLEWVS

SEQ ID NO: 5794 - protein, 14 aa, synthetic construct
WLRQPPGKALEWLA

SEQ ID NO: 5795 - protein, 14 aa, synthetic construct
WVRQMPGKGPEWLG

SEQ ID NO: 5796 - protein, 14 aa, synthetic construct
WIRQHPGRGLEWMA

SEQ ID NO: 5797 - protein, 14 aa, synthetic construct
WVRQAPGQGLEFMG

SEQ ID NO: 5798 - protein, 14 aa, synthetic construct
WIRQSAGKGLEWLG

SEQ ID NO: 5799 - protein, 14 aa, synthetic construct
WLRQAPGQGFEWMG

SEQ ID NO: 5800 - protein, 14 aa, synthetic construct
WIRQAPGKGLEWVS

SEQ ID NO: 5801 - protein, 14 aa, synthetic construct
WVRQTPGQGLEWIG

SEQ ID NO: 5802 - protein, 14 aa, synthetic construct
WVRQGRGRGLEWVS

SEQ ID NO: 5803 - protein, 14 aa, synthetic construct
WVRQSPGKGLEWVA

SEQ ID NO: 5804 - protein, 14 aa, synthetic construct
WVRQTRGQRLEWMG

SEQ ID NO: 5805 - protein, 14 aa, synthetic construct
WVRQTTGNSLEWVS

SEQ ID NO: 5806 - protein, 14 aa, synthetic construct
WVRQAPGQGFEWMG

SEQ ID NO: 5807 - protein, 14 aa, synthetic construct
WVRQPLEKGLEWVA

SEQ ID NO: 5808 - protein, 14 aa, synthetic construct
WIRQPPGKQLEWIG

SEQ ID NO: 5809 - protein, 14 aa, synthetic construct
WVRQSPEKGLEWPR

SEQ ID NO: 5810 - protein, 14 aa, synthetic construct
WVRQSTGKGLEWVS

SEQ ID NO: 5811 - protein, 14 aa, synthetic construct
WVRQAPGSGLEWVA

SEQ ID NO: 5812 - protein, 14 aa, synthetic construct
WVRQMPGKGLEWVG

SEQ ID NO: 5813 - protein, 14 aa, synthetic construct
WVRQVTGKGLEWVA

SEQ ID NO: 5814 - protein, 14 aa, synthetic construct
WIRQPAGKGLEWIG

SEQ ID NO: 5815 - protein, 14 aa, synthetic construct
WVRQVPGQGVEWMG

SEQ ID NO: 5816 - protein, 14 aa, synthetic construct
WVRQVIGKGLEWVS

SEQ ID NO: 5817 - protein, 14 aa, synthetic construct
WVRQAPGQRPEWLG

SEQ ID NO: 5818 - protein, 14 aa, synthetic construct
WVRQAPGPGLEWMG

SEQ ID NO: 5819 - protein, 14 aa, synthetic construct
WLRQAPGKGLEWVS

SEQ ID NO: 5820 - protein, 14 aa, synthetic construct
WIRQTPGKGLEWIG

SEQ ID NO: 5821 - protein, 14 aa, synthetic construct
WVRQAPGKGLAWVS

SEQ ID NO: 5822 - protein, 14 aa, synthetic construct
WIRQSPGRGLEWIG

SEQ ID NO: 5823 - protein, 14 aa, synthetic construct
WIRQHPGQGLEWIG

SEQ ID NO: 5824 - protein, 14 aa, synthetic construct
WYRQAPGSARGAVA

SEQ ID NO: 5825 - protein, 14 aa, synthetic construct
WVRQAPGEGLEWMG

SEQ ID NO: 5826 - protein, 14 aa, synthetic construct
WVRQVPGRGLEWVS

SEQ ID NO: 5827 - protein, 14 aa, synthetic construct
WIRQPAGRGLEWIG

SEQ ID NO: 5828 - protein, 14 aa, synthetic construct
WVRQAPGQGLEWVG

SEQ ID NO: 5829 - protein, 14 aa, synthetic construct
WVRQPPGKGLEWVS

SEQ ID NO: 5830 - protein, 14 aa, synthetic construct
WVRQAPGRGLEWLA

SEQ ID NO: 5831 - protein, 14 aa, synthetic construct
WVRQAPGKGLESVA

SEQ ID NO: 5832 - protein, 14 aa, synthetic construct
WVRQSPGKGLEWIA

SEQ ID NO: 5833 - protein, 14 aa, synthetic construct
WVRQAPGKGLEWLA

SEQ ID NO: 5834 - protein, 14 aa, synthetic construct
WVRLVPGKGLEWVS

SEQ ID NO: 5835 - protein, 14 aa, synthetic construct
WLRQAPGQGLEWVG

SEQ ID NO: 5836 - protein, 14 aa, synthetic construct
WVRQSTGEGLEWVS

SEQ ID NO: 5837 - protein, 14 aa, synthetic construct
WVRQTAVKGLEWVS

SEQ ID NO: 5838 - protein, 14 aa, synthetic construct
WVRQAPGRGLEWVP

SEQ ID NO: 5839 - protein, 14 aa, synthetic construct
WIRQAPGRGLEWLS

SEQ ID NO: 5840 - protein, 14 aa, synthetic construct
WVRQAPGHGLEWMG

SEQ ID NO: 5841 - protein, 14 aa, synthetic construct
WVRQAPGKGLDWVA

SEQ ID NO: 5842 - protein, 14 aa, synthetic construct
WVRQDTGKRLEWVS

SEQ ID NO: 5843 - protein, 14 aa, synthetic construct
WVRQMPGKGLEWTG

SEQ ID NO: 5844 - protein, 14 aa, synthetic construct
WVRQAPGKGLEWAA

SEQ ID NO: 5845 - protein, 14 aa, synthetic construct
WIRQHPGKGLEWMG

SEQ ID NO: 5846 - protein, 14 aa, synthetic construct
WVRQTPSNGLEWVS

SEQ ID NO: 5847 - protein, 14 aa, synthetic construct
WVRQVSGKGLEWVS

SEQ ID NO: 5848 - protein, 14 aa, synthetic construct
WVRQAPGRGPESVS

SEQ ID NO: 5849 - protein, 14 aa, synthetic construct
WVRQKPGKGLEWMG

SEQ ID NO: 5850 - protein, 14 aa, synthetic construct
WVRQPPGQGLEWMG

SEQ ID NO: 5851 - protein, 14 aa, synthetic construct
GVRQAPGKGLECVS

SEQ ID NO: 5852 - protein, 14 aa, synthetic construct
WVRQAPGKGVEWVS

SEQ ID NO: 5853 - protein, 14 aa, synthetic construct
WIRHHPGKGLEWIG

SEQ ID NO: 5854 - protein, 14 aa, synthetic construct
WVRLAPGKGLQWVA

SEQ ID NO: 5855 - protein, 14 aa, synthetic construct
WVRQTPDKGLEWVA

SEQ ID NO: 5856 - protein, 14 aa, synthetic construct
WIRQLPGKGLEWIG

SEQ ID NO: 5857 - protein, 14 aa, synthetic construct
WIRQPPGNGLEWIG

SEQ ID NO: 5858 - protein, 14 aa, synthetic construct
WLRQPPGKGLEWVG

SEQ ID NO: 5859 - protein, 14 aa, synthetic construct
WVRQAPGKGLEWVP

SEQ ID NO: 5860 - protein, 14 aa, synthetic construct
WVRQSPGKGLEWVS

SEQ ID NO: 5861 - protein, 14 aa, synthetic construct
WVRQAPGKGPEWVA

SEQ ID NO: 5862 - protein, 14 aa, synthetic construct
WIRQPPGKGLEWVG

SEQ ID NO: 5863 - protein, 14 aa, synthetic construct
WVRQAPRQGLEWMG

SEQ ID NO: 5864 - protein, 14 aa, synthetic construct
WVRLMPGKGPEWMG

SEQ ID NO: 5865 - protein, 14 aa, synthetic construct
WIRQPPGQGLEWMG

SEQ ID NO: 5866 - protein, 14 aa, synthetic construct
WIRQPPGKRLEWIG

SEQ ID NO: 5867 - protein, 14 aa, synthetic construct
WVRQAPGKGLECVS

SEQ ID NO: 5868 - protein, 14 aa, synthetic construct
WVRLAPGQGLEWMG

SEQ ID NO: 5869 - protein, 16 aa, synthetic construct
YFYSTGKTNYNPSLKS

SEQ ID NO: 5870 - protein, 17 aa, synthetic construct
RVIPFLRILDYAPKFQG

SEQ ID NO: 5871 - protein, 19 aa, synthetic construct
RSANRVNSYTALYAASVMG

SEQ ID NO: 5872 - protein, 16 aa, synthetic construct
EISHDGTTKYKSALES

SEQ ID NO: 5873 - protein, 19 aa, synthetic construct
RTRNKANSYTTEYAASVKG

SEQ ID NO: 5874 - protein, 17 aa, synthetic construct
WINPRYGNTKSSQNLQG

SEQ ID NO: 5875 - protein, 16 aa, synthetic construct
NIYHSGSTNYNPSLKS

SEQ ID NO: 5876 - protein, 17 aa, synthetic construct
WINPSSGYTNSAQKFQG

SEQ ID NO: 5877 - protein, 16 aa, synthetic construct
RIDWEDDKVYSTSLKN

SEQ ID NO: 5878 - protein, 16 aa, synthetic construct
VLYSGGSTYYADSVKG

SEQ ID NO: 5879 - protein, 17 aa, synthetic construct
GISWNGGSIAYADSVKG

SEQ ID NO: 5880 - protein, 17 aa, synthetic construct
GVTWNSGTIDYADSVKG

SEQ ID NO: 5881 - protein, 19 aa, synthetic construct
RVKSHIDGGTTDYAAPVKG

SEQ ID NO: 5882 - protein, 17 aa, synthetic construct
VVSSDASSKFYADSVKG

SEQ ID NO: 5883 - protein, 17 aa, synthetic construct
ATSHDGSEKNYADSVKG

SEQ ID NO: 5884 - protein, 17 aa, synthetic construct
VISYDGNEKYYADSVKG

SEQ ID NO: 5885 - protein, 16 aa, synthetic construct
SVSHDGSTYHNPSLKS

SEQ ID NO: 5886 - protein, 17 aa, synthetic construct
YISSGSTIIHYADSMRG

SEQ ID NO: 5887 - protein, 19 aa, synthetic construct
RIKTINDGGTTDYAAPVKG

SEQ ID NO: 5888 - protein, 16 aa, synthetic construct
VIGTDGDTYYPDSVKG

SEQ ID NO: 5889 - protein, 16 aa, synthetic construct
AIGTSGDSYYTDSVKG

SEQ ID NO: 5890 - protein, 16 aa, synthetic construct
VIYAGGRTDYADSVKG

SEQ ID NO: 5891 - protein, 16 aa, synthetic construct
YIYYSGSANLNPSLKS

SEQ ID NO: 5892 - protein, 17 aa, synthetic construct
RVIPVLDRPIYAQQFQG

SEQ ID NO: 5893 - protein, 16 aa, synthetic construct
AIGSSGDTYYADSVKG

SEQ ID NO: 5894 - protein, 16 aa, synthetic construct
AIGTSGDTYYGDSVKG

SEQ ID NO: 5895 - protein, 17 aa, synthetic construct
VVSYDGSNEFYADSVKG

SEQ ID NO: 5896 - protein, 17 aa, synthetic construct
GIIPMFGTANYPQNFQG

SEQ ID NO: 5897 - protein, 16 aa, synthetic construct
DIYHSGNTVYNPSLKS

SEQ ID NO: 5898 - protein, 17 aa, synthetic construct
IINPSGGATTYAQKFQG

SEQ ID NO: 5899 - protein, 17 aa, synthetic construct
NIDPSDSYTNYSPAFQG

SEQ ID NO: 5900 - protein, 17 aa, synthetic construct
WISPYDGHTNYAQKIQG

SEQ ID NO: 5901 - protein, 17 aa, synthetic construct
LIYYDGSSKYYADSVKG

SEQ ID NO: 5902 - protein, 16 aa, synthetic construct
SIFYSGSTYYNPSLKS

SEQ ID NO: 5903 - protein, 16 aa, synthetic construct
FIYYSGSTYYNPSLKS

SEQ ID NO: 5904 - protein, 16 aa, synthetic construct
EIFHSGSTVYNPSLKS

SEQ ID NO: 5905 - protein, 17 aa, synthetic construct
LISYDGSNNYYADSVKG

SEQ ID NO: 5906 - protein, 17 aa, synthetic construct
TIIPILGVPNYAQQFQA

SEQ ID NO: 5907 - protein, 17 aa, synthetic construct
LMSDDGAYKDYADSVKG

SEQ ID NO: 5908 - protein, 17 aa, synthetic construct
WIAVGSGKTDYAQKFHE

SEQ ID NO: 5909 - protein, 17 aa, synthetic construct
VISYDGAHKFYADSVKG

SEQ ID NO: 5910 - protein, 19 aa, synthetic construct
RIKNGPDGGTTDYAAPVRG

SEQ ID NO: 5911 - protein, 17 aa, synthetic construct
GTAWNSATIGYADSVKG

SEQ ID NO: 5912 - protein, 17 aa, synthetic construct
HISSGGTTTYYADSVKG

SEQ ID NO: 5913 - protein, 17 aa, synthetic construct
TVKQDGTEKYYVDSVKG

SEQ ID NO: 5914 - protein, 16 aa, synthetic construct
GVGTSGDTYYSDSVKG

SEQ ID NO: 5915 - protein, 17 aa, synthetic construct
IINPGDDSTTYSQKFQG

SEQ ID NO: 5916 - protein, 16 aa, synthetic construct
RIDWDYEKHYSASLTT

SEQ ID NO: 5917 - protein, 17 aa, synthetic construct
GIIPKYDTTNYAQKFQG

SEQ ID NO: 5918 - protein, 16 aa, synthetic construct
EIYHRGTTDYNPSLKS

SEQ ID NO: 5919 - protein, 16 aa, synthetic construct
LVDWDDAKYYSTSLTT

SEQ ID NO: 5920 - protein, 16 aa, synthetic construct
IIYSGGSAYYADSVKG

SEQ ID NO: 5921 - protein, 16 aa, synthetic construct
HTEYSGGTYYNPSLKS

SEQ ID NO: 5922 - protein, 17 aa, synthetic construct
RILPLIGVPDYAQSFQG

SEQ ID NO: 5923 - protein, 16 aa, synthetic construct
RIYASGGTSYNPSLQS

SEQ ID NO: 5924 - protein, 17 aa, synthetic construct
WLNPQTGDTNYAQKFQG

SEQ ID NO: 5925 - protein, 16 aa, synthetic construct
VMYPGGSTFYADSVRG

SEQ ID NO: 5926 - protein, 17 aa, synthetic construct
IVNPDAGSTTYAQKFQG

SEQ ID NO: 5927 - protein, 16 aa, synthetic construct
EVFHSGSTEYSPSLKS

SEQ ID NO: 5928 - protein, 17 aa, synthetic construct
GIIPILGTTSSAHKFEG

SEQ ID NO: 5929 - protein, 16 aa, synthetic construct
DIYHSGRTNYNPSLKS

SEQ ID NO: 5930 - protein, 16 aa, synthetic construct
AIGTSGDTYYADSVKG

SEQ ID NO: 5931 - protein, 17 aa, synthetic construct
TISSDASIKYYGDSVKG

SEQ ID NO: 5932 - protein, 16 aa, synthetic construct
LVYWDGDRRYSPFLKT

SEQ ID NO: 5933 - protein, 17 aa, synthetic construct
VISHDGSETYYADSVKG

SEQ ID NO: 5934 - protein, 17 aa, synthetic construct
WIAVGSGNTEYAQKFQE

SEQ ID NO: 5935 - protein, 17 aa, synthetic construct
LISFDGSDKYYTDSVKG

SEQ ID NO: 5936 - protein, 17 aa, synthetic construct
VIWYDGSNRYYLDSVQG

SEQ ID NO: 5937 - protein, 17 aa, synthetic construct
WINTFNGDTNYPQKFQG

SEQ ID NO: 5938 - protein, 16 aa, synthetic construct
EIFHTGSTAYNPSLKS

SEQ ID NO: 5939 - protein, 17 aa, synthetic construct
WISVYNGDTNYAQKVQG

SEQ ID NO: 5940 - protein, 17 aa, synthetic construct
RIFPILGIPNYAQKFQD

SEQ ID NO: 5941 - protein, 16 aa, synthetic construct
LIYWDGDKRYSPSLKS

SEQ ID NO: 5942 - protein, 16 aa, synthetic construct
AIGTGGHTYYPDSVKG

SEQ ID NO: 5943 - protein, 17 aa, synthetic construct
VILDDGSNKFYADSVKG

SEQ ID NO: 5944 - protein, 17 aa, synthetic construct
WINPNSGGTNYAQKFQG

SEQ ID NO: 5945 - protein, 17 aa, synthetic construct
LITPDGGSRTYAQKFQG

SEQ ID NO: 5946 - protein, 16 aa, synthetic construct
GIGTSGDTYYADSVKG

SEQ ID NO: 5947 - protein, 16 aa, synthetic construct
CMYYSVGTHYNPSLKS

SEQ ID NO: 5948 - protein, 16 aa, synthetic construct
HVFHSGGTNFNPSLRS

SEQ ID NO: 5949 - protein, 16 aa, synthetic construct
EIYHVGATNDNPSLKS

SEQ ID NO: 5950 - protein, 16 aa, synthetic construct
DIYPGGSTFYADSLKG

SEQ ID NO: 5951 - protein, 17 aa, synthetic construct
NIYPIDSDTRYNPSFQG

SEQ ID NO: 5952 - protein, 16 aa, synthetic construct
VIYSGNNTYYIDSVKG

SEQ ID NO: 5953 - protein, 17 aa, synthetic construct
IINPDAGSTTYAQKFQG

SEQ ID NO: 5954 - protein, 16 aa, synthetic construct
VVYPGGSTFYADSVRG

SEQ ID NO: 5955 - protein, 17 aa, synthetic construct
LISNDGRMKFYTDSVKG

SEQ ID NO: 5956 - protein, 17 aa, synthetic construct
IIWPGDSDTTYSPSFQG

SEQ ID NO: 5957 - protein, 16 aa, synthetic construct
ATGTSGDTSYLDSVKG

SEQ ID NO: 5958 - protein, 17 aa, synthetic construct
IFFPGDSDARYSPSFQG

SEQ ID NO: 5959 - protein, 16 aa, synthetic construct
NIYNSGSTYYNPSLKS

SEQ ID NO: 5960 - protein, 16 aa, synthetic construct
YISYTGSTDYNPSLKS

SEQ ID NO: 5961 - protein, 17 aa, synthetic construct
DISGDGLITYYADSVKG

SEQ ID NO: 5962 - protein, 16 aa, synthetic construct
AIGTAGDTYYEDSVKG

SEQ ID NO: 5963 - protein, 17 aa, synthetic construct
KIFPILGVTNYAERFQG

SEQ ID NO: 5964 - protein, 17 aa, synthetic construct
AISHDGTNPYYADSVKG

SEQ ID NO: 5965 - protein, 16 aa, synthetic construct
EINDSGTTNYNPSLKS

SEQ ID NO: 5966 - protein, 19 aa, synthetic construct
RIKSNFDGGTTDYAAPVKG

SEQ ID NO: 5967 - protein, 16 aa, synthetic construct
YISYSGSTDYNPSLKS

SEQ ID NO: 5968 - protein, 17 aa, synthetic construct
SVSGSGANTYYADSVKG

SEQ ID NO: 5969 - protein, 17 aa, synthetic construct
VIYPGDSDTRYSPSFQG

SEQ ID NO: 5970 - protein, 17 aa, synthetic construct
YISSSGSTIYYADSVKG

SEQ ID NO: 5971 - protein, 17 aa, synthetic construct
IINPVGGSRTYAQEFQG

SEQ ID NO: 5972 - protein, 16 aa, synthetic construct
YIYHNGTTYSNPSLRS

SEQ ID NO: 5973 - protein, 17 aa, synthetic construct
SISGSGGARYSADSLEG

SEQ ID NO: 5974 - protein, 16 aa, synthetic construct
GIGTSGDRYYADSVKG

SEQ ID NO: 5975 - protein, 17 aa, synthetic construct
RIILVLGITNYAQKFQG

SEQ ID NO: 5976 - protein, 17 aa, synthetic construct
LITPSDGGASYAQKFQG

SEQ ID NO: 5977 - protein, 16 aa, synthetic construct
EIYHVGSTNYNPSLKS

SEQ ID NO: 5978 - protein, 17 aa, synthetic construct
SITGSADTTYYADSVKG

SEQ ID NO: 5979 - protein, 16 aa, synthetic construct
VMFSGGSTFYADSVKG

SEQ ID NO: 5980 - protein, 16 aa, synthetic construct
SILVTSHVFYADSVKG

SEQ ID NO: 5981 - protein, 16 aa, synthetic construct
VIYSDGNTYYANSVKG

SEQ ID NO: 5982 - protein, 17 aa, synthetic construct
GIIPIVGIPNYAENFQG

SEQ ID NO: 5983 - protein, 16 aa, synthetic construct
SVYYSGSTHYNPSLKS

SEQ ID NO: 5984 - protein, 17 aa, synthetic construct
RIIPILGVPNSAQKFQD

SEQ ID NO: 5985 - protein, 17 aa, synthetic construct
VISSDGSLRFYADSVKG

SEQ ID NO: 5986 - protein, 16 aa, synthetic construct
LMYAGGSTFYADSVKG

SEQ ID NO: 5987 - protein, 17 aa, synthetic construct
IIFPGDSDTRYSPSFQG

SEQ ID NO: 5988 - protein, 17 aa, synthetic construct
GISWNGVSIGYGDSVKG

SEQ ID NO: 5989 - protein, 16 aa, synthetic construct
TLYSGGSTFYADSVRG

SEQ ID NO: 5990 - protein, 17 aa, synthetic construct
GSTWNSGTIGYADSVKG

SEQ ID NO: 5991 - protein, 17 aa, synthetic construct
LISSDGSNKYYADSVKG

SEQ ID NO: 5992 - protein, 16 aa, synthetic construct
LIYWDDDKRFSPSLRN

SEQ ID NO: 5993 - protein, 17 aa, synthetic construct
RINPNSGDTHYAQKFQG

SEQ ID NO: 5994 - protein, 19 aa, synthetic construct
FIRTKTYGGTTEYAASVKG

SEQ ID NO: 5995 - protein, 16 aa, synthetic construct
SIYYSGSADYNPSLKS

SEQ ID NO: 5996 - protein, 17 aa, synthetic construct
GITWNSGTIGYADSVKG

SEQ ID NO: 5997 - protein, 17 aa, synthetic construct
AISYDGSDEYYADSVKG

SEQ ID NO: 5998 - protein, 17 aa, synthetic construct
RIIPPLGISDYAQKFQG

SEQ ID NO: 5999 - protein, 17 aa, synthetic construct
RIIPILGIPNYAQKFQG

SEQ ID NO: 6000 - protein, 17 aa, synthetic construct
WIAVGRGNTDYAQKFQE

SEQ ID NO: 6001 - protein, 16 aa, synthetic construct
VIYSGGTTYYADSVKG

SEQ ID NO: 6002 - protein, 16 aa, synthetic construct
TISSGGAAFYSNAVTG

SEQ ID NO: 6003 - protein, 16 aa, synthetic construct
NIYFTGDTDYHPSLKS

SEQ ID NO: 6004 - protein, 17 aa, synthetic construct
IINPDGGAITYAQKFRG

SEQ ID NO: 6005 - protein, 17 aa, synthetic construct
IINPDGGARTYAQHFQG

SEQ ID NO: 6006 - protein, 17 aa, synthetic construct
GISFDGDDKDYADSLKG

SEQ ID NO: 6007 - protein, 17 aa, synthetic construct
VISNDGNYKSYSDSVKG

SEQ ID NO: 6008 - protein, 17 aa, synthetic construct
RIIPILGIPHYAQTFQD

SEQ ID NO: 6009 - protein, 17 aa, synthetic construct
IINPDAGSTTYAQQFQG

SEQ ID NO: 6010 - protein, 17 aa, synthetic construct
GIIPLFGAPNYAQKFQG

SEQ ID NO: 6011 - protein, 17 aa, synthetic construct
LISGHGGSTYYAESVKG

SEQ ID NO: 6012 - protein, 16 aa, synthetic construct
DINHSGNTNYNPSLKS

SEQ ID NO: 6013 - protein, 17 aa, synthetic construct
RISPSQGISNYAQRFQG

SEQ ID NO: 6014 - protein, 17 aa, synthetic construct
LINPRGGGTSYAHKFQG

SEQ ID NO: 6015 - protein, 16 aa, synthetic construct
AIGSAGDTYYADSEKG

SEQ ID NO: 6016 - protein, 17 aa, synthetic construct
VISDDGRYKDSADSVKG

SEQ ID NO: 6017 - protein, 16 aa, synthetic construct
EINHSGTTTYNPSLKS

SEQ ID NO: 6018 - protein, 17 aa, synthetic construct
RIDPSDSYTKYSPSFQG

SEQ ID NO: 6019 - protein, 16 aa, synthetic construct
FIYSGGNTFYADSVKG

SEQ ID NO: 6020 - protein, 17 aa, synthetic construct
VISYDGTNEFYADFVKG

SEQ ID NO: 6021 - protein, 17 aa, synthetic construct
VISFDGSDRYYADSVKG

SEQ ID NO: 6022 - protein, 16 aa, synthetic construct
EIYQSGSTNDNPSLKS

SEQ ID NO: 6023 - protein, 16 aa, synthetic construct
EIYHSGSTNYNTSLES

SEQ ID NO: 6024 - protein, 17 aa, synthetic construct
EIIPITGTANYAQKFQG

SEQ ID NO: 6025 - protein, 17 aa, synthetic construct
FISHDGSTKYYADSVKD

SEQ ID NO: 6026 - protein, 17 aa, synthetic construct
LISYDGSNTYSADSVKG

SEQ ID NO: 6027 - protein, 17 aa, synthetic construct
GISWNSGTIGYADSVKG

SEQ ID NO: 6028 - protein, 17 aa, synthetic construct
TISGSGGSTYYADSVKG

SEQ ID NO: 6029 - protein, 16 aa, synthetic construct
YVYYSGSTNYNPSLKS

SEQ ID NO: 6030 - protein, 17 aa, synthetic construct
RIIPILGVASDAEKFQG

SEQ ID NO: 6031 - protein, 16 aa, synthetic construct
GIGTSGDTYYAESVKG

SEQ ID NO: 6032 - protein, 16 aa, synthetic construct
EIFHTGSVQYNPSLKG

SEQ ID NO: 6033 - protein, 17 aa, synthetic construct
ILWFDGVKKYYAESVEG

SEQ ID NO: 6034 - protein, 17 aa, synthetic construct
RFIPIIRTATYAHKFQG

SEQ ID NO: 6035 - protein, 17 aa, synthetic construct
RITPMFGMANYVQKFQD

SEQ ID NO: 6036 - protein, 16 aa, synthetic construct
YIYFTGSTDYNPSLRG

SEQ ID NO: 6037 - protein, 16 aa, synthetic construct
TIGTSGDRYYSDSVKG

SEQ ID NO: 6038 - protein, 17 aa, synthetic construct
VIWSDGTGKHYEDSVRG

SEQ ID NO: 6039 - protein, 16 aa, synthetic construct
VIYSGGSTFYADSVRG

SEQ ID NO: 6040 - protein, 17 aa, synthetic construct
RIIPMLGAANYAQKVQG

SEQ ID NO: 6041 - protein, 17 aa, synthetic construct
IIFPHDSDTRYSPSFQG

SEQ ID NO: 6042 - protein, 17 aa, synthetic construct
LISYDGSNSYYADSVKG

SEQ ID NO: 6043 - protein, 17 aa, synthetic construct
KIIPILNVMDYAQKFQG

SEQ ID NO: 6044 - protein, 17 aa, synthetic construct
KIIAFLGVSNYAQKFQG

SEQ ID NO: 6045 - protein, 17 aa, synthetic construct
RIIPILGVAEYAQKFQG

SEQ ID NO: 6046 - protein, 17 aa, synthetic construct
SIIPSLGITDSEQKFQG

SEQ ID NO: 6047 - protein, 16 aa, synthetic construct
FVFDSGSTNYNPSLRS

SEQ ID NO: 6048 - protein, 17 aa, synthetic construct
MINPSGGSTTYAQKFQG

SEQ ID NO: 6049 - protein, 17 aa, synthetic construct
TIIPILGVPNYAQKFQG

SEQ ID NO: 6050 - protein, 17 aa, synthetic construct
RVIAFLNIPNYAQKFQG

SEQ ID NO: 6051 - protein, 16 aa, synthetic construct
YIDYSGSTNYNLSLES

SEQ ID NO: 6052 - protein, 17 aa, synthetic construct
FIPYDGRNPHYADSVKG

SEQ ID NO: 6053 - protein, 16 aa, synthetic construct
EIFHTGNTKYNPSLKS

SEQ ID NO: 6054 - protein, 16 aa, synthetic construct
VIGTYGDTYYPDSVRG

SEQ ID NO: 6055 - protein, 17 aa, synthetic construct
GINWNGAGAGYADSVKG

SEQ ID NO: 6056 - protein, 16 aa, synthetic construct
NIFYSGTTYYNPSLKS

SEQ ID NO: 6057 - protein, 17 aa, synthetic construct
IINAGSGGTSYPQKFQG

SEQ ID NO: 6058 - protein, 17 aa, synthetic construct
IIHPSGGSTTYAQKFQG

SEQ ID NO: 6059 - protein, 17 aa, synthetic construct
RIIPFLGVADLAQKFQG

SEQ ID NO: 6060 - protein, 17 aa, synthetic construct
WISTFNGNTNFAQKFQG

SEQ ID NO: 6061 - protein, 17 aa, synthetic construct
RIIPILGIANYAQNFQG

SEQ ID NO: 6062 - protein, 17 aa, synthetic construct
RIIPILGIADYAQKFQG

SEQ ID NO: 6063 - protein, 17 aa, synthetic construct
KIIPILGATDYAQKFQG

SEQ ID NO: 6064 - protein, 17 aa, synthetic construct
VIWYDGSNTYYADSVKG

SEQ ID NO: 6065 - protein, 17 aa, synthetic construct
RIIPILGIPNYAQTFEG

SEQ ID NO: 6066 - protein, 16 aa, synthetic construct
VIYSGGSTFYADSIQG

SEQ ID NO: 6067 - protein, 17 aa, synthetic construct
LISYDGTNKYYADSVKG

SEQ ID NO: 6068 - protein, 16 aa, synthetic construct
YISYSGNIDYNPSLKS

SEQ ID NO: 6069 - protein, 17 aa, synthetic construct
GIIPLFGTANYAQKFQD

SEQ ID NO: 6070 - protein, 16 aa, synthetic construct
VIYSDDNTNYADSVKG

SEQ ID NO: 6071 - protein, 17 aa, synthetic construct
TIKQDGSEKLYVESVKG

SEQ ID NO: 6072 - protein, 17 aa, synthetic construct
GISWNSNNIGYGDSVKG

SEQ ID NO: 6073 - protein, 17 aa, synthetic construct
VIWSDGSHQHYADSVKG

SEQ ID NO: 6074 - protein, 17 aa, synthetic construct
RIIPALGIADYAQNFQD

SEQ ID NO: 6075 - protein, 17 aa, synthetic construct
RIIPILDIANYAQKFQG

SEQ ID NO: 6076 - protein, 17 aa, synthetic construct
LIYPGDSDTRYSPSFQG

SEQ ID NO: 6077 - protein, 16 aa, synthetic construct
HIYYSGGTNYNPSLKS

SEQ ID NO: 6078 - protein, 17 aa, synthetic construct
SIKLDGSEKYYVVSAKG

SEQ ID NO: 6079 - protein, 17 aa, synthetic construct
GISWNSGNIGYGDSVKG

SEQ ID NO: 6080 - protein, 17 aa, synthetic construct
GISWNSASLGYADSVKG

SEQ ID NO: 6081 - protein, 17 aa, synthetic construct
RIKSDGSSTTYADSVKG

SEQ ID NO: 6082 - protein, 17 aa, synthetic construct
VIWYHGSDKYYADSVKG

SEQ ID NO: 6083 - protein, 16 aa, synthetic construct
LIYWNDDKRYSPSLKN

SEQ ID NO: 6084 - protein, 17 aa, synthetic construct
GISWNSGSIGYADSVKG

SEQ ID NO: 6085 - protein, 17 aa, synthetic construct
WMVVGSGDTNYAEKFQE

SEQ ID NO: 6086 - protein, 17 aa, synthetic construct
GISYYRSDIDYADSVNG

SEQ ID NO: 6087 - protein, 17 aa, synthetic construct
LIGPDGGGAFYSDYVKG

SEQ ID NO: 6088 - protein, 17 aa, synthetic construct
VTNPSAGSTTYAQKFQG

SEQ ID NO: 6089 - protein, 17 aa, synthetic construct
WINAEYGNRKYAQMVQG

SEQ ID NO: 6090 - protein, 16 aa, synthetic construct
HIYHNGTTYSNPSLKS

SEQ ID NO: 6091 - protein, 16 aa, synthetic construct
GIGTTGDTYYLDSVKG

SEQ ID NO: 6092 - protein, 16 aa, synthetic construct
GIGSAGDTYYADSVKG

SEQ ID NO: 6093 - protein, 16 aa, synthetic construct
TTYYTGSTNYNPSLKS

SEQ ID NO: 6094 - protein, 16 aa, synthetic construct
IINPTGSTGYAQKFQG

SEQ ID NO: 6095 - protein, 16 aa, synthetic construct
YIYNSETTDYNPSLKS

SEQ ID NO: 6096 - protein, 17 aa, synthetic construct
RIIPLPDIPNYAQKFQG

SEQ ID NO: 6097 - protein, 17 aa, synthetic construct
IPNPSGGSTAYAHNFQD

SEQ ID NO: 6098 - protein, 17 aa, synthetic construct
YITSSGTTIYYADSVKG

SEQ ID NO: 6099 - protein, 17 aa, synthetic construct
IINPSGVGTTYAQKFQG

SEQ ID NO: 6100 - protein, 17 aa, synthetic construct
GISSDGVTTYYADSMKG

SEQ ID NO: 6101 - protein, 17 aa, synthetic construct
WTNPNSGATGYAQKFQG

SEQ ID NO: 6102 - protein, 17 aa, synthetic construct
LIWYDGYNKRYADSVKG

SEQ ID NO: 6103 - protein, 16 aa, synthetic construct
VIHRGGSTYYPDSVRG

SEQ ID NO: 6104 - protein, 17 aa, synthetic construct
KIIPMLGIADYAQKFQG

SEQ ID NO: 6105 - protein, 17 aa, synthetic construct
SISGTSSFISYADSVKG

SEQ ID NO: 6106 - protein, 17 aa, synthetic construct
GISWNSGNIEYADSVRG

SEQ ID NO: 6107 - protein, 17 aa, synthetic construct
RIIPILDLADYAQKFQG

SEQ ID NO: 6108 - protein, 17 aa, synthetic construct
IIWPGDSDTRYSPSFQG

SEQ ID NO: 6109 - protein, 16 aa, synthetic construct
AIGTAGDAYYLDSVKG

SEQ ID NO: 6110 - protein, 17 aa, synthetic construct
VIWSDGSHKHYADSVKG

SEQ ID NO: 6111 - protein, 16 aa, synthetic construct
EIYHTGSTNYNPSLKS

SEQ ID NO: 6112 - protein, 17 aa, synthetic construct
VLTYDGSNKYYAGSVKG

SEQ ID NO: 6113 - protein, 17 aa, synthetic construct
NILYDGSNKYYEDSVKG

SEQ ID NO: 6114 - protein, 17 aa, synthetic construct
RVFPILGIANYAQKFQG

SEQ ID NO: 6115 - protein, 17 aa, synthetic construct
GINWNGGRTGYADPVKG

SEQ ID NO: 6116 - protein, 16 aa, synthetic construct
SIYHSGRTYYNPSLQS

SEQ ID NO: 6117 - protein, 16 aa, synthetic construct
YTSYSGSTNYNPSLKS

SEQ ID NO: 6118 - protein, 17 aa, synthetic construct
GISWNSASIGYADSVKG

SEQ ID NO: 6119 - protein, 16 aa, synthetic construct
IITTSGGTTYPDSVKG

SEQ ID NO: 6120 - protein, 17 aa, synthetic construct
AVDSDGSRTYYADSVRG

SEQ ID NO: 6121 - protein, 16 aa, synthetic construct
FIYSGGSTFYRDSVKG

SEQ ID NO: 6122 - protein, 16 aa, synthetic construct
YIHYSGSTFYNPSLKN

SEQ ID NO: 6123 - protein, 17 aa, synthetic construct
VISYDGNYKYYADSVKG

SEQ ID NO: 6124 - protein, 17 aa, synthetic construct
VILDDGRGKFYADSVKG

SEQ ID NO: 6125 - protein, 16 aa, synthetic construct
YMYYSGSTYYNPSLKS

SEQ ID NO: 6126 - protein, 17 aa, synthetic construct
RIIPIFGITNIAQKFQG

SEQ ID NO: 6127 - protein, 16 aa, synthetic construct
NIFKTGRTNYNPSLKS

SEQ ID NO: 6128 - protein, 16 aa, synthetic construct
YIYDNGNTNYNPSLKS

SEQ ID NO: 6129 - protein, 17 aa, synthetic construct
TIGDSGRSTYYADSVKG

SEQ ID NO: 6130 - protein, 17 aa, synthetic construct
AVFPGDSDTRYSPSFQG

SEQ ID NO: 6131 - protein, 17 aa, synthetic construct
IINPDGGSRTYAQKFQG

SEQ ID NO: 6132 - protein, 16 aa, synthetic construct
VIFPGGSTYYADSVKG

SEQ ID NO: 6133 - protein, 17 aa, synthetic construct
AISGSGDDTYYADSVKG

SEQ ID NO: 6134 - protein, 17 aa, synthetic construct
WISTYEGNTNYAQNFQG

SEQ ID NO: 6135 - protein, 17 aa, synthetic construct
GIIPMFGAAKYAQKFQG

SEQ ID NO: 6136 - protein, 17 aa, synthetic construct
GITWNSGTIGYADSAKG

SEQ ID NO: 6137 - protein, 17 aa, synthetic construct
WSSAYNGNTNYAQKLQG

SEQ ID NO: 6138 - protein, 17 aa, synthetic construct
GISWNGGIINYADSVKG

SEQ ID NO: 6139 - protein, 17 aa, synthetic construct
GVSGSGDGRFYADSVKG

SEQ ID NO: 6140 - protein, 17 aa, synthetic construct
VIWYDGSDKYYADSVKG

SEQ ID NO: 6141 - protein, 16 aa, synthetic construct
LIYYDDDKRYSPSLKS

SEQ ID NO: 6142 - protein, 17 aa, synthetic construct
SISSSNNFIYYADSVKG

SEQ ID NO: 6143 - protein, 17 aa, synthetic construct
AISYDGSNKYFADSVKG

SEQ ID NO: 6144 - protein, 17 aa, synthetic construct
GINPIFGTANYAQKFRG

SEQ ID NO: 6145 - protein, 16 aa, synthetic construct
YIYYSGSTDYNPSLKS

SEQ ID NO: 6146 - protein, 17 aa, synthetic construct
RIIPLLGIANYAQKFQG

SEQ ID NO: 6147 - protein, 17 aa, synthetic construct
GISWNSVSIDYADSVKG

SEQ ID NO: 6148 - protein, 17 aa, synthetic construct
IISPPDSDTRYNPSFEG

SEQ ID NO: 6149 - protein, 16 aa, synthetic construct
EVTHTGNINYNPSLKS

SEQ ID NO: 6150 - protein, 16 aa, synthetic construct
YIYNSETTEYNPSLKS

SEQ ID NO: 6151 - protein, 17 aa, synthetic construct
LISYDGSNKYYADSVEG

SEQ ID NO: 6152 - protein, 17 aa, synthetic construct
LISYDGTKTSYADSVKG

SEQ ID NO: 6153 - protein, 17 aa, synthetic construct
IINPDAGSTTYGQQFRG

SEQ ID NO: 6154 - protein, 16 aa, synthetic construct
YIFYSGSTNYNPSLRS

SEQ ID NO: 6155 - protein, 17 aa, synthetic construct
DVSSDGSIKTYADSVKG

SEQ ID NO: 6156 - protein, 16 aa, synthetic construct
IIYSGGSTFYADSVKD

SEQ ID NO: 6157 - protein, 17 aa, synthetic construct
VILYDGSDKYYADSVKG

SEQ ID NO: 6158 - protein, 16 aa, synthetic construct
VVYAGGSTFYADSVKG

SEQ ID NO: 6159 - protein, 17 aa, synthetic construct
IINPSAGSTSYAQKFQG

SEQ ID NO: 6160 - protein, 17 aa, synthetic construct
VISYDGHNKYYADSVKG

SEQ ID NO: 6161 - protein, 16 aa, synthetic construct
YIFYSGSTYYNPSLKS

SEQ ID NO: 6162 - protein, 17 aa, synthetic construct
IINPSGGSTTYAQKFQG

SEQ ID NO: 6163 - protein, 16 aa, synthetic construct
YIYHSESTYYNPSLES

SEQ ID NO: 6164 - protein, 17 aa, synthetic construct
VISYDGINKYYADSVKG

SEQ ID NO: 6165 - protein, 17 aa, synthetic construct
GVSGSGDGTFYADSVKG

SEQ ID NO: 6166 - protein, 17 aa, synthetic construct
VISYDGSNKYYADSVKG

SEQ ID NO: 6167 - protein, 17 aa, synthetic construct
LIWYDGSNKYYADSVKG

SEQ ID NO: 6168 - protein, 17 aa, synthetic construct
LINPSGGSSNYAQKFQG

SEQ ID NO: 6169 - protein, 17 aa, synthetic construct
ALSASGDAPYYADSVKG

SEQ ID NO: 6170 - protein, 17 aa, synthetic construct
AISNSGGSTYYADSVKG

SEQ ID NO: 6171 - protein, 16 aa, synthetic construct
YIFYGGSTNYNPSLRS

SEQ ID NO: 6172 - protein, 17 aa, synthetic construct
VISSDGSMKFYADSVKG

SEQ ID NO: 6173 - protein, 17 aa, synthetic construct
IINPSGGGTSYAQKFQG

SEQ ID NO: 6174 - protein, 30 aa, synthetic construct
QVTISADKSMTTAYLQWSSLKASDTAMYFC

SEQ ID NO: 6175 - protein, 30 aa, synthetic construct
RVTISVDKSKNLFSLRLDSVTAADTALYYC

SEQ ID NO: 6176 - protein, 30 aa, synthetic construct
RLTIAVDTSTSTAYLELSSLRSEDTAVYYC

SEQ ID NO: 6177 - protein, 30 aa, synthetic construct
RFTISRDDSKNTLFLQMTSLKTDDTAVYHC

SEQ ID NO: 6178 - protein, 30 aa, synthetic construct
RVSISLDTSKNQFSLKLSSVTAADTAMYYC

SEQ ID NO: 6179 - protein, 30 aa, synthetic construct
RFTISRDDSKNSLYLQMNSLKTEDTAVYYC

SEQ ID NO: 6180 - protein, 30 aa, synthetic construct
RFTMSSDTGATTVFMELRGLTSDDTAVYYC

SEQ ID NO: 6181 - protein, 30 aa, synthetic construct
RVSITVDTSRTQFSLKLSSVTAADTAVYYC

SEQ ID NO: 6182 - protein, 30 aa, synthetic construct
RITLTRDTSTTTIFMELNSLRSDDTAIYYC

SEQ ID NO: 6183 - protein, 30 aa, synthetic construct
RLTISKATSKNQVVLTMTDMDPVDTATYYC

SEQ ID NO: 6184 - protein, 30 aa, synthetic construct
RFTISRDNSKNTLFLQMNSLKAEDTADYYC

SEQ ID NO: 6185 - protein, 30 aa, synthetic construct
RFTISRDNAKNSLYLQMNSLRPEDTAFYYC

SEQ ID NO: 6186 - protein, 30 aa, synthetic construct
RFFISRDNAKNSLYLQMNSLRAEDTALYYC

SEQ ID NO: 6187 - protein, 30 aa, synthetic construct
RFVISRDDSKNTLYLEMNSLKTEDTAVYYC

SEQ ID NO: 6188 - protein, 30 aa, synthetic construct
RFTISRDNSKNTLFLQMSSLIPEDSAVYYC

SEQ ID NO: 6189 - protein, 30 aa, synthetic construct
RFTISRDNSKNTLYLQMDSLRPEDTALYYC

SEQ ID NO: 6190 - protein, 30 aa, synthetic construct
RFTISRDNSKNTVYLQMNSLRVEDTAVYFC

SEQ ID NO: 6191 - protein, 30 aa, synthetic construct
RVTISADTSKNQFSLMLSSVTAADTAIYYC

SEQ ID NO: 6192 - protein, 30 aa, synthetic construct
RFTISRDNAKNSLFLQLNSLRVEDTAVYYC

SEQ ID NO: 6193 - protein, 30 aa, synthetic construct
RFTISRDDSKSTLSLQMNSLKTEDTAVYFC

SEQ ID NO: 6194 - protein, 30 aa, synthetic construct
RFTVSRDNGKNSLYLQMNNLGAGDTAVYYC

SEQ ID NO: 6195 - protein, 30 aa, synthetic construct
RFTISRENAKNSLFLQMNNLRAGDTAVYYC

SEQ ID NO: 6196 - protein, 30 aa, synthetic construct
RFTISRDDSKNTLHLQMNSLRVEDTAVYYC

SEQ ID NO: 6197 - protein, 30 aa, synthetic construct
RVTISVDTSKNQLSLKLNSVTAADTAIYYC

SEQ ID NO: 6198 - protein, 30 aa, synthetic construct
RVTISRDNARNSLYLEMHSLRVEDTGLYYC

SEQ ID NO: 6199 - protein, 30 aa, synthetic construct
RVTIIADTSTNTAYMEVSSLRSEDTAVYYC

SEQ ID NO: 6200 - protein, 30 aa, synthetic construct
RFTISRENARKSLYLQMNNLRAGDTGIYYC

SEQ ID NO: 6201 - protein, 30 aa, synthetic construct
RFTISRENAKNSLNLQMNSLRAEDTAIYYC

SEQ ID NO: 6202 - protein, 30 aa, synthetic construct
RFSISRDNSKNTLHLQMNSLKAEDTAEYFC

SEQ ID NO: 6203 - protein, 30 aa, synthetic construct
RVTITAEESTSTVYMELNSLRCEDTAMYYC

SEQ ID NO: 6204 - protein, 30 aa, synthetic construct
RVTISVDKSKNHFSLSLKSVTAADTAVYYC

SEQ ID NO: 6205 - protein, 30 aa, synthetic construct
RVTLTSDTSTSTVYLELTSLTSEDTAVYYC

SEQ ID NO: 6206 - protein, 30 aa, synthetic construct
HVTIAADKGISTAYLQWRSLKASDTAMYYC

SEQ ID NO: 6207 - protein, 30 aa, synthetic construct
RVTMATDTSASTAYMDLRSLRSDDTAVYYC

SEQ ID NO: 6208 - protein, 30 aa, synthetic construct
RFTISRENSKNTLYLQMNSLRVEDTALYYC

SEQ ID NO: 6209 - protein, 30 aa, synthetic construct
RVTISVDTSKNQFSLQLTSVTATDTAVYYC

SEQ ID NO: 6210 - protein, 30 aa, synthetic construct
RVTISVDTSKNQFSLKLSSLTAADTAVYYC

SEQ ID NO: 6211 - protein, 30 aa, synthetic construct
RVTMSLDKSKSQFSLNLITRSKMKWVTFIS

SEQ ID NO: 6212 - protein, 30 aa, synthetic construct
RLTLTADKSTSTAYMELSSLRSEDTASYYC

SEQ ID NO: 6213 - protein, 30 aa, synthetic construct
RFTISRDNSKNTLYLQMNGLKSEDTAVYFC

SEQ ID NO: 6214 - protein, 30 aa, synthetic construct
RVTITRDMSINTAYLELSSLRSEDTAVYYC

SEQ ID NO: 6215 - protein, 30 aa, synthetic construct
RFTVSRDNSKNTLYLQLNSLRPEDTAVYSC

SEQ ID NO: 6216 - protein, 30 aa, synthetic construct
RFTISRDDSKNTLYLQMNSLKSEDTGVYFC

SEQ ID NO: 6217 - protein, 30 aa, synthetic construct
RFFISRDNAKSSLYLQMISLRAEDTALYYC

SEQ ID NO: 6218 - protein, 30 aa, synthetic construct
RFTISRDNDENSLVLQMNSLRAEDTAVYYC

SEQ ID NO: 6219 - protein, 30 aa, synthetic construct
RFTISRDDSKNTLYLQMISLRAEDTAVYYC

SEQ ID NO: 6220 - protein, 30 aa, synthetic construct
RFTISRDNAKNSVFLQMNSLRAEDTAVYYC

SEQ ID NO: 6221 - protein, 30 aa, synthetic construct
RFTISRENAKNSLYLQMNNLRAGDTAVYYC

SEQ ID NO: 6222 - protein, 30 aa, synthetic construct
RVTVTSDTSTSTVYMELSSLRSEDTAVYYC

SEQ ID NO: 6223 - protein, 30 aa, synthetic construct
RLTISTDTSKNQVVLTMTNMDPVDTATYYC

SEQ ID NO: 6224 - protein, 30 aa, synthetic construct
RVTITADKSTSTAYMELSSLTSEDTAVYYC

SEQ ID NO: 6225 - protein, 30 aa, synthetic construct
RVTISLDKSKNYFSLNLTSVTAADTAVYYC

SEQ ID NO: 6226 - protein, 30 aa, synthetic construct
RLTISKDTSKNQVVLTMTNMDPVDTGTYYC

SEQ ID NO: 6227 - protein, 30 aa, synthetic construct
RFTISRDDSRNTLYLQMKSLRAEDTAVYYC

SEQ ID NO: 6228 - protein, 30 aa, synthetic construct
LLNISIDRSKNQFSLKVTSVTAADTAVYYC

SEQ ID NO: 6229 - protein, 30 aa, synthetic construct
RVTITADTSTGTAYVEVNSLRSEDTALYYC

SEQ ID NO: 6230 - protein, 30 aa, synthetic construct
RVTMSLDTSKNQMFLRLTSVTAADTAVYYC

SEQ ID NO: 6231 - protein, 30 aa, synthetic construct
RVSMTGDTSISTAYMELRRLTSDDTAFYYC

SEQ ID NO: 6232 - protein, 30 aa, synthetic construct
RFTISRDHSKNILYLQMINLRVEDTAVYYC

SEQ ID NO: 6233 - protein, 30 aa, synthetic construct
RLTILLDKSKSQFSLRLSSVTAADTAVYYC

SEQ ID NO: 6234 - protein, 30 aa, synthetic construct
RLTLTSDTSTSTVFMELSSLRSDDTAVYYC

SEQ ID NO: 6235 - protein, 30 aa, synthetic construct
RVTISADKSRDQFSLKLKSVTAADTAVYYC

SEQ ID NO: 6236 - protein, 30 aa, synthetic construct
RVTITADKSTSMAYMELSSLRSEDTALYYC

SEQ ID NO: 6237 - protein, 30 aa, synthetic construct
RVTISVDTSKNNFSLKLSSLTTADTAVYFC

SEQ ID NO: 6238 - protein, 30 aa, synthetic construct
RFSVSREDGKNSFYLQMNSLRAGDTAVYYC

SEQ ID NO: 6239 - protein, 30 aa, synthetic construct
RFTISRDNSKNTLYLQMSSLRAEDTAVYFC

SEQ ID NO: 6240 - protein, 30 aa, synthetic construct
RVTITKDTSKNQVVLTMTNMDSVDTATYFC

SEQ ID NO: 6241 - protein, 30 aa, synthetic construct
RFTISRDNSKNTLSLQMHSLRADDTAVYYC

SEQ ID NO: 6242 - protein, 30 aa, synthetic construct
RLTITTDMSTSTTYMELSSLRSEDTAVYYC

SEQ ID NO: 6243 - protein, 30 aa, synthetic construct
RFIVSRDNAKNSLYLYMSSLRVEDTAFYYC

SEQ ID NO: 6244 - protein, 30 aa, synthetic construct
RFTISRDNSKNTVYLQMNNLRAEDTAVYYC

SEQ ID NO: 6245 - protein, 30 aa, synthetic construct
RVTMTTDTSTTTVHMELRSLRSDDTALYYC

SEQ ID NO: 6246 - protein, 30 aa, synthetic construct
RVTMSVDKSKNQFSLRLSSVNAADTAVYYC

SEQ ID NO: 6247 - protein, 30 aa, synthetic construct
RFTISRENAKNSLSLQMNSLRAGDSAVYYC

SEQ ID NO: 6248 - protein, 30 aa, synthetic construct
RVTMTTDTSTNTAYMQLRNLRSDDTAVYYC

SEQ ID NO: 6249 - protein, 30 aa, synthetic construct
RVTISADRSTSTAYMELSSLRSEDTAVYFC

SEQ ID NO: 6250 - protein, 30 aa, synthetic construct
RLTITRDTSKNQVVLTMTNMDPVDTATYYC

SEQ ID NO: 6251 - protein, 30 aa, synthetic construct
RFTISRENAKSSLYLQMNSLRAGDTAVYYC

SEQ ID NO: 6252 - protein, 30 aa, synthetic construct
QVTMSVDKSISTAYLQWTSLKASDTAMYYC

SEQ ID NO: 6253 - protein, 30 aa, synthetic construct
RVTMTRDTSISTAYMELSRLRSDDTAVYYC

SEQ ID NO: 6254 - protein, 30 aa, synthetic construct
RVTMTSDTSTNTVYMDLSSLRSADTAFYYC

SEQ ID NO: 6255 - protein, 30 aa, synthetic construct
RFTISREDAKNSLYLQMNSLRAGETAVYFC

SEQ ID NO: 6256 - protein, 30 aa, synthetic construct
RVAISVDKFKNQFSLRLTSVTAADTAVYYC

SEQ ID NO: 6257 - protein, 30 aa, synthetic construct
RLTILVDTSKNQFSLKLRSVTAADTAIYYC

SEQ ID NO: 6258 - protein, 30 aa, synthetic construct
RVTISVDKSKNQFSLKLTSVTAADTAVYYC

SEQ ID NO: 6259 - protein, 30 aa, synthetic construct
RFTISRDSSKNTLYLQMNSLRVDDTAVYYC

SEQ ID NO: 6260 - protein, 30 aa, synthetic construct
QVTISADKSITTAYLHWNSLKASDTAIYFC

SEQ ID NO: 6261 - protein, 30 aa, synthetic construct
RFTLSRDTSKNTLFLQMNSLRAEDTAVYYC

SEQ ID NO: 6262 - protein, 30 aa, synthetic construct
RFYISRDNAQNSLYLQMLRLRPEDTALYYC

SEQ ID NO: 6263 - protein, 30 aa, synthetic construct
RVSMTRDTSTSTVYLHLSSLRSEDTAVYYC

SEQ ID NO: 6264 - protein, 30 aa, synthetic construct
RFTISRDHSKNTLYLQVTSLRAEDTAVYYC

SEQ ID NO: 6265 - protein, 30 aa, synthetic construct
RFTISREDAKKSLYLQMNSLRAGDTAVYYC

SEQ ID NO: 6266 - protein, 30 aa, synthetic construct
RFTASRDNSKNTLYLEMNSLRSEDTAVYYC

SEQ ID NO: 6267 - protein, 30 aa, synthetic construct
QVTISVDKSITTAYLEWGSLKASDTAIYYC

SEQ ID NO: 6268 - protein, 30 aa, synthetic construct
RFTISRDDARSSLYLQMNNLRAGDTAVYYC

SEQ ID NO: 6269 - protein, 30 aa, synthetic construct
QVTMSADKSISTAYLQWSSLKASDTAMYYC

SEQ ID NO: 6270 - protein, 30 aa, synthetic construct
RLTISVDTSKNQFSLKLNSVTAADTAVYYC

SEQ ID NO: 6271 - protein, 30 aa, synthetic construct
PVTMSVDTSKSQFSLRLSSVTAADSAVYYC

SEQ ID NO: 6272 - protein, 30 aa, synthetic construct
RFTITRDNSKNTLYLHMSSLRAEDTAVYYC

SEQ ID NO: 6273 - protein, 30 aa, synthetic construct
RFTISRENAKNSVYLQMNSLRAGDTAMYYC

SEQ ID NO: 6274 - protein, 30 aa, synthetic construct
RVTITADKSTSTAYMELSGLRSEDTAEYYC

SEQ ID NO: 6275 - protein, 30 aa, synthetic construct
RFTISRDNSKDTLYLQMNSLRAEDTAVYHC

SEQ ID NO: 6276 - protein, 30 aa, synthetic construct
RFTITRDNSKNTLYLQMSSLRAEDTAVYYC

SEQ ID NO: 6277 - protein, 30 aa, synthetic construct
RVTISVDTSKNQFSLKLRSVTAADTADYYC

SEQ ID NO: 6278 - protein, 30 aa, synthetic construct
RFSISRDDSKNTLYLQMNSLNTEDTAVYYC

SEQ ID NO: 6279 - protein, 30 aa, synthetic construct
RVTISVDTSKNQVSLKLTSVTAADTAVYYC

SEQ ID NO: 6280 - protein, 30 aa, synthetic construct
RFTISRDNSKNTVSLQMNSLRAEDAAVYYC

SEQ ID NO: 6281 - protein, 30 aa, synthetic construct
QVTFSADKSISTAYLQWSSLKASDTAIYYC

SEQ ID NO: 6282 - protein, 30 aa, synthetic construct
RVTLTSDTSTRTLYMEMSSLTSEDTAIYFC

SEQ ID NO: 6283 - protein, 30 aa, synthetic construct
RVTMSLDTSKNQFSLKVRSVTAADTAVYFC

SEQ ID NO: 6284 - protein, 30 aa, synthetic construct
RFTISRDNSNNTLYLEMTSLRDEDTAVYYC

SEQ ID NO: 6285 - protein, 30 aa, synthetic construct
RFIISREDARNSLYLQMNSLRAGDTAIYYC

SEQ ID NO: 6286 - protein, 30 aa, synthetic construct
RVTMTADKSTNTAYMELGSLTSDDTAVYYC

SEQ ID NO: 6287 - protein, 30 aa, synthetic construct
RVTMTRDTSTSTVYMEMSSLTIEDTAVYYC

SEQ ID NO: 6288 - protein, 30 aa, synthetic construct
RVTISIDKSNNQFSLKLNSVTAADTAVYYC

SEQ ID NO: 6289 - protein, 30 aa, synthetic construct
RFTISRDNSKNTLYLQMNSLSAEDTAVYYC

SEQ ID NO: 6290 - protein, 30 aa, synthetic construct
RFTISRHNSNNTLYLQMSSLGPEDTATYYC

SEQ ID NO: 6291 - protein, 30 aa, synthetic construct
RFTISRDNVKNSLYLQMNSLRAEDTAVYYC

SEQ ID NO: 6292 - protein, 30 aa, synthetic construct
RFTVSRDNSKNTLFLQMSSLRAEDTAVYFC

SEQ ID NO: 6293 - protein, 30 aa, synthetic construct
RVTITADKSTSTAYMELSSLKSEDTALYYC

SEQ ID NO: 6294 - protein, 30 aa, synthetic construct
RVTISVDTSKNQFSLSLTSVTAADTAVYYC

SEQ ID NO: 6295 - protein, 30 aa, synthetic construct
RVTITADKSTSTAYMELSSLRYDDTAVYFC

SEQ ID NO: 6296 - protein, 30 aa, synthetic construct
RFTISRDNSKNTLYLQMNSLRTEDTAVFYC

SEQ ID NO: 6297 - protein, 30 aa, synthetic construct
RFTISRDNSKNTLFLQMNSLRVEDTAVYYC

SEQ ID NO: 6298 - protein, 30 aa, synthetic construct
QVTISADKSISTAYVQWSSLKASDTAMYYC

SEQ ID NO: 6299 - protein, 30 aa, synthetic construct
RFTISRDNAKNSLYLHMNSLRGEDTAVYYC

SEQ ID NO: 6300 - protein, 30 aa, synthetic construct
RFTISRDNSKNTLYLQMNSLTGEDTAVYYC

SEQ ID NO: 6301 - protein, 30 aa, synthetic construct
RFIISRDNARNSLYLQMNRLRPEDTAFYYC

SEQ ID NO: 6302 - protein, 30 aa, synthetic construct
RFTISRDNSKNTLYLQMNSLRGDDTAVYHC

SEQ ID NO: 6303 - protein, 30 aa, synthetic construct
RLTITKDTSKNQVVLTLTNIDPVDTATYYC

SEQ ID NO: 6304 - protein, 30 aa, synthetic construct
RVTMTRDASISTAFMELSRLRSDDTAVYYC

SEQ ID NO: 6305 - protein, 30 aa, synthetic construct
RFTISRDDSKSIAYLQMNSLRTEDTAVYYC

SEQ ID NO: 6306 - protein, 30 aa, synthetic construct
RVTISVDTSKNHFSLKLSSVTAADTAVYYC

SEQ ID NO: 6307 - protein, 30 aa, synthetic construct
RFIIIRDNAKNSLYLQMNSLRVEDTALYYC

SEQ ID NO: 6308 - protein, 30 aa, synthetic construct
RFTISRDDSKNTVYLQMNSLRAEDTAVYYC

SEQ ID NO: 6309 - protein, 30 aa, synthetic construct
RVTFTADKSTSTAYMELSSLRSEDTAVYYC

SEQ ID NO: 6310 - protein, 30 aa, synthetic construct
RVTITRDMSTSTAYMELSSLRSEDTAVYYC

SEQ ID NO: 6311 - protein, 30 aa, synthetic construct
RFTISRDNSKNTLYLQMSSLRAEDTAVYYC

SEQ ID NO: 6312 - protein, 30 aa, synthetic construct
RFTISRDNAKNEVYLQMNGLKDEDTGVYYC

SEQ ID NO: 6313 - protein, 30 aa, synthetic construct
RLSISVDTFRNRFSLKLTSVTAADTAVYFC

SEQ ID NO: 6314 - protein, 30 aa, synthetic construct
RVTIIADKSSSTVYMELTTLRSEDTAVYYC

SEQ ID NO: 6315 - protein, 30 aa, synthetic construct
RVTMTTDTSTSTVYMNVISLRSEDTAVYYC

SEQ ID NO: 6316 - protein, 30 aa, synthetic construct
RLTMTTDTSTTTVYMELSNLGSEDTAMYYC

SEQ ID NO: 6317 - protein, 30 aa, synthetic construct
RFTISRDNSKDTLYLQMNGLSTEDTAVYFC

SEQ ID NO: 6318 - protein, 30 aa, synthetic construct
RFTISRDPSKNTLYLQMNSLRGEDTAVYYC

SEQ ID NO: 6319 - protein, 30 aa, synthetic construct
RVTITADKSTSTLYMELSSLRSEDTAIYYC

SEQ ID NO: 6320 - protein, 30 aa, synthetic construct
RLTMTTDTSTSTVYMELRSLRSEDTAVYYC

SEQ ID NO: 6321 - protein, 30 aa, synthetic construct
RVTVTADKSTGTAHMELSSLRSEDTAIYYC

SEQ ID NO: 6322 - protein, 30 aa, synthetic construct
RFTISRDNSANSLYLQMNSLSTEDTAFYYC

SEQ ID NO: 6323 - protein, 30 aa, synthetic construct
RLTISVDTSKNQFSLKLSSVTAADTAVYYC

SEQ ID NO: 6324 - protein, 30 aa, synthetic construct
RVSITADKSTSTASMELSSLRSEDTAVYFC

SEQ ID NO: 6325 - protein, 30 aa, synthetic construct
RVTMSRDTSTSTAYMELTSLRSEDTAVYYC

SEQ ID NO: 6326 - protein, 30 aa, synthetic construct
RVTITADRSTSTTYMELSSLRSEDTARYYC

SEQ ID NO: 6327 - protein, 30 aa, synthetic construct
RFTISREKANNSLYLQMHSLRAGDTAVYYC

SEQ ID NO: 6328 - protein, 30 aa, synthetic construct
RVNIIADKSTGTAYMELRSLRSEDTAVYYC

SEQ ID NO: 6329 - protein, 30 aa, synthetic construct
RFTISRDNSQNTLYLQMSSLRPEDTAIYYC

SEQ ID NO: 6330 - protein, 30 aa, synthetic construct
RVTISIDTSKNQFSLRLSSVTAADTAVYYC

SEQ ID NO: 6331 - protein, 30 aa, synthetic construct
RVSISADKSTSNAYMQWSSLQASDTAIYYC

SEQ ID NO: 6332 - protein, 30 aa, synthetic construct
QVTISADKSISTAYVQWSSLKASDTAMYFC

SEQ ID NO: 6333 - protein, 30 aa, synthetic construct
RFTITRDNSKNTLWLQMNSLRAEDTAVYYC

SEQ ID NO: 6334 - protein, 30 aa, synthetic construct
RFTISRDNSKNKLYLQMNSLRAEDTAVYYC

SEQ ID NO: 6335 - protein, 30 aa, synthetic construct
RFTISRDNSKNTLYLQMNSLRAQDTAVYYC

SEQ ID NO: 6336 - protein, 30 aa, synthetic construct
RVTISIDKSKNQFSLKLSYVTAADTAVYFC

SEQ ID NO: 6337 - protein, 30 aa, synthetic construct
RVTMSVDKSQNHFSLKLRSVTAADTAVYYC

SEQ ID NO: 6338 - protein, 30 aa, synthetic construct
RFTISRDDSKNTVYLQMNSLRTEDTAVYYC

SEQ ID NO: 6339 - protein, 30 aa, synthetic construct
RFTISRDTSKNTLYLQMNNLRAEDTAVYYC

SEQ ID NO: 6340 - protein, 30 aa, synthetic construct
RFTISRDNPKNTLFLQMNSLRAEDTAVYYC

SEQ ID NO: 6341 - protein, 30 aa, synthetic construct
RFIISRDNAENSLYLQMNSLRAEDSALYYC

SEQ ID NO: 6342 - protein, 30 aa, synthetic construct
RVTMSVDTSKNQYSLKLSSLTAADTAVYYC

SEQ ID NO: 6343 - protein, 30 aa, synthetic construct
RFTISRDNSKNTLDLHMSSLRAEDTAVYYC

SEQ ID NO: 6344 - protein, 30 aa, synthetic construct
RVTISVDTSKNQFSLKLRSVTAADTAVYYC

SEQ ID NO: 6345 - protein, 30 aa, synthetic construct
HVTISADKSISTAYLQWSSLKASDTAMYYC

SEQ ID NO: 6346 - protein, 30 aa, synthetic construct
RLTITADKSTTTTYMELNSLRSEDTAVYFC

SEQ ID NO: 6347 - protein, 30 aa, synthetic construct
RFTISREDAMTSVYLQMNRLTAGDTAVYYC

SEQ ID NO: 6348 - protein, 30 aa, synthetic construct
RVTISIDKSNSRFSLKLSSVTAADTAVYYC

SEQ ID NO: 6349 - protein, 30 aa, synthetic construct
RFIISRDNFKNTLYLQMNSLRAEDTAVYFC

SEQ ID NO: 6350 - protein, 30 aa, synthetic construct
RVTITADESTSTAYMELNSLTYDDTAVYYC

SEQ ID NO: 6351 - protein, 30 aa, synthetic construct
RVTFTADKSTGTAYLEVSSLTSEDTAVYYC

SEQ ID NO: 6352 - protein, 30 aa, synthetic construct
RVTISVDTFENQFSLRLTSVTAADTATYYC

SEQ ID NO: 6353 - protein, 30 aa, synthetic construct
RFTISREDAKDSLYLEMNSLRGGDTAVYYC

SEQ ID NO: 6354 - protein, 30 aa, synthetic construct
RFTISRDNFKNMLYLQMNSLRVEDTAVYYC

SEQ ID NO: 6355 - protein, 30 aa, synthetic construct
RFTISRHNSKNTLYLQMNSLRPEDTAVYYC

SEQ ID NO: 6356 - protein, 30 aa, synthetic construct
RVTITADKSTNTAYMELSSLRSEDTAVYYC

SEQ ID NO: 6357 - protein, 30 aa, synthetic construct
QVTLSADKSINTAYLHWSSLRASDTAMYYC

SEQ ID NO: 6358 - protein, 30 aa, synthetic construct
RFTISRDNSNNTVYLQMSSLRGEDTAVYYC

SEQ ID NO: 6359 - protein, 30 aa, synthetic construct
RVTITADKSTGTAYMDLSSLTSEDTAVYYC

SEQ ID NO: 6360 - protein, 30 aa, synthetic construct
RVTITADKSTNTAYLVLSSLRSEDTAVYYC

SEQ ID NO: 6361 - protein, 30 aa, synthetic construct
RVTITADRSSSTAYMELSSLRSEDTALYYC

SEQ ID NO: 6362 - protein, 30 aa, synthetic construct
RVTITADKSTSTVHMELSSLRSEDTAVYYC

SEQ ID NO: 6363 - protein, 30 aa, synthetic construct
RITISIDTSRNQFSLKLRSVTAADTAVYYC

SEQ ID NO: 6364 - protein, 30 aa, synthetic construct
RVIMTGDTSTKTVYMELSSLRSEDTAVYSC

SEQ ID NO: 6365 - protein, 30 aa, synthetic construct
RVTITADKSTSTAYMELTSLRSEDTAVYYC

SEQ ID NO: 6366 - protein, 30 aa, synthetic construct
RVTISIDTAKNQFSLRLSSVTAADTAVYYC

SEQ ID NO: 6367 - protein, 30 aa, synthetic construct
RATISIDKSKNQFSLKLSSVTAADTAIYYC

SEQ ID NO: 6368 - protein, 30 aa, synthetic construct
RFTISRENGKNSLFLQMNSLRAGDTAVYFC

SEQ ID NO: 6369 - protein, 30 aa, synthetic construct
RFTIFRDNAKNFLYLEMNSLRVEDTALYHC

SEQ ID NO: 6370 - protein, 30 aa, synthetic construct
RLTISLDTSKNQFSLKLTSVTAADTAVYYC

SEQ ID NO: 6371 - protein, 30 aa, synthetic construct
RVTMTRDTSTSTVDMELSSLRSEDTAVYYC

SEQ ID NO: 6372 - protein, 30 aa, synthetic construct
RVTMTSDSSTSTVYMDLSSLRSEDTAVYYC

SEQ ID NO: 6373 - protein, 30 aa, synthetic construct
RVTITADKSTNTASMELSSLRSEDTAVYYC

SEQ ID NO: 6374 - protein, 30 aa, synthetic construct
RVTLTTDTSTSTVYMELRSLRSDDTAVYYC

SEQ ID NO: 6375 - protein, 30 aa, synthetic construct
RVTITADKSTATVYLEVSSLRSEDTAVYYC

SEQ ID NO: 6376 - protein, 30 aa, synthetic construct
RVTITADKSTATVYMEVSSLRSEDTAMYYC

SEQ ID NO: 6377 - protein, 30 aa, synthetic construct
RVTITADKSTSMAYMELNSLRSEDTAVYYC

SEQ ID NO: 6378 - protein, 30 aa, synthetic construct
QVTFSADKSISTAYLQWSSLKASDTAMYFC

SEQ ID NO: 6379 - protein, 30 aa, synthetic construct
RVIISVDTSKNQFSLKLSSVTAADTAVYYC

SEQ ID NO: 6380 - protein, 30 aa, synthetic construct
RVTITADKSTRTAYMELSSLRSEDTAVYYC

SEQ ID NO: 6381 - protein, 30 aa, synthetic construct
RFTISRHNSKNTLYLQMNSLRAEDTAVYYC

SEQ ID NO: 6382 - protein, 30 aa, synthetic construct
RFTISRDNAKNSLYLQMNSLGAEDTAVYYC

SEQ ID NO: 6383 - protein, 30 aa, synthetic construct
RFTISRDNAKNSLFLQMNSLRADDTALYYC

SEQ ID NO: 6384 - protein, 30 aa, synthetic construct
RVTITADKSTSTAYMELSSLRSEDTAVYFC

SEQ ID NO: 6385 - protein, 30 aa, synthetic construct
RVTITADKSTSTAYMELSSLRYEDTAVFYC

SEQ ID NO: 6386 - protein, 30 aa, synthetic construct
QVTMSADKSISTAYLQWNSLKASDTAVYYC

SEQ ID NO: 6387 - protein, 30 aa, synthetic construct
RVTISEDTSKNQFSLKLSSVTAADTAVYYC

SEQ ID NO: 6388 - protein, 30 aa, synthetic construct
RYTISRDNAKNSLYLQMNSLRAEDTAVYYC

SEQ ID NO: 6389 - protein, 30 aa, synthetic construct
RFTISRDNVKNSLSLQMNSLRAEDTALYYC

SEQ ID NO: 6390 - protein, 30 aa, synthetic construct
RFTFSRDNAKNTLYLQMDSLRAEDTAVYYC

SEQ ID NO: 6391 - protein, 30 aa, synthetic construct
RFTISRDNAKNSLYLQMNRLRAEDTALYFC

SEQ ID NO: 6392 - protein, 30 aa, synthetic construct
RLTITKDTSKNQVVFTMTNMDPVDTATYYC

SEQ ID NO: 6393 - protein, 30 aa, synthetic construct
RFTISRDNAKNSLYLQMNSLRAEDTAFYYC

SEQ ID NO: 6394 - protein, 30 aa, synthetic construct
RVTISGDMSTGTVYMEVSGLKSDDTAVYYC

SEQ ID NO: 6395 - protein, 30 aa, synthetic construct
RFTISRDSSKNTLYLQMNSLKDEDTAVYYC

SEQ ID NO: 6396 - protein, 30 aa, synthetic construct
RFTVSRDNSKNSLFLQLNSMRSEDTAFYYC

SEQ ID NO: 6397 - protein, 30 aa, synthetic construct
RVTMTTDTSTSTVYLGLSNLRPEDTAVYFC

SEQ ID NO: 6398 - protein, 30 aa, synthetic construct
RVTMTTDTSTSTAYMELRSIRFDDTAVYYC

SEQ ID NO: 6399 - protein, 30 aa, synthetic construct
RVTMSLDTSKNQFSLKVSSVTAADTAVYYC

SEQ ID NO: 6400 - protein, 30 aa, synthetic construct
RFTISRENARNSLYLQMSSLRAGDTAVYFC

SEQ ID NO: 6401 - protein, 30 aa, synthetic construct
RVTISVDTSKNQFSLRLTSVTATDTAVYYC

SEQ ID NO: 6402 - protein, 30 aa, synthetic construct
RVTMTSDTSTSTIYMELSGLRSEDTAVYYC

SEQ ID NO: 6403 - protein, 30 aa, synthetic construct
RVTMSGDTSKNQVSLRLTSVTAADTAVYYC

SEQ ID NO: 6404 - protein, 30 aa, synthetic construct
RVTITADKSTNTAYMELSTLRSDDTAVYYC

SEQ ID NO: 6405 - protein, 30 aa, synthetic construct
RVTMTGDTSTSTVYMELSSLRSEDTAVYYC

SEQ ID NO: 6406 - protein, 30 aa, synthetic construct
RFTISRDNAKNLLFLQMNSLRAEDTAVYYC

SEQ ID NO: 6407 - protein, 30 aa, synthetic construct
RVTMTSDPSTSTVYMELRSLTSEDTAVYYC

SEQ ID NO: 6408 - protein, 30 aa, synthetic construct
RFTVSRDHPKNTLYLQMNSLRVEDTAVYYC

SEQ ID NO: 6409 - protein, 30 aa, synthetic construct
RFTISRDNSKSTLYLQMSSLRPEDTAVYYC

SEQ ID NO: 6410 - protein, 30 aa, synthetic construct
RVTMTRNTSINTAFMELSSLRSDDTAVYYC

SEQ ID NO: 6411 - protein, 30 aa, synthetic construct
RFTISRDNSKNTLDLQMNSLRGEDTAVYYC

SEQ ID NO: 6412 - protein, 30 aa, synthetic construct
RFTISRDNPQNTVYLQMNSLRAEDTAVYYC

SEQ ID NO: 6413 - protein, 30 aa, synthetic construct
RATITADKSTSTAYMELSSLRSEDTAVYFC

SEQ ID NO: 6414 - protein, 30 aa, synthetic construct
RFTISRDNAKNSLYLQMNSLRVEDTAVYYC

SEQ ID NO: 6415 - protein, 30 aa, synthetic construct
RFAISRDNAKNFLYLQMNSMRVEDTALYYC

SEQ ID NO: 6416 - protein, 30 aa, synthetic construct
RVTITADKSTSTAYMELSSLRSEDTALYYC

SEQ ID NO: 6417 - protein, 30 aa, synthetic construct
QVTISADKSISTAYLQWNSLKASDTAMYYC

SEQ ID NO: 6418 - protein, 30 aa, synthetic construct
RFTISRENAKNSLYLQMNSLRAGDTAVYFC

SEQ ID NO: 6419 - protein, 30 aa, synthetic construct
RFTISRDNSKNTLYLQMDSLRAEDTAVYYC

SEQ ID NO: 6420 - protein, 30 aa, synthetic construct
RVTISVDTSKNQFSLTLSSVTAADTAMYYC

SEQ ID NO: 6421 - protein, 30 aa, synthetic construct
TVTITADKSTSTAYMEMSSLRSEDTAVYYC

SEQ ID NO: 6422 - protein, 30 aa, synthetic construct
RFTISRDNAKNSLYLQMNSLRAEDTALYYC

SEQ ID NO: 6423 - protein, 30 aa, synthetic construct
RVTISVDTSKNQFSLKLTSVTAADTAVYYC

SEQ ID NO: 6424 - protein, 30 aa, synthetic construct
QVTISADKSISTAYLQWSGLKASDTAMYYC

SEQ ID NO: 6425 - protein, 30 aa, synthetic construct
RFTISKDTCKNTLYGQMNSLRAEDTAVYYC

SEQ ID NO: 6426 - protein, 30 aa, synthetic construct
RFTISRDNAKSTLYLQMNNLNSEDTAVYYC

SEQ ID NO: 6427 - protein, 30 aa, synthetic construct
RFPISRDKSKNTLYLQMNSLRPEDTAVYYC

SEQ ID NO: 6428 - protein, 30 aa, synthetic construct
RVTISLDTAKNQLSLKLGSVTAADTAIYYC

SEQ ID NO: 6429 - protein, 30 aa, synthetic construct
RFTIARDNSKNTMYLQMNSLRPDDTAVYYC

SEQ ID NO: 6430 - protein, 30 aa, synthetic construct
RFTISRDNLKNTLYLQMNTVGVEDTAVYYC

SEQ ID NO: 6431 - protein, 30 aa, synthetic construct
RLTISIDTFKNQYSLKLSSVTAADTAVYYC

SEQ ID NO: 6432 - protein, 30 aa, synthetic construct
RVTISADKSTGTTYMELSSLRSEDTAVYFC

SEQ ID NO: 6433 - protein, 30 aa, synthetic construct
RFTISRDTSKNTLYLQMNSLRLEDTAVYYC

SEQ ID NO: 6434 - protein, 30 aa, synthetic construct
RVTISVDTSKKQFSLRLSSVTAADTAVYFC

SEQ ID NO: 6435 - protein, 30 aa, synthetic construct
RVTISLDTSKNQFSLILSAVTAADTAVFYC

SEQ ID NO: 6436 - protein, 30 aa, synthetic construct
RFTISRDNSKNTLHLRMNSLRADDTAAYYC

SEQ ID NO: 6437 - protein, 30 aa, synthetic construct
QVTISADKSISTAYLHWSGLKTSDTAMYYC

SEQ ID NO: 6438 - protein, 30 aa, synthetic construct
RVTMTSDTSTSTVYMELSSVRYEDTAVYYC

SEQ ID NO: 6439 - protein, 30 aa, synthetic construct
RFTISRDNAKNALYLQINSLRAEDTAVYTC

SEQ ID NO: 6440 - protein, 30 aa, synthetic construct
RFTISRDNSKNTLYLQMSLLRAEDTAVYFC

SEQ ID NO: 6441 - protein, 30 aa, synthetic construct
RVRIIADESTSTAYMELSSLRSEDTAVYYC

SEQ ID NO: 6442 - protein, 30 aa, synthetic construct
RFTISRDNSKNSLYLHISSLRTEDTALYYC

SEQ ID NO: 6443 - protein, 30 aa, synthetic construct
RVTMTTDTSTSTAYMELRSLTSDDTAVYYC

SEQ ID NO: 6444 - protein, 30 aa, synthetic construct
RFIISRDNAKNSLYLQMIRLRAEDTALYYC

SEQ ID NO: 6445 - protein, 30 aa, synthetic construct
RLTITKDTSQNQVVLTMTNMDPVDTATYYC

SEQ ID NO: 6446 - protein, 30 aa, synthetic construct
RFTISRDNAKNSVYLQMNSLRAEDTAVYYC

SEQ ID NO: 6447 - protein, 30 aa, synthetic construct
RFTISRDHSKNTLYLQMNSLRAADTAVYYC

SEQ ID NO: 6448 - protein, 30 aa, synthetic construct
RVTISVDTSKSQFSLKLNSVTDADTAVYYC

SEQ ID NO: 6449 - protein, 30 aa, synthetic construct
RVTISVDTSKNQFYLKLSSVTAADTAVYYC

SEQ ID NO: 6450 - protein, 30 aa, synthetic construct
RVTITADKSTSTAYMEVSSLRSEDTAVYYC

SEQ ID NO: 6451 - protein, 30 aa, synthetic construct
QVTISVDNSINTAYLQWNSLKASDTAIYYC

SEQ ID NO: 6452 - protein, 30 aa, synthetic construct
RVTISVDTSKNQISLNLRSVSAADTAVYYC

SEQ ID NO: 6453 - protein, 30 aa, synthetic construct
RVTISVDTSKNQISLKLSSVTAADTAVYYC

SEQ ID NO: 6454 - protein, 30 aa, synthetic construct
RFTISRDNSKNTLYLQMNSLRPEDTAVYYC

SEQ ID NO: 6455 - protein, 30 aa, synthetic construct
RFTISRDNSKNTLLLEMNSLRGEDTAVYYC

SEQ ID NO: 6456 - protein, 30 aa, synthetic construct
RVTMTSDTSTSTVYMELSSLRSEDTAVYYC

SEQ ID NO: 6457 - protein, 30 aa, synthetic construct
RLTISVDTSKNQFSLNLRSVTAADTAVYYC

SEQ ID NO: 6458 - protein, 30 aa, synthetic construct
RFTISRDNSKYTLYLQMNSLRAEDTAVYYC

SEQ ID NO: 6459 - protein, 30 aa, synthetic construct
RFTISRDNSKNTLYLQMNSLKREDTAVYYC

SEQ ID NO: 6460 - protein, 30 aa, synthetic construct
RFTISRHNSKNTLYLQMNSLRVEDTAVYYC

SEQ ID NO: 6461 - protein, 30 aa, synthetic construct
RVTMTTDTSTSTVYMELSSLRSEDTAIYYC

SEQ ID NO: 6462 - protein, 30 aa, synthetic construct
RFTISRDNSKNTLYLQMDSLRADETAVYYC

SEQ ID NO: 6463 - protein, 30 aa, synthetic construct
RVTISVDTSKNQFSLKLNSVTAADTAVYHC

SEQ ID NO: 6464 - protein, 30 aa, synthetic construct
RVTMTRDTSTSTVYMELSSLRSEDTAVYFC

SEQ ID NO: 6465 - protein, 30 aa, synthetic construct
RVTISVDRSKNQFSLNLSSVTAADTAVYYC

SEQ ID NO: 6466 - protein, 30 aa, synthetic construct
RFTISRDNSMTTLFLQMNSLRAEDTAVYYC

SEQ ID NO: 6467 - protein, 30 aa, synthetic construct
RVTMSLDTSKNQFSLKLSSVTAADTAVYYC

SEQ ID NO: 6468 - protein, 30 aa, synthetic construct
RVTLTRGTATNTVYMELSSLRSEDMAVYYC

SEQ ID NO: 6469 - protein, 30 aa, synthetic construct
RFTISRDNSRNTLYLQMNSLRAEDTAVYYC

SEQ ID NO: 6470 - protein, 30 aa, synthetic construct
RFTISRDSSKNTLFLQMNSLRAEDTAVYYC

SEQ ID NO: 6471 - protein, 30 aa, synthetic construct
RFTISRDNSKNTLYLQMNSLRAEDTALYYC

SEQ ID NO: 6472 - protein, 30 aa, synthetic construct
RLTISVDTSKNQFSLRLSSVTAADTAVYYC

SEQ ID NO: 6473 - protein, 30 aa, synthetic construct
RFTISRDNSKNTLFLQMNSLRPEDTAVYYC

SEQ ID NO: 6474 - protein, 15 aa, synthetic construct
ARGEGYGDYADAFDI

SEQ ID NO: 6475 - protein, 13 aa, synthetic construct
ARRIRTYPPCFDY

SEQ ID NO: 6476 - protein, 14 aa, synthetic construct
ARADRRLPNDAFDV

SEQ ID NO: 6477 - protein, 20 aa, synthetic construct
AEHYHESRFGGGISDDAFNI

SEQ ID NO: 6478 - protein, 9 aa, synthetic construct
VVIAGTYGS

SEQ ID NO: 6479 - protein, 16 aa, synthetic construct
ARGLSAVVTVSGWFDS

SEQ ID NO: 6480 - protein, 13 aa, synthetic construct
ARVGAALGGVCDY

SEQ ID NO: 6481 - protein, 16 aa, synthetic construct
ARSGFCDGTSCFSGDY

SEQ ID NO: 6482 - protein, 15 aa, synthetic construct
ARGPHERWFKNWFDP

SEQ ID NO: 6483 - protein, 11 aa, synthetic construct
TRDPTAGAGDY

SEQ ID NO: 6484 - protein, 18 aa, synthetic construct
TKAQAPLDSGDFGGGFHI

SEQ ID NO: 6485 - protein, 14 aa, synthetic construct
ARVGDRFGYQYMDV

SEQ ID NO: 6486 - protein, 15 aa, synthetic construct
ARGDGGGDYPYGMDV

SEQ ID NO: 6487 - protein, 14 aa, synthetic construct
GKGSTSSYYGYFDP

SEQ ID NO: 6488 - protein, 20 aa, synthetic construct
AKDGGGRLLYFEMEHYYMDV

SEQ ID NO: 6489 - protein, 18 aa, synthetic construct
VTDLSRFLSSRETDAFDI

SEQ ID NO: 6490 - protein, 17 aa, synthetic construct
AREKRVRTILGHYGFDV

SEQ ID NO: 6491 - protein, 16 aa, synthetic construct
ARGGHIVMVTAGYFDF

SEQ ID NO: 6492 - protein, 22 aa, synthetic construct
AKDHLTARYYDFRSVSFNGDAY

SEQ ID NO: 6493 - protein, 15 aa, synthetic construct
AREGGSFFRDGDFEH

SEQ ID NO: 6494 - protein, 20 aa, synthetic construct
ARHLSPTNNDFLTGPDAFDL

SEQ ID NO: 6495 - protein, 13 aa, synthetic construct
STASDYGDHSPHY

SEQ ID NO: 6496 - protein, 18 aa, synthetic construct
VRGAWSSDSYLPRGFFDY

SEQ ID NO: 6497 - protein, 22 aa, synthetic construct
ARGTQQQLVLHGNVNYFYYMDV

SEQ ID NO: 6498 - protein, 13 aa, synthetic construct
ARGDGGYYSGIDY

SEQ ID NO: 6499 - protein, 17 aa, synthetic construct
ARLPDSDYHGYAYYFDY

SEQ ID NO: 6500 - protein, 19 aa, synthetic construct
LTHPQPQYVRPTPVVWFDP

SEQ ID NO: 6501 - protein, 21 aa, synthetic construct
ARDVKFDYSTSSIEESIAFDI

SEQ ID NO: 6502 - protein, 24 aa, synthetic construct
ARGDIEVRPASTTHKTSYFYYMDV

SEQ ID NO: 6503 - protein, 16 aa, synthetic construct
ARATPHSSGYWDWFDP

SEQ ID NO: 6504 - protein, 16 aa, synthetic construct
VRPHLPDYFGSGSFHY

SEQ ID NO: 6505 - protein, 18 aa, synthetic construct
ARDGRYCNSTACLNFFDL

SEQ ID NO: 6506 - protein, 13 aa, synthetic construct
ARSIGSRPRWFDP

SEQ ID NO: 6507 - protein, 15 aa, synthetic construct
ARDSEYIPAAGSFDY

SEQ ID NO: 6508 - protein, 18 aa, synthetic construct
ARRIMITSGGKEIDAFDI

SEQ ID NO: 6509 - protein, 23 aa, synthetic construct
VRDYYGALTSPNANSETLGTMDY

SEQ ID NO: 6510 - protein, 15 aa, synthetic construct
ARDGANGYDPLYLNH

SEQ ID NO: 6511 - protein, 9 aa, synthetic construct
ARELGFSDS

SEQ ID NO: 6512 - protein, 13 aa, synthetic construct
ARDFGGNAQYFAF

SEQ ID NO: 6513 - protein, 20 aa, synthetic construct
AKSQGTYCSGGNCYSNYFDY

SEQ ID NO: 6514 - protein, 9 aa, synthetic construct
LLFLFLASS

SEQ ID NO: 6515 - protein, 23 aa, synthetic construct
ARGGDCSGGGCPYPYYYNGIDDV

SEQ ID NO: 6516 - protein, 17 aa, synthetic construct
ARESGYSAPGSVTYFDL

SEQ ID NO: 6517 - protein, 16 aa, synthetic construct
ARDLPSSSWSSTAFDY

SEQ ID NO: 6518 - protein, 16 aa, synthetic construct
AAPHCNRTNCHDGFDL

SEQ ID NO: 6519 - protein, 17 aa, synthetic construct
ASRSPRVPATATNAFDI

SEQ ID NO: 6520 - protein, 17 aa, synthetic construct
TTMSREYYDTDFYAKDV

SEQ ID NO: 6521 - protein, 15 aa, synthetic construct
VKVFSRDWSGYAFDM

SEQ ID NO: 6522 - protein, 13 aa, synthetic construct
ARVLRYSSAWVDL

SEQ ID NO: 6523 - protein, 11 aa, synthetic construct
ARQENNDAFDI

SEQ ID NO: 6524 - protein, 9 aa, synthetic construct
ARELGILDW

SEQ ID NO: 6525 - protein, 16 aa, synthetic construct
ARGETTMALRWYAFDI

SEQ ID NO: 6526 - protein, 19 aa, synthetic construct
ARDFLPATASPYYYYYMDV

SEQ ID NO: 6527 - protein, 20 aa, synthetic construct
ARFKYFYDRNNYYFGSGFDY

SEQ ID NO: 6528 - protein, 20 aa, synthetic construct
AHSPGYSSGWYRAGISWFDP

SEQ ID NO: 6529 - protein, 12 aa, synthetic construct
ARAPAGDFRQLF

SEQ ID NO: 6530 - protein, 16 aa, synthetic construct
ARRADFSSSWTDYFDY

SEQ ID NO: 6531 - protein, 12 aa, synthetic construct
ARIDRRRNCMDV

SEQ ID NO: 6532 - protein, 13 aa, synthetic construct
VRRIVGGNAGMDV

SEQ ID NO: 6533 - protein, 15 aa, synthetic construct
ARIHDYGGHISAFDM

SEQ ID NO: 6534 - protein, 17 aa, synthetic construct
ARERGYSGYGSAVYFDI

SEQ ID NO: 6535 - protein, 17 aa, synthetic construct
ARGGGYDELLVFGAFDI

SEQ ID NO: 6536 - protein, 19 aa, synthetic construct
ARGGYCSAYSCFHGAWFAP

SEQ ID NO: 6537 - protein, 9 aa, synthetic construct
ARAQGIFDY

SEQ ID NO: 6538 - protein, 15 aa, synthetic construct
ARDFSFIVATTAFEY

SEQ ID NO: 6539 - protein, 9 aa, synthetic construct
ARVAGLFDN

SEQ ID NO: 6540 - protein, 17 aa, synthetic construct
VRDRGYSGYGSNYYFDL

SEQ ID NO: 6541 - protein, 18 aa, synthetic construct
ARGEALGVEPYYYYFMDI

SEQ ID NO: 6542 - protein, 16 aa, synthetic construct
AKDTLVDIAVVTLIDY

SEQ ID NO: 6543 - protein, 11 aa, synthetic construct
AHHSIPTIFTS

SEQ ID NO: 6544 - protein, 17 aa, synthetic construct
ARATTDYCGGDCYPIDS

SEQ ID NO: 6545 - protein, 16 aa, synthetic construct
ASPHCRGGSCLDGFDI

SEQ ID NO: 6546 - protein, 17 aa, synthetic construct
ARATTDYCGGDCYPIDN

SEQ ID NO: 6547 - protein, 24 aa, synthetic construct
AKLGALSRQYDFRTGENHQYYMDV

SEQ ID NO: 6548 - protein, 14 aa, synthetic construct
ARLATIPWSYYMDV

SEQ ID NO: 6549 - protein, 18 aa, synthetic construct
ARVGTDYVWGSSIYFFDY

SEQ ID NO: 6550 - protein, 9 aa, synthetic construct
ARSAGLLDY

SEQ ID NO: 6551 - protein, 22 aa, synthetic construct
ARGEQRMMISGVVPRYYYYMDV

SEQ ID NO: 6552 - protein, 17 aa, synthetic construct
ARDTIYMVRGVLDAFDI

SEQ ID NO: 6553 - protein, 19 aa, synthetic construct
ARDRAAADTNTLPTYYFDY

SEQ ID NO: 6554 - protein, 11 aa, synthetic construct
AHHDIPTIFSV

SEQ ID NO: 6555 - protein, 21 aa, synthetic construct
ARGLHSVAAGGTIRYYYYMDV

SEQ ID NO: 6556 - protein, 10 aa, synthetic construct
ARLEVGGRDY

SEQ ID NO: 6557 - protein, 13 aa, synthetic construct
ARDRGFTVTWFDF

SEQ ID NO: 6558 - protein, 14 aa, synthetic construct
ARVYTRFSAWWFDP

SEQ ID NO: 6559 - protein, 15 aa, synthetic construct
ARGGIVPAAKENFDF

SEQ ID NO: 6560 - protein, 18 aa, synthetic construct
TRGISTSSAGYHYYYMDV

SEQ ID NO: 6561 - protein, 22 aa, synthetic construct
ARGADHRYDSRWYAHETSKFDS

SEQ ID NO: 6562 - protein, 14 aa, synthetic construct
ARDQGSGWLDAFEV

SEQ ID NO: 6563 - protein, 13 aa, synthetic construct
ARTPFGDFYYMDV

SEQ ID NO: 6564 - protein, 12 aa, synthetic construct
ARDGYGENVFDF

SEQ ID NO: 6565 - protein, 13 aa, synthetic construct
SRQGSGTYYDFDY

SEQ ID NO: 6566 - protein, 14 aa, synthetic construct
AKGADTWYGGTFDS

SEQ ID NO: 6567 - protein, 18 aa, synthetic construct
AKDLYLKEGYNSGGAFDM

SEQ ID NO: 6568 - protein, 15 aa, synthetic construct
ARGALVPDAHDALDI

SEQ ID NO: 6569 - protein, 11 aa, synthetic construct
ARQDNNDAFDI

SEQ ID NO: 6570 - protein, 16 aa, synthetic construct
VRGTTVTGGLEYYFDY

SEQ ID NO: 6571 - protein, 14 aa, synthetic construct
ARDGPMTTVTCFDY

SEQ ID NO: 6572 - protein, 11 aa, synthetic construct
VRRGSAWEIDY

SEQ ID NO: 6573 - protein, 22 aa, synthetic construct
VRGDVVEVPSVPSYYYYYYMDV

SEQ ID NO: 6574 - protein, 18 aa, synthetic construct
ARATYCGGDCSSGGAFDV

SEQ ID NO: 6575 - protein, 13 aa, synthetic construct
ARDYGGNAQYFHY

SEQ ID NO: 6576 - protein, 21 aa, synthetic construct
ARASMTPVTQAGPLGYYYMDV

SEQ ID NO: 6577 - protein, 16 aa, synthetic construct
VRDVSVDTSMVTVFEY

SEQ ID NO: 6578 - protein, 20 aa, synthetic construct
ARGDQPITISGVVETYYMDV

SEQ ID NO: 6579 - protein, 17 aa, synthetic construct
ARESGYSASGSVIYFDL

SEQ ID NO: 6580 - protein, 22 aa, synthetic construct
AKDAVGGYCRGGSCYDFDYFDY

SEQ ID NO: 6581 - protein, 21 aa, synthetic construct
ARERVILLSGTSLHYNYYMDV

SEQ ID NO: 6582 - protein, 21 aa, synthetic construct
TTDVVDDDFRSGYIEHDAFDF

SEQ ID NO: 6583 - protein, 16 aa, synthetic construct
ARELPTGNSYEYYFDY

SEQ ID NO: 6584 - protein, 13 aa, synthetic construct
GKAIIGSNGVGEY

SEQ ID NO: 6585 - protein, 20 aa, synthetic construct
ARQTGIVGASRYQYYYYMDV

SEQ ID NO: 6586 - protein, 17 aa, synthetic construct
ARAPRTNWNDVWGTFDY

SEQ ID NO: 6587 - protein, 15 aa, synthetic construct
ARGRIPPDSDGYFDF

SEQ ID NO: 6588 - protein, 21 aa, synthetic construct
ARLGPSFYDRSGSSRLNYFDS

SEQ ID NO: 6589 - protein, 15 aa, synthetic construct
ARFGGSDYRGGWSSY

SEQ ID NO: 6590 - protein, 17 aa, synthetic construct
ARGVAAGNYNLYYYMDV

SEQ ID NO: 6591 - protein, 16 aa, synthetic construct
ATKDAPTVNSNGGLDF

SEQ ID NO: 6592 - protein, 15 aa, synthetic construct
ARGDWNKISYYYMDV

SEQ ID NO: 6593 - protein, 13 aa, synthetic construct
ARVVLSDFKEAAS

SEQ ID NO: 6594 - protein, 14 aa, synthetic construct
AKGMDGAPGFYFDY

SEQ ID NO: 6595 - protein, 11 aa, synthetic construct
ARDLPPYGMDV

SEQ ID NO: 6596 - protein, 15 aa, synthetic construct
ARDSRGLYGSGIPDF

SEQ ID NO: 6597 - protein, 10 aa, synthetic construct
ARVVSDAFDL

SEQ ID NO: 6598 - protein, 17 aa, synthetic construct
ARGSGYSASGSNTYFDP

SEQ ID NO: 6599 - protein, 12 aa, synthetic construct
ARNSSRTPLFDY

SEQ ID NO: 6600 - protein, 13 aa, synthetic construct
AREGGTTTEYFRQ

SEQ ID NO: 6601 - protein, 16 aa, synthetic construct
ARDPPTSVTSQMLLDF

SEQ ID NO: 6602 - protein, 12 aa, synthetic construct
ARDLAEPYGMDV

SEQ ID NO: 6603 - protein, 20 aa, synthetic construct
ATLKLEGFTPVDYNTLPALY

SEQ ID NO: 6604 - protein, 17 aa, synthetic construct
AKDKRLDYSNYGTAPEY

SEQ ID NO: 6605 - protein, 11 aa, synthetic construct
ARDALYYGDSN

SEQ ID NO: 6606 - protein, 18 aa, synthetic construct
ARDSTILGAKPEEYYFDY

SEQ ID NO: 6607 - protein, 23 aa, synthetic construct
ARHQESVLPTADRPYRYYYYMDV

SEQ ID NO: 6608 - protein, 14 aa, synthetic construct
ARFKEHLGYNWFDP

SEQ ID NO: 6609 - protein, 16 aa, synthetic construct
AVEPYYNILTASYRDC

SEQ ID NO: 6610 - protein, 14 aa, synthetic construct
TGVLGWRGSYREDY

SEQ ID NO: 6611 - protein, 13 aa, synthetic construct
ARRPTTDFYYMDV

SEQ ID NO: 6612 - protein, 20 aa, synthetic construct
VKDSREIKTLMVEEDYYMDV

SEQ ID NO: 6613 - protein, 16 aa, synthetic construct
AKVTASHYYYYYGMDV

SEQ ID NO: 6614 - protein, 18 aa, synthetic construct
ARDRGYSSVSGSNYYMDV

SEQ ID NO: 6615 - protein, 17 aa, synthetic construct
ARDAGYSGSGSAYYFDY

SEQ ID NO: 6616 - protein, 16 aa, synthetic construct
AALNCNVTTCSDGFDM

SEQ ID NO: 6617 - protein, 10 aa, synthetic construct
ARVVSDAFDI

SEQ ID NO: 6618 - protein, 19 aa, synthetic construct
ARTYYYDDNGNYYQYYFDY

SEQ ID NO: 6619 - protein, 7 aa, synthetic construct
SIVSRDI

SEQ ID NO: 6620 - protein, 13 aa, synthetic construct
ARDGGSGYHNLDY

SEQ ID NO: 6621 - protein, 19 aa, synthetic construct
AREGTGYCDGGICPDAFDI

SEQ ID NO: 6622 - protein, 14 aa, synthetic construct
ARGSLIPAKDGFDI

SEQ ID NO: 6623 - protein, 15 aa, synthetic construct
ARDLVAIPAAMCGAY

SEQ ID NO: 6624 - protein, 20 aa, synthetic construct
AKGLGTYCSGGNCYSHYFDY

SEQ ID NO: 6625 - protein, 13 aa, synthetic construct
ANDYGDLVTWFDY

SEQ ID NO: 6626 - protein, 13 aa, synthetic construct
AREGGSTTAYFPH

SEQ ID NO: 6627 - protein, 16 aa, synthetic construct
TRADDFIPSPFGAFEI

SEQ ID NO: 6628 - protein, 22 aa, synthetic construct
ARGSLYHDSSRGSLDNHYYMEV

SEQ ID NO: 6629 - protein, 18 aa, synthetic construct
VKDAVLVVYGMGNWYFDL

SEQ ID NO: 6630 - protein, 15 aa, synthetic construct
ARGRPGWELIPFFDS

SEQ ID NO: 6631 - protein, 15 aa, synthetic construct
ARDLGAGSYYRHFDS

SEQ ID NO: 6632 - protein, 18 aa, synthetic construct
ARDPGVVDPLSPHPLPRF

SEQ ID NO: 6633 - protein, 17 aa, synthetic construct
ARDVGYSGSGSSYYFDP

SEQ ID NO: 6634 - protein, 18 aa, synthetic construct
VRGTMTTLGVFQYYYKEI

SEQ ID NO: 6635 - protein, 17 aa, synthetic construct
ARDVGYSGSGSAYYFDL

SEQ ID NO: 6636 - protein, 14 aa, synthetic construct
TREGPMTTVTYFDY

SEQ ID NO: 6637 - protein, 22 aa, synthetic construct
AREVVVIPAATIRYSYNYYMDV

SEQ ID NO: 6638 - protein, 15 aa, synthetic construct
ARGRGSAYDIMEIEY

SEQ ID NO: 6639 - protein, 8 aa, synthetic construct
ATSPAVGV

SEQ ID NO: 6640 - protein, 20 aa, synthetic construct
VKVQGEYCSGTSCYGFTLDV

SEQ ID NO: 6641 - protein, 16 aa, synthetic construct
AKGSAVPGSRPYYFDF

SEQ ID NO: 6642 - protein, 13 aa, synthetic construct
ARTPLTDFYYMDV

SEQ ID NO: 6643 - protein, 19 aa, synthetic construct
ARGVGFDDFWSGPNRYFSL

SEQ ID NO: 6644 - protein, 20 aa, synthetic construct
ARVGRSYYDSSGYYYTYFDS

SEQ ID NO: 6645 - protein, 17 aa, synthetic construct
AKHFGAPTSYYYYGMDV

SEQ ID NO: 6646 - protein, 20 aa, synthetic construct
AKALGPYCGAGDCYWAPLDF

SEQ ID NO: 6647 - protein, 24 aa, synthetic construct
GKDKGPYYYDSGSLWDYYSNGMDV

SEQ ID NO: 6648 - protein, 13 aa, synthetic construct
ARDYGGNAQYFNY

SEQ ID NO: 6649 - protein, 25 aa, synthetic construct
AKANDLGYCSGGRCYPPYYYYGMDV

SEQ ID NO: 6650 - protein, 17 aa, synthetic construct
ARDQGYSGSGSHYWFDP

SEQ ID NO: 6651 - protein, 16 aa, synthetic construct
ATDYFDSTGFHYGMDV

SEQ ID NO: 6652 - protein, 14 aa, synthetic construct
ARSGGNRLLYGMDV

SEQ ID NO: 6653 - protein, 16 aa, synthetic construct
ARVGDMSTTGTDAFDI

SEQ ID NO: 6654 - protein, 14 aa, synthetic construct
ARGDASGLFYYMDV

SEQ ID NO: 6655 - protein, 9 aa, synthetic construct
ARVAGLFDY

SEQ ID NO: 6656 - protein, 11 aa, synthetic construct
ARDGEGGAAEN

SEQ ID NO: 6657 - protein, 17 aa, synthetic construct
ARAADPGVGPTIGYFDP

SEQ ID NO: 6658 - protein, 15 aa, synthetic construct
ARSEVMNVGHYYLDS

SEQ ID NO: 6659 - protein, 13 aa, synthetic construct
ARVGGGGTNDFDF

SEQ ID NO: 6660 - protein, 26 aa, synthetic construct
ARGNDIALVPPAMSERPRNYFYYLDV

SEQ ID NO: 6661 - protein, 13 aa, synthetic construct
ARDYGSRTTWFDP

SEQ ID NO: 6662 - protein, 12 aa, synthetic construct
ARDDARYEAFDI

SEQ ID NO: 6663 - protein, 16 aa, synthetic construct
ATTNPELSVGGDVFHV

SEQ ID NO: 6664 - protein, 18 aa, synthetic construct
AKGPQLTAHPLRVGAFDI

SEQ ID NO: 6665 - protein, 23 aa, synthetic construct
ARHQESVLPAADRPYRYYYYMDV

SEQ ID NO: 6666 - protein, 17 aa, synthetic construct
ARESGYSGSGSVVYFHL

SEQ ID NO: 6667 - protein, 13 aa, synthetic construct
AKEGGTTTEYLQH

SEQ ID NO: 6668 - protein, 17 aa, synthetic construct
ARDVGYSGSGSCYYFDP

SEQ ID NO: 6669 - protein, 17 aa, synthetic construct
ARGSGYSGSGSNNYFDP

SEQ ID NO: 6670 - protein, 17 aa, synthetic construct
ARHGPDSSSRYHDAFDI

SEQ ID NO: 6671 - protein, 17 aa, synthetic construct
ARDSGYSGSGSNNYFDP

SEQ ID NO: 6672 - protein, 22 aa, synthetic construct
ARVGRADAVVPAGIDYYYYMDV

SEQ ID NO: 6673 - protein, 16 aa, synthetic construct
ATEAGFDPNYNYYLDV

SEQ ID NO: 6674 - protein, 9 aa, synthetic construct
ARIMGALDY

SEQ ID NO: 6675 - protein, 18 aa, synthetic construct
ARGTSVTRGSYHYYYMDV

SEQ ID NO: 6676 - protein, 9 aa, synthetic construct
VRSYDTGDV

SEQ ID NO: 6677 - protein, 9 aa, synthetic construct
TRQIGMADY

SEQ ID NO: 6678 - protein, 18 aa, synthetic construct
ARDPGVVDPLNPHPLPRF

SEQ ID NO: 6679 - protein, 15 aa, synthetic construct
ARGGLVPDAQEPFDI

SEQ ID NO: 6680 - protein, 17 aa, synthetic construct
ARGSGYSSGGSNNYFDS

SEQ ID NO: 6681 - protein, 18 aa, synthetic construct
AREGPFYCSGGSCYFFDY

SEQ ID NO: 6682 - protein, 17 aa, synthetic construct
AREAGYSGSGSSYYFDY

SEQ ID NO: 6683 - protein, 14 aa, synthetic construct
ARLATVPYFYYMDV

SEQ ID NO: 6684 - protein, 17 aa, synthetic construct
ATEVGYSGYGPSPYFDS

SEQ ID NO: 6685 - protein, 12 aa, synthetic construct
ARQSSSWHDVDY

SEQ ID NO: 6686 - protein, 16 aa, synthetic construct
ARFHDIFTGYSDAFDI

SEQ ID NO: 6687 - protein, 18 aa, synthetic construct
ARPSGRVLHDPWAYGMDV

SEQ ID NO: 6688 - protein, 19 aa, synthetic construct
ARTYYFDSSGNYYQYYFDY

SEQ ID NO: 6689 - protein, 22 aa, synthetic construct
ARGSLYHDTRWGSFDNHYYMDV

SEQ ID NO: 6690 - protein, 10 aa, synthetic construct
ARVVTEAFDI

SEQ ID NO: 6691 - protein, 13 aa, synthetic construct
ARVGPYYYYGMDV

SEQ ID NO: 6692 - protein, 19 aa, synthetic construct
AKSHDILDGYLDQINYFDY

SEQ ID NO: 6693 - protein, 13 aa, synthetic construct
ARDDGSPTTYFGD

SEQ ID NO: 6694 - protein, 17 aa, synthetic construct
ARDVGYSGSGSSYYFDY

SEQ ID NO: 6695 - protein, 17 aa, synthetic construct
AREIGYSDYGATEWFDP

SEQ ID NO: 6696 - protein, 15 aa, synthetic construct
ASSASAYYLFFYMDV

SEQ ID NO: 6697 - protein, 12 aa, synthetic construct
ARDRDGDFSFDF

SEQ ID NO: 6698 - protein, 12 aa, synthetic construct
ARKRWLQSDFDY

SEQ ID NO: 6699 - protein, 19 aa, synthetic construct
AKSHDILNGYLDQINYFDY

SEQ ID NO: 6700 - protein, 17 aa, synthetic construct
AKDKSSNYGDYAGGLGV

SEQ ID NO: 6701 - protein, 11 aa, synthetic construct
ASAPSYYYMDV

SEQ ID NO: 6702 - protein, 20 aa, synthetic construct
ARDGGFKPIYPRYYYYYMDV

SEQ ID NO: 6703 - protein, 20 aa, synthetic construct
AKTMAPDRAHYDTANDAFDI

SEQ ID NO: 6704 - protein, 21 aa, synthetic construct
AHRRGDIVVVPAAIIDNWFDP

SEQ ID NO: 6705 - protein, 17 aa, synthetic construct
VKDKSSNYGDYAGGMDV

SEQ ID NO: 6706 - protein, 16 aa, synthetic construct
AAPSCSRTTCYDGFNL

SEQ ID NO: 6707 - protein, 20 aa, synthetic construct
AKVAGTYCSGTTCSSGYFDY

SEQ ID NO: 6708 - protein, 16 aa, synthetic construct
AKDTSGAKCRVPIFEN

SEQ ID NO: 6709 - protein, 15 aa, synthetic construct
ARDIFFLPAGDAFDL

SEQ ID NO: 6710 - protein, 13 aa, synthetic construct
VRVSSSATGYFDL

SEQ ID NO: 6711 - protein, 18 aa, synthetic construct
ARGDQWELLNRYYYAMDV

SEQ ID NO: 6712 - protein, 18 aa, synthetic construct
ARGDHILTGLNYYYYMDV

SEQ ID NO: 6713 - protein, 15 aa, synthetic construct
ARDLVFIPAIDALEI

SEQ ID NO: 6714 - protein, 12 aa, synthetic construct
ARGMSGGDAFDI

SEQ ID NO: 6715 - protein, 19 aa, synthetic construct
ARHNSPVWGHYDNSGPFDY

SEQ ID NO: 6716 - protein, 20 aa, synthetic construct
ARHLSPTSYDFLSGPDAFDI

SEQ ID NO: 6717 - protein, 15 aa, synthetic construct
ARDSVGVPAADALDI

SEQ ID NO: 6718 - protein, 12 aa, synthetic construct
ARGDLGTPRIDF

SEQ ID NO: 6719 - protein, 11 aa, synthetic construct
ARRGSAWEIDY

SEQ ID NO: 6720 - protein, 15 aa, synthetic construct
VKDIGPMTPVTTPES

SEQ ID NO: 6721 - protein, 13 aa, synthetic construct
ARMSTTLTNWFDP

SEQ ID NO: 6722 - protein, 25 aa, synthetic construct
ARAGLPTDARALDGSGNYYTFYFDS

SEQ ID NO: 6723 - protein, 22 aa, synthetic construct
ATSRVYYDSGGYPQYHYYAMDV

SEQ ID NO: 6724 - protein, 17 aa, synthetic construct
ARERGYSDSGSVTYFDL

SEQ ID NO: 6725 - protein, 16 aa, synthetic construct
ARDSHLLRFLTQPMDV

SEQ ID NO: 6726 - protein, 15 aa, synthetic construct
VRDGRGLEPLGWFDP

SEQ ID NO: 6727 - protein, 17 aa, synthetic construct
ARDVGYSGSGSSYYFDH

SEQ ID NO: 6728 - protein, 13 aa, synthetic construct
ARSSGTGYNDFDY

SEQ ID NO: 6729 - protein, 14 aa, synthetic construct
ARGDLAALDWHFDL

SEQ ID NO: 6730 - protein, 13 aa, synthetic construct
ARDDGLPTTYFDS

SEQ ID NO: 6731 - protein, 24 aa, synthetic construct
ARASEKGLLFGAYTYTYVDWYFDI

SEQ ID NO: 6732 - protein, 18 aa, synthetic construct
AKHPCSGGSCYHEFYFDY

SEQ ID NO: 6733 - protein, 20 aa, synthetic construct
AKASGEYCSGGSCYNHYFDY

SEQ ID NO: 6734 - protein, 13 aa, synthetic construct
AREGGTTTEYFRH

SEQ ID NO: 6735 - protein, 19 aa, synthetic construct
VKGKELRAAAGRTYRPLDY

SEQ ID NO: 6736 - protein, 20 aa, synthetic construct
ARGGAIFRYFDLLSSEGMDV

SEQ ID NO: 6737 - protein, 22 aa, synthetic construct
ARVGAYCGGGHCYPEDKQSPDY

SEQ ID NO: 6738 - protein, 16 aa, synthetic construct
AADYYDSTGYHYGMDV

SEQ ID NO: 6739 - protein, 17 aa, synthetic construct
AKDLSINWGSPLSGMDV

SEQ ID NO: 6740 - protein, 14 aa, synthetic construct
ARARGWGVGATIDY

SEQ ID NO: 6741 - protein, 16 aa, synthetic construct
DKSEAYGTGWYGKNDY

SEQ ID NO: 6742 - protein, 11 aa, synthetic construct
ARTRHYDGLDH

SEQ ID NO: 6743 - protein, 18 aa, synthetic construct
VREIYGCTSCQHGIPRDH

SEQ ID NO: 6744 - protein, 21 aa, synthetic construct
ARAPCSGGGCYYGSLRGAFDY

SEQ ID NO: 6745 - protein, 20 aa, synthetic construct
GRARSTFCTSSSCYSAAFDF

SEQ ID NO: 6746 - protein, 16 aa, synthetic construct
ARDSSTADSLVSWFDP

SEQ ID NO: 6747 - protein, 22 aa, synthetic construct
VRESIVVAPAAGTYPSYYGIDV

SEQ ID NO: 6748 - protein, 11 aa, synthetic construct
ARGRTDDYLDS

SEQ ID NO: 6749 - protein, 11 aa, synthetic construct
ARDFHEGAFDI

SEQ ID NO: 6750 - protein, 23 aa, synthetic construct
ARAYTHSDFWSGYSDYYDYYMDV

SEQ ID NO: 6751 - protein, 12 aa, synthetic construct
ARGLTTGDAFDL

SEQ ID NO: 6752 - protein, 22 aa, synthetic construct
AKNLDTPNYDADDYYYYYGMDV

SEQ ID NO: 6753 - protein, 12 aa, synthetic construct
ARLGYSYDTGDY

SEQ ID NO: 6754 - protein, 15 aa, synthetic construct
ARDFAFIPAAGPFEY

SEQ ID NO: 6755 - protein, 12 aa, synthetic construct
ARVFWLRGGVDF

SEQ ID NO: 6756 - protein, 24 aa, synthetic construct
AKQSVNRNPGWDFLVSTTEDYFDS

SEQ ID NO: 6757 - protein, 20 aa, synthetic construct
ARVFSYYDSSGWGTAYYFDS

SEQ ID NO: 6758 - protein, 21 aa, synthetic construct
ARDEATITVVQGVATRHGYDI

SEQ ID NO: 6759 - protein, 16 aa, synthetic construct
AKDTGSKDYYYYGMDV

SEQ ID NO: 6760 - protein, 14 aa, synthetic construct
ARALGEGSGSVFGY

SEQ ID NO: 6761 - protein, 17 aa, synthetic construct
AKSSSVGDEGEFSSFDY

SEQ ID NO: 6762 - protein, 15 aa, synthetic construct
GKDSNLITQIVVDEY

SEQ ID NO: 6763 - protein, 14 aa, synthetic construct
AANGYTPGGDFFDP

SEQ ID NO: 6764 - protein, 13 aa, synthetic construct
ARHTIATIFDFDS

SEQ ID NO: 6765 - protein, 21 aa, synthetic construct
AKDLTYYYDSSDYYGPNAFDI

SEQ ID NO: 6766 - protein, 22 aa, synthetic construct
ARDPSGTMVRGGIVYYHYGMDV

SEQ ID NO: 6767 - protein, 22 aa, synthetic construct
ARGKAIYDFWRGYNGRALNFDN

SEQ ID NO: 6768 - protein, 14 aa, synthetic construct
AKDQVTSPLYGMDV

SEQ ID NO: 6769 - protein, 12 aa, synthetic construct
ARGGGYGDYFDY

SEQ ID NO: 6770 - protein, 17 aa, synthetic construct
ARSAPLAGTPPANWFDP

SEQ ID NO: 6771 - protein, 9 aa, synthetic construct
ARMPYGMDV

SEQ ID NO: 6772 - protein, 13 aa, synthetic construct
AKEGCSSTSCYDY

SEQ ID NO: 6773 - protein, 17 aa, synthetic construct
ARHLGVELGTIRGYFDS

SEQ ID NO: 6774 - protein, 14 aa, synthetic construct
ARGDFYSTRLAFDI

SEQ ID NO: 6775 - protein, 12 aa, synthetic construct
ARGAQYGDFFDY

SEQ ID NO: 6776 - protein, 17 aa, synthetic construct
ARAKQWVQRGYYYPMDV

SEQ ID NO: 6777 - protein, 21 aa, synthetic construct
AKRVDTYCYADCLGFPTTLDY

SEQ ID NO: 6778 - protein, 15 aa, synthetic construct
ARDIFLVPAISAMEV

SEQ ID NO: 6779 - protein, 16 aa, synthetic construct
ARDLGYSSGWPDAFDI

SEQ ID NO: 6780 - protein, 14 aa, synthetic construct
ARDVDTAMVTILDY

SEQ ID NO: 6781 - protein, 11 aa, synthetic construct
ARDLEQFGIDL

SEQ ID NO: 6782 - protein, 20 aa, synthetic construct
AKQMGSHCSAGNCYSATFDY

SEQ ID NO: 6783 - protein, 9 aa, synthetic construct
AREAYAFDI

SEQ ID NO: 6784 - protein, 15 aa, synthetic construct
ARDIVQITAAMGLEY

SEQ ID NO: 6785 - protein, 14 aa, synthetic construct
ARGVRWNGDYAVDY

SEQ ID NO: 6786 - protein, 12 aa, synthetic construct
ARGRQLINWFDP

SEQ ID NO: 6787 - protein, 25 aa, synthetic construct
ARGGRGFLEGVLSDENYYHYYGMDA

SEQ ID NO: 6788 - protein, 15 aa, synthetic construct
AGEVVRGNGRNAFHI

SEQ ID NO: 6789 - protein, 19 aa, synthetic construct
ARDSHPPVHYFWSGYYCDY

SEQ ID NO: 6790 - protein, 15 aa, synthetic construct
GKDSNLITMIVVDEY

SEQ ID NO: 6791 - protein, 16 aa, synthetic construct
ASAMVAHYYYYYGMDV

SEQ ID NO: 6792 - protein, 14 aa, synthetic construct
ARNSRFLGTNYFDY

SEQ ID NO: 6793 - protein, 19 aa, synthetic construct
ARDWGRGSSSSPEHDAFDI

SEQ ID NO: 6794 - protein, 12 aa, synthetic construct
ARAVPGTNYFDY

SEQ ID NO: 6795 - protein, 19 aa, synthetic construct
ARTYYYDSSGNYYQYYFDY

SEQ ID NO: 6796 - protein, 25 aa, synthetic construct
ARGGRGFLEKILSDEGYYDYFGMDV

SEQ ID NO: 6797 - protein, 13 aa, synthetic construct
AKQAGSPPDYFDY

SEQ ID NO: 6798 - protein, 11 aa, synthetic construct
ARDYGDFYFDF

SEQ ID NO: 6799 - protein, 18 aa, synthetic construct
AKQAYSSGWYAAGLVFDY

SEQ ID NO: 6800 - protein, 13 aa, synthetic construct
ARDAENLVTEFDY

SEQ ID NO: 6801 - protein, 13 aa, synthetic construct
VREGCSSTSCFDY

SEQ ID NO: 6802 - protein, 23 aa, synthetic construct
ARDKIIWESGYHKNYYYYYYMDV

SEQ ID NO: 6803 - protein, 11 aa, synthetic construct
WGNGTTVTVSS

SEQ ID NO: 6804 - protein, 11 aa, synthetic construct
WGHGTLVTVSS

SEQ ID NO: 6805 - protein, 11 aa, synthetic construct
WGQGTPVTVSS

SEQ ID NO: 6806 - protein, 11 aa, synthetic construct
WGQGTLVTVSQ

SEQ ID NO: 6807 - protein, 11 aa, synthetic construct
WGQGVLVTVSS

SEQ ID NO: 6808 - protein, 11 aa, synthetic construct
RAEVQLFTVSS

SEQ ID NO: 6809 - protein, 11 aa, synthetic construct
WGQGILVTVSS

SEQ ID NO: 6810 - protein, 11 aa, synthetic construct
WGRGIPVTVSS

SEQ ID NO: 6811 - protein, 11 aa, synthetic construct
WGTGTTVTVSS

SEQ ID NO: 6812 - protein, 11 aa, synthetic construct
WGQGTRVTVSS

SEQ ID NO: 6813 - protein, 11 aa, synthetic construct
WDQGTPVTVSS

SEQ ID NO: 6814 - protein, 11 aa, synthetic construct
WGRGTQVTVSS

SEQ ID NO: 6815 - protein, 11 aa, synthetic construct
WGQGIKVTVSS

SEQ ID NO: 6816 - protein, 11 aa, synthetic construct
WGKGTLVTVSS

SEQ ID NO: 6817 - protein, 11 aa, synthetic construct
WGRGTMVTVSS

SEQ ID NO: 6818 - protein, 11 aa, synthetic construct
RGNGTTVTVSS

SEQ ID NO: 6819 - protein, 11 aa, synthetic construct
WGAGTTVTVSS

SEQ ID NO: 6820 - protein, 11 aa, synthetic construct
WGQGTLVTAPQ

SEQ ID NO: 6821 - protein, 11 aa, synthetic construct
WGQGNAVTISS

SEQ ID NO: 6822 - protein, 11 aa, synthetic construct
WGSGTTVTVSS

SEQ ID NO: 6823 - protein, 11 aa, synthetic construct
WSQGTLVTVSS

SEQ ID NO: 6824 - protein, 11 aa, synthetic construct
WAQGTTVTVSS

SEQ ID NO: 6825 - protein, 11 aa, synthetic construct
WGQGTAVTVSS

SEQ ID NO: 6826 - protein, 11 aa, synthetic construct
GGRGTLVTVSS

SEQ ID NO: 6827 - protein, 11 aa, synthetic construct
WDQGTTVTVSS

SEQ ID NO: 6828 - protein, 11 aa, synthetic construct
WGQGTLVPVSS

SEQ ID NO: 6829 - protein, 11 aa, synthetic construct
WAQGTLVTVSS

SEQ ID NO: 6830 - protein, 11 aa, synthetic construct
WGTGTLVTVSS

SEQ ID NO: 6831 - protein, 11 aa, synthetic construct
GGQGTTVTVSS

SEQ ID NO: 6832 - DNA, 366 bp, synthetic construct
  source 1..366: mol_type = other DNA
caggtccagctggtgcagtctggagcagaggtgaaaaagcccggggagtctctgaagatctcctgtaagggttctggatacagctttaccagctactggatcggctgggtgcgccagatgcccgggaaaggcctggagtggatggggatcatctatcctggtgactctgataccagatacagcccgtccttccaaggccaggtcaccatctcagccgacaagtccatcagcaccgcctacctgcagtggagcagcctgaaggcctcggacaccgccatgtattactgtgcgaggggggaagggtacggtgactacgcagatgcttttgatatctggggccaagggacaatggtcaccgtctcctca

SEQ ID NO: 6833 - DNA, 360 bp, synthetic construct
  source 1..360: mol_type = other DNA
caggtccagctggtgcagtctggagcagaggtgaaaaagcccggggagtctctgaagatctcctgtaaaatctctggatacagctttaccacctactggatcggctgggtgcgccagatgcccgggaaaggcctggagtggatgggcatcatctatcctggtgactctgataccagatacagcccgtccttccaaggccaggtcaccatctcagccgacaagtccatgaccaccgcctacctgcagtggagcagcctgaaggcctcggacaccgccatgtatttctgtgcgagacgaattaggacctaccccccctgctttgactactggggccagggaaccctggtcaccgtctcctca

SEQ ID NO: 6834 - DNA, 366 bp, synthetic construct
  source 1..366: mol_type = other DNA
caggtacagctgcagcagtcgggcccagggctggtgaagccttcggagaccctgtccctcacgtgctctgtctctggtgcctccgtcagcggtgagggtaactactggacctggatccggcagcccccagggaaacgactggagtccattgcctatttctattctactgggaaaaccaactacaacccctccctcaagagtcgagtcaccatatctgtggacaagtccaaaaatcttttctccctgaggctggattctgtgactgctgcggacacggccctttattactgtgccagagcggaccgccgactaccgaatgatgcttttgatgtttggggccaagggaccacggtcaccgtctcctca

SEQ ID NO: 6835 - DNA, 381 bp, synthetic construct
  source 1..381: mol_type = other DNA
caggtccagctggtgcagtctggggctgaggtgaagaagcctgggtcctcggtgaaggtctcctgcaaggcttctggaggcaccttcagcagctatggcattagctgggtgcgacaggtccctggacaagggcttgagtggatgggaagggtcatccccttccttcgtatacttgactatgcaccgaagttccagggcagactcacgattgccgtggacacatccacgagcacagcctacctggaactgagcagcctcagatctgaagacacggccgtgtattattgtgcggaacattaccatgaaagtcgttttgggggtgggatcagcgatgatgcctttaatatctggggccaagggacaatggtcaccgtctcctca

SEQ ID NO: 6836 - DNA, 354 bp, synthetic construct
  source 1..354: mol_type = other DNA
caggtgcagctgttggagtctgggggaggcttggtccaacctggagggtccctgagactctcctgtgcaatctccggactcattatcagtgaccattacatagactgggtccgccaggctccaggaaaggggctggagtgggttggccgttctgcaaacagagttaacagttacaccgcactctacgccgcgtctgtgatgggcagattcaccatctccagagatgattcaaagaataccctgtttcttcaaatgaccagtctgaaaaccgacgacacggccgtttatcactgtgttgtcattgctgggacttatggctcctggggccagggaaccctggtcaccgtctcctca

SEQ ID NO: 6837 - DNA, 366 bp, synthetic construct
  source 1..366: mol_type = other DNA
caggtgcagctacagcagtggggcgcaggactgctgaagccttcggagaccctgtccctcacctgcgctttttctggtgggtccgtcaatggtgactactggagctggatccgccagcccccagggaaggggctggagttgattggggagatcagccatgatggaaccaccaagtacaagtcggccctcgagagtcgagtcagtatatctttagacacgtccaagaaccagttctccctgaagttgagttctgtgaccgccgcggacacggctatgtattactgtgcgagaggcctgtcggcagtggttactgtttctgggtggttcgactcctggggccagggaaccctggtcaccgtctcctca

SEQ ID NO: 6838 - DNA, 366 bp, synthetic construct
  source 1..366: mol_type = other DNA
gaggtgcagctgcaggagtctgggggaggcttggtccagcctggagggtccctgagactctcctgtgcagcctctggcttcaccttcagtgaccacttcatggactgggtccgccaggctccagggaaggggctggagtgggttggccgtactagaaacaaagctaacagttacaccacagaatacgccgcgtctgtgaaaggcagattcaccatctcaagagatgattcaaagaactcactgtatctgcaaatgaatagcctgaaaaccgaggacacggccgtgtattactgtgctagagtgggagctgcactcggcggggtttgtgactactggggccagggaaccctggtcaccgtctcctca

SEQ ID NO: 6839 - DNA, 369 bp, synthetic construct
  source 1..369: mol_type = other DNA
gaggtccagctggtgcagtctggggctgaggtgaggaagcctggggcctcagtgaaggtttcctgcaagactgttggatacaccttccctgcctattctatccattgggtgcgccaggtccccggacaacgccttgagtggctgggatggatcaacccccgctacggaaacacaaaatcttcacagaatttacagggcagattcaccatgagcagtgacacaggcgcgaccactgtcttcatggaactgcgcggcctgacttctgacgacacggctgtctattactgtgcgagatcaggcttttgtgatggtacgagttgcttctcgggagactactggggccagggaaccctggtcaccgtctcctca

SEQ ID NO: 6840 - DNA, 363 bp, synthetic construct
  source 1..363: mol_type = other DNA
gaggtgcagctgttggagtcgggcccaggactggtaaagccttcggagaccctgtccctcatttgttctatctctggtggctccataagtagtcattactggagctggatccggcagtcccccgggaagggactggaatggattgggaatatttatcacagtgggagcaccaattacaacccctccctcaagagtcgagtcagcattacagttgacacgtccaggacccagttctccctgaaactgagttctgtgaccgctgcggacacggccgtctattactgtgcgagaggccctcatgagcggtggttcaagaattggttcgacccctggggccagggaaccctggtcaccgtctcctca

SEQ ID NO: 6841 - DNA, 354 bp, synthetic construct
  source 1..354: mol_type = other DNA
gaggtgcagctggtacagtctggggctgaggtgaagaagcctggggcctcagtgaaggtctcctgtaaggcttctggataccccttcaccggccgctatatgcactgggtgcgacaggcccctggacaggggcttgactggatgggatggatcaaccctagcagtggttacacaaactctgcacagaagtttcagggcaggatcaccctgaccagggacacgtccactactacaatcttcatggagctgaatagcctaagatctgacgacacagccatttattactgtacgagagatccgacggccggggcaggtgactactggggccagggaaccctggtcaccgtctcctca

SEQ ID NO: 6842 - DNA, 375 bp, synthetic construct
  source 1..375: mol_type = other DNA
gaggtgcagctggtggagtctgggggaggcttagtacagcctggcaggtccctgagactctcctgtgcagcctctggattcacctttgaagattatgccatgcactgggtccggcaaactccagggaagggcccggagtgggtctcaggtattagttggaatgggggtatcatgggctatgcggcctctgtagagggccgattcatcatctccagagacaacgccaagaactccctgtatctgcaaatgatgcgtctgagagcagaggacacggccttctattactgtacaaaagcccaagccccacttgactccggtgacttcggcggtggttttcatatctggggcccagggaccacggtcaccgtctcctca

SEQ ID NO: 6843 - DNA, 366 bp, synthetic construct
  source 1..366: mol_type = other DNA
caggtcccgctgaaggagtctggtcctgcgctggtgaaacccacacagaccctcacactgacctgcaccttctctgggttctcactcgctactagtggaatgcgtgtgagttggatccgtcagcccccagggaaggccctggagtggcttgcacgcattgattgggaggatgataaagtctacagtacttctctaaagaacaggctcaccatctccaaggccacctccaaaaaccaggtggtccttacaatgaccgacatggaccctgtagacacagccacttattactgtgcacgggtgggagacagatttggctaccagtacatggacgtctggggcaatgggaccacggtcaccgtctcctca

SEQ ID NO: 6844 - DNA, 363 bp, synthetic construct
  source 1..363: mol_type = other DNA
gaggtgcagctggtggagactggaggaggcttgatccagcctggggggtccctgagactctcctgtgcagcctctgggatcaccgtcagcagcaactacatgacctgggtccgccgggctccagggaaggggctggagtgggtctcagttctttatagcggtggtagcacatactacgcagactccgtgaagggccgattcaccatctccagagacaattccaagaacacgctgtttcttcaaatgaacagcctgaaagccgaggacacggccgactattactgtgcgagaggggacgggggaggagactacccctacggtatggacgtctggggccaagggaccacggtcaccgtctcctca

SEQ ID NO: 6845 - DNA, 363 bp, synthetic construct
  source 1..363: mol_type = other DNA
caggtgccgctggtggagtctgggggaggcttggtacagcctggcaggtccctgagactctcctgtgcagcctctggattcacctttgatgattatgccatgcactgggtccggcaagctccagggaagggcctggagtgggtctcaggtattagttggaatggtggtagcatagcctatgcggactctgtgaagggccgattcaccatctccagagacaacgccaagaactccctgtatctgcaaatgaacagtctgagacctgaggacacggccttttattactgtggaaaagggtccaccagcagctattacgggtacttcgacccctggggccacggaaccctggtcaccgtctcctca

SEQ ID NO: 6846 - DNA, 381 bp, synthetic construct
  source 1..381: mol_type = other DNA
gaggtgcagctgttggagtctgggggaggcttggtacagcctggcaggtccctgagactctcctgtgcagcctctggattcacctttgatgattatgccatgcactgggtccgacaagttccagggaagggcctggagtgggtctcaggtgttacttggaatagtggtaccattgactatgcggactctgtgaagggccgattcttcatctccagagacaacgccaagaactccctgtatctgcaaatgaacagtctgagagctgaggacacggccttgtattactgtgcaaaagatggaggtggacgactactgtattttgagatggagcactactacatggacgtctggggcaaagggaccacggtcaccgtctcctca

SEQ ID NO: 6847 - DNA, 381 bp, synthetic construct
  source 1..381: mol_type = other DNA
gaggtgcagctggtggagtctgggggaggctttgtaaagcctggggggtcccttagactctcctgtgcagcctctggattcactttcaattacgcctggatgacctgggtccgccaggctccagggggggggctggagtgggttggccgtgttaaaagccacattgatggtgggacaacagactacgcggcacccgtgaaaggcagattcgttatttccagagatgattcaaaaaacacgctgtatttggaaatgaacagcctgaaaaccgaggacaccgccgtatattactgtgtcacagatctctcaaggtttttatcgtccagggagactgatgcttttgacatctggggccaagggaccacggtcaccgtctcctca

SEQ ID NO: 6848 - DNA, 372 bp, synthetic construct
  source 1..372: mol_type = other DNA
gaggtgcagctggtggagtctgggggacgcgcggtccagcctggggggtccctgagactctcctgtggagcctctggattcacctttaggacctatgatttttactgggtccgccagactccaggcaaggggctggagtgggtggcagttgtctcatctgatgcaagcagtaaattctacgcagactccgtgaagggccgattcaccatctccagagacaattccaagaacacattgtttctgcaaatgagcagcctgatacctgaggacagtgctgtttactactgtgcgagagagaagcgcgtgagaacgattcttgggcactacggtttcgacgtctggggccaagggaccacggtcaccgtctcctca

SEQ ID NO: 6849 - DNA, 369 bp, synthetic construct
  source 1..369: mol_type = other DNA
gaggtgcagctggtgcagtctgggggaggcgtggtccagcctgggaggtccctgagactctcctgtgtggcctctggcttcaccttcggaaattttgctgtgcactgggtccgccagactccgggcaaggggctagagtgggtggcagctacttcacatgatggaagtgagaaaaactacgcagactccgtgaagggccgcttcaccatctccagagacaattccaagaacacgctgtatctgcaaatggacagcctgagacctgaggacacggctctatactattgtgcgagagggggacatattgtaatggtgactgctggttactttgacttctggggccagggaaccccggtcaccgtctcctca

SEQ ID NO: 6850 - DNA, 387 bp, synthetic construct
  source 1..387: mol_type = other DNA
gaggtgcagctggtggagtctgggggaggcgtggtccagcctgggaggtccctgagcctctcctgtgcggcctctggattcaccttccgtcattttgccctacactgggtccgccagactccaggcaagggcctggaatgggtggcagttatttcgtatgatggaaatgaaaaatactacgcagactccgtgaagggccgattcaccatctccagagacaattccaagaacacagtatatctgcaaatgaacagcctgagagttgaggacacggctgtttatttctgtgcgaaagatcatttaaccgccaggtactacgattttcggagtgtttcttttaatggtgacgcctactggggccagggcaccctggtcaccgtctcctca

SEQ ID NO: 6851 - DNA, 366 bp, synthetic construct
  source 1..366: mol_type = other DNA
gaggtgcagctggtggagtcgggcccaggagtggtgaggccttcggagaccctgtccctcacctgcgctgtgtctggttactcgatcagtagtggttactcatggggctgggtgcggctgcccccagggaagggtctgcagtggattgggagtgtctctcatgatgggagcacctaccacaacccgtccctcaagagtcgagtgaccatatcagcagacacgtccaagaaccagttctccctgatgctgagctctgtgaccgccgcagacacggccatctattactgtgcgagagagggtgggagttttttccgggatggtgacttcgaacactggggccagggcaccctggtcaccgtctcctca

SEQ ID NO: 6852 - DNA, 381 bp, synthetic construct
  source 1..381: mol_type = other DNA
gaggtgcagctgaaggagtctgggggaggcgtggtacagccgggggggtccctgagactctcctgtggagcctctggattcacgttaagtagtttcagcatgaattgggtccgccaggctccagggaaggggctggagtgggtttcatatattagtagtggtagtactatcatacactatgcagactctatgaggggccgattcaccatctccagggacaatgccaagaactcactgtttctacaactgaacagcctgagagtcgaagacacggctgtgtattactgtgcgagacatctctctccaacgaataacgattttttgactggcccagatgcttttgatctctggggtcaagggaccacggtcaccgtctcctca

SEQ ID NO: 6853 - DNA, 366 bp, synthetic construct
  source 1..366: mol_type = other DNA
caggtgcagctgcagcagtctgggggaggcttcgtaaagcctggtgggtcccttagactctcctgtgcaacctctggattctcttttaatcacgcctggatgagctgggtccgccaggctccagggaaggggctggagtgggttggccgtattaaaaccataaatgatggtgggacaacagactacgctgcacccgtgaaaggcagattcaccatttcaagagatgattcgaaaagcacactgagtctccaaatgaacagcctgaaaaccgaggacacagccgtctatttttgtagcacagctagtgactacggtgaccactcccctcactactggggccagggaaccctggtcaccgtctcctca

SEQ ID NO: 6854 - DNA, 372 bp, synthetic construct
  source 1..372: mol_type = other DNA
gaggtgcagctggtggagtctgggggaggcttggtacagccgggggggtccctgagactctcctgtgcagcctctggattcaggttcagtaactacgacatgcactgggtccgccaggctataggaaaaggtctagagtggctctcagttattggtactgatggggacacatactatccagactccgtgaagggccgattcaccgtctccagagacaatggcaagaactccttgtatcttcaaatgaacaacttgggagccggggacacggctgtgtattattgtgtaagaggggcttggagcagtgactcatatctcccccgtggattttttgactactggggccagggagccctggtcaccgtctcctca

SEQ ID NO: 6855 - DNA, 384 bp, synthetic construct
  source 1..384: mol_type = other DNA
gaggtgcagctggtggagtctgggggaggcttggtgcagcctggggggtccctgagactctcctgtgtagcctctggattcaccttcagtagtgacgacatgcactgggtccgccaacctgcaggtaaaggtctggagtgggtctcagctattggtacttctggtgactcctactatacagactccgtgaagggccggttcaccatctccagagaaaatgccaagaactccttgtttcttcaaatgaacaacctgagagccggggacacggctgtgtattattgcgcaagaggtacacagcagcaactggtacttcatggaaacgttaactacttttattacatggacgtctggggcaaagggaccacggtcaccgtctcctca

SEQ ID NO: 6856 - DNA, 357 bp, synthetic construct
  source 1..357: mol_type = other DNA
caggtgcagctgaagcagtctggaggaggcttgatccaacctggggggtccctgagactctcctgtgcagcctctggactcatcgtcagtagcaactacatgagctgggtccgccaggctccagggaaggggctggagttggtctcagttatctatgccggtggtagaacagactacgcagactccgtgaagggccgattcaccatctccagagacgattccaagaacacgctacatcttcaaatgaacagcctgagagtcgaagacacggccgtgtattattgtgcgagaggtgatgggggatattatagtggcatcgactactggggccagggaaccctggtcaccgtctcctca

SEQ ID NO: 6857 - DNA, 369 bp, synthetic construct
  source 1..369: mol_type = other DNA
gaggtgcagctgttggagtcgggcccaggactggtgaagccctcggagaccctgtccctcacgtgcacggtctctggtgcctccatcagtacttactactggggctggatccggcagcccccagggaagggactggagtggattgggtatatctactacagtgggagcgccaatctcaacccctccctcaagagtcgagtcaccatatcggtggacacgtccaaaaaccagttgtccctgaagctgaactctgtgaccgctgcggacacggccatttattactgtgcgaggctccctgatagtgactatcacggatacgcgtactactttgactactggggccagggaaccctggtcaccgtctcctca

SEQ ID NO: 6858 - DNA, 378 bp, synthetic construct
  source 1..378: mol_type = other DNA
gaggtgcagctggtggagtctgggggagacttggtacagcctggagggtccctgagactctcctgtgtcgcctctggattcaccttcagtaattatgagatgaactgggtccgccagggtccagggaaggggctggagtggatttcatacattagtacgagtggaagtacctattactacgcagactctgtgaagggccgagtcaccatatccagagacaacgccaggaattcactgtatctggaaatgcacagcctgagagtcgaagacactggtctttattactgtctgacacaccctcagcctcaatatgtacgacccacgccggtggtttggttcgacccctggggccagggaaccttggtcaccgtctctcag

SEQ ID NO: 6859 - DNA, 384 bp, synthetic construct
  source 1..384: mol_type = other DNA
caggtgcagctggtgcagtctggggctgaagtgaagaagcctgggtcctcggtgaaggtctcctgcagggcttctggaggcaccttcagcaactttgctatcaactgggtgcgacaggcccctggacaagggcctgagtggatgggaagggtcatccctgtccttgatagaccaatctacgcacaacaattccagggcagagtcacgattatcgcggacacatccacgaacacagcctacatggaggtgagcagcctgagatccgaagacacggccgtttattattgtgcgagagatgtgaagttcgactatagcacctcgtccattgaggagagcatcgcttttgatatctggggccaggggaccacggtcaccgtctcctca

SEQ ID NO: 6860 - DNA, 390 bp, synthetic construct
  source 1..390: mol_type = other DNA
gaggtgcagctggtggagtctgggggaggcttggtacagccgggggggtccctgagactctcttgtgcagcctctggaatcaccttcaataacgacgacatacactgggtccgccaaggtccagggaaaggtctggagtgggtctcagctattggttcttctggtgacacatattatgcagactccgtgaagggccgattcaccatctccagagaaaacgccaggaagtccttgtatctccaaatgaacaacctgagagccggggacacaggtatatattactgtgcgagaggggatattgaagtaagaccggccagtaccacgcacaagacctcttacttttactacatggacgtctggggcaaagggaccacggtcaccgtctcctca

SEQ ID NO: 6861 - DNA, 366 bp, synthetic construct
  source 1..366: mol_type = other DNA
caggtgcagctggtgcagtctgggggaggcttggtacagccgggggggtccctgagactctcctgtgcagcctctggattcaccttcagtcgttttgacatgcactggttccgccaaggcacagggaaaggtctagagtgggtctcagctattggtacttctggtgacacatattatggagactccgtgaagggccgattcacgatcagcagagaaaatgccaagaactccttgaatcttcaaatgaacagcctgagagccgaagacacggctatatattactgtgcaagagcgactccgcatagtagtggttattgggactggttcgacccctggggccagggaaccctggtcaccgtctcctca

SEQ ID NO: 6862 - DNA, 369 bp, synthetic construct
  source 1..369: mol_type = other DNA
gaggtgcagctggtggagtctgggggaggcgtagtccagcctgggaggtccctaagactctcctgtgcagcctctggattcacctttggaaactatgctatgcactgggtccgccaggctccggacaaggggcttgagtgggtggcagttgtctcatatgatggaagtaatgaattctacgcagactccgtgaagggccgattcagcatctccagagacaattccaagaacacactccatctgcaaatgaacagcctgaaggctgaagacacggctgaatatttttgtgtgagaccccacctccctgattactttggttcagggagttttcactactggggccagggagtcctggtcaccgtctcctca

SEQ ID NO: 6863 - DNA, 375 bp, synthetic construct
  source 1..375: mol_type = other DNA
gaggtgcagctggtacagtctgggcctgcggtgaagaagcctgggtcctcggtgaaggtctcctgcaaggcttctgggggcgccttcagcatccatggtatcacctgggtgcgccaggcccctggacaagggcttgagtggctgggagggatcatccctatgtttggaacagcaaactacccacagaacttccagggcagagtcacgattaccgcggaggaatccacgagcacagtctacatggagctgaacagcctgcgatgtgaggacacggccatgtactactgtgcgagggatggcagatattgtaacagtaccgcctgccttaacttctttgacttatggggccagggaaccctggtcactgtctcctca

SEQ ID NO: 6864 - DNA, 360 bp, synthetic construct
  source 1..360: mol_type = other DNA
gaggtgcagctgttggagtcggccccgggactggtgaagccttcggggaccctgtccctcacctgcgctgtctctggtgactccatcagcagtggttactggtggagttgggtccgccagcccccactgaaggggctggagtggattggggacatctatcatagtggcaacaccgtctacaacccgtccctcaagagccgagtcaccatttcagtagacaagtccaagaaccacttctccctgagtctgaagtctgtgaccgccgcggacacggccgtctattactgtgcgcgatcaataggatctcgtccgaggtggttcgacccctggggccagggaaccctggtcaccgtctcctca

SEQ ID NO: 6865 - DNA, 366 bp, synthetic construct
  source 1..366: mol_type = other DNA
gaggtgcagctgttggagtctgggactgaggtgaagaagcctggggcctcagtgaaggtttcctgcaaggcacttggatacactttcaccaataactacatacactgggtgcgacaggcccctggacaagggcttgagtggatgggaataatcaatcctagtggtggcgccacaacctacgcacagaagttccagggtagagtcaccttgaccagcgacacatccacgagcacagtctacctggagctgaccagcctgacatctgaggacacggccgtctattactgtgcgagagatagcgaatatataccagcagctggttcttttgactactggggccagggaaccctggtcaccgtctcctca

SEQ ID NO: 6866 - DNA, 375 bp, synthetic construct
  source 1..375: mol_type = other DNA
gaggtgcagctggtggagtccggaccagaggtgaaaaagcccggggagtctctgacgatctcctgtaaggcttctggatacagctttatcagctattggatcacctgggtgcgccagatgcccgggaaaggcctggagtggatggggaacattgatcctagtgactcttacaccaactatagtccggccttccaaggccacgtcaccatcgcagctgacaagggcatcagcactgcctacctacagtggaggagcctgaaggcctcggacaccgccatgtattattgtgcgagacgaattatgattacatctggtggaaaagagatcgatgcttttgatatctggggccaagggacaacggtcaccgtctcctca

SEQ ID NO: 6867 - DNA, 390 bp, synthetic construct
  source 1..390: mol_type = other DNA
gaggtccagctggtgcagtctggagctgaggtgaagaagcctggggcctcagtgaaggtctcctgcaagacttctggttacgcctttatcaactatggtatcagctgggtgcgacaggcccctggacaagggcttgagtggatgggatggatcagcccttacgatggccacacaaactatgcacagaaaatccagggcagagtcaccatggccacagacacatccgcgagcacagcctacatggacctgaggagcctgagatctgacgacacggccgtctattactgtgtgagagattactacggtgctttgacaagcccaaatgccaatagtgagacgttgggaacgatggactactggggccagggaaccctggtcaccgtctcctca

SEQ ID NO: 6868 - DNA, 366 bp, synthetic construct
  source 1..366: mol_type = other DNA
gaggtgcagctggtggagtctgggggaggcgtggtccagcctgggaagtccctgagactctcctgtgtagcgtctggattcaccttcagtagacatggcatgcactgggtccgccaggctccaggcaaggggctggagtgggtggcacttatatattatgatggaagtagtaaatattatgcagactccgtgaagggccgattcaccatctccagagagaattccaagaacacgctgtatctgcaaatgaacagcctgagagtcgaggacacggctctgtattactgtgcgagagatggggctaatggctatgatcctttgtacctcaaccactggggccagggcaccctggtcaccgtctcctca

SEQ ID NO: 6869 - DNA, 351 bp, synthetic construct
  source 1..351: mol_type = other DNA
caggtgcagctggtggagtcgggcccaggactggtgaagccttcggagaccctgtccctcacctgcactgtctctgatgactccatcagcagtagtaattcctactgggcctggatccgccagcccccagggaaggggctggagtggattgggagtatcttttatagtgggagcacctactacaacccgtccctcaagagtcgagtcaccatatccgtagacacgtccaagaaccagttctccctgcagttaacttctgtgaccgccacagacacggctgtttattactgtgcgagagaacttggatttagtgactcctggggccagggaaccctggtcaccgtctcctca

SEQ ID NO: 6870 - DNA, 363 bp, synthetic construct
  source 1..363: mol_type = other DNA
gaggtgcagctgttggagtcgggcccaggactggtgaagccttcacagaccctgtccctcacctgcactgtctctggtgactccatcagccgtggtggttactactggagctggatccgccagcacccagggaggggcctggagtggattgggttcatctattacagtgggagcacctactataacccgtccctcaagagtcgagtcaccatatcagtggacacgtctaagaaccagttctccctgaagctgagctctctgactgccgcggacacggccgtatattactgtgcgagagacttcggtggtaacgcccaatactttgccttctggggcccgggaaccctggtcaccgtctcctca

SEQ ID NO: 6871 - DNA, 381 bp, synthetic construct
  source 1..381: mol_type = other DNA
gaggtgcagctggtggagtctgggggaggcgtggtccagcctgggaggtcccttagactctcctgtgcagcctccggattcaccttcaggagatatggcatgcattgggtccgccaggctccaggcaaggggctggagtgggtggcagttatattatatgatggaagtaataaagactacgcagactccgtgaagggccgattcaccatctccagagacaattccaagaacacgctgtatctgcaaatgaacagcctgagagctgaagacacggctgtgtattactgtgcgaaatcccagggaacttattgcagtgggggtaactgctactcgaattactttgactactggggccagggaaccctggtcaccgtctcctca

SEQ ID NO: 6872 - DNA, 348 bp, synthetic construct
  source 1..348: mol_type = other DNA
gaggtgcagctggtggagtcgggcccaggactggtgaagccttcggggaccctgtccctcacctgcgctgtctccggtggctccatcagcggtagtaactggtgggcttgggtccgccagtccccagggaagggactggagtggattggggaaatctttcatagtgggagcaccgtctacaacccgtccctcaagagtcgagtcaccatgtcactagacaagtccaagagccagttctccctgaacttgataacgcgttcaaaaatgaaatgggttacgtttatatctctattgttcttatttctggcgtcctcgagggccgaggtgcagctgttcaccgtctcctca

SEQ ID NO: 6873 - DNA, 390 bp, synthetic construct
  source 1..390: mol_type = other DNA
ccaggtgcccgctgttgcagtctgggggacgtgtggtccagctgggaggtccctgcgactctcctgtgcagctctggattcaccttcagtaactatgctatgcactgggtccgccaggctccaggcaaggggctggagtgggtggcacttatatcatatgatggaagcaataattactacgcagactccgtgaagggccgattcaccatctccagagacaattccaagaacacgctgtatctgcaaatgaacagcctgagagctgaggacacggctgtgtattactgtgcgagaggaggtgattgtagtggtggtgggtgcccgtacccctactactacaatggtatagacgacgtctggggccaagggaccacggtcaccgtctcctca

SEQ ID NO: 6874 - DNA, 372 bp, synthetic construct
  source 1..372: mol_type = other DNA
caggtgcagctgcagcagtctggggctgaggtgaaggagcctgggtcctcggtgaaggtctcctgcatggcttctggaggcaccttcagcagctctcctatcagctggatacgccaggcccctggacaagggcttgagtggatgggcacgatcatccctatccttggtgtaccaaactacgcacaacagttccaggccagacttacccttaccgcggacaaatccacgagcacagcctacatggaactgagcagcctgagatctgaggacacggcctcttattactgtgcgagagagtcgggttactctgctccggggagtgttacctacttcgatctctggggccgtggcaccctggtcaccgtctcctca

SEQ ID NO: 6875 - DNA, 369 bp, synthetic construct
  source 1..369: mol_type = other DNA
gaggtgcagctggtgcagtctgggggaggcgtggtccagcctgggaggtccctgagactctcctgtgcagcctctggattcaccttcagtaactatgctttctactgggtccgccagactccaggcaaggggctagagtgggtggcacttatgtcagatgatggagcttataaagactacgcagactccgtgaagggccgattcaccatctccagagacaattccaagaacacgctgtatctgcaaatgaacggcctgaaaagtgaggacacggctgtttatttctgtgcgagagatctgccaagcagcagctggtcatcaaccgcctttgactactggggccagggagccctggtcaccgtctcctca

SEQ ID NO: 6876 - DNA, 369 bp, synthetic construct
  source 1..369: mol_type = other DNA
caggtccagctggtgcagtctgggcctgaggtgaagaagcctgggacctcagttaaggtcccctgcaaggcttctggtttcaactttgatctctctgctgtgcagtgggtgcgacaggctcgtggacaacgccttgagtggatagggtggatcgccgttggcagtggcaaaacagactacgcacagaagttccatgaaagagtcaccataaccagggacatgtcaataaatacggcctacctggagctgagcagcctgagatccgaggacacggccgtctattactgtgcggcaccccattgcaatcgtaccaactgccacgatggttttgatctctggggccaagggaccacggtcactgtctcctca

SEQ ID NO: 6877 - DNA, 372 bp, synthetic construct
  source 1..372: mol_type = other DNA
gaggtgcagctggtggagtctgggggaggcgtggtccagcctgggaggtccctgagactctcctgtgcagcctctggattccccttcagtacctatcctatgcactgggtccgccaggctccaggcagggggctggaatgggtggcagttatttcatatgatggagcccataaattctacgcagactccgtgaagggccgattcaccgtctccagagacaattccaagaacacactgtatctacaactgaacagcctgagacctgaggacacggctgtttattcttgtgcgagtcgctcaccgcgtgtaccagcaactgctactaatgcttttgatatctggggccaagggaccacggtcaccgtctcctca

SEQ ID NO: 6878 - DNA, 378 bp, synthetic construct
  source 1..378: mol_type = other DNA
caggtgcagctggtggagtctgggggaagcttggtcaagcctggggggtcccttagactctcctgtgcagcctctggattccctttcagtaacgcctggatgacctgggtccgccaggctccagggaaggggctggagtggattggccgtattaagaacggacctgatggtgggacaacagactacgctgcacccgtgagaggcagattcaccatctcaagagatgattcaaaaaacacgctgtatcttcaaatgaacagcctgaaaagcgaggacacaggcgtttatttctgtaccacaatgagccgagaatactatgataccgacttctacgctaaggacgtctggggccaagggaccacggtcaccgtctcctca

SEQ ID NO: 6879 - DNA, 366 bp, synthetic construct
  source 1..366: mol_type = other DNA
gaggtgcagctggtggagtctgggggaggtttggtacagcctggcaggtccctgagactctcttgtgcagcctctggattcacctttgaagattatggcatgcactgggtccggcaagctcctgggaagggcctggagtgggtatcaggcactgcctggaatagtgctaccataggctatgcggactctgtgaagggccgattcttcatctccagagacaacgccaagagctccctgtatctgcaaatgatcagtctgagagctgaggacacggccttgtattactgtgtaaaagttttttcccgggattggagtggttacgcttttgatatgtggggccaagggaccacggtcaccgtctcctca

SEQ ID NO: 6880 - DNA, 360 bp, synthetic construct
  source 1..360: mol_type = other DNA
gaggtgcagctgttggagtcggggggaggcttggtacagcctggagggtccctgagactctcctgtgcagccactggattccccttcattacttatgaaatgaactgggtccgccaggctccagggaaggggctggagtgggtctcacacattagtagtggtggtactaccacatactacgcagactctgtgaagggccgattcaccatctccagagacaacgacgagaactcactggttttgcaaatgaacagcctgagagccgaggacacggctgtttattactgtgcgagagtcttgcgttatagcagtgcctgggttgacctctggggccagggaaccctggtcaccgtctcctca

SEQ ID NO: 6881 - DNA, 351 bp, synthetic construct
  source 1..351: mol_type = other DNA
gaggtgcagctgttggagactggaggaggcttgatccagccgggggggtccctgagactctcctgtgcagcctctgagatcatcgtcagcaggaactacatgacctgggtccgccaggctccagggaaagggctggactgggtctcagtcatttatcccggtgggagcactttctacgcagactccgtgaggggccgattcaccatctccagagacgattccaagaacactctgtatcttcaaatgatcagcctgagagccgaggacacggccgtatattactgtgcgagacaagaaaataatgatgcttttgatatttgggggcaagggaccacggtcaccgtctcctca

SEQ ID NO: 6882 - DNA, 348 bp, synthetic construct
  source 1..348: mol_type = other DNA
gaggtgcagctgttggagtctgggggaggcttggtccagccgggggggtccctgagactctcctgtgcagcctctggattcattttcactaactattggataagttgggtccgccaggctccagggaaggggctggagtgggtggccaccgtgaagcaagatggaactgagaaatattatgtggactctgtgaagggccgattcaccatctccagagacaacgccaaaaactcagtctttctgcaaatgaacagcctgagagccgaggacacggccgtgtattattgtgcgagagaattggggatcttggattggtggggccagggaaccctggtcaccgtctcctca

SEQ ID NO: 6883 - DNA, 366 bp, synthetic construct
  source 1..366: mol_type = other DNA
caggtgcagctggtgcagtctgggggaggcttggtacagcctggggggtccctgagactctcctgtgcagcctctggattcaccttcagtacctccgacatgcactgggtccgccaagttacaggaaaacatctggaatgggtctcaggtgttggaacttctggtgacacatactattcagactccgtgaagggccgattcaccatctccagagaaaatgccaagaactctttatatcttcaaatgaacaacctgagagccggggacacggctgtgtattactgtgcaagaggggaaacaactatggcgctccggtggtatgcttttgatatctggggccaagggaccacggtcaccgtctcctca

SEQ ID NO: 6884 - DNA, 378 bp, synthetic construct
  source 1..378: mol_type = other DNA
caggtgcagctggtgcagtctggggctgaggtgaagaagcctggggcctcagtgaaactttcctgcaaggcatctggatacaccttcaccagttactttattcattgggtgcgacaggcccctggacaagggcttgagtggatgggaataatcaaccctggtgatgatagcacaacttactcacagaagttccagggcagagtcaccgtgaccagtgacacgtccacgagcacagtctacatggagctgagcagcctgagatctgaagacacggccgtgtattactgtgcgagagatttcctcccagcgaccgcgtccccctactactactattatatggacgtctggggcaaagggaccacggtcaccgtctcctca

SEQ ID NO: 6885 - DNA, 384 bp, synthetic construct
  source 1..384: mol_type = other DNA
caggtcacgctgaaggagtgtggtcctgcgctggtgaaacccacacagaccctcacactgacctgcaccttctctgggttctcactcaacactggaggaatatgtgtgagctggctccgtcagcccccagggaaggccctggagtggcttgcacgcattgattgggattatgagaaacactatagcgcatctctgacgaccagactcaccatctccacggacacctccaaaaaccaggtggtcctcacaatgaccaacatggaccctgtggacacagccacctactactgtgcacgattcaagtatttttatgataggaataattactacttcggttcgggatttgactactggggccagggagccctggtcaccgtctcttca

SEQ ID NO: 6886 - DNA, 381 bp, synthetic construct
  source 1..381: mol_type = other DNA
gaggtgcagctggtgcagtctggggctgaggtgaagaagcccgggtcctcggtgaaggtctcctgcaaggcctctggaggcaccgccaggacctatgctatcagttgggtgcgacaggcccctggacaagggcttgagtggatgggagggatcattcctaagtatgatacaacaaactacgcacagaagttccagggcagagtcacgattaccgcggacaaatctacgagcacagcctacatggaactgagcagcctgacatctgaggacacggccgtgtattattgtgcgcactctcccggatatagcagtggctggtatcgggccggaatcagctggttcgacccctggggccagggaaccctggtcaccgtctcctca

SEQ ID NO: 6887 - DNA, 357 bp, synthetic construct
  source 1..357: mol_type = other DNA
caggtgcagctgttggagtcgggcccgggactggtgaagccttcggggaccctgtccctcacctgcgctgtctctggtggctccatcagcagtagtaactggtggacttgggtccgccagcccccagggaagggactggagtggattggggaaatctatcatagagggaccaccgactacaatccgtcgttgaagagtcgagtcaccatatcactcgacaagtccaagaactacttctccctgaatttgacctctgtgaccgccgcggacacggccgtctattactgtgcgagagccccggcgggggactttcggcagctcttctggggccggggaaccctggtcaccgtctcctca

SEQ ID NO: 6888 - DNA, 369 bp, synthetic construct
  source 1..369: mol_type = other DNA
caggtgcagctggcgcagtctggagcagaggtgaaaaagcccggggagtccctgaagatctcctgtaagggttctggatacagctttgacaccaagtggatcgcctgggtgcgccagatgcccgggaaaggcccggagtggctggggaccatttatcctggtgactctgataccagatacagcccgtccttccaaggccaggtcaccatctcagccgacaagtccatcagcaccgcctacctgcagtggagcagcctgaaggcctcggacaccgccatttactactgtgcgagacgagcggactttagcagcagctggactgactactttgactactggggccagggagccctggtcaccgtctcctca

SEQ ID NO: 6889 - DNA, 360 bp, synthetic construct
  source 1..360: mol_type = other DNA
caggtcaccttgaaggagtctggtcctgcgctggtgaaacccacacagaccctcacactgacctgcaccttctctgggttctcactcaccactagtggaatgtctgtgacctggatccgtcagcccccagggaaggccctggagtggcttgcactcgttgattgggatgatgctaaatactacagcacgtctctgacgaccaggctcaccatctccaaggacacctccaaaaaccaggtggtcctaacaatgaccaacatggaccctgtggacacaggcacctattactgtgcacggatagaccgacgccggaattgtatggacgtctggggccaagggaccacggtcaccgtctcctca

SEQ ID NO: 6890 - DNA, 357 bp, synthetic construct
  source 1..357: mol_type = other DNA
gaggtgcagctggtggagtctgggggaggcttgatccagcctggggggtccctgagactctcctgtgcagcctctggggtcaccgtcagtaggaactacatgagctgggtccgccaggctccagggaaggggctggagtgggtctcaattatttatagcggtggtagtgcatactacgcagactccgtgaagggccgattcaccatctccagagacgattccaggaacacgctgtatcttcaaatgaagagcttgagagcggaagacacggccgtgtattattgtgtgagacgtatagtgggaggcaatgccggcatggacgtctggggccaagggaccacggtcaccgtctcctca

SEQ ID NO: 6891 - DNA, 369 bp, synthetic construct
  source 1..369: mol_type = other DNA
gaggtgcagctgttggagtcggggccaggactggtgaagccttcgcagaccctgtccctcacctgcactgtctctggtggctccatcagcggcgctccttactactggacttggatccgccagcaccccgggaggggcctggagtggatggcccacaccgagtacagtgggggcacctactacaacccgtcccttaagagtctacttaacatatcaatagacaggtctaagaaccagttctccctgaaggtaacctctgtgactgccgcggacacggccgtgtattactgtgcgagaatacacgactacggtggccacattagtgcttttgatatgtggggccaagggaccacggtcaccgtctcctca

SEQ ID NO: 6892 - DNA, 372 bp, synthetic construct
  source 1..372: mol_type = other DNA
caggtacagctgcagcagtctggggctgaggtgaagaagcctgggtcctcggtgaaggtctcctgcaaggcttctggaggcaccttcagctcctatggtctcacctgggtgcgacaggcccctggacaaggacttgagttcatgggaaggatcctccccctcattggtgttcctgactacgcacagagcttccagggcagagtcacgatcaccgcggacacatccacgggcacagcctacgtggaggtgaacagcctgagatctgaggacacggccctatattattgtgcgagagaacggggatacagtggctacggctcagcggtttactttgacatctggggccagggcaccctggtcaccgtctcctca

SEQ ID NO: 6893 - DNA, 375 bp, synthetic construct
  source 1..375: mol_type = other DNA
caggtgcagctgcaggagtcgggcccaggactggtggagccttcacagaccctgtccctcacctgcactgtctctggtggctccatcggcagtaatagtttctacttgacctggatccggcagtccgccgggaagggactggagtggcttgggcgtatctatgccagtgggggcaccagctacaacccctccctccagagtcgagtcaccatgtcactagacacgtccaagaaccagatgttcctgaggctgacgtctgtgaccgccgctgacacggccgtctattattgtgcgagagggggtggctacgatgaattactagttttcggtgcttttgatatctggggccaagggaccacggtcaccgtctcctca

SEQ ID NO: 6894 - DNA, 378 bp, synthetic construct
  source 1..378: mol_type = other DNA
caggtgcagctggtgcagtctggggctgaggtgaagaagcctggggcctcagcgaaggtctcctgtagggcttctggatacacgttcaccgactactatattcactggctacgacaggcccctggacaagggtttgagtggatgggatggctgaaccctcagactggtgacacaaactatgcgcagaagtttcagggcagggtctccatgaccggggacacgtccatcagcacagcctacatggagctgaggaggctgacatctgatgacacggccttttattactgtgcgagagggggatattgtagtgcttacagctgcttccacggggcttggttcgccccctggggccagggaagcctggtcaccgtctcctca

SEQ ID NO: 6895 - DNA, 351 bp, synthetic construct
  source 1..351: mol_type = other DNA
gaggtgcagctgttggagactggaggaggtttgatccagccgggggggtccctgagactctcctgtgcagcctctgagatcatcgtcagttggaactacatgacctggatccgccaggctccagggaaaggtctggagtgggtctcagttatgtatcccggtgggagcactttctacgcagactccgtgaggggccgattcaccatctctagagaccattccaagaatattctgtatcttcaaatgatcaacctgagagtcgaggacacggccgtgtactactgtgcgagacaagagaataatgatgcttttgatatttggggacaggggaccacggtcaccgtctcctca

SEQ ID NO: 6896 - DNA, 348 bp, synthetic construct
  source 1..348: mol_type = other DNA
gaggtgcagctgttggagtcgggcccaggactggtgaagccttcggggaccctgtccctcacctgcgctgtctctggtgcctccatgaacagtcggaattggtgggcttgggtccgccagaccccagggcaggggctggaatggattggcgaaatctctcatagtgggagcaccaactacaacccgtccctcaagagtcgactgaccatactactggacaagtccaagagccagttctccctgaggttgagctccgtgaccgccgcggacacggccgtctattactgtgcgagagcccaaggaatctttgactactggggccagggaattctggtcaccgtctcctca

SEQ ID NO: 6897 - DNA, 366 bp, synthetic construct
  source 1..366: mol_type = other DNA
gaggtgcagctggtggagtctggggctgaggtgaggaagcctggggcctcagtgaaggtttcctgcagggcatctggatacaccttcagcaaccactatatacactgggtgcggcaggcccctggacaaggccctgagtggatgggaatagtcaaccctgatgctggtagcacaacctacgcacagaaattccagggcagactcaccctgaccagcgacacgtccacgagcacagtgttcatggagttgagcagcctgagatctgacgacacggccgtatattattgtgcgagagatttctcatttatagtggcaacgacagcctttgagtattggggccagggaaccctggtcaccgtctcctca

SEQ ID NO: 6898 - DNA, 348 bp, synthetic construct
  source 1..348: mol_type = other DNA
gaggtgcagctgttggagtcgggcccaggactggtgaagccttcggggaccctgtccctcacatgcgctgtgtctggtgactccatcaccagtcatagttggtggagttgggtccgccagcccccagggaaggggctggagtggattggggaagtctttcatagtgggagtaccgagtacagtccgtccctcaagagtcgagtcaccatatcagcagacaagtccagggaccagttctcactgaagttgaagtctgtgaccgccgcagacacggccgtatattactgtgcgagagtggctggtctttttgacaactggggcccgggaaccctggtcaccgtctcctca

SEQ ID NO: 6899 - DNA, 372 bp, synthetic construct
  source 1..372: mol_type = other DNA
caggtgcagctggtgcagtctggggctgagatgaggaagcctgggtcctcggtgaaggtctcctgccaggcttctggaggcaccttcagcagttatggaatcagctgggtgcgacaggcccctggacaagggcttgagtggatgggagggatcatccctatccttggtacgacaagttccgcacacaaattcgagggcagagtcacgattaccgcggacaaatccactagtatggcctacatggagctgagcagcctgaggtctgaggacacggccctgtactactgtgtgagagatcgtggatacagtggctacggatcaaactactacttcgatctctggggccgtggcaccctggtcaccgtctcctca

SEQ ID NO: 6900 - DNA, 363 bp, synthetic construct
  source 1..363: mol_type = other DNA
gaggtgcagctgttggagtcgggcccagggctggtgaagccttcggagaccctgtccctcacctgcactgtctctggtgactccatcaatagtttctattgggcctggatccggcagcccccagggaagggactggagtggattggggacatctatcacagtgggaggaccaattacaatccctccctcaagagtcgagtcaccatatcagtggacacgtccaaaaataacttctccctgaagttgagttctctgaccactgcggacacggccgtctatttttgtgcgagaggccctaaagagcggtggttcaacaactggttcgacccctggggccaaggaattctggtcaccgtctcctca

SEQ ID NO: 6901 - DNA, 372 bp, synthetic construct
  source 1..372: mol_type = other DNA
caggtgcagctggtgcagtctgggggaggcttggtacagcctggggggtccctgagactctcctgtgcagcctctggattcaccttcagtacctccgacatgcactgggtccgtcaaggtagaggaagaggtctggaatgggtctcagctattggtacttctggtgacacatactatgcagactccgtgaagggccgattttcggtctccagagaagatggcaaaaactccttctatcttcaaatgaacagcctgagagccggagacacggctgtctattactgtgcaagaggagaggcccttggagtggagccctattattactattttatggacatttggggccaagggaccacggtcaccgtctcctca

SEQ ID NO: 6902 - DNA, 369 bp, synthetic construct
  source 1..369: mol_type = other DNA
caggtgcagctgcagcagtctggggggggcgtggtccagcctgggaggtccctgagactctcctgtgcagcctctggattcaccttcgaaaactatgacatgcactgggtccgccagtctccaggcaaggggctggagtgggtggcaactatatcatctgatgcaagtattaaatattatggagactccgtgaagggccgattcaccatctccagagacaattccaagaacacgctgtatctgcaaatgagcagcctgagagctgaggacacggctgtgtatttctgtgcgaaagataccctcgtggatatagctgtggtaaccctgattgactactggggccagggaaccctggtcaccgtctcctca

SEQ ID NO: 6903 - DNA, 357 bp, synthetic construct
  source 1..357: mol_type = other DNA
caggtccagctgatggagtctggtcctacgctggtgaaacccacacagaccctcacgctgacctgctccttctctgggttctcactcaacactgctggagtgggtttggcctggatacgtcagcccccaggaaaggccctggagtggcttgccctcgtttattgggatggtgataggcgctatagtccatttttgaagaccagggtcaccatcaccaaggacacctccaaaaaccaggtggtccttacaatgaccaacatggactctgtggacacagccacatatttctgtgcacaccattcaattcctacaatttttacctcctggggccagggaatcctggtcaccgtctcctca

SEQ ID NO: 6904 - DNA, 372 bp, synthetic construct
  source 1..372: mol_type = other DNA
caggtgcagctggtgcagtctgggggaggcgtggtccagcctgggaggtccctgagactctcctgtccagtctctggattcaccttcaggatctacgctttccactgggtccgccaggctccaggcaaggggctggagtgggtggcagttatatcgcatgatggaagcgagacatactacgcagactccgtgaagggccgattcaccatctccagagacaattccaagaacacgttgtctctgcaaatgcacagcctgagagctgacgacacggctgtctattactgtgcaagagcgactaccgattattgtggcggtgactgctatcccattgattcctggggccagggaaccctggtcaccgtctcctca

SEQ ID NO: 6905 - DNA, 369 bp, synthetic construct
  source 1..369: mol_type = other DNA
caggtccagctggtgcagtctgggcctgaggtgaagaagcctgggacctcagtgaaggtctcctgcaagacttctggattcacctttattacctctgctgtgcagtgggtgcgacagactcgtggacaacgccttgagtggatggggtggatcgccgttggcagtgggaacacagagtacgcacagaagttccaggaaagactcactattaccacggacatgtccacaagcacaacctacatggagctgagcagcctgagatccgaggacacggccgtatattactgtgcgtcaccacactgtcgtggtggtagctgcctggatggttttgatatctggggccaagggaccacggtcaccgtctcctca

SEQ ID NO: 6906 - DNA, 372 bp, synthetic construct
  source 1..372: mol_type = other DNA
caggtgcagctggtgcagtctgggggaggcgtggtccagcctgggaggtccctgagactctcctgtctagcctctggattcaccttcagtcgattttctatgcactgggtccgccaggctccaggcaaggggctggagtgggtgacacttatatcatttgatggaagcgataaatactacacagactccgtgaagggccgattcaccatctccagagacaattccaagaacacgctgtatctgcagatgaacagtctgagaactgaggacacggctgtgtattactgtgcgagagcgactaccgattactgtggtggcgactgctatcccattgacaactggggccggggaatcccggtcaccgtctcctca

SEQ ID NO: 6907 - DNA, 393 bp, synthetic construct
  source 1..393: mol_type = other DNA
aggtccacgctgaaggagtctgggggaggcctggtacagcctggcaggtccctgagactctcctgtgcagcctctggattcacgtttgaagattatgccatgcactgggtccggcaagctccagggaagggcctggagtgggtctcaggtgttagttggaatagcggtatcataggctatgcggactctgtgaagggccgattcatcgtctccagagacaacgccaagaactccctatatctctacatgagcagcctgagagtcgaggacacggccttctattactgtgcaaaattgggggctttgtctcgccaatacgattttcggacgggggaaaatcaccagtattacatggacgtctggggcaaggggaccacggtcaccgtctcctca

SEQ ID NO: 6908 - DNA, 363 bp, synthetic construct
  source 1..363: mol_type = other DNA
gaggtgcagctgttggagtcggggggaggcgtggtccagcctgggaggtccctgagactctcctgtgcagcgtctggattcagtttcagtgactatggcatgcactgggtccgccaggctccaggcaaggggctggagtgggtggcagttatatggtatgatggaagtaacaggtattatttagactctgtgcagggccgattcaccatctccagagacaattccaagaatacggtgtatctccaaatgaacaacttgagagccgaggacacggctgtctattactgtgcgagattggctacgattccctggtcctactatatggacgtctggggcaaagggaccacggtcaccgtctcctca

SEQ ID NO: 6909 - DNA, 375 bp, synthetic construct
  source 1..375: mol_type = other DNA
caggtccagctggtgcagtctggagctgaggtgaagaagcctggggcctcagtgaaggtctcctgcaaggcctctggttacacctttaccagctacggaatcagctgggtgcgacaggcccctggacaagggcttgagtggatgggatggatcaacactttcaatggtgacacaaactatccacagaagttccagggcagagtcaccatgaccacagacacatccacgaccacagtccacatggagctgaggagcctgagatctgacgacacggccctgtattactgtgcgagagtaggaactgattacgtttgggggagttccatctacttctttgactactggggccagggaaccctggtcaccgtctcctca

SEQ ID NO: 6910 - DNA, 348 bp, synthetic construct
  source 1..348: mol_type = other DNA
gaggtgcagctggtggagtcgggcccaggactggtgaagccttcggggaccctgtccctcacttgcgctgtctctggcggctccatcagcagtagaaattggtggagttgggtccgccagtccccagggaaggggctggagtggattggagaaatctttcatactgggagtaccgcctacaacccgtccctcaagagtcgagtcaccatgtcggtggacaagtccaagaaccagttctccctgagactgagctctgtgaacgccgcggacacggccgtgtattactgtgcgaggtcggctggcctccttgactactggggccagggaatcctggtcaccgtctcctca

SEQ ID NO: 6911 - DNA, 384 bp, synthetic construct
  source 1..384: mol_type = other DNA
gaggtgcagctgttggagtctgggggaggcttggtacagcctggggggtccctgagactctcctgtgcggcctctggattcaccttcagtaactccgacatgcactgggtccgccaaactacaggaaatagtctggagtgggtctcaactattggtactgctggggatacatactatccagactccgtgaagggccgattcaccatctccagagaaaatgccaagaactccttgtctcttcaaatgaatagcctgagagccggggactcggctgtgtattactgtgcaagaggggaacaacgtatgatgatttctggcgtggttccgcgttactattattacatggacgtctggggcaaagggaccacggtcaccgtctcctca

SEQ ID NO: 6912 - DNA, 372 bp, synthetic construct
  source 1..372: mol_type = other DNA
caggtccagctggtgcagtctggagctgaggtgaagaagcctggggcctcagtgaaggtctcctgcaaggcttctggttacaggtttaccagctacggtatcagctgggtgcgacaggcccctggacaagggcttgagtggatgggatggatcagcgtttacaacggtgacacaaattatgcacagaaggtccagggcagagtcaccatgaccacagacacatccacgaacacagcctacatgcagttgaggaacctaagatctgacgacacggccgtgtattactgtgcgcgagacactatatatatggttcggggagtccttgatgcttttgatatctggggccaagggaccacggtcaccgtctcctca

SEQ ID NO: 6913 - DNA, 378 bp, synthetic construct
  source 1..378: mol_type = other DNA
gaggtgcagctggtgcagtctggggctgaggtgaagaagcctgggtcctcggtgaaggtctcctgcaaggcttctggaggcaccttcagcagctatactttcagctgggtgcgacaggcccctggacaagggcttgagtggatgggaaggatcttccccatccttggtataccaaactacgcacagaagttccaggacagagtcaccattagtgcggacagatccacgagcacagcctacatggaactgagcagcctgagatctgaagacacggccgtgtatttctgtgcgagagaccgagcagcagctgacacgaacacccttcccacgtactactttgactactggggccagggaaccctggtcaccgtctcctca

SEQ ID NO: 6914 - DNA, 357 bp, synthetic construct
  source 1..357: mol_type = other DNA
caggtcacgttgaaggagtctggtcctgcgctggtgaaacccaaacagaccctcacactgacctgcaccttctctgggttctcattcagcactagtggagtcggtgtggcctggatccgtcagcccccaggaaaggccctggagtggcttgcactcatttattgggatggtgataagcgctacagcccttctctgaagagcaggctcaccatcaccagggacacctccaaaaaccaggtggtccttacaatgaccaacatggaccctgtggacacagccacatattactgtgcgcaccacgacatcccgacgatttttagtgtctggggcacagggaccacggtcaccgtctcctca

SEQ ID NO: 6915 - DNA, 381 bp, synthetic construct
  source 1..381: mol_type = other DNA
gaggtgcagctggtggagtctgggggaggcttggtacagcctggggggtccctgagactctcctgtgcagcctctggattcaccttcagtacctacgacatgcactgggtccgccaagttacaggaaaaggtctggagtgggtctcagctattggtactggtggtcacacatactatccagactccgtgaagggccgattcaccatctccagagaaaatgccaagagctccttgtatcttcaaatgaacagcctgagagccggggacacggctgtgtattactgtgcaagagggcttcactccgtagcagcaggtggcacgattcgatactactactacatggacgtctggggcaaagggaccacggtcaccgtctcctca

SEQ ID NO: 6916 - DNA, 351 bp, synthetic construct
  source 1..351: mol_type = other DNA
gaggtgcagctgttggagtctggagcacaggtgaaaaagcccggggagtctctgaagatctcctgtaagggttctggatacagctttatcagcaactggatcggctgggtgcgccagatgcccgggaaaggcctggagtggatggggatcatctatcctggtgactctgatactagatacagcccgtccttccaaggccaggtcaccatgtcagtcgacaagtccatcagcaccgcctacctgcagtggaccagcctgaaggcctcggacaccgccatgtattactgtgcgagactcgaggtgggaggtagggattattggggccagggaaccctggtcaccgtctcctca

SEQ ID NO: 6917 - DNA, 360 bp, synthetic construct
  source 1..360: mol_type = other DNA
gaggtgcagctgttggagtctgggggaggcgtggtccagcctgggaggtccctgagactctcctgtgtaggctctggattcagcttcagtagctatgctatgcactgggtccgccaggctccaggcaaggggctagagtgggtggcagttatattagatgatggaagtaataaattctacgcagactccgtgaagggccgattcaccatctccagagacaattccaagaacacgctgtatctgcaaatgaacagcctgagagctgaggacacggctgtgtattactgtgcgagagaccggggatttacggtgacttggtttgacttctggggccagggaaccctggtcaccgtctcctca

SEQ ID NO: 6918 - DNA, 363 bp, synthetic construct
  source 1..363: mol_type = other DNA
gaggtgcagctgatggagtctggggctgaggtgaagaagcctggggcctcagtgaaggtctcctgcaaggcttctggatacaccttcaccggctactatatgcactgggtgcgacaggcccctggacaagggcttgagtggatgggatggatcaaccctaacagtggtggcacaaactatgcacagaagtttcagggcagggtcaccatgaccagggacacgtccatcagcacagcctacatggagctgagcaggctgagatctgacgacacggccgtgtattactgtgcgagagtttacacacgattttcagcgtggtggttcgacccctggggccagggaaccctggtcaccgtctcctca

SEQ ID NO: 6919 - DNA, 366 bp, synthetic construct
  source 1..366: mol_type = other DNA
gaggtgcagctgttggagtccggggctgaggtgaagaagcctggggcctcggcgaagatttcctgcacggcatctggatacaccttcatcaattactatatacactgggtgcgacaggcccctggacaaggctttgagtggatgggactaatcacccctgatggtggtagtagaacctacgcacagaagttccagggcagagtcaccatgaccagcgacacgtccacgaacacagtctacatggacctgagcagcctgagatctgcggacacggccttttattattgtgcgagagggggcattgtaccagctgccaaggagaactttgacttctggggccagggaaccctggtcaccgtctcctca

SEQ ID NO: 6920 - DNA, 372 bp, synthetic construct
  source 1..372: mol_type = other DNA
gaggtgcagctggtggagtctgggggaggcttggtacagcctggggggtccctgagactctcctgtacagcctcgggattcgtcttcagtaacgacgacatgcactgggtccgccaacctctagaaaaaggtctggaatgggtcgcaggtattggtacttccggtgacacatattatgcagactcagtgaagggccgattcaccatctccagagaagatgccaagaactccttgtatcttcaaatgaacagcctgagagccggggaaacggctgtatatttctgtacacggggaatcagtacgtccagcgcgggctatcactattactatatggacgtctggggcaaagggaccacggtcaccgtctcctca

SEQ ID NO: 6921 - DNA, 390 bp, synthetic construct
  source 1..390: mol_type = other DNA
caggtgcagctgcagcagtcgggcccaggactggtgaagccttcacagaccctgtccctcacctgcactgtctctggtggctccctcatcagtggtggttactactggaactggatccgccagcgcccagggaagggcctggagtggattgggtgcatgtattacagtgtggggacccactacaacccgtccctcaagagtcgagttgccatttccgtagacaagtttaagaaccagttctccctgaggctgacctctgtgactgccgcggacacggccgtgtattactgtgcgagaggggcagaccaccggtatgacagcagatggtacgcccacgagacgtccaagtttgactcctggggccagggaaccctggtcaccgtctcctca

SEQ ID NO: 6922 - DNA, 366 bp, synthetic construct
  source 1..366: mol_type = other DNA
gaggtgcagctgttggagtcgggcccaggactggtgaagccttcggagaccctgtccctcacctgcagtgtctctggtggctccgtcagcagtggtagttactactggaactggatccggcagcccccagggaaacaattggagtggatcggccatgtctttcacagtgggggcaccaacttcaacccctccctcaggagtcgactcaccatattagtagacacgtccaagaaccagttctccctgaagttgaggtctgtgaccgctgcggacacggccatttattactgtgcgagagatcagggtagtggctggctagatgcttttgaagtctggggccaagggaccacggtcaccgtctcctca

SEQ ID NO: 6923 - DNA, 360 bp, synthetic construct
  source 1..360: mol_type = other DNA
gaggtgcagctggtggagtcgggtccaggactggtgaagccttcggggaccctgtccctcacttgttctgtctctggtggctccatcagtagtagtaactggtggacttgggtccgccagtccccagagaaggggctggagtggccccgtgagatctatcatgttggggccaccaacgacaacccgtccctcaagagtcgggtcaccatatcagtcgacaagtccaagaaccaattctccctgaagttgacttctgtgaccgccgcggacacggccgtgtattactgtgcgaggaccccttttggggacttctactacatggacgtctggggcaaggggaccacggtcaccgtctcctca

SEQ ID NO: 6924 - DNA, 354 bp, synthetic construct
  source 1..354: mol_type = other DNA
gaggtgcagctggtggagtctgggggaggcttgatccagcctggggggtccctgagactctcctgtgcagcctctgggatcatcgtcagttataactatatgagttgggttcgccaggctccagggaagggactggactgggcctcagatatttatcccggtggtagcacattctacgcagactccctgaagggccgattcaccatctccagagacagttccaagaacacgttgtatcttcaaatgaacagcctgagagtcgacgacacggccgtgtattactgtgcgagagatgggtacggtgaaaatgtctttgatttttggggccagggaaccctggtcaccgtctcctca

SEQ ID NO: 6925 - DNA, 360 bp, synthetic construct
  source 1..360: mol_type = other DNA
gaggtgcagctggtgcagtctggagcagaggtgaaaaagcccggggagtctctgacgatctcctgtaaggcttctggatacagctttaccacctactggatcggctgggtgcgccagatgcccggaaaaggcctggagtggatggggaacatctatcctattgactctgataccagatataatccgtccttccaaggccaggtcaccatctcggccgacaagtccatcaccaccgcctatctgcactggaacagcctgaaggcctcggacaccgccatttatttttgttcgagacaaggtagtgggacctactacgactttgactactggggccagggagccctggtcaccgtctcctca

SEQ ID NO: 6926 - DNA, 360 bp, synthetic construct
  source 1..360: mol_type = other DNA
gaggtgcagctgttggagactggaggaggcttgatgcagcctggggggtccctgagactctcctgtgcagcctctgggttcaccgtcagtgactactacatgagctgggtccgccaggctccagggaaggggctggagtggatttcagttatttatagtggaaataacacctactacatagactccgtgaagggccgattcaccctctccagagacacttccaagaacacgctgtttctccaaatgaacagcctgagagccgaagacacggccgtgtattactgtgcaaaaggggccgacacttggtacggggggacctttgactcctggggccagggaaccctggtcaccgtctcctca

SEQ ID NO: 6927 - DNA, 375 bp, synthetic construct
  source 1..375: mol_type = other DNA
gaggcgcagctggtggagtctgggggaagtttggtacagcctggcaggtccctgagactctcctgtgcagcctctggattcacctttgaagattataccatgcactgggtccggcaagctccagggaagggcctggagtgggtctcaggtataagttggaatggtggtataatcggctatgcggactctgtgaagggccgattctacatctccagagacaacgcccagaactcactttatctgcaaatgctccgtctaagacctgaggacacggccttgtattactgtgcaaaagacttatatcttaaagaaggctacaattcgggaggcgcttttgatatgtggggccaagggacaacggtcaccgtctcctca

SEQ ID NO: 6928 - DNA, 360 bp, synthetic construct
  source 1..360: mol_type = other DNA
caggtccagctggtacagtctggggctgaggtgaagaagcctgggtcctcggtgaaggtctcctgcaaggcttctggaggcaccttcaacaaccattttatcaactgggtgcgacgggcccctggacaagggcttgagtggatgggaaagatcatccctatcattgatatagcaaactccgcacagaagttccagggcagagtcacgattaccgcggacaaatccacgagcacagtctacatggagctgagcagcctgagatctgatgacacggccatgtattactgtgcgcgtcgaactagcagttcgtctgagtattttgactcctggggccagggaaccctggtcaccgtctcctca

SEQ ID NO: 6929 - DNA, 366 bp, synthetic construct
  source 1..366: mol_type = other DNA
gaggtgcagctggtggagtctggggctgaggtgaagaagcctggggcctcagtgaaggtttcctgcaaggcatctggacacaccttcaccctccactatatgcactgggtgcgacaggcccctggacaaggacttgagtggatgggaataatcaaccctgatgctggtagcacaacatacgcacagaagttccagggcagagtctccatgaccagggacacgtccacgagcacagtctacttgcacctgagcagcctgagatctgaggacacggccgtgtattactgtgcgagaggggcactagtaccagatgcccatgatgctcttgatatttggggccaggggaccacggtcaccgtctcctca

SEQ ID NO: 6930 - DNA, 351 bp, synthetic construct
  source 1..351: mol_type = other DNA
gaggtgcagctgttggagactggaggaggcttgatccagccgggggggtccctgagactctcctgtgcagcctctgagatcatcgtcagtaggaactacatgacctgggtccgccaggctccaggcaaagggctggagtgggtctcagttgtttatcccggtgggagcactttctacgcagactccgtgaggggccgattcaccatctccagagaccattccaagaacactctttatcttcaagtgaccagcctgagagccgaggacacggccgtgtattactgtgcgagacaagacaataatgatgcttttgatatttgggggcaagggaccacggtcaccgtctcctca

SEQ ID NO: 6931 - DNA, 366 bp, synthetic construct
  source 1..366: mol_type = other DNA
gaggtgcagctggtggagtctgggggaaagttggtacagcctggggggtccctgagactctcctgtgcagcctctggattcagtttcggtacctacgacatgcactgggtccgccaatctacaggaaaaggtctggagtgggtctcagctattggtacttctggtgacacatactatgcagactccgtgaagggccgattcaccatctctagagaagatgccaagaagtctttgtatcttcaaatgaacagtctgagagccggggacacggctgtgtattattgtgtaagaggtactacggtgactgggggactggaatactactttgactactggggccagggaaccctggtcaccgtctcctca

SEQ ID NO: 6932 - DNA, 363 bp, synthetic construct
  source 1..363: mol_type = other DNA
gaggtgcagctggtggagtctgggggaggcgtggtccagcctgggaggtccctgagactctcctgcgcaacctctggattcaccttcagtagttatgctatgcactgggtccgccaggctccaggctcgggactggagtgggtggcacttatatcaaatgatggaagaatgaaattctacacagactccgtgaagggccgcttcaccgcctccagagacaattccaagaacactctgtatctggaaatgaacagcctgagatctgaagacacggctgtgtattactgtgcgagagatggccctatgactacggtgacttgctttgactactggggccagggaaccctggtcaccgtctcctca

SEQ ID NO: 6933 - DNA, 354 bp, synthetic construct
  source 1..354: mol_type = other DNA
caggtgcagctggtgcagtctggagcagaggtgaaaaagccgggggagtctctgaagatctcctgtaagacttctggatacagctttatcagcaactggatcggctgggtgcgccagatgcccgggaaaggcctggagtggatggggatcatctggcctggtgactctgataccacatacagcccgtccttccaaggccaggtcaccatctcagtcgacaagtccatcaccaccgcctacctggagtggggcagcctgaaggcctcggacaccgccatatactactgtgtgagacgaggcagtgcctgggaaattgactactggggccagggaaccctggtcaccgtctcctca

SEQ ID NO: 6934 - DNA, 384 bp, synthetic construct
  source 1..384: mol_type = other DNA
gaggtgcagctgttggagtctgggggaggcttggtgcagccgggggggtccctgagactctcctgtgcagcctctgggttccccttcagtagctacgacatgcactgggtccgccaagctacaggaaaaggtctggagtgggtctcagccactggtacttctggtgacacatcctatttagactccgtgaagggccgattcaccatctccagagacgatgccaggagctccttgtatcttcaaatgaacaacctgagagccggggacacggctgtgtattactgtgtaagaggtgatgttgtagaagtaccatctgtcccgtcctactactactactactacatggacgtctggggcaaagggaccacggtcaccgtctcctca

SEQ ID NO: 6935 - DNA, 375 bp, synthetic construct
  source 1..375: mol_type = other DNA
gaggtgcagctgttggagtctggagcagaggtgaaaaagcccggggagtctctgaagatctcctgtcaggattctggagactacttttccacctactggatcggctgggtgcgccagatgcccgggaaaggcctggagtgggtggggatcttctttcctggtgactctgatgccagatacagcccgtccttccaaggccaggtcaccatgtcagccgacaagtccatcagcaccgcctacctgcagtggagcagcctgaaggcctcggacaccgccatgtattactgtgcgagagcaacatattgtggtggtgattgctcttcgggcggtgcttttgatgtctggggccaagggacaatggtcaccgtctcctca

SEQ ID NO: 6936 - DNA, 363 bp, synthetic construct
  source 1..363: mol_type = other DNA
gaggtgcagctgttggagtcgggcccaggactggtgaagccttcacagaccctgtccctcacctgcactgtctctggtgcttccatcagcagaagtggtttctactggaactggatccgccagcacccagggaagggcctggagtggattgggaacatctataatagtgggagcacctactacaacccgtccctcaagagtcgacttaccatttcagtcgacacgtctaagaaccagttctccctgaagctgaactctgtgactgccgcggacacggccgtgtattactgtgcgagagactacggtggtaacgcccaatactttcactactggggccagggaaccctggtcaccgtctcctca

SEQ ID NO: 6937 - DNA, 387 bp, synthetic construct
  source 1..387: mol_type = other DNA
ccaggtgcagctggcggagtcggcccaggactggtgaagacttcacagaccctgtccctcacctgcactgtctctggtggctccctcagcagtggtggttactactggaactggatccgccagcacccagggaagggcctggagtggattgggtacatctcttacactgggagcaccgactacaacccgtccctcaagagtccagttaccatgtccgtagacacgtctaagagccagttctcccttaggctgagctctgtgactgccgcggactcggccgtgtattactgtgcgagagcctcaatgactccggtgactcaggcaggtcccttaggctactactacatggacgtctggggcaaagggaccacggtcaccgtctcctca

SEQ ID NO: 6938 - DNA, 369 bp, synthetic construct
  source 1..369: mol_type = other DNA
gaggtgcagctggtggagtctgggggaggcttggtccagcctggggggtccctgagactctcctgttcagcctctggattcagcttcagtacctattctatgcactgggtccgccaggctccagggaagggactggaatatgtttcagatataagtggtgatggccttatcacatactacgcagactccgtgaagggcagattcaccatcaccagagacaattccaagaatacgctctatcttcacatgagcagtctgagagctgaggacacggctgtctattactgtgtgagagatgtgagtgtggatacatctatggttacagtatttgaatactggggccagggaaccctggtcaccgtctcctca

SEQ ID NO: 6939 - DNA, 378 bp, synthetic construct
  source 1..378: mol_type = other DNA
caggtccagctggtgcagtctgggggaggcttggcacagcctggggggtccctgagactctcctgtgcagcctctggattcatcttcagtagttacgacatgcactgggtccgccaagtcacaggaaaaggtctggaatgggtcgcagctattggtactgctggtgacacatactatgaagactccgtgaagggccggttcaccatctccagagagaatgccaagaactccgtgtatcttcaaatgaacagcctgagagccggggacacggctatgtattactgtgcaagaggtgatcaacctattacgatttctggagtggttgaaacctactacatggacgtgtggggcaaagggaccacggtcaccgtctcctca

SEQ ID NO: 6940 - DNA, 378 bp, synthetic construct
  source 1..378: mol_type = other DNA
caggtgcagctggtgcagtctgggggaggcttggcacagcctggggggtccctgagactctcctgtgcagcctctggattcatcttcagtagttacgacatgcactgggtccgccaagtcacaggaaaaggtctggaatgggtcgcagctattggtactgctggtgacacatactatgaagactccgtgaagggccggttcaccatctccagagagaatgccaagaactccgtgtatcttcaaatgaacagcctgagagccggggacacggctatgtattactgtgcaagaggtgatcaacctattacgatttctggagtggttgaaacctactacatggacgtgtggggcaaagggaccacggtcaccgtctcctca

SEQ ID NO: 6941 - DNA, 372 bp, synthetic construct
  source 1..372: mol_type = other DNA
caggtccagctggtgcagtctggggctgaggtgaagaagcctgggtcctcggtgaaggtctcctgcaaggcttctggaggcaccttcagcagtcaaacaatcagttgggtgcgacaggcccctggacaagggcttgagtggatgggaaagatcttccctatccttggtgtaacaaactacgcagagaggtttcagggcagagtcacgattaccgcggacaagtcgaccagcacagcctacatggagctgagcggcctgagatctgaggacacggccgagtattactgtgcgagagagtcgggttactctgcttcggggagtgttatctacttcgatctctggggccgtggcaccctggtcaccgtctcctca

SEQ ID NO: 6942 - DNA, 387 bp, synthetic construct
  source 1..387: mol_type = other DNA
gaggtgcagctgttggagtctgggggaggcgtggtccagcctgggaggtccctgagactctcctgtgcagtctctggattcaacttcagaagttatggcatgcactgggtccgccaggctccaggcaaggggctggagtgggtggcagctatatcacatgatggaactaatccatattatgcagactccgtgaaggggcgattcaccatctccagagacaattccaaggacacgctgtatctgcaaatgaacagcctgagagcggaggacacggctgtgtatcactgtgcgaaagatgccgttgggggatattgtaggggtggtagttgttatgactttgactactttgactactggggccagggaaccctggtcaccgtctcctca

SEQ ID NO: 6943 - DNA, 369 bp, synthetic construct
  source 1..369: mol_type = other DNA
gaggtgcagctgttggagtctgggggaggcttggtccagcctgggggatccctgagactctcctgttcagcctctggattcaccttcagtacctattctatgcactgggtccgccaggctccagggaagggactggaatatgtttcagatataagtggtgatgggcttatcacatactacgcagactccgtgaagggcagattcaccatcaccagagacaattccaagaatacgctctatcttcaaatgagcagtctgagagctgaggacacggctgtctattactgtgtgagagatgtgagtgtggatacatctatggttacagtatttgaatactggggccagggaaccctggtcaccgtctcctca

SEQ ID NO: 6944 - DNA, 381 bp, synthetic construct
  source 1..381: mol_type = other DNA
caggtgcagctacagcagtggggcacaggactgttgaagccttcggagaccctgtccctcacctgcgctgtctatggtgggtccttcagtggtaagtactggagctggatccgccagcccgcagggaaggggctggaatggattggagaaatcaatgatagtggaaccaccaactacaacccgtccctcaagagtcgagtcaccatatcagtagacacgtccaagaaccagttctccctgaaactgaggtctgtgaccgccgcggacacggctgactattattgtgcgagagaacgggttatcctactaagtggaacgtctctccactacaactactacatggacgtctggggcaaagggaccacggtcaccgtctcctca

SEQ ID NO: 6945 - DNA, 390 bp, synthetic construct
  source 1..390: mol_type = other DNA
gaggtgcagctgttggagtctgggggaggcctggtaaagcctggggggtccctcagactctcctgtgcagccactggattcactttcagtaatgcctggatgaattgggtccgccaggctccagggaaggggctggagtgggttggccgtattaaaagcaattttgacggtgggacaacagactacgctgcacccgtgaaaggcagattcagcatctcaagagatgattcaaaaaacacgctgtatctgcaaatgaacagtctgaacaccgaggacacagccgtctattattgtaccacagatgtagtggatgacgattttcggagtggctacatagagcatgatgcttttgatttctggggccaagggacaagggtcaccgtctcctca

SEQ ID NO: 6946 - DNA, 366 bp, synthetic construct
  source 1..366: mol_type = other DNA
caggtgcagctgttggagtcgggcccaggactggtgaagccttcggagacactgtccctcacctgcactgtctcaggtgtctccatcagtgattactactggagctggatccgacagcccccagggaagggactggagtggattgggtatatctcttacagtgggagcaccgactacaacccctccctcaagagtcgagtcaccatatcagtggacacgtccaagaaccaggtctccctgaaactgacctctgtgaccgctgcggacacggccgtgtattactgtgcgagagaattgcctactggaaatagttatgagtactactttgactactggggccagggaaccctggtcaccgtctcctca

SEQ ID NO: 6947 - DNA, 360 bp, synthetic construct
  source 1..360: mol_type = other DNA
caggtgcagctgttggagtctgggggaggcttggtacagccgggggggtccctgagactctcctgtgcagcctctggattcacctttagcagttatgccatgagctgggtccgccaggctccagggaaggggctggagtgggtctcttctgttagtggtagtggtgctaacacatattacgcagactccgtgaagggccggttcaccatctccagagacaattccaagaacacggtgtctctgcaaatgaacagcctgagagccgaggacgcggccgtatattactgtgggaaagccataatcggaagtaacggggtgggagagtactggggccagggaaccctggtcaccgtctcctca

SEQ ID NO: 6948 - DNA, 381 bp, synthetic construct
  source 1..381: mol_type = other DNA
gaggtgcagctggtgcagtctggagcagaggtgaagaagcccggggagtctctgaagatctcctgtaagggttctggatacagctttaccaactactggatcggctgggtgcgccagatgcccgggaaaggcctggagtggatgggtgtcatctatcctggtgactctgataccagatatagcccgtccttccaaggtcaggtcaccttctcagccgacaagtccatcagcaccgcctacctgcagtggagcagcctgaaggcctcggacaccgccatatattattgtgcgagacagacaggtatagtgggagcctcgcgataccagtactactactacatggacgtctggggcaaagggaccacggtcaccgtctcctca

SEQ ID NO: 6949 - DNA, 372 bp, synthetic construct
  source 1..372: mol_type = other DNA
gaggtgcagctgttggagtctgggggaggcttggtacagcctggagggtccctgagactctcctgtgcagcctctggattcaccttcagtagttatgaaatgaactgggtccgccaggctccagggaaggggctggagtgggtttcatacattagtagtagtggtagtaccatatactacgcagactctgtgaagggccgattcaccatctccagagacaacgccaagaactcactgtatctgcaaatgaacagcctgagagccgaggacacggctgtttattactgtgcgagagccccacgtaccaactggaacgacgtttgggggacatttgactactggggccagggaaccctggtcaccgtctcctca

SEQ ID NO: 6950 - DNA, 366 bp, synthetic construct
  source 1..366: mol_type = other DNA
caggtgcagctggtgcagtctggggctgaggtgaagaagcatggggcctcagtcaaggtttcctgcaaggcatctggaaacaccttcaccaacaactatatacagtgggtgcgacaggtccctggacaaggggttgagtggatgggaataatcaaccctgttggtggtagtagaacttacgcacaggagttccagggcagagtcaccttgaccagtgacacgtccacgagaacattgtacatggagatgagcagcctgacatctgaggacacggccatatatttttgtgcgagaggtcgaatcccccccgatagtgatggttattttgacttctggggccagggaaccctggtcacggtctcctca

SEQ ID NO: 6951 - DNA, 387 bp, synthetic construct
  source 1..387: mol_type = other DNA
caggtgcagctggtgcagtctggcccaggactggtgaagccttcacagaccctgtccctcacctgcactgtctctggtggctccatcagaagtgtttactactactggacctggatccgccagcacccagggaagggcctagagtggattgggtacatctatcacaatgggaccacctactccaatccgtccctcaggagccgagttaccatgtcactggacacgtctaagaaccagttttccctgaaggtgaggtctgtgactgccgcggacacggccgtgtatttctgtgcgagacttggaccgtctttctatgataggagtggttcctcacgtctcaactactttgactcgtgggaccaggggaccccggtcaccgtctcctca

SEQ ID NO: 6952 - DNA, 366 bp, synthetic construct
  source 1..366: mol_type = other DNA
aggtgcacgctggtgcaatctgggggagacttggtgcagccgggggggtccctgagactctcctgtgaagcctctggattcacatttagcagctatgtcatgacgtgggtccgccaggctccagggaaggggctggagtgggtctcaagtatcagtggtagtggtggtgccagatactccgcagactccttggagggccggttcaccatctccagagacaactcgaacaacactctgtatttggaaatgactagcctgagagacgaggacacggccgtatactactgtgccagatttggagggtccgattaccgcggtggctggtctagttattggggccagggaaccctggtcactgtctcctca

SEQ ID NO: 6953 - DNA, 369 bp, synthetic construct
  source 1..369: mol_type = other DNA
gaggtgcagctggtggagtctgggggaggcttggttcagtcgggggggtccctgagactctcctgtgcagcctctggattcaccttcactagcgacgacatgcactgggtccgccaagtaataggaaaaggtctggagtgggtctcggggattggcacttctggtgatagatactatgcagactccgtgaagggccgcttcatcatctctagagaagatgccaggaactccttgtatcttcaaatgaacagcctgagagccggggacacggctatatattattgtgcaagaggggtagctgccggcaattataacctctactactacatggacgtctggggcaaagggaccacggtcaccgtctcctca

SEQ ID NO: 6954 - DNA, 369 bp, synthetic construct
  source 1..369: mol_type = other DNA
gaggtgcagctggtggagtctggggctgaggtgaagaagcctgggtcttcggtgaaggtctcctgcaaggcttctggaggccccttcagtaaatatgctatgaactgggtgcgacaggcccctggacaacgacctgagtggctgggaaggatcattcttgtccttggtatcacaaactacgcacagaagttccagggcagagtcacaatgaccgcggacaaatccacgaatacagcctacatggagctgggcagcctgacatctgacgacacggccgtgtattactgtgcgaccaaggatgcccccactgtaaatagtaacggtggtctggacttctggggccagggaaccctggtcaccgtctcctca

SEQ ID NO: 6955 - DNA, 366 bp, synthetic construct
  source 1..366: mol_type = other DNA
gaggtgcagctgctggagtctggggatgaggtgaagaagccgtgggcctcagtgacggtttcctgcaaggcatctggatacagcttcaccacttactatatacactgggtgcgacaggcccctggaccagggcttgaatggatgggactaatcacccctagtgatggcggcgcaagctacgcacagaagttccagggcagagtcaccatgaccagagacacgtccacgagtacagtctacatggagatgagcagcctgacaattgaggacacggccgtatattattgtgcgagaggggactggaacaaaataagctactactacatggacgtctggggcaaagggaccacggtcaccgtctcctca

SEQ ID NO: 6956 - DNA, 360 bp, synthetic construct
  source 1..360: mol_type = other DNA
cgaggtgcagctgcaggagtcgggcccaggactggtgaggcttcggggaccctgtccctcacctgcgctgtctcaggtgcctccatcagcagtagtaactggtggagttgggtccgccagcccccagggaaggggctggagtggatcggggaaatctatcatgttgggagtaccaactacaacccgtccctcaagagtcgagtcaccatatcaatagacaagtccaacaaccagttctccctgaagctgaactctgtgaccgccgcggacacggccgtgtactactgtgcgagagtcgtactctctgacttcaaggaggcggcgtcgtggggccagggaaccctggtcaccgtctcctca

SEQ ID NO: 6957 - DNA, 363 bp, synthetic construct
  source 1..363: mol_type = other DNA
caggtccagctggtgcagtctgggggaggcttggtacagccgggggggtccctgagactctcctgtacagcctctggattcagctttagtctgtttgccatgaactgggtccgccaggctccaggaaaggggctggagtgggtctcaagtattactggaagtgctgataccacatactacgcagactccgtgaagggccggttcaccatatccagagacaattccaagaacacactgtatctgcaaatgaacagcctgagcgccgaggacacggccgtatattattgtgcgaaagggatggacggtgccccggggttctactttgactactggggccagggaaccctggtcaccgtctcctca

SEQ ID NO: 6958 - DNA, 351 bp, synthetic construct
  source 1..351: mol_type = other DNA
caggtgcagctggtggagtctggaggaggcttggtccagcctggggggtccctgagactctcctgtgcagcctctgggctcaccgtcagtagcaactatatgacctggcttcgccaggctccagggaaggggctagagtgggtctcagttatgtttagcggtggtagcacattctacgcagactccgtgaagggccgattcaccatctccagacacaattccaacaacacgctgtatcttcaaatgagcagcctgggacctgaggacacggccacatattactgtgcaagagatctgcctccatacggtatggacgtctggggccaagggaccacggtcaccgtctcctca

SEQ ID NO: 6959 - DNA, 363 bp, synthetic construct
  source 1..363: mol_type = other DNA
gaggtgcagctgttggagtctgggggaggcctggtcaagcctggggggtccctgagactctcctgtgcagcctctggattcaccttcagtagttatagcatgaactgggtccgccaggctccagggaaggggctggagtgggtctcttccattcttgtcactagccacgtattctacgcagactcagtgaagggccgattcaccatttccagagacaacgtcaagaactcactgtatctgcaaatgaacagcctgagagccgaggatacggctgtctattactgtgcgagagattcccgtgggctctatgggtcagggatccccgacttctggggccagggaaccctggtcaccgtctcctca

SEQ ID NO: 6960 - DNA, 348 bp, synthetic construct
  source 1..348: mol_type = other DNA
aggtgcagctgttggagtcctggaggaggcttgatccagcggggggggtccctgagactctcctgtgtagcctctgggttcaccgtcagtgccaactacatgacctgggtccgccaggctccagggaagggactcgagtgggtctcagtgatttatagtgatggtaacacatactatgcaaactccgtgaagggccggttcaccgtctccagagacaattccaagaacacgctgtttcttcaaatgagcagcctgagagccgaggacacggccgtgtatttctgtgcgagagtcgtgtcggatgcttttgatctctggggccaagggaccacggtcaccgtctcctca

SEQ ID NO: 6961 - DNA, 372 bp, synthetic construct
  source 1..372: mol_type = other DNA
caggtacagctgcagcagtctggggctgaggtgaagaagcctgggtcctcggtgaaggtctcctgcagggcttctggaggcaccttcagcacctatactgtcacctggctgcgacaggcccctggacaagggcttgagtggatgggagggatcatccctatcgttggaataccaaactacgcagagaacttccagggcagagtcacgattaccgcggacaaatccacgagcacagcctacatggagctgagcagcctgaaatctgaggacacggccctgtattactgtgcgagaggttcgggatactctgcttcagggagtaatacctacttcgacccctggggccagggaaccctggtcaccgtctcctca

SEQ ID NO: 6962 - DNA, 357 bp, synthetic construct
  source 1..357: mol_type = other DNA
caggtgcagctgcagcagtcgggcccgggactggtgaagccttcggacaccctgtccctcacctgcgctgtctctggttactccatcaggagtgacgactactggggctggatccggcagaccccagggaaggggctggagtggattgggagtgtctattatagtggcagcacccactacaacccgtccctcaagagtcgagtcaccatatcagtagacacgtccaagaaccagttctccctgagtctgacctctgtgaccgccgcagacacggccgtgtattactgtgcgcgaaactcttcaagaactcccttatttgactactggggccagggaaccctggtcaccgtctcctca

SEQ ID NO: 6963 - DNA, 360 bp, synthetic construct
  source 1..360: mol_type = other DNA
caggtgcagctggtgcagtctgggggtgaggtgaagaagcctgggtcctcggtgaaggtctcctgcaaggcttcgggaggcaccttcggcagtgactctatcagctgggtgcgacaggcccctggacaagggcttgagtggatgggaaggatcatccctatcctcggtgtaccaaactccgcacagaagttccaggacagagtcacaattaccgcggacaaatccacgagcacagcctacatggagctgagcagcctgagatatgacgacacggccgtgtatttctgtgcgagagaaggtggaaccaccactgaatacttccggcagtggggccagggcaccctggtcaccgtctcctca

SEQ ID NO: 6964 - DNA, 369 bp, synthetic construct
  source 1..369: mol_type = other DNA
caggtccagctggtgcagtctgggggaggtgtggtccagcctggggggtccctgagactctcctgtgcagcctctggattcaccttcagtaactatgatatgcactgggtccgccaggctccaggcaaggggctagagtgggtggcagtcatatcatctgatggaagtcttagattctacgcagactccgtgaagggccgattcaccatctccagggacaattccaagaacactctatatctgcaaatgaacagcctgagaactgaggacacggctgttttttactgtgcgagagatccccccacttcggtgacttcccagatgcttcttgacttctggggccagggaaccctggtcaccgtctcctca

SEQ ID NO: 6965 - DNA, 354 bp, synthetic construct
  source 1..354: mol_type = other DNA
caggtgcagctggtgcagtctgggggaggcttggtccagcctggggggtccctgagactctcctgtgcagcctctggaatcatcgtcagtagcaactacatgagttgggtccgccaggctccagggaaggggctggagtgggtctcactgatgtatgccggtggtagtacattctacgcagactccgtgaagggcagattcaccatctccagagacaattccaaaaacacgctgtttcttcaaatgaacagcctgagagtcgaggacacggctgtgtattactgtgcgagggatttggcagagccctacggtatggacgtctggggccaagggaccacggtcaccgtctcctca

SEQ ID NO: 6966 - DNA, 381 bp, synthetic construct
  source 1..381: mol_type = other DNA
gaggtgcagctggtgcagtctggagcagaggtgagaaagcccggggagtctctgaagatctcctgtaaggcctctggatacacctttagtacctactggatcggctgggtgcgccagatgcccgggaaaggcctggagtggatggggatcatctttcctggtgactctgataccaggtacagcccgtccttccaaggccaggtcaccatctcagccgacaagtccatcagcaccgcctacgtacagtggagcagcctgaaggcctcggacaccgccatgtattactgtgcgactctgaaactcgagggatttacccccgttgattacaacacacttcccgcactttactggggccagggaaccctggtcaccgtctcctca

SEQ ID NO: 6967 - DNA, 372 bp, synthetic construct
  source 1..372: mol_type = other DNA
gaggtgcagctgttggagtctgggggaggcttggtgcagcctggcaggtccctgagactctcatgtgcagccgctggattcatctttaatgattatgccatgcactgggtccggcaagttccagggaagggcctggagtgggtctcaggtattagttggaatggtgttagcataggctatggggactctgtgaagggccgattcaccatctccagagacaacgccaagaactccctgtatctgcacatgaacagtctgagaggtgaggatacggccgtgtattactgtgcaaaagataagagacttgactacagtaactacgggactgcccctgagtactggggccagggaaccctggtcaccgtctcctca

SEQ ID NO: 6968 - DNA, 351 bp, synthetic construct
  source 1..351: mol_type = other DNA
caggtgcagctggtggagtctggaggaggcttgatccagcctggggggtccctgagactctcctgtgcagcctctgggctcatcgtcagtagcaactacatgagctgggtccgccaggctccagggaaggggctggcgtgggtctcaactctttatagcggtggtagcacattctacgcagactccgtgaggggccggttcaccatctccagagacaactccaagaacacgctgtatcttcaaatgaacagcctgacaggcgaggacacggccgtttattactgtgcgagagatgccctatattacggtgactcaaactggggccagggaaccctggtcaccgtctcctca

SEQ ID NO: 6969 - DNA, 375 bp, synthetic construct
  source 1..375: mol_type = other DNA
gaggtgcagctgttggagtctgggggaggcttggtacagcctggcaggtccctgagactctcctgtgcagcctctggattcacctttgatgattatgccatacactgggtccggcaagctccagggaagggcctggagtgggtctcaggtagtacttggaatagtggtactataggctatgcggactctgtgaagggccgattcatcatctccagagacaacgccaggaactccctatatctgcaaatgaatcgtctgagacctgaggacacggccttctattactgtgcaagagattctacaatactgggagctaagcccgaagagtattactttgactattggggccagggaaccctggtcaccgtctcctca

SEQ ID NO: 6970 - DNA, 390 bp, synthetic construct
  source 1..390: mol_type = other DNA
aggtgcacgctggtggagtctgggggaggcgtggtccagcctgggaggtccctgagactctcctgtgcagcctctggattcaccttcagtagtgatgatatatactgggtccgccaggctccaggcaaggggctagaatgggtggcacttatatcttctgatggaagtaataagtactacgcagactccgtgaagggccgattcaccatctccagagacaattccaagaacacgctgtatctgcaaatgaacagcctgagaggtgacgacacggctgtgtatcactgtgcgagacatcaggagtccgtactcccaactgctgataggccctaccgttactactactacatggacgtctggggcagagggaccacggtcaccgtctcctca

SEQ ID NO: 6971 - DNA, 366 bp, synthetic construct
  source 1..366: mol_type = other DNA
caggtcacgttgaaggagtctggtcctacgctggtgaaacccacacagaccctcacgctgacctgcagcttctctgggttctcactcagcactaatggagtgggtgttgcctggatccgtcagcccccaggaaaggccctggagtggcttgcactcatttattgggatgatgataagcgtttcagcccatctctgagaaacagactcacaatcaccaaggacacctccaaaaaccaggtggtccttacactgaccaacattgaccctgtggacacagccacatattactgtgcacgcttcaaggagcacctcgggtacaactggttcgacccctggggccagggaaccctggtcaccgtctcctca

SEQ ID NO: 6972 - DNA, 369 bp, synthetic construct
  source 1..369: mol_type = other DNA
gaggtgcagctggtgcagtctggggctgaggtgaagaagcctggggcctcagtgaaggtctcctgcaaggcttctggatacaccttcaccggccattatatgtactgggtgcgacaggcccctggacaagggcttgagtggatgggacggatcaaccccaacagtggtgacacacactatgcacagaagtttcagggcagggtcaccatgaccagggacgcctccatcagcacagccttcatggagctgagcaggctgagatctgacgacacggccgtgtattactgtgcggtcgagccttattacaatattttgactgcttcttatcgagactgctggggccagggaaccctggtcaccgtctcctca

SEQ ID NO: 6973 - DNA, 369 bp, synthetic construct
  source 1..369: mol_type = other DNA
gaggtgcagctggtggagtctgggggaggcttggtacagccagggcggtccctaagactctcctgtataacttctggattcacctttggtgatcatgctatgaactgggtccgccaggctccagggaaggggctggagtgggtaggtttcattagaaccaaaacttatggtgggacaacagaatacgccgcgtctgtgaaaggcagattcaccatctcaagagatgattccaaaagcatcgcctatctgcaaatgaacagcctgagaaccgaggacacagccgtgtattactgtactggagtcttaggttggcgggggagttatcgtgaagactactggggccagggaaccctggtcaccgtctcctca

SEQ ID NO: 6974 - DNA, 363 bp, synthetic construct
  source 1..363: mol_type = other DNA
caggtgcagctgcagcagtcgggcccaggactggtgaagccttcggagaccctgtccctcacctgcactgtctctggtggctccatcagcagcaggagttactactgggactggatccgccagtccccagggagggggctggagtggattgggagtatctattatagtgggagcgccgactacaacccgtccctcaagagtcgagtcaccatatccgtcgacacgtccaagaaccatttctccctgaagctgagctctgtgaccgccgcagacacggctgtgtattactgtgcgaggcgaccgactacggacttctactacatggacgtctggggcaaagggaccacggtcaccgtctcctca

SEQ ID NO: 6975 - DNA, 381 bp, synthetic construct
  source 1..381: mol_type = other DNA
caggtgcagctgttggagtcggggggaggcttggtacagcctggcaggtccctgcgactcacctgtgcagcctctggattcacctttgatgattatgccatgcactgggtccggcaagctccagggaagggcctggagtgggtctcaggtattacttggaatagtggtaccataggctatgcggactctgtgaagggccgattcatcattatcagagacaacgccaagaactccctgtatctccaaatgaacagtctgagagttgaggacacggccttgtattactgcgtaaaagatagccgcgaaatcaaaacacttatggttgaagaagactactacatggacgtctggggcaaagggaccacggtcaccgtctcctca

SEQ ID NO: 6976 - DNA, 369 bp, synthetic construct
  source 1..369: mol_type = other DNA
gaggtgcagctggtggagtctgggggaggcgtggtccagcctgggaggtccctgagactctcctgtgcagcctctggattcaccttcattaactatggcatgcactgggtccgccaggctccaggcaaggggctggagtgggtggcagctatatcatatgatggaagtgatgaatactatgcagactccgtgaagggccgattcaccatctccagagacgattccaagaacacggtgtatctgcaaatgaacagcctgagagctgaggacacggctgtgtattactgtgcgaaagtgaccgcctcccattattactactactacgggatggacgtctggggccaagggaccacggtcaccgtctcctca

SEQ ID NO: 6977 - DNA, 375 bp, synthetic construct
  source 1..375: mol_type = other DNA
caggtccagcttgtgcagtctggggctgaggtgaagaagcctgggtcctcggtgaaggtctcctgcaaggcttctggaggcaccttcagcagctatcctatcagctgggtgcgacaggcccctggacaagggcttgagtggatgggaaggatcatccctccccttggtatatcagactacgcacagaagttccagggcagagtcacaataaccgcggacaaatccacgagcacagcctacatggagctgagcagcctgacatctgaggacacggccgtgtattactgtgcgagagatcgaggttactcctctgtttcagggagtaactactacatggacgtctggggcaaagggaccacggtcaccgtctcctca

SEQ ID NO: 6978 - DNA, 372 bp, synthetic construct
  source 1..372: mol_type = other DNA
caggtccagctggtgcagtctggggctgaggtgaagaagcctgggtcctcggtgaaggtctcctgcaaggcttctggaggcaccttcagcagcaatcctttcagctgggtgcgacaggcccctggacaagggcttgagtggatgggaaggatcatccctatccttggtataccaaactacgcacagaagttccagggcagagtcacgtttaccgcggacaaatccacgagcacagcctacatggagttgagcagcctgagatctgaggacacggccgtctattactgtgcgagagatgcgggttactctggttcggggagtgcttactactttgactactggggccagggaaccctggtcaccgtctcctca

SEQ ID NO: 6979 - DNA, 369 bp, synthetic construct
  source 1..369: mol_type = other DNA
caggtccagcttgtacagtctgggcctgaggtgaagaagcctgggacctcagtgaaagtctcctgcaaggcttctggattcaccttcattacctctgctgtgcagtgggtgcgacaggctcgtggacaacgccttgagtggataggatggatcgccgttggcagaggtaacacagactacgcacagaagttccaggaaagagtcaccattaccagggacatgtccacaagcacagcctacatggagctgagcagcctgagatccgaggacacggccgtgtattactgtgcggcccttaattgtaatgtcacgacctgctctgatggttttgatatgtggggccaagggaccacggtcaccgtctcctca

SEQ ID NO: 6980 - DNA, 348 bp, synthetic construct
  source 1..348: mol_type = other DNA
gaggtgcagctgttggagtctggaggaggcttgatccagcggggggggtccctgagactctcctgtgcagcctctggattcaccgtcagtaccaactacatgagctgggtccgccaggctccagggaaggggctggagtgggtctcagttatttatagcggtggtaccacatactacgcagactccgtgaagggccgattcaccatctccagagacaattccaagaacacgctgtatcttcaaatgagcagcctgagagccgaggacacggccgtgtattactgtgcgagagtcgtgtcggatgcttttgatatctggggccaagggaccacggtcaccgtctcctca

SEQ ID NO: 6981 - DNA, 381 bp, synthetic construct
  source 1..381: mol_type = other DNA
gaggtgcagctgttggagtcgggcccaggactggtgaagccttcacagaccctgtccctcacctgcactgtctctggtggctccatcagcagtggtgcttactactggacctggatccgccagcacccagggcagggcctggagtggattgggtacatctattacagtgggatcacctactacaatccgtccctcaagagtcgagtcaccatatcagtagacacgtctaagaaccagttctccctgaagctgagctctgtgactgccgcggacacggccgtttattactgtgcgaggacgtattactatgatgataatggtaattactaccagtactactttgactactggggccagggaaccctggtcaccgtctcctca

SEQ ID NO: 6982 - DNA, 339 bp, synthetic construct
  source 1..339: mol_type = other DNA
gaggtgcagctcgtggagtctgggggaggctttgtacaggctgggcagtctctgagactctcctgtacagcctctggagtcaacctcaaagagtatagtatgggctggtaccgccaggctccagggagcgcgcgcggagcggtcgcaactatcagtagtggtggtgctgcattctattcaaatgccgtgacgggccgattcaccatctccagagacaacgccaagaacgaagtgtatctgcagatgaacggcctgaaagatgaggacacgggcgtctattactgtagcatcgtgtcgcgtgacatatggggccggggaacccaggtcaccgtctcttca

SEQ ID NO: 6983 - DNA, 363 bp, synthetic construct
  source 1..363: mol_type = other DNA
gaggtgcagctgttggagtcgggcccaggactggtgaagccttcacagaccctgtccctcacctgcactgtctctggtgactccatcgccagtggtggttattactggacctggatccgccagcaccccgggcagggcctggagtggattgggaacatctatttcactggggacaccgactaccacccgtccctcaagagtcgacttagcatatcagtagacacgtttaggaaccggttctccctgaagttgacctctgtgactgccgcggacacggccgtatatttttgtgcgagagacggcggtagtggctaccacaaccttgactattggggccagggaatcaaggtcaccgtctcctca

SEQ ID NO: 6984 - DNA, 378 bp, synthetic construct
  source 1..378: mol_type = other DNA
caggtacagctggtgcagtctggggctgaggtgaagaagcctgggtcctcggtgaaggtctcctgcaaggcttctggaggcaccttcatcaggaacactataagttgggtgcgacaggcccctggacaggggcttgagtggatgggaagggtcatccctctacttaatgtagttgactacgcacagaagttccagggcagagtcacgataatcgcggacaaatcttcgagcacagtctacatggagttgactaccctgagatctgaggacacggccgtctattactgtgcgagagaggggaccggctattgtgatggtggtatatgccctgatgcttttgatatctggggccaagggaccacggtcaccgtctcctca

SEQ ID NO: 6985 - DNA, 363 bp, synthetic construct
  source 1..363: mol_type = other DNA
aggtccagctggtgcagtctgggcgctgaggtgaagaagcctggggcctcagtgaaggtttcctgcaaggcatctggatacaccttcaccacctactatattcactgggtgcgacaggcccctggagaagggcttgagtggatgggaataatcaaccctgatggtggtgccataacttacgcacagaagttccggggcagagtcaccatgaccacggacacgtccacgagtacagtctacatgaatgtaatcagcctgagatctgaagacacggccgtatattactgtgcgagagggtcattaatcccagcaaaggatggttttgatatctggggccgagggaccacggtcaccgtctcctca

SEQ ID NO: 6986 - DNA, 366 bp, synthetic construct
  source 1..366: mol_type = other DNA
gaggtgcagctggtgcagtctggggctgaggtgaagaagcctggggcctcagtgaaggtttcctgcaaggcatctggatacacctttaccacctactatattcactgggtgcgacaggcccctggacaagggcttgagtggatgggaataatcaaccctgatggtggtgccagaacctacgcacagcacttccagggcagactcaccatgaccacggacacgtccacgaccacagtctacatggaactgagcaacctgggctctgaggacacggccatgtattactgtgcgagagatcttgtcgcgataccagctgctatgtgtggcgcctactggggccagggaaccctggtcaccgtctcctca

SEQ ID NO: 6987 - DNA, 381 bp, synthetic construct
  source 1..381: mol_type = other DNA
gaggtgcagctggtggagtctgggggaggcgtggtccagcctgggaggtccctgagactctcctgtacagcctctggattcaccttcagtcgttatggcatgcactgggtccgccaggctccaggcaaggggctggagtgggtggcaggtatatcgtttgatggagatgacaaagactatgcagactccctgaagggccgattcaccatctccagagacaattccaaggacacgctgtatctccaaatgaacggcctgagcactgaggacacggctgtgtatttctgtgcgaagggtctggggacgtattgtagtggtggcaactgctactctcactactttgactactggggccagggaaccctggtcaccgtctcctca

SEQ ID NO: 6988 - DNA, 360 bp, synthetic construct
  source 1..360: mol_type = other DNA
gaggtgcagctggtggagtctgggggaggcgtggtccagcctgggaggtccctgagactcgcctgcacagcctctggagtctccttcagtagttctggcatgcactgggtccgccaggctccaggcaaggggctggagtgggtggcagttatatcaaatgatggaaattacaaatcttattcagactccgtgaagggccgattcaccatctccagagacccttccaagaacacactgtatctgcaaatgaacagcctgagaggagaggacacggctgtgtattattgtgcaaacgactacggtgacttagtaacctggtttgactactggggccagggagccctggtcaccgtctcctca

SEQ ID NO: 6989 - DNA, 357 bp, synthetic construct
  source 1..357: mol_type = other DNA
aggtaccagctggtgcagtctggggctgaggtgaagaagcctgggtcctcggtgaaaatctcctgccaggcttctggaggcactttcagttataatataaactgggtgcgacaggcccctggacaaggacttgagtggatgggaaggatcatccctatccttggaataccacactacgcacagacgtttcaggacagagtcacgataaccgcggacaaatccacgagcaccctctacatggagctgagcagcctgagatctgaggacacggccatatattactgtgcgagagaaggtggttccaccactgcatacttcccgcactggggcaagggcaccctggtcaccgtctcctca

SEQ ID NO: 6990 - DNA, 369 bp, synthetic construct
  source 1..369: mol_type = other DNA
caggtgcagctggtgcagtctggggctgaggtgaagaagcctggggcctcagtgcaggtttcctgcaaggcatctggatacaccttcattagccagtatatacactgggtgcgacaggcccctggacaaggcctagagtggatgggaataatcaaccctgacgctggtagcacaacctacgcacagcagttccagggcagactcaccatgaccacggacacgtccacgagcacagtgtacatggaactgaggagcctgagatctgaggacacggccgtttattactgtactagagccgacgattttattccctcgcctttcggtgcttttgagatctggggccgaggaacaatggtcaccgtctcctca

SEQ ID NO: 6991 - DNA, 387 bp, synthetic construct
  source 1..387: mol_type = other DNA
gaggtgcagctggtggagtctgggtctgaggtgaagaagcctgggtcctcggtgaaggtctcctgcaaggcttctggaggcagtttcagcaactttgctttcaactgggtgcgacaggcccctggacaaggccttgagtggatgggagggatcatccctctctttggtgcaccaaactacgcacagaagttccagggcagagtcactgtaaccgcggacaaatccacgggcactgcccacatggagttgagcagcctgagatctgaagacacggccatatattactgtgcgaggggctctctttatcatgattccagccggggaagtttggacaaccattattacatggaggtccggggcaatgggaccacggtcaccgtctcctca

SEQ ID NO: 6992 - DNA, 375 bp, synthetic construct
  source 1..375: mol_type = other DNA
gaggtgcagctggtggagtctgggggaggcgtggtacaacctggggggtccctgagactctcctgtctaggctatggagtcacctttgatggttctgccatgcactgggtccgtcaagttccagggaggggtctggagtgggtctcccttattagtgggcatggtggtagcacatactatgcagagtctgtgaagggccgattcaccatctccagagacaacagcgcaaactctctatatctccaaatgaacagtctgagcactgaggacaccgccttctactactgtgtaaaagacgccgtgttagtggtgtatggcatggggaactggtacttcgatctctggggccgtggcaccctggtcaccgtctcctca

SEQ ID NO: 6993 - DNA, 363 bp, synthetic construct
  source 1..363: mol_type = other DNA
caggtgcagctacagcagtggggcgcagggctgttgaagccttcggagaacctgtccctcacctgcggtgtctctggtggttccttcaacactttcttctggacctggatccgccagcccgcagggagggggctggagtggattggggacatcaatcatagtggaaacaccaactacaacccgtccctcaagagtcgactcaccatttcagtagacacgtccaagaaccagttctccctgaaactgagttctgtgaccgccgcggacacggctgtgtattactgtgcgagaggcaggccggggtgggagctcatccccttctttgactcctggggccagggaaccctggtcaccgtctcctca

SEQ ID NO: 6994 - DNA, 366 bp, synthetic construct
  source 1..366: mol_type = other DNA
gaggtgcagctggtggagtctggggctgaagtgaagaagcctgggtcctcggtgaaagtctcctgcaaggcttctggaggcagcttcagcacatttgccatcagctgggtgcgacaggcccctggacaagggcttgagtgggtgggaaggataagccccagccagggtatatcaaactacgcacagaggttccagggcagagtctcgattaccgcggacaaatccacgagcacagcctccatggaactcagcagcctgagatctgaggacacggccgtctatttctgtgcgcgagatctaggtgcggggagttattatcgacactttgactcctggggccagggaaccctggtcaccgtctcctca

SEQ ID NO: 6995 - DNA, 375 bp, synthetic construct
  source 1..375: mol_type = other DNA
caggtgcagctggtgcagtctggggttgaggtgaagaagcctggggcctcagtgatgctttcctgcaaggcatctggatacaccttcagcaactactatatactctgggtgcgacaggcccctggacaagggcttgagtggatgggactaatcaacccgcgtggtggtggcacaagctacgcacacaagttccagggtagagtcaccatgagtagggacacgtccacgagcactgcctacatggagttgaccagcctgagatctgaggacacggccgtgtattactgtgcgagagatccgggtgtcgtggacccgctgagcccccaccccctgccgcggttctggggccagggaaccctggtcaccgtctcctca

SEQ ID NO: 6996 - DNA, 372 bp, synthetic construct
  source 1..372: mol_type = other DNA
caggtgcagctggtgcagtctggggctgaggtgaagaagcctgggtcctcggtgaaggtctcctgcaaggcttctggaggccccttcggcagttctccaatcagttgggtgcggcaggcccctggacaagggcttgagtggatgggaaggatcatccctattcttggtgtggcggactacgcacagaagtttcagggcagagtcaccattaccgcggacagatccacgagcacaacctacatggagctgagcagcctgagatctgaagacacggcccgatattattgtgcgagagatgtgggttactctggttcggggagctcttactactttgacccctggggccagggaaccctggtcaccgtctcctca

SEQ ID NO: 6997 - DNA, 372 bp, synthetic construct
  source 1..372: mol_type = other DNA
gaggtgcagctggtggagtctgggggaggcttggtacagcctggggggtccctgagactctcctgtgtagcctctggattcaccctcagtaacgacgacatacactgggtccgccaagctccaggaaaaggtctggagtgggtctcagctatcggttctgccggtgacacatattatgcagactccgagaagggccgattcaccatctccagagaaaaggccaacaactccttgtatcttcaaatgcacagcctgagagccggggacacggctgtgtattactgtgtgagagggacgatgactacgcttggggtcttccaatactattacaaggaaatttggggcagagggaccacggtcaccgtctcctca

SEQ ID NO: 6998 - DNA, 372 bp, synthetic construct
  source 1..372: mol_type = other DNA
caggtgcagctgcagcagtctggggctgaggtgaagaagcctgggtcttcggtgaaggtctcctgcaaggcctctggaggctccttcaacagccatagcatcagttgggtgcgacaggcccctggacaagggcttgagtggatgggaaggatcatccctatccttggtgtagcagactacgcacagaagttccagggcagagtcaacattatcgcggacaagtccacgggcacagcctacatggagctgaggagcctgagatctgaggacacggccgtgtattactgcgcgagagatgtgggttattctggttcggggagtgcttactactttgacctctggggccagggaaccctggtcaccgtctcctca

SEQ ID NO: 6999 - DNA, 363 bp, synthetic construct
  source 1..363: mol_type = other DNA
gaggtgcagctggtggagtctgggggaggcgtggtccagcctgggaggtccctgagactctcctgtgcagcctttggattcaccttcagtacttatgccatgcactgggtccgccaggctccaggcaaggggctggagtgggtggcagttatatcagatgatggcagatataaagactccgcagactccgtgaagggccgattcaccatctccagagacaattcccagaacacgctttatctgcagatgagcagcctgagacctgaggacacagctatctattactgtacgagagagggccctatgactacggtgacctactttgactactggggccagggaaccctggtcaccgtctcctca

SEQ ID NO: 7000 - DNA, 384 bp, synthetic construct
  source 1..384: mol_type = other DNA
gaggtgcagctgcagcagtcgggcgcgggactgttgaagccttcggagaccctgtccctcacctgcggtgtctttggtgggtccttcagtgggaactactggagctggatccgccagtccccagggaaggggctggagtggattggcgagatcaatcatagcggaaccaccacttacaacccgtccctcaagagtcgagtcaccatatcaattgacacgtccaagaaccagttctccctgcggctgagctctgtgaccgccgcggacacggctgtgtattactgtgcgagagaggttgtagtaataccagctgctacaataaggtactcctacaactactacatggacgtctggggcgcagggaccacggtcaccgtctcctca

SEQ ID NO: 7001 - DNA, 366 bp, synthetic construct
  source 1..366: mol_type = other DNA
gaggtgcagctgttggagtccggagcagaggtgaaaaagcccggggagtctctgaggatctcctgtaagggttctggatacagtttcaccacctactggatcacctgggtgcgccagatgcccgggaaaggcctggaatggatggggaggattgatcctagtgactcttacaccaaatacagtccgtccttccaaggccgagtatccatctcggctgacaagtccaccagcaatgcctacatgcagtggagcagcctccaggcctcggacaccgccatttattactgtgcgagggggcgagggagtgcctacgacataatggaaattgagtattggggccagggaaccctggtcacggctcctcag

SEQ ID NO: 7002 - DNA, 381 bp, synthetic construct
  source 1..381: mol_type = other DNA
caggtccagctggtgcagtctggagcagaggtgagaaagcccggggagtctctgaagatctcctgtaaggcttctggatacacgtttagtacctactggatcggctgggtgcgccagatgcccgggaaaggcctggagtggatggggatcatctttcctggtgactctgataccaggtacagcccgtccttccaaggccaggtcaccatctcagccgacaagtccatcagcaccgcctacgtacagtggagcagcctgaaggcctcggacaccgccatgtatttctgtgcgactctgaaactcgagggatttacccccgttgactacaatacacttcctgctctttactggggccagggaaccctggtcaccgtctcctca

SEQ ID NO: 7003 - DNA, 342 bp, synthetic construct
  source 1..342: mol_type = other DNA
caggtgcagctggtggagtctgggggagacttggtccagcctggggggtccctgagactctcctgtgcagtctctggattcaccgtcagtaacaactacatgagctgggtccgccagcctcccgggaaggggctggagtgggtctcatttatttatagcggtggtaacacattctacgcagactccgtgaagggccgattcaccatcaccagagacaattccaagaacacactgtggcttcaaatgaacagcctgagagccgaagacacggctgtttactactgtgcgacctcacctgcggtgggggtctggggccaagggacaatggtcaccgtctcctca

SEQ ID NO: 7004 - DNA, 381 bp, synthetic construct
  source 1..381: mol_type = other DNA
caggtgacgttgaaggagtctgggggaggcgtggtccagcctgggaggtccctgagactctcctgtgcagcctctggattcaccttcaataaatatggcatgcactgggtccgccaggctccaggcagggggctggagtggctggcagttatatcatatgatggaactaatgaattctatgcagacttcgtgaagggccgattcaccatctccagagacaattccaagaacaagttgtatctgcaaatgaacagcctgagagctgaggacacggctgtctattactgtgtgaaagtccaaggggaatattgtagtggtaccagctgctacgggttcactttggacgtctggggccaagggaccacggtcaccgtctcctca

SEQ ID NO: 7005 - DNA, 369 bp, synthetic construct
  source 1..369: mol_type = other DNA
caggtgcagctggtggagtctgggggaggcgtggtccagcctgggaggtccctgagactctcctgtgcagcctctggattcaccttcagaatttatggcatgcactgggtccgccaggctccaggcaaggggctggagtccgtggcagttatctcatttgatggaagtgatagatattacgcagactccgtgaagggccgattcaccatctccagagacaattccaagaacacgctgtatctgcaaatgaacagcctgagggctcaggacacggctgtctattactgtgcgaaaggatctgcagtgcctggttcacggccctactactttgacttctggggccagggaaccctggtcaccgtctcctca

SEQ ID NO: 7006 - DNA, 360 bp, synthetic construct
  source 1..360: mol_type = other DNA
gaggtgcagctggtggagtcgggcccaggactggtgaagccttcggggaccctgtccctcacctgcactgtctctggtggctccatcagcagtagcaattggtggagctgggtccgccagtctcctgggaaggggctggagtggattgcggaaatctatcagagtgggagcaccaacgacaacccgtccctcaagagtcgagtcaccatatcaatagacaagtccaagaaccagttctccctgaagttgagttatgtgaccgccgcggacacggccgtgtatttctgtgcgaggaccccccttacggacttctactacatggacgtctggggcaaagggaccacggtcaccgtctcctca

SEQ ID NO: 7007 - DNA, 378 bp, synthetic construct
  source 1..378: mol_type = other DNA
caggtgcagctgcaggagtcgggcccaggactggtgaagccttcggggaccctgtccctcacctgcgctgtctctggtgcctccatcagcagtactaactggtggagttgggtccgccagcccccagggaaggggctggagtggattggagaaatctatcatagtgggagcaccaactacaacacgtccctcgagagtcgagtcaccatgtcagtggacaaatcccagaaccacttctccctgaaactgaggtctgtgaccgccgcggacacggccgtgtattactgtgcgagaggtgtgggatttgacgatttttggagtggtcccaacaggtacttcagtctctggggccgtggcaccctggtcaccgtctcctca

SEQ ID NO: 7008 - DNA, 381 bp, synthetic construct
  source 1..381: mol_type = other DNA
gaggtgcagctgttggagtctggggctgaggtgaggaagcctgggtcctcggtgagggtctcctgcaaggcttctggaggcgccttcagcatttatgccatcagctgggtgcgacaggcccctggtcaagggcttgagtggatgggagagatcatccctatcactggtacagcaaactacgcacagaagttccagggcagagtcacgattaccgcggacgaatccacgagcacagcctacatggaactgagcagcctgagatctgaggacacggccgtgtattactgtgcgagagtcggtcgctcttactatgatagtagtggttattactacacatactttgactcctggggccagggaaccctggtcaccgtctcctca

SEQ ID NO: 7009 - DNA, 369 bp, synthetic construct
  source 1..369: mol_type = other DNA
gaggtgcagctgttggagtctgggggaggcgtggtccagcctgggaggtccctgagactctcctgtgcagcctctggattcaccttcattaactatggcatgcactgggtccgccaggctccaggcaaggggctggagtgggtggcagctatatcatatgatggaagtgatgaatactatgcagactccgtgaagggccgattcaccatctccagagacgattccaagaacacggtgtatctgcaaatgaacagcctgagaactgaggacacggctgtgtattactgtgcgaaagtgaccgcctcccattattactactactacgggatggacgtctggggccaagggaccacggtcaccgtctcctca

SEQ ID NO: 7010 - DNA, 372 bp, synthetic construct
  source 1..372: mol_type = other DNA
gaggtgcagctgttggagtctgggggaggcgtggtccagcctgggaggtccctgagactctcctgtgcagtctctggattcaccttcagtaactatggcatgcactgggtccgccaggctccaggcaaggggctggagtgggtggcatttatatcacatgatggaagtactaaatactatgcagactccgtgaaggaccgattcaccatctccagagacacttccaagaacacactgtatctgcaaatgaacaacctgagagctgaggacacggctgtgtattactgcgcgaagcatttcggggcccctacttcctactactactacggtatggacgtctggggccaagggaccacggtcaccgtctcctca

SEQ ID NO: 7011 - DNA, 381 bp, synthetic construct
  source 1..381: mol_type = other DNA
caggtgcagctggtgcagtctgggggaggcgtggtccagcctgggaggtccctaagactctcctgtgcagcctctggattcaccttcagtacctacggcatgcactgggtccgccaggctccaggcaaggggctggagtggctggcacttatttcatatgatggaagtaatacatactctgcagactccgtgaagggccgattcaccatctccagagacaatcccaagaacactctgtttctgcaaatgaacagcctgagagctgaggacacggctgtgtattactgtgcgaaagccctgggcccctattgtggtgctggtgactgctactgggctccccttgacttctggggccagggaaccctggtcaccgtctcctca

SEQ ID NO: 7012 - DNA, 393 bp, synthetic construct
  source 1..393: mol_type = other DNA
caggtgcagctggtgcagtctgggggaggcttggtacagcctggcaggtccctgagactctcctgtgcaggctctggattcacctttgatgattatgccatgcactgggtccggctagttccagggaagggcctggagtgggtctcaggtattagttggaatagtggaaccataggctatgcggactctgtgaagggccgattcatcatctccagagacaacgccgagaactccctgtatttgcaaatgaacagtctgagagctgaggactcggccctgtattactgtggaaaagataagggaccgtattactatgattccgggagtctttgggactactactccaacggtatggatgtctggggccaagggaccacggtcaccgtctcctca

SEQ ID NO: 7013 - DNA, 363 bp, synthetic construct
  source 1..363: mol_type = other DNA
gaggtgcagctggtggagtcgggcccaggactggtgaagccttcacagaccctgtccctcacctgcactgtgtctggtgtctccatcagcagtggtggttactactggaactggatccgccagcacccagggaagggcctggagtggattgggtacatctattacagtgggagcacctactacaacccgtccctcaagagtcgagttaccatgtcagtagacacgtctaagaaccagtactccctgaagctgagctctctgactgccgcggacacggccgtgtattactgtgcgagagactacggtggtaacgcccaatactttaactactggggccagggaaccctggtcaccgtctcctca

SEQ ID NO: 7014 - DNA, 396 bp, synthetic construct
  source 1..396: mol_type = other DNA
caggtgcagctggagcagtctgggggaggcttggtacagccgggggggtccctgagactctcctgtgcagcctctggattcaccttcagtagctatgccatgaactgggtccgccaggctccagggaagggactggagtgggtctcaactattagtggtagtggtggtagcacatactacgcagactccgtgaagggccggttcaccatctccagagacaattccaagaacacgctggatctacacatgagcagcctgagagccgaggacacggccgtatattactgtgcgaaagctaatgacctaggatattgtagtggtggtaggtgctaccccccctactactactacggtatggacgtctggggccaagggaccacggtcaccgtctcctca

SEQ ID NO: 7015 - DNA, 372 bp, synthetic construct
  source 1..372: mol_type = other DNA
caggtccagctggtgcagtctggggctgaggtgaagaagcctgggtcctcggtgaaggtctcctgcaaggcttctggaggcaccttcagtagctatcctatcagctgggtgcgccaggcccctggacaaggacttgagtggatgggaaggatcatccctatccttggtataccaaactacgcacagaagttccagggcagagtcacgattattgcggacaaatccacgagcacagcctacatggagttgagcagcctgagatctgaggacacggccgtgtattattgtgcgagagatcagggttactctggttcggggagtcattactggttcgacccctggggccagggaaccctggtcaccgtctcctca

SEQ ID NO: 7016 - DNA, 366 bp, synthetic construct
  source 1..366: mol_type = other DNA
gaggtgcagctgttggagtcgggcccaggactggtgaagccttcggagaccctgtccctcacctgctctgtctctggtgcctccatcagtagttactactggagctggatccggcagcccccagggaagggactggagtggattgggtatgtctattacagtgggagcaccaactacaacccctccctcaagagtcgagtcaccatatcagttgacacgtccaagaaccagttctccctgaagctgaggtctgtgaccgctgcggacacggccgtttattactgtgcgactgattactttgatagtactggtttccactacggtatggacgtctggggccaagggaccacggtcaccgtctcctca

SEQ ID NO: 7017 - DNA, 363 bp, synthetic construct
  source 1..363: mol_type = other DNA
gaggtgcagctgttggagtccggagcagaggtgaaaaagcccggggagtctctgaggatctcctgtaagggttctgaatacagcttttccagctactggatcagctgggtgcgccagatgcccgggaaaggcctggagtggatggggaggattgatcctagtgactcttataccaactacagcccgtccttccaaggccacgtcaccatctcagctgacaagtccatcagcactgcctacctgcagtggagcagcctgaaggcctcggacaccgccatgtattactgtgcgagatcaggtggtaaccggctcctttatggtatggacgtctggggccaagggaccacggtcaccgtctcctca

SEQ ID NO: 7018 - DNA, 369 bp, synthetic construct
  source 1..369: mol_type = other DNA
caggtgcagctggtgcagtctggggctgaggtgaagaagcctgggtcctcggtgaaggtctcctgcaagccttctggaagctccttcacccaccatcctatcgcctggctgcgacaggcccctggacaagggcttgagtgggtgggaaggatcatccctatccttggtgtagccagcgacgcagagaagttccagggccgactcacgattaccgcggacaaatccacgaccactacctacatggagctgaacagcctgagatctgaggacacggccgtgtatttctgtgcgagagtgggggacatgtctacaaccgggactgatgcttttgatatctggggccaagggaccacggtcaccgtctcctca

SEQ ID NO: 7019 - DNA, 360 bp, synthetic construct
  source 1..360: mol_type = other DNA
caggtgcagctgcagcagtctgggggaggcttggtacgaccgggggggtcccggagactctcctgtgcagcctctggattcaccttcagtaactatgacatacactgggtccgccaaagtacaggagaaggtctggaatgggtctcaggtattggtacttctggtgacacatactatgcagagtccgtgaagggccgcttcaccatctccagagaagacgccatgacctccgtgtatcttcaaatgaacaggctgacagccggggacacggctgtgtattactgtgcaaggggagacgcatcaggcctcttctactacatggacgtctggggcaaagggaccacggtcaccgtctcctca

SEQ ID NO: 7020 - DNA, 348 bp, synthetic construct
  source 1..348: mol_type = other DNA
gaggtgcagctgttggagtcgggcccaggactggtgaagccttcggggaccctgtccctcacctgcgctgtctctggtgcttccctcagcggtattaattggtggagttgggtccgccagtccccagggaagggcctggagtggattggagaaatctttcatactgggagtgtccagtacaacccgtccctcaagggtcgagtcaccatttcaatcgacaagtcgaacagtcgtttctccctgaagctgagctctgtgaccgccgcggacacggccgtttattactgtgcgagagtggctggactttttgactactggggccagggatccctggtcaccgtctcctca

SEQ ID NO: 7021 - DNA, 354 bp, synthetic construct
  source 1..354: mol_type = other DNA
caggtgcagctggtgcagtctgggggaggcgtggtccagcctggggggtccctgagactctcctgtgcagcgtctggtttcagcatcaatacctatggcatacactgggtccgccaggctccaggcaagggactggagtgggtggcaattttgtggtttgatggagttaagaaatactatgcagagtccgtggagggccgcttcatcatttccagagacaatttcaagaacacgctgtatctacaaatgaacagcctgagagccgaggacacggctgtgtatttttgtgcgagagatggagagggtggggccgctgaaaactggggccagggagccctggtcaccgtctcctca

SEQ ID NO: 7022 - DNA, 372 bp, synthetic construct
  source 1..372: mol_type = other DNA
caggtgcagctggtgcagtctggggctgagatgaagaagcctgggtcctcggtgaaggtctcctgcaaggcttctggaggcatcctcaacacctatagtatttcctgggtgcgacaggcccctggacaagggcttgagtggatgggaaggttcatccctatcattcgaacagcaacctacgcacataagttccagggcagagtcacgattaccgcggacgagtccacgagcacagcctacatggagctgaacagcctgacatatgacgacacggccgtctactactgtgcgagggcggccgacccaggggtgggacctacaattggctacttcgacccctggggccagggaaccctggtcaccgtctcctca

SEQ ID NO: 7023 - DNA, 366 bp, synthetic construct
  source 1..366: mol_type = other DNA
caggtgcagctggtgcagtctggggctgaagtgaagaagcctgggtcctcggtgaaggtctcctgcaaggcttctggaggcaccttcagtaattatggtatcaattgggtgcgacaggtccctggacaggggcttgagtggatggggaggatcacccctatgttcgggatggcaaattatgtgcagaaatttcaggacagagtcacatttaccgcggacaaatccacgggcacagcctacttggaagtgagcagcctgacatctgaggacacggccgtttattactgtgcgagatcggaggtgatgaatgttggtcattactaccttgactcctggggccagggaaccctggtcaccgtctcctca

SEQ ID NO: 7024 - DNA, 363 bp, synthetic construct
  source 1..363: mol_type = other DNA
gaggtgcagctggtggagacgggcccaggactggtgaagccttcgcagaccctgtcactcacctgcagtgtctctggtggctccatcaagagcggtggttactattggagctggatccgccagcacccagggaagggcctggagtggattggctacatctatttcactgggagcaccgactacaacccgtccctcagaggtcgagttaccatttcagtggacacatttgagaaccagttttccttgaggctgacctctgtgactgccgcggacacggccacgtattactgtgcgagagttggtggtggtgggaccaacgactttgacttctggggccagggaaccctggtcaccgtctcctca

SEQ ID NO: 7025 - DNA, 396 bp, synthetic construct
  source 1..396: mol_type = other DNA
gaggtgcagctggtggagtctgggggagacttggtacagcctggggggtccctgagactctcctgtgcagcctccggattcaccttcaggacctacgacatgcactgggtccgccaaactgcagtaaaaggtctggagtgggtctccactattggtacttcaggtgatagatactattcagactccgtgaagggccgatttaccatctccagagaggatgccaaggactccttgtatcttgaaatgaacagcctaagaggcggggacacggctgtgtattactgtgcaagaggcaacgatattgcactagtaccacctgccatgagtgagcgcccccgaaactacttctactacttggacgtctggggcaaggggaccacggtcaccgtctcctca

SEQ ID NO: 7026 - DNA, 360 bp, synthetic construct
  source 1..360: mol_type = other DNA
gaggtgcagctgttggagtctgggggaggcgtggtccagcctgggaggtccctgagactctcctgtgcagtgtctggattcaccttcagtaactatgccatgcactgggtccgccaggctccaggcagggggttggagtgggtgccagttatctggtctgatggaactggtaaacactatgaagactcagtgaggggccggttcaccatctccagagacaatttcaagaacatgttgtatctccaaatgaacagcctgagagtcgaggacacggctgtctattactgtgcgagagattacggcagcaggactacctggttcgacccctggggccagggaaccctggtcaccgtctcctca

SEQ ID NO: 7027 - DNA, 354 bp, synthetic construct
  source 1..354: mol_type = other DNA
aggtgcacgctggtgcagtctggaggaggcttggtccagcctggggggtccctgagactctcctgcacagcctctgaagtcatcgtcagtcgcaattacatggcctggatccgccaggctccagggaggggactggagtggctctcagttatttatagcggtggtagcacattctacgcagactccgtgaggggccgattcaccatctccagacacaattccaagaacacactatatcttcaaatgaacagcctgagacctgaggacacggccgtgtattactgtgcgagagatgatgcccgatatgaagcttttgatatctggggccaagggacaacggtcaccgtctcctca

SEQ ID NO: 7028 - DNA, 369 bp, synthetic construct
  source 1..369: mol_type = other DNA
caggtccagcttgtgcagtctggggctgaagtgaagaagcctgggacctcggtgaaagtctcctgcaagtctgctggaggcaccatcagtagaagtgctatcacctgggtgcgacaggtccctggacaagggcttgagtggatgggaaggatcatccctatgcttggcgcagcaaactacgcacagaaggtccagggcagagtcacgattaccgcggacaaatccaccaacacagcctacatggagctgagcagcctgagatctgaggacacggccgtgtattactgtgcgacaaccaaccccgaactctcagtgggtggagatgtatttcatgtctggggccaaggggcattggtcaccgtctcttca

SEQ ID NO: 7029 - DNA, 375 bp, synthetic construct
  source 1..375: mol_type = other DNA
gaggtgcagctggtggagtctggagcagaggtgaaaaagcccggggagtcactgaagatctcctgtacgggttctggattcagctttaccgactactggatcggctgggtgcgccagatgcccggcaaaggcctggagtgggtggggatcatctttcctcacgactctgacaccagatacagcccgtccttccaaggccaggtcaccctctcagccgacaagtccatcaacaccgcctacctgcactggagcagcctgcgggcctcggacaccgccatgtattactgtgcgaaagggccccagcttaccgctcatcccctgcgggtcggtgcttttgatatctggggccaagggacaacggtcaccgtctcctca

SEQ ID NO: 7030 - DNA, 390 bp, synthetic construct
  source 1..390: mol_type = other DNA
aggtgcacgctgaagcagtctgggggaggcgtggtccagcctgggaggtccctgagactctcctgtgcagcctctggattcaccttcagtaatgatgatatatactgggtccgccagactccaggcaaggggctagagtgggtggcacttatttcatacgatggaagtaattcatactacgcagactccgtgaagggccggttcaccatctccagagacaattccaacaacacggtgtatctgcaaatgagcagcctgagaggtgaggacacggctgtatattactgtgcgagacatcaagagtccgtactcccagctgctgataggccctatcgttactactactacatggacgtctggggcagagggaccacggtcaccgtctcctca

SEQ ID NO: 7031 - DNA, 372 bp, synthetic construct
  source 1..372: mol_type = other DNA
caggtacagctgcagcagtctggggctgaggtgaagaagcctgggtcctcagtgaaggtctcctgcaaggcttctggaggcaccttcagcagctattctatcacctgggtgcgacaggcccctggacaagggcttgagtggatggggaagatcatccctatccttaatgtaatggactacgcacagaagttccagggcagagtcacgattaccgcggacaaatcgacgggcacagcctacatggacctgagcagcctgacatctgaggacacggccgtttattactgtgcgagagagtcgggttattctggttcgggcagtgttgtatacttccatctctggggccgcggcaccctggtcaccgtctcctca

SEQ ID NO: 7032 - DNA, 360 bp, synthetic construct
  source 1..360: mol_type = other DNA
caggtgcagctggtgcagtctggggctgaggtgaagaagcctgggtcctcggtgaaggtctcctgcaaggcttctggcgactccttcagtagttatactgtcaactgggtgcgacaggcccctggacaagggcttgagtggatggggaagatcatcgctttccttggagtgtcaaactacgcacagaagttccagggcagagtcacgattaccgcggacaaatccacgaacacagcctacttggtgctgagcagcctgagatctgaggacacggccgtttactactgtgcgaaagaaggtggtaccaccactgaatacctccaacactggggccagggcaccctggtcaccgtctcctca

SEQ ID NO: 7033 - DNA, 372 bp, synthetic construct
  source 1..372: mol_type = other DNA
caggtccagctggagcagtctggggctgaggtgaagaagcctgggtcctcggtgaaggtctcctgcaaggcttctggaggccccttcagcagttctccaatcagctggctgcggcaggcccctggacaggggcttgagtggatgggaaggatcatccctatccttggtgtggcagaatacgcacagaagtttcagggcagagtcaccattaccgcggacagatcctcgagcacagcctacatggagctgagcagcctgagatctgaggacacggccctgtattattgtgcgagagatgtgggttactctggttcggggagttgttactactttgacccctggggccagggaaccctggtcaccgtctcctca

SEQ ID NO: 7034 - DNA, 372 bp, synthetic construct
  source 1..372: mol_type = other DNA
caggtgcagctgttggagtctggggctgaggtgaagaagcctgggtcctcggtgaaggtctcctgcaaggcctctggaggcaccttcgacagctatactatcagctgggtgcgacaggcccctggacaagggcttgagtggatgggaagcatcattccttcccttggtataacagactccgaacagaagttccagggcagagtcacgattaccgcggacaaatccacgagcacagttcacatggagctgagcagcctgagatctgaggacacggccgtgtattactgtgcgagaggttcggggtattctggttcagggagtaacaactacttcgacccctggggccagggaaccctggtcaccgtctcctca

SEQ ID NO: 7035 - DNA, 369 bp, synthetic construct
  source 1..369: mol_type = other DNA
caggtgcagctgttggagtcgggcccaggactggtgaagccttcggagaccctgtccctcacctgcagtgtctctggtggctccatcagtagtaactactggagctggatccggcagcccccagggaagggactggagtggattgggtttgtctttgacagtgggagcaccaactacaacccctccctcaggagtcgaatcaccatatcaatagatacgtccaggaaccagttctccctgaagctgaggtctgtgaccgccgcagacacggccgtgtactactgtgcgagacatgggcccgatagcagcagcaggtaccatgatgcttttgatatctggggccaagggaccacggtcaccgtctcctca

SEQ ID NO: 7036 - DNA, 363 bp, synthetic construct
  source 1..363: mol_type = other DNA
caggtgcagctggtggagtctggggctgaggtgaagaagcctggggcctcagtgaagatttcctgcaaggcatctggatacactttcagcaactactatgtgcactgggtgcgacaggcccctggacacgggcttgagtggatgggaatgatcaaccctagtggtggtagcacaacctacgcacagaaattccagggcagagtcatcatgaccggggacacgtcgacgaaaacagtgtacatggaactgagcagcctgaggtctgaggacacggccgtttattcctgtgcgaggagccaagtagtaccagctactagtcaccttgactactggggccagggaaccctggtcaccgtctcctca

SEQ ID NO: 7037 - DNA, 375 bp, synthetic construct
  source 1..375: mol_type = other DNA
caggtccagctggtacagtctggggctgaggtgaaggagcctgggtcctcggtgaaggtctcctgcaaggcttctggaggcaccttcagcagctatagtatcacctgggtgcgacaggcccctggacaagggcttgagtggatgggaacgatcatccctatccttggtgtaccaaactacgcacagaagttccagggcagagtcaccattaccgcggacaaatccacgagcacagcctacatggaggtgaccagcctgacatctgaggacacggccatatattactgtgcgagagaatattgtagtggtgacagctgccgaaccgttaactggttcgacccctggggccagggaaccctggtcaccgtctcctca

SEQ ID NO: 7038 - DNA, 372 bp, synthetic construct
  source 1..372: mol_type = other DNA
caggtccagctggtggagtctggggctgaggtgaagaagcatgggtcctcggtgaaggtctcctgcaaggcttctgcaggcgccttcagcagctactctatcagctgggtgcgacaggcccctggacaagggcttgagtggatgggaagagtcatcgctttccttaatataccaaactacgcacagaaattccagggcagagtcaccattaccgcggacaaatccacgagtacagcctacatggagctgaccagcctcagatctgaggacacggccgtgtattattgtgcgagagattcggggtactctggttcagggagtaacaactacttcgacccctggggccagggtaacgcggtcacaatttcatcg

SEQ ID NO: 7039 - DNA, 384 bp, synthetic construct
  source 1..384: mol_type = other DNA
gaggtgcagctgttggagtcgggcccaggcctggtgaagccgtcggagaccctgtccctctcctgcactgtctctggtggctccaccagaaattactactggacctggatccggcagcccccagggaagggactggagtggattgggtatatcgattacagtggtagcaccaactacaacctctccctggagagtcgagtcaccatatcaatagacacggccaagaaccagttctccctgaggctgagctctgtgaccgctgcggacacggccgtatattactgtgcgagagtcgggagggctgatgcagtagtaccagctggtatagattattactactacatggatgtctggggcaaagggaccacggtcaccgtctcctca

SEQ ID NO: 7040 - DNA, 369 bp, synthetic construct
  source 1..369: mol_type = other DNA
gaggtgcagctgttggagtctgggggaggcgtggtccagccagggaggtccctgagactctcctgtgcagcgtctggattcaccttcgggagctatggcatgcactgggtccgccaggctccaggcaaggggctggattgggtggcatttataccgtatgatggaaggaatccacactatgccgactccgtgaagggccgattcaccgtctccagagacaactccaaaaacacgctgtatctgcagatgaacagcttgagagccgaggacacggctgtctactactgtgcgacagaggcgggatttgaccccaactacaactactacttggacgtctggggcaaagggaccacggtcaccgtctcctca

SEQ ID NO: 7041 - DNA, 348 bp, synthetic construct
  source 1..348: mol_type = other DNA
gaggtgcagctggtggagtcgggcccaggactggtgaagccttcggggaccctgtccctcacctgcgctgtctctggtggctccatcagcggtcctaattggtggagttgggtccgccagcccccagggaaggggctggagtggattggggaaatctttcatactgggaacaccaagtacaacccgtccctcaagagtcgagccaccatatcaatagacaagtccaagaaccagttctccctgaagctgagttctgtgaccgccgcggacacggccatttattactgtgcgagaataatgggagcccttgactactgggggcagggaaccctggtcaccgtctcctca

SEQ ID NO: 7042 - DNA, 372 bp, synthetic construct
  source 1..372: mol_type = other DNA
caggtgcagctggtgcagtctgggggaggcttggtacagcctggggggtccctgagactctcctgtgcagcctctggattcaccttcagtagctacgacatgcactgggtccgccaagatacaggaaaacgtctagaatgggtctcagttattggtacttatggtgacacatactatccagactccgtgaggggccgattcaccatctccagagaaaatggcaagaactccttgtttcttcaaatgaacagcctgagagccggggacacggctgtctatttctgtgcaagagggacgtcggtcacccgtgggtcctaccactactactacatggacgtctggggcaaagggaccacggtcaccgtctcctca

SEQ ID NO: 7043 - DNA, 348 bp, synthetic construct
  source 1..348: mol_type = other DNA
caggtgcagctgttggagtctgggggacgtgtggtacggccgggggggtccctgagactctcctgtgcagcctctggattcacctttgatgattttgccatgagttgggtccgccaagctccagggaagggactggagtgggtctctgggattaactggaatggtgctggcgcagggtatgcagactctgtgaagggccgattcaccatcttcagagacaacgccaagaacttcctgtatctggaaatgaacagtctgagagtcgaagacacggccctctatcactgtgtgagaagctacgataccggggacgtctggggcagcgggaccacggtcaccgtctcctca

SEQ ID NO: 7044 - DNA, 351 bp, synthetic construct
  source 1..351: mol_type = other DNA
gaggtgcagctgttggagtcgggcccaggactggtgaagccttcggagaccctgtccctcacctgcactgtctctggtggctccatcagcaggactacttactactggggctggatccgccagtcccccgggaagggactagaatggattgggaatatcttttatagtgggaccacctactacaacccgtccctcaagagtcgactcaccatatccctagacacgtccaagaaccagttctccctgaaactgacctctgtgaccgccgcagacacggctgtctattactgtacaagacagattggtatggcagactactggggccagggaaccctggtcaccgtctcctca

SEQ ID NO: 7045 - DNA, 375 bp, synthetic construct
  source 1..375: mol_type = other DNA
gaggtgcagctggtgcagtctggggctgaggtgaagaagcctggggcctcagtgaaggtttcctgcaaggcgtctggatacagcttcaccaactactatatacactgggtgcgacaggcccctggacaagggcttgagtggatgggaataatcaatgctggtagtggtggcacaagctaccctcagaagttccagggccgagtcaccatgaccagggacacgtccacgagcacagtcgacatggagctgagtagcctgagatctgaggacacggccgtgtattactgtgcgagagatccgggtgtggtggacccgctgaatccccaccccctgcctcgtttctggggccagggaaccctggtcaccgtctcctca

SEQ ID NO: 7046 - DNA, 366 bp, synthetic construct
  source 1..366: mol_type = other DNA
gaggtgcagctggtggagtctggggctgaggtgaagaagcctggggcctcggtgagggtttcctgcaaggcatctggacacaccttcagcacctactatattcactgggtgcgacaggcccctggacaagggcttgagtggatgggaataatccaccctagtggtggtagcacaacctacgcacagaagttccagggcagagtcaccatgaccagcgactcgtccacgagcacagtctacatggacttgagcagcctgagatctgaggacacggccgtgtattactgtgcgagagggggattagttccagatgcgcaagagccttttgatatctggggccaggggaccacggtcaccgtctcctca

SEQ ID NO: 7047 - DNA, 372 bp, synthetic construct
  source 1..372: mol_type = other DNA
caggtccagctggtgcagtctggggctgagctgaagaagcctgggtcctcggtgaaggtctcctgcaaggcttctggaggctccttcagcagttatactatcagctgggtgcgacaggcccctggacaaggccttgagtggatgggaaggatcatccctttccttggtgtagcagacctcgcacagaagttccagggccgagtcacgattaccgcggacaagtccacgaacacagcctccatggagttgagcagcctgagatctgaagacacggccgtgtattactgtgcgagaggctccggctatagcagcggaggtagtaataactacttcgactcctggggccagggaaccctggtcaccgtctcctca

SEQ ID NO: 7048 - DNA, 375 bp, synthetic construct
  source 1..375: mol_type = other DNA
gaggtgcagctggtgcagtctggagctgaggtgaagaagcctggggcctcagtgaaggtctcctgcaaggcttctggttacacctttaccagttttggtgtcaactgggtgcgacaggcccctggacaaggccttgagtggatgggatggatcagcactttcaatggtaatacaaactttgcacagaagttccagggcagagtcaccctgaccacagacacatccacgagcacagtctacatggagctgcggagcctgagatctgacgacacggccgtgtattattgtgcgcgagaggggcctttttattgtagtggtggtagttgctacttttttgactactggggccagggaaccctggtcaccgtctcctca

SEQ ID NO: 7049 - DNA, 372 bp, synthetic construct
  source 1..372: mol_type = other DNA
caggtgcagctggtgcagtctggggctgaggtgaagaagcctgggtcctcggtgaaggtctcctgcatggcttctggaggcaccttcagcagctatactgtcagctgggtgcgacaggcccctggacaagggcttgagtggatgggaaggatcatccctatccttggtatagcaaactacgcacagaacttccagggcagagtcacgattaccgcggacaaatccacggccacagtctacttggaggtgagcagcctgagatctgaggacacggccgtgtattactgtgcgagagaggcgggttattctggctcggggagttcttactactttgactactggagccagggaaccctggtcaccgtctcctca

SEQ ID NO: 7050 - DNA, 372 bp, synthetic construct
  source 1..372: mol_type = other DNA
caggtccagcttgtgcagtctggggctgaggtgaagaagcccgggtcctcggtgaaggtctcctgcaaggcctctggaggcaccttcagcagtaatactgtcagctgggtgcgacaggcccctggacaagggcttgagtggatgggaaggatcatccctatccttggtatagcagactacgcacagaagttccagggcagagtcacgattaccgcggacaaatccacggccacagtctacatggaggtgagcagcctgagatctgaggacacggccatgtactactgtgcgagagaggcgggttattctggctcggggagttcttactactttgactactggagccagggaaccctggtcactgtctcctca

SEQ ID NO: 7051 - DNA, 372 bp, synthetic construct
  source 1..372: mol_type = other DNA
caggtgcagctggtgcagtctggggctgaggtgaagaagcctgggtcctcggtgaaggtctcctgcaaggcttctggaggcaccttcagcagctatagtatctcctgggtgcgacaggcccctggacaggggcctgagtggttgggaaagatcatccctatccttggtgcaacagactacgcacagaagttccagggcagagtcaccattatcgcggacaaatccacgagcacggcctatatggagctgagcagcctgagatctgaggacacggccgtgtattattgtgcgagagagtcggggtactctggttcggggagtgttacgtacttccatctctggggccgtggcaccctggtcaccgtctcctca

SEQ ID NO: 7052 - DNA, 363 bp, synthetic construct
  source 1..363: mol_type = other DNA
gaggtgcagctgttggagtcggggggaggcgtgatccagcctgggaggtccctgagactctcctgtgcagcgtctggattcattttcagtgactatggcattcattgggtccgccaggctccaggcaaggggctggagtgggtggcagttatatggtatgatggaagtaatacatactatgcagactccgtgaagggccgattcaccatctccagagacaattccaagaacacggtgtatctgcaaatgaacagcctgagagccgaagacacggctgtgtattactgtgcgagactggctacggttccgtacttctactacatggacgtctggggcaaagggaccacggtcaccgtctcctca

SEQ ID NO: 7053 - DNA, 372 bp, synthetic construct
  source 1..372: mol_type = other DNA
gaggtgcagctggtggagtctggggctgaggtgaagaagcctgggtcctcgctgaaggtctcctgcaaggcttctggaggcaccttcagcagctatactatcacctgggtgcgacaggcccctggacaagggcttgagtggatgggcaggatcatccctattcttggtataccaaactacgcacagacgttcgagggcagagtcaccattaccgcggacaaatccacgagcatggcgtacatggaactaaacagcttgagatctgaggacacggccgtgtattactgtgcgacagaagttggatatagtggctacggcccaagtccctactttgactcttggggccagggaaccctggtcaccgtctcctca

SEQ ID NO: 7054 - DNA, 357 bp, synthetic construct
  source 1..357: mol_type = other DNA
gaggtgcagctggtgcagtctggagcagaggtgaaaaagcccggggagtctctgaagatctcctgtaagggttctggatacagttttatcagccattggatcgcctgggtgcgccagatgcccgggaaaggcctggagtggacggggatcatctatcctggtgactctgatatcagatatagcccgtccttccaaggccaggtcaccttctcggccgacaagtccatcagcaccgcctacctgcagtggagcagcctgaaggcctcggacaccgccatgtatttctgtgcgaggcaaagcagcagctggcacgacgttgactactggggccagggaaccctggtcaccgtctcctca

SEQ ID NO: 7055 - DNA, 366 bp, synthetic construct
  source 1..366: mol_type = other DNA
gaggtgcagctggtggagactggaggagacttgatccagcctggggggtccctgagactctcctgtgcagcctctgggttcaacgtcagtagaaactacatgaactgggtccgccaggctccagggaaggggctggagtgggtctcagttatctatagcggtggtagtacattctacgcagactccatacagggccgattcaccatctccagagacaattccaagaacacgctgtatcttcaaatgaacagcctgagagccgaggacacggccgtgtattactgtgcgagatttcacgatattttcactggttactccgatgcttttgatatctggggccaagggaccccggtcaccgtctcctca

(The sequence listing continues in the following parts.)

1. An isolated antibody, or antigen-binding fragment thereof, that binds to the spike protein of a coronavirus (CoV-S), wherein said antibody, or antigen-binding fragment thereof, comprises a heavy chain variable region (VH) and a light chain variable region (VL),
wherein the VH comprises an amino acid sequence having at least 90%, 91%, 92%, 93%, 94%, 95%, 96%, 97%, 98%, or 99% sequence identity to, comprises, or consists of an amino acid sequence selected from the group consisting of any one of the VH sequences in Tables 3 and 5, and
wherein the VL comprises an amino acid sequence having at least 90%, 91%, 92%, 93%, 94%, 95%, 96%, 97%, 98%, or 99% sequence identity to, comprises, or consists of an amino acid sequence selected from the group consisting of any one of the VL sequences in Tables 4 and 6.

2. The isolated antibody, or antigen-binding fragment thereof, of claim 1, wherein the VH comprises a VH CDR1 amino acid sequence selected from the group consisting of any VH CDR1 sequence in Tables 3 and 5, a VH CDR2 amino acid sequence selected from the group consisting of any VH CDR2 sequence in Tables 3 and 5, and a VH CDR3 amino acid sequence selected from the group consisting of any VH CDR3 sequence in Tables 3 and 5, and
wherein the VL comprises a VL CDR1 amino acid sequence selected from the group consisting of any VL CDR1 sequence in Tables 4 and 6, a VL CDR2 amino acid sequence selected from the group consisting of any VL CDR2 sequence in Tables 4 and 6, and a VL CDR3 amino acid sequence selected from the group consisting of any VL CDR3 sequence in Tables 4 and 6.

3. An isolated antibody, or antigen-binding fragment thereof, that binds to the spike protein of a coronavirus (CoV-S), wherein said antibody, or antigen-binding fragment thereof, comprises a heavy chain variable region (VH) and a light chain variable region (VL),
wherein the VH comprises a VH CDR1 amino acid sequence selected from the group consisting of any VH CDR1 sequence in Tables 3 and 5, a VH CDR2 amino acid sequence selected from the group consisting of any VH CDR2 sequence in Tables 3 and 5, and a VH CDR3 amino acid sequence selected from the group consisting of any VH CDR3 sequence in Tables 3 and 5, and
wherein the VL comprises a VL CDR1 amino acid sequence selected from the group consisting of any VL CDR1 sequence in Tables 4 and 6, a VL CDR2 amino acid sequence selected from the group consisting of any VL CDR2 sequence in Tables 4 and 6, and a VL CDR3 amino acid sequence selected from the group consisting of any VL CDR3 sequence in Tables 4 and 6.

4. The isolated antibody, or antigen-binding fragment thereof, of claim 3,
wherein the VH comprises an amino acid sequence having at least 90%, 91%, 92%, 93%, 94%, 95%, 96%, 97%, 98%, or 99% sequence identity to, comprises, or consists of an amino acid sequence selected from the group consisting of any one of the VH sequences in Tables 3 and 5, and
wherein the VL comprises an amino acid sequence having at least 90%, 91%, 92%, 93%, 94%, 95%, 96%, 97%, 98%, or 99% sequence identity to, comprises, or consists of an amino acid sequence selected from the group consisting of any one of the VL sequences in Tables 4 and 6.

5. The isolated antibody, or antigen-binding fragment thereof, of claim 1,
(a) wherein the CoV-S is the spike protein of SARS-COV (“SARS-COV-S”) and/or the spike protein of SARS-COV-2 (“SARS-COV-2-S”);
(b) wherein SARS-COV-S comprises a sequence having at least 95% identity to the amino acid sequence of SEQ ID NO:1, and wherein SARS-COV-2-S comprises a sequence having at least 95% identity to the amino acid sequence of SEQ ID NO:5; and/or
(c) wherein the SARS-COV-2-S is a B.1.1.7 variant, a B.1.351 variant, a B.1.1.28 variant, a B.1.429 variant, a P.1 variant, a B.1.617 variant, a B.1.617.2 variant, a C.37 variant, a 1.621 variant, a AY.1 variant, a 1.623 variant, a C.36 variant, a A.27 variant, a AV.1 variant, a B.1.1.482 variant, a B.1.1.523 variant, a B.1.427 variant, a AY.4 variant, a AY.11 variant, a D614G variant, a B.1.1.529/BA.1 variant, a BA1.1 variant, a BA.2 variant, a BA.2.75 variant, a BA.4 variant, a BA.5 variant, a BA.4.6 variant, a BQ.1 variant, a BQ.1.1 variant, a XBB variant, a XBB.1 variant, a XBB.1.5 variant, a BJ.1 variant, a BM.1.1.1 variant, a BA.2.3.20 variant, a BF.7 variant, a XBC variant, a BN.1 variant, or a CH.1.1 variant.

6. The isolated antibody, or antigen-binding fragment thereof, of claim 1, wherein the VH comprises the VH amino acid sequence of ADI-75865, VYD225, ADI-80707, ADI-75696, ADI-75864, ADI-75620, ADI-75738, ADI-75700, ADI-75859, ADI-75684, ADI-75754, ADI-75648, ADI-75632, ADI-75741, ADI-75725, ADI-75717, ADI-75706, ADI-75699, ADI-75747, or ADI-75773; and
wherein the VL comprises the VL amino acid sequence of ADI-75865, VYD225, ADI-80707, ADI-75696, ADI-75864, ADI-75620, ADI-75738, ADI-75700, ADI-75859, ADI-75684, ADI-75754, ADI-75648, ADI-75632, ADI-75741, ADI-75725, ADI-75717, ADI-75706, ADI-75699, ADI-75747, or ADI-75773.

7. The isolated antibody, or antigen-binding fragment thereof, of claim 1, comprising the VH CDR1, VH CDR2, VH CDR3, VL CDR1, VL CDR2, and VL CDR3 amino acid sequences of ADI-75865, VYD225, ADI-80707, ADI-75696, ADI-75864, ADI-75620, ADI-75738, ADI-75700, ADI-75859, ADI-75684, ADI-75754, ADI-75648, ADI-75632, ADI-75741, ADI-75725, ADI-75717, ADI-75706, ADI-75699, ADI-75747, or ADI-75773.

8. (canceled)

9. (canceled)

10. The isolated antibody, or antigen-binding fragment thereof, of claim 1,
(a) wherein the isolated antibody, or antigen-binding fragment thereof, cross-reacts with SARS-COV-S and SARS-COV-2-S;
(b) wherein the antibody, or antigen-binding fragment thereof, binds to the receptor binding domain (RBD) or the N-terminal domain (NTD) of SARS-COV-S and/or of SARS-COV-2-S;
(c) wherein the antibody, or antigen-binding fragment thereof, binds to the receptor binding domain (RBD) of CoV-S from the B.1.1.529/BA.1 variant, the BA.1.1 variant, the BA.2.75 variant, the BQ.1.1 variant, and/or the XBB variant;
(d) wherein the antibody, or antigen-binding fragment thereof, binds to the S1 subunit and/or the S2 subunit of SARS-COV-S and/or of SARS-COV-2-S;
(e) wherein the antibody, or antigen-binding fragment thereof, binds to the ACE2-binding motif of SARS-COV-S and/or of SARS-COV-2-S;
(f) wherein the antibody, or antigen-binding fragment thereof, competes for binding with ACE2;
(g) wherein the antibody, or antigen-binding fragment thereof, binds to the S protein of SARS-COV and/or of SARS-COV-2; and does not bind to any of the S proteins of HCoV-229E, HCoV-HKU1, HCoV-NL63, and HCoV-OC43;
(h) wherein the antibody, or antigen-binding fragment thereof, binds to the S protein of SARS-COV and/or of SARS-COV-2; and binds to the S protein of at least one of HCoV-229E, HCoV-HKU1, HCoV-NL63, and HCoV-OC43;
(i) wherein the antibody, or antigen-binding fragment thereof, binds to CoV-S with a K_{D} value of:
(i) about 100 nM or lower;
(ii) about 10 nM or lower;
(iii) about 1 nM or lower;
(iv) about 100 pM or lower;
(v) about 10 pM or lower;
(vi) about 1 pM or lower; or
(vii) about 0.1 pM or lower;
(j) wherein the antibody, or antigen-binding fragment thereof, binds to the receptor binding domain (RBD) of CoV-S from the B.1.1.529/BA.1 variant, the BA.1.1 variant, the BA.2.75 variant, the BQ.1.1 variant, the XBB variant, the B.1351 variant, or the B.1.617.2 variant with a K_{D} value of about 100 nM or lower, or about 10 nM or lower, or about 1 nM or lower;
(k) wherein the antibody, or antigen-binding fragment thereof, neutralizes SARS-COV and/or SARS-COV-2;
(l) wherein the antibody, or antigen-binding fragment thereof, neutralizes SARS-COV and/or SARS-COV-2 at: (i) an IC50 of about 100 nM or lower, of about 50 nM or lower, of about 20 nM or lower, of about 10 nM or lower, of about 5 nM or lower, of about 2 nM or lower, of about 1 nM or lower, of about 500 pM or lower, of about 200 pM or lower, of about 100 pM or lower, of about 50 pM or lower, of about 20 pM or lower, of about 10 pM or lower, of about 5 pM or lower, of about 2 pM or lower, or of about 1 pM or lower; and/or (ii) an IC50 of about 1 μg/mL or lower, of about 500 ng/mL or lower, of about 200 ng/mL or lower, of about 100 ng/ml or lower, of about 50 ng/ml or lower, of about 40 ng/ml or lower, of about 30 ng/ml or lower, of about 20 ng/ml or lower, of about 10 mg/mL or lower, of about 5 ng/mL or lower, of about 2 ng/ml or lower, or of about 1 ng/ml or lower, in vitro;
(m) wherein the antibody, or antigen-binding fragment thereof, neutralizes the B.1.1.529/BA.1 variant of SARS-COV-2 with an IC50 of about 100 ng/ml or lower, of about 50 ng/ml or lower, of about 40 ng/ml or lower, of about 30 ng/ml or lower, of about 20 ng/ml or lower, of about 10 mg/mL or lower, of about 5 ng/ml or lower, of about 2 ng/ml or lower, or of about 1 ng/ml or lower, in vitro;
(n) wherein the antibody, or antigen-binding fragment thereof, neutralizes the BA.2.75 variant, the BF.7 variant, the BQ.1.1 variant, the XBB.1 variant, and/or the XBB.1.5 variant of SARS-COV-2 with an IC50 of about 200 ng/ml or lower, of about 100 ng/ml or lower, of about 50 ng/ml or lower, of about 40 ng/ml or lower, of about 30 ng/ml or lower, of about 20 ng/ml or lower, of about 10 mg/mL or lower, of about 5 ng/ml or lower, of about 2 ng/mL or lower, or of about 1 ng/mL or lower, in vitro;
(o) wherein the antibody, or antigen-binding fragment thereof, is a human, humanized, primatized, chimeric, bispecific, or multispecific antibody, or antigen-binding fragment thereof;
(p) wherein the antibody, or antigen-binding fragment thereof, comprises a Fab, Fab2, or scFv; and/or
(q) wherein the antibody, or antigen-binding fragment thereof, comprises a constant region, an Fc region, or at least one domain thereof;
wherein the constant region or Fc region comprises a mutation which impairs at least one effector function, FcR binding, complement binding, glycosylation, complement-dependent cytotoxicity (“CDC”), or antibody-dependent cellular cytotoxicity (“ADCC”); or
wherein the constant or Fc region is a human constant or Fc region selected from a human IgG1, IgG2, IgG3 or IgG4 constant or Fc region.

11-32. (canceled)

33. An isolated antibody, or antigen-binding fragment thereof, which competes for binding with, or binds the same epitope as the isolated antibody, or antigen-binding fragment thereof, of claim 1.

34. (canceled)

35. An affinity matured variant of any one of the isolated antibody, or antigen-binding fragment thereof, of claim 1.

36. A chimeric antigen receptor (“CAR”) comprising at least one antibody, or antigen-binding fragment thereof, according to claim 1.

37. An antibody drug conjugate (“ADC”) comprising: (a) at least one antibody, or antigen-binding fragment thereof, according to claim 1; and (b) a drug.

38. (canceled)

39. (canceled)

40. A pharmaceutical composition comprising at least one antibody, or antigen-binding fragment thereof, of claim 1; and a pharmaceutically acceptable carrier or excipient.

41. A method of treating and/or preventing infection by SARS-CoV, SARS-COV-2, and/or another coronavirus optionally selected from the group consisting of MERS-COV, HCoV-HKU1, HCoV-OC43, HCOV-229E, and HCoV-NL63, or treating a condition, symptom, disease, or disorder associated with the infection in a subject in need thereof, comprising administering to the subject a therapeutically effective amount of the antibody, or antigen-binding fragment thereof, of claim 1.

42. (canceled)

43. (canceled)

44. A method of inducing an immune response against and/or inhibiting or blocking infection of susceptible cells by SARS-COV, SARS-COV-2, and/or another coronavirus optionally selected from the group consisting of MERS-COV, HCoV-HKU1, HCoV-OC43, HCoV-229E, and HCoV-NL63 in a subject in need thereof, comprising administering at least one antibody, or antigen-binding fragment thereof, according to claim 1.

45. (canceled)

46. (canceled)

47. A method of preventing the need for a subject infected with SARS-COV, SARS-COV-2, and/or another coronavirus optionally selected from the group consisting of MERS-COV, HCoV-HKU1, HCoV-OC43, HCOV-229E, and HCoV-NL63 to be placed on a ventilator, or reducing the time that a subject infected with SARS-COV or SARS-CoV-2 or another coronavirus optionally selected from the group consisting of MERS-COV, HCoV-HKU1, HCoV-OC43, HCOV-229E, and HCoV-NL63 is on a ventilator, comprising administering to the subject a prophylactically or therapeutically effective amount of an antibody, or antigen-binding fragment thereof, according to claim 1.

48. A method of preventing the onset of pneumonia in a subject infected SARS-COV, SARS-COV-2, and/or another coronavirus optionally selected from the group consisting of MERS-COV, HCoV-HKU1, HCoV-OC43, HCOV-229E, and HCoV-NL63, or treating pneumonia and/or the symptoms of pneumonia in a subject for a subject infected SARS-COV or SARS-COV-2 or another coronavirus optionally selected from the group consisting of MERS-COV, HCOV-HKU1, HCoV-OC43, HCOV-229E, and HCoV-NL63, comprising administering to the subject a prophylactically or therapeutically effective amount of an antibody, or antigen-binding fragment thereof, according to claim 1.

49-56. (canceled)

57. A method of producing the antibody, or antigen-binding portion thereof, of claim 1, the method comprising expressing the antibody, or antigen-binding portion thereof, in a recombinant cell, and isolating the antibody, or antigen-binding portion thereof, from the cell.

58-60. (canceled)

61. A composition comprising two or more isolated antibodies, or antigen-binding fragments thereof, selected from the group consisting of VYD225, VYD223 and VYD224.

62. (canceled)

63. An isolated nucleic acid molecule or an isolated mRNA molecule encoding the antibody, or antigen-binding fragment thereof, of claim 1.

64. (canceled)

65. (canceled)

66. A kit comprising the antibody, or antigen-binding fragment thereof, of claim 1, and instructions for use.

67. A vial comprising the antibody, or antigen-binding fragment thereof, of claim 1.

68. (canceled)

69. (canceled)
